United States Patent Application Publication US 2004/0214272 A1 - sequence listing, part 55

SEQ ID NO: 295872 - protein, 104 aa, Zea mays
  Clone ID: MRT4577_32913C.1.pep
SAAVSQPVLQVRVSAQVPVPILPRHGRQSMFSRNGPISRVTTEVMTVLVGHVHGYLGQCPRPHIKVSRVQPAMLTSQLTLLIRCSQSSLLSQQAWLVVSYHFKS

SEQ ID NO: 295873 - protein, 115 aa, Zea mays
  Clone ID: MRT4577_32914C.1.pep
MAATSSKSSSSSSSAQRAAAALLVAAAVAVSVLVVGAAAVCDMSNEQFMSCQPAAAKTTDPPAAPSQACCDALAGADLKCLCGYKNSPWMGVYNIDPKRAMELPAKCGLATPPDC

SEQ ID NO: 295874 - protein, 164 aa, Zea mays
  unsure (1)..(164): unsure at all Xaa locations
  Clone ID: MRT4577_32915C.1.pep
MPETAVSSRSQSKEEXKREIQSSPHSKVVGAPAEEEHQAQMPKNPSSTGLTPKQDGAWHDXRRLYXSNTXTNFREVAIKDXWDMCYQEGYSXVISTTEYNXENTRSLXNLNKVXGFLNQMDLSRKNSFVKMLMICFEPTFKLKGLRVXRRQDAPKFAMDEEYDM

SEQ ID NO: 295875 - protein, 114 aa, Zea mays
  Clone ID: MRT4577_32916C.1.pep
MAAATSSSSSKSSSSSAQRAAAAALLVAVSVLVVGAAAVCDMSNEQFMSCQPAAAKTTDPPAAPSQACCDALAGADLKCLCGYKNSPWMGVYNIDPKRAMELPAKCGLATPPDC

SEQ ID NO: 295876 - protein, 112 aa, Zea mays
  Clone ID: MRT4577_32917C.1.pep
MAATSSKSSSSSSSAQRAAAAALLVAVSVLVVGAAAVCDMSNEQFMSCQPAAAKTTDPPAAPSQACCDALAAADLMCLCGYNNSPWMGAYHIDPKSAMQLPARCDLDTTPDC

SEQ ID NO: 295877 - protein, 51 aa, Zea mays
  Clone ID: MRT4577_32918C.1.pep
TRKTRVHLICSLFQKDTSQYTRNFIPPKNWAVTTTENKEPNHANAWADEWA

SEQ ID NO: 295878 - protein, 1059 aa, Zea mays
  Clone ID: MRT4577_32919C.1.pep
MSSPIKDQDLVPEHMDKSVAQEKSSSEGYETPSDPFPTTSIDRAALRELQRDPTYDPREAEEVMSEFRAILEEAVARNEDVPEPTQDAPEQTKTTTETSRKRKQSDRKRGDRGLNKFPDKTYKISDVSPKGQPLAPEEALPKFRNALGFLVRDNLDITIRQWRDVSDDVKNQIWNKLLMRFVLPRGSEELVKEYTMKQLAINFRNWRSEMNTKFAKKGLDPTKKYKISAGQWAVFLEQRSSPDFISLSEANSELSKKNKYRHHLGTGGYKRQVPKWRQEDAEKKAAGLPTLSEQLGERAANWLRARKPRETETGVSFDDPIVEEAAKNIYTMAAKQSEGTFKPQRERDILTAGLGNPEHPGRVRGISSKEGWKEGFGQQWEGLYRKRDRYKEEMADYFKLEAKKEFKAMMSQMLSNPPPELMQQLASAMSVQQMTTPQIQIIPAAQPPASTDCTTLPSSVASTGNKDRYPVDDITRPVACALVIRYGINNKRTKKVATGLAIPGRKFHGNDIPDDYCKVEVTTVVQGSEDDMLDIPGPEGIEKLGQAIKNFILWPRRDVDLLDWSNSPQASQAQPSPPSQIFAPIVHPSSSPPQTSHAAPHPFSDPPSPPQASPFRAPPPSPPHPLGDPLSTPPSRDPPSPQPSNDPRPSKKSKLPIPKLVSPYQKKKSKATTAGTVRFLKGIGRSLTSQTVDLAEHEESAKKAEAMAAKIKKPTKADYKNVPKKYVPGRPLLPLEKLRKVPAGVKRLHDWYMRASSVGIDTISVHIPDHAFIGSNQKAVVTFEDMWLMMNLQRLDVQLVTMFALMQHDQQEILYGTKPNASASKRVGYLNPILISEESHTFRIGKDNDEIRGKTDEEVEKRIKEMKKDFEARYATYIGHAMLQFQDREAIMAPYNFKDHWICFLIYPKVGKVLVLDSLNFDPSTYATFLSILELAYRFYKMKGGKYDLSKKLVPLDIHHHWPCHKQPQGSVLCGFYACEFMRVNGRYITNPDKQFQRGNPENLTEAALYGIVEDLCTFILKEVIPAEGKYHDASGTLALPEFRILTEISRLSLSRDSY

SEQ ID NO: 295879 - protein, 84 aa, Zea mays
  Clone ID: MRT4577_3291C.1.pep
RSLNRRAPRPAAARSGPNLGRSSCATSGASGQYAALVIIMCNAASSDHIVPRRTTAVPGSHLFGCAAYGSSVASALRGSSKFRP

SEQ ID NO: 295880 - protein, 112 aa, Zea mays
  Clone ID: MRT4577_32920C.1.pep
MAATSSKSSSSSSSAQRAAAAALLVAVSVLVVGAAAVCDMSNEQFMSCQPAAAKTTDPPAAPSQACCDALAGADLKCLCGYKNSPWMGVYNIDPKRAMELPAKCGLATPPDC

SEQ ID NO: 295881 - protein, 119 aa, Zea mays
  Clone ID: MRT4577_32921C.1.pep
MAAATTTSSSKKSSSPSSSSSAQRAAAAALLVAVSVLVVGAAAVCDMSNEQFMSCQPAAAKTTDPPAAPSQACCDALAGADLKCLCGYKNSPWMGVYNIDPKRAMELPAKCGLATPPDC

SEQ ID NO: 295882 - protein, 54 aa, Zea mays
  unsure (1)..(54): unsure at all Xaa locations
  Clone ID: MRT4577_32922C.1.pep
XXRERERWAXTLGPRVSFWXLNYVYTMTISLSPLGYICKNFTLLYPKKKKKKRP

SEQ ID NO: 295883 - protein, 115 aa, Zea mays; identical to SEQ ID NO: 295873
  Clone ID: MRT4577_32923C.1.pep

SEQ ID NO: 295884 - protein, 63 aa, Zea mays
  Clone ID: MRT4577_32924C.1.pep
PRIPSAEEISARFGKILSLLSTHILWVNPAAALLSRKSPPVRPPLSNLVSAGKLIRSQLASAQ

SEQ ID NO: 295885 - protein, 198 aa, Zea mays
  unsure (1)..(198): unsure at all Xaa locations
  Clone ID: MRT4577_32925C.1.pep
ETLSLREARSQKRKATSPTPQVEELDQEIRDLEAIHHQVQRKRDKMFRLVELQRKIDEAAEEMRHIAQDDQGRGPQHRELRQETPIDIDRWYDDLXHGNFAFDYASPLAAELQTTPWPPSYKPPQNPMYDGHSDPKQFLMSYEATISSYGGNTTVMAKSFVMAVRSVTQTWYSSFRPGTXTSWXKLKDMLVTSFQGFK

SEQ ID NO: 295886 - protein, 139 aa, Zea mays
  unsure (1)..(139): unsure at all Xaa locations
  Clone ID: MRT4577_32926C.1.pep
PGPGPPTHTSRTCDYYPHGYPRSPIRPSPLLSYCHEHTRIWQXGISYLTALALNCAVTVAIPAQIYRHDGLASLAELITGLPLPSAKLPLLRRLLQLLNASDVFTDDRQSTDKERXRISPGSYLLVERIPHEDHMNHTS

SEQ ID NO: 295887 - protein, 76 aa, Zea mays
  Clone ID: MRT4577_32927C.1.pep
HVYACATPVDVPVNHSLSSPDCTLQAPLGYRTCQEGEGALQQDQSQELLAPAPAPDTGCWCRQKTYPGRAAVGPIE

SEQ ID NO: 295888 - protein, 50 aa, Zea mays
  Clone ID: MRT4577_32928C.1.pep
QNIHKQLVEFFQSLQTLSGVSFFASVVFCSFPELVAVLLFFLPTRQTTRP

SEQ ID NO: 295889 - protein, 503 aa, Zea mays
  Clone ID: MRT4577_32929C.1.pep
MGPDGGGVIGAVVYGALAVLAVRLVLSYKSAAHALRRAWRWADERAQAYQHYEVPRLAADGAENPLFRKAAAYVASLPSLEDADAACVLSSAAKSNGFALRLGPGHAARDAFLGARLAWTSAGADRLVLRVRRHDRTRVLRPYLQHLESVADEMEARRRELRLYASASASGAGPSPAPRWTSAPFTHPATLDTVVMDPELKARVRADLESFLKGRGYYHRLGRVWRRSYLLYGAPGTGKSTFAAAMARFLGYDVYDIDLSRAGVGDDLRALLLDTTPRSLILVEDLDRYLRDGETAAASVLGFMDGVSSCCGEERVMVFTMSGGKDGVDPAVLRPGRLDVHIHFTMCDFEAFKALASSYLGLKDHKLYPQVEEGFQAGARLSTAELGEIMLANRGSPSRALRAVIGALQHVAPSPQPQRTLAAARPPRLTSRWSGHFDEASAATSEASGGAGGFAKDAPIREIKKLYGLIKYRSRKDAGVVPVDDSAASQNGRGSDVSYEKDR

SEQ ID NO: 295890 - protein, 64 aa, Zea mays
  Clone ID: MRT4577_3292C.1.pep
GTQRLHLACRNHPHAHHHGGLLSERRPISLVDDAKSIFCYSYSSPSFYRGYSFPAMHALLYLSL

SEQ ID NO: 295891 - protein, 422 aa, Zea mays
  Clone ID: MRT4577_32930C.1.pep
AACVLSSAAKSNGFALRLGPGHAARDAFLGARLAWTSAGADRLVLRVRRHDRTRVLRPYLQHLESVADEMEARRRELRLYASTSASGAGPSPAPRWTSAPFTHPATLDTVVMDPELKARVRADLESFLKGRGYYHRLGRVWRRSYLLYGAPGTGKSTFAAAMARFLGYDVYDMDLSRAGVGDDLRALLLDTTPRSLILVEDLDRYLRGGGDGETAAARTARVLGFMDGVSSCCGEERVMVFTMSGGKDGVDPAVLRPGRLDVHIHFTMCDFEAFKALASSYLGLKDHKLYPQVEEGFQAGARLSPAELGEIMLANRGSPSRALRTVISALQHVAPSAPPAAQPQRTLAAARPPRLTSRWSGHFDEASGSAGGFAKDAPIREIKKLYGLIKYRSRKDAGVVPVDDSAASQNGRGSDVSYEKDR

SEQ ID NO: 295892 - protein, 425 aa, Zea mays
  Clone ID: MRT4577_32932C.1.pep
MMGQDGVGGGVIGALLYAALAVLALRLVLSYKSAAHAVRRAWRWADEWAQAYQYYEVPRLAVDGAENPLFRKAAAYVASLPSLEDADAACVLSSAAKSNDFALQLGPGHTARDAFLGARLAWTNAGGDGRLVLRVRRHDRTRVLRPYLQHLESVADEMEARRRELRVHANAGGGAPRWASAPFTHPATLDTVAMDPDLKARVRADLESFLKGRAYYHRLGRVWRRSYLLYGAPGTGKSTFAAAMARFLGYDVYDVDLSRGGCDDLRALLLDTAPRSLILVEDLDRYLRGGDGETAAARTARVLGFMDGLSSSCGEERVMVFTMSGGKDGVDPAVLRPGRLDVHIHFTMCDFEGFKALASNYLGLKDHKLYPQVEEGFHAGARLSPAELGEIMLANRGSASRALRTVISALQHVAPSPPPQRTVTA

SEQ ID NO: 295893 - protein, 84 aa, Zea mays
  Clone ID: MRT4577_32933C.1.pep
RLTSRWSGHLDEASVATATSEASAAGQSPRGGGGFAKDAPIREIKKLYGLIKYRSRKDAGVVPVDDSAASPDGRDSDVSPEKDR

SEQ ID NO: 295894 - protein, 104 aa, Zea mays
  Clone ID: MRT4577_32934C.1.pep
IKRTVRVHAGRQAGLLLVLKKLLHRSVRATQTGTLIGPVTPSPCRTLCNSMYRATAPGFISQSQQMSIPWIVGARFSFSTTYALLRVLTWPVVAPPSCVFYQRQ

SEQ ID NO: 295895 - protein, 77 aa, Zea mays
  Clone ID: MRT4577_32935C.1.pep
LPKTFPSTSLPQTRSPLKRGPVRELHQRIPILKSALQEPKPELNRVRKGNPPVCFFFPRPSVWPKKAVNFFGSEPSC

SEQ ID NO: 295896 - protein, 73 aa, Zea mays
  Clone ID: MRT4577_32936C.1.pep
SSYRSASRSASYSFVSVRLTSRFSCSPTGGRVPNSSSIVHGSCCITLMSSWAHNWGNCAHTGSLIVSQQDHRY

SEQ ID NO: 295897 - protein, 116 aa, Zea mays
  Clone ID: MRT4577_32937C.1.pep
SLGQDKTHLLMFIPRMLCATQNTGTKKVYTQGSFFKHTWKKTRFFEGWSWVSEEESAIIVSPHLPGGFHHQVFPLSTLVQVGTAPFFRPQNHGHPAGGPKNGGNKFPPGGGFPCLF

SEQ ID NO: 295898 - protein, 93 aa, Zea mays
  Clone ID: MRT4577_32938C.1.pep
IRLEGRHNVSCIVLKAPLRQVCKGDPMGITNALDRYQQLGHLVCDTHEDKLVPLLAESKNDGGAAKFIYAMKEGYCVTRLDPCHISQLLRAGS

SEQ ID NO: 295899 - protein, 62 aa, Zea mays
  Clone ID: MRT4577_32939C.1.pep
VPLTCTFLREKYNDTFIKGSETVNPIYASKLPSGTDLSSLHSSNQKADTHINHIFHKTCQRV

SEQ ID NO: 295900 - protein, 141 aa, Zea mays
  unsure (1)..(141): unsure at all Xaa locations
  Clone ID: MRT4577_3293C.1.pep
MKKNGFXYLTAPKLVNXCRSFAXNHYTYLASNPFSPXDKVDYSDLLDPVPCHLXEGKNGETTGSXIIDTTNPLAHEPGTILGHFTIDIVGNVFHGSNFIQSAIKAIVMWLSLGPAYLYYSQHPLIYHKLTCKDSHQTLTAK

SEQ ID NO: 295901 - protein, 56 aa, Zea mays
  Clone ID: MRT4577_32940C.1.pep
IKVVCCCKKKKKKKKKKKKKKKKKKKKKKKKKKKKKKKKRGKKKKKKKISLGPKQP

SEQ ID NO: 295902 - protein, 107 aa, Zea mays
  Clone ID: MRT4577_32941C.1.pep
ICADPTDWGAARASGTSPRVLTLTAAALCILLGWRSVHPNLSRFMSDFFCCSCRRTDGNLGGEKFSLFNGLSYIDMDVCRGLNCTVHITHDTVTVILVREIRIDACF

SEQ ID NO: 295903 - protein, 117 aa, Zea mays
  unsure (1)..(117): unsure at all Xaa locations
  Clone ID: MRT4577_32942C.1.pep
MDPDGDPAFHRNEAISAVQDVDQYYGDDDDFDDLYNDVNVGDGFLHASHQAPSPLSSSPSTQQAPPSQKHQLPPASQQLPPPQQHPPAHXLPPPPSEAPPAQQQVSIPGVAGPAPGR

SEQ ID NO: 295904 - protein, 109 aa, Zea mays
  unsure (1)..(109): unsure at all Xaa locations
  Clone ID: MRT4577_32943C.1.pep
MTAGYIVGSLVGSFAIAYLCDTSPPDPYGMSPLVSSSIDLCLISVLQPCRFGXIWISLCGHIGSTPKTVSEKEWWQATDTKFQAWPRTAGPPVVMNPISRQNFIVKSTE

SEQ ID NO: 295905 - protein, 84 aa, Zea mays
  unsure (1)..(84): unsure at all Xaa locations
  Clone ID: MRT4577_32944C.1.pep
MTAGYIVGSLVGSFAIAYLCDTXHEGRXFISDKKAFGGSTPKTVSEKEWWQATDTKFQAWPRTAGPPVVMNPISRQNFIVKSTE

SEQ ID NO: 295906 - protein, 129 aa, Zea mays
  Clone ID: MRT4577_32945C.1.pep
DKGYSDNQETTVRLRPEAVLSKKKKKKKKKKKKKKGKKKKKKEKKKGLWGCNHSLRAKSRKLGAVTRGSKFGTKLGEKMVIDVSWVKLLVVENFKQNKRRKKKRKRLGGLMREVIKINCVGVIDCFQYE

SEQ ID NO: 295907 - protein, 66 aa, Zea mays
  Clone ID: MRT4577_32946C.1.pep
LPVCILSFSPRAFFCVFPWCFAIFCFRHVGHFQRVPLSPILLWTLPSPFYIVRCVCVSICVHPLRS

SEQ ID NO: 295908 - protein, 45 aa, Zea mays
  Clone ID: MRT4577_32947C.1.pep
DAVDAFLTAVATNQPPKIFVAHSKFVILSARKLVFIGDTLSRQAK

SEQ ID NO: 295909 - protein, 52 aa, Zea mays
  unsure (1)..(52): unsure at all Xaa locations
  Clone ID: MRT4577_32948C.1.pep
SHDNKLXRIPLLAGSQPLSAQLDNLASSPPQLYSLDASSATYSAQVLCKETP

SEQ ID NO: 295910 - protein, 135 aa, Zea mays
  Clone ID: MRT4577_32949C.1.pep
KLKFFSPSPSPPLGLFFSLFLPPLWAPCNFFLISPFPLFGNFFQFLCPPFKNPFFVKTLRSPNFFLFHNSPFSHLHNNQKTSHHFIFQKFGFLNLLFPPPFRLFLSPVFFGVSLQGSPFFFFPLIPPFFVFFPFF

SEQ ID NO: 295911 - protein, 95 aa, Zea mays
  unsure (1)..(95): unsure at all Xaa locations
  Clone ID: MRT4577_3294C.1.pep
TLCGCFSYFRELELHAVTVKVKNDXEILATLHSEDHYLNMRLENTRXATTTTXSQMLFLRNCFIRRSGVRYGMLPDDVVYIHILHDCAIRETSGC

SEQ ID NO: 295912 - protein, 80 aa, Zea mays
  Clone ID: MRT4577_32950C.1.pep
SIHWPRYTSDWKPCVPTNRLTHPFAVRIQRPTDRLQQLPPDAMDRPDAISRRVWYRTAVTARPTPSFVFFFCTSRFRNLM

SEQ ID NO: 295913 - protein, 93 aa, Zea mays
  Clone ID: MRT4577_32951C.1.pep
ARYASWGSSMDFFVRRRENREGHFRIGSLRPEGRGIPPRWSTIDRRSDMGPPMLRERLTAACTDVPQASQDVSGPGDARGRSDGDVLAWGGLR

SEQ ID NO: 295914 - protein, 75 aa, Zea mays
  Clone ID: MRT4577_32952C.1.pep
SCFRIKFKKENLILQGLVLAMHDHSNTRPIRHIFYRGTQIKHAAANTNGTDNPRFYLLSSSHMTRRSEGYITGNV

SEQ ID NO: 295915 - protein, 79 aa, Zea mays
  Clone ID: MRT4577_32953C.1.pep
MELSRKLFTAVLLVMLLLLSAEVGPVAVAEARTCQSQSHRFRGPCLRRSNCANVCRTEGFPGGRCRGFRRRCFCTTHCH

SEQ ID NO: 295916 - protein, 64 aa, Zea mays
  Clone ID: MRT4577_32954C.1.pep
LSLLSECDGCLNPNLPVCGVRPSPTIPLIFLLLSVLSIIFYYFTSKDTPTFRRFPTIHRSLCIL

SEQ ID NO: 295917 - protein, 79 aa, Zea mays; identical to SEQ ID NO: 295915
  Clone ID: MRT4577_32955C.1.pep

SEQ ID NO: 295918 - protein, 147 aa, Zea mays
  unsure (1)..(147): unsure at all Xaa locations
  Clone ID: MRT4577_32956C.1.pep
MVNRNLPRGIIKETQGLFSEPAPGIWAATSEENMRYFNVLILGPAQWPYEGGVFKLELFLPVDYPMVAPMVRFLTTIFHPIVGMLGXICLDILRAKWXPALXIRTVLVRLQALLXAPNPDDPLSDHFASHWESTGVAAVGSAPVWAR

SEQ ID NO: 295919 - protein, 304 aa, Zea mays
  Clone ID: MRT4577_32957C.1.pep
MNYIIGAFKPPCDIFVTFADERTRKQVQIKKDNGKTVMVPTFQTLETIAGEVSIAPVPGKRLEHTGVKIELLGQIELYFDRGNFYDFTSIVRELDVPGEIYERKTYPFEFSTVEMPYESYNGTNVRLRYILKVTIGRNYVGSIVESRDFCVRNYSLVPTINNSIKMEVGIEDCLHIEFEYSKSKYHLKDVIIGKIYFLLVRIKIKNMELEIRRRESTGSGPNTYVETETLAKFELMDGAPVRGESIPVRLFLTPYELTPTHRNINNKFSVKYYLNLVIVDEEDRRYFKQHEITMYRLLETPQSS

SEQ ID NO: 295920 - protein, 239 aa, Zea mays
  Clone ID: MRT4577_32958C.1.pep
QILCAIVCTTELYFDRGNFYDFTSIVRELDVPGEIYERKTYPFEFSTVEMPYESYNGTNVRLRYILKVTIGRNYVGSIVESRDFCVRNYSLVPTINNSIKMEVGIEDCLHIEFEYSKSKYHLKDVIIGKIYFLLVRIKIKNMELEIRRRESTGSGPNTYVETETLAKFELMDGAPVRGESIPVRLFLTPYELTPTHRNINNKFSVKYYLNLVIVDEEDRRYFKQHEITMYRLLETPQSS

SEQ ID NO: 295921 - protein, 106 aa, Zea mays
  Clone ID: MRT4577_32959C.1.pep
DEGHQQGQAVGSEPGVIPTLGRWDTHQGGVDQFLGGRGGPSFLYPKVRPVLYKLFSPYGTAGPQNSRSGFGKHTLALGIWAPMLERSYFELKMLVFPCFFLNILVL

SEQ ID NO: 295922 - protein, 183 aa, Zea mays
  Clone ID: MRT4577_3295C.1.pep
PPSSPHAQAAAILPFPPGARLVASPGGADNGRLWRRAGLRQATRCTRWSTPSTSMLPTPAAPSSTTVVSRQEASSTIRGSEVAICSFGQASTDHLSFDAGSTPTTTSNSILTASKSKPPDEIPSKLLRSAFSASAPPPPSTTRHPKAMKARILVRGFGIRLRLLTLSVPKPLVDFSDKPLIMH

SEQ ID NO: 295923 - protein, 104 aa, Zea mays
  Clone ID: MRT4577_32960C.1.pep
IQGRSIEIQNLQSPQCVLFFLHTSFTAGYLWLNNLYIYCTRVRGFLKMLLGHPVYLCLRTKPDPLCHCIPSRLSIYSSEPNLCSNYVVRYLFPFAGSIRPSPVT

SEQ ID NO: 295924 - protein, 132 aa, Zea mays
  Clone ID: MRT4577_32961C.1.pep
PFVIVEGVIYCKSCKGKGYNTGIDASPLQGATAMMVCYGRKVVNATGTVTDANGYFLIMFYDMASFSSKTCKMYLVSSPTPQCSKPFYPPNQWIGLSLVRETRTVPPAGLQGIYTPTSVLFYAPAVKGQCPY

SEQ ID NO: 295925 - protein, 143 aa, Zea mays
  Clone ID: MRT4577_32962C.1.pep
NALKTIEELTRKESEKVDRAVLKELSEKLELAEKALASKQLQMDEMKQTIAKQEEDLETMTILRAQMEVYCSDFHAERAAREKIHEEKEQLALQLAALLKENDAFEDGGRQSLMEMQSRHGARTSDSDQQAYLAQRGTEDRDW

SEQ ID NO: 295926 - protein, 101 aa, Zea mays
  Clone ID: MRT4577_32963C.1.pep
SLQSSDVSLYEKKKEAYLNLHLFEILLYGMQNAQYCLRKRNPMRPTTPFTSYKETVYGLEYSAPSGKTELLQLCGYAYKLSACPIHLFTALDNTICMRHDN

SEQ ID NO: 295927 - protein, 54 aa, Zea mays
  Clone ID: MRT4577_32964C.1.pep
ENGVLICFSTGLMLSGRGPFMNLDLDAQLFHTSTPNQNPITFHVIGRPLENSGV

SEQ ID NO: 295928 - protein, 354 aa, Zea mays
  unsure (1)..(354): unsure at all Xaa locations
  Clone ID: MRT4577_32965C.1.pep
MQAKARIHADPVHEFDQFDCLHDSLVLLILNKLEXLEDVRSLGRCSAVSKRFSGLVLLVHDVRVKIDRVVTMDGDSADDALNLSSPKPHNIISHLFKMMLVAIAQPFHDMRSPSSAGRLLFPQLSQHSPVQVLKNFSHVRNLQVELPSGDVAVEEGVLLKWRAEYGSTLQSCVILGGTLVDRKAAGSGHEPSPDDKGSMPESFYTNGGLKLRVVWTISCLIAASTRHYLLRSIINDHPTLRSLVLADAEGQGALSMGAEQLNDFREHQLSASPCSNRTQVPACNMKLKYAQYLELPGGLALQGATLLVTKPASDGHGNRKEVEAFVSSAFDGPLRFAAKALMKRRTYLLEMNGF

SEQ ID NO: 295929 - protein, 91 aa, Zea mays
  Clone ID: MRT4577_32966C.1.pep
TCGYRGCRLAPSDAYIGHREPLCQSSSHGVQRWKGERGIGLPLKSFAAGVSSASSEATNHLKIILSTRNLKSQVKNRYHRMRCMEDAVMCS

SEQ ID NO: 295930 - protein, 80 aa, Zea mays
  Clone ID: MRT4577_32967C.1.pep
MRTVSLAGSTGSPTTTPSTTPSVSKERSSSRISSLDRETERCRGFGFVTFSTEDAMSSAIEGMNGLELDARTITVNEVFF

SEQ ID NO: 295931 - protein, 146 aa, Zea mays
  unsure (1)..(146): unsure at all Xaa locations
  Clone ID: MRT4577_32968C.1.pep
MHDQDYLNREIQELGDTIPGGESEDHQERVRTLHDDNFIHHTLVNPADRYATHNELHSPVHYPHAEEFEDDYEIXTTLSGSXKNMNNNDRPHAYIAHIAEQSIAQFQVSSXEHANLNRPSIPAINKLMKLTLLIHFLFNNNLQQEF

SEQ ID NO: 295932 - protein, 137 aa, Zea mays
  Clone ID: MRT4577_32969C.1.pep
LPQCNAPRCEGTSHKPPRLNANATRGRSHSTIRGVREPVGQEATQVGGHLRIFTHSWAESGDSASRFPPSPAPTSRVFPNQNSCKCYGHVNFIFGYPIVLVYFCRMHRVFNFFFFFFCFFFFFFFFFFFFFFFFFFG

SEQ ID NO: 295933 - protein, 124 aa, Zea mays
  Clone ID: MRT4577_3296C.1.pep
RPEPPSSPHAQAAAILPFPPGARLVASPGGADDGRLWRRAGLRQAIRCTRWSTPSTSMPPTPAAPSSTTVVSRQEASSTIRGASPRGRPRRSGPRSRSVASVRPPRTTYPSMQARHPPRRPTPS

SEQ ID NO: 295934 - protein, 50 aa, Zea mays
  Clone ID: MRT4577_32970C.1.pep
MDTQVKLAVVVKVMGRTEFRGQVTQGRVKILDYQNRLIMRNVKGSVREGD

SEQ ID NO: 295935 - protein, 57 aa, Zea mays
  Clone ID: MRT4577_32971C.1.pep
APRTMSRPARSDHTVKYRMPCGNRPRDLGMDRGKETGTMPAQTRHVMNMGWQGKMRR

SEQ ID NO: 295936 - protein, 71 aa, Zea mays
  Clone ID: MRT4577_32972C.1.pep
TSGSLDFITSYEPHHYINLYRVHVMLPSRIKVVVVSRSIKCDKVERTQFSSEVISFQQKDASNTKSLAFDG

SEQ ID NO: 295937 - protein, 145 aa, Zea mays
  Clone ID: MRT4577_32973C.1.pep
AHCCAFPSQQDPFRSCVMLRRRSSVAIWRIVQLVASGRRQGVQTVVWTSDEWWRRRRHRDLGGVRTRRSRHRCVNRQCHRRWDQAGGVLVEVLLVVHIHPARCGPGHVGHERLVLLVRNGPDEVAMACTGGRAIGVGHAEQRRRV

SEQ ID NO: 295938 - protein, 132 aa, Zea mays
  unsure (1)..(132): unsure at all Xaa locations
  Clone ID: MRT4577_32974C.1.pep
GTLISLSDQDKNALMQYHVLYAAIPMSXVDTDSNPVRTXSDSASPGEFPLNVIYYEGQQVNFTTGVVIDSVDNFLYSVHSLGVYQVNKVLLPMKIFIADDAPAPAPIAPAKKKGKTPADVNDWTDAVEAFPD

SEQ ID NO: 295939 - protein, 178 aa, Zea mays
  Clone ID: MRT4577_32975C.1.pep
MASAGVAPSGYKNSSSTSIGAEKLQDHMNELKIRDDKEVEATIINGKGTETGHIIVTTTGGKNGQPKQTVSYMAERIVGQGSFGIVFQAKCLETGETVAIKKVLQDKRYKNRELQTMRLLDHPNVVALKHCFFSTTEKDELYLNLVLEYVPETVHRVVKHHNKMHQRMPLIYVKLYMY

SEQ ID NO: 295940 - protein, 408 aa, Zea mays
  Clone ID: MRT4577_32976C.1.pep
MASAGVAPSGYKNSSSTSIGAEKLQDHMNELKIRDDKEVEATIINGKGTETGHIIVTTTGGKNGQPKQTVSYMAERIVGQGSFGIVFQAKCLETGETVAIKKVLQDKRYKNRELQTMRLLDHPNVVALKHCFFSTTEKDELYLNLVLEYVPETVHRVVKHHNKMNQRMPLIYVKLYMYQICRALAYIHGTIGVCHRDIKPQNLLVNPHTHQLKLCDFGSAKVLVKGEPNISYICSRYYRAPELIFGATEYTTAIDIWSAGCVLAELMLGQPLFPGESGVDQLVEIIKVLGTPTREEIKCMNPNYTEFKFPQIKAHPWHKVFHKRMPPEAVDLVSRLLQYSPNLRCTAVEALVHPFFDELRDPNTRLPNGRFLPPLFNFKPHELKGVPSDIVAKLIPEHAKKQCSYVGL

SEQ ID NO: 295941 - protein, 69 aa, Zea mays
  Clone ID: MRT4577_32977C.1.pep
GFPQNTSLPTRARERLPYQRLRASIKHAETASHAASTRVQDDGLTGSARQRSHVRPWYLSTALRRACQG

SEQ ID NO: 295942 - protein, 72 aa, Zea mays
  Clone ID: MRT4577_32978C.1.pep
SVPPPKAATHSLGARLSLHSQELRDPNTRLPNGRVLPPVFNFKPHELKGVPADIVAKLVPEHAKKQCSYVGS

SEQ ID NO: 295943 - protein, 182 aa, Zea mays
  unsure (1)..(182): unsure at all Xaa locations
  Clone ID: MRT4577_32979C.1.pep
KPDXNNQPPGTLLPELSKLGFPASLQRDLSRHISLKSKTGTHLPEPNLNSARRIRNVSGHRKNETEKESGLKPTLRQILNASRRNVNWEQVIQQVTKKKQELGKGLPRFGIEMVPLVQNEQEVLDLDEEPDLSSLEGFQWEGVSIPSSSGLARKRSLSESSVGMDRAPVYSLFTGEGAAEEN

SEQ ID NO: 295944 - protein, 112 aa, Zea mays
  unsure (1)..(112): unsure at all Xaa locations
  Clone ID: MRT4577_3297C.1.pep
HTRPEGAPEDLGKFLAPGGEVNMGDPEGGTPLNWVVDRGHLSVVGVLAKLNAALIAKATEGQTELHSAVVGERENIXKLLVKHHASFKIRDEVGTTEQDLCLPSCVLLNRPN

SEQ ID NO: 295945 - protein, 170 aa, Zea mays
  Clone ID: MRT4577_32980C.1.pep
MGIPVVVPVAAAYSCSSSLAAPPRAAAAAARAPSRAHVAAAGMSSRASSFVGGSGGDLSAVAASVAARPRRAGSGGGGALGCKCLFGLGVPELAVIAGVAALVFGPKQLPEIGRSIGKTVKSFQQAAKEFETELKKEPGEGGDQPPPATPTAVSGGEEKGLEASSSKESA

SEQ ID NO: 295946 - protein, 437 aa, Zea mays
  unsure (1)..(437): unsure at all Xaa locations
  Clone ID: MRT4577_32981C.1.pep
MASAGVAPSGYKNSSSTSIGAEKLQDQMNELKIRDDKEVEATIINGKGTETGHIIVTTTGGKNGQPKQTVSYMAERIVGQGSFGIVFQAKCLETGETVAIKKVLQDKRYKNRELQTMRLLDHPNVVALKHCFFXTTEKDELYLNLVLEYVPETVHRVVKHHNXMNQRMPLIYVKLYMYQICRALAYIHGTIGVCHRDIKPQNLLVNPHTHQLKLCDFGSAKVLVKGEPNISYICSRYYRAPELIFGATEYTTAIDIWSAGCVLAELMLGQPLFPGESGVDQLVEIIKVLGTPTREEIKCMNPNYTEFKFPQIKAHPWHKXNFFYIFYNVLKKLLLPVYXCLFGYFIFQVFNKRMPPEAVDLVSRLLQYSPNLRCTAVEALVHPFFDELRDPNTRLPNGRFLPPLFNFKPHELKGVPADIVAKLVPEHAKKQCSYVGL

SEQ ID NO: 295947 - protein, 133 aa, Zea mays
  Clone ID: MRT4577_32982C.1.pep
KNSAGRSPAACMESFTMGVTGILHNQAHKGNLKTHAPMPPWGWVEARMARLYSIRKTRHPHPHSPWLTKAIWKAGHSTNNRGNPRLPVLPMATPSYGNNKESAKQGNLPPRLEWGKTPGGTGSTRGRHHPTHN

SEQ ID NO: 295948 - protein, 72 aa, Zea mays
  unsure (1)..(72): unsure at all Xaa locations
  Clone ID: MRT4577_32983C.1.pep
GSTNTTACRWLSLLMRACLCTLAAPVTCICQCSQAAIAAFSPPYXLPLTIAPVCENPAFQPYRLQQAIVASN

SEQ ID NO: 295949 - protein, 80 aa, Zea mays
  Clone ID: MRT4577_32984C.1.pep
MISPSSPFPPKANIVDPCCTIHNWVTQDGSDDFIIQDSNWPSHTHDPPLVAQPSDHPPMVPLSQGIPAQMWIAHQTSNGT

SEQ ID NO: 295950 - protein, 58 aa, Zea mays
  Clone ID: MRT4577_32985C.1.pep
RPGRDQPTLILPFSSFHPLYLVSRFLAGSSSLERTRHRTLPELVLCRDDKREIMCMCE

SEQ ID NO: 295951 - protein, 75 aa, Zea mays
  Clone ID: MRT4577_32986C.1.pep
DPSVPLCFFPRPSSRCPPPSELRSWCVLSCPPRVGVDLSCIVFCNALSSFVVRGCAPPCPPRFGPNTLDGSAPPS

SEQ ID NO: 295952 - protein, 35 aa, Zea mays
  Clone ID: MRT4577_32987C.1.pep
FCYCLHGTRQYRFAPKTKRILTLQKANSWFNCREN

SEQ ID NO: 295953 - protein, 69 aa, Zea mays
  Clone ID: MRT4577_32988C.1.pep
KDLGSCVTAMCISCRGRSGYISFDQLHPMFPMHDGFVLSAYFWHASVVLIKYLTLIHPHGYIELIPIPA

SEQ ID NO: 295954 - protein, 114 aa, Zea mays
  Clone ID: MRT4577_32989C.1.pep
MATLYQHHLLPLQRLPNSPRRPPPRLRLPTKPSRHHNRQLRPRAAASTTATVSAMEDFRRWLASHGAGDGGKAIPAAVPEGLGLVAARDLPRGEVVAEVPKKLWMDADAVAGFD

SEQ ID NO: 295955 - protein, 51 aa, Zea mays
  Clone ID: MRT4577_3298C.1.pep
FNFFVLVGSFHGSTALVASMPVVIMWNYWVVESLKQKKKRKSGPRAPILKT

SEQ ID NO: 295956 - protein, 39 aa, Zea mays
  Clone ID: MRT4577_32990C.1.pep
LTWHNRLPPLSIDSCRSSRDKFLLTFQGCHSDTDAAGEL

SEQ ID NO: 295957 - protein, 440 aa, Zea mays
  unsure (1)..(440): unsure at all Xaa locations
  Clone ID: MRT4577_32991C.1.pep
MSGANSSLPMPPPAPAASALDNVEAKISPSIVFVVAILAIVFFVCGLLHLLVRHLLRLRRRRRRAREDADSVTAFQGQLQQLFHLHDAGVDQAFIDALPVFLYRNVVGAAPGGKDPFDCAVCLCEFSPDDRLRLLPQCSHAFHLECIDTWLLSHSTCPLCRRNLLADLSPASSSPVVVVQLGSGSARDMAASAGGATHDDADGGEPSDRATPAQEMVEVKLGKFVCVEGNSDSASATATDAAGTSGDGDGGASAEEGLGQRRCHSMGSYEYVMDDRASLRVAIKPEPKKKPAASKSRRRGAMSECELGASKRGETSLRLPFPATVPKQQQQSDSDATMAKLAKDSFSVSKIWMVPSSKEDPDAAGXEAHGVVPVAGEEQGRGRRQEPEERERGRLGRGGRERRRRQQXASSLAEERPSFARRTLLWVVGGRQQSRVGSCS

SEQ ID NO: 295958 - protein, 418 aa, Zea mays
  unsure (1)..(418): unsure at all Xaa locations
  Clone ID: MRT4577_32992C.1.pep
MSGANSSLPMPPPAPAASALDNVEAKISPSIVFVVAILAIVFFVCGLLHLLVRHLLRLRRRRRRAREDADSVTAFQGQLQQLFHLHDAGVDQAFIDALPVFLYRNVVGAAPGGKDPFDCAVCLCEFSPDDQLRLLSHSTCPLCRRSLLADLSPTCSPVVMVLESESARDMAASAARAVGAEPSAGPGATLPRDQGADEVVEVKLGKFMCVEGSTANANAKAADGAGTSGDGDVDVDASAKEGLGLGQRRCHSMGSYEYVMDDHASLRVAIKPPKKKPAASKSRRRGAMSECEFGASKRGETSLRLPFPATAHKQQQQADATMAKLAKDSFSVSKTWMXADQEGSRRRXARGVVPVAGERQGRGXEGKDRRSGSEAEWDVEAGSCGSVSSLAEERPSFARRTLLWVVGGRQQSRVGSCS

SEQ ID NO: 295959 - protein, 312 aa, Zea mays
  unsure (1)..(312): unsure at all Xaa locations
  Clone ID: MRT4577_32993C.1.pep
MGDERVDAMEIDGQQREEVAAAVPDGFNADYLRIYYGKLFPYVDFFKWLAYGNDAKHPGCDQSYIGRRELSFTLENDIYLRFQSFDSAAELETSIKEKCPFKIDIGPVYSVDPAKRHAYAQSGNNVFVPVERELIFDIDISDYDDVRYCCSGADVXGDCWPLMTIVIKILDTSLRDDFGFSHILWVYSGRRGVHCWVCDSRARKLSNEQRAAIADYFRVYKGGENALKKERCRKILDLIPDESVASEVHDKWQGNRRSSISKEDVNATRWEQLKMTXQSGKKAQGLRRCVEEIVFSYTYPRLDMEVSKHMNH

SEQ ID NO: 295960 - protein, 451 aa, Zea mays
  Clone ID: MRT4577_32994C.1.pep
MGRDYDPMEIDDQKQQQLEVTAAVPEGFNTDYLRVYYGKLFPYGDFFKWLCYGNDGKHPGCDQSYVGRREFSFTLENDIYLRFQSFDTATELESSIKEKCPFKIDIGPVYSVDPSKRHAYAQSGNNVFVPVERELIFDIDISDYDDVRYCCSGADVCRDCWPLMTIAIKILDTSLRDDFGFSHILWVYSGRRGVHCWVCDSRARKLSNEQRAAIADYFRVYKGGENALKKVSLAGPVLHPFLARSYMDVLKTFFEDRLLLNQQLFASEERCRKILDLIPDESVASEVHDKWQGNRRSSISKEDVNATRWEQLKMTLQSGKKAQGLRRCVEEIVFSYTYPRLDMEVSKHMNHLLKAPFCIHPKTGRVCVPIDPSNCDDFDPAAVPTLSQLLGELNATGFQTDPENNWERTSLGKSISFFRTSFLHPLLKACKEELESAYSAKLQQSKNSLDW

SEQ ID NO: 295961 - protein, 36 aa, Zea mays
  Clone ID: MRT4577_32995C.1.pep
AHEKLSVPVTCKIRVFPEIDKTVRYAQMLQKAGCQL

SEQ ID NO: 295962 - protein, 31 aa, Zea mays
  Clone ID: MRT4577_32996C.1.pep
KKWSELFTKAGFRESKILKEFGARVAFEVYP

SEQ ID NO: 295963 - protein, 362 aa, Zea mays
  Clone ID: MRT4577_32997C.1.pep
MASEVVRPSDAELLKAQADIWRLSLSYLTPLSLRCAVELGIPTAIYRHGGAASAAELVTALSLPSTKLPFLRRLLRLLAASGVFTVDKQSTEERYRISPVSYLLVDGIPHEDHMNHTALVLTCTSTRYIEAGIGLAEWFKRDVVTSPFEELHGATLFHESMGSLDADFHDMASEALDAHDNFGIEIAMREFRDLFEGIQSMTYCCGNFGDDKGARAIVKAFPHIKCTVLAPPKIIATKPADGAMINYVEGDMFSFIPPAQTVVLKLVLHHLTDEECVKLLAQCRKAIPSRKDGGKVIIGDIMIDHSGPMLETHLLMDIGMMTMTKGRQRDEKEWSELFTKAGFSEYKILKEFGARVAFEVYP

SEQ ID NO: 295964 - protein, 363 aa, Zea mays
  Clone ID: MRT4577_32998C.1.pep
MASEVVRPSDAELLQAQADIWRLSLSYLTPLSLKCAVVLGIPAAIYRHGGAASAAELITALSLPSAKLPFLRRLLRLLAASGVFTVDRQSTDEERYCISPVSYLLVEGIPHEDHMNHTSFVLTCTSSRYIEPAIGLAEWFRKDTATSPFEELHGATLFHESMGSLDADFHDMASDALDTHDNFGVEMALREFRDLFEGIQSMTYCCGNFGDDKGARAIAKAFPHIKCTVLAPPKIIAAKPADGVKINYVQGDMFSFIPPAQTVVLKLVLHHLTDEECVKLLAQCRKAIPSRKDGGKVIIGDIMIDHSGPMLETHLLMDIGMMTMTKGRQRDEKEWSELFTKAGFSEYKILKEFGARVAFEVYP

SEQ ID NO: 295965 - protein, 85 aa, Zea mays
  unsure (1)..(85): unsure at all Xaa locations
  Clone ID: MRT4577_32999C.1.pep
KLVVQCRKPIPFRKXGGKVICGDFXISRFGRMLETHFLMDMGMMSMTKGRQRYEKEWSELFTKAGFREYKILKEFGAVVAFEVYP

SEQ ID NO: 295966 - protein, 88 aa, Zea mays
  Clone ID: MRT4577_3299C.1.pep
RLRHQGLCGLVFLCLAFGNWGADFSFQQLGWYNLLMLGCRTAGCNVQPCCVVWARAVGVPLSPFLLSLLSPLCCLLSLPANNRSIAPY

SEQ ID NO: 295967 - protein, 902 aa, Zea mays
  unsure (1)..(902): unsure at all Xaa locations
  Clone ID: MRT4577_329C.1.pep
IDEILYWHNAVLRELSDIAEENFGTRQSGDFSDIAGFNMRLQFIADVCIFHSIAEDQVIFPAVDGELSFVQEHAEEERQLNKFRSLIEQIQLAGAKSTVVDFHSELCSQADQIMQKIEGHFNDEEIKVLPKARIKFSQEKQRELLYQSLCVMPLKLLEXSTMVYSEXMMQAVSFLQNMPAPSSETALDSSLMRLLETSVNLXCLGLVGRSVFSVDGVSSMLSSRARRLGAFTLAAGXLGSSPPPHLQESTSTTELTARRRHGSSPAPTFPIRPTVXSTARSPVLLHGPRLTGARTDXMVAVGEVDLVXPRFDVQRATWRWLTSSSTASCSYNYCWPYREMLGLLYQLFKAWTLYSYMFXIIDRLISEMPIDWYICGNLFANCKPVVMHRTFXWYKIFLLMXLQVIFPALDIRVKNVAGTYSLEHKGENXSLRTSDKASTLSEESHFQENLEQNDQMFRPGWKDIFRMNQSELEAEIRKXVSRDSTLDPRRKAYLIQNLMTSRWIAAQQKSPQPSVEGHNGCTRRPGCVPSYRDPGKQIFGCEHYKRNCKLVAACCNKLFTCRFCHDKVSDHTMXSIFTPTIHFIVTHFLLRDAFKDFILTSNQYQLSMAFNLEIEXAGVSWMCEAIHLQNLSDKVTKGPLLTLXHVIGVYTTTLTCKGCRSGRSXGLIPIYEYGRKKSVSAASKNQPIXRKSVMEMMCMQCLNVQPVGPNCQSPSCNGLSMAKYYCSICKFFDDERSVYHCPFCNLCRLGSGLGTDFFHCMKCNCCLGIKMIEHKCREKMLEMNCPICCDFLFTSSAPVKGLPCGHFMHSACFQAYTCTHYTCPICCKSLGDMTVYFGMLDGLLAAEQLPEEYQDRCQDILCNDCERKGRSRFHWLYHKCGFCGSYNTRVIKTDTAECSRPL

SEQ ID NO: 295968 - protein, 336 aa, Zea mays
  Clone ID: MRT4577_32C.1.pep
MGADYYKVLGVDRGASDDDLKKAYRKLAMRWHPDKNSTNKKEAETKFKEISVAYEVLSDPKKRAIYDQLGEEGLKGQPPPGAGGPGTSPFFPGGAHSTAHHFNPRSADDIFKEFFGSPGMGGMRTEPGFQRSMFGNDIFSSRFRAEGSTSMQQPLRKAAAIENPLPVGLADLYKGVTKKMKISRETIDASGRISNTEDILTIQVKAGWKKGTRITFPDKGNEAPNMKPADIVFIIDEKPHDVFTREGNDLVVTEKISLVEALTGYTARVTTLDGRSLSLHINSIIHPKYEEVMPGEGMPVPKDPTKKGNLRIKFNIMFPSRLTSDQKAGIKRLLGS

SEQ ID NO: 295969 - protein, 45 aa, Zea mays
  Clone ID: MRT4577_33000C.1.pep
PIVVQPDYMELDDIVTRSSTIFRHMPAGRPCFDNLSDWDCAYYDA

SEQ ID NO: 295970 - protein, 50 aa, Zea mays
  unsure (1)..(50): unsure at all Xaa locations
  Clone ID: MRT4577_33001C.1.pep
PLMDIGMMPIPKDRQRDDKEWSELFTXKPGFRESKILKEFGARVAFEVYP

SEQ ID NO: 295971 - protein, 363 aa, Zea mays
  Clone ID: MRT4577_33002C.1.pep
MASEVVRPSDAELLKAQADIWRLSLSYLTPLSLRCAVELGIPTAIYRHGGAASAAELVTALSLPSTKLPFLRRLLRLLAASGVFTVDKQSTEEERYRISPVSYLLVDGIPHEDHMNHTALVLTCTSTRYIEAGIGLAEWFKRDVVTSPFEELHGATLFHESMGSLDADFHDMASEALDAHDNFGIEIAMREFRDLFEGIQSMTYCCGNFGDDKGARAIVKAFPHIKCTVLAPPKIIATKPADGAKINYVEGDMFSFIPPAQTVVLKLVLHHLTDEECVKLLAQCRKAIPPRKDGGKVIIGDIMIDHSGLMLETHLLMDIGMMTMTKGRQRDEKEWSELFTKAGFSEYKILKEFGARVAFEVYP

SEQ ID NO: 295972 - protein, 104 aa, Zea mays
  unsure (1)..(104): unsure at all Xaa locations
  Clone ID: MRT4577_33003C.1.pep
SLALTPSKLVRRPPNLPGRSALXRLFSLRKAKXATKGXLPPNRCQGPSXLXXLSXVRSLGRXXLXVXSXXLXXXSXSXXPPPPXGSSAAVLRRXLGGASPRAAX

SEQ ID NO: 295973 - protein, 62 aa, Zea mays
  Clone ID: MRT4577_33004C.1.pep
SHVSLARSKRYRHFKCHTKLEKNETCDILAMTSIFFYNGIVQDTLLETGFPVVPKSLGSTCL

SEQ ID NO: 295974 - protein, 50 aa, Zea mays
  Clone ID: MRT4577_33005C.1.pep
RLLRVRTRPTRQESVLKLAERHHGGLQVPDERYSSGFTVENGRGYGLQRG

SEQ ID NO: 295975 - protein, 173 aa, Zea mays
  unsure (1)..(173): unsure at all Xaa locations
  Clone ID: MRT4577_33006C.1.pep
MGSALRMRGSTMAISLTVMARTSMKVSSFGDGRITMRKTVGNANEEASGSPXDGPDGAQVXGSTSTGERTRYHTGSAARDYGWDXAGMLRYSDDFAKNRKLKAIHYRCAMILELGMVHXELFSRKGDWCREDXWLTVGCQSCTEVVLDYRVNHRLIQTKRILAIWSXQVVLKE

SEQ ID NO: 295976 - protein, 69 aa, Zea mays
  Clone ID: MRT4577_33007C.1.pep
YTDYIQMMYMNPDHQMIFITNQYTYSRFIHQIHTHHKSHSQNDNSTSIYISSSIYISKHHLKYHFHITC

SEQ ID NO: 295977 - protein, 89 aa, Zea mays
  Clone ID: MRT4577_33008C.1.pep
MSSRRPSSRGNISEDEINELISKLQALLPSSRRRGSGQASTTKLLKETCSYIKSLHREVDDLSDRLSDLMATMDHNSPGAEIIRSILRS

SEQ ID NO: 295978 - protein, 151 aa, Zea mays
  Clone ID: MRT4577_33009C.1.pep
LAYTVTHRFPGRLRWCSSTKRGRKTMTSESARPGGVGSCSGGARCQPRTLVRVSAGVSGVAVPAPWMAETMYDLLPFYDTAAPAKIKASVPARRAGVAPGLVPRRRRPLHVRRGMPTQCCPTPSAGADTTSIYDAVPTLWTPGTERHTSPV

SEQ ID NO: 295979 - protein, 223 aa, Zea mays
  Clone ID: MRT4577_3300C.1.pep
PPLLRPPVAGVRRSLSSPREQRLPPPAFRMENPFSVKVLQVFTGFGVGCGVGIGVGRPIYLGMIPGLQQVMSATRGATDAFSGVTRHVNSALRTAGLKNIEAGIGCGVGIGHGFGIGIALKPRVLHGIQSSVGDPLFQNDTKVDFRDAPGNLHGMDSVLQLVLKHQKVIEELQEENENLRQILIEELKISPTKLQIGHKNGVKAYYPCSYCFECRAKFRTSTQ

SEQ ID NO: 295980 - protein, 70 aa, Zea mays
  unsure (1)..(70): unsure at all Xaa locations
  Clone ID: MRT4577_33010C.1.pep
KGGRHPIYFFLYFFLRIFFFFFFFFFFFFFFFFFFFXHLFINLRSKTKSIIKCIKELAICAMVTPVVVVG

SEQ ID NO: 295981 - protein, 291 aa, Zea mays
  Clone ID: MRT4577_33011C.1.pep
MAVGKGGGLLVLVVVGLLLHGTRVADAQSLRVGYYSQTCGSAESIVADEVQKASYRDRGVLASLIRLHFHDCFVNGCDGSVLLEASDRQAEKNAKPNLSLRGFDVIERIKQRLEAACALTVSCADIVAFAARDSVKLSGGLWYAVPGGRQDGMVSRASMTGDLPPPNQRNVDLLAQYFYRKGLTLDEMVLLSAAHTVGIAHCSSFDYRLTSDQDKGMDPAFRNSLRSQCQYNPSNYVPLDAGSQYAFDTGYFSNVLANRTVLDSDAALASPRTADKVKQWKNNPDWFKNSF

SEQ ID NO: 295982 - protein, 90 aa, Zea mays
  Clone ID: MRT4577_33012C.1.pep
FVYSSRQHEAINIGTDGGHSYTRCIIVQHATCSLSYTITGPCEELWITNYTFTVFQRSHQTNADRGITFAQWTRSLHVLGSKTMIMFTGP

SEQ ID NO: 295983 - protein, 104 aa, Zea mays
  Clone ID: MRT4577_33013C.1.pep
WMTSSAPPHALATVTDASPCTYGAAADSCLERPTPASRTLTLVPVRNSIITEIIKPKQEVLATLSIFYQCQETSLHILPVHIANDLIQMACVCDRGGAGERGDD

SEQ ID NO: 295984 - protein, 114 aa, Zea mays
  Clone ID: MRT4577_33014C.1.pep
LTTNQLLHRYFAHITIHTIGAYEHLQPLHALIQLPALNPLSYQQQHLHLLHPLALPFITSILNNITLLQQSSTTSNISPHLHRSQLTTTCSTDLIYISPYCQCTYIPITTDGAT

SEQ ID NO: 295985 - protein, 119 aa, Zea mays
  unsure (1)..(119): unsure at all Xaa locations
  Clone ID: MRT4577_33015C.1.pep
KGADRRDGPTRLARPIGRPAGTRARRPKRXARTPPHPKKNITTPITARGEQRQLTKTTNTTLTTANPDAIEKTPSTNAAXQTSTLTPINKNDPYGQEAYPKHHKQSAVPDTHQTSCKNK

SEQ ID NO: 295986 - protein, 73 aa, Zea mays
  Clone ID: MRT4577_33016C.1.pep
TSRSPQVTQLSPPACFPPSCSCLCIKAPGAGSPTTRVFFAPVGPFSSPRYPLRRGAKIPEKFLFALTCPPCIF

SEQ ID NO: 295987 - protein, 112 aa, Zea mays
  unsure (1)..(112): unsure at all Xaa locations
  Clone ID: MRT4577_33017C.1.pep
SLIRAVFYIIIQCLGAICSAXGVVNGFHHGLYMGNRCRANVVSPGYTKGHRLRAEIVGTFILVYTVFSATDANRNASDSHVLILAPLTIRFAVFLVHLANIPITGTGIKPAL

SEQ ID NO: 295988 - protein, 85 aa, Zea mays
  Clone ID: MRT4577_33018C.1.pep
LIIKFNKVKGGPCVCFKSVSQLGAMACFEFKIIIMANGGVVSSPGLLGGFWQTVFFFVWVPPANRLTMCPFVLGPPPFIIFSLPP

SEQ ID NO: 295989 - protein, 181 aa, Zea mays
  Clone ID: MRT4577_33019C.1.pep
MAAAYRHVATRGLALALAAAVVTAWQCAAQRAPSGPGCMPELVSLNPCMDYMSGNATAPDGPCCSAVSGMLRASPSCLCMVVGGTAATLGVAVDGDRALRLPAACQVQAPPASQCNVAGAPVPSPMVGTNTPGAPAAAAPSDANVTPAGSGSTLPSSDGDNGRPGTTFVFAAAALPLLHRL

SEQ ID NO: 295990 - protein, 100 aa, Zea mays
  Clone ID: MRT4577_3301C.1.pep
CRIGSQFIVSLGEASASLSPNPTAAMAAPSAALSVSGAAHTNSFVCRNKKLKSNRNRLHRAVPSSSESTNYCRKLTICRAQSEDSKGGGGSLAGFSYRGE

SEQ ID NO: 295991 - protein, 55 aa, Zea mays
  Clone ID: MRT4577_33020C.1.pep
TTLTRAIMRVNIRWLMESYHKHATSWHWIFTRTIGLVKVVYMDHMRSSIFVLKVN

SEQ ID NO: 295992 - protein, 68 aa, Zea mays
  Clone ID: MRT4577_33021C.1.pep
VSGLVRKGLNSLVALGAYIIWNHRNRCVFDNWIPNVTLAIRMAMEERWMWEMAGAKGLSYLSAPLLEV

SEQ ID NO: 295993 - protein, 103 aa, Zea mays
  Clone ID: MRT4577_33022C.1.pep
ATCHCHCVRDTTSKDTNGHKMALRGYLPVPPPLVRAADTASDKSATLDFFSSAPAASVTARAKGDRRRHAYISANLTSRRGSRHTVATELESSSAISVPISSG

SEQ ID NO: 295994 - protein, 65 aa, Zea mays
  unsure (1)..(65): unsure at all Xaa locations
  Clone ID: MRT4577_33023C.1.pep
EGEGEELMLRXSDNQELEVKELVXMQXMTMKKMVEDGCADKGIMFIKVTYYMLVKVMEYCNKNVE

SEQ ID NO: 295995 - protein, 99 aa, Zea mays
  unsure (1)..(99): unsure at all Xaa locations
  Clone ID: MRT4577_33024C.1.pep
GFPEPLWLGGPLVKAGFXKFGGRIKGIQGFFFEGNNNLGLQNPFGAGVVPFKMFKPFFKPGGPGGGVPHRISLWSLPGVGLAHLIGGGAFFGFQGCLLN

SEQ ID NO: 295996 - protein, 225 aa, Zea mays
  unsure (1)..(225): unsure at all Xaa locations
  Clone ID: MRT4577_33025C.1.pep
EKLRNDFXNIDIWDEDRIEALLNTFLEDLRSGWLEEVGWPVMLPAYSVSKMVINLYTRIMARRXNINWNXGVLTPEQGARGPFMLALLPDDGPTRWYIDEMGDKMGSLSFFKKLKYSSSVEGFCGAQFSFPNIMLCKSWSQDLATNTESHLLPEMLEVVTGYISHELHLMLTSIGVTHMIGCGKYLMGVIGLLTPWDPGIVVFNLKFLMLWLEGKPNLKKGEYQY

SEQ ID NO: 295997 - protein, 273 aa, Zea mays
  unsure (1)..(273): unsure at all Xaa locations
  Clone ID: MRT4577_33026C.1.pep
PEPXPEAPGLNILAAWPSGVGPAGIPSDGRSTEFNILSGTSMACPHVSGLAALLKAAHPSWSPAAIKSALMTTAYVRDNSNGTVADESTGAAAGAFDLGAGHVDPMRAMDPGLVYDIGPSDYVSFLCNLNYTERNIRAVTRRPADCRGARRAGHAGNLNYPSLSATFVAAGAAAAAAASRTHFIRTVTNVGGGSAVYRASVTAPEGCNVTVQPRRLAFRRDGQRLSFAVRVEAALGGRMEPGSSLVRSGALTWSDGRHVVRSPIVVTVQAPLQ

SEQ ID NO: 295998 - protein, 111 aa, Zea mays
  Clone ID: MRT4577_33027C.1.pep
ALRRSSFGRWWRREVREEMKAVVRAKLEKRLRARSRSIRGMTLYRGDPSRTLRLTHAVIQRWSKTIPTVWKTASMTNSNPMLREPLALMNRCSLVRPSRERGHWKPLHLRF

SEQ ID NO: 295999 - protein, 93 aa, Zea mays
  Clone ID: MRT4577_33028C.1.pep
PGLALGPCSGGDRRGVRKERGLICNRIVVLMLNYCLVKSHRSEREDTHIRLKRRLKASYTAAQNQSRPHCHRRSHVTGSQLPDLRCYQRSIFS

SEQ ID NO: 296000 - protein, 79 aa, Zea mays
  Clone ID: MRT4577_33029C.1.pep
CSDGVITAGGASSRQRLQGRLRPCLQGRRHGGRQAWTQAIGGRESGYGGIHPFSNRSQANCCVLRQLWWRVTTSIGWWW

SEQ ID NO: 296001 - protein, 83 aa, Zea mays
  Clone ID: MRT4577_3302C.1.pep
TITLEVLSSYIIDNVKAMILDKEGIPPDQQRLIFAGKQLEDGRTLADYNIQKESTLHLVLRLRGGIIEPSLMALARKYNQDKM

SEQ ID NO: 296002 - protein, 128 aa, Zea mays
  Clone ID: MRT4577_33030C.1.pep
MSSMVSRAAAAAALRCHVRRPGAAFSRPASTSAATAEHHAGHSRASGRLPRGDYVPVYVALGLIALSVTLGLHTARQQLAYAPNVWVDKKKLETVPEVAAPELALDEAEQFVDRSLFRKVATVQDDPS

SEQ ID NO: 296003 - protein, 141 aa, Zea mays
  unsure (1)..(141): unsure at all Xaa locations
  Clone ID: MRT4577_33031C.1.pep
GPEFPGRPRVRSTYHKDIGTLYLLFGAXAGIVGTALSILIRAELGQPGALLGDDQIYNVIVTAHAFVIIFFIGIPIIIGGFGNXLVPLIIGAPDIAFPRINNISFXLLPPXFLLLLASSIAQAGAGAAXTAYRPVRANVAH

SEQ ID NO: 296004 - protein, 73 aa, Zea mays
  Clone ID: MRT4577_33032C.1.pep
DLCACLCAWQFPCSPSASAWQHSRLHACVLPSDSTNIISLRLVSLRITDSGTRPAFACFVTDLLKEGQGEAAI

SEQ ID NO: 296005 - protein, 58 aa, Zea mays
  Clone ID: MRT4577_33033C.1.pep
RIITYALTITPLTMSLEELLPPNQQKYSNIVMLRSALVVSTLLIALSVPFFGKFMIDW

SEQ ID NO: 296006 - protein, 105 aa, Zea mays
  unsure (1)..(105): unsure at all Xaa locations
  Clone ID: MRT4577_33034C.1.pep
LVCSLACPFVGAGVCCFSGVFGLLLAAFACWXFSGCCVGFSPPVAFFVVXSGVRWVALGACVPWGXFVAFAXLAVCAPPPSVGXSLGRXCCSFVGXGFRFLCCLL

SEQ ID NO: 296007 - protein, 58 aa, Zea mays
  Clone ID: MRT4577_33035C.1.pep
RKPINFIPKPSQPIAFKDNRLLLEKWAPLISLTGLITLITPYISRTRLLYYTTMANEP

SEQ ID NO: 296008 - protein, 138 aa, Zea mays
  Clone ID: MRT4577_33036C.1.pep
SNYCSPIRRHLVWSVGHASLERPRYMALTLNGALGQLLERITICTMVGSAKMRLLYDTQIVALPNLVQPTGALLDKVSNAGATVLDVAIVLLMSSAANGSCPGMMAEEIRVSPLGSETGSTPHAIAGACFICAVCKGK

SEQ ID NO: 296009 - protein, 484 aa, Zea mays
  unsure (1)..(484): unsure at all Xaa locations
  Clone ID: MRT4577_33037C.1.pep
MRAVVGGRLLGVALRVSSRSLLVTDECANMMLGCGCWSDEASPVSSSGVNSLWWNEPEIELKEADPVDLLPTDPFWMNLETTFKVASACXIGNLTFMSGTGRFGSCDDDVFYDDLSLYLNRAFMLKPEPWSSVYTGSIDHSFVSGGLSHTGGXINSDIRWMDSLITLGLCDRSYSSCHPALSCCDNMVEEDPSSSCNPALACWDMVDVAPVQEGNDAHEAMVFVLSYLGLRDILSVEMVCKSLHSAVRNEPFLWKCIHIDSRLGKKMSDADLLCLTQKSPGSMQCLSLMHCNNITDQGLKAVLKSNLQLTKLGIFGAFRITYQGLIDSLRSFNMETDIGIKKLRVTNHVTASEAQYEELLSLMKIDKKMALHKQEPRIFHSGRLLLDLYGGYVPDSFVPELHDEFALDIEKCPLCPNYKLVYDCPSKECKNSRHSTCRGCIVCIWRCLLCGRCIDIANVFQESFCLGKLCRDCVKYEDLLPTEK

SEQ ID NO: 296010 - protein, 223 aa, Zea mays
  unsure (1)..(223): unsure at all Xaa locations
  Clone ID: MRT4577_33038C.1.pep
MAIDHATPLGLKRRGAMGGGGECDDGSDTRRWPPWLRPLLSASFFVQCRVHADAHKSECNMYCLDCMGGALCALCLAARHRDHHSIQIRRSSYHDVIRVSEIQKVLDIAGVQTYIINSARVVFLNERPQPRPGKGVTNTCEVCERSLLDCFRFCSLXCKIVGTARGYRPKKKHGAAAAVTRGRERRLRTCALTRRSRAPAPAAQMPATGESGKHTPAVQPVLL

SEQ ID NO: 296011 - protein, 43 aa, Zea mays
  Clone ID: MRT4577_33039C.1.pep
LIYLHLGDMPHRLVTSYLPHGTLFTCGVVSTMEALSQKRYISP

SEQ ID NO: 296012 - protein, 68 aa, Zea mays
  unsure (1)..(68): unsure at all Xaa locations
  Clone ID: MRT4577_3303C.1.pep
VKVRKEKSDEAFLGDNIXATANRAVMCEEESKRIFVANAKRMQEIVADDECHKRYIDEFVQSLRTYKN

SEQ ID NO: 296013 - protein, 200 aa, Zea mays
  Clone ID: MRT4577_33040C.1.pep
MAFHDEAPLLLRINTARGGHMGGGECDEAENQRWPPWLKPLLATSFFGQCKMHADAHKCECNMYCLDCINGALCSQCLAYHHGHHAIQIRRSSYHDVIRVSEIQKVLDITGVQTYIINSARVVFLNERPQPRPGKGVTNTCDVCERSLLDTFRFCSPKTSHSQPQAELPDSYTGKTSPLLSPLSLPLALSWIPRAATRWR

SEQ ID NO: 296014 - protein, 192 aa, Zea mays
  Clone ID: MRT4577_33041C.1.pep
MAIDHATPLGLKRRGAMGGGGECCDDGSETRRWPPWLRPLLSASFFVQCRVHADAHKSECNMYCLDCMGGALCALCLAARHRDHHSIQIRRSSYHDVIRVSEIQKVLDIAGVQTYIINSARVVFLNERPQPRPGKGVTNTCEVCERSLLDCFRFCSLGCKVVGTSSVALRVSIRVVVNVPFSSCFVGTRARR

SEQ ID NO: 296015 - protein, 73 aa, Zea mays
  Clone ID: MRT4577_33042C.1.pep
QVVKQKHMEVVELEAQQNSPKQVVHIENCYCPPIRKYKRQYPSIRLMVNQQGTIKVNWAQFATTPPFGPSPIL

SEQ ID NO: 296016 - protein, 174 aa, Zea mays
  Clone ID: MRT4577_33043C.1.pep
MAIDHATPLGLKRRGAMGGGGECDDGSDTRRWPPWLRPLLSASFFVQCRVHADAHKSECNMYCLDCMGGALCALCLAARHRDHHSIQIRRSSYHDVIRVSEIQKVLDIAGVQTYIINSARVVFLNERPQPRPGKGSEYTCECCDRMHGALCSFCSLGCKIAGTRPDTEVVVPRT

SEQ ID NO: 296017 - protein, 178 aa, Zea mays
  unsure (1)..(178): unsure at all Xaa locations
  Clone ID: MRT4577_33044C.1.pep
MAIDHAARLGLTSRGATGGGGCGDDDAENRRWPPWLKPLLCTSFFVQCRIHADAHKSECNMYCLDXXTGALCSLCLARHRDHHSIQIRRSSYHDVIRVSEIHKVLDIAGVQTYIINSARVVFLNERPQQPRPGKGVTNTCEVCERSLLLRFRFCSLGCKIVGTARGYRPGNKKKHRGT

SEQ ID NO: 296018 - protein, 97 aa, Zea mays
  Clone ID: MRT4577_33045C.1.pep
VNFANNKQEPVKLRAEGDCQVSDSLNVLHTNFQAVSRHLLTEGQYSEVYLIHHHIVHHPNLMMSGVLHLPLKQSREIPRVAASTDISTLSGNFSKRE

SEQ ID NO: 296019 - protein, 65 aa, Zea mays
  Clone ID: MRT4577_33046C.1.pep
LFWNPAAKPLSPRFNTLVATQHNYQCQHHELNPLNSSDGVLQQLTLHKYVIVKDIPAYSALLPLL

SEQ ID NO: 296020 - protein, 62 aa, Zea mays
  Clone ID: MRT4577_33047C.1.pep
ETAFPLVFSHWTVCRPWFFCVRSSGNHLSLHNQCPPIDNLSSFIKIGSCPLHPTIKRTKEIS

SEQ ID NO: 296021 - protein, 56 aa, Zea mays
  unsure (1)..(56): unsure at all Xaa locations
  Clone ID: MRT4577_33048C.1.pep
HNTRAPQHPQPTRHTGRHRQQPPXXRSSVRLRVPSGVPQXLERXADAWVXXREXPD

SEQ ID NO: 296022 - protein, 53 aa, Zea mays
  Clone ID: MRT4577_33049C.1.pep
RLRDTMFTESIRRDPAEFSLLGSAASGSVGHIPGAGMVHRLENAGAQPRNRLH

SEQ ID NO: 296023 - protein, 427 aa, Zea mays
  Clone ID: MRT4577_3304C.1.pep
MAAADSSPLHIVIFPWLAFGHLIPGLEFAERLAEHGQRVSFVSTQGILRRLRPVAPALASLIDLVALPFPRIDGLPDGAEATSDLPPGTAELHVQAMDRLAPAFSAFLGAACADGSDRKVDWVLLDNFHASMADVASEHKVPCILNMPYSAATTEDFGIPDPSVLPMFRPFVETFKRCKVIAARSSFELEPESLPLMTKILGKPVIPVGLLPPAPAGGNTQRDDSAALSWLDEQPSKSVVYVAFGSEYPMTVKQLHEIARGLELAGTRFLWALKRPSVAHPDEDLLPPGFEERTRGRGSVVTGWVPQTSILGHGAVAAFMMHCGWGSTIEALQYGHPLVMMPVLVDHLSTARVMEQRKVGVKVRKEKSDEAFLGDNIATAIRAVMCEEESKRIFVANAKRMQEIVADDECHKRYIDEFVQSLRTYKN

SEQ ID NO: 296024 - protein, 54 aa, Zea mays
  Clone ID: MRT4577_33050C.1.pep
RPSTGEWMSFSCSSIHRRLILSAVVLLFVLAAASASSGTFCVPGWSIPHNPLPI

SEQ ID NO: 296025 - protein, 43 aa, Zea mays
  Clone ID: MRT4577_33051C.1.pep
LGSWAATTTEAVDSWTENRLTSAWTTTRSLSVTAIYTCAHGTD

SEQ ID NO: 296026 - protein, 554 aa, Zea mays
  Clone ID: MRT4577_33052C.1.pep
NYSFSKHKKPKAPLIGGSNLIICPMTLISQWKAEIEAHTKPGTANIYVHYGQNRPKDASIIGQSDIVLTTYGVVSSEFSIDGSTENGALYSVHWFRVVLDEAHMIKSSKSLISLAAAALTADRRWCLTGTPIQNNLEDLYSLFRFLKVEPWRNWALWNKLVQKPYEEGDERGLKLLQSILKPIMLRRTKNCTDKEGRPILNLPPANIEVKYCVLSEAEKDFYEALFRRSKVKFDQFVEQGRVLHNYASILELLLRLRQCCDHPFLVMSRGDTKEYADLNKLAKRFLRGGNGAVNGDSCIPSRAYIEQVVQELQKDEGECPICLEAFEDAVLTPCAHRLCRECLLSSWRSATAGLCPVCRMSMSKQDLITAPTDNRFQIDVEKNWVESSKISALLQELEALRSSGAKSIVFSQWTAFLDLLQIPLSRNNFSFARLDGTLNLQQREKVIKEFSEDKGILVLLMSLKAGGVGINLTAASNAFVMDPWWNPAVEEQAVMRIHRIGQTKTVSIRRFIVKGTVEERMEAVQARKQRMISGALTDQEVRTARIEELKMLFS

SEQ ID NO: 296027 - protein, 128 aa, Zea mays
  Clone ID: MRT4577_33053C.1.pep
IFLLPYQPAPFLASVQAKEEKERSAPRVYSSKIHFQVLPFRIILYTFKQIDNRRNFTKMEITPISQLRPGKLNYALHVRISRMWEFRGTNEQNDIKHLDLVLIDQKGNSIYAEIPPDAIAVLKSHIYT

SEQ ID NO: 296028 - protein, 59 aa, Zea mays
  Clone ID: MRT4577_33054C.1.pep
QHGRRRTSKTLIYHTCLLIRQSERSREDDTFLSHDISLPTRPRTRGRTRGRTRGRTRGR

SEQ ID NO: 296029 - protein, 80 aa, Zea mays
  Clone ID: MRT4577_33055C.1.pep
TPEQEAEGTEAMCINHVEGSGAKGAIWRSHELSFRLRVLFVKVVSAVSMRVMLLHHIYRCARCFEWADLVHSVPAPASPY

SEQ ID NO: 296030 - protein, 91 aa, Zea mays
  Clone ID: MRT4577_33056C.1.pep
FGSSSGQDAKYSFFPPLDELIARIDEELFILQLEQDWIEDQSDREAVLNENMRRRGVHRALFHLEALIPASLIQVYLVDRFFKRKLGTSRV

SEQ ID NO: 296031 - protein, 56 aa, Zea mays
  Clone ID: MRT4577_33057C.1.pep
FFPCPRFWASTLGITKPFHYFLNEHTILRITAHVHIPFKKTHTKLVSPSQDGRTPP

SEQ ID NO: 296032 - protein, 103 aa, Zea mays
  unsure (1)..(103): unsure at all Xaa locations
  Clone ID: MRT4577_33058C.1.pep
LWVSTLRAGQKDKKTNRTEPEHDHAHDKLLEKDYRFLVRKTKSKANAVIVKRCXMSKTNTPPVSMRRLVKCMERKEKNIGVIVCTATDDKTIHEVTAMKVTAL

SEQ ID NO: 296033 - protein, 55 aa, Zea mays
  Clone ID: MRT4577_33059C.1.pep
LGHGTEGVPPILSREETLQRPLQLCGFPEGDKKSTLSGCPGMFKIYQAHYKAGGF

SEQ ID NO: 296034 - protein, 305 aa, Zea mays
  Clone ID: MRT4577_3305C.1.pep
VEEDGAEVVRLRTRRGNEIVGVYVRHARASATVLYSHGNAADLGQMYGLFVELSRRLRVNLFGYDYSGYGRSTGKPTECNTYADIEAAYNCLKEKYGVADEDIILYGQSVGSGPTIDLASRLPDLRAVVLHSPILSGLRVIYPVKRTFWFDIYKNIDKIGLVNCPVLVIHGTSDDVVDCSHGKQLWEHCKVKYSPLWLSGGGHCNLELYPDYIKHLKKFVSSVSKKTSSKPDPKEIMTKDDTTSKEREEAYPEKPQPRGPRGPAQISRKSLDSRVGKSKTVDVPDKSRMSSDDIDKFRRRRCLVW

SEQ ID NO: 296035 - protein, 78 aa, Zea mays
  Clone ID: MRT4577_33060C.1.pep
TIRSVLLLAPSPLTLFLRKGQQFPTGRDDVLYRGSLGALLFSLVPHGAERCRPIRRSLDCLHGSPLYFPLPWHAVYRR

SEQ ID NO: 296036 - protein, 90 aa, Zea mays
  Clone ID: MRT4577_33061C.1.pep
EKKPKLISFVPSFFPLTRNNFYSLRLGKALNWSPKRVLGWWVLSMPVLRSRLTALNPRYRSRSSLKKIEPFLLNKRCASDSLDETKQGEY

SEQ ID NO: 296037 - protein, 80 aa, Zea mays
  Clone ID: MRT4577_33062C.1.pep
DSARILIVSIYCEWIYGLSSISLFYVMTLSYYPLFSGGITIYPTSYKTRGILLGLFQFDKDLYLDKHSMFPITWCRAAVR

SEQ ID NO: 296038 - protein, 211 aa, Zea mays
  unsure (1)..(211): unsure at all Xaa locations
  Clone ID: MRT4577_33063C.1.pep
MSDATTAPATGAGDHVVDAAAHKPPAAPSPDMASIRRGGSSVTETVTQATQQQQSRLDDDQLAELREIFRSFDRNADGSLTQLELGSLLRSLGLTPSADQLDALITRADTNSNGLIEFSEFVALVAPDLLQDRSPYSEDQLRKLFAIFDRDGNGSITAXELAHSMAKLGHALTVKELTGMIKEADTDGDGRINFQEFSRAITAXAFDNIFS

SEQ ID NO: 296039 - protein, 493 aa, Zea mays
  Clone ID: MRT4577_33064C.1.pep
MDVDLEAPPPPPPTAAAVTRRSPSPSAPMVVGTIAARRGEPHAPSMLRADASSSLAIAQMGWPHLPPPMGGPNGPRSGRHDGRLGGGGGEEARPLRGQWRSALSAALLLDVEQWAGGGSARPEVGPGAACPAERRRRHRPAVRGRGGLAESATSSPSADGEGGSTGTRAMAALGAGKDRHDGHAGPLPPRRGRLHGGATGAQERSLAAAGAGRSLLAPPPGGNMSTKEFEELALDGHNYPTWASDIEITFASRGIIDAIAAPITGTDPVKEPSEADKIEKTLSTMLPEDRILHQQYRSSNFQRYSQLMHTLTQAEKHHELLLKNAQQRPPGSAPLPEVHFNVHKTENKKGFKKNFKNPPGSRKFKKNKFHKKGKGKGKGNDKPLPSKGNRACLKCGTEGHFARDCTCPKHLVLLYQQSLKKPKSDKPGFEAHFNSTEAPIEVGSSSLASGDLKNTLAKEHLNVVDNKPPLLQEDESDDMIIEYMSKDPFGDLA

SEQ ID NO: 296040 - protein, 65 aa, Zea mays
  Clone ID: MRT4577_33065C.1.pep
PQGHGGEGVRPEDFTVDAHQLVDLAGRHDHLRGSQHGHGGEGVRPDDEIREELTKRARTTTITPG

SEQ ID NO: 296041 - protein, 85 aa, Zea mays
  Clone ID: MRT4577_33066C.1.pep
FRERWCLPMGAYISSDPVKRVSQDHIDSSSKNHPKTGESPSHIVSATMKIMFSFWMLNLRPKDGVFVQVILYPIHSSLNLKNMFL

SEQ ID NO: 296042 - protein, 60 aa, Zea mays
  Clone ID: MRT4577_33068C.1.pep
AREPLSSSATRSLKPRHAYLWCSAAAAAFALARCSSVCRSARLSVGSVVSAAGAGAAAVA

SEQ ID NO: 296043 - protein, 87 aa, Zea mays
  Clone ID: MRT4577_33069C.1.pep
FVLAACMPHRGIFLLSCVGLCFLCSQMLLLIHKYTILGSLCVYKIVYIRLLPIPLLYLLNISNFAHYFKLRSATVQYFSKQYFYMAC

SEQ ID NO: 296044 - protein, 134 aa, Zea mays
  Clone ID: MRT4577_3306C.1.pep
IRHEGQRPRLSSYGPLANTSPSGFWTSQTPPSPCTHQPGTTRDYVTARCPPCPRSAPHHEVSPTPSYITGDARRTATALYRRRAVVTRSACARRLGGTGLEVGTRRRPCRAAFCNDGGCLTGRPAAVLAHAVLD

SEQ ID NO: 296045 - protein, 153 aa, Zea mays
  unsure (1)..(153): unsure at all Xaa locations
  Clone ID: MRT4577_33070C.1.pep
MAPKVEKKPDAKKTAEEETAVAKGPVGKKAMADKRLPVDNSAGKEGVDKKXSRRMKKPVDTYKIYIFKGVKQDHPDICMSCKGMFIMHSFVNDIFXKLAGEAAKLARYSKKPAITSREIRTSVRLVLPGELIMHALSEGTKDVTKCHHRRFEA

SEQ ID NO: 296046 - protein, 113 aa, Zea mays
  Clone ID: MRT4577_33071C.1.pep
QFNNFLHHHVENIIGSCLESKQDRLIGHVLDDCKLVTRILEAEKNSALSSDLTKHTMSSEGRSPPRIGIVGHMTRIANRLLQLVNTNIMVQSHLQQNSDWIEWHASTCPGGRS

SEQ ID NO: 296047 - protein, 60 aa, Zea mays
  unsure (1)..(60): unsure at all Xaa locations
  Clone ID: MRT4577_33072C.1.pep
CHSLKTHLIKCRRGMAPLRSYYMRLXLIVATTMILRIAAIHRSEDNMAAAYRYTDQPERS

SEQ ID NO: 296048 - protein, 223 aa, Zea mays
  unsure (1)..(223): unsure at all Xaa locations
  Clone ID: MRT4577_33073C.1.pep
MEEPPPGSSKAAAARAPRVVGVLAGLLERAAERGDTATPTLADSAFRGRALPGIPVRRYAERIYRYAGCSPACYVVAYVYLDRLXGPMRRRRRRXEDEDEAAVVGIDSYTVHRLLITSVLVAAKFMDDRHHNNAYFARVGGVEVAEMNALELRLLFALRFRLNVAPDTFARYCAALECHVDTPDAGGPVPRMPPSSHVDGEEAVTSSKGKVAAAGWRFRRRPA

SEQ ID NO: 296049 - protein, 736 aa, Zea mays
  Clone ID: MRT4577_33074C.1.pep
MFWHVPGLSAASPVDTILDKENFKLECLLDEDEIIQECKALNTRLINFLRDKVQVEQLLRYIVEEAPEDAEKERIFRFPFIACEVITCEVDVIMKTLVEDEDLMNLLFSFLKPDHPHGTLSAGYFAKVVICLMIRKTLPLVSYVQGHPEIVSQLVDLIGITSIMEVLIRLIGADETMYSSYADSMQWLDDIQVLEMIVDKFSTSDSPEVHANAAEILCAVTRYAPPALAAKISSPSFVGRLFQHAFEDSRPKSVLVHSLSVCISLLDPKRLVSASYQAFRSQLSHGTLVTASPETVNGMLDSLGDLLKLLDVSSAENVLPTTYGSLQPPLGKHRLKIVEFISVLLSIGSAAAETRLIQLGAIKHAIDLFFEYPFNNFLHHHVENIIGSCLESKQDRLIGHVLDDCKLVTRILEAEKNSALSSDLTKHTMSSEGRSPPRIGIVGHMTRIANRLLQLVNTNIMVQSHLQQNSDWIEWHASTLTKRNALENVYQWACGRPTSLQDRGRDSDDEDFRDRDYDVAALASNLSQAFKYGIYSSEDIDEAQASLERDDEDVYFDDESAEVVISSLPLGDDQESGSLFTNSNWFAFDEDKALNDGLVSSEASPSPNSEISALKEDDEHDEVILGEIIDEIKGSEPTLPFSNKDADKESGSTGLANGTVDKFEDDIRPPTPDVKESQPEFVEWKEEEAEPGDVAEKDTAVPDIEVENEKQLDSMDDVMLCDAKLGEEKKSDELGI

SEQ ID NO: 296050 - protein, 73 aa, Zea mays
  Clone ID: MRT4577_33075C.1.pep
MLSRCQFNNFLHHHVENIIGSCLESNNDQLMGHVLDECKLVTRILEAEKNSALSSELDGRIDARFQQRSRYSP

SEQ ID NO: 296051 - protein, 141 aa, Zea mays
  unsure (1)..(141): unsure at all Xaa locations
  Clone ID: MRT4577_33076C.1.pep
AARRSCSRSERLRSGGVGPTAGGGITLPSMGAPPPPLHPTPTSPTARPHHHHYLFSIKQLNTLGAAAVLAFSTTVPLSETAFAVLLXPYLLVLAWLAFPQRPGRSRPGSRLYPSAPSSVSSMATTAPTPPPRQTLSPLPLA

SEQ ID NO: 296052 - protein, 42 aa, Zea mays
  Clone ID: MRT4577_33077C.1.pep
IGRSSRPIPAPFRSYWEARSDCTLRTDRPVSSGYGTRGSGCQ

SEQ ID NO: 296053 - protein, 111 aa, Zea mays
  Clone ID: MRT4577_33078C.1.pep
GIELTLTSLLPSSIHSPDAHHSQHVNSLTTLHSHHNLNNHIHFILIFQHIFLKKYPFLSTNINPTPSPTSYITTPTTLSPTTDLISFHPTHTTSPFLSSGPTTSTTTNTPH

SEQ ID NO: 296054 - protein, 137 aa, Zea mays
  unsure (1)..(137): unsure at all Xaa locations
  Clone ID: MRT4577_33079C.1.pep
SLIGRRLYRGWLVRVLISRYVPDSVXDLIXHMYRHILDKNVYXFTQMYXGGIHRLSDRLCQDVLWTWAEAVSPYCDSHHVFLVLYRELWYCYCXTRLYWLTDRHRAESXTSFCHLFSVNLHCVISMQVGNXQGVWDL

SEQ ID NO: 296055 - protein, 74 aa, Zea mays
  Clone ID: MRT4577_3307C.1.pep
MASPSPSPSPDWAGLPDDALLTVFERLGAPEVLMGAGVVCRNWLRVATGEPDLWRRVDLSDCFDPTIDMVAMAC

SEQ ID NO: 296056 - protein, 104 aa, Zea mays
  Clone ID: MRT4577_33080C.1.pep
YTHILSFSTFFCILCSCSVGGTEAIGTYIRDYCVLQYIQYTKVFPFFVKNKFKKKKKKKKKKKKKKKKRSRFKKKKKKKKKKKKKKKGGGRLKGPKFPSGGLGV

SEQ ID NO: 296057 - protein, 77 aa, Zea mays
  Clone ID: MRT4577_33081C.1.pep
HLRGTSSIQMAHTSVLLDAHGVPDTQGLRDALEHPHLHLGVRFPIHYSCTTITKLDMKSMEHDSSTHGARTCYRNCS

SEQ ID NO: 296058 - protein, 413 aa, Zea mays
  unsure (1)..(413): unsure at all Xaa locations
  Clone ID: MRT4577_33082C.1.pep
MAGLAPEGSQFDDKQYDKKMQEILTEDFFTSYDDVCESFDSMGLQENLLRGIYAYGFEKPSAIQQRGIVPFCKGLDVIQQAQSGTGKTATFCSGILQQLDYGLVECQALVLAPTRELAQQIEKVMRAPGDYLGVKVHACVGGTSVREDQRILASGVHVVVGTPGRVFDMLRRQSLRPDNIKMFVLDEADEMLSRGFKDQIYDIFQLLPSKIQVGVFSATMPPEALEITRKFMNKPVRILVKRDELTLEGIKQFYVNIDKEDWKLDTLCDLYETLAITQSVIFVNTRRKVDWLTDKMRSRDHTVSATHGDMDQNTRDIIMREFRSGSSRVLITTDLLARGIDVQQVSLVINYDLPTQPENYLHRIGRSGRFGRKGVAINFVTRDDERMLFDIQRFYNVLIXELPPKVAALLWSL

SEQ ID NO: 296059 - protein, 140 aa, Zea mays
  unsure (1)..(140): unsure at all Xaa locations
  Clone ID: MRT4577_33083C.1.pep
MEQENTNEGRRKKRKKTAGADHRAQDAIIEHATQSTFYWDAQXTRLVGGYTIARGAKPRLYKGXYDEKTSAFKYIRQTDNNHNGKTVAKIDKHXNSKINSXDHLYYSNVIKLVTPYKTPXLFYIITQVLSGGLLRLYLNN

SEQ ID NO: 296060 - protein, 85 aa, Zea mays
  Clone ID: MRT4577_33084C.1.pep
PELSLCQQFGSCSVSSVRRPVLGHCVEFLRHQCSPAGTPYGSPQWQALQQQCCHQITHVEPLNRFHATYSVVLQYFLQQQPEGEL

SEQ ID NO: 296061 - protein, 64 aa, Zea mays
  Clone ID: MRT4577_33085C.1.pep
GLIHEPKITFTYSWIRLQKCFIGSLNFNALGGVAQHMDWKNPDQGQFKWFVRHCLFHSWGSSQW

SEQ ID NO: 296062 - protein, 100 aa, Zea mays
  Clone ID: MRT4577_33086C.1.pep
DGIDTSTPPMATIPIPKRRRRSLPRRVASPSQGFRHSRNSLLLRPHPLPSIGGMNHLPPSCADPGARRLWHSVLLFALSSRFSSLQTIAETLLYMDLGLI

SEQ ID NO: 296063 - protein, 175 aa, Zea mays
  Clone ID: MRT4577_33087C.1.pep
MANGGGKGGRGALIVLEGLDRSGKSSQCARLLSFLQGKGCATEGWRFPDRDTSVGKMISAYLANESQLDDRTIHLLFSANRWEKRSLMESKLLGGTTLVVDRYSYSGVAFSAAKGLDIGWCKAPEVGLLAPDLVIYLDVQPEKAAERGGYGGERYERVEFQKRVAEHYHSLRDST

SEQ ID NO: 296064 - protein, 47 aa, Zea mays
  Clone ID: MRT4577_33088C.1.pep
NTPYRTSGSCGSHTPPFHLPPPSYTPPTFYLPPHHHPQPCQYPTQPP

SEQ ID NO: 296065 - protein, 83 aa, Zea mays
  Clone ID: MRT4577_33089C.1.pep
NLGISVITVGPHPERDQILWWTYRVQNNAGRGVKDDVSAVKGLMQPGHIEMSQMLDGLRIVVCLSPRMVIVLGIIKSFMKHPN

SEQ ID NO: 296066 - protein, 102 aa, Zea mays
  Clone ID: MRT4577_3308C.1.pep
RMQASSLTKTSSSCLVARPAVPVPAWLTGLGLAGPANGRRAVASYAFPVEPCMQQSSAGGRSCHRWIAAGHVTALSPTALAPSPPPCTQSDPPPMHPFSLPV

SEQ ID NO: 296067 - protein, 155 aa, Zea mays
  Clone ID: MRT4577_33090C.1.pep
KKQVAVSCHSAAATTLIISETGSEAKTGCMCGWPRRIPMQCGRGRVRRTGGCGRTPSTAVGGRARPRTLTSSPGRVTSGQAALLCDPRTPAGGARSPQRSAGPPGLHSRRPRTRKTVGHRTRQHPEPPPPRSRPNAGRHRRCFFGLWVWSGFAVG

SEQ ID NO: 296068 - protein, 71 aa, Zea mays
  Clone ID: MRT4577_33091C.1.pep
TLPGLTPFDWAPLYICYRHETPKCLCIVGAGLYYGTTPILLMAKLNVFWNWIVPLNFPLGSCPVPFMCTHS

SEQ ID NO: 296069 - protein, 76 aa, Zea mays
  Clone ID: MRT4577_33092C.1.pep
VPKNISSSIVALVTQKGAHHLHLSMGTDEDAVWVTEQRSPLVEIIQACLSQYHGYMVQVSYRRGGAVLHIYSPSQD

SEQ ID NO: 296070 - protein, 218 aa, Zea mays
  unsure (1)..(218): unsure at all Xaa locations
  Clone ID: MRT4577_33093C.1.pep
MRLMEARLSERISGRCDGVERRLDQRCEEPCDEMSIFDEGPIFDEEPCFHRRVLDSDPDSSYDGVDLPSVVRVAAPRSQDLLPPPGIRTVPSNYVASAHPQEVVGVDVRPNAPHDLLPLRLQLGQHNGELVEPPRRAESAARVESNVPRASSTELGREFSAASAFITAASSTSALEEAQLHLYTIATEGPCAVLPXSXLKVFDQRFSPSPARSRSRSS

SEQ ID NO: 296071 - protein, 68 aa, Zea mays
  Clone ID: MRT4577_33094C.1.pep
PASAHASACLKKKKKKKKKGKKKKKKKKKKKKKKKKKKKKKKKKKKKKKKKKKKKKKKKGGPGLKDQS

SEQ ID NO: 296072 - protein, 71 aa, Zea mays
  Clone ID: MRT4577_33095C.1.pep
TVRAEAQPRLETGLRRRNCSVEQLLQPRELPRPATLEHDPGPPAITQSHQTSVEPRSDFGCAHPSHGNGGI

SEQ ID NO: 296073 - protein, 60 aa, Zea mays
  Clone ID: MRT4577_33096C.1.pep
VLQEPIVHKKPIRKPRKVLKHREHRTTPRHPDTGAPDSVQVHQRTVCDPPPHLKLYSVCS

SEQ ID NO: 296074 - protein, 47 aa, Zea mays
  Clone ID: MRT4577_33097C.1.pep
DGSSGTIIKGDWDLFVQSQKKKKKRKKRKTKKKKTTHAWVDAGIPNR

SEQ ID NO: 296075 - protein, 70 aa, Zea mays
  unsure (1)..(70): unsure at all Xaa locations
  Clone ID: MRT4577_33098C.1.pep
NTSLLALVIVLKDMDIMLPSASICSCISFTHLLYLTYIYFLSRNYYACKNTRRHIVPTKLCYLKXLKMIR

SEQ ID NO: 296076 - protein, 41 aa, Zea mays
  Clone ID: MRT4577_33099C.1.pep
MDGFAQQARSIGGGAMSDAVMRGFNPADVAVYRELVSQFAV

SEQ ID NO: 296077 - protein, 134 aa, Zea mays
  unsure (1)..(134): unsure at all Xaa locations
  Clone ID: MRT4577_3309C.1.pep
TVGVFXCPRFYQLSSAVAFPGCWSPRGLAPPCFVVCSRWGGAFAAPPGXASPFSLGLGPCPLGXSWASRVRCFGCSFAALFFXLVRVRVVLSWPPPGPACGSSGLAPSCGGCLRLGEALVLGARSLSLPSAFSL

SEQ ID NO: 296078 - protein, 48 aa, Zea mays
  Clone ID: MRT4577_330C.1.pep
TKKNGRFLTYTKFNISRLIRLKLGRRTRRKEKKRKKTKKLLKRTSRKY

SEQ ID NO: 296079 - protein, 111 aa, Zea mays
  Clone ID: MRT4577_33100C.1.pep
SFFSSPDRATVGAHIGGRWNYSDENLDSRPGERFYVNSTCTWTSLSSRSGDTPLIPRSRASSHRESASYLPSRYLAADRDHSNTTVPCRILCMSHLPLLTARQPCNLVSRR

SEQ ID NO: 296080 - protein, 126 aa, Zea mays
  unsure (1)..(126): unsure at all Xaa locations
  Clone ID: MRT4577_33101C.1.pep
LIILTPIPCALLMEVREXPLHNVFAIFHDLDNCMHPIIVLYPYLPIPAHNLRNMSQPLLVXIFSTIFKSPNASXQSYEDMLHCYIDSNYNNRRPTTEVXVTQLLIAILFVIQLTISITLTLTEPYI

SEQ ID NO: 296081 - protein, 515 aa, Zea mays
  Clone ID: MRT4577_33102C.1.pep
MSAARRRSPIPVLLFFLLLHSASPSPIKTVVVLVMENRSFDHMLGWMKRLNPEIDGVTGREWNPANASDPAAGRVYFRDGAAYVDPDPGHSFQEIRQQVFGSDDDAADNPPRMDGFAQQARSIGGGAMSDAVMRGFNPADVAVYRELVSQFAVCDRWFASVPSSTQPNRLFVHSGTSGGATSNNPTLLAEGYPQRTIFDNLHDAGLSFGVYFQDVPAVLFYRNLRKLKYLLDFHPLRPSFADHARRGTLPNYAVIEQHYLDSKLDPANDDHPSHDVYQGQMLVKYVYETLRASPQWNQTLLVITYDEHGGFFDHVPTPVAGVPSPDGIVGPPPYNFTFDRLGVRVPAILVSPWIDRGTVVHGPHGPTPTSQYEHSSIPATVKKIFGLPQDFLTRRDAWAGTFEGVVQGRTEPRTDCPEQLPTPTRIRQTEADEEAKLSEFQQEIIQLASVLNGDHHLATLQDRIKNDMNVREGIDYMKAAVKRYFQAGASARRMGVDGDQIVKMRPSLTTRIQRP

SEQ ID NO: 296082 - protein, 68 aa, Zea mays
  Clone ID: MRT4577_33103C.1.pep
TGPCKNWNIFPKKGPNPTPPVFGIGILKSSVTRGGFLFCKVCIVKSPKRKGVLKSFEIKNEIKGLLDP

SEQ ID NO: 296083 - protein, 364 aa, Zea mays
  unsure (1)..(364): unsure at all Xaa locations
  Clone ID: MRT4577_33104C.1.pep
MVKLRSAAIRRSLLDSLWRRSSSDLPLMDLASILAATDNFSKANKLGEGGFGPVYRGVLSGGSEIAVKRLSARSRQGAXEFRNEVELIAKLQHRNLVRLLGWCAEREEKLLVYEYLPNRSLDAFLFDPSKSAQLGWSTRHNVILGIARGLLYLHEDSLLKVVHRDLKASNVLLDHKMSPKISDFGMAKIFEDDSDAINTGRVVGTYGYMAPEFALDGVFSVKSDVFSFGVLLLEILSGQRNGALYLEEHQQSLIQDAWKLWSEDRAAEFMDQSLGRSYSKDEAWRCYHVGLLCVQEDPDVRPTMSNVLLMLISDHTKLPEPAMPPLFARLRNISLLAPPLTTKTESTTSPLSINDVSITMIEPR

SEQ ID NO: 296084 - protein, 130 aa, Zea mays
  Clone ID: MRT4577_33105C.1.pep
SIARRLRHSSPDAHIHLHCLPPFGLTSSTSGRSASSSSRRSDLDLNLSVASASSIARRLRHSSPDAHIHLHCLPPFGLTSSTSGRSASSSSRRWRGLCLVYMTVTRGTTMERVGKAPTSILLDALLEDYS

SEQ ID NO: 296085 - protein, 121 aa, Zea mays
  Clone ID: MRT4577_33106C.1.pep
PPPRSLPPPVVVAPQPVQPLGQHFPGASTAPAHDGAGGRWDGVLARRGRALSDALITEPPGPPSAATIPHDAPQRHLPRIAAPPASLVLPRPPASALARVACYRSVAGDGRSGQPKASCRI

SEQ ID NO: 296086 - protein, 291 aa, Zea mays
  unsure (1)..(291): unsure at all Xaa locations
  Clone ID: MRT4577_33107C.1.pep
RGRPGNDSPWSMATESSAVAFAGDANSTESWSARVRTLTRLGRHRESIALLRHGGPSPPPHALALPASVISCAALSLPTGVAQIHALAAKRGLLPAADAYLLSALLTAYSRLGCLRLAHQLLDETPIESTSDTTLRTAFNSLISGCARHSLPVACFALFRRMRAIAVRFDAVTLLALVPAAPLSVVPQVHALAAQVGLATETSVANCLMSTYARXGRGSARPPPRRVFDEMPLASRDLXXSWNAVLSAHAQTGLXAVDALDLYRRMLSPKXXGVEPDAVTXIVGVLSSAAH

SEQ ID NO: 296087 - protein, 70 aa, Zea mays
  Clone ID: MRT4577_33108C.1.pep
PGWGYPLSWSGRATCRRGATEIKQSPLLLGRVLGSHVVRKTSGHTTAHIAGVWPRASAISISRGDAPRYP

SEQ ID NO: 296088 - protein, 75 aa, Zea mays
  Clone ID: MRT4577_33109C.1.pep
RPHLRPLFRPFVLCWLLGPLGFFFGFLRVSFLRLSDRADRDGCFIPLVPLLPRLAHLLHTTTTTSTTPSAPTLKS

SEQ ID NO: 296089 - protein, 71 aa, Zea mays
  Clone ID: MRT4577_3310C.1.pep
VGTQLYFLAGYQVPSADDSFRTVSLVHSFDTGAAPGLVPAWRSFRPEMSQEDAEVGGKELFSQCCSVQLSS

SEQ ID NO: 296090 - protein, 33 aa, Zea mays
  Clone ID: MRT4577_33110C.1.pep
LGGCLKHILRVEMKTTNIYDHIGQTYVIINLGH

SEQ ID NO: 296091 - protein, 120 aa, Zea mays
  Clone ID: MRT4577_33111C.1.pep
LLFYIKREYIHTDCRHIHLLDCTEQQKNTTDVCHPSFATPVASLESKVGTDTTNSRARTGRGGTLLCTLQFSNLPSRGQNTAYYDFDPSQHTYAQHFEQPRHARAAHICANKTAHWSSSC

SEQ ID NO: 296092 - protein, 39 aa, Zea mays
  Clone ID: MRT4577_33112C.1.pep
ELFKLKQMFGNADMNTFPTFKFEDPKFEVIEKPRPEEIK

SEQ ID NO: 296093 - protein, 117 aa, Zea mays
  Clone ID: MRT4577_33113C.1.pep
MAQILLHGTLHATIFEAESLSNPHRATGGAPKFIRKLVEGIEDTVGVGKGATKIYATVDLEKARVGRTRMISNEPVNPRCGRRVHHHWVRQHQPEVHGRCQGLRDRHGRVPAVPLGD

SEQ ID NO: 296094 - protein, 91 aa, Zea mays
  Clone ID: MRT4577_33114C.1.pep
KLHTQTYPCTLLRPSIAGRTTMVWPQPNKQPVHFTINGRTILKHHFKHHQLLYCRGFSQLQFHWTSENRRRFGILVVGFVFEAQLPPEPRN

SEQ ID NO: 296095 - protein, 85 aa, Zea mays
  unsure (1)..(85): unsure at all Xaa locations
  Clone ID: MRT4577_33115C.1.pep
MVLFMGARRLVCTGASFTHHFLCIIITRPMFXSMLIHSFDKLXHPSLYTYYAFIEATSMFPVFCTTGDKQTRIRKLIPLYLQTSH

SEQ ID NO: 296096 - protein, 194 aa, Zea mays
  unsure (1)..(194): unsure at all Xaa locations
  Clone ID: MRT4577_33116C.1.pep
MAQILLHGTLHATIFEAESLSNPHRATGGAPKSIRKLVEGIEDTVGVGKGATKIYATVDLEKARVGRTRMISNEPVNPRWYESFHIYCAHMAADVIFTVKIDNPIGASLIGRAYLPVQDLLGGEEIDKWLEICDEKREPVGDSKIHVKLQYFDVGKDRNWARGVRSTKYPGVPYTFFSQRQGCKVTLYXDAHVP

SEQ ID NO: 296097 - protein, 812 aa, Zea mays
  Clone ID: MRT4577_33117C.1.pep
MAQILLHGTLHATIFEAESLSNPHRATGGAPKFIRKLVEGIEDTVGIGKGTTKIYATVDLEKARVGRTRMVSNEPVNPRWYESFHIYCAHMAADVVFTVKIDNPIGASLIGRAYLPVEDILGGDEIDKWLEICDEKREPIGDSKIHVKLQYFDVGKDRNWARGVRSTKYPGVPYTFFSQRQGCKVTLYQDAHVPDNFVPRIPLADGKNYEPHRCWEDIFDAISKAQHLIYITGWSVYTEITLVRDTSRPKPGGDVTLGELLKRKASEGVRVLMLVWDDRTSVGLLKKDGLMATHDEETANYFHGTDVNCVLCPRNPDDSGSFVQDLQISTMFTHHQKIVVVDHELPNEGSQQRRIVSFVGGIDLCDGRYDTQYHSLFRTLDTVHHDDFHQPNFEGGSIKKGGPREPWHDIHSRLEGPIAWDVLYNFEQRWRKQGGKDLLVRLRDLSDIIIPPSPVMFPEDRDTWNVQLFRSIDGGAAFGFPETPDEAARAGLVSGKDQIIDRSIQDAYINAIRRAKNFIYIENQYFLGSSYDWKPEGIKPEDIDCLHLIPKELSLKIVSKIEAGERFTVYVVVPMWPEGVPESASVQAILDWQRRTMDMMYTDITQALEANGIQANPKDYLTFFCLGNREVKQEGEYQPEEHPEPGTDYIRAQEARRFMIYVHAKMMIVDDEYIIIGSANINQRSMDGARDSEIAMGAYQPYHLATRQPARGQIHGFRMSLWYEHLGMLDDVFQRPESVECVQKVNKIAEKYWDLYSSDDLEQDLPGHLLSYPIGVTADGTVTELPGMENFPDTRARVLGNKSDYLPPILTT

SEQ ID NO: 296098 - protein, 73 aa, Zea mays
  unsure (1)..(73): unsure at all Xaa locations
  Clone ID: MRT4577_33118C.1.pep
EQTSVIPGWRIDKNRGVRYIGAXEYKVTQGKRAIEPLXGKEGIIXSHMVETTLXKVYSQTFTLGTVGDLGQPP

SEQ ID NO: 296099 - protein, 61 aa, Zea mays
  Clone ID: MRT4577_33119C.1.pep
PYSVIVKQEPFTLNNLRSRDRAEDYLPREKVLGGMGKVSAAIHSAGRCTLYIIQWAGALLN

SEQ ID NO: 296100 - protein, 92 aa, Zea mays
  unsure (1)..(92): unsure at all Xaa locations
  Clone ID: MRT4577_3311C.1.pep
SNDQKNAPKQAADDKSKSEDANDAGASGRDANQXDEADDDEDKKKERESQXNPSTAKKNQGAGADRGGPSGRDEDAPAGSGGPGPKSEEADK

SEQ ID NO: 296101 - protein, 303 aa, Zea mays
  unsure (1)..(303): unsure at all Xaa locations
  Clone ID: MRT4577_33120C.1.pep
WYPRFCRELIYIENXYFLGSSYGWKPEGINPQEIGALHLIPKELSLKIVSKIEAGERFTVYVVVPMWPEGVPESASVQAILDWQRRTMEMMYTDIAQALEANGIEANPKDYLTFFCLGNREVKQEGEYEPEEHPEPDTDYIRAQEARRFMIYVHTKMMIVDDEYIIIGSANINQRSMDGARDSEIAMGAYQPYHLATRQPARGQIHGFRMSLWYEHLGMLEDVFQRPESVECVQKVNEVAEKYWDLYSSDDLEQDLPGHLLSYPIGVTADGSVTELPGMENFPDTRARVLGNKSDYLPPILTT

SEQ ID NO: 296102 - protein, 111 aa, Zea mays
  Clone ID: MRT4577_33121C.1.pep
GWQRGGRTMPGVTVKDVNQQEFVRALAAFLKKSGKLKVPEWVDTVKLAKHKELAPYDENWFYTRAASTARHLYLRGGAGVGSMTKIYGGRQRNGVMPSHFSRGSKSVARRV

SEQ ID NO: 296103 - protein, 815 aa, Zea mays
  unsure (1)..(815): unsure at all Xaa locations
  Clone ID: MRT4577_33122C.1.pep
MAQILLHGTLHATIFEAESLSNPHRATGGAPKFIRKLVEGIEDTVGVGKGATKIYATVDLEKARVGRTRMISNEPVNPRWYESFHIYCAHMXAADVIFTVKIDNPIGASLIGRAYLPVQDLLGGEEIDKWLEICDEKREPVGDSKIHVKLQYFDVCKDRNWARGVRSTKYPGVPYTFFSQRQGCKVTLYQDAHVPDNFVPRIQLADGKNYEPHRCWEXDIFDARSKDXCLISIEGWPVGTPSTLVRDTNRPKPGGDVTLGELLKRKASEGVRVLMLVWDDRTSVGLLKKDGLMATHDEETANYFHGTDVNCVLCPRNPDDSGSFVQDLQISTMFTHHQKIVVVDHEMPNQGSQQRRIVSFIGGIDLCDGRYDTQYHSLFRTLDTVHHDDFHQPNFEGGSIKKGGPREPWHDIHSRLEGPIAWDVLYNFEQRWRKQGGKDLLVRLRDLSDIIIPPSPVMFPEDRETWNVQLFRSIDGGAAFGFPETPEEAARAGLVSGKDQIIDRSIQDAYVNAIRRAKNFIYIENQYFLGSSYGWKPEGIKPEEIGALHLIPKELSLKIVSKIEAGERFTVYVVVPMWPEGVPESASVQAILDWQRRTMEMMYTDIAQALEANGIEANPKDYLTFFCLGNREVKQEGEYEPKEHPEHDTDYTRDHSRESXTIYVRTRXRMTGGLGILPGARSMASGCLFGTSTWECWKTSXRPKSAACRPGXARGQIRGFRRTLRYELEQVLPEPLPSPESVECVQKVNEVAEKYWDLYSSDDLEQDLPGHLLSYPIGVTADGSVTELPGMENFPDTRARVLGNKSDYLPPILTT

SEQ ID NO: 296104 - protein, 812 aa, Zea mays
  Clone ID: MRT4577_33123C.1.pep
MAQILLHGTLHATIFEAESLSNPHRATGGAPKFIRKLVEGIEDTVGVGKGATKIYATVDLEKARVGRTRMISNEPVNPRWYESFHIYCAHMAADVIFTVKIDNSIGASLIGRAYLPVQDLLGGEEIDKWLEICDENREPVGDSKIHVKLQYFDVGKDRNWARGVRSTKYPGVPYTFFSQRQGCKVTLYQDAHVPDNFVPRIQLADGKNYEPHRCWEDIFDAISKAQHLIYITGWSVYTEITLVRDTNRPKPGGDVTLGELLKRKASEGVRVLMLVWDDRTSVGLLKKDGLMATHDEETANYFHGTDVNCVLCPRNPDDSGSFVQDLQISTMFTHHQKIVVVDHEMPNQGSQQRRIVSFIGGIDLCDGRYDTQYHSLFRTLDTVHHDDFHQPNFEGGSIKKGGPREPWHDIHSRLEGPIAWDVLYNFEQRWRKQGGKDLLVRLRDLPDIIIPPSPVMFPEDRETWNVQLFRSIDGGAAFGFPETPEEAARAGLVSGKDQIIDRSIQDAYVNAIRRAKNFIYIENQYFLGSSYGWKPEGIKPEEIGALHLIPKELSLKIVSKIEAGERFTVYVVVPMWPEGVPESASVQAILDWQRRTMEMMYTDIAQALEANGIEANPKDYLTFFCLGNREVKQEGEYEPEEHPEPDTDYIRAQEARRFMIYVHTKMMIVDDEYIIIGSANINQRSMDGARDSEIAMGAYQPYHLATRQPARGQIHGFRMSLWYEHLGMLEDVFQRPESVECVQKVNEVAEKYWDLYSSDDLEQDLPGHLLSYPIGVTADGSVTELPGMENFPDTRARVLGNKSDYLPPILTT

SEQ ID NO: 296105 - protein, 840 aa, Zea mays
  unsure (1)..(840): unsure at all Xaa locations
  Clone ID: MRT4577_33124C.1.pep
MAQILLHGTLHATIFEAESLSNPHRATGGAPKFIRKXTTVLACSRERSCTALVPFDHSTLGSSXLVEGIEDTVGIGKGTTKIYATVDLEKARVGRTRMVSNEPVNPRWYESFHIYCAHMAADVVFTVKIDNPIGASLIGRAYLPVEDILGGDEIDKWLEICDEKREPIGDSKIHVKLQYFDVGKDRNWARGVRSTKYPGVPYTFFSQRQGCKVTLYQDAHVPDNFVPRIPLADGKNYEPHRCWEDIFDAISKAQHLIYITGWSVYTEITLVRDTSRPKPGGDVTLGELLKRKASEGVRVLMLVWDDRTSVGLLKKDGLMATHDEETANYFHGTDVNCVLCPRNPDDSGSFVQDLQISTMFTHHQKIVVVDHELPNEGSQQRRIVSFVGGIDLCDGRYDTQYHSLFRTLDTVHHDDFHQPNFEGGSIKKGGPREPWHDIHSRLEGPIAWDVLYNFEQRWRKQGGKDLLVRLRDLSDIIIPPSPVMFPEDRDTWNVQLFRSIDGGAAFGFPETPDEAARAGLVSGKDQIIDRSIQDAYINAIRRAKNFIYIENQYFLGSSYDWKPEGIKPEDIDCLHLIPKELSLKIVSKIEAGERFTVYVVVPMWPEGVPESASVQAILDWQRRTMDMMYTDITQALEANGIQTNPKDYLTFFCLGNREVKQEGEYQPEEHPEPGTDYIRAQEARRFMIYVHAKMMIVDDEYIIIGSANINQRSMDGARDSEIAMGAYQPYHLATRQPARGQIHGFRMSLWYEHLGMLDDVFQRPESVECVQKVNKIAEKYWDLYSSDDLEQDLPGHLLSYPIGVTADGTVTELPGMENFPDTRARVLGNKSDYLPPILTT

SEQ ID NO: 296106 - protein, 112 aa, Zea mays
  Clone ID: MRT4577_33125C.1.pep
IKCSWCADGRKVTAGSPVRMVYVWSTSSRRILGEPCGRYGSAKDLAFHPPDPIIGSSSNHKQISLGSLLVTIRSFSAPCSCDALMSIGGADTLFPSRTIASLRLPASGFDLC

SEQ ID NO: 296107 - protein, 812 aa, Zea mays; identical to SEQ ID NO: 296104
  Clone ID: MRT4577_33126C.1.pep

SEQ ID NO: 296108 - protein, 325 aa, Zea mays
  Clone ID: MRT4577_33127C.1.pep
MAQILLHGTLHATIFEAESLSNPHRATGGAPKFIRKLVEGIEDTVGIGKGTTKIYATVDLEKARVGRTRMVSNEPVNPRWYESFHIYCAHMAADVVFTVKIDNPIGASLIGRAYLPVEDLLGGDEIDKWLEICDEKREPIGDSKIHVKLQYLDVGKDRNWARGVRSTKYPGVPYTFFSQRQGCKVTLYQDAHVPDNFVPRIPLADGKNYEPHRCWEDIFDAISKAQHLIYITGWSVYTEITLVRDTSRPKPGGDVTLGELLKRKASEGVRVLMLVWDGRTSVGLLKKDGLMATHDEETANYFHGTDVNCVLCPRNPDDSGSFVQD

SEQ ID NO: 296109 - protein, 55 aa, Zea mays
  Clone ID: MRT4577_33128C.1.pep
YSMTKRLPLLFLAMVMLSDACSAADHRCGVLVLNVKVESTWAPVTLVDHHDSMIR

SEQ ID NO: 296110 - protein, 103 aa, Zea mays
  unsure (1)..(103): unsure at all Xaa locations
  Clone ID: MRT4577_33129C.1.pep
MYQTSTRRPIHQSSFTRYTPDVRGFMRRLSQDYLFVREFDAFIACVLIKCCRQKDNSDMXFMLDGVVYLSDAISWHMNETYRWIVYLARVTPLIASLECHSII

SEQ ID NO: 296111 - protein, 88 aa, Zea mays
  unsure (1)..(88): unsure at all Xaa locations
  Clone ID: MRT4577_3312C.1.pep
LRCTRTYVSSEFGSRYKDDLNSSWVRLSVVETGVCTMATFYSVFGDANIKTDSFSXAPTTVREIIGDVNGVKIRIIYSPGLRANVMDQ

SEQ ID NO: 296112 - protein, 87 aa, Zea mays
  Clone ID: MRT4577_33130C.1.pep
SPDLPYSRRRWKPLGAHRPWESRACVSPGSNNRRWLAQQGARSALRSEQLRTPLLASRFVAPPDLRQIDYASSLFRGARLLQARYWC

SEQ ID NO: 296113 - protein, 85 aa, Zea mays
  unsure (1)..(85): unsure at all Xaa locations
  Clone ID: MRT4577_33131C.1.pep
KLLTXTHMLSTKDEQSFRRXGQEQVPFAMHNIQTDSTDAPTEAVELRQLLPLYTNDFFCRVILGASHRNQCRNRLFSELTKINVS

SEQ ID NO: 296114 - protein, 99 aa, Zea mays
  Clone ID: MRT4577_33132C.1.pep
KKKKASCGRGAPSGARVLFLGSFLIKNCCLKKKKALLSALKFLKRGPPPPSTRFFPLLVCHPRGGFLGSWNTEFGFLKNPVASPSKGVSPFFLAFLSSF

SEQ ID NO: 296115 - protein, 93 aa, Zea mays
  unsure (1)..(93): unsure at all Xaa locations
  Clone ID: MRT4577_33133C.1.pep
VVPTRRCWEWNSTDARXIVKRLAVHSAEASTVSQSSKVWTPSLAAGTRVAVMVVAVLLRQNHKSVHVQLGCVDVWERWSLSYARPCVLGSRSP

SEQ ID NO: 296116 - protein, 105 aa, Zea mays
  Clone ID: MRT4577_33134C.1.pep
CSSSAPAQCDIQPKVHHSLPPPLPPLSCYRVSLLRSIIRYLVISPPLGLSATHEMFSGHYRSLIGPCRSQLVGPRARLEPTRGGMRALVRLSLGNPRTVKQPEAS

SEQ ID NO: 296117 - protein, 74 aa, Zea mays
  unsure (1)..(74): unsure at all Xaa locations
  Clone ID: MRT4577_33135C.1.pep
LAYVTHAMAQSLIKLTARKRHRHGXTQQLQSVRYIHLWHRVSCFIILACSSNNSPIGCSIFDVLQYLQSRQLRX

SEQ ID NO: 296118 - protein, 91 aa, Zea mays
  Clone ID: MRT4577_33136C.1.pep
YLSSDCRKIPLQSYCLFSFKLSSFVTSFLLLKCNWSLCLVYRRATVPVNLPSEGDSQSFLRGLALPPLRTTDVYVYEKVSVNVRHSREVCV

SEQ ID NO: 296119 - protein, 61 aa, Zea mays
  Clone ID: MRT4577_33137C.1.pep
CFTTYTISSNRIAIAMMSTVSCLYQSWWVAVGLGEAGAGARMRCGRRMRCPPPPRVRPRVR

SEQ ID NO: 296120 - protein, 88 aa, Zea mays
  Clone ID: MRT4577_33138C.1.pep
PGSHPRRPSPPSPSSLSRKRRQAQGPRATAAPRPCLLLYLYLFLFLLHCSRQAKGRGSKDPAAREDRLTRSHAARTVTSESRTRDRRA

SEQ ID NO: 296121 - protein, 98 aa, Zea mays
  Clone ID: MRT4577_33139C.1.pep
TMSETSSKCLTYGLKTSQFSKEIDETILFAYIYREIESVHNGVQSTHIFRISKADVYLLCLCFIAKLIASIFLYDIALLLDAGSSYQRTDFIVLPMIH

SEQ ID NO: 296122 - protein, 143 aa, Zea mays
  unsure (1)..(143): unsure at all Xaa locations
  Clone ID: MRT4577_3313C.1.pep
GRVGGRVGFFKRKADSNIGSSDSHHMERTTCSKSTGNIEELAVAATSAMDCTLCKENHLSMEELRMIHVAKWRTLFQHNRLRHWGVRRSPKIQLFLELRLQKPSTPIASDSMSTPTKEQSSLESTGNLDITKLLDEXEIPSRF

SEQ ID NO: 296123 - protein, 73 aa, Zea mays
  Clone ID: MRT4577_33140C.1.pep
AHWRIYYAFKVKVVLPTAGGVSPAPAANALSKAGASFFFLCYMLSHLVKSNSLFVIDLASYSILCNGKNFCIL

SEQ ID NO: 296124 - protein, 75 aa, Zea mays
  Clone ID: MRT4577_33141C.1.pep
RSAARSLASAPAASSIPRDEQQLPTKHADRGINIGIGSVISIRSQALGERIRPVLTVNKMDRCFLELQVEGEEAY

SEQ ID NO: 296125 - protein, 463 aa, Zea mays
  Clone ID: MRT4577_33142C.1.pep
MSCLPCSGSSGKEDKSLAALSPSPRPAAKAAPVRSNSRASSSRKEDSVPVRRGGNTAHGPAQIFSFRELAVATKNFRRDCLLGEGGFGRVYKGHMENGQVIAVKQLDRNGFQGNREFLVEVLMLSLLHHPNLVRLIGYCADGDQRLLVYEYMLLGSLENRLFGPAGKEPLDWNTRMKIAAGAAKGLEYLHDKANPPVIYRDFKSSNILLGEDYYPKLSDFGLAKLGPVGDKTHVSTRVMGTYGYCAPEYAMTGQLTLKSDVYSFGVVFLELITGRKAIDHTQPSGEQNLVAWARPLFRDRRKFCQLADPLLHGGYPKRGLYQALAVAAMCLQEQAASRPLIGDVVTALSYLAAHPYDPNAPSTKDSKTCPSTPRAKTHRRTTSVPDAQHAAESLILNFPDMRKETVRGGEFEKDRTEGSGSSSSSGRNDCLDVPRLLSVPNGKVCGEGNNIQKSTVKVGAREN

SEQ ID NO: 296126 - protein, 249 aa, Zea mays
  Clone ID: MRT4577_33143C.1.pep
GKKALASARMVPSSFCPAHVSLISVAPRIILVCLSFSWLSSRRWSLLPNVPKRAELLTVVRRYGLASGRSCLHHLRQLASPAALYATILYCCRSYRQTLCVASSLPLSTRLGSRRAMAAREGWQGLAMVVRHCYFRVPRYGRTPFHAVVSWLSPSPLSCIFNFKHCLQHRRCRAFFILDASNSFPSCATCPVKCETWPSTRWPSLGIRRRHRFSRQMLDETLDPRNCHHSNSFAASCVPAGETRSPRSV

SEQ ID NO: 296127 - protein, 71 aa, Zea mays
  Clone ID: MRT4577_33144C.1.pep
LGYVLVEAVDFKGERGLAIRRGDGLVLRPGEESNGQREQHRDPVPFTGSPWRSSWSVASVCISPRVRGRVG

SEQ ID NO: 296128 - protein, 65 aa, Zea mays
  Clone ID: MRT4577_33145C.1.pep
RSLSPFSYCLETQHGFVFYFTAIGVHIWDSCLSGELSFYFFTLINLTLSCFLILKKKKKKKKKKI

SEQ ID NO: 296129 - protein, 71 aa, Zea mays
  Clone ID: MRT4577_33146C.1.pep
PLPTTGPGRGSNYVLKPLAIYVAFFPIIFFPFTNHLFSLKILPGHCNGSFRSLLTPPPMLMGDNTLLIAVE

SEQ ID NO: 296130 - protein, 58 aa, Zea mays
  Clone ID: MRT4577_33147C.1.pep
LSDDRSIHITELALVHRLVIQSRVHTRPIEPALSGSSRAQMHAISNKVDEKRTRGRAG

SEQ ID NO: 296131 - protein, 70 aa, Zea mays
  Clone ID: MRT4577_33148C.1.pep
KPVMVQLRSRACFIIRIRTCDGEPGEGARSYQLYLLVQVSCAATAELSEYVLPARSCAGVWTPPSPAAFM

SEQ ID NO: 296132 - protein, 64 aa, Zea mays
  Clone ID: MRT4577_33149C.1.pep
GAGTSVIITELVYNATSMLLWVLDIPAGWRAALGEACLPSVPRGKEEPMNCSTIVSRQLMSALD

SEQ ID NO: 296133 - protein, 135 aa, Zea mays
  Clone ID: MRT4577_3314C.1.pep
ATTFFPFNQLFTLNPAVYLQQQQLFPFSQVVIAYFQQQQFFPFNQLAALNPFVYFHQQILLPFGQLVTTNPVSFLTQQQLLPFYHQFVANPPPFFQLHQLLPFVHLVLTNPAAFYQQHIIGGALLLDCLLVVIQK

SEQ ID NO: 296134 - protein, 158 aa, Zea mays
  Clone ID: MRT4577_33150C.1.pep
MATLSWWMEWSVENVREAFFSYFGENQHVRLPSTPVIPVDDPSVPLLHTCLHRFKGTLGGRERHRTCFSLRCIIASGDEDLIDRFRIDATFHRFTEILGNWPHGYYFKEEAIGLLFSLLTEKYKLPQSRIYASYFSGDMSSCLSSVDESRNTLQKYIG

SEQ ID NO: 296135 - protein, 55 aa, Zea mays
  unsure (1)..(55): unsure at all Xaa locations
  Clone ID: MRT4577_33151C.1.pep
YLDKTRKRFLWARGENPTRGKCKVXSNKXCGLGMLDSERFARALXLRWMWLQWAK

SEQ ID NO: 296136 - protein, 65 aa, Zea mays
  Clone ID: MRT4577_33152C.1.pep
PLTRVQPATFRVASIHSGHHQGDGMPGNTIDDDPPILGLLFFMSPFFPFDYGRLFFPPNFFTDPM

SEQ ID NO: 296137 - protein, 64 aa, Zea mays
  Clone ID: MRT4577_33153C.1.pep
EHQPEEWTGTRKWGKGGQEEVDTGDTSHLISDPRGVHRWGHKTQPAHWMARASNNLSVLHLRAR

SEQ ID NO: 296138 - protein, 520 aa, Zea mays
  unsure (1)..(520): unsure at all Xaa locations
  Clone ID: MRT4577_33154C.1.pep
MGIEILCLIFIFLLIRVLTRSYAASPSPPAMSAEAPLWLPPGPWQLPLIGSLHHLLLSRFSDLPHRALREMSGTYGPLMLLRLGSVPTLVASSAEAAREVMRSHDVAFCSRYLSASLDIISCGGRGVLFSPYNDRWRELRKVCMLELFNPRRVLSFRSVREEEVARLLRSISXSVAVAAGXAAAVVNLSEAICRMVNDVVVRTAIGDRCKHRDEFLRELDEAVRLTGGFSLADLYPSSRLVRWFSASARDMGRCQKNVYGIIGSIIRERDGARVPGRREDDLLGVLLRLQREGGLQFALTDEIVIAVIFDIFAAGSETSSTVLAWAMSELVRNPRVLHKAQSEVRETFKGQERLTEDDMPRLSYLHLVIKEALRLHAPVPLLLPRECREPCRVMGYDVPEGTRVFVNVWAIGRDDGFWGDGEVFRPERFDGGGGGVDFRGNDFEFTPFGAGRRICPGIALGLANMELALASLLYHFDWEQPADGPGTGSSGSLDMAEAFGITLRRKSKLLLKATPRVETK

SEQ ID NO: 296139 - protein, 212 aa, Zea mays
  Clone ID: MRT4577_33155C.1.pep
FDIFAAGSETSSTVLAWAMSELVRNPRVLHKAQSEVRETFKGQERLTEDDMPRLSYLHLVIKEALRLHAPVPLLLPRECREPCRVMGYDVPEGTRVFVNVWAIGRDDGFWGDGEVFRPERFDGGGGGVDFRGNDFEFTPFGAGRRICPGIALGLANMELALASLLYHFDWEQPADGPGTGSSGSLDMAEAFGITLRRKSKLLLKATPRVETK

SEQ ID NO: 296140 - protein, 49 aa, Zea mays
  unsure (1)..(49): unsure at all Xaa locations
  Clone ID: MRT4577_33156C.1.pep
LFVPCVKPPRHQSSSVFPPPPPPSIIFVXKKKCSLKINLKNLKKITFLS

SEQ ID NO: 296141 - protein, 51 aa, Zea mays
  Clone ID: MRT4577_33157C.1.pep
LTVWSWQRRFNTPRSSSNGPSATDSPFEFCTVTVAHILQSGYSFVIMVDHV

SEQ ID NO: 296142 - protein, 93 aa, Zea mays
  unsure (1)..(93): unsure at all Xaa locations
  Clone ID: MRT4577_33158C.1.pep
MEATVPSAAKSGCPWQPSRKSEAADLKQQXQKVAANAPPDAYNQRRYGFNRTISCMTSTINLSPALRQTRLFYSTLDMLTENISXXQARSHSW

SEQ ID NO: 296143 - protein, 81 aa, Zea mays
  unsure (1)..(81): unsure at all Xaa locations
  Clone ID: MRT4577_33159C.1.pep
AGGGADXVAPARAXEEWXAGKETRXAPKQEXXATLSQQSERXKMKHSRXSGKXSTLQTRHWSRMVWLDIILFLGQGMGSXI

SEQ ID NO: 296144 - protein, 148 aa, Zea mays
  Clone ID: MRT4577_3315C.1.pep
MACGSRSRTNEMVDEYEKLVLRMNPPRVTVDNDSDMTATLLKVYCANKYGTLLEVVQVLTDLKLTIKRAYISSDGEWFMDVFHVVDQDGNKLYDCQVIDRIEQSLGAGSLSFRGPPERAVAVEAEAEEAHTTIELVGRDRPSLLSEVF

SEQ ID NO: 296145 - protein, 52 aa, Zea mays
  Clone ID: MRT4577_33160C.1.pep
QGNRGCTRGAQQSFFRDMFRVLVIRRSHTSACVVPYGIFLAELLFVLSTPPV

SEQ ID NO: 296146 - protein, 60 aa, Zea mays
  Clone ID: MRT4577_33161C.1.pep
SKVKTEVQAFIIKGFSLSRYLLWASSGHFLATGGRFRLLSVGPLPLLGGRFAFLWPPFFP

SEQ ID NO: 296147 - protein, 84 aa, Zea mays
  Clone ID: MRT4577_33162C.1.pep
AQIPTRTQGKLSSANRPGKGYNIHNLGNGLSWGTEPSKNIGNGASQNPQGVRPIQALGALPGQKNKRAPHKGRNRLGFTPTMGR

SEQ ID NO: 296148 - protein, 110 aa, Zea mays
  unsure (1)..(110): unsure at all Xaa locations
  Clone ID: MRT4577_33163C.1.pep
KVDSITTIGAPLATKIFSFLRLLVLLPGVVTPPFFLNGYKVLYGSFFPHILSLIIWLECENPXLNLYALXHALSASDIPLXSPVVVXQSPDLYLVQTLVQXTIMAAQLLQ

SEQ ID NO: 296149 - protein, 218 aa, Zea mays
  unsure (1)..(218): unsure at all Xaa locations
  Clone ID: MRT4577_33164C.1.pep
MLSPIETHLAVPVHRHLVLFLLLGLAIASLATGDDQFVVTGFTQSSFNLEGAVTVTNGGLLDLSTGTSYLKGHALYPTPLHFRKTPNGKVQSFSACFVFSIVNTYPLLSDDGMAFFIATANTSFAGATPRMYFGLVNSKDDGKPSIRILAVELDTYKNSXLRDMWATHVGIDSKGAPSLSSAAAXXVHESGGAFRNLTLNDHSEMQLWVDYDERSTRI

SEQ ID NO: 296150 - protein, 108 aa, Zea mays
  Clone ID: MRT4577_33165C.1.pep
DDHDDLDNFNVLHLNVNLPVNYNDLLEDCKYDYDLYNDHYLQNLQVLLLGHHYLVLEMNRPPSVVDFSVARVVVLTESKLGETRAGLVFVHVHVPAFLATLFWGRLPG

SEQ ID NO: 296151 - protein, 79 aa, Zea mays
  unsure (1)..(79): unsure at all Xaa locations
  Clone ID: MRT4577_33166C.1.pep
GVAQQSPRAHVAILVVLALTLRRKPDVLINVXLPRYXXHSDYLRQHNLAIIVCDTAQSSDSDLPSGMLXXSHSLFPTLC

SEQ ID NO: 296152 - protein, 43 aa, Zea mays
  Clone ID: MRT4577_33167C.1.pep
TLRVFNLLYRARPKINYKSNEQNTFIKSPTNYSRKSLRHTLHM

SEQ ID NO: 296153 - protein, 86 aa, Zea mays
  Clone ID: MRT4577_33168C.1.pep
GANGLVVFLASEGSKNFSIICYAVKQHVSLFERIRKMERERERDFKKKQVCLPSQTCPQNSQPARSLHRLYDGWSTLYSFEIGLPD

SEQ ID NO: 296154 - protein, 277 aa, Zea mays
  Clone ID: MRT4577_33169C.1.pep
AQIDMALGRFDAAVAAAQKARDLDPGNAEIGMVLNNVRLVAKAREQGNDLFKAAKFSDASMAYGEGLKYDPSNSVLHCNRAACWSKLEKWEKAVDDCNEALRIQPNYTKALLRRAASYAKLERWVDCVRDYEVLRKEFPSDKEVAEALFHAQIALKATRGEDVSNMKFGGEVEMVSNVEQLHAAISSPGVTVVYFMSTMNQQCTQITPSINTLCTECPSVNFLKVNIDSSPTVAKAENARIVPTFKIYKGGVKVKEMICPSLHVLRYSVRHYSVSSS

SEQ ID NO: 296155 - protein, 226 aa, Zea mays
  unsure (1)..(226): unsure at all Xaa locations
  Clone ID: MRT4577_3316C.1.pep
MACGSRSRRTSETVDEYEKLVLRMNPPRVTVDNDSDMTATLVKXRRRSSAELFLLFLLLSLSGCSFDLCLLQVDSANKYGTLLEVVQVLTDLKLTINRAYISSDGEWFMDVFHVVDQDGNKLYDGQVIDRIEQSLGSGVAXSGARRSXVAVEAEAEEAQTTIELVGRDRPGLLXSRVFAVLADLRCNVVXSEVWTHDGRXAALVHVTDADTLGAIDDPARLDTVKR

SEQ ID NO: 296156 - protein, 71 aa, Zea mays
  unsure (1)..(71): unsure at all Xaa locations
  Clone ID: MRT4577_33170C.1.pep
GPPPPCVRYXWWSVSHGSFKLQMSLSRLVPPLHMKVVKVSAVRVMSRAPVGLIMDRLCCVCVLPRTMTNHE

SEQ ID NO: 296157 - protein, 101 aa, Zea mays
  unsure (1)..(101): unsure at all Xaa locations
  Clone ID: MRT4577_33171C.1.pep
KWGAGVFSDQNTGAXNLRGWNRRNRGIRDQEIVFWYTLGLPPKPSQGDFPVMPTLNGGFELRPSNFFEKNPIPKIGRPPIRSRASGNCLFKAKKRGPGQDT

SEQ ID NO: 296158 - protein, 69 aa, Zea mays
  unsure (1)..(69): unsure at all Xaa locations
  Clone ID: MRT4577_33172C.1.pep
PTHSRTRGRTRGLSTCWPTRGLRRLSRRSGSHNXLCLRRPPAVRPRSSRSPRRRFMLSMCSWPRILTPS

SEQ ID NO: 296159 - protein, 86 aa, Zea mays
  Clone ID: MRT4577_33173C.1.pep
SLGGSAPMPRQRRGLQTPWIRAASNSIRGTHQPTTSPAVAACASARNQTLAYQHESASDAKLAVASHDLPTRMKTEVGGARPGWSG

SEQ ID NO: 296160 - protein, 49 aa, Zea mays
  Clone ID: MRT4577_33174C.1.pep
VGGWTVVYDGLTFVTVRGAGHMVPSTQPQQALELFKHFLANTNLPSKPF

SEQ ID NO: 296161 - protein, 36 aa, Zea mays
  Clone ID: MRT4577_33175C.1.pep
KEQAWVGYISVIHDITYSRKSNISCQQSIHACKGQD

SEQ ID NO: 296162 - protein, 60 aa, Zea mays
  Clone ID: MRT4577_33176C.1.pep
MKVLIYFWFCRIIASLRANQLCERLPCPNGESTIDCHQISKMPNLAFAIANKSDLVKMTC

SEQ ID NO: 296163 - protein, 104 aa, Zea mays
  unsure (1)..(104): unsure at all Xaa locations
  Clone ID: MRT4577_33177C.1.pep
CTSAARVPLLXRHARTXKMADPAPEHRPPGEFVRENPLPTLIPEDTTLXTYCHETGTRLEIIAPNFRVGPDEHEVHASMRPPSLLQPMKPVNTETDERPCSSYY

SEQ ID NO: 296164 - protein, 64 aa, Zea mays
  Clone ID: MRT4577_33178C.1.pep
DYKRSMCASKQVAALLVLVTDSSTNPSLLRGGKPSLSEEQKDKILEECDRIIRVGYPIYVVAHA

SEQ ID NO: 296165 - protein, 146 aa, Zea mays
  Clone ID: MRT4577_33179C.1.pep
NHNAPPFSARFAEALGYYAALFDSLDAVAAATATASAAGDRAQVERMVLGEEIKNVLLCEGAGRLERHERLSQWAMYMDASGFRRVPLSFRAIRESELKLASFGMSGCRYQVESDGLLLGWGSTRLYSVSAWRPNKSGTRECTFRS

SEQ ID NO: 296166 - protein, 120 aa, Zea mays
  Clone ID: MRT4577_3317C.1.pep
SLSFRGPPERAVAVEAEAEEAQTTIELVGRDRPGLLSEVFAVLADLKCNVVASEVWTHERRVAALVHVTDADTLGAIEDPARLDTGRRLLRHVLGREQPRQEGRPPRRLGARGGARAAPA

SEQ ID NO: 296167 - protein, 105 aa, Zea mays
  Clone ID: MRT4577_33180C.1.pep
TFPHDWCEGFSTYPRTYDLIHSNGIFSLYQNKCQFEDILLEMDRILRPEGAVIIRDKVDVLVKVEKIANAMRWKTRLADHEGGPLVPEKILFAVKQYWTVAKTSS

SEQ ID NO: 296168 - protein, 179 aa, Zea mays
  Clone ID: MRT4577_33181C.1.pep
DNNLWRKHVEAYKKINNLLDTGRYRNIMDMNAGLGSFAAALESPKVWVMNVIPTIANTSTLGVIYGRVGERGLIGMYHDWCEGFSTYPSTQGRTHSNDIFSLYQNKCQFEDILLEMDRILRPEGAVIIRDKVDVLVKVEKIANAMRWKTRLADHEGGPLVPEKILFAVKQYWTVAKTSS

SEQ ID NO: 296169 - protein, 82 aa, Zea mays
  unsure (1)..(82): unsure at all Xaa locations
  Clone ID: MRT4577_33182C.1.pep
VRLSPSNKAVFTYEVVKEVPDEFASGEELPPSRIIXPLRPSMDRAREIHEIKTGGSLDSTNRDMHLINRGCKHYLNSYHIPT

SEQ ID NO: 296170 - protein, 381 aa, Zea mays
  Clone ID: MRT4577_33183C.1.pep
MASAATAVALVVVAALASLTQLAASECSAADRDALLSIRAALSEEERQLGVFSTWAAGTDCCAGWYGVACDPTTGRVADLSLRGEADDAVMAPAGRPASGVMSGYVSDAVCRLDRLSTLVLADWKRISGPIPACVATSLPYLRVLELPGNRLTGAVPPLGGGQSRLAVLNLAGNQLSGGIPASLTSLTELKHLDLAGNRLSGRVPPDLGRLRMLSRALLARNRLSGPIPASVASLPRLADLDLSENQLTGAIPEGLGAGPGNSGVLTTLYLGGNRLSGGVPASLLRSGGLGMLNLSRNALGGGVPDAFTPRSYFMLLDLSRNRLTGGVPRSLASAAYVGHLDLSHNRLCGTIPAGPPFDRLGAESFVGNSCLCGGPLGKCT

SEQ ID NO: 296171 - protein, 96 aa, Zea mays
  Clone ID: MRT4577_33184C.1.pep
IFLLFLFFVSFLYLFVFCFFTLKRPTVSLNRGTLNARKNSADKKKNPYRGKKPQPQGKPRKLLRAGPTRQPKGSWGLCQTKTLPRLVGQKLGGTFT

SEQ ID NO: 296172 - protein, 123 aa, Zea mays
  Clone ID: MRT4577_33185C.1.pep
THASRGVLTTLYLGGNRLSGGVPASLLRSGGLGMLNLSRNALGGGVPDAFTPRSYFMLLDLSRNRLTGGVPRSLASAAYVGHLDLSHNRLCGTIPAGPPFDRLGAESFVGNSCLCGGPLGKCT

SEQ ID NO: 296173 - protein, 117 aa, Zea mays
  unsure (1)..(117): unsure at all Xaa locations
  Clone ID: MRT4577_33186C.1.pep
RRAEKGSVWGSMYRINISXWHRHSQREARDNNVXTTEHRCXLVRPSGGKKNISTSVPLKEYTKLQASYTTVFKAHMHALKKRERKDKMKTEDAEKAXQTAPKRQKRASSKKSSGPNL

SEQ ID NO: 296174 - protein, 118 aa, Zea mays
  Clone ID: MRT4577_33187C.1.pep
PKKHPFFLIKKWGHHFFLQQNLAFLGYPPTHPNLLPFYTKSHPGGPYHDASILTSKIFLKHSTGLIGPPGNPRKFPPGPPGFPILPFIRASQNHGNNWLLCLLGKNSQPHTIYHHLPP

SEQ ID NO: 296175 - protein, 44 aa, Zea mays
  Clone ID: MRT4577_33188C.1.pep
KIFLKNVIRNPVTYTEHARRKTVTPMNFVYALKRQGPTLYGFEG

SEQ ID NO: 296176 - protein, 62 aa, Zea mays
  Clone ID: MRT4577_33189C.1.pep
EITCDPCSHVYVLHDNSHQCWGDYFMKDGCVCDTRCMILGTSHLADNDEEKRMKHHALAHGT

SEQ ID NO: 296177 - protein, 64 aa, Zea mays
  unsure (1)..(64): unsure at all Xaa locations
  Clone ID: MRT4577_3318C.1.pep
NTHXHGLSIIIILXHVXYVYLIFSCIRIIYIXQRMASSSLASSLLXSKCSRQRIASQKKKKKSG

SEQ ID NO: 296178 - protein, 38 aa, Zea mays
  Clone ID: MRT4577_33190C.1.pep
VIMNGYKQRSRKGEANTRKYLRWWRRRIKKIQCKGRDQ

SEQ ID NO: 296179 - protein, 114 aa, Zea mays
  Clone ID: MRT4577_33191C.1.pep
KPVFSPALLKKNWVIFFARSQKTPLHYPKAPGPSVLIFPGPPSYMDAIFFFPHPRLAAPLWTKTPPPVMWKFKTQKPLWAFLLRGPPAPFPSGLGGFKPLETLRVLKSRAFWFF

SEQ ID NO: 296180 - protein, 112 aa, Zea mays
  Clone ID: MRT4577_33192C.1.pep
AAAPLALGILQASRARLVGACCARLGPRWRLPGSWTCPRVDSTIWARGWTPAAGGAAWQRGYSAEVKTEDELRVRYLEEENRGIVVLGINRAYAKNSLSKNLIKMLSKAVDA

SEQ ID NO: 296181 - protein, 463 aa, Zea mays
  unsure (1)..(463): unsure at all Xaa locations
  Clone ID: MRT4577_33193C.1.pep
MDPKGKGIVINDKEESFVNEPKDDKPTDSGSGHKRKDGKKKKTRRIKEIVYYDYSDESTSSQKDNDDNDYRKPIWDTLRISHEGNDVTLLTKMELVEGELGRFAMIRGEEPTQTYNRLKTLINKIRSYGSTRWTNHDVVRLMLRSFTVLDPHLVNNIRENXVHQDVARRSSWEIXSGRMMIKEARYVDDALNGPIHEPQPIALKATRSKEALPSKVAQVEAAGLNDEEMTLIIKRFKTALKGRKGQPSKTKTKGKRSCFKCGKVGHFIANCPDNDSDQEQGNKREKKNYKKAKGEAHLGKEWDSDCSLSDSDNEGLAATAFNKSSLFPNEHHTCLMAREKKGLDRTKVDKINELIDALNDKNRLLEKQEDLLYDEHDKFVEAQKSLALEIKRNEMLSCELSTCHDSISSLKSINDDLNAKLEIANKSTSCVEHVVVCTRCKDFNVDACSEHLVSISKLNDKVV

SEQ ID NO: 296182 - protein, 57 aa, Zea mays
  Clone ID: MRT4577_33194C.1.pep
TNTLRVFDGWMDESLKSHFLAGLFRPYINHVHMRNEADDVHPIPFLKTNKNVRACDC

SEQ ID NO: 296183 - protein, 40 aa, Zea mays
  Clone ID: MRT4577_33195C.1.pep
QHIGQRILATWVGTTVTSAFFASLERCSCINLSTDDDDYD

SEQ ID NO: 296184 - protein, 522 aa, Zea mays
  Clone ID: MRT4577_33196C.1.pep
GLRLFPEYLSFAFGLPSKTGCDTGSGHKRKDGKKKKKTRRIKEIVYYDDSDESTSSQKDNDDNDYERRKPVNSNFSFDYSRIPQSTNAHLLSIPLGKPPHFDGEDYRFWSHKMRSHLFSLHPSIWEIVESGMKFDSLDSPMFINEQIHRNAQATIVLLASLCRDEYHKVSGLDNAKQIWDTLRISHEGNDVTLLTKMELVEGELGRFAMIRGDEPTQTYNRLKTLINKIRSYGSTRWTDHNVVRLMLRSFTVLDPHLVNNIRENPRYTKMSPEEVLGKFVSGRMMIKEARYVNDALNGPIHEPQPIALKATRSKEALPSKRFKTALKGRKGQPSKTKTKGKRSCFKCGKVGHFIANCPDNDSDQEQGNKREKKKNYKKAKGEAHLGKEWDSNCSSFDSDNEGLAATAFNKSSLFPNEHHTCLMAREKKGLDRTKVDKINELIDALNDKNRLLEKQEDLLYDEHDKFVEAQKSLALEIKRNEMLSCELSTCHDSISSLKSINDDLNAKLEIANKSTSCVEHVV

SEQ ID NO: 296185 - protein, 109 aa, Zea mays
  Clone ID: MRT4577_33197C.1.pep
MALIIKRFKTTLKGCKGQPSKTKTKGKRSCFKCGKEQGNKREKKKNYKKAKGEAHLGKEWDSDCLSSDSDNEGLAATAFDNSSLFPNEHHTCLMAREKKIARKARGSLI

SEQ ID NO: 296186 - protein, 554 aa, Zea mays
  Clone ID: MRT4577_33198C.1.pep
MELVEGELGRFAMIRGEEPTQTYNRLKTLINKIRSYGSTRWTDHDVVRLMLRSFTVLDPHLVNNIRENPRYTKMMPEEILRKFVSGRMMIKEARYVDDALNGPIQEPQTIALKATRSKETLPSKVAQVEAAVLNDEEMALIIKRFKAALKGRKGQPNKNKTKGKHSCFKCGKIGHFIANCPDNDSDQEQGNKREKKKAYKKAKGEAHLGKEWDSDCLLFDSDNEGLAATAFNKSSLFPNEHHTCLVAREKKVSTRNTSTYASSSDEESSDDEIDYSCLFKGLDRTKVDKINELIDALNDKNRLLEKQEDLLYEEHDKFVEAQKSLALEIKRNEMLSCELSTCHDSISSLKSINDDLNAKLEIANKSTSCVEHVAICNRCKDFNVDACSEHLVSISKLNDEVASLNAQLKTSKSEFDKIKFARDSYTIGRHPSIKDGLGFKREVKNLTSHKVSISAKEKGKAPMSSSVQKNHAFMYHDRRHSRNNYRSYDAFNSHAMTASSSSIMHDRNLTRKNVIHHMPKRNVTHVPRKINEPSINYHTGNASFAICRKDRLGI

SEQ ID NO: 296187 - protein, 79 aa, Zea mays
  Clone ID: MRT4577_33199C.1.pep
SATTQWPPLGDGGAAAAVASNNLVMSFGEMLIDYVPDEVVMALNDKRALNIATRKLATHNRLNNNRDEMMLRLRKMRSG

SEQ ID NO: 296188 - protein, 563 aa, Zea mays
  Clone ID: MRT4577_3319C.1.pep
MDPPNPNPNDAPSLPAESAARLAALSLCGTRDLPPDFHTAEILDDDEGYLTSASRGGSSTSAWKEAPEGLHDDDKDGDDVSQPSPRSSGYAGERGSSLDDDADPDPDPDQDWARGKKHPHEDDASSSWRKRKKHFFILSNSGKPIYSRYGDEHKLAGFSATLQAIISFVENSGDHIKFVRAGKHQIVFLVKGPIYLVCISCTEESYEGLRGQLELMYGQLLLILTKSVNKCFEKNPRFDMATLLGGTDAVFLSLIHAFSWNPATFLHAYTCLPLAQSTRQAASAVLQDIADSGVLFALLMCEHKVISLVGAQKATLHPDDILLLANFILSSGSFRTSESFVPICLPRYNPMAYLHAYVHFFDEHTYVTLLTTRSDAFYDLKDSRAHIQNALLKSNVLIEVQRSLHENALRVEDLPTNPSSQSASHPPESSQDISSQSLSSEMAIGGPGGLWHFIYKSIYLDQFVSSEFPSPISNKKQKKGLYKAYQKLYASMHDKATGPHKTQFRRDEDYVLFCWITQDFELYAAFNPLADKTQAIKMCNRVCQWVRDLENEIFVYGESTLSW

SEQ ID NO: 296189 - protein, 453 aa, Zea mays
  unsure (1)..(453): unsure at all Xaa locations
  Clone ID: MRT4577_331C.1.pep
MRECISIHIGQAGIQVGNACWELYCLEHGIQADGQMPGDKTIGGGDDAFNTFFSETGAGKHVPRAVFVDLEPTVIDEVRTGTYRQLFHPEQLISGKEDAANNFARGHYTIGKEIVDLCLDRIRKLADNCTGLQGFLVFNAVGGGTGSGLGSLLLERLSVDYGKKSXKLGFTVYPSPQVSTXSVVEPYNSVLSTHSLLEHTDVAILLDNEAIYDICRRSLDIERPTYTNLNRLVSQVISSLTASLRFDGALNVDVNEFQTNLVPYPRIHFMLSSYAPVISAEKAYHEQLSVAEITNSAFEPSSMMAKCDPRHGKYMACCLMYRGDVVPKDVNAAVATIKTKRTIQFVDWCPTGFKCGINYQPPSVVPGGDLAKVQRAVCMISNSTSVVEVFSRIDHKFDLMYAKRAFVHWYVGEGMEEGEFSEAREDLAALEKDYEEVGAEFDEGEDGDEGDEY

SEQ ID NO: 296190 - protein, 627 aa, Zea mays
  unsure (1)..(627): unsure at all Xaa locations
  Clone ID: MRT4577_33200C.1.pep
MDPKGKGIVINDKEKESFINEPKDDKPTDSGSGHKCKDGKKKKTRRIKEIVYYDDSDESTSSQKDNDDNDYERRKPVNSNFSFDYSRIPQSTNAHLLSIPLGKPPHFDGEDYGFWSHKMRSHLFYLHPSIWEIVESGMKFDSSDSPMFINEQIHRNAQATTVLLASLCRDEYHKVSGLDNAKQIWDTLRISHEGNDVTLLTKMELVEGELGRFAMIRGEEPTQTYNRLKTLINKIRSYGSTQWTDHDIVRLMLRSFTVLDPHLVNNIRENPRYTKMSPEEVLGKFVSGRMMIKEARYVNDALNGPIHEPQPIALKATRSKEALPSKVAQVEAAGLNDEEMALIIKRFNTALKGRKGQPSKTKTKGKCSCFKCGKVGHFIANCPDNDSDQEQENKREKKKNYNKAKGEAHLGKEWDSDCSLSDSDNEGLAATAFNKSSLFPNEHHTCLMAREKKVSTHNTSTYASSSDEESSDDEVDYSCLFEGLDRTKVDKINELIDALNDKNRLLEKQEDLLYEEHDKFVEAQKSLALEIKGNEMLSCELSTCHDSISSLKSINDDLTAKLEIGNKSTSCVEHVAICNRCKDFNVDACSEHLVSISNLNDEVASLNAQLKTSKSVFXQTKIARDPE

SEQ ID NO: 296191 - protein, 115 aa, Zea mays
  Clone ID: MRT4577_33201C.1.pep
NQIYTRTRRGAPGTFKTLWGTTTPSRRRKQRAPPQRHHKTTRHETTPTTFATPQPPSPRTAKQKTASRRSPTTKTTAPKTNNEEAPDRDTAPEPKGDNKGTAARTPHPERGNTPR

SEQ ID NO: 296192 - protein, 47 aa, Zea mays
  Clone ID: MRT4577_33202C.1.pep
RGPQLHLLSVHSILPASKELNGPHGHQSFAERTMDAPGVIQTNGPGD

SEQ ID NO: 296193 - protein, 1710 aa, Zea mays
  unsure (1)..(1710): unsure at all Xaa locations
  Clone ID: MRT4577_33203C.1.pep
MDPKGKRIVINDKEKESFVNEPKDDKHTDSGSGHKRKDGKKKKTRRIKEIVYYDDSDESTSSQKDNDDNDYERRKPVNSNFSFDYSRIPQSTNAHLLSIPLGKPPHFDGEDYGFWSHKMRSHLFSLHPSIWEIVESGMKFDSSDSPMFINEQIHRNAQATTMLLASLCRDEYHKVSGLDNAKQIWDTLRISHEGNDVTLLTKMELVEGELGRFAMIRGVEPTQTYNRLKTLINKIRSYRSTRWTDHDVVRLMLRSFTVLDPHLVNNIRENPRYTKMWPEEVLGKFVSGRMMIKEARYVDDALNGPIHEPQPIALKATRSKEALPSKVAQVEAAELNDEEMALIIKRFKTALKGRKGQPSKTKTKGKRSCFKCGMVGHFIANCPDNDSDQEEGNKREKKKNYKKAKGEAHLGKEWDSDCSSSDSDNEGLAATTFNKSSLFPNEHHTCLMAREKKVSAHNTSTYASSSEDESSDDDEIDYSCLFKGLDRTRVDKINELIDALNDKNRLLEKQEDLLYDEHDKFVEAQKSLALEIKRNEMLSCELSTCHDSISSLKSINDDLNAKLEIANKSTSCVEHVVLCTRCKDFNIDACSEHLVSISKLNDEVASLNAQLKTSKSEFDKLKFARDAYTIGRHPSIKDGLGFKREAKNLTSHKAPIPAKEKGKAPMASSAKRNHAFMYHDRKQSYKSCNAYDAFDSHAMFASSSSYMHGKDMSRRXCSYAXRNVVNVPRKVNEPSTIYHALNASFAICRKDRKIVARKLGAKCKGDKTCIWVPKTIVTNLVGPNKSWVYASGGSSWIIDSGCTNHMTGEKKMFTSYVKNKDSQDSIIFGDGNQGKVKGLDVSVIRRSDGSLAFKGVLDDTLYLVDFAKEEAGLDACLIAKTNMGWLWHRRLAHVGMKNLHKLLKGEHVTGLTNVQFEKDRPCAACQAGKQDKSETQGTLKRFLRRAQNEFELKVKKIRSDNGSEFKNLQVEEYLEEEGIKHEFSAPYTPQQNGVVERKNRTLIDMARTMLGEFKTPERFWSEAVNTACHAINRVYLHRLLKKTSYELLTGNKPNVSYFRVFGSKCYILVKKGRNSKFAPKVVEGFLLGYDSNTKAYRVFNKSSGLVEVSSNVVFDETNGSPREQVVDYDDVDEEEVPTTAIRTMAIGDVRPQEQDEQDQPSSSTMVQPPTQDDEQEACDQGGAQDDHVMEEEAQPAPPAQVRAMIQRDHPVDQILGDISKGVTTRSRLVNFCEHYSFVSSIEPFRVEEALLDPDWVLAMQEELNNFKRNEVWTLVPRPKQNVVGTKWVFHNKQDEHGVVTRNKARLVAKGYAQVAGLDFEETFAPVARLESIRILLAYAAHHSFRLFQMDVKSAFLNGPIKEEVYVEQPPGFEDERYPDHVCKLSKALYGLKQAPRAWYECLRDFLIANAFKAGKADPTLFTKTCDGDLFVCQIYVNDIIFGSTNQKSCEEFSRVMTQKFERSMMGELSYFLGFQVRQLKDGTFISQTKYTQDLIKRFGMKDAKPQRLQWEPTDTPTSTKEECHLVAVKRILRYLVATPCFGIWYPKGSTFDLIGYSDSDYAGCKVDRKSTSGTCQFLGRSLVSWSSKKQTSVALSTAEAEYVAAGQCCAQLLWMRQTLRDFGYNLSKVPLLCDNESAIRMADNPVEHSRTKHIDIRHHFLRDHQQKGDIEVFHVSSENQLADIFTKPLDEQTFCKLRSELNVLDSRNLD

SEQ ID NO: 296194 - protein, 280 aa, Zea mays
  Clone ID: MRT4577_33204C.1.pep
SGKDVTTIQPFRYDPDASLRKFYLAVIMHEYPFNIVEHDYFVDFIKSLRPNFAFKSRVTARKDILDIYFEEKEKLYAQLKNVTCRFSATMDIWTSCQNKSYMCVTLHWIDDSWHIQKRIVGFFHVEGRHTGIKLAQCFTEVMVKWFAEKKLFSLTLDNASNNLVAVKDIIQDLRVNASSCLICDGIFFHIRCACHILNLVARDGLAVISKALEKIKDLVLTVKGSPLQWEELMKRATECGLDTSKGIQLDVSTRWNSTYMMLRDALHYVCLMSEIVIPNS

SEQ ID NO: 296195 - protein, 91 aa, Zea mays
  Clone ID: MRT4577_33205C.1.pep
MAHRAVATMTTNKPLLLVALASALLGAAPAAANSPGGAFITWVAMIQQSYALSAQNSIGDGGTEPLDEKLSDAEKNKVTYVVDPRGTGYYT

SEQ ID NO: 296196 - protein, 34 aa, Zea mays
  Clone ID: MRT4577_33206C.1.pep
PSNDLDCYLLASCTLQTNIRGEYLKAKSCVCVTC

SEQ ID NO: 296197 - protein, 219 aa, Zea mays
  unsure (1)..(219): unsure at all Xaa locations
  Clone ID: MRT4577_33207C.1.pep
MAAGTHQRTVEVRESVELTEEEERIFARLLDVVRHFGLGTQLRVAGGWVRDKLLGKGSADIDIALDNMTGQNFCERVNEYSKFMGEEQKGIGVIQCNPDQSKHLETARMLIYGIWIDFVNLRSEKYAENSRIPTVEIGTAKEDALRRDLTINSLFFNINTKSVEDLTGRGLEDLKKGLIDTPLPAKSPFLDDPLRVXLRAIRFAARFSFTLAEDLKEPL

SEQ ID NO: 296198 - protein, 52 aa, Zea mays
  unsure (1)..(52): unsure at all Xaa locations
  Clone ID: MRT4577_33208C.1.pep
HVWIHNFFDEFNYNKSSINXKKTFYPIIFLPHNFCKKIPGTRPMTIINRAVL

SEQ ID NO: 296199 - protein, 178 aa, Zea mays
  Clone ID: MRT4577_33209C.1.pep
NPKQLLKQIATIYVHIARGDKEAVFPAAISKDGRSYSEQLFASATNILWKIGVDPQIIQEFMQLAGKAKAAAAEAMDAEAILGDIPDEFLDPIQYTLMNDPVILPSSRVTVDRPVIVRHLLSDSTDPFNRSQLTQDMLIPDTDLKLRIEEFVRSQQSRKRRAVDTQTGEPDGAADMVE

SEQ ID NO: 296200 - protein, 148 aa, Zea mays
  unsure (1)..(148): unsure at all Xaa locations
  Clone ID: MRT4577_3320C.1.pep
GGWGXVVCGGXFCFWVGVVLCAGGVVRFWCVGDXCLLXGEDMVCGFGVLGVGGGXGSVRSIGMQACGSTCPFWSVRPCSGCLPALLFSLCGALRFWVRGVRCCLCRLCGXFLLFRLMFAGRVLPVVLFAVARLGPEVVRCRSWPSSYS

SEQ ID NO: 296201 - protein, 63 aa, Zea mays
  Clone ID: MRT4577_33210C.1.pep
KKRDKTIEKKNILNRKLKMARNFMVQAKKLIKAKSISRQKIGTTHYNKKELASLKTLKLSSYN

SEQ ID NO: 296202 - protein, 88 aa, Zea mays
  Clone ID: MRT4577_33211C.1.pep
LVTLVWRRSDLVMLRHLCKAGMMGSHQAGPAALESATSVPSVGPPRVASARARPSHRPCSRRSGHRGPCPRGGPPLSSLESAAFRTAA

SEQ ID NO: 296203 - protein, 139 aa, Zea mays
  Clone ID: MRT4577_33212C.1.pep
HDSKAGLVRALNFSMLAPDTAHTHRSCLGWHGSTKPILFNLFNLVTYKLYIIVIFRLLCGQMMLPLFNIFNLVRHELYMVVIFGFYAVQIYRLARRNEDTECFRAEAGSLFLLFRPARHDQKNLGLLDSNPFGFKYGPT

SEQ ID NO: 296204 - protein, 51 aa, Zea mays
  unsure (1)..(51): unsure at all Xaa locations
  Clone ID: MRT4577_33213C.1.pep
DVXPSELPPECPPIRGIEHQIDLIPGASLPNRAFSRHQCSCPRRLVARRIS

SEQ ID NO: 296205 - protein, 88 aa, Zea mays
  unsure (1)..(88): unsure at all Xaa locations
  Clone ID: MRT4577_33214C.1.pep
GRPPPXPQPNLILGSHPGTTPITTQRNKKKNGPQQSNAPPPARSSLPKKRAHQHLAAPAPTRAAVVTVPDPAGDSAPGHIQATDLHRT

SEQ ID NO: 296206 - protein, 54 aa, Zea mays
  Clone ID: MRT4577_33215C.1.pep
QAPVSSYQRTTPHPVQALRPPSPSPDMNATVQSASVSALFRTHRLLARLRGSRP

SEQ ID NO: 296207 - protein, 83 aa, Zea mays
  Clone ID: MRT4577_33216C.1.pep
GGGEVGLVELRRDSVVATRRGAGRLAAARKTSAKKINISLSTKNRQHLPHTGKFPKPVNKSNNMMTNVHICFNGTIAKNHIYI

SEQ ID NO: 296208 - protein, 107 aa, Zea mays
  unsure (1)..(107): unsure at all Xaa locations
  Clone ID: MRT4577_33217C.1.pep
MGTATTNGAEQAAPPAPKNXGRTGXNGGXXGGXXAARGNPXXNGAGRXENRAQXEADXDAAAPTHXXNAAGXTGRPNXDGXETHRAETNRANXRGTPTXADXXRGRG

SEQ ID NO: 296209 - protein, 191 aa, Zea mays
  Clone ID: MRT4577_33218C.1.pep
MASMAFALAGAFKGLSLAPTTTTSSFPRCDRASLSVGGAAGVPAVPVPARRLTIQMAHKKGAGSTKNGRDSKGQRLGVKIYGDQLAKPGAIIIRQRGTRVYPGNNVGMGKDHTLFSLIDGLVKFEKYGPDKKKVSVYPYEKEPENPNSYRARKREYFRMRRERKKARAEGAAEPQLVLAAVDENSEVSADC

SEQ ID NO: 296210 - protein, 89 aa, Zea mays
  Clone ID: MRT4577_33219C.1.pep
HQELDVPNFAPACQISPSCTFLLYSSTPATKHYRFYTPASILACLVLIQAALPGSSCNSRLWNFLCTWGVDCLLACFEPNKQTPKALLN

SEQ ID NO: 296211 - protein, 61 aa, Zea mays
  Clone ID: MRT4577_3321C.1.pep
SPVQIQPTNHYRPTSLLCHGLHPSKVHFTSGSLLIKEDDCDLILWIYTNSLLTFATHDVHS

SEQ ID NO: 296212 - protein, 68 aa, Zea mays
  Clone ID: MRT4577_33220C.1.pep
LFLLESWIVSYFFVVNLLRRVFVYQGLFWTFFLLNIMMCSSPARSRKNILHTLYQFRYIEDDLRLGLT

SEQ ID NO: 296213 - protein, 91 aa, Zea mays
  unsure (1)..(91): unsure at all Xaa locations
  Clone ID: MRT4577_33221C.1.pep
MTQRLLLALSLIASETAVPDVIQHGTGRPYRSLLWRGSFSYGGEGXSXRLAEFFSNPARGAPCTPAGGLHSATTRRDLGTRLTPPPTASTC

SEQ ID NO: 296214 - protein, 92 aa, Zea mays
  Clone ID: MRT4577_33222C.1.pep
LKLVPLSVHVGRMGMVGLLHKAFAYFARTQEGFLEIDEPRGSLAVALGQIKERVFNAIFRAVSPVMVGRLGSDKFAALLKAGPDWRKALGQF

SEQ ID NO: 296215 - protein, 90 aa, Zea mays
  Clone ID: MRT4577_33223C.1.pep
KKKKNPPYLPRKTGFFLGAMAPSPWAVFFARGQEQPHVRSYPLFLVPITSPENFFFFLWNKNMIPSLKEQQGGLGKGVFFAIPTPILPPG

SEQ ID NO: 296216 - protein, 110 aa, Zea mays
  unsure (1)..(110): unsure at all Xaa locations
  Clone ID: MRT4577_33224C.1.pep
LTRGLWDFLLXEVIQDHGDRKNLNGNRENESDDFIYILLYRYXEYCFTIDNVKCLLMNLFYATIETSYLVLEFAMAELMNHRTVMKKLQAEVQAYXAYNKLDMISEDYLS

SEQ ID NO: 296217 - protein, 62 aa, Zea mays
  Clone ID: MRT4577_33225C.1.pep
VISQRAVDGSTNSSVHDLRVCVVSSSPLDIQQQLCWLRQRAPQILPVNSLSCTSSMARAQPP

SEQ ID NO: 296218 - protein, 65 aa, Zea mays
  Clone ID: MRT4577_33226C.1.pep
YTQRTLDQSYNNRTPSLKSTPSSALLPTTPCPHPHSDHHTRAHSNNPTPCYPPSALPTTSESHLL

SEQ ID NO: 296219 - protein, 87 aa, Zea mays
  unsure (1)..(87): unsure at all Xaa locations
  Clone ID: MRT4577_33227C.1.pep
EDHTFYQSFYALQAEENWDFSYLLDILICSGFIVSRLGSSFVGHVTSXGYPGGLDVFDRVERKYYKIVTWSYAERRFVSDLMNLIFS

SEQ ID NO: 296220 - protein, 344 aa, Zea mays
  unsure (1)..(344): unsure at all Xaa locations
  Clone ID: MRT4577_33228C.1.pep
MATRCCLVVATLLAALLSVSASLEFGFYNKTCPSAEAIVQQTVAAAFTNNSGVAPALLRMHFHDCFVRGXCDGSVLIDSTANNKAEKDSIPNSPSLRFFDVVDRAKASLEARCPGVVSCADILAFAARDSVVLTGGLGYKVPSGRRDGRISNATQALNELPPPFFNATQLVDNFASKNLSLEDMVVLSGAHTIGVSHCSSFAGINNTGDRLYNFSGSSDGSICPSNSGRFFPNTTTFMDLITPAKFDNKYYVGLTNNLGLFESDAALLTNATMKALVDSFVRSEATWKTKFAKSMLKMGQIEVLTGTQGEIRRNCRVINPANAAADVVLASQPDSSGSTGVAAS

SEQ ID NO: 296221 - protein, 442 aa, Zea mays
  Clone ID: MRT4577_33229C.1.pep
MAPSPWPLLATSLLLILFHHSPRAAAAFPPSLGDGLLGAARAPGFAAWLRGLRRRIHERPELAFQEHRTSELVRDELDAIGVPYAWPVAQTGVVATIAGGSDGPVVALRADMDALPLQELVDWEHKSKENGKMHACGHDAHTTMLLGAAKLLHARKDDLKGTVKLVFQPGEEGYGGAYHVLREGVLDDVSAIFGLHVDPGLPVGTVSSRPGPFLAAAGRFLVTVTGKGGHAAGPQDAVDPIVAASSAIVSLQLLVAREIDPLQAAVVSVTFMKGGDAYNVIPESASFGGTFRSLTTEGFSYLMKRIKEIIEGHAAVHRCTAAVDFMQEKLRPYPATVNDEGMYRHAREVAEAMLGQDKVSVGAQMMGAEDFSFYAEKFAGAFFMIGVRNKSMEEAMHPLHSPYFVIDEDVLPVGAAFHSAVAMEYLNKYSTTRQTELLRIEL

SEQ ID NO: 296222 - protein, 213 aa, Zea mays
  Clone ID: MRT4577_3322C.1.pep
CGNDTSWTTNYQQGVFTSPKTISREACPPGFGSGENQGNGTPWYMSSKQRAFTSPSFTSPTTISREVGLPGYGQENQGNGASWNMSYEQGVFMSPTDISREVGPPGYGPAENQGNTTSWISTGNKQRMFTASTIPNEVGLPGYSPVGIQGTGGSRSMNLEAFPPGYGPGENHLGGASGSVINPQARSQESVEFSDETRRKAIQRELRRRQKFR

SEQ ID NO: 296223 - protein, 55 aa, Zea mays
  Clone ID: MRT4577_33230C.1.pep
FALALAFAGCRRPFSKAPALCFFSRPYQRVFDVKTQLNPQTTDHSGITLYPVSTI

SEQ ID NO: 296224 - protein, 328 aa, Zea mays
  Clone ID: MRT4577_33231C.1.pep
ASAAAARNPVVACHDYALLPGRRHSPRGAALGQCQPRVRFLQQDVLIDSTANNKAEKDSIPNSPSLRFFDVVDRAKASLEARCPGVVSCADILAFAARDSVVLTGGLGYKVPSGRRDGRISNATQALNELPPPFFNATQLVDNFASKNLSLEDMVVLSGAHTIGVSHCSSFAGINNTGDRLYNFSGSSDGIDPALSKAYAFLLKSICPSNSGRFFPNTTTFMDLITPAKFDNKYYVGLTNNLGLFESDAALLTNATMKALVDSFVRSEATWKTKFAKSMLKMGQIEVLTGTQGEIPPPPRVINPANAAADVVLASQPDSSGSTGVAAS

SEQ ID NO: 296225 - protein, 105 aa, Zea mays
  Clone ID: MRT4577_33232C.1.pep
SRSITRRERERGRDRTGGQQATGTNRRRPFTGGGRRDRGRDAFLFFFFTHTRTGPWSRTPEHPDSDSASSCEAASDAPQIKVSSKKKPAAEQQREETEEQGSSGA

SEQ ID NO: 296226 - protein, 388 aa, Zea mays
  unsure (1)..(388): unsure at all Xaa locations
  Clone ID: MRT4577_33233C.1.pep
MTTRCCLVVATLLAALLSVSASLEFGFYNKTCPSAETIVQQTVAAAFTNNSGVAPALLRMHFHDCFVRGCDGSVLIDSTANNKAEKDSIPNSPSLRFFDVVDRAKASLEARCPGVVSCADILAFAARDSVVLTGGLGYKVPSGRRDGRISNATQALNELPPPFFNATQLVDNFASKNLSLEXDMVVLSGAHTIGVSHCSSFAGINNTGDRLYNFSGXRRGKFPLRPSSHPYRGLIQLMRPXLLYICSTDGIDPALSKAYAFLLKSICPSNSGRFFPNTTTFMDLITPAKFDNKYYVGLTNNLGLFESDAALLTNATMKALVDSFVRSEATWKTKFAKSMLKMGQIEVLTGTQGEIRRNCRVINPANAAADVVLASQPDSSGSTGVAAS

SEQ ID NO: 296227 - protein, 357 aa, Zea mays
  Clone ID: MRT4577_33234C.1.pep
MTTRCCLVVATLLAALLSVSASLEFGFYNKTCPSAETIVQQTVAAAFTNNSGVAPALLRMHFHDCFVRGCDGSVLIDSTANNKAEKDSIPNSPSLRFFDVVDRAKASLEARCPGVVSCADILAFAARDSVVLTGGLGYKVPSGRRDGRISNATQALNELPPPFFNATQLVDNFASKNLSLEDMVVLSGAHTIGVSHCSSFAGINNTGDRLYNFSGSSDGIDPALSKAYAFLLKSICPSNSGRFFPNTTTFMDLITPAKFDNKYYVGLTNNLGLFESDAALLTNATMKALVDSFVRSEATWKTKFAKSMLKMGQIEVLTGTQGEIRRNCRVINPANAAADVVLARQPGSSGSTGVATS

SEQ ID NO: 296228 - protein, 170 aa, Zea mays
  unsure (1)..(170): unsure at all Xaa locations
  Clone ID: MRT4577_33235C.1.pep
AANKNTSRGLWARVFWPSPESSAAPLPAEGYLHRVVGTFXXAAXYVEEAVCLRVCRELGAVGGSFNYRLAPKHRWPAGYQDGGALLQYLGSAGLPDSVHVPVDLSRCFLFGDSACANISHHVGQRWTTASSPPWGIPVRLGGALLVQPFFGGEERTEPEVRLDRNLPVGD

SEQ ID NO: 296229 - protein, 84 aa, Zea mays
  Clone ID: MRT4577_33236C.1.pep
IIKSLGGWAFLGGFSKKKGFFFYPIGVVFSPRRPNFWVWTCLFFKKKKKKKKKKKKKKKKKKKKKKKKKKKKKKKKKKKKKKPP

SEQ ID NO: 296230 - protein, 53 aa, Zea mays
  Clone ID: MRT4577_33237C.1.pep
KTYTHGCLHIALGNKYDLFPTHMANTNVQRPIIHTHLTMQRNAMQTHDMHLTP

SEQ ID NO: 296231 - protein, 96 aa, Zea mays
  unsure (1)..(96): unsure at all Xaa locations
  Clone ID: MRT4577_33238C.1.pep
KGNRGSSQTGDWGGALACTLWGHPPLTLAEFPKGGSQDFXDIWVKEGXNLPRAFSXNTGVGLVGTAPGCPNGSPTPPHIKTHAWGGNSNYQVPFCP

SEQ ID NO: 296232 - protein, 52 aa, Zea mays
  Clone ID: MRT4577_33239C.1.pep
VKGPRPVDRRSSSLLNLVTDYDRNVLSMGRILIPKFCNQACLSLCINPSCKI

SEQ ID NO: 296233 - protein, 242 aa, Zea mays
  unsure (1)..(242): unsure at all Xaa locations
  Clone ID: MRT4577_3323C.1.pep
MDPPNPNPNDAPSLPAESAARLAALSLCGTRDLPPDFHTSEILDDDEGYLTSASRGGSSTSAWKEAPEGLHDDDKDGDDVSQPSPRSSGYAGERGSSLDDDADPDPDPDQDXARQEASPRGELVTDLRQSPSTWASPQAAVDXALMFQDDASSSWRKRKKHFFILSNSGKPIYSRYGDEHKLAGFSATLQAIISFVENSGDHIKFVRAGKHQIVFLXEXPIYLVCISCTEESYEGLRGQLEL

SEQ ID NO: 296234 - protein, 112 aa, Zea mays
  Clone ID: MRT4577_33240C.1.pep
CDGPEQEEGVQFLEGDNKVEEVEEGEEVDSSDATTGSAAVLGNSCNDPNVEEVVAVMEEQFTEPHEGIVKEQDPISVDRSASVEVMDDSPFLGVIEKKHDASFEDCEDLADF

SEQ ID NO: 296235 - protein, 76 aa, Zea mays
  Clone ID: MRT4577_33241C.1.pep
EVTFPDSNVKKKKKKKKKKKKKKKKKKKKKKKKKKKKKKKKKKTKKKKKKKKKRFFPWAETPLRGIFENFQKIGGR

SEQ ID NO: 296236 - protein, 83 aa, Zea mays
  Clone ID: MRT4577_33242C.1.pep
DRDHRFCFVGLSPFVLMPSVVGVLGETLVWLSSSYFCCFFGRAVFLCVGGGGTFSCGSIKMFVWGLGGGRQVLLIMAPFCVGG

SEQ ID NO: 296237 - protein, 95 aa, Zea mays
  Clone ID: MRT4577_33243C.1.pep
EFSFFLGGACFSPFLFLLKKKALCLSFFFGGAMGSFHCSFLKTAPPGGFFLGRPRLVFFRGFSPAVHPGLSFGAWGGFFFFCHPPPLVSGFFVAG

SEQ ID NO: 296238 - protein, 83 aa, Zea mays
  Clone ID: MRT4577_33244C.1.pep
ALYHKDFTVEQGTINPPNGWKAYYAATKAIINLNAEFYNIIREGSLPAMSRFWLNADYVKCIHATGEFCTGGVHLVVLDLLLG

SEQ ID NO: 296239 - protein, 48 aa, Zea mays
  Clone ID: MRT4577_33245C.1.pep
RRWRGSIFFYYPLNLSLNLNWRKIVPKENFFNTSPLNHTFYYMLASNF

SEQ ID NO: 296240 - protein, 82 aa, Zea mays
  Clone ID: MRT4577_33246C.1.pep
CILGLASLPVCLSVLCGCLRSFLSSVVHACVWSRTCSGFHVHVGFVPCGWCAQCHFIELPRSARSAIAVTSPGGGGFAWVAL

SEQ ID NO: 296241 - protein, 83 aa, Zea mays
  unsure (1)..(83): unsure at all Xaa locations
  Clone ID: MRT4577_33247C.1.pep
RYTIYAVLARPATPEWLPFVQRAYYCVPPVPGSLGVAQLINSTILITMCADTMTDEEAFSFTTDAXPAIPCDFCCLLLLKKQL

SEQ ID NO: 296242 - protein, 65 aa, Zea mays
  Clone ID: MRT4577_33248C.1.pep
NTFYRNGGNLHNADGQDLVHLGDSRTSCDGPSAVACGVSTEHHLSKMYLDPTSISVHHCKTPHLT

SEQ ID NO: 296243 - protein, 99 aa, Zea mays
  Clone ID: MRT4577_33249C.1.pep
RPAVILPGCAVQCAPSASAAPYPSAMDCLTDVPILSSRHYRSTSARTYGSEDVTWVYRSNNLGPCPNACNPAQEVGKRYYNGCRKLHATGKNRPVILYL

SEQ ID NO: 296244 - protein, 144 aa, Zea mays
  unsure (1)..(144): unsure at all Xaa locations
  Clone ID: MRT4577_3324C.1.pep
QEHTYVTLLTTRSDAFYDLKDSRAHIQNALLKSNVLIEVQRSLHEXALRVEXDLPTNPSSQSASHPPESSQDISSQSLSSEMAIGGPGGLWHXIYKSIYLDQFXVSSEFPSPISNKKQKKXLYKAYXKLYASMHDKATGPPQNS

SEQ ID NO: 296245 - protein, 61 aa, Zea mays
  Clone ID: MRT4577_33250C.1.pep
DWFFPPSAPTCELNCSETTSLAFVSSCTIIFKCQKTTKDSQYFPHISGELRVYSGSFRYVK

SEQ ID NO: 296246 - protein, 85 aa, Zea mays
  Clone ID: MRT4577_33251C.1.pep
FGSRPEQFFCCGSRASDPYGTNGVMGGRWRYCHAEECSRGLRWGEGPAAALRRIITTPAAHQAPRRLDELGTRHQERAGVCHTRS

SEQ ID NO: 296247 - protein, 91 aa, Zea mays
  Clone ID: MRT4577_33252C.1.pep
DCFGQGPSLLGGPYSMLGVVSSAAGICKFLAFARTLQQSLGFGREFRFSDQPAPPGGAASADPFASGGAAAPYGDRFCSLGCSLTVAVTTM

SEQ ID NO: 296248 - protein, 42 aa, Zea mays
  Clone ID: MRT4577_33253C.1.pep
MLIVAPPFLKKKKKKKKKKKKKKKKKKKKKKKKKKKKKLEEG

SEQ ID NO: 296249 - protein, 286 aa, Zea mays
  Clone ID: MRT4577_33254C.1.pep
MGGAAEEALRREYVVGEEIGRGRFGTVRRCYAAATGEPFALKTTPKAALRADPLDLALAEQEPKVHHLASAASRHVVALHAAFVDADAVHLVLDLCAGGDLFALVSARGALPEPEAAELMAQLADALAGCHRRGVAHRDVKPDNLLFDAAAGGALRLGDFGSAAWFGDGRPMTGLVGTPYYVAPEVVAGREYTEKVDVWSAGVVLYMMLSGTVPFSGATAGEIFQAVLRGNLRFPPRAFAAVSPEAKDLLRRMLCRDVWRRLSAEQVLSHPWIVTRGGSVPGGRLV

SEQ ID NO: 296250 - protein, 143 aa, Zea mays
  Clone ID: MRT4577_33255C.1.pep
RGRGAVKRNPKTSHGATALQVNRENGPTRRGKKAKKAKDRALGSGQVNRRGSAKPPDPKGPIHGASPWPISQPDCWKGSKGGGRLGHYRQQAQRGEGGQGDQSEESGRDSTSSPRPPRSEPSGPRIKKTRAAQTKASTRVAKR

SEQ ID NO: 296251 - protein, 78 aa, Zea mays
  Clone ID: MRT4577_33256C.1.pep
ILALFARFIRTSHSRIIPQYSIAANANHVQFILAMTYYCFETLSIQAYLLKLALTDSTLRLSNGQMQQQFLANFTNEA

SEQ ID NO: 296252 - protein, 105 aa, Zea mays
  Clone ID: MRT4577_33257C.1.pep
NSTIRYSDTGANFSSMYTSLRSLEMAVASSGGMLVLLQLEEGRREGQACEVAARTARAGGAHSSARRHGGAGCLGKTERARAPRRGEDGTRPGAARNQSLDARGR

SEQ ID NO: 296253 - protein, 126 aa, Zea mays
  Clone ID: MRT4577_33258C.1.pep
ALVPSRAWSCAIFTPPWRPCPLGLVWASCTTVPSCAAVSSTSTRRPRCDFARMSLMHPLLKLQQHQRQAAAISELREEVYIKEKFATVPEYPVVEFHLTTYQSRRILGSSIAIRQAPVHLLPSLYL

SEQ ID NO: 296254 - protein, 118 aa, Zea mays
  unsure (1)..(118): unsure at all Xaa locations
  Clone ID: MRT4577_33259C.1.pep
FFVHSETHRVKHIRNILTTVATKILSLLALLALSESATNALIIPQCSLAPSYIITQLLTPATLVALIHPVERAINTQQAFAVSXVLQQPILQLTPRCWAYHTIHNMATXQRQQLLPAL

SEQ ID NO: 296255 - protein, 76 aa, Zea mays
  Clone ID: MRT4577_3325C.1.pep
YAYMHASKVLMMRVIMDSFVLYSIQYHGNLSQSRTQCILSVEESSWATAIRDSPMSVSPLVGKFVAITHEVLTIFV

SEQ ID NO: 296256 - protein, 285 aa, Zea mays
  unsure (1)..(285): unsure at all Xaa locations
  Clone ID: MRT4577_33260C.1.pep
MARRRLLALASRLYGRPQATQPWRRPPPRFLSSAASGTLDHLKSPPFARPAARNPASYPWDRFGGGQKRTMFIQTQSTPNPQSLMFYPGKPVMEIGSSDFPNARTAMTSPLAKSLFAIDGVTRVFFGSDFVTVTKSEETSWDCLKPEVFAAIMDFYSSGQPLFLDSNAAASMDTAIHEDDSEIVAMIKELLETRIRPAVQDDGGDIEYRGFDPETGTVKLKMQGACSGCPSSSVTLKSGIENMLMHYVPXVTLKSGIENMLMHYVPEVKGVEQEFDGDEEAEVAG

SEQ ID NO: 296257 - protein, 144 aa, Zea mays
  Clone ID: MRT4577_33261C.1.pep
VTKSEETSWDCLKPEVFAAIMDFYSSGQPLFLDSNAAASMDTAIHEDDSEIVAMIKELLETRIRPAVQDDGGDIEYRGFDPETGTVKLKMQGACSGCPSSSVTLKSGIENMLMHYVPEFVMLLLKQVKGVEQEFDGDEEAEVAG

SEQ ID NO: 296258 - protein, 265 aa, Zea mays
  Clone ID: MRT4577_33262C.1.pep
MAMAWRRALALVSQLLQRRVLPAPRFLSSAAGGALDRLNSPPFARPAAPRNPAPPSPWDRLGGQKRTMFIQTQSTPNPQSLMFHPGKPVMEVGSSDFPNARTAMTSPLAKALFAIEGVTRVFFGSDFVTVTKSEETSWDCLKPEVFAAIMDFYSSGQPLFLDSNAAASMDTAIHEDDSEIVAMIKELLETRIRPAVQDDGGDIEYRGFDPETGTVKLKMQGACSGCPSSSVTLKSGIENMLMHYVPEVKGVEQEFDGDEEAEVAG

SEQ ID NO: 296259 - protein, 133 aa, Zea mays
  Clone ID: MRT4577_33263C.1.pep
QNLATSSNASGPPGNPCSGTLGLGCRLADAAPATTSLLILPQKRARTSGNSYPKNATAIQDKKRQRIKEAQARKNARRHPLARIQIKHRRQEDQVSLFAEQSVASFFNGGLGGSRSDQTGIKPRIENGQEDEL

SEQ ID NO: 296260 - protein, 162 aa, Zea mays
  Clone ID: MRT4577_33264C.1.pep
MAALGRVVPPMIKDEGLNIESFIKKVQPTMMDGMMTFTMRRDEAYRYFEMTRGFGERLHHRHVRTIHNPKTNDDRANHTQSKLPIGPSPKRKRKEKLQRKQPTTSVASASHSQDAWAQLPPPRPLAPTLVHNQQAEGHRQAQQQRDTREDSEARIVNSTVPE

SEQ ID NO: 296261 - protein, 101 aa, Zea mays
  Clone ID: MRT4577_33265C.1.pep
MSGVTADEDKKPAGDGGGAHINLKVKGQDGNEVFFRIKRSTQLKKLMNAYCDRQSVDLNSIAFLFDGRRLRGEQTPDELEMEEGDEIDAMLHQTGGCFPGP

SEQ ID NO: 296262 - protein, 159 aa, Zea mays
  Clone ID: MRT4577_33266C.1.pep
KKGSIIKKTGQAPFLWFWAENPNRGGGALLFEGEGLKTPGEKNNRKRPPPRSFTNRRAHYGGGRSPKGGTGAETPPGGKSLKNSSFFGRNPPREKSTPPDPGALIRATGGAPTGHKKEGPTGLTGKTAGVPATGGLGAMFFPGSLGGPNFGPGDSRTWG

SEQ ID NO: 296263 - protein, 300 aa, Zea mays
  unsure (1)..(300): unsure at all Xaa locations
  Clone ID: MRT4577_33267C.1.pep
MSQRGDRGEGHARRPGRSSSFGGHRGGGVGGAGKGGAGSSGQPPLSTNRSFRKPGNGHGGQQRVVNQPDTTGFQPAPAPAPHQTPARPPPAPQNAAVHVPISAPWPQPQGPQVSSSSXQRQAGXPPLPKATHAAPRAPPKSSNPPLPQGGSKGEPPKGFNFQFGSINMNGLPQFPARTSSAPPNLDEQKRNQVLVEELKVTPTPVQPTPKQQLLQQHPHPLQKQQHQLPQLSHQPQQPQQQSTRKETVGSSQPNSINPHTTSQLKRDVHPSPSVPNVTSVRPTVQQMPGVQMPIPFHHQP

SEQ ID NO: 296264 - protein, 217 aa, Zea mays
  Clone ID: MRT4577_33268C.1.pep
MTTVAIGILAMACLVAVARGGNFFQDSEMTWGDGRGKVVDGGRGLDLTLDKTSGSGFQSKTEYLFGKIDMQIKLVPGNSAGTVTTFYLSSQGTAHDEIDFEFLGNVTGEPYTLHTNVFAKGQGQREQQFRLWFDPTKAFHTYSIIWNPQHVIFAVDGTAIRDFKNHEARGVSFPKSQPMRLYASLWNADDWATQGGRVKTDWKQAPFVASFRNFNAD

SEQ ID NO: 296265 - protein, 403 aa, Zea mays
  unsure (1)..(403): unsure at all Xaa locations
  Clone ID: MRT4577_33269C.1.pep
GNWSTTYAPSSFYMTSKMRSGYLEGYEYSIFDLTRPDRVQIQIYGNSVQGRILDGDSPTELLTSYTESTGRKKVQKKWITSGAVVGMQGGTDAVRRVWGQLKDYDVPVSAFWLQDWVGQRKTAIGSQLWWNLELDDAHYNGWKDLVDDLRSHGIRTMAYCNPCLVPXREAQREEAPVRGSQEAGHPGEGRRRRAVHDAQHGVRRRHARPHQPGSARVVQEHRPAGDGGPRRQRLDGRLRRGPAPGRAAALGRGPRRRAQPVPRSCGRASTARSLTSGEPAAAVPRRRATTXVDDNDGLVFFVRSGFRESSRWAMLFWEGDQMVSWQANDGIKSSVVGLLSGCLSGFPLNHSDAGGYCTVDLPPFLRYRRSEELLMRWMEVNAFTVVLRTHEGNRPVSNCQFYS

SEQ ID NO: 296266 - protein, 64 aa, Zea mays
  Clone ID: MRT4577_3326C.1.pep
LGVRLEFFSVGYRIMVRMCLQAAEYQFSLVCACLCEVLLLLAPWLSVVRWPPGKNINRKRPLSP

SEQ ID NO: 296267 - protein, 296 aa, Zea mays
  unsure (1)..(296): unsure at all Xaa locations
  Clone ID: MRT4577_33270C.1.pep
MRAAALGIVAMACLVAVARGGNFIQDSEMTWGDGRGKVVDGGRGLDLTLDKTSGSGFQSKSEYLFGKIDMQIKLVPGNSAGTVTTFYLSSQGTAHDEIDFEFLGNVTGEPYTLHTNVFAQGQGQREQQFRLWFDPTKAFHTYSIIWNPQHVIFAVDGTAIRDFKNHEARGVSFPKSQPMRLYASLWNADDWATRGGLEKTDWAKAPFVSSFRDFAADACAWPPTPAGGAPSPPTPACAAATGDSWWDQPXVGAGRRXRLDNAWVARNLLVYDYCDDRKRFPTPPEECALRAAATAS

SEQ ID NO: 296268 - protein, 94 aa, Zea mays
  Clone ID: MRT4577_33271C.1.pep
NSARGTPSPSPALPSSTVSLIHPSLPSSYAPLPNASAAELRQATRFVPPPLPTPPLSIGRESPHRPQLVRPSTTSPPGTHTSGEIMMSELLVGG

SEQ ID NO: 296269 - protein, 56 aa, Zea mays
  Clone ID: MRT4577_33272C.1.pep
VVFCEPSVVRIILSLAVNLWLISHHQISSLFGNILMIICSANIRSAGYFWIAKLRC

SEQ ID NO: 296270 - protein, 70 aa, Zea mays
  Clone ID: MRT4577_33273C.1.pep
NLKRDRPSYRSQSITLLDSQAPNVTIINKLKHTIACEKIQRVIPGINISHPHKCYSYNIQHENTILSHNI

SEQ ID NO: 296271 - protein, 57 aa, Zea mays
  Clone ID: MRT4577_33274C.1.pep
AIRSLDPSFPSSNRNTPWPLTREPAPSRAICWPPPGRHRPNSVHISLSSRYRNPAKC

SEQ ID NO: 296272 - protein, 70 aa, Zea mays
  Clone ID: MRT4577_33275C.1.pep
VLYMRGGGLQHTCFLLIHISFFIGFTIVSFSAFFNSSQLISTNLFIVYLYCCDFLLKLIQIIYHPFYIFS

SEQ ID NO: 296273 - protein, 81 aa, Zea mays
  Clone ID: MRT4577_33276C.1.pep
EKGCYYEKERFKRECSTSYERSSKSCCDTVRSVDMSCVRRTMTSYEDTVLIVQKISFLSMACNNSLRVVGKKYGDIPKRPM

SEQ ID NO: 296274 - protein, 75 aa, Zea mays
  unsure (1)..(75): unsure at all Xaa locations
  Clone ID: MRT4577_33277C.1.pep
FTVPFMNHPPPPWNMAARGIVTRQEQESTGRRIRSSLQGVSDQIYFYLLLVPLLSSSPTXLCLFLGLFFPFQAYC

SEQ ID NO: 296275 - protein, 64 aa, Zea mays
  Clone ID: MRT4577_33278C.1.pep
RKHRCCTPVLAHTCIDLCVQGSRPYACSTMTKRHDGYSPGLAGYLGHVVAAGTWSIIMAHSLDY

SEQ ID NO: 296276 - protein, 522 aa, Zea mays
  unsure (1)..(522): unsure at all Xaa locations
  Clone ID: MRT4577_33279C.1.pep
LVGVVSEEXLLDLLDIAMSSNTAETVNXSRELMDSGVDPMALMSQLAGLIMDIIAGTYRLADPTSGRVGSGGRNITDAELERLQQALRILSDAEKQIRLSSERSTWFTAALLQLGSGHNSEITQSRSSSKQSAKATSETMMEAMRESSASRSTAHXIHFSXSKKIVDLKTTSGHSSPHASLSSRMRHNENMIYAEHMSVDRALLDSAQTSISSEQKGMHSGISDNLTRIWMKCIENCHSKTLRQLLYDHGKLTSVKECEGTIVAFIAFEDNDIKFRAQRFISSIRNSMETVLKCNVEVRICLMQEFLAGGLKHETYPDETAESDVLSCSTNSERRKGVLNLSGAGGVQPNNVPMIISEETSGMHRTRGQDVSIEQLKVSAFDEQRLESAWLQAAEKPMPGMLNQGRPERNQILPQNGGQHHGRSSMATVVPSRHVDKDLSNELKALKISDSHGPHNGQDVQMESGYAISPSLLHRNNHLANCDNESVVSESGAPGCHGLFPCWKTEKTKRRKGKGQTRLRSS

SEQ ID NO: 296277 - protein, 102 aa, Zea mays
  Clone ID: MRT4577_3327C.1.pep
LCTFHNAPFDNLSPSFNCYYIILLHICLLKDSANLYKQAQRLHPIRSYDEVDNLSANRGRFFTLPNTKGASVGEATDNASYVSCWLGVFMPNRTICIDRTRS

SEQ ID NO: 296278 - protein, 140 aa, Zea mays
  unsure (1)..(140): unsure at all Xaa locations
  Clone ID: MRT4577_33280C.1.pep
MHVSFFFECLHMALNRSLCLFGVHKSYXDKCIRSMRADSHVFLLVNSKXKRYFSXRLNAAXLTDTALPLNDRYKDIHADAVKNRRRATLNTYSRSIESASLHVISNNIVDKSEYHDAVIECDLREIGERIVNTKALENIC

SEQ ID NO: 296279 - protein, 87 aa, Zea mays
  unsure (1)..(87): unsure at all Xaa locations
  Clone ID: MRT4577_33281C.1.pep
MTRGNQREYARQKNMKKQSDSVKGKRRDDGLSAAARKQXGTRRSCSRSRKRQTRRRRNPSSFVASCPTLLPFACVPGASPTTLAFPP

SEQ ID NO: 296280 - protein, 73 aa, Zea mays
  Clone ID: MRT4577_33282C.1.pep
LLVIIFVFPAGGHKGSPLSLLGRGQVLRAVPHMSIVGGNGKFRMGGGYVQALPFDSGAPSGSPVVQYPVNVKA

SEQ ID NO: 296281 - protein, 94 aa, Zea mays
  unsure (1)..(94): unsure at all Xaa locations
  Clone ID: MRT4577_33283C.1.pep
VCALSVXVPSAPSFAGSCPGGGVPAPCCFSRGCRAAGGGWCXLGPSGSSVGGSPSRASAAPCAXSVPFPXRLWVRSSFCFYPPLLPPCPRVRII

SEQ ID NO: 296282 - protein, 67 aa, Zea mays
  Clone ID: MRT4577_33284C.1.pep
FWASQGYPNVMRCKLKCGTFGLGHPIRCLKPGIDVEVSLDIHNPMTLPPRVFLLVFFYIVCYGFYFF

SEQ ID NO: 296283 - protein, 118 aa, Zea mays
  unsure (1)..(118): unsure at all Xaa locations
  Clone ID: MRT4577_33285C.1.pep
LPFTQLSALKCAAYLQQQLPFSQIDAADPQQFIPFNELAALSXPAYLEQQQLLPFSQLMDVSPTAFLTQPQXLLPFNQLIAPNAGTLSHGHRRLPLRXLALTNPAALKXRPINGGALC

SEQ ID NO: 296284 - protein, 34 aa, Zea mays
  Clone ID: MRT4577_33286C.1.pep
SVLLNGGFDCGWLDYQFFFSRSLGMLQKLLNNPL

SEQ ID NO: 296285 - protein, 160 aa, Zea mays
  Clone ID: MRT4577_33287C.1.pep
MDVGLGGAGSSGRGGGGGRSGSGGGRDSPFALGGGGASAAAWTRLVSSGVEDELVAASGGRGGGGGRAGARAGGLPQGHFLDACFLCRKPLPSNRDIFMYRGDIPFCTEECRTEQIEMDEEMERKESTQKKKLAPRAPSPKDVESAPRPPKARAGSILAG

SEQ ID NO: 296286 - protein, 84 aa, Zea mays
  Clone ID: MRT4577_33288C.1.pep
APPGLVVRKQGVQSGGPQAFRLRLRNRFCPYFNFPVSVQKRLFGPQASKFRFRSQVFQNQAFQFRFKNRCCPYFTLPISVKKFP

SEQ ID NO: 296287 - protein, 60 aa, Zea mays
  Clone ID: MRT4577_33289C.1.pep
STIHRFLPETHHMARILNERGFDSLFNLFKYSFAAHDFLTPVPSTARSCTLRPPTPEPYV

SEQ ID NO: 296288 - protein, 241 aa, Zea mays
  unsure (1)..(241): unsure at all Xaa locations
  Clone ID: MRT4577_3328C.1.pep
RPVLEPWLYRVKTCRIDPTADPYQSSPVAAVATSARLSSAADASHLYRAGASLGDELKVLDLTMVRAARPPRVLSATEKRSISADRVPDMDKXYLMNLLLLXAISLPTVPMVVPXYGVFFVPAGSLERRSRQXSNDNLGINITEHGCVKTHSPEERMLVQRIKGDPTYLAXEHDKTLAXTYRINTSSTHIACILTRNTAENKFICPCHGSQYNNQSKATRGSAPLSLSLIHLHVDHTQVLF

SEQ ID NO: 296289 - protein, 78 aa, Zea mays
  Clone ID: MRT4577_33290C.1.pep
IKPVSSLWNQTQVGVDAMLVGTVMLFDITESAKALLWPVSQPPSSTTVSSYASLSRMVAGGANRESYAKKKPKGGRRQ

SEQ ID NO: 296290 - protein, 118 aa, Zea mays
  unsure (1)..(118): unsure at all Xaa locations
  Clone ID: MRT4577_33291C.1.pep
SSGRPGRYHAFLVSETVIKQMACFLDIWAYKAGELLTLDTHQECLVSNENETKATGESELKKGLSMGDTVRNLIMEEKQIQHNIQMSINLLECLLNNNWHNVRXIYIKSTMGKPYTIL

SEQ ID NO: 296291 - protein, 252 aa, Zea mays
  unsure (1)..(252): unsure at all Xaa locations
  Clone ID: MRT4577_33292C.1.pep
GGAAFDRCLLALYLISPVRVLALRFISAPYGKLSRPGWGPVLPAPLAWFLMESPTLWLPPLVLXPLAAAAALRPXAALPAALYAFHYVHRTLVHPLRLARLRRAPAPVPLLIAACALGFNILNAYLQARSFALHAGRQASPFRCLAGLALFAWGMRTNIAADKELLRLKEAGGGYKIPRGGWFDLVTSPNYFGETVEWLGFAVVAWTPAAWAFFLYTCANLGPRARDHRRWYVQKFRGEYPASRKAFIPYIY

SEQ ID NO: 296292 - protein, 124 aa, Zea mays
  Clone ID: MRT4577_33293C.1.pep
MVRVSALNDALNALTNAERRGKRQALIRPSSKVIVKFLTVMQRHGYIGEFEIVDDHRSGKIVVNLLGRLNKTGCISPRFDVSVDGIEQWCNNLLPSRQFGYLVLTTSLGIMDHEEARKKGTGGK

SEQ ID NO: 296293 - protein, 117 aa, Zea mays
  Clone ID: MRT4577_33294C.1.pep
ESTAGSTFGYRSHRFPFWLCLRPLLGVHALDWTGLERGLAVGSARGLWPSAHTCCSGRQRIFSWSTRRRRRRWRRGCSLAVNRRCQSGVVLASYLCPSCWEQGLPPWQQRHRVINIF

SEQ ID NO: 296294 - protein, 44 aa, Zea mays
  unsure (1)..(44): unsure at all Xaa locations
  Clone ID: MRT4577_33295C.1.pep
IWDRVAXAGLPGIFLWGGKEKFNGHLRREGERLSQQDKAAMAPS

SEQ ID NO: 296295 - protein, 326 aa, Zea mays
  Clone ID: MRT4577_33296C.1.pep
MASPIPREWVGLQQFPAATQTKLHELLGKLKEEDVSTLTILVMGKGGVGKSSTVNSIVGERVASVSAFQSEGLRPMMCSRTRAGFTLNIIDTPGLIEGGYINEQAVDIIKRFLLGKTIDVLLYVDRLDAYRMDTLDEQVIRAITNSFGKDIWRRSLVVLTHAQLSPPDGIDYNDFFTRRSEALLRYIHSGAGINKREYGDFPLPIALVENSGRCKTNEHGEKILPDGTLWVPNLMKEITVVISNGSSPIHVDQKLIDGPNPNNRRKLFIPLILAVEYFLVVKGIRRAIHADIANGKVDDWEQRYRDLVGSRDLVEQKGSTSRNRKA

SEQ ID NO: 296296 - protein, 326 aa, Zea mays
  Clone ID: MRT4577_33297C.1.pep
MASPIPREWVGLQQFPPATQTELHELLGKLKEEDVSTLTILVMGKGGVGKSSTVNSIVGERIATVSAFQSEGLRPMMWSRTRAGFTLNIIDTPGLIEGGYINEQAVDIIKRFLLGKTIDVLLYVDRLDAYRMDTLDGQVIRAITNSFGKDIWRRSLVVLTHAQLSPPDGIEYNDFFTRRSEALLRYIHSGAGIKKREYGDFPLPIALVENSGRCKTNEHGEKILPDGTPWVPKLMKEITVVISNGSKPIHVDQKLIDGPNPNNRWKMFIPIILAVEYFLVVKGIRRAIHADIANGKVDDWEQRYRDLVGSRDPVEQKGSTTRNRKA

SEQ ID NO: 296297 - protein, 95 aa, Zea mays
  Clone ID: MRT4577_33298C.1.pep
GYFGKVGMGYFHKLRNKFYCPGVNIEGLWWMVPPHKGGEAGGDKAPQIEVTQLGYFKVLGKGVLPPKPIVVKAKLISKVPKKKIKAAGGPVVLPP

SEQ ID NO: 296298 - protein, 59 aa, Zea mays
  Clone ID: MRT4577_33299C.1.pep
ELRAFNSSRVQAFGLIINWFCITLQSSHQSLSLPLHTLYSNHPPLPNTFHPILGLYVRQ

SEQ ID NO: 296299 - protein, 259 aa, Zea mays
  Clone ID: MRT4577_3329C.1.pep
MASSRVMPSSSPSHTASDLARLAQAASRPGGGGSGLGSMNVEELLRGIYSDMPTPAPPASEPERPRSPAPAPEVATRRTAEEVWKEITGGGGSGEAVAPVAAQAVAPDGGAGTGGPEVTLEDFLARESAVKEDEVKISVPPAPVMGLPGGAEGVSVPGGGGGRERKRQLMDPVDRAAMQRQKRMIKNRESAARSRERKQAYIAELESLVTHLEEENAELLREQEERHQKRLKELLERVTPVILRKKPSGDLRRTNSMQW

SEQ ID NO: 296300 - protein, 66 aa, Zea mays
  Clone ID: MRT4577_332C.1.pep
IFFFLYLSFLSFIIVRALLFVYFLFCLINSIFFCMCFASKCHSLCFLWCTFFSSQVFLFIHCCSPF

SEQ ID NO: 296301 - protein, 55 aa, Zea mays
  Clone ID: MRT4577_33300C.1.pep
CFARPYRITLSFSLSSIVYMTPMGVCRACSSANAISIGFHTIAVVVWVHENENAW

SEQ ID NO: 296302 - protein, 79 aa, Zea mays
  Clone ID: MRT4577_33301C.1.pep
SSRSKIASVRLQTRTTSESMSCSTSSLLTTMTMTRITLPCPLLISSGEEEDYTDLSSYLISELIAYHTCTRTLENDPVV

SEQ ID NO: 296303 - protein, 188 aa, Zea mays
  unsure (1)..(188): unsure at all Xaa locations
  Clone ID: MRT4577_33302C.1.pep
PPRGRGGAPPPGGGEAKGGARPPGGGEPKAPXPGGPSPPGWXPKRAEATGGGPGPPGGPPRPPASGGAAPRPPQKGGPRKMAGVLPQVLGKGXRGGDPGPRVVREGLGDGSSRVALGSSGPGDGVAVLSNQVEVLRPKKSARVKILAGHFRGGPGKLFGLNGFGGIVGPPPPSQVKVFDLGNLAQQAP

SEQ ID NO: 296304 - protein, 67 aa, Zea mays
  unsure (1)..(67): unsure at all Xaa locations
  Clone ID: MRT4577_33303C.1.pep
HXKEIXNPKXHRLTTSSRRXIREWXXASXCLTELANCFSLFXXXXRARXTTCIEXHLXXLSYXNTXF

SEQ ID NO: 296305 - protein, 78 aa, Zea mays
  Clone ID: MRT4577_33304C.1.pep
RARNSRADHTLPKPKGKNGVVPLLPEDERIRVEGFNNGAGSLNHLNFLFVLRPKGASGPFVNLSDGLLFVAAGLVGHY

SEQ ID NO: 296306 - protein, 137 aa, Zea mays
  unsure (1)..(137): unsure at all Xaa locations
  Clone ID: MRT4577_33305C.1.pep
LFFSFASLMVDDMPMRDFRKLDSKGVASPKSQPMRLYSSLCNADDWATQDLPVKTDXSHAPLSDSYRDFKAEACLDAAGGRTRCRPTVGNEGTGAPDSGHGARDWLNHELDITLHDGMRWAQLDDMIYNYXTDAKRY

SEQ ID NO: 296307 - protein, 67 aa, Zea mays
  Clone ID: MRT4577_33306C.1.pep
IRVFIKNGGGPFKFSFYSFLLQFTPFLGGKPKTNIGADSNLKQKLLILPRPKKTKPPALYIKNTKFA

SEQ ID NO: 296308 - protein, 127 aa, Zea mays
  unsure (1)..(127): unsure at all Xaa locations
  Clone ID: MRT4577_33307C.1.pep
CGARPVVRLLFLXLSGXCLPAXGWFPSLLGXCSGGVAGVLXVFRGLLLPCVSSXAXAWLRPLVALSCCLXLSPSRLGCPLLFSLPPVRXLPVXPAVASPPPXAAVARGLRPVAVVPFPLPRVPLPSL

SEQ ID NO: 296309 - protein, 56 aa, Zea mays
  Clone ID: MRT4577_33308C.1.pep
YICGTLRQRELRMLMERGLSHIFLSMTMKSTDIFIELISRSTFIVVLYFHNAVSDG

SEQ ID NO: 296310 - protein, 101 aa, Zea mays
  unsure (1)..(101): unsure at all Xaa locations
  Clone ID: MRT4577_33309C.1.pep
LYDVNIISRLGTQCQRVGDLDRKXLPVPASLAQIKMDADSLAREYGYHIVLLSPANNSSFHRPMSPMYTVSDYSIENIQYMHRENELLTALLLTMEQETNI

SEQ ID NO: 296311 - protein, 115 aa, Zea mays
  Clone ID: MRT4577_3330C.1.pep
GPHPPLPVLTTRYFFDKAALIKFPGAGLPTCRLEKPFAHPTLLALPSIPSLPPGSCPKASPSTRPPTKLSTPNGTGATPLMGGLTPPGGAAPPSFNEHFRNLLHPGGYHSHLCFQ

SEQ ID NO: 296312 - protein, 502 aa, Zea mays
  unsure (1)..(502): unsure at all Xaa locations
  Clone ID: MRT4577_33310C.1.pep
FPRGGGSGLPGPSPWRPQPCNGRGLLLRPGAGGVTGAAAPAATAGNRAGCEPVRKGGPMTMEXLVALHETDAEREARIRDMFGFFDTAGRGQLDYAQIEAGLPRLLGPLQYKHGRELDRALYRXIPAIDVEHNGCILPEELWHALVKAGIEIDDEELARFVEHVDKDNDGIITFEEWRDFLLLYPHEATMENIYHHWERVCLVDIGEQAAIPEGINKHVSASKYLIAGGIAGAASRTATAPLDRLKVNMQVQTNCIAVVDVVKGIWREGGLLGFFRGNGLNVVKVAPESAIRFYTYEMLKEYIMKSKGENKGDIGTSGRLMAGGLAGAIAQTVIYPMDLVKTRLQTYEGGRIPSLGALSRDIWTHEGPRAFYRGLVPSLLGMVPYAGIDLTVYETLKEMSRTYALVDKDPGPLVQLGCGTVSGALGATCVYPLQVIRTRMQAQPANSEDPYRGMTDCFRITLRREGVSGFYKGLVPNLLKVVPAASITYLVYETMKKSLSLD

SEQ ID NO: 296313 - protein, 89 aa, Zea mays
  Clone ID: MRT4577_33311C.1.pep
SRRMVPRRIGRRRRKRPRKARGLLLVKVMVKKKKKKSLRRSRKSLLWLLLPKLKKKKKSFPLMVRMFQCHPKNPVKKRRKKRKRGADYE

SEQ ID NO: 296314 - protein, 131 aa, Zea mays
  unsure (1)..(131): unsure at all Xaa locations
  Clone ID: MRT4577_33312C.1.pep
RTYALVDKDPGPXVQLGCGTVSGALGATCVYPLQVIRTXNDSISLIAMXLYSHEALQNASSFLLMLXRMQAQPANSEDPYRGMTDCFRITLRREGVSGFYKGLVPNLLKVVPAASITYLVYETMKKSLSLD

SEQ ID NO: 296315 - protein, 81 aa, Zea mays
  Clone ID: MRT4577_33313C.1.pep
AHASAHSSEHLQYHDLDGSQRTQGTPQMKALTHMTTNHVSTLNFLDPSSSPLYPCYTCFSLINYLNPLNSRYITFTVSPKF

SEQ ID NO: 296316 - protein, 222 aa, Zea mays
  unsure (1)..(222): unsure at all Xaa locations
  Clone ID: MRT4577_33314C.1.pep
MLQFKRKRLLLASAGCVALMLLITPTHGDSDSEQSYKMARPLELTPKLSLQLKLHAILLWSSVAFLMPVGVLLIRVSANVKSASTVRLLFYCHVASQVVAVVLATAGAVLSISNFENAFDNTHQRVGLALYAFIWLQPLVGFLRPDRGARARGAWYLAHWLLGVGVCVVGVANVYVGLHTYQERPGRSARPWALLXFTVEVAPLAFVFLVQDRWSYVLRQRE

SEQ ID NO: 296317 - protein, 139 aa, Zea mays
  unsure (1)..(139): unsure at all Xaa locations
  Clone ID: MRT4577_33315C.1.pep
RAPIYDPFVYPRCRSSHQTLTVHTINLTXVESSDTIDNDQAKIQDKDAIPQHQXRLIVAEERAQDGXALADYYIQXESTLHLVLHLRXGMQHLHKTLSGKTISRQWEASDTIDKVKAYIQDEEGIPPDRQRTPFCRQTT

SEQ ID NO: 296318 - protein, 75 aa, Zea mays
  unsure (1)..(75): unsure at all Xaa locations
  Clone ID: MRT4577_33316C.1.pep
TDICWFFRCRRYRVISCWLFCWLKEKKCLWQMFNAPLPVRRTPYSFICKVMFYKLKDCSECNTDKCESSVVILXR

SEQ ID NO: 296319 - protein, 70 aa, Zea mays
  unsure (1)..(70): unsure at all Xaa locations
  Clone ID: MRT4577_33317C.1.pep
FFFFXXXXXXXXXXXXXXXXXXXXXXXXXRLQWSSYLNLPVILVILPGTPHYFWHVDTIMYILFTDRVIE

SEQ ID NO: 296320 - protein, 113 aa, Zea mays
  unsure (1)..(113): unsure at all Xaa locations
  Clone ID: MRT4577_33318C.1.pep
MEVVSLHDTECEETIHLFYCXSARSSPSXIAASSDAIYLQFIIWWSFDYSFPNLFINNAHYIRGQHVTLLGSFSSPSFILYXISVIFALPKLFIGXFTLVLTFLPTCSFERVE

SEQ ID NO: 296321 - protein, 121 aa, Zea mays
  Clone ID: MRT4577_33319C.1.pep
FFPWKRCILATPLFVRSPPFLAPPGFPFLEPGCCVGGFLKGAHFPPGTNFARETPKLGSRAGSPRNGPPLVGTPPLGGPPGGVKKKKKKKKKKKKKKKKKKKKKKKKKKKKKKKKKKKACT

SEQ ID NO: 296322 - protein, 63 aa, Zea mays
  Clone ID: MRT4577_3331C.1.pep
FFFIGPPFFLFFFLFIIFFIFFFFFFFFFFFEHYENGHYALFMYKYSTYMKSINNQKRYNTSI

SEQ ID NO: 296323 - protein, 65 aa, Zea mays
  Clone ID: MRT4577_33320C.1.pep
GGGRPTLQIKGPMLALAFIKLASPPSRGFPLYTVGTTKGWLATPVFFNRLIIVPLPKIGPTPGNF

SEQ ID NO: 296324 - protein, 127 aa, Zea mays
  Clone ID: MRT4577_33321C.1.pep
RGVEHGAAAPRDVPLPPVRPGRRGSSQRLVVAAAPVVASPRPLLLLARQPRVVVLAEPRGCGPRPPACHVPSSPTKSCRSQRPARWLNPVVSLKPRLGTLCFSTCVKKEPNQKSLTLDHLLVVSDAW

SEQ ID NO: 296325 - protein, 38 aa, Zea mays
  Clone ID: MRT4577_33322C.1.pep
PWPANRPENRGAGPASRARTSGLAKNAGWAGSAGANTL

SEQ ID NO: 296326 - protein, 51 aa, Zea mays
  Clone ID: MRT4577_33323C.1.pep
AMTPHIFGTTIYAQLRYPDGVRDILDRYFKGEDFPGQKYIVKEGQLASQYQ

SEQ ID NO: 296327 - protein, 149 aa, Zea mays
  unsure (1)..(149): unsure at all Xaa locations
  Clone ID: MRT4577_33324C.1.pep
MGGEGSPRNGSSSASFTTSGDSGAEGSSLFDFDLLSGVDLAACVTDGVAPLHHDDAAPLWAQLGLXAVAWATAWSPADSAAAVVAAAAEREARVQRYREKRKNRRFHKTIRYASRKAYAEARPRIKGRFVKRAAXTSSSSSSTPRRRQR

SEQ ID NO: 296328 - protein, 117 aa, Zea mays
  unsure (1)..(117): unsure at all Xaa locations
  Clone ID: MRT4577_33325C.1.pep
AAXXREGLQAKXQQGLPALRRAPAXRDGPRASPXSSASXRTTSSSPSPSSXSSATATSSASVFCSXSFCCSIWVASSXAVCAVILVXRRRGRGXEGRAPPPAAWQKPKSXPERKGGG

SEQ ID NO: 296329 - protein, 269 aa, Zea mays
  unsure (1)..(269): unsure at all Xaa locations
  Clone ID: MRT4577_33326C.1.pep
MGGEGSTSPAPGGAACAVCGGAAVVYCVADAAALCSPCDAAVHAANLLASRHERVPLSMAAVPSASGAYDDLFAPDDVDAAAPAQAQGLGSPRNGSSSASFTTSGDSGAEGSSLFDFDLLSGVDLAACVTDGVAPLHHDDAAPLWAQPGLAVAWATAWSPADSAAAVVAAAAEREARVQRYREKRKNRRFHKTIRYASRKAYAEARPRIKGRFVKRAAXTSSSLSSAAGTXDDGNDATGAAAKFWLSFSDDARDGFYVDAGAYGVVPSF

SEQ ID NO: 296330 - protein, 282 aa, Zea mays
  unsure (1)..(282): unsure at all Xaa locations
  Clone ID: MRT4577_33327C.1.pep
MGRSEGSTSPAAGGAACACAVCGGAAVVYCAADAAALCSPCDTAVHAANLLASRHERVPLSMVTAASGVYDDDLFAPDDIDAASSWASAPAQGQRQGQGSSQNGSSSASFTTGDSGAEGRGLFDLLSDVDLAACVTGGGGYLPDGVAPVVHHGAAPLWAQPGLPAAAWTATWSPTVVVQGAAVVAARGGGAXARVQRYREKRERRKFQKTIRYASRKAYAEARPRIKGRFVKRAAGTSSSSSSGAGTSDSIDAAAKFWLSFSDDARDGFFVDAGAYGVVPSF

SEQ ID NO: 296331 - protein, 113 aa, Zea mays
  Clone ID: MRT4577_33328C.1.pep
PVGTSLSWRKKWRIAPDILTGKIDHQSSSSPHACVKNGVFLIGEMVTEIPYKIHCATNNNRPLFSPMYNKVTTNLLREGSTSGKYMEYSVAQATSTLLLGSWKLLHVPNHYLY

SEQ ID NO: 296332 - protein, 117 aa, Zea mays
  Clone ID: MRT4577_33329C.1.pep
PFLSPVLQVLSLSVNLPPPVAASQFSPWSTDPQSTRRPAVLFARCLRGHQLVLVGRVLLPQLPVASTFFFIDQRTAAIQDFIYYLNPQSVTHKQEGPKKMEDKQHPGNKFYPTLSSR

SEQ ID NO: 296333 - protein, 66 aa, Zea mays
  Clone ID: MRT4577_3332C.1.pep
MSTSSSTSSSSRHRDERDSSRTERDRDRDKDRDRDRDRARSSRRSRSRSRSRERERDRDKDRRRNY

SEQ ID NO: 296334 - protein, 135 aa, Zea mays
  unsure (1)..(135): unsure at all Xaa locations
  Clone ID: MRT4577_33330C.1.pep
ARGGPHGAAXDWXALGXFLYELLHGRTPFAGADNEATLRNIARRPLSFPAAGDADARDLIARLLAKDPRQRLGSRRGAADVKAHPFFRGLNFALLRSSRPPVVPAASRSPLQRSQSCSAARTKPKPPPDARFDLF

SEQ ID NO: 296335 - protein, 55 aa, Zea mays
  Clone ID: MRT4577_33331C.1.pep
SPPPQKNIKKKKTNKKKKKKKNIKKKKKKKKKKKKKKKKKKKKKKKKIKKKKKKK

SEQ ID NO: 296336 - protein, 299 aa, Zea mays
  Clone ID: MRT4577_33332C.1.pep
MVIEGSKVNNVNAMSGGCGSGCGGGCGSGMVIEGSKANNAMSGGCGSGCGGGCGSGMLIEGSKANKAMSGGCGSGCGGGCGSGMVIECSKANNTMSGGCGSGCGGGCGSGMVIEGSKANNAMSGGCGSGCGGGCGSGMVNEGSKAANTMSGGCGSGCGGGCGALFNASTAAGEGLHNKSAGCGGGGCGSGCGGGGGCGSGMAIEGFKANHAKSGGCGSGCGGGGCGTLFSSSAAASQGQSRSGGCGSGCGGGGCGTGSMVAEGSNGGNAKSGGCGGGCGGGGGCGGGGCGGGCGAVFNA

SEQ ID NO: 296337 - protein, 43 aa, Zea mays
  Clone ID: MRT4577_33333C.1.pep
LLRSFYCTKLHLKGFSTESRVFCRSKPVYSATKWQKATINSLI

SEQ ID NO: 296338 - protein, 225 aa, Zea mays
  unsure (1)..(225): unsure at all Xaa locations
  Clone ID: MRT4577_33334C.1.pep
EGQSXSGGVGTLLSSNAMGGEGQQAHSAGCGSGCGGGCGSGMLIKGSKVNNVNAMSGGCCSGCGAGLGSLLVIEGYKXSTSTSGGCGSGCGVFNGSTAVIEGLHNKSAGCGGGGCGSGCGGGGGCGSGMAIEGSKANHAKSGGCGSGCGGGCGTLFSSSAAAGQGQSRSGGCGSGCGGGCGTGSMVAEGSNGGHAKSGGCGGGCGGGGGCGGGGCGGGCGTVFNA

SEQ ID NO: 296339 - protein, 89 aa, Zea mays
  Clone ID: MRT4577_33335C.1.pep
TPFRANKILTQKKKGKKPRGWEIPTRPPPQKKKTSKGGGEKKKKGGGLKKKKLKSFGKKTYQKGTPPSKGQPQKKKKKNPVGVGLNFPL

SEQ ID NO: 296340 - protein, 883 aa, Zea mays
  unsure (1)..(883): unsure at all Xaa locations
  Clone ID: MRT4577_33336C.1.pep
IRHEEKLDVGFTETTEQFESTFGVRYWKAGCMYRGNVPSPVTSTPQTFSAEVGTGSDICKAQKDLNALDITVVELYLQIVDIKNLPSAVQKENVYVRFTKNQSDMFISDGGRLDISTVTGXKNTGVCLQCEPTGELILAVMVDQLSKKPEPIGKVSFPLHDLTGPDSKLSFEKWFELKAHGGHAASPPVSLRVAASATVPSSAQKVFTMVRMEPFSLKSCLLPHSIKDQNTGSWTRFVNDCGTELIRLQIREHKAKNSMVVVRELVGVLKSTKKQIQLAEFKENKWTLKDSNLPISHGTDGSLLDLKGDNHLIKLYRGRKLEYERKCCSAHSEDVSAVTAVKFCAEHPYGKAVALLDTEAQLIMVNEDWLLLPWISISVLFMDGDGSMKLSGGAMVQKGTVFGSDTSMVLDTQTVGAGSVATNLAQCGTCSAVFGGDDKEMANCKVEHVSSGASRTVVASGENGHTETAGCGGGCGSNCGPMMAEDPKAGNAKSGGCGSGCGGGCGGAGGCRTMANEGQSRSGGVGTLLSSNAMGGEGQQAHSAGCGSGCGGGCGSGMLIEGSKANNAMSGGCGSGCGGGCGSELLDAHRILAAVQNAQRSAKRRGAGPARPVIAVTPTTTSALQVPSLTSLAHTLRLVDAQLVWIVVEPGHRTDAVAAVLSRSNLDFLHITGPGDSTANLRMHALREIRAKRMDGIVVFADENSILRTELFDEAQKVTTVGAVPVGILGEDDGTSESSLQAPSCDAEGKLVGYHVSEETVLPANRSDMLMASRLEWAGFVVNARALWEDTKERPLWVRDLSAIDDADARAASPLALVTDAGRVEPLASCTQAASRVVAAFRQSPRGQIPTRVENRSGTAEYRCPSANCSTRDTTHANYSSEH

SEQ ID NO: 296341 - protein, 37 aa, Zea mays
  Clone ID: MRT4577_33337C.1.pep
SCTTRIDASICWVTLLAQHARANQSLAHRVELYGSSC

SEQ ID NO: 296342 - protein, 87 aa, Zea mays
  unsure (1)..(87): unsure at all Xaa locations
  Clone ID: MRT4577_33338C.1.pep
SAGLSTELRHKYNVRSISICKDDEVLLVRGIYKVREGKVVQVXRRRWVIHVERITREKVNGXTVNVGIHPSKVIVTMLMLDNDRNAL

SEQ ID NO: 296343 - protein, 118 aa, Zea mays
  unsure (1)..(118): unsure at all Xaa locations
  Clone ID: MRT4577_33339C.1.pep
EFQIDWDTIEXLAXWDEEGRQEVPLEEGMYDTLGLREEDEREGRERQEACMGRSSGVDGYEYIDVVAAFPVXEHLPDEXVLLCDRTNPIMKIGSLYXKEFILAMRHHEINNEFELGIE

SEQ ID NO: 296344 - protein, 170 aa, Zea mays
  Clone ID: MRT4577_3333C.1.pep
MASSRVMPSSSPSHTASDLARLAQAASRPGGGGSGLGSMNVEELLRGIYSDMPTPAPPASEPERPRSPAPAPEVATRRTAEEVWKEITGGGGSGEPVPPVAAQAAVPAGGGGAGGPEMTLEDFLAREEGAVKEDGVRVSGPSAPAMGFLGGAEGVGVPGGGSGRGRKRQL

SEQ ID NO: 296345 - protein, 114 aa, Zea mays
  Clone ID: MRT4577_33340C.1.pep
KLMTPRISALERFKWRKPSPASLSRSKKLLINLEKVGVERVDAKALVAHAEGGPLLQQLLLQQPLDGRRHVLAHARHRPPTGSGRQGDGRRIESIGFFLLPASQALAAGAEPFL

SEQ ID NO: 296346 - protein, 91 aa, Zea mays
  Clone ID: MRT4577_33341C.1.pep
RGVLGAQQSVGLLIPRFLVLYFRRSSRIGAGFVACCAPSPLEGWSGLLFARAYLYTKEDQQIGAGCLPRVPGCSGGGMGQAESSCCAGGRL

SEQ ID NO: 296347 - protein, 93 aa, Zea mays
  Clone ID: MRT4577_33342C.1.pep
GGGPPPPQQPPASHRRRRTTCGLTSGPHDPEPRTTPVLLGTGSSSSSLDTSITSAPISIAVAGKFARAHACRTTTWLPLLARPRVPPTRPASV

SEQ ID NO: 296348 - protein, 152 aa, Zea mays
  unsure (1)..(152): unsure at all Xaa locations
  Clone ID: MRT4577_33343C.1.pep
NRPNLNSPLGAGKPGGGGPSLAPQGGPGKGFTWDPPQFPDTNPPGFGFQGHPPPGGGLGNSPPRGPPGGGGPLFKPPGGDRTLNAPPPGPPGEXPPSPPRKGGGPKFQKNVAGPKXPGKPPSFQKSPGRRAEPRKTFFRKKAPLPEVGVWCP

SEQ ID NO: 296349 - protein, 128 aa, Zea mays
  Clone ID: MRT4577_33344C.1.pep
KCKFFIWLAPLNKCWTADRLARRGLDYPYKCPLCDQQDETIHHVLVSCVFARETWTKVLIRFGLLPLAPDSTDEVFQNWWRASELQVPKTHQKGFNSLVILVAWWLWKHHPSQIISSFAEWVQRISGG

SEQ ID NO: 296350 - protein, 136 aa, Zea mays
  unsure (1)..(136): unsure at all Xaa locations
  Clone ID: MRT4577_33345C.1.pep
THAYGAELELETLLKASTYXLGAAFGGIENKADLADGAALAVRRIDSECSGVLHFNELDTHMRPVLNLLHNNILPLRSLYWGPDQMLIIHNFSINGNLANHYVKRKQGSYAINLRWSARVHITRCVSRSPAYLHNK

SEQ ID NO: 296351 - protein, 58 aa, Zea mays
  Clone ID: MRT4577_33346C.1.pep
TEGLFYTQPEQHIPANTMYRQQIQVTKQVPTCIRHSPPTIANRRNREMMTQVEHRVQV

SEQ ID NO: 296352 - protein, 62 aa, Zea mays
  Clone ID: MRT4577_33347C.1.pep
KCYDNQSMHYKNKHLNHLSSHFTCSQNKQYPLGKLPGFNARITNTPFCHVFSPQATTYFDLF

SEQ ID NO: 296353 - protein, 83 aa, Zea mays
  Clone ID: MRT4577_33349C.1.pep
SSSASTSSTSPIVGSNHHMGDLLSRSGIGILACMDMAQWHQVSYNLLSTSVSIEPCAIAAAVCTTLWAMRTRSLPRRFGSWWS

SEQ ID NO: 296354 - protein, 42 aa, Zea mays
  Clone ID: MRT4577_3334C.1.pep
CRSCLSFYSVHKNCHDMCLVDVNIIIVIDLNMPIFGECFIEF

SEQ ID NO: 296355 - protein, 409 aa, Zea mays
  Clone ID: MRT4577_33350C.1.pep
MAPAPALTATSVLKRSHLPGVHSLAGRRQPGRDRVSVLSPAIPPPRVSWQQGSGVVAKRLLWASASGSFEKDNIGEDVVLPSQIEVENKVDLLKILKSANSIIPHIVLGSTILALVYPPSFTWFTTRYYAPALGFLMFAVGVNSSANDFIEAIKRPDAIAAGYIGQFVIKPLFGFLFGTLAVAVLNLPAALGAGIMLVSCVSGAQLSNYATFLTDPHMAPLSIVMTSLSTATAVFVTPTLSYFLIGQKLPVDVKGMMSSIVQIVVAPIAAGLLLNRFLPRLCAAIQPFLPSMSVFVTALCVGSPLAINIKAVLSPFGLTIVLLLFAFHTSSFVAGYHLAGTWFRKSDDVKALQRTISFETGMQSSLLALALANKFFPDPLVGVPPAISVVLMSLMGFALVMVWSKKREA

SEQ ID NO: 296356 - protein, 84 aa, Zea mays
  unsure (1)..(84): unsure at all Xaa locations
  Clone ID: MRT4577_33351C.1.pep
GRTLADYNMGNVSTLQVVLRLKGGMHIFVKTLTGMTITHMDKSTDAIDNVKDKIQDTEGILLGPXRLIITCXHLEDGLTMADYN

SEQ ID NO: 296357 - protein, 91 aa, Zea mays
  Clone ID: MRT4577_33352C.1.pep
CSNTSRKLAQACCTELMKKITSCMKINSLTDAVYEQKKNITQQQMQIQLKHKTMHAIWTCRIHSTHIKTLPPGMTPVPPAIPAATLATRLP

SEQ ID NO: 296358 - protein, 75 aa, Zea mays
  Clone ID: MRT4577_33353C.1.pep
LKTKRHPFNFFQTKTGTRGTRGGAKKTREKHKRGVGNFAAKKTFEGGDFRPQTGDETLFPLWDPVIIVFYPNPYF

SEQ ID NO: 296359 - protein, 66 aa, Zea mays
  Clone ID: MRT4577_33354C.1.pep
MSWAVLVAVVLLMQCCNVVVAARPLLLMQSPAVATADGGWLEMIMQVLQGPGSNNHNCQAPNGSCP

SEQ ID NO: 296360 - protein, 130 aa, Zea mays
  Clone ID: MRT4577_33355C.1.pep
LCLRRAVATARDVEEAPPPAHSSAPRRPPPAVPRCTVQDPLFSSPPPARRRPPPWIHCARRRSSSRVSPSSMDPLRSTQEQQGARAMAGGGLQGAKKRKREHASPRKEVPSLARPRQVPPAACVNTQPRT

SEQ ID NO: 296361 - protein, 89 aa, Zea mays
  Clone ID: MRT4577_33356C.1.pep
PTRTRTRGRILRVFRLGGAGRTHSAGRSLFSPSSPLPCSLGFQQHVKLVNSVSHPDAMHSRRHNRCYEACGAPRGGGHRGGRGGGGGGG

SEQ ID NO: 296362 - protein, 97 aa, Zea mays
  Clone ID: MRT4577_33357C.1.pep
PLLEFFFFFFFFFFFFFFFFFFGTQRRLIFCGPALSLITLGPTSNPFERSSCFFQHHLPILIFLSGSKRAISNNLGYHLPLFPHLEKSKVVMVIKTP

SEQ ID NO: 296363 - protein, 142 aa, Zea mays
  unsure (1)..(142): unsure at all Xaa locations
  Clone ID: MRT4577_33358C.1.pep
SSEFGSARCLPRFLCTPSPTNKGGSFFIMLAFSHGTLGVTHDEAQDVHQKPAVPAVVHPADTICADRNCTEAKADHLDKIHKPFGLPXEHAQXSVQVIQLRSXPNAPEAYVARWQIRVQRVRGLKEAHYQLDSLIAEPPTES

SEQ ID NO: 296364 - protein, 69 aa, Zea mays
  Clone ID: MRT4577_33359C.1.pep
RCSTQVLWLQLSNIIFLCSPMVDELEVCGAREYSTGGTDNYVSGLRTPAGVYLTVETAAKPRESHYQRR

SEQ ID NO: 296365 - protein, 267 aa, Zea mays
  unsure (1)..(267): unsure at all Xaa locations
  Clone ID: MRT4577_3335C.1.pep
PLHLRLRASSPRLPPASPTRRTPETEKQSLLPPASRPTDRPTDPWTAVLLSPSXAPPPPAPAPGAXPPLVPASSVQTPPGSMKKAAAPMRASVCAIPSPVRFEPSPMRASISALPSPIRAEPSPMRARVTAALQPPSRVKLDLAASSPPPARAAADKENFLLAAAPSSPSARVGFDKENLLPAGADAHDELVALNLAAIARTAGTPVWWPALRAGQALRPLLGAPQRAAQAQAGLAPSIPRSSRPRQWTPRRWPRTPVSPSSCPNAA

SEQ ID NO: 296366 - protein, 109 aa, Zea mays
  unsure (1)..(109): unsure at all Xaa locations
  Clone ID: MRT4577_33360C.1.pep
FCKRSTKYHWRFVFTCENNNPQCRIVLEKEYQIRSSEELLERYQQKYRLVDQSDGDLINNDLSWQLPWQLYAPLKLLQKSKRPYCSVIKIAGKGVPIQSKKLXLPSANC

SEQ ID NO: 296367 - protein, 56 aa, Zea mays
  Clone ID: MRT4577_33361C.1.pep
TFPRGLNDHVVQVFFSPINHGFSGSVNCLTPWCYKNNPALVLPSLRVHISYSTKVQ

SEQ ID NO: 296368 - protein, 538 aa, Zea mays
  unsure (1)..(538): unsure at all Xaa locations
  Clone ID: MRT4577_33362C.1.pep
MEVEATPTTAVSSSGVAAQLPPPGPPAKKKRALPGMPDPDAEVIALSPKTLLATNRFVCEICNKGFQRDQNLQLHRRGHNLPWKLRQRSGKEVRKRVYVCPEPSCVHHDPSRALGDLTGIKKHFCRKHGEKKWKCDKCSKKYAVQSDWKAHVKTCGSREYRCDCGTLFSRRDSFITHRAFCDALAEESAKARAEAPSAEDGSSAAAVVPPPAPPPAPXTATATAPACAASCXPRNETDTNATEAVQFAPPPPPPPPPPPPPPPQLQVPVLSQASVSAAANVGASSSSSSVAGTSQSLLGGMFAPSSMASAPQYADLGGRPERAHPAKPPPLCLATDASSSIFSAAPAVTAERQQFAPPPPSPSPSAHMSATALLQKAAQMGATSSSSSFLRGLGLDVSSSSPGASSSGQQHQHQEAMRVSLPDASLQQWPPRLELEPAPMLSAGLGLGLPYDSTGAQVSLPELMMGQSSLFSGKPATLDFLGLGMSPSGASAGRGLPAFVQPIGGMAGTGAGAAETFGAGRGAQATPWERNPSSSPIL

SEQ ID NO: 296369 - protein, 191 aa, Zea mays
  Clone ID: MRT4577_33363C.1.pep
DGSNQRAMAEPTNARGSPKNRTRRKTSTAQEIQGTEFGGTSECRELYLRDRGRVASGQTKREVSGKQEEWMQCRGREGRGDGFVVQCRCGDDVMRGGGGGAAMWGCLVRMTKEMGRGWQWPPPEATRCLSVVTPPPGACVDVVCTAAVCAVTQQLRVFCRHFVEVGGGSADGAGGGGSKQSSERARPSPRV

SEQ ID NO: 296370 - protein, 93 aa, Zea mays
  Clone ID: MRT4577_33364C.1.pep
LGRRKRGKGPTRVLRNKAPGNFLRNPQTGGGKTGPGGGGDQKNTNLTTGGVQQKGGHSPVNWKQKGIDHPPLGNEKGKKKGLIWRWGAGGGRP

SEQ ID NO: 296371 - protein, 52 aa, Zea mays
  Clone ID: MRT4577_33365C.1.pep
GPGIQKELVILVIVAYLSNHPFMFPYIKLLFLILPRLTCRLLLSINEDAHCF

SEQ ID NO: 296372 - protein, 77 aa, Zea mays
  Clone ID: MRT4577_33366C.1.pep
CSPLGSAAQGSHTIRPKVARASLFQTSHRSEVVCCCLLVMKWCRWFKILPTLTNGPVNTLVLHLFVTILFARSRMKW

SEQ ID NO: 296373 - protein, 248 aa, Zea mays
  unsure (1)..(248): unsure at all Xaa locations
  Clone ID: MRT4577_33367C.1.pep
MAQKDAANGNGATTRPPPTPSPIRFSKFFQANMRILVTGGAGFIGSHLVDKLMENEKNEVIVADNFFTGSKDNLKKWIGHPRFELIRHDVTEPLLVEVDQIYHLACPASPIFYKHNPVKTIKTNVIGTLNMLGLAKRVGARILLTSTSEVYGDPLEHPQTEAYWGNVNPIGVRSCYDEGKRVAETLMFDYHRQHGIEIRIARIFNTYGPRMNIDDGRVVSNFIAQGIRGEALTVQKPGXQTRSFCYVA

SEQ ID NO: 296374 - protein, 77 aa, Zea mays
  Clone ID: MRT4577_33368C.1.pep
FNSTPYLRLKQLLPCSQLTHLSPATFLIQPQLLPIYHHATPNTDILLQLQQLLPFNQLDFTNPSVFYQQPIICGALY

SEQ ID NO: 296375 - protein, 91 aa, Zea mays
  Clone ID: MRT4577_33369C.1.pep
YLMALEECLTRLLAVGETWTRRRTTYQGIFTTAVQCWRDYLTDLPTPRRKRCSTWRSAWDSAQRSSCRWRKAIVGLPWPYMGGDSTWSRSS

SEQ ID NO: 296376 - protein, 160 aa, Zea mays
  Clone ID: MRT4577_3336C.1.pep
PAGLPAGADAHDELVAFNLAAIARTAGTPSGGPLFVRGRLYDLYSARRNERLKRKQGFPFYSEEFASAAVDPETMAENPCVAVELSKRRVAKKAYAASGAESVRRSMPAVDFAACRGGDLGPRSSLRSSKEMKKASAASGAVSMATKVRRVNPRSSVRRF

SEQ ID NO: 296377 - protein, 128 aa, Zea mays
  unsure (1)..(128): unsure at all Xaa locations
  Clone ID: MRT4577_33370C.1.pep
GVRVSLVLPRLLCPGSSRVSCVAFRSCLPCPSSLPSPFLVLLVAGVXRVGVSAGLPVVARAVLFSVFRCGPVLAPAWARSSLWLPVVVASVSPRRAXWVARWVXXRSGXCSLPXXXXFPPFSVLVPWL

SEQ ID NO: 296378 - protein, 112 aa, Zea mays
  Clone ID: MRT4577_33371C.1.pep
TLEAAGPRPHLRLSSSYKPTSNTSHSGVGYYAPAARTTLNPCVFLRSSRSFQRSSKTPKPLLISGFRAGALRHPAGDLLSDSIQHKRWPTSKIKVMQVYVDGLGLVKDECRA

SEQ ID NO: 296379 - protein, 119 aa, Zea mays
  unsure (1)..(119): unsure at all Xaa locations
  Clone ID: MRT4577_33372C.1.pep
GPLVNVGFFTPQREVVFPAFYKILSGXPAKRMLALGPPLVDPGLLSGVSPRGLPAEDPQRSPQMGFFGNGLPLFPVVEWGGQPLGNGKVGKLIPALFFFLWEDNKFGFDRIPVSFKPLP

SEQ ID NO: 296380 - protein, 91 aa, Zea mays
  Clone ID: MRT4577_33373C.1.pep
VLKTPRGNQKRGRGPANQHLSSGYKVGVSKKIHPLNGTKILPPPVVFLGGGKFCPPPWFWGPNWPHFLSGEKFKHFALAPKTFKNFFLFFP

SEQ ID NO: 296381 - protein, 133 aa, Zea mays
  unsure (1)..(133): unsure at all Xaa locations
  Clone ID: MRT4577_33374C.1.pep
PPPPPPRPPPPXPPXPPPPAXAPPPPPAXPPPPPPPTRRPHXAPPPXPPPTRAXXPTHXXPPPPNPXXPPARHGTQPQRAAPGAEKKPXPKPQPKPTTQPKTRTTRQKEDRGPKRTRADPSSETTKGPAPSPA

SEQ ID NO: 296382 - protein, 317 aa, Zea mays
  unsure (1)..(317): unsure at all Xaa locations
  Clone ID: MRT4577_33375C.1.pep
QGQLQYILVLSNLLTGPILPAYAECTPLLRFRVSNNHLEGDVPPGIFGLPHASIVDLSYNHFTGPVAATVAGATNLTSLFASNNRMSGQLPPEIAAASGLVKIDLSDNLIAGPIPESVGLLSKLNQLSLQGNRLNGSIPETLAGLKALNVLNLSDNALSGEIPESLCKLLPNSLDFSXNNLSGPVPLQLIKEGLLESVAGNPGLCVAFRLNLTDPALPLCPRPSLRRGLAGDVWVVGVCALACAVATLALARRWVLRARRYAGQDKGLASSSPASSESYDVTSFHKLSFDQHEILEALIDKNIVGHGGSGTVYKNEL

SEQ ID NO: 296383 - protein, 64 aa, Zea mays
  Clone ID: MRT4577_33376C.1.pep
GGDDSSSGSGTGVGRAGSAVGSAHGYGNASGGTGAGGGSGAGSGGQGGYGGGGGGGTGSSGGHP

SEQ ID NO: 296384 - protein, 152 aa, Zea mays
  Clone ID: MRT4577_33377C.1.pep
IYSPSPPPHPSPLAVAAAPQPARRPRRRLRGRTSARSPPPSQPNPSSPPMDAAPTTSSNRKPQFGSLCSRPSAATSPPLQRPSRPYPTPPFSAHPSACPPDNARLNCCCQDLPQCGLHHCGDDIVDLRLRRLHPEGLPQFSRLGSSTLISLL

SEQ ID NO: 296385 - protein, 331 aa, Zea mays
  Clone ID: MRT4577_33378C.1.pep
MASVEGKRETVLVTGASGFIGSTLVGLLLDRGYNVHASVLNPDDKAETEHLVALGAGAGEGRLRVFPGDLLDGAALMAAARGCSGVFHLATPCTVYPVSDPQGQMVVPAVEGTLNVLRAAKEARTVRRVVVTSSSSAIIPSPAWPAGEPRDERCWADVDYCKKNEVWYPVSKTLAEKAAWRFAEENGVDVVVVNPVTAMGPMIPPTINCSMIVLLRLLQGCTEEYRDIWMGAVHVHDAAMAHILVFESPAASGRHICAQSISHWSDFAAKVAELYPEYKVPKFPKDTQPGLVRQGAEEGSKKLVALGLHFSPLEKIIRDAVEALKSRGYIS

SEQ ID NO: 296386 - protein, 68 aa, Zea mays
  Clone ID: MRT4577_33379C.1.pep
NFFSFPYYKLSPGKNYFSDYGTTRNRSPRGLSHSFTAQDYISPGIPESVAMNLPNFTSKKATSQLGMA

SEQ ID NO: 296387 - protein, 64 aa, Zea mays
  Clone ID: MRT4577_3337C.1.pep
SVCRPAMSWLMQHLERPSLTSSQRLLKIHLPNHWSFGSMEVRKPTNQLVCGLFCLSSSSTQLCC

SEQ ID NO: 296388 - protein, 91 aa, Zea mays
  Clone ID: MRT4577_33380C.1.pep
STLDWCEENYVVTLFVAEFWNTVSNLIMIIPPIFGAIQGFRDRLEKRYIAAYVALTVVGMGSWCFHMTLKFEMQLLDELPMIYSCCIFVYC

SEQ ID NO: 296389 - protein, 543 aa, Zea mays
  Clone ID: MRT4577_33381C.1.pep
MPPPLQAHRLLISHRRLPTPARRRFTAASSVQSAPATTLAPGPATSSILSIRESLLSGERTAADITSEYLSRLRRTEPTLRSFIHVADAAAEREAEELDRRIASGEKDAVGPLAGVLVGVKDNLCTANMPSTGGSRILDGYRPAYDATAVRRLREAGAIVLGKTNLDEFGMGSTTEGSAFQVTTNPWDDSRVPGGSSGGSAAAVSARQCVVSLGSDTGGSVRQPASFCGVVGLKPTYGRVSRFGLMAYASSLDVVGCFGSSVFDTATILSVVAGHDKMDATSSSQVVPEYASELVSLDLLESKPLNGVRIGIIQETLGEGVASGVVSSIKGAASHLEQLGSVVEEVSLPSFSLGLPAYYILASSEASSNLSRYDGIRYGGQVSADDLNELYGESRANGFGHEVKMRILMGTYALSAGYYDAYYKRAQQVRTLVKQSFKDALERYDILISPAAPSAAYKIGEKINDPLAMYAGDIMTVNVNLAGLPALVVPCGFVEGGAAGLPVGLQMMGSPFCEGNLLRVGHIFEQTLQNLSFVPPLLAEGQL

SEQ ID NO: 296390 - protein, 210 aa, Zea mays
  Clone ID: MRT4577_33382C.1.pep
MRLNHKYFSNLNNIANSSPQGIMKIYINVKNVRMTYIVKRREYINTTREYAYTMRLAMAASIYSFGDNLLELLTGKPSVSILESITNGFHLCCRSFEPVASSDVHPRRRIQLPWHPGKILRLCHLIKGADHLAINSINQLMSSNQRSIDPQNQPNKQTISTCDSSAMSVRGPDGGWEWKARRAAAAIILVPANDIDLDMDMDMDGFRIFS

SEQ ID NO: 296391 - protein, 58 aa, Zea mays
  Clone ID: MRT4577_33383C.1.pep
LPFFFFFFFFFFFSRGNCRGGVEYVGLGIQIFLEFGTCVWQIIFQANTMGGYSRFKGS

SEQ ID NO: 296392 - protein, 79 aa, Zea mays
  Clone ID: MRT4577_33384C.1.pep
KKPSISNTMPHYMYTHPHHHIEAHHNAPDQLDTKHKPPLNSPIFMNKHDHDQYKNKHTLQLTTTIANVILFYPDNHNHN

SEQ ID NO: 296393 - protein, 61 aa, Zea mays
  Clone ID: MRT4577_33385C.1.pep
LFKSHKNNSQLKSSSKTGGGTCTRWDDQPGRGARLAQATARMRLRTVTLSERRQTQKVGTV

SEQ ID NO: 296394 - protein, 53 aa, Zea mays
  Clone ID: MRT4577_33386C.1.pep
NPNSSNASKSSNSYDPASEYVSSNIVNSVDRIASDDPLSPAYAISSMVPASLQ

SEQ ID NO: 296395 - protein, 65 aa, Zea mays
  unsure (1)..(65): unsure at all Xaa locations
  Clone ID: MRT4577_33387C.1.pep
MLRRSARCYRQIQNNPYPMFRYCRGVSDPKIRIYDVSMRRMAXDEFPYCVSLXVSWEKGNSLQRG

SEQ ID NO: 296396 - protein, 181 aa, Zea mays
  Clone ID: MRT4577_33388C.1.pep
MARRDHDDDDEEEVEEEAYDLDEEEDDEDEEDDYEEEARRGKASRGGGKGGGGRKRSREDNFIDDSAIEDEDEDDDDDGGGRPRKKGGGGVRGFFDEEAQVDEDEEEEDEGEGEDDFINDAGADLPDEDVVRGSRRHSIPMRDEEEDIDEIQTSVRLVLPGELAKHAVSEGTKAVTKFTSA

SEQ ID NO: 296397 - protein, 256 aa, Zea mays
  Clone ID: MRT4577_33389C.1.pep
GILTPAISVLSASGGIRVQNQNMSTDVVVLVAVVILIGLFSMQHYGTDKVGLLFAPIVLLWFILIGSVGAINIHKYNNSVLRAYNPISIYRFFQRRRNYDIWTSLGGIMLSITGTEALFADLCHFPVLAIQIAFTLIVFPCLLLAYTGQAAYIISNKTHVADAFYRSIPAAIYWPAFIIATAAAIVASQATISATYSIIKQALALGCFPRVKIVHTSKKFLGQIYIPDINWILLVLCIAVTAGFKNQSQIGNAYGT

SEQ ID NO: 296398 - protein, 118 aa, Zea mays
  unsure (1)..(118): unsure at all Xaa locations
  Clone ID: MRT4577_3338C.1.pep
TRSLTSKMQACSPRRALLLRGPRGAQLFPIPVGNKPRAFSSASPAAARSPKDAHNAPPPIMPTLPWGDALAATQRTFCLPLAGRVLAASATENAAVAPRAVYASLAPGRXRRARRHAA

SEQ ID NO: 296399 - protein, 96 aa, Zea mays
  unsure (1)..(96): unsure at all Xaa locations
  Clone ID: MRT4577_33390C.1.pep
DGKTHVTVEYVNEGGXMVPVRVHTVVISTQHDETVTNDEVAADLREHVIKPVIPDRYVDEKTMLQLNPSGRFVVGGPHGDAGLTGRRVIVGTYCGW

SEQ ID NO: 296400 - protein, 123 aa, Zea mays
  Clone ID: MRT4577_33391C.1.pep
QIPDGYGSGRGYGRGMGGRMMAGRGFGRGLERRTPPPGYVCHRCKVPGHFIQHCPTNGDARYDVKRMKPPTGIPKSMLMQTPDGSYALPSGAGAVLKPNEAAFEKEIEGLPTTRPVGDLPPEL

SEQ ID NO: 296401 - protein, 60 aa, Zea mays
  Clone ID: MRT4577_33392C.1.pep
KRLLGDQRGEKKGGGALFEKRPFRDSQSPPPRGGKFEGFHPPFPLKGFFPPGKNFFPFFL

SEQ ID NO: 296402 - protein, 42 aa, Zea mays
  Clone ID: MRT4577_33393C.1.pep
GYFFFFLFSFMCDFCIIIIFCVFCCILFFFYFLIFCLISLMF

SEQ ID NO: 296403 - protein, 141 aa, Zea mays
  unsure (1)..(141): unsure at all Xaa locations
  Clone ID: MRT4577_33394C.1.pep
GVLPPAVGLVFGLXRLWPPAVSCGFGGSGAPFWVRFGPXFLLSPRWPFPLVVFPSLSGLVCXWFLPCSFCVLSLVLCWLSFGSPGPCWCCAFPALGCLFVVPGLVGVGRFPPGALLXXFFXXESXGGRSAAPCFAACFRLA

SEQ ID NO: 296404 - protein, 166 aa, Zea mays
  unsure (1)..(166): unsure at all Xaa locations
  Clone ID: MRT4577_33395C.1.pep
MLKIVNKVIINVAGKHDVMNNVMSLGIHPTWEDECISSMALGLDIKSLDVAGRTGSIALQLLDYCKNVHRDNTAFAKLVYINPHMLREGXKKFKETPYIHIGFLVQKAVNLADIPDGSADFYTIAFGIRNCTHVDKVIKETYRVXKAGSAFXCLEFSKLDSLLIGK

SEQ ID NO: 296405 - protein, 56 aa, Zea mays
  Clone ID: MRT4577_33396C.1.pep
PRVRANYAKTSSTGKIKCVVLCCVNQIIGKLKCDIKSGPGMPMCFKIFHVRVLSAP

SEQ ID NO: 296406 - protein, 66 aa, Zea mays
  Clone ID: MRT4577_33397C.1.pep
GQIIWFSLTLKRSFSHDPHRKPVIDRARAYPTNGTRSFAFTKLLKCTVSLYVENTNDGSPRELYIL

SEQ ID NO: 296407 - protein, 104 aa, Zea mays
  Clone ID: MRT4577_33398C.1.pep
PGLLLFPVGRAGPPPGFSFIGAPGGGSAGRFLRWSLPFSWFARVGSGVCSSQGVPPAARGALFLGRGGRPPFFFFVFLSARSKPSAPWPVVLGIGRPLSFLLKS

SEQ ID NO: 296408 - protein, 73 aa, Zea mays
  Clone ID: MRT4577_33399C.1.pep
TAGQGFKQMLGGGHKRPLIFFGGKALGGGKIFLLPNKLLKILRVLLPYGKFMYLPTLCSMYGPRMCPMWLCNF

SEQ ID NO: 296409 - protein, 93 aa, Zea mays
  Clone ID: MRT4577_3339C.1.pep
FFFFFFFFFFFFYFPGSCWKGERPNKKKFMPGEKRPVPRAQKKKAKVQSATKMIVVASSNTTPTTNIKKKTQYVQRHKKQPKKINSKTPADQP

SEQ ID NO: 296410 - protein, 231 aa, Zea mays
  unsure (1)..(231): unsure at all Xaa locations
  Clone ID: MRT4577_333C.1.pep
GQCISIHIGQAGIQVGNACWELYCLEHGIQADGQMPGDKTIGGGDDAFNTFFSETGAGKHVPRAVFVGLVPTGIDEVRTGAYRQVFHPGRLISGXEDAAHNFARGLYSIGXGIVVLCLGRLLKLADNCTGLQGFLVFYAVGGGTGSGLGSLPPGRLAVVFGXESQLGFPVVPSPQGPPSGVEPPXSGLATHSFLGPLXFVVLPRLEAFFGFCRRCLAFEXPTFPTLNRVGS

SEQ ID NO: 296411 - protein, 78 aa, Zea mays
  Clone ID: MRT4577_33400C.1.pep
GLAVLGLLGLRWGFGALSVVAVCLCFLPWWGPLLGPGVVVGALLCAGCSPASFVPSPPVVGAFGVVNRGVGRPGGSGA

SEQ ID NO: 296412 - protein, 98 aa, Zea mays
  Clone ID: MRT4577_33401C.1.pep
RDGQLPINRIGLGSHQEVYHPFTLKAGCVEFISTLILFFGGQGFGMVFIKLTGGGPTTPAVLIVAEVSHAFALFAAKSVGANISVGHVNPAVTFGAFV

SEQ ID NO: 296413 - protein, 313 aa, Zea mays
  Clone ID: MRT4577_33402C.1.pep
SRPAGKSPHYHYQPERQARPPASLQTKQNKTMATASEIAAVGVIGAGQMGSGIAQLAAAGGCAVLLLDADPTALSRAVVSISASLRRLAAKGQLSQDLRDADLVIEAVVENEDVKKKLFVELDKVTKPSAILASNTSSISITRLASATKRPSQVIGMHFFNPPPVMKLIEIIRGADTSDEVFAAVRSFSERLGKSVICSQDYPGFIVNRILMPMINEAFWALYTGVATKEDIDAGMKLGTNHPMGPLQLADFIGLDVCLSVLRVLHSGLGDSKYSPCPLLVQYVDAGRLGKKRGVGVYSYGHRPSSVRPKSSL

SEQ ID NO: 296414 - protein, 337 aa, Zea mays
  Clone ID: MRT4577_33403C.1.pep
GTGPLEADGDSHPDPHPTYQPERQARPPASLQTKQNKTMATASEIAAVGVIGAGQMGSGIAQLAAAGGCAVLLLDADPTALSRAVVSISASLRRLAAKGQLSQAACEDSIKRIRCVSAVQDLRDADLVIEAVVENEDVKKKLFVELDKVTKPSAILASNTSSISITRLASATKRPSQVIGMHFFNPPPVMKLIEIIRGADTSDEVFAAVRSFSERLGKSVICSQDYPGFIVNRILMPMINEAFWALYTGVATKEDIDAGMKLGTNHPMGPLQLADFIGLDVCLSVLRVLHSGLGDSKYSPCPLLVQYVDAGRLGKKRGVGVYSYGHRPSSVRPKSSL

SEQ ID NO: 296415 - protein, 55 aa, Zea mays
  Clone ID: MRT4577_33404C.1.pep
IFFCFLLFFFFFFFFFFFIFFFFFFFFFFFFLNFQMYLSFKSEMLQLNFQKVAII

SEQ ID NO: 296416 - protein, 153 aa, Zea mays
  unsure (1)..(153): unsure at all Xaa locations
  Clone ID: MRT4577_33405C.1.pep
RPVGLHFDFRAQKREGRSSRSPGDPVAGRPHTSSSLPSVLFPTIKMSRGGSASGGQRSLVYLFGSGEPPKPXSDXPAESAPPAAAGAPPAEKSPAAKTDGTRHIADEVTRLSNNXSHRVDDQSTGNFLTDRPSTKVHAAPGVGSSLRYLFAGN

SEQ ID NO: 296417 - protein, 279 aa, Zea mays
  unsure (1)..(279): unsure at all Xaa locations
  Clone ID: MRT4577_33406C.1.pep
MPMAPPPLLPLSALLLLLAAASHASAKPVQTQALLATPLSPDRVSAPSELARDDDSNVFAGNLAAAEDAAASTVRFRVVHRDDFSKNATAAELLAYRLERDEKRAARLSAAAGAANGTRRGGGGVVAPVVSGLAQGSGEYFTKIGVGTPATPALMVLDTGSDVVWLQCAPCRRCYEQSGQVFDPRRSRSYGAVGCAAPLCRRLDSGGCDLRRSACLYQVTYGDGSVTXAGDISTETLTFAGGARVARXRSGVRHDNXEGLFVXAAAGLLGLGRGSLSFP

SEQ ID NO: 296418 - protein, 111 aa, Zea mays
  unsure (1)..(111): unsure at all Xaa locations
  Clone ID: MRT4577_33407C.1.pep
SSRCPGRXVLCRVRGRLXGLPVLGVAVVVAVXVRVLFLXXXVLARXAVAVAPPPPFGXGCVRAGVRRAVGRFRXGLGSAVLVXAGVRACSPRRGRCWLGLSGSRPPPXRLR

SEQ ID NO: 296419 - protein, 63 aa, Zea mays
  Clone ID: MRT4577_33408C.1.pep
GPQAFQFKFAPSLVCAIVNPLTISPRKQCMTVIGPKFVPGSDSLHKSPNVGEFPLSVGTAQQF

SEQ ID NO: 296420 - protein, 74 aa, Zea mays
  Clone ID: MRT4577_33409C.1.pep
MVFFCFLVEQRRTVRSSKPAAGICSRCGGCASVADMETATRVCYLLTVHRRTWRAIICTFCGAMLKSYRHYRLY

SEQ ID NO: 296421 - protein, 665 aa, Zea mays
  Clone ID: MRT4577_3340C.1.pep
MALLLRPIPPPPRLRALLGRLLSTGASLFPSRMLPAPRSTAAVPRLLFGPSAVAAAATRRNGVRVRAFMASTTASEAMHEKQVSAEYTAANVQVLEALDGVRTRPGMYIGSTGPRGLHHLVYEILDNAVDEAQAGHASKIDVVLHDDNSVSVTDNGRGIPTDMHPQTKKSCVETVLTLMHAGGKFGGSKSGYSVSGGLHGVGLSVVNALSETLEVTVWRDGKEHRQSYSRGKPTTRLTSSTLTGETSSRQGTRIRFWPDKDIFTTTIDFDFNTISSRIRELAFLNPELTIILTKEEGHTVQRNEYCYAGGLVEYVKWLNTDKKPLHDPIAFRKELDGITVDVSLQWSSDSYSDTVLGYANSIRTIDGGTHIDGLKASLTRTINNLAKKSKTIKDKDITLSGEHVREGMTCIISVKVPSPEFEGQTKTRLGNPEVRRIVEQSVQENLTEYLELHPDVLDSILSKSLNALKAALAAKRARELVRTKSVLKSSSLPGKLADCASANPEESEIFIVEGDSAGGSAKQGRDRRFQAILPLRGKILNIERRDEAAMYKNEEIQNLILALGLGVKGEDFKKEALRYHKIVILTDADVDGAHIRTLLLTFFFRYQRALFDEGCIYVGVPPLYKVERGKLAHYCYDDADLKEIVNTFPANASYHIQRFKGLGEM

SEQ ID NO: 296422 - protein, 43 aa, Zea mays
  Clone ID: MRT4577_33410C.1.pep
QLHHNNKFRCIHTGAEATTNQKVTYITTISSPVQVSRRCSLLI

SEQ ID NO: 296423 - protein, 95 aa, Zea mays
  Clone ID: MRT4577_33411C.1.pep
FKTTVVIQMLSESQEETQGKFKHGIILKVRLALNQASIRINLVHPSACNPIQGCSHKKTCNIFFSNTQEKCISYIKNNKRGKRTPNNITKSHLGF

SEQ ID NO: 296424 - protein, 98 aa, Zea mays
  unsure (1)..(98): unsure at all Xaa locations
  Clone ID: MRT4577_33412C.1.pep
MASGAAAAPVLNTMVLKAAIHCHGCXMNVRKVFTGIEGVHDVTVDPFHHKVTXTGTEDTDTLMKRLYKSCMKGVPWQCHTSSKNREPTPEATVNSHSS

SEQ ID NO: 296425 - protein, 110 aa, Zea mays
  Clone ID: MRT4577_33413C.1.pep
RHNRSTWHYRCGPDCRTPSSVDSPVIMRLKITCRQRDLTPENAVQAIRHRNARCAGLICRRRSRSAQAFQDGRRRGYQAANYPLGCSLSNSSARRQRSSLSPAGTSTMAS

SEQ ID NO: 296426 - protein, 81 aa, Zea mays
  Clone ID: MRT4577_33414C.1.pep
FGTRAAPVGRRRLARLHGLLTVLSSRALEQPVSRYKVIPVLDYISGRTNSLNYIYSVHEPFATFQLRDCTGTIVLDCIAEL

SEQ ID NO: 296427 - protein, 95 aa, Zea mays
  Clone ID: MRT4577_33415C.1.pep
DLLQRLNLLERLCGLNEGLELIRREIGIRISDCNALSSYGSSLLPLWMHAEVHLKQLDSSISRMEMSYHADTEHRNSKTEVVEHNAPDGADLTTP

SEQ ID NO: 296428 - protein, 71 aa, Zea mays
  Clone ID: MRT4577_33416C.1.pep
PDSGQEGVFTYMSAQYLSVKTAPRTKNGTRRELECQPPSTLSGLKNWGETPIKKLLTLSKPAINKYNLRVC

SEQ ID NO: 296429 - protein, 188 aa, Zea mays
  unsure (1)..(188): unsure at all Xaa locations
  Clone ID: MRT4577_33417C.1.pep
MDPSSEPLYAQVEPYDSGFLKVSDVHTIYYEQSGNPQGHAAVFLHGGPGAGTSPGNRRFFDPQFYRIVLFDQRGAGRSTPHACLEQNTTWDLVADIEKLREHLGIPEWQAIIFFFNNTDYSLFSAGTQCCQTMXVFGGSWGSTLALAYSQEHPDKVLNADLLWPVTSSPVHILNLKNHVVEEKLTENE

SEQ ID NO: 296430 - protein, 194 aa, Zea mays
  unsure (1)..(194): unsure at all Xaa locations
  Clone ID: MRT4577_33418C.1.pep
MDPLSEPVYASVEPYDSGFLKVSNVHTIYYEQSGNPQGHVAVFLHGGPGAGTSPGNKRFFDPEFYRIVLFDQXFGYSSFFLKRNQRGLGGCVLFLICVMVRLQRGAGRSTPHACLEQNTTWDLVADIEKLREHLGIIQVFDGSWGSTLALAYSQEHPDKVTGLVLRGIFLLRKQEFDWFYDGGAAAIFPDGVEC

SEQ ID NO: 296431 - protein, 207 aa, Zea mays
  Clone ID: MRT4577_33419C.1.pep
KTKKKKKKKKKKKKKKKKKKKKKKKKKKKKTLGNRKNGGFRIRLSPEPKGSPLPQFFSNFSQRRRLPLFKNTRGEGFSIHFGKAGIQVENAGGKLNCLKKGIQVEGKRPGEKTLGGGEEVFNTFFREMGVGNHAPRVVFVDLEPIVIKEGRMGTYRQFFHLEKFFRGKEDAANNFVGGHNTIGKEMVDLCLDRIRKFANNCTGLKGF

SEQ ID NO: 296432 - protein, 182 aa, Zea mays
  unsure (1)..(182): unsure at all Xaa locations
  Clone ID: MRT4577_3341C.1.pep
LVFFFGLVPCRCAAWGGGARRFVPGLPLWPLFFFLCFCLLAVVGGAGWLGLAFGLGRSAAGPPGSFCLLLSSCLLSPAXFLPLXPXAPPPAPGVXPAPSPSXXXALAPPPVRFSSPPWLPAPFGXXFCPPPPLLAAAPXXXVPPXAPPPXXPXPPXPPPXXXPPPPPPXPPPPFFFFFPPFF

SEQ ID NO: 296433 - protein, 385 aa, Zea mays
  Clone ID: MRT4577_33420C.1.pep
MIRVSPLLLARPLRVHCPTPSRLSRPPLHHPHPRSGEGGLGCVQAKGTRRRCRASLSVPIAAQMDPSSEPLYAQVEPYDSGFLKVSDVHTIYYEQSGNPQGHAAVFLHGGPGAGTSPGNRRFFDPQFYRIVLFDQRGAGRSTPHACLEQNTTWDLVADIEKLREHLGIPEWQVFGGSWGSTLALAYSQEHPDKVTGLVLRGIFLLRKKEFDWFYEGGAAAIFPDAWEPFRDFIPEDERNCFVDAYNKRLTSSDPIVQVEAAKRWTMWEMMTAQLIQNNDNIKRGEDDEFSLAFARIENHYFVNKGFLPSDSFLLDNVDKIRHIKGFIVQGRYDVCCPMMSAWDLHKAWPEAEFKVVADAGHSANEVGIAAELRSATDKLRDLLRK

SEQ ID NO: 296434 - protein, 63 aa, Zea mays
  Clone ID: MRT4577_33421C.1.pep
ICCFIATTLPQLSHQNSPSTPKHPAVKHLRADRSVCSSSKLHSPNNILLVALRSRHLTNKWSR

SEQ ID NO: 296435 - protein, 66 aa, Zea mays
  Clone ID: MRT4577_33422C.1.pep
SFKVAAKFGIHGLCQGFHGLLPCRLISCGFIFRWQHTQAHGPFVPFGSNSPSLNFFIRASLYVIVP

SEQ ID NO: 296436 - protein, 91 aa, Zea mays
  unsure (1)..(91): unsure at all Xaa locations
  Clone ID: MRT4577_33423C.1.pep
MANTNSEDDPSLDLMTELLRRLKRSLKPDKRLILIGPPGSGKGTQTPSIIDEYXLCHXATGDMXRAAVAAKTPLGVKAKEPMDKGELGADD

SEQ ID NO: 296437 - protein, 201 aa, Zea mays
  unsure (1)..(201): unsure at all Xaa locations
  Clone ID: MRT4577_33424C.1.pep
RTPSPLFAFPDLCRSSGHASSSKCSPTGFHQYHVAGCALSTPTDDHPKIYRMNXCATNEVHAKSKVWYFLTKLKNVNSNNGLMFFIIEIFXRNPTTIKNYSIWLRNHSTTDDHHMDEEDRDTTLNGVEDHMXTXMDSRHRVRSPCIQIVETATDHFKLCMRDNAIEVHRXAINVPLVYRKVKTTSVKVMTTFEEARPHLVM

SEQ ID NO: 296438 - protein, 73 aa, Zea mays
  Clone ID: MRT4577_33425C.1.pep
RPGGIVTSISMYSAPLVAVKQVILTKSVEFMPFYLSLFSLLTSFTWMLYGILGRDPYLTKQSAAESSQWCDNN

SEQ ID NO: 296439 - protein, 77 aa, Zea mays
  Clone ID: MRT4577_33426C.1.pep
WSRSWRRRPLCRGAPASYRTRRQRSSRTRRSTASPCPPRARLSVCCSSFGHMVSPPTHTSPMTPSRKHDHKPKPRPD

SEQ ID NO: 296440 - protein, 237 aa, Zea mays
  unsure (1)..(237): unsure at all Xaa locations
  Clone ID: MRT4577_33427C.1.pep
MVTSIRVIVGIIGSVVCVLLYAVPVLTFKRVVKEASVGEFSCVPYILALFSAFTWGWYGFPIVXRVGEPVALRHVRRRSALRSXSSSYTCGLXPRDKKKSVVLMVSLVVATLCVIVSLSSFVFHTHHTRKLFVGSIGIVTSISMYSAPLVAVKQVILTKSVEFMPFYLSLFSLLTSFTWMLYGILGRDPYLTAPNGAGCLTGLLQIAVYCIYSRCNRPPKAVNGATTSREDANDCKV

SEQ ID NO: 296441 - protein, 45 aa, Zea mays
  Clone ID: MRT4577_33428C.1.pep
KLRVAETKMDHRAKMDLPFYPSTSKDAIDFRIRNLGRRGNLPSQF

SEQ ID NO: 296442 - protein, 54 aa, Zea mays
  Clone ID: MRT4577_33429C.1.pep
PARSKGLLSLTSPESQDFSNKRNLAIMRKIIPYGSPQFRGKNSSFTWRSKILDF

SEQ ID NO: 296443 - protein, 107 aa, Zea mays
  unsure (1)..(107): unsure at all Xaa locations
  Clone ID: MRT4577_3342C.1.pep
PRGRRRRRPRTTFTFTSPTPTTTPRATTRTPPPTAPPTRPPXPSPGTTTPPHPAPKQPRAAPPPATRPAHSPAPTRATAPPTEAPREPAPPSQERRPACAPAGAAKT

SEQ ID NO: 296444 - protein, 50 aa, Zea mays
  Clone ID: MRT4577_33430C.1.pep
KNQVLNILVKPSLFGDGFPNRGQQQENFSNKRFHKLTPPPTTSVYTDLIL

SEQ ID NO: 296445 - protein, 36 aa, Zea mays
  Clone ID: MRT4577_33431C.1.pep
ADHHSPFIAEQLAMEHHRVVAALWVKVEEKECVTFP

SEQ ID NO: 296446 - protein, 118 aa, Zea mays
  Clone ID: MRT4577_33432C.1.pep
VGNGNAPGSSVGRAGVIARTFRAAVVPVSSLRRPATVASAPSHSQAPVRVALGGRPPLGGRRPAGPCDRGAQAWRRRRVLLCRRWRLACPLHAAQEGAPARLGCLYLEASSLAFRVYP

SEQ ID NO: 296447 - protein, 152 aa, Zea mays
  Clone ID: MRT4577_33433C.1.pep
SLAEHYYGSLGSGYPATSHHSVQILSLQGRQCLASLRWHRPSLATSGRQTCVAAMCLFLLGTWMALAWLAVTHEQLESEPSAAVTVRMARSSSTIRLSLSVNHLRPGVLVLASLHVDLIGEGAFGRLAFGLVVRARSLRTRIPWKTMGLPAI

SEQ ID NO: 296448 - protein, 97 aa, Zea mays
  Clone ID: MRT4577_33434C.1.pep
STRENRTNKDGGTQPDDSRGTVSRCYDILLYISKKDQRTAPDDIQQSQIAYLRKKRPTDSAKTRHAANVNKSALNRTPRSKECKYQREDVYMIPGNT

SEQ ID NO: 296449 - protein, 150 aa, Zea mays
  Clone ID: MRT4577_33435C.1.pep
TVVIDASAVASGAGEGEEEEEEQGECGFCLFMKGGGCKDEFVAWEKCVEETDAADASIDVVERCQDVTAALRKCMDAHAAYYEPILRAERAMAADLEAFQAQEAASDSAASEEGQKEAAAAEAAPRPSDLGQNKQVAEAAVAEESRDPAA

SEQ ID NO: 296450 - protein, 69 aa, Zea mays
  Clone ID: MRT4577_33436C.1.pep
ETLQGIAATQATVVPRSQIFGEAELVSAVPCLLRLLFCVISIDQLLPWRLCNSISWVYLRALKPYLSMN

SEQ ID NO: 296451 - protein, 160 aa, Zea mays
  Clone ID: MRT4577_33437C.1.pep
SFLMGGPSPRLGAFDPKLRGKPPPLKKSPKKRGGRDSKRVKTPGHYRGGLKATAVIGGMPKQLAAQKNEPGDPNHFGDRKREAPKQPPHKKGLGGKKPQPGPPFPDVLRERLANHLFFARVVVVVGVFHGPPPPQKPGEHNGVLQPPQAPLADERAHGVH

SEQ ID NO: 296452 - protein, 63 aa, Zea mays
  Clone ID: MRT4577_33438C.1.pep
IHPVVIINALPSTVNFVSWIKDHGVSYSASMSFVSCQGGSNHKCLMFSICRCYICYAPASHRQ

SEQ ID NO: 296453 - protein, 60 aa, Zea mays
  Clone ID: MRT4577_33439C.1.pep
LFITRSRQQCRTELDTVLNNEGVGTNLKQTILPCTCVRRVAPSSRHGVGPLDRPPPPPRP

SEQ ID NO: 296454 - protein, 61 aa, Zea mays
  Clone ID: MRT4577_3343C.1.pep
RAAARAGTSFFFLFSFFFFFSLNRLIINLSFKKTLAGILPYMLPLLDTSTKKRSQGGHYSK

SEQ ID NO: 296455 - protein, 108 aa, Zea mays
  Clone ID: MRT4577_33440C.1.pep
RAQKANRLSPGVGRFIKATGPTGFPTGKRAVRPTQLILVRSLLRPPRLYPLSFRVVSCGEMLTENHFPQGTTMAINSPRLGPRLDPLGTAPNWVEIALFERPPGQGHF

SEQ ID NO: 296456 - protein, 56 aa, Zea mays
  Clone ID: MRT4577_33441C.1.pep
VHYGSSCYSFARDVLPLGISPRGALYRGNLKSKAANKRLSTDLPTYLSLFGIPSSA

SEQ ID NO: 296457 - protein, 92 aa, Zea mays
  Clone ID: MRT4577_33442C.1.pep
WRSQCQGLVEAFLWCREKGLALLKEEPASPGGDGEAGLALAPNECDFCVTAPPPLPVAVVHAILEGKGSFSPEGPRNAQQPEPGDPMEIPDR

SEQ ID NO: 296458 - protein, 89 aa, Zea mays
  Clone ID: MRT4577_33443C.1.pep
PAIDCYSQFIEVGTMVSPTIYARRCLSYLMNGMPQEALNDAMNALVISPTWSTAFYLQAAALLSQGMENEAQEALKDGCNLEQSSSGGH

SEQ ID NO: 296459 - protein, 69 aa, Zea mays
  Clone ID: MRT4577_33444C.1.pep
DSGILLKGKKCRRSGGSKKKKKKKKKKKKKKKKKKKKKKGGRNKKKKNKQMKFYQVHQCAVVSTCVSNV

SEQ ID NO: 296460 - protein, 207 aa, Zea mays
  unsure (1)..(207): unsure at all Xaa locations
  Clone ID: MRT4577_33445C.1.pep
MAPKRGGRAPVPAKKKTDKVTNPLFEKRPKQFGIGGALPPKKDLHRFVKWPKVPPALNQFTRTLDKNLATNLFKMLLKYRPEDKAAKKERLLKRAQAENEGKTVESKKPIVVKYGLNHVTYLIEQNKAQLVVIAHDVDPIELVVWLPALCRKMEVPYCIVKGKARLGSIVHKKNASVLCLTTVKNEDKLEFSKILEAIRXNFNDKFD

SEQ ID NO: 296461 - protein, 111 aa, Zea mays
  unsure (1)..(111): unsure at all Xaa locations
  Clone ID: MRT4577_33446C.1.pep
MQFLKVVSPLRRTQSLRILAILVIFFVLASVSRYQGSYEYSIDEDGQVQSVPSDVTEHDIYFTHHIATFDPNDLRPWTKSDTEALKTPXGQEVVDYLTDSSFQKHVAENDT

SEQ ID NO: 296462 - protein, 94 aa, Zea mays
  Clone ID: MRT4577_33447C.1.pep
SNMVLSVSVPRNDTNRHRYRAESLSHSKGQHYITKMWGGGRQAPAEKRRRSLGGNEHVYLTSLLHTERTRPPSCPLDVILRQGPHCWGGCLRGG

SEQ ID NO: 296463 - protein, 258 aa, Zea mays
  Clone ID: MRT4577_33448C.1.pep
MAPKRGGRAPVPAKKKTDKVVNPLFEKRPKQFGIGGALPPKKDLHRFVKWPKVVRIQRQRRILKQRLKVPPALNQFTRTLDKNLATNLFKMLLKYRPEDKAAKKERLLKRAQAETEGKTVEAKKPIVVKYGLNHVTYLIEQNKAQLVVIAHDVDPIELVVWLPALCRKMEVPYCIVKGKARLGSIVHKKTASVLCLTTVKNEDKLEFSKILEAIKANFNDKFDEVRKKWGGGIMGSKSQAKTKAREKLIAKEAAQRMT

SEQ ID NO: 296464 - protein, 98 aa, Zea mays
  Clone ID: MRT4577_33449C.1.pep
WLPALCRKMEVPYCIVKGKARLGSIVHKKNASVLCLTTVKNEDKLEFSKILEAIKANFNDKFDEVRKKWGGGIMGSKSQAKTKAREKLLAKEAAQRMT

SEQ ID NO: 296465 - protein, 36 aa, Zea mays
  Clone ID: MRT4577_3344C.1.pep
QKPSYMFTDREHREPFEYSEDLTSLTVGAEDPENVI

SEQ ID NO: 296466 - protein, 128 aa, Zea mays
  Clone ID: MRT4577_33450C.1.pep
VTWLRPYFIEQNKAQLVVIAHDVDPIELVVWLPALCRKMEVPYCIVKGKARLGSIVHKKNASVLCLTTVKNEDKLEFSKILEAIKANFNDKFDEVRKKWGGGIMGSKSQAKTKAREKLLAKEAAQRMT

SEQ ID NO: 296467 - protein, 258 aa, Zea mays
  Clone ID: MRT4577_33451C.1.pep
MAPKRGGRAPVPAKKKTDKVTNPLFEKRPKQFGIGGALPPKKDLHRFVKWPKVVRIQRQRRILKQRLKVPPALNQFTRTLDKNLATNLFKMLLKYRPEDKAAKKERLLKRAQAENEGKTVESKKPIVVKYGLNHVTYLIEQNKAQLVVIAHDVDPIELVVWLPALCRKMEVPYCIVKGKARLGSIVHKKNASVLCLTTVKNEDKLEFSKILEAIKANFNDKFDEVRKKWGGGIMGSKSQAKTKAREKLLAKEAAQRMT

SEQ ID NO: 296468 - protein, 142 aa, Zea mays
  Clone ID: MRT4577_33452C.1.pep
QNPKNLKFQTQKNPPKNRSPSLKNPTPRAPYLTPKFAKRENLTTGEIPWEKKTGVLNPLVYPKNPPPKKFLCLLGKHGGEKLGALFGDPLDLPLKDLISQLAPPGGRNISPPGPNSGGRGDPLFLKGPPPGGTPTFGPLKGG

SEQ ID NO: 296469 - protein, 160 aa, Zea mays
  unsure (1)..(160): unsure at all Xaa locations
  Clone ID: MRT4577_33453C.1.pep
MGKKGKWFGAVKKVFSPESKEKKEERLRRKSAXQPSTGRSDPIYLPGSQCFGATPSGSSSSXPRQTDEVRVPEAEQEQSKHGHXLEEAPAAAAAPAQASVLPPGAPTEELAAIKIQTAFRGYLARRALRALRGLVRLKSLXEGXSVKRQSASTLRCMQTL

SEQ ID NO: 296470 - protein, 228 aa, Zea mays
  Clone ID: MRT4577_33454C.1.pep
MGKKGKWFGAVKKVFSPESKEKKEERLRRKSAGSNPTPVDLTPSTSLEVNLSVPPPPAPPPVLHQAEEVGVPEAEQEQSKHVAVEEAPAAAPAQASVLPPAVPTQELAAVKIQTAFRGYLARRALRALRGLVRLKSLVEGNSVKRQSASTLRCMQTLSRVQSQISSRRAKMSEENQALQRQLLLKQELENFRMGENWDDSTQSKEQIEASLISRQEAAIRRERALAYA

SEQ ID NO: 296471 - protein, 258 aa, Zea mays; identical to SEQ ID NO: 296467
  Clone ID: MRT4577_33455C.1.pep

SEQ ID NO: 296472 - protein, 467 aa, Zea mays
  Clone ID: MRT4577_33456C.1.pep
MGKKGKWFGAVKKVFSPESKEKKEERLRRKSAASNPTPVDLTPSTSLEVNLSVPPPPAPPPVLHQAEEVGVPEAEQEQSKHVAVEEAPAAAPAQASVLPPAVPTQELAAVKIQTAFRGYLARRALRALRGLVRLKSLVEGNSVKRQSASTLRCMQTLSRVQSQISSRRAKMSEENQALQRQLLLKQELENFRMGENWDDSTQSKEQIEASLISRQEAAIRRERALAYAFSHQWKSTSRSVNPMFVDPNNLQWGWSWLERWMAAKPWEGRNGADKESNIDRGSVKSMSLNLGEGEITKAFNRRDSKLEKPSPPTPRPARPTSRHSPLTPSARVAPIPARRKFVTPKNGLSQVDDDARSVLSVQSERPRRHSIATSTVRDDESLTSSPSLPSYMVPTESARAKSRLQGSATANGAETPEKGGSTGPAKKRLSFQGGTVSASPMRRHSGPPKVEIAPPQPEALVVNGGSK

SEQ ID NO: 296473 - protein, 258 aa, Zea mays
  Clone ID: MRT4577_33457C.1.pep
MAPKRGGRAPVPAKKKTDKVTNPLFEKRPKQFGIGGALPPKKDLHRFVKWPKVVRIQRQRRILKQRLKVPPALNQFTRTLDKNLATNLFKMLLKYRPEDKAAKKERLLKRAQAENEGKTVESKKPIVVKYGLNHVTYLIEQNKAQLVVIAHDVDPIELVVWLPALCRKMEVPYCIVKGKARLGSIVHKKTASVLCLTTVKNEDKLEFSKILEAIKANFNDKFDEVRKKWGGGIMGSKSQAKTKAREKLLAKEAAQRMT

SEQ ID NO: 296474 - protein, 284 aa, Zea mays
  unsure (1)..(284): unsure at all Xaa locations
  Clone ID: MRT4577_33458C.1.pep
MVVDEALLPFFQKFEVKPLVLHINYIPRQFDPIALGKGNYAELLNILPWKGIDLKLKHVSAMGVYGWSSIGDTVAAEWLEDISKNQVHKLLKGLAPIRSLAAVGSGTRKLVSLPIKSYKKGXRKLLKGVQRGTVAFIRSVSIEAVGLGVHLAAGAHDILMKTEHALTTVPPPLASCEAKRTKHNIRANQPESAQQGMKQAYESLTVGFGRTASALIGNPIKVYNRGAGVGSVLATAICGAPAAAVAPVSASARALHYALLGLRNSLDPEHKKESMYKYQGPSQA

SEQ ID NO: 296475 - protein, 470 aa, Zea mays
  Clone ID: MRT4577_33459C.1.pep
MGKKGKWFGAVKKVFSPESKEKKEERLRRKSAGSNPTPVDLTPSTSLEVNLSVPPPPAPPPVLHQAEEVGVPEAEQEQSKHVTLEEAPAAAPAQASVLPPGAPTEELAAIKIQTAFRGYLARRALRALRGLVRLKSLVEGNSVKRQSASTLRCMQTLSRVQSQIRSRRAKMSEENQALQRQLLLKQELENFRMGENWDDSTQSKEQIEASLISRQEAAIRRERALAYAFSHQWKSTSRSANPMFVDPNNLQWGWSWLERWMAAKPWEGRNGADKESNIDRGSVKNMSLNLGVGEGEITKAFNRRDSKPEKPSPPTPKPARPASRHSPSTPSARVAPIPARRKSSTPKNGLSQVDDDARSVLSVQSERPRRHSIATTSTVRDDESLTSSPSLPSYMVPTESARAKSRLQGSATANGAETPEKGGSTGPAKKRLSFQGGTAAASPMRRHSGPPKVEIAPPQPEALVVNGGSK

SEQ ID NO: 296476 - protein, 58 aa, Zea mays
  Clone ID: MRT4577_3345C.1.pep
MPLVRFEVRNEVGLGDPGLYGGGASAAAGEEEEPNALLEGVAVAGLVGILRQLGDLAE

SEQ ID NO: 296477 - protein, 259 aa, Zea mays
  Clone ID: MRT4577_33460C.1.pep
MAPKRGGKAPVPAKKKAADKVVNPLFEKRPKQFGIGGALPPKKDLHRFVKWPKVVRIQRQRRILKQRLKVPPALHQFTRTLDKNLATNLFKMLLKYRPEDKVAKKERLLKRAQAEAEGKTVEAKKPIVVKYGLNHVTYLIEQSKAQLVVIAHDVDPIELVVWLPALCRKMEVPYCIVKGKARLGSIVHKKTASVLCLTTVKNEDKLEFSKILEAIKANFNDKFDEVRKKWGGGIMGSKSQAKTKAREKLLAKEAAQRMT

SEQ ID NO: 296478 - protein, 218 aa, Zea mays
  unsure (1)..(218): unsure at all Xaa locations
  Clone ID: MRT4577_33461C.1.pep
MPTDSAPPNAASLSEDDRLLVAHCATLSFPSSSPTAAAATTPSASSFQVHHASHPYPCAAFVFPPSWSAADWMGGDGGHPPFGDAEVDPALFPSLRAVGSGIPARTNAAFLGNFRRLLDGSTLQSEVSRAVAEEKRVVFTGHSSGGSIATLAAIWFLEKCTRRGSVNQAHPFCVTFGAPLIGDNIFNHAVKREGWSQXFLHFLLSLDIVPRIPLTPLA

SEQ ID NO: 296479 - protein, 477 aa, Zea mays
  unsure (1)..(477): unsure at all Xaa locations
  Clone ID: MRT4577_33462C.1.pep
MGKKGKWFGAVKKVFSPESKEKKEERLRRKSAASNPAPVDLTPSTSLEVNVSVPPPPAXLLQFLARPTRSGSPKPSRSRAXHVTLEEAPAAAAAPAQASVLPPGAPTEELAAIKIQTAFRGYLARRALRALRGLVRLKSLVEGNSVKRQSASTLRCMQTLSRVQSQIRSRRAKMSEENQALQRQLLLKQELENFRMGENWDDSTQSKEQIEASLISRQEAAIRRERALAYAFSHQWKSTSRSANPMFVDPNNLQWGWSWLERWMAAKPWEGRNGTDKESNIDRGSVKNMSLNLGVGEGEITKAFNRRDSKPEKPSPPTPKPARPASRQSPSTPSARVAPIPARRKSSTPKNGLSQVDDDVRSVLSVQSERPRRHSIATTSTMRDDESLASSPSLPSYMVPTESARAKSRTATANGAETPEKGGSAGPVKKRLSFQGGAAAASPMRRHSGPPKVESAVKDIAAPPQPEALVANGGGSK

SEQ ID NO: 296480 - protein, 258 aa, Zea mays; identical to SEQ ID NO: 296467
  Clone ID: MRT4577_33463C.1.pep

SEQ ID NO: 296481 - protein, 112 aa, Zea mays
  unsure (1)..(112): unsure at all Xaa locations
  Clone ID: MRT4577_33464C.1.pep
LNLHAHPQNEKRWEPKRIGAHXKDSPIPLLDTPDPTANKREPQRVLPFGWGRGGALRNPAAVCEKRDGGRGGEKINPICEESRAEATRPSPRFITSARASATPRPLDYRGPI

SEQ ID NO: 296482 - protein, 113 aa, Zea mays
  Clone ID: MRT4577_33465C.1.pep
LMNAMAGSETVANCAPTVVRYTCLAKCLCRTGTTVQALTVLDRTTDRRLMPNRAFMRTLLEGIYPEHTDINSYDVAKLCIADRSVSSTQCYTCSTRLLVEGRHDENKLHDWHG

SEQ ID NO: 296483 - protein, 102 aa, Zea mays
  unsure (1)..(102): unsure at all Xaa locations
  Clone ID: MRT4577_33466C.1.pep
MISIAALLQRIVINYITTKVIVLVLGLALSVASASAMQMXCPCAGLQGLYRAGPGXDTMMGAGGCXPYXEYLRQRVHPCGGPYTRCGREPMYTVRTGCSTIG

SEQ ID NO: 296484 - protein, 200 aa, Zea mays
  unsure (1)..(200): unsure at all Xaa locations
  Clone ID: MRT4577_33467C.1.pep
RQIAGNSGILLSYIADFALAGLPTPLNWRLMIGIGAVPPLFLAAAAALAMPETPRWLVLHGHRDEARRVLARTVGDADRRLQEIXVRAGGHEAGGLRRRRRAVVGEXVRREILLRPTPAVRRVMLAILGLQVFQQACGVAAMVLYAPRVFSHVGITSERDVLGATVLLGAAKTVAIVVPLFLADSLGRRPMLLTNAGGMG

SEQ ID NO: 296485 - protein, 90 aa, Zea mays
  unsure (1)..(90): unsure at all Xaa locations
  Clone ID: MRT4577_33468C.1.pep
QLVYPFFFYKLVGGLKRVWGQRTLAPKKAGRKAYLAKLSRAQLWPRNRTNRPXFWFLRAIQKGSKPLASKPEQIISGENKGAFCIGAPLG

SEQ ID NO: 296486 - protein, 215 aa, Zea mays
  Clone ID: MRT4577_33469C.1.pep
MAEDGKSNDQILSELDALSHTLYQAHTKRRTTSLALRRSAVDENAGGADAVAVRTAARPLSRRMSMSPFRSRPKLDNNLNDDDDEDDDAGVALPSKSQSFAAVTTSPTVVGEKKGIRGWKPMRALSRIGMHRMGCLFSVEVVAAQGLPTSMNGLRLAVAVRKKETRDGGVQTMPSRVQQGAADFEETLFVRCNLYCSGGGATGKPLKFEPRPFLV

SEQ ID NO: 296487 - protein, 105 aa, Zea mays
  Clone ID: MRT4577_3346C.1.pep
LSPLPISTTEGVITRSETRRCRSVPKPLPTLIASATCTHTYGVLRFDPPTSAHFPPSWHRPSTDHLTRYWHVPPTELLTSAYHLANHDHVPTICFIQKTPPLRFR

SEQ ID NO: 296488 - protein, 129 aa, Zea mays
  Clone ID: MRT4577_33470C.1.pep
VLYRSRFNMGPPITWEGGKLNIALPHFGLGHLSWDALKGHFFGPTESLGFFWLGCPLVGPSKGEVSHGSPAGEGFELPSMGGGDMPSWVTLGWGGTFPLPPCSTFWSSKKSTSTLVLRRTFLTTFFLSP

SEQ ID NO: 296489 - protein, 121 aa, Zea mays
  unsure (1)..(121): unsure at all Xaa locations
  Clone ID: MRT4577_33471C.1.pep
SRRCVTXVARPHKLFLREPPRQQEYPSRSIRSRGADAAASARRGRGCYAHFFECKNIGVVPPIETKKSSSVAPSAAGGDPTIASSEGAEEAKEPFQSPADVKATADDGGKFTAQVEQEHEV

SEQ ID NO: 296490 - protein, 53 aa, Zea mays
  Clone ID: MRT4577_33472C.1.pep
DACVDPRTDHQLINEAAVQSMGTISLCDTDYLMQYVHIGLQMNNKGMNTIRCL

SEQ ID NO: 296491 - protein, 491 aa, Zea mays
  Clone ID: MRT4577_33473C.1.pep
MDAEAAAAAAATAVEERERLRRSFASGRTRPAAWREAQLRGLLRMATEREDDICAALHADLAKPLTECYVHEISLVISSCKFALKNLKKWMKPRKVPGGLLTFPSAASVAAEPLGVVLVISAWNYPFLLAIDPVVGAFAAGNAVALKPSEVAPATSLLLADLLPRYVDPSCVRVVQGGIPETTALLELQWDKIFYTGNSRVGRIVMSYAAKHLTPVVLELGGKCPVVVDSDVNLHVAAKRIAAGKWGCNSGQACVSPDYVVTTKSFAPKLLESLKRVLFEFYGEEPLRSPDLSRVVNSNHFNRLMALMDDYSVSGNVAFGGQIDERRLRIAPTLLLDVPLDSAMMKEEIFGPLLPIITVDKIGESFAVINSMPKPLAAYLFSNDGQLKQQFERTVSAGGIMFNDTGIHLTNPNLPFGGVGESGMGAYHGAFSFDAFSHRKAVLDRSFLGEARARYPPYTPAKLAILRGVLNGSPLATVQAAAGCTGGASAD

SEQ ID NO: 296492 - protein, 65 aa, Zea mays
  Clone ID: MRT4577_33474C.1.pep
PLAAQHCHTDDSPFAHCWLTVCTQFAHRLLTRLSCVSELAIVFTSLAHFFFTIFAPLSHIFLTFV

SEQ ID NO: 296493 - protein, 57 aa, Zea mays
  Clone ID: MRT4577_33475C.1.pep
SISSASPALLVKIEGRSGQDHTPSKVHTYPKILTLHQPPRCAPFSIATASSSSSLPA

SEQ ID NO: 296494 - protein, 209 aa, Zea mays
  unsure (1)..(209): unsure at all Xaa locations
  Clone ID: MRT4577_33476C.1.pep
PPRGVPPPRPPPWGGPSPAXVRPRGHGLAPDPWFPAQGPPLVPPPPPPCVCRPRPPLPRPPPPRPQGPPPPRARGQGPPLQGGPLPLVSPPSXRPKAGPVPAEPPPPXPGPGARPPSWGPLPPSPDGGGAPXGGVPCFGPLVXGPPPVXSAPPGAAPVVFPVFSCVPPLFFFSVLFFSTVVKTKKKKKKKKKKKKKKKKKKRKKKKKKR

SEQ ID NO: 296495 - protein, 79 aa, Zea mays
  Clone ID: MRT4577_33477C.1.pep
CPRRCRRSSSGEEGGRRRRRHGRVLPCWRAMWPVRLGWERGGHVPRSNVRLAALGYLNCQFNSHSKNNSFTNSNVSTQF

SEQ ID NO: 296496 - protein, 230 aa, Zea mays
  Clone ID: MRT4577_33478C.1.pep
MVKLAALALLALLGSVACQGDNGSPADSPAAYPPSRSVPPSSAPASPSTPAASPSQPMPSPIVLSPSPTPLAQPPSRGLGAPSQSPPVYPPSVSQPAFPPSGSSSAPSASSPEYLPSPSPSVSSQTPPTYSPDPSPPTSPSPSPLSPSKIAYPPSPSPSQPTYPPSPSPINPRQPPSPGPASYIPSPSPSPDSPAPAPFPPISNSPSPGAQCRSLQLLMPKCRSYRQGRP

SEQ ID NO: 296497 - protein, 136 aa, Zea mays
  Clone ID: MRT4577_33479C.1.pep
KKNPPGAQYTNPLPPGVWRFFFCNGPPGFSCLIRAFSSPPFFLVWSPLWPPRLFPFFFPPSFFFGIFYGLPFSPGNSVFPFFAPLLFSPLFGNFFRPLGPASYFRVAPAVRPRVQVFFCKFEPWLTPLFHGAFVFS

SEQ ID NO: 296498 - protein, 77 aa, Zea mays
  Clone ID: MRT4577_3347C.1.pep
MGYLWRVRLSSFAAGAATASAAGFFLLYKDHLLARAAIISQVEDIKETSEKHYAALNKRISALESRREPGTIKEASD

SEQ ID NO: 296499 - protein, 61 aa, Zea mays
  Clone ID: MRT4577_33480C.1.pep
PPTRRGGETNAIFFFFFLFFSSRTPHLINPSIGTTINKKSRPVKGPTPYNCAQHTIPGGGG

SEQ ID NO: 296500 - protein, 73 aa, Zea mays
  Clone ID: MRT4577_33481C.1.pep
HSPVSFQRVASEMSARTGPIYLLMLARRASLTASRLDHSRTAPARSRPCTWLARSASPTHRHLVGVAVAVATA

SEQ ID NO: 296501 - protein, 663 aa, Zea mays
  unsure (1)..(663): unsure at all Xaa locations
  Clone ID: MRT4577_33482C.1.pep
KASHKHLMPGGIVLSSSGSGKSXFMEPQDAVELNNREVKLSGEERAEELVVLSLLTSMIADSQLTIRNLMDNVLELDLACARGSYALWTNSVRPTFTDSYTICQSDQCNDYSIYIEGIRHPLLLEQSLLAEESTTEASEMPVPLDMWVKKNARIVVISGPNTGGKTATMKTLGLSSLMSKAGIFFPAKGRPRIPWFDQVLADIGDHQXSLSFDENFSSHLWDNKLIDENYFLDDXSLEHSLSTFSGHISRLRKIVEMVSKDSLVLIDEIGSGTDPAEGVALSTSILKYLASRVNLAIVTTHYADLSRLQSVDNRFENAAMEFCVETLQPTYRILWGSTGNSNALSIAKSIGFDQKVLDRAQEWVEKLLPDKQKERQGLLYDSLVDEKELLESQANEAASVLSQVEGLYNEIRLEADDLESRVAALRARETQKVQQELKVVKYRMDTIIKNFEAQLKNSKLEQYNSLMRKAEAATASVVAAHQPSEIAFDDDDENRISFVPQVGDKVYVQGLGGGTMATVVETLGEDESCMVQYGKIKVRVKRSRIKLVQRGTNNEATTSSSVKAKGRTPKQRSATTTDVSFGPVVQTSKNTVDLRGKRVSEAAFELRMAVDACRPYQVLFVVHGMGTGAVKDCAIDVLRKHPRVARFEDESPLNYGCTVAYIQ

SEQ ID NO: 296502 - protein, 133 aa, Zea mays
  unsure (1)..(133): unsure at all Xaa locations
  Clone ID: MRT4577_33483C.1.pep
PRVRKKKKKKKKKKKKKKKKKKKKKKIKKINKNKKKKKKKXKKKKKKQKRRGPSKVSNFIYPLFQFQTPSKFSLNFIPWPFFLKLLTWKTPAFPLFNPFAKNPLFPIWLFTKKPSPFSPSKNFPTLNANWNPP

SEQ ID NO: 296503 - protein, 62 aa, Zea mays
  Clone ID: MRT4577_33484C.1.pep
GIILFWQDVWNNHAPMTAFPCLYSLAKKIRNPQCWHSSAMSLEDNFHTPLSCRLRNTLSFHI

SEQ ID NO: 296504 - protein, 68 aa, Zea mays
  Clone ID: MRT4577_33485C.1.pep
AEDTFPNFDALASKKKKKKKKKKKKKKKKKKKKKKKKKKKKKKKKKKKKKRKNKKNKKKKKKKKKNGG

SEQ ID NO: 296505 - protein, 155 aa, Zea mays
  unsure (1)..(155): unsure at all Xaa locations
  Clone ID: MRT4577_33486C.1.pep
ISLERARDRXRERXREXXRYCTECXTRDIPRPYISXSTRXPSSRQGMDALARARECATREAXASSXAQKRGXGLXHXRLXSKPSGRTDVSVEQRRLXTMRVCLDDASASTGARGGXXGILXAXARHSLCSQTYRHXDSTAXSRARXFXRRYSVSH

SEQ ID NO: 296506 - protein, 64 aa, Zea mays
  unsure (1)..(64): unsure at all Xaa locations
  Clone ID: MRT4577_33487C.1.pep
DFKVVSLQRVSSQCLRALNFGGPSLFVDAIPIFFGHIPFREKGVTGVTPKKFTLCXFFLGKXXE

SEQ ID NO: 296507 - protein, 44 aa, Zea mays
  Clone ID: MRT4577_33488C.1.pep
NVVTEKSLLLPNFVAWVLILLSPAFLLPTWPHLTVLHIQFASLN

SEQ ID NO: 296508 - protein, 68 aa, Zea mays
  unsure (1)..(68): unsure at all Xaa locations
  Clone ID: MRT4577_33489C.1.pep
MALPNQGTVDYPSFKLVIVGDGGTGKTTFVKRHLTGEVEKKYEPTIGVEVHSLDFNTNCGXNRFYCWD

SEQ ID NO: 296509 - protein, 146 aa, Zea mays
  unsure (1)..(146): unsure at all Xaa locations
  Clone ID: MRT4577_3348C.1.pep
MVVPPVVVKGKRSKRQRVHAPPVVVEAAAPEWSSSAASAATAPGRDDSGLATATSPSAADEAASAGYCLSKEDEDTALCLMLLAHGEPAVAGKDDGGGTVAVAVAGKEASRFRSRRLAANDGAASGEYVYECKTCNKCXPSFQALG

SEQ ID NO: 296510 - protein, 45 aa, Zea mays
  Clone ID: MRT4577_33490C.1.pep
IMFNTLYYRDQNSLYLNKRTQMRPPTRPPTRQRTSGRTRGRTRGR

SEQ ID NO: 296511 - protein, 56 aa, Zea mays
  Clone ID: MRT4577_33491C.1.pep
LNDVFFCCSPGVAYMPMHVCVFRRPAVAWQSVQWPTCHDVTSLCTMYLFVCWIFSC

SEQ ID NO: 296512 - protein, 53 aa, Zea mays
  Clone ID: MRT4577_33492C.1.pep
VKIKREHPDLRTRMTPVMPRGRHAPLRVRYVRVSQVDQLGGEERPPEVCDVPT

SEQ ID NO: 296513 - protein, 78 aa, Zea mays
  Clone ID: MRT4577_33493C.1.pep
RNRKNCLCPQHMSAPSFLTFFLYTNRISLEMVLDTNTHTQSIRGQQKLSAGLNVPFFPCFPKCYLYENQQAKGPGVPV

SEQ ID NO: 296514 - protein, 30 aa, Zea mays
  Clone ID: MRT4577_33494C.1.pep
YRQLRDLSNTRCVVHTRSKTNNMKFPHRHE

SEQ ID NO: 296515 - protein, 145 aa, Zea mays
  unsure (1)..(145): unsure at all Xaa locations
  Clone ID: MRT4577_33497C.1.pep
PGDRPPDAPPGECPPSCPPPPRAKQLLPPWRQQGGGAGQLLPKQRLPSGAQQRRRRQPVRVPSPPTXVGGIGPPPSLSPPTSPPXPGPPPGSCCYRIWPRELEPAVPPLPCPHDGCPXVSPPPPSFVFPPRPGGPKKNVGGGVKI

SEQ ID NO: 296516 - protein, 216 aa, Zea mays
  unsure (1)..(216): unsure at all Xaa locations
  Clone ID: MRT4577_33498C.1.pep
MEKKAGREHVIGIPVNNRAFGIEEPDFSSKGAARNAAAAGRAAKSGWTTGDRVAQGLKEHVALGPNLYETVRGKLSLGARILRAGGVEKAFRRWFSVVGKGERLLRASQCYLSTTAGPIAGTLFVSTERIAFRSDRSLALTSPKRGXWCLVRVPYKVSIPLGRVKTATPGGNKDRPEQKYVQVVTDDGFEFWFMGFVRYQVSLHELEKAIKQAQAQ

SEQ ID NO: 296517 - protein, 33 aa, Zea mays
  Clone ID: MRT4577_33499C.1.pep
ERESLDEVQRTIRSQLQAGAFALLTKLSYLFVV

SEQ ID NO: 296518 - protein, 106 aa, Zea mays
  Clone ID: MRT4577_3349C.1.pep
KQHPRGVWQHLLWCNGGKFLASCNNPLQFLLFTTFNPHRHFLVGKGSFKISVPPTLAHICKKKKLKKNPRILRGAYGGWLKKPQRSNCFASIVLKALKAFWWKHFA

SEQ ID NO: 296519 - protein, 726 aa, Zea mays
  unsure (1)..(726): unsure at all Xaa locations
  Clone ID: MRT4577_334C.1.pep
SSSTRAGVETMYRVCVGGGKIERKEDDPRLWRRWDSDERYIFSMNAAHSIRNTSSISYVSRDGADSVPAPLRLYETARVTEETFVVDRKFNVSWRFGVDPGFEYLVRLHFCELEYGSAEQRRFKIYINGKTAAENYDVVAKAGGKNKAFHEDFLDDDDAAPASETDTLWVQLGSESSATSSAASDALLNGMEIFKVSRNGNLGHPTVRIGGVSGGLEDDRRKRSPRWVLVGAAVGLVIFVSVAAAVYLCFYLHRKENTNTSAANKKTKTKTKDDNLPATTSPGLRAAGTFGSGRMGRRFSIAEIKAATMDFDESLVIGVGGFGKVYRGETDTGTPVAVKRGHAESQQGAKEFETEIEMLSRLRHRHLVSLIGYCDEQDEMILVYEHMANGTLRSHLYGSEXRAHLPALTWRQRLEICIGAARGLHYLHTGLDRGGVIHRDVKTTNILLDGSLVAKVADFGISKQGPPLDRTHVSTAVKGSFGYLDPEYFMRQQLTQSSDVYSFGVVLLEVLCARPVINPALPRDQVNLPEWALERKRRGLLETVVDRRLDGGYDLESVRQLAEVAEKCVADEGRDRPSIGQVLWHLETALQLHQAHLQSSSASAAAGDLEPSDGASASNSIRRAEEAAETAGVTYGDGHEMGKRWNSELRYCKRCVCGCPSKYTEILLVLHSVVLCKENAVLRVAFVWVVACKYRCTFGPGPVGRPEARKKKHGPSTARPVISGRV

SEQ ID NO: 296520 - protein, 158 aa, Zea mays
  Clone ID: MRT4577_33500C.1.pep
NNKGPANSNIEDLQHEIRKYRHQVEELEKQIRMFEPDPAVLVLTNEAETCEKFLMDTLTRVEERKKYLSCNQLGPFEPSPTDIHDVFGVSQQQQQQGDLSAFGAGDVVSYFAGGMAASDIFSSPAMTAGSGRIESKIVCSLKDDIGPGRVGGRVGGRV

SEQ ID NO: 296521 - protein, 128 aa, Zea mays
  Clone ID: MRT4577_33501C.1.pep
MAALLAFLLLLLLLLLSGGAAGDDVAALLEFKKGIAGRDRDRVLGSWSRPATTEAGSGGGGGGCPASWRGVACDGGAVVGVALDGLGLAGELKLATLAGMRALQNLSLAGNAFSGRLPPGIGSLSSLR

SEQ ID NO: 296522 - protein, 57 aa, Zea mays
  Clone ID: MRT4577_33502C.1.pep
EDIILVQVSIVNATDNNHMLESHNYRVSILDKTSHEFCHEGILIFCRETHLLLPCYT

SEQ ID NO: 296523 - protein, 98 aa, Zea mays
  Clone ID: MRT4577_33503C.1.pep
RGVSSVSSFPRFFFFFKKKLLPPGVIKNMGPKIFLGGPLRGLTGPRKHKNSKPIFIPEGHVPQFKISKDSGPLIGSKGCEKGEVKHRANSFGRKKGGF

SEQ ID NO: 296524 - protein, 65 aa, Zea mays
  Clone ID: MRT4577_33504C.1.pep
MAGSMQAADAAGRLSALLSLLALRRLLAVLQPLALLLLLPFRWRSRPGAGAAASAPGACGKGEAS

SEQ ID NO: 296525 - protein, 65 aa, Zea mays
  Clone ID: MRT4577_33505C.1.pep
PSREAFLGGVALTKIGPPHIFNKSHQQRPCITYLFNQGIIKVGYGLHNGTLQSQVHAAAAGPYTI

SEQ ID NO: 296526 - protein, 54 aa, Zea mays
  Clone ID: MRT4577_33506C.1.pep
SGQIYECCAVPWFQSASSVCVERFYASCTTYRMMLQEDNTVWLHLRFKFMLGII

SEQ ID NO: 296527 - protein, 90 aa, Zea mays
  unsure (1)..(90): unsure at all Xaa locations
  Clone ID: MRT4577_33507C.1.pep
LDPSEGQAHEVEGLVVPDVALADERWFGRVASVPVASSSDVINICVSASGASRAIGWAGGFVLGGPGRCSSGPPVVVCVLGGWCLNIVLX

SEQ ID NO: 296528 - protein, 131 aa, Zea mays
  Clone ID: MRT4577_33508C.1.pep
TRQPLGEGYACPSLKKKGWTGGKKKPRHPGEGLAWALAGGKPEPPGGGEIKRVGPTRGAPVNQTPRGAHPGVLGRQKEQGKGKARKGRKQPNPGVKGGEPPGGPPRAHISNVNQERARKGVHGHKPTGGGG

SEQ ID NO: 296529 - protein, 75 aa, Zea mays
  Clone ID: MRT4577_33509C.1.pep
YVHPWGWPTRSQVLLMLTSMLTIVVSIPLCSPFPPLCYVNLLAPGGSNCWPDLFMQIKFLLPLFSCSNRKKCMSQ

SEQ ID NO: 296530 - protein, 113 aa, Zea mays
  Clone ID: MRT4577_3350C.1.pep
CSLFVCPAIDLVDEAAAKLKMEITSKPIELDEVDREIIRLEMEKLSLKNDTDKASKERLSKLEAELESLKQKQKSLSEHWEYEKSLMTRIRSIKEEFQPVIDPFFMFFLPSVM

SEQ ID NO: 296531 - protein, 117 aa, Zea mays
  Clone ID: MRT4577_33510C.1.pep
WSDRRLSDEATNRHVKVLARHRPHYSLILNIREDDAAGRRRSASRISSTKTPVKGSRSSMENVIRDAYCYTEHSCRITGTAMDAVHPLKPQGQDLSMHSAHRADAVAPRLVAGADLE

SEQ ID NO: 296532 - protein, 94 aa, Zea mays
  unsure (1)..(94): unsure at all Xaa locations
  Clone ID: MRT4577_33511C.1.pep
EFNSGVNNPLSGGRVGGTGVAVRVVAXRAATEGSLDLSLGGVLPDTQRLVVVAHRTPAPRXIGFGRWIXRRKGEGAGRPERSKGIGGDGRRRGR

SEQ ID NO: 296533 - protein, 153 aa, Zea mays
  Clone ID: MRT4577_33512C.1.pep
VPVWLSSASSSHPPCAVRHLVLGARLCFLVAAPSFLSSARPLLLLDRGFILSLLAMAGRAFFPATKLPWPPSSAFAPPCVARLACSPAPVHARILFLPGARPHLHLPASALPKPSHGVVPPWCRVSLCQSPMAPSRLAFLVYLDNVQIHIYYR

SEQ ID NO: 296534 - protein, 333 aa, Zea mays
  Clone ID: MRT4577_33513C.1.pep
MAAKEPMRVLVTGAAGQIGYALVPMIARGVMLGADQPVILHMLDIEFAAEALKGVKMELIDAAFPLLKGVVATTDVVEACTGVNVAVMVGGFPRKEGMERKDVMTKNVSIYKAQASALEAHAAPNCKVLVVANPANTNALILKEFAPSIPEKNISCLTRLDHNRALGQISERLGVQVSDVKNAIIWGNHSSSQYPDVNHATVKTPSGEKPVRELVQDDEWLNGEFIATVQQRGAAIIKARKLSSALSAASSACDHIRDWVLGTAEGTFVSMGVYSDGSYGVPAGLIYSFPVTCSGGEWTIVQGLPIDEFSRKKMDATAQELSEEKALAYSCLA

SEQ ID NO: 296535 - protein, 36 aa, Zea mays
  Clone ID: MRT4577_33514C.1.pep
PGPVNLHGPKNILRGLNTFFYLLMAIKQVSGTILGP

SEQ ID NO: 296536 - protein, 206 aa, Zea mays
  Clone ID: MRT4577_33515C.1.pep
PVPVWLSSASSSHPPCAVRHLVLGARLCFLVAAPSFLSSARPLLLLGRGFILSLLAMAGRAFFQPRSSHGRRAQPLLLPASRAWLALQLPCTPGSSSSQGLGRISISQQAPYRSPPMALFLPGAESLSANRPWRPAAWPSWYSLSLSALSLVRRPSCSSLYFFIAGRCSPRRHRPPLALILCRASPEGVQGMPPLRAPNIRRTPYT

SEQ ID NO: 296537 - protein, 156 aa, Zea mays
  unsure (1)..(156): unsure at all Xaa locations
  Clone ID: MRT4577_33516C.1.pep
GVAVLVGVPXXXAGFXXXPLXFLXXXPLXGPFFGXFXPRXVLXXVVXLXLXXXLXVXXFFXXXVPFAXXXXAFALXAXGXGXRCLSRXGWVVAVSFVLWPGLGVKKRKPPPDPPGKYTLTMDRACVSRSVWLLPSSRVAYPCRVINMDMNHHPLGL

SEQ ID NO: 296538 - protein, 82 aa, Zea mays
  Clone ID: MRT4577_33517C.1.pep
KVNSFSCIVVRPQPPVGLQAVPDHLHSSMPRCFLPIALLYLSIAQAFMFSPWFLLCLFFRGSVLQPGFDYFFPQRTILQLWD

SEQ ID NO: 296539 - protein, 51 aa, Zea mays
  Clone ID: MRT4577_33518C.1.pep
PLTRIPGSPPTSEYRLVMPHQEQEGHEGNDISQCYGPPLVQLNQPMEWKEV

SEQ ID NO: 296540 - protein, 34 aa, Zea mays
  Clone ID: MRT4577_33519C.1.pep
CTYYPKVIIIFYIVGAIVITVLMVIRLCIGFAIC

SEQ ID NO: 296541 - protein, 92 aa, Zea mays
  Clone ID: MRT4577_3351C.1.pep
FNSVVARTKKVIESGDSTPQPHCVDLENSVKTIVVQIAKTISMIGAEERFNELSMFDRRLLSSPESAKFAYEWKNISCTTWTNFKYCSSSGS

SEQ ID NO: 296542 - protein, 43 aa, Zea mays
  Clone ID: MRT4577_33520C.1.pep
LNFQELITCICYSSRRSGVWLKAVSDEVMSFQSVSKSLVQTPS

SEQ ID NO: 296543 - protein, 178 aa, Zea mays
  Clone ID: MRT4577_33521C.1.pep
SFGIWLFAVKLGIEGHVSIANVLVAMYYKCGTPGCARRLFEFMGERDVVSWTTVMSMDREDAVSLFNGMMRDGVAPNEVTFVAILSAMPGHCPAREGQMVHAVCIKTGLSDKPAAANSFITMYAKLRRMDDAKMIFGLMPHPEVIAWNALISGYAQNEMCQDALEAFLSMVKITKPSE

SEQ ID NO: 296544 - protein, 116 aa, Zea mays
  Clone ID: MRT4577_33522C.1.pep
STITCTPPRDSLFQRWLGHQETVRPLPDRLLMKSLSLSSKNPLTSSPLPSFDPKANSQKSSTRFPSPHSIPSRYPPLPSSPAAPSPGAYTPPPRQSYSNPTPFHPVPLPRPSTECA

SEQ ID NO: 296545 - protein, 25 aa, Zea mays
  Clone ID: MRT4577_33523C.1.pep
RTDGPLYYLLAGFNASPILVVVRVM

SEQ ID NO: 296546 - protein, 431 aa, Zea mays
  unsure (1)..(431): unsure at all Xaa locations
  Clone ID: MRT4577_33524C.1.pep
MASAAAEAPGASASSAENRLLQSLAERGWRFRDPTDEAIQALLLASPTPSPEAVESELVSMDLRMFGGKCLPDRAAAGGTSKRLSYLHGPVVLQIVSLRDIYHSSIDASFKNPQQRRLLRFGLTDGICEAVAIEFSPIPFITEEIAPGTKIRLENKVPINNGILCLSAKNVTVIGGAVQSLYEEWQMNQKYSGLSRPSLRLSPSDDGVGPPPFEKLXDIEARPCRETKVQAYPARKLAVTHDHGPVNSGGKPMNEDSNDENRDNIESKVESKQITQDSRPKEVSEAVPVQNQAAAQKLLQKMSQAVPEDRRGRGHRFKGKGKEEDAQVFTLDEWEKRKAIGSKPAAESYVHDTSRDEELARQLQEQLDLEDLHGGAGAGVLHGGAESSDAERLRMSMFSFSGPDEAGGGRRDFRGRGRGRGGGRRRGRGRF

SEQ ID NO: 296547 - protein, 116 aa, Zea mays
  Clone ID: MRT4577_33525C.1.pep
AFRIITLRSDEATYLLVTETKKASRVVSAVVVLVIVASVLAVLEVFLEVFVGVVGGVVGFSVSGVVAAVAFVAGVSAVHPSVHHSYRVMMCGVVMPGRTAPGLLGQPTGAPHPCGP

SEQ ID NO: 296548 - protein, 65 aa, Zea mays
  Clone ID: MRT4577_33526C.1.pep
GNPSDGGVLPVTLSRIGAGFLKAGPDAAGSQALLWTLLGLGGFHRLKLSTGGRRYRAQTRRSHRC

SEQ ID NO: 296549 - protein, 62 aa, Zea mays
  Clone ID: MRT4577_33527C.1.pep
PRVHSACEVPLKGIMGYVEDDLFFTNITWDITSSTLLQLRHYGPLRPTCLAKPMGLLPTAHH

SEQ ID NO: 296550 - protein, 28 aa, Zea mays
  Clone ID: MRT4577_33528C.1.pep
WTACNCFTKHCHWPELYFYMSNNKIFKP

SEQ ID NO: 296551 - protein, 81 aa, Zea mays
  Clone ID: MRT4577_33529C.1.pep
ENGADHRRPKKRRFPEQGLVLLKQVAKRFGGVQYIYGGVPKGASGDLFGDLNVCWDLTFFIGSRTKGQDWSVGPQLINACF

SEQ ID NO: 296552 - protein, 157 aa, Zea mays
  Clone ID: MRT4577_3352C.1.pep
KINITISKYHPWRQKVNWEMPPRSNRTPRCVAPLEPPVLLRGLSALASRPRGGGSSALARSPAWNSARFGVAQPAPKARTDSPGRWRTHATTHRGWNTGAGGFTGGGAFSTPVFLHSRSFSLLGFSLLLRCWRSAETAGNGSTAGWSARPWWRPPAG

SEQ ID NO: 296553 - protein, 135 aa, Zea mays
  unsure (1)..(135): unsure at all Xaa locations
  Clone ID: MRT4577_33530C.1.pep
LQPESYIQKMAYMHAALQIKSRQLNVITGANYLARDCSIDRSILXQTFLAGAAVVLVGDQLSFTTPRQGNCMVRGSSRARSPSPSTTRSRPDRPSHKPPGARLSCRSRPRAYSGPDTTGSATTDIPGPAGMPGYL

SEQ ID NO: 296554 - protein, 196 aa, Zea mays
  Clone ID: MRT4577_33531C.1.pep
MSGLKTMLMTLCSAIWDLYHLLLKERHRALIHLAMDSFGYFAARTSFTQLWRFVPGDAALSYNASTGTSIDENGFMLELRAYLQKEVALHTDKWSEEQIRLLVSEGRALKKLAEVCCEIPVVAEPEKAPVAKDASTKKRKMPDGICEGMAMLQNGLKVMRGAFGEGDFADLKDSFAAHLSRLEDAVSQIASLSDEI

SEQ ID NO: 296555 - protein, 70 aa, Zea mays
  Clone ID: MRT4577_33532C.1.pep
RIQSPFSAIHSYRLALSLPRVLHCIISTLHGAANSVRDDIHRNPAGLLPGRQCTHLPPVCGKSAQTGPCM

SEQ ID NO: 296556 - protein, 53 aa, Zea mays
  Clone ID: MRT4577_33533C.1.pep
YLIATATISYHIYLHNVLKKNDSLRQQLLLSFKQHAFTIHTTLLYPNTMGCAA

SEQ ID NO: 296557 - protein, 55 aa, Zea mays
  Clone ID: MRT4577_33534C.1.pep
STHFRLPRLYTSPVWPVYSSDLYAFTNFTPITIIPMIPLSSYFTQFRITCVYPQV

SEQ ID NO: 296558 - protein, 186 aa, Zea mays
  unsure (1)..(186): unsure at all Xaa locations
  Clone ID: MRT4577_33535C.1.pep
MAPKIFCSLMLLGLSASVATETMVPQCSQAPMNTLVPPYLXSGVVQCCETPIXEPYXIQQAXATGILPLSPXKVQQPTSLLQQKPLVHWWAQXIRAQQAHQLVLAKNAGVTLQQHKLLXVNQLAALNSAAYLPQQLPFKHLVAAYLQQVLPFNQLAALNSAAYLQQXRLLPFIQLADVSPADHVTQ

SEQ ID NO: 296559 - protein, 99 aa, Zea mays
  unsure (1)..(99): unsure at all Xaa locations
  Clone ID: MRT4577_33536C.1.pep
VTWVHAASFWISSQRALLAXRDAVLSTXIEQEPAKSPRTKERSGLVRSHLLSNVKLLQAMLLANLSRFLTRPALFCICLLYLAIQQRGKLEILLTDASC

SEQ ID NO: 296560 - protein, 97 aa, Zea mays
  unsure (1)..(97): unsure at all Xaa locations
  Clone ID: MRT4577_33537C.1.pep
MAMEKATGKSIFIYPIKSCRGLAVSQALIISTGXGCDPPSIFRPWRFRWDRQXVAVNGKGRAYTQRVEPKLALVQVELPPEAFAEDWQPTPYDHLVF

SEQ ID NO: 296561 - protein, 166 aa, Zea mays
  unsure (1)..(166): unsure at all Xaa locations
  Clone ID: MRT4577_33538C.1.pep
GGGGAVAAMVLLYLDQPXXCQVARLNSSFXGAASADCVXAAKLPANYRYLAALTATADDEGCGDGDASGKRLTKKEIYARLCRSTLFDAXRKEFSILKNKGALCMSISSKAMTITGIDDRRYWSHLAIEESSTLPFLFTVRFSLSVMEHIMISDWANHPLPHLFVD

SEQ ID NO: 296562 - protein, 164 aa, Zea mays
  unsure (1)..(164): unsure at all Xaa locations
  Clone ID: MRT4577_33539C.1.pep
FPTGAGGGGGGALVLWSDGGGGAVAAMVLLYLDQPEICQVARLNSSFHGAASADCVXAAKLPANYRYLAALTATADDEGCGDGDASGKRLTKKEIYARLCRSTLFDAXRKEFSILKNKGALCMSISSKAMTITGIDDRRYWSHLAIEESRYFFSLRLLFCIASP

SEQ ID NO: 296563 - protein, 123 aa, Zea mays
  Clone ID: MRT4577_3353C.1.pep
VPSEPAGKEAPRSSCSTPFTLSSLSLPFSTPPPPLVRPYLALAPAPPAQPPGEREGGGLPRPAGSRRAGGPNGRVPKGPWRPGGDLGRPPPGRGAPGLPGDARKPRTGVGAYSEELRDSLPSG

SEQ ID NO: 296564 - protein, 36 aa, Zea mays
  Clone ID: MRT4577_33540C.1.pep
QYRVACRRSLASFYEGHTKIPYSLGPVVFTNGRGLG

SEQ ID NO: 296565 - protein, 61 aa, Zea mays
  Clone ID: MRT4577_33541C.1.pep
LKGRFSATLQALANQGLQSQLWAAGKRLSRSSRLGHPCRPCRPARLPLSLLPGDSHCIFGK

SEQ ID NO: 296566 - protein, 80 aa, Zea mays
  Clone ID: MRT4577_33542C.1.pep
SGRARTSTPRSRSPAASRCSCGPPAASRRWPWSARPPRRSSGRRRPKGASLRSRRRSPSLVALAVALAASRHRSADAWRW

SEQ ID NO: 296567 - protein, 40 aa, Zea mays
  Clone ID: MRT4577_33543C.1.pep
HVATKPYAIVGTKPRIFPGDTILETGEVIPHIIDLTDKHH

SEQ ID NO: 296568 - protein, 45 aa, Zea mays
  Clone ID: MRT4577_33544C.1.pep
NVIYYCYYSNEPLLEMRIWLTGDKLKIPNRNLLQTTKVTNSKLNP

SEQ ID NO: 296569 - protein, 67 aa, Zea mays
  Clone ID: MRT4577_33545C.1.pep
LFRGYHPKVQSVYSCQNTSHLVLRTNSMKKTRGPLGMSKRMPGPYFLLRANPATTSFKKGGRSCSAG

SEQ ID NO: 296570 - protein, 72 aa, Zea mays
  unsure (1)..(72): unsure at all Xaa locations
  Clone ID: MRT4577_33546C.1.pep
GDLSHLLAIILLLLKIWKSRSCAGISGKSQVLFAVVFTARYLDLFTNYISLYNTCMKVVXIACSFTTVWLIY

SEQ ID NO: 296571 - protein, 99 aa, Zea mays
  Clone ID: MRT4577_33547C.1.pep
IGGGFNKFFGLFPPKKNGTRAHYFLKKQGPAAFLNVSKHFHLSRKTRNSPHEHHLFGQYNTNHKRGALQERTPPWRSHIKPWLSPVPPPKFFTEKKGPP

SEQ ID NO: 296572 - protein, 66 aa, Zea mays
  Clone ID: MRT4577_33548C.1.pep
RGEQAMVLNTRLVLPLSSEPLRARAAEVNAPMGKRSANSIKSGRLRRKVIGQVQIQLGLGCIEWCH

SEQ ID NO: 296573 - protein, 35 aa, Zea mays
  Clone ID: MRT4577_33549C.1.pep
TLPSSQSLVVSTSAKCPPWGAGSKHQHCRLFITIC

SEQ ID NO: 296574 - protein, 87 aa, Zea mays
  Clone ID: MRT4577_3354C.1.pep
MPGRPNRLGFFGAVFGVFFVAPPPGGGGVGVPLPFVCPLYVKERTFCFPQKKKQKKKKKKKKKKKKKKKKKKKKKKKKKLKKKKKKR

SEQ ID NO: 296575 - protein, 147 aa, Zea mays
  Clone ID: MRT4577_33550C.1.pep
HASGYCLVASKQMVGIFLTIWVRSEIRNDVRNLKVSCVGRGLMGYLGNKGSISISMSLHHTTFCFVCCHLTSGEKEGDELRRNSDVMEILRKTRFPQVRGAADVKSPETILEHDRIIWLGDLNYRIALSYCSAKALVEMHNWKQLLE

SEQ ID NO: 296576 - protein, 51 aa, Zea mays
  Clone ID: MRT4577_33551C.1.pep
HAHIFVFFGWGEKQKYMDVIRYRVLVHTLSSYELMTVPRWKKKKNQKKNNI

SEQ ID NO: 296577 - protein, 59 aa, Zea mays
  Clone ID: MRT4577_33552C.1.pep
ASYVISGRVACLVSLAVLAAPPGRVADDDRVADTFLINQAGRQLSTGIWSEQPPSSLNQ

SEQ ID NO: 296578 - protein, 48 aa, Zea mays
  Clone ID: MRT4577_33553C.1.pep
WCFVFIQQGLLQPSIRSWNGPGRPLDGVVRNIVMLAWGQGAPCAKPAA

SEQ ID NO: 296579 - protein, 62 aa, Zea mays
  Clone ID: MRT4577_33554C.1.pep
SPSIPKRPHGAVSAHTTGTSNSAYTAHVRSPSYEVRCCFSSSSSSSSAQTHKEDRSVMSLWQ

SEQ ID NO: 296580 - protein, 95 aa, Zea mays
  unsure (1)..(95): unsure at all Xaa locations
  Clone ID: MRT4577_33555C.1.pep
IAKIRLFRVVQGLPNIKNVPIAIKPKGFXLCPSPVVFQKSFKTYNPFNKHKPSSPPPTKPGVQKKPVAVPVSVSVSERRTASSAPSRLVLSDEKP

SEQ ID NO: 296581 - protein, 49 aa, Zea mays
  unsure (1)..(49): unsure at all Xaa locations
  Clone ID: MRT4577_33556C.1.pep
RWCWXDXNXXXVFRIKLPIQCLVYSLLNLAMCFCILFLNSIAMATICFS

SEQ ID NO: 296582 - protein, 43 aa, Zea mays
  Clone ID: MRT4577_33557C.1.pep
VSLKAYPHAHIVVLPVGSVVPPDYPPNRVRIFVPLPPQTPHIG

SEQ ID NO: 296583 - protein, 63 aa, Zea mays
  Clone ID: MRT4577_33558C.1.pep
LIQIADVRPVAFLTQQQLRPLYLYAASNAVTILQLQQSLSLNQLALTNTTTLYQQPIIGGALF

SEQ ID NO: 296584 - protein, 86 aa, Zea mays
  Clone ID: MRT4577_33559C.1.pep
LPKSKHFPRPGKGLFFGNHKITPPCSKKLTRGVVVSPEISYLGPPPAGTTVNQKGGGAFFRRWPPGGPWGPFFSRGAREIHTPRPP

SEQ ID NO: 296585 - protein, 75 aa, Zea mays
  Clone ID: MRT4577_3355C.1.pep
YESSGDAPLLHLCTGHRAAQQPSRFPCAYRSLCSYLAWLPCGCSRSARVRTNMKCWYSLLDLCLIPLNLFLRMTY

SEQ ID NO: 296586 - protein, 71 aa, Zea mays
  Clone ID: MRT4577_33560C.1.pep
TDGWGPAQFSPTNNPRKTGSGPPFYPVGHRTTCPPGFNGTLLNHQGPLIPQPSQMGPCGPTSKASCQPAGI

SEQ ID NO: 296587 - protein, 80 aa, Zea mays
  Clone ID: MRT4577_33561C.1.pep
VPPPDPPEAKVNKNKAPPKFPPKKVFCMGVPGGNLAREENQTPPTLPMGVPFLVSLPKKNWQNFKCLYAKSPMGNPPRVF

SEQ ID NO: 296588 - protein, 176 aa, Zea mays
  unsure (1)..(176): unsure at all Xaa locations
  Clone ID: MRT4577_33562C.1.pep
MAGTLVEDYTGDGRSSSTEDLPSDQQSHSGESLAEWRSSEQVENGTPSTSPAYSDTEDDDCGPRPPELYGKFTWRIDNFSQINKRELRSNSFDVGGYKWYILIYPQGCDVCNHLSLFLCVANHDKLLPGWSHFAQFTIAVINRDPKKSKYSDTLHRFWKKEHDWGXKKFMELSNYM

SEQ ID NO: 296589 - protein, 170 aa, Zea mays
  Clone ID: MRT4577_33563C.1.pep
LEAGRENGGSMISIKPEQQMAQPDQMMRSASGVKLEPQQLQAQMMRSLSSVKMEQQTSDSSAFLQQQQQQQHLLQLTKQIRNCPELVSIGGPNAIANPQAATAAQLTLLQQQRLLHMQQQQQQQILKNLPLQRNQLQQQQQHQQQQQLLRQQSLNMRTPGKSSPYEPGTC

SEQ ID NO: 296590 - protein, 100 aa, Zea mays
  Clone ID: MRT4577_33564C.1.pep
PCLLTLRARTLLLRPAEIIHRAHVTGDCTGRSTVNSRRVATGPAHLSTRGHLRTTSFLLTERCREYVLTDEWVPTLMNTLLFSENRYAWVSLDHMVALML

SEQ ID NO: 296591 - protein, 148 aa, Zea mays
  unsure (1)..(148): unsure at all Xaa locations
  Clone ID: MRT4577_33566C.1.pep
MEEQHSGFRQWQWQWRLFSLLSSQPELLPPPRPANHVRWEETAAAHLFSASLPGVRKEEIRVEVEDARYLVIRTEXTPAPAPAAPSRTXSFDRKFRLPGMVDVDGISAAYTHGVLTVKVPRMHTRARPVVDILGAGAGPASDHAARAA

SEQ ID NO: 296592 - protein, 107 aa, Zea mays
  unsure (1)..(107): unsure at all Xaa locations
  Clone ID: MRT4577_33567C.1.pep
LLSKAFFFCVPSGVRKEEIRVEVEDARYLVIRTEXTPAPAPAAPSRTXSFDRKFRLPGMVDVDGISAAYTHGVLTVKVPRMHTRARPVVDILGAGAGPASDHAARAA

SEQ ID NO: 296593 - protein, 53 aa, Zea mays
  Clone ID: MRT4577_33568C.1.pep
KLGIRLEQHPPFFFTAGALGYGVGFNYVRGDRQTAASHHACCTRAAPRPLSQP

SEQ ID NO: 296594 - protein, 132 aa, Zea mays
  Clone ID: MRT4577_33569C.1.pep
RCPDGLPLYRLMKGDCQKFAMQISCFQEIASHGCFSLGMIARFEPVLHEKGEWMYPRLFWETGILGQVLYLEAHAIAISATGIGCYFDDTVHEALGLKGLDFQSLYHFTVGAPVLDKRIMSLPAYPGPGIDA

SEQ ID NO: 296595 - protein, 130 aa, Zea mays
  Clone ID: MRT4577_3356C.1.pep
PKKPLLPIRRKSPPGNLSLNCPRSQQPKLLPLQRLFPLEKNWGTNPPLWVLFENPSARQLPLMNLGSAGRKGTHPAGSLKKKVGPQLPFFPLCYFCLNCWGGLWTKISFLPPKEVGVWKMASDPPRDWLS

SEQ ID NO: 296596 - protein, 67 aa, Zea mays
  unsure (1)..(67): unsure at all Xaa locations
  Clone ID: MRT4577_33570C.1.pep
TRPKARGVSINPQQQPHAEGTHQHTGHASTGPRNAPPGQKXGLTPXSSTGRHRGQPAATATKADKAT

SEQ ID NO: 296597 - protein, 91 aa, Zea mays
  Clone ID: MRT4577_33571C.1.pep
FGSPTSCNIELQLAIVQVVLLCLEKAQERRQLSEIELHLLRSLKAKSLGLAAMQKSRAKQHSRLKWIKQGTEGDPIDRSSGTEMGIVCLCI

SEQ ID NO: 296598 - protein, 93 aa, Zea mays
  Clone ID: MRT4577_33572C.1.pep
VVGRVRYREGEWLVTVRSDGVRERWRVDSQRRGREEVRSSGRRIERSGMGRSHSLQARASVSSPSGRMVQPVEVAPLFIPPPVVPFPQQQAQA

SEQ ID NO: 296599 - protein, 381 aa, Zea mays
  Clone ID: MRT4577_33573C.1.pep
MAPPALGSQVAAAASVPVGSDSLAKGAALKGNSTLNFRTKPCIGMALAWRNRTQQPRRLNKVLCMSVQQASRSKVAVMPFELEKAKEPPLHLYKPKEPYTATIVSVERLVGPRAPGETCHVVIDHGGNVPYWEGQSYGVIPPGENPKKPGSPNTVRLYSIASTRYGDSFDGKTASLCVRRAVYYDPETGEEDPSKRGVCSNFLCGSKPGDKVQITGPSGKIMLLPEDDPNATHIMIATGTGVAPYRGYLRRMFMEDVPTFKFGGLAWLFLGVANSDSLLYDEEFTNYLQQYPDNFRYDKALSREQKNKSGGKMYVQDKIEEYSDEIFRLLDGGAHIYFCGLKGMMPGIQDTLKKVAEQRGESWDQKLSQLKKNKQWHVEVY

SEQ ID NO: 296600 - protein, 76 aa, Zea mays
  Clone ID: MRT4577_33574C.1.pep
LLSKRTKPVPLLHLPQSSVPFRSVPSRLPQVKTLNLPRGSLARSLGGSAMAPPALGSQGNITLNFRTKPCIGMALA

SEQ ID NO: 296601 - protein, 270 aa, Zea mays
  unsure (1)..(270): unsure at all Xaa locations
  Clone ID: MRT4577_33575C.1.pep
MAPPALGSQVAAAASVPVGSDSLAKGAALKGNNTLNFRTKPCIGMALAWKNRTQQPRRLNKVLCMSVQQASRSKVAVVPIELEKAKEPPLHLYKPKEPYTATIVSVERLVGPRAPGETCHVVIDHGGNVPYWEGQSYGVIPPGENPKKPGSPNTVRLYSIASTRYGDSFDGKTASLCVRRAVYYDPETGEEDPSKRGVCSNFLCGSKPGDKVQITGXQHFILHHNYFFSINQGPSGKIMLLPEDDPNATHIMIATGTGVAPYRGYLRRMF

SEQ ID NO: 296602 - protein, 104 aa, Zea mays
  unsure (1)..(104): unsure at all Xaa locations
  Clone ID: MRT4577_33576C.1.pep
TRPDALIVNIGDLFQAWSNNRYKSVEHKVVANAKAERLSVAYFLCPSYDSLVGTCGEPSPYRPFTFGEYRRKVQDDVKRTGXKIGLPNFLKQSPVDAMNHSLCT

SEQ ID NO: 296603 - protein, 51 aa, Zea mays
  Clone ID: MRT4577_33577C.1.pep
SRDCAVMSLDPITSSDLPGRFICRILVVAPMSSLVDVPATALRLGAALYPG

SEQ ID NO: 296604 - protein, 37 aa, Zea mays
  Clone ID: MRT4577_33578C.1.pep
SPAGIRWSPTGCTPSYLSLNLTSSRLCDALDSVILRR

SEQ ID NO: 296605 - protein, 85 aa, Zea mays
  Clone ID: MRT4577_33579C.1.pep
TWEPLNLGDTKDGHHDGDTISHQSSVGPQLVPVQSIFHPSPQIRSIATLQHCQCGHGLRCLKKKVFCKTQYCSTATQRAWNLFRT

SEQ ID NO: 296606 - protein, 266 aa, Zea mays
  Clone ID: MRT4577_3357C.1.pep
MSRGLRNRSASKLEKVEVASTSSFGADVDPREIDLAMRIAERMFLKMKEDEAKNKIEEEENDRWRPNDESTSSQESQSSIELEISGISDISITQENKELKEEVGRLRRSLTLLKGKCHAQPSQDNRDNMVKKLEKRTTVACTKPLQKNTKLSKKGMRKIHDLARSRKMTINKDESKRQMHCKDKHHICYNCREKGHLFKPHRKNEALENELKRFHLALEKIQLYVLKGKEITKKEVSTNDEKKNTKVTPPQIPLRKKKHLRIYISC

SEQ ID NO: 296607 - protein, 101 aa, Zea mays
  Clone ID: MRT4577_33580C.1.pep
QALSCITHYFSMIAVKLLIYFASHWLYYYTYRSLHQLIQHPPTLPVLELMLQKLWLWLSCSHSLWLNFYSHALSGLNRILMNPSEFMQIWYPTLVNPFNWF

SEQ ID NO: 296608 - protein, 117 aa, Zea mays
  Clone ID: MRT4577_33581C.1.pep
MVISSWLACPGISQWGACWSTLFGLFPGVWGLKKPWASNDVEASFYLLCVFCFRFSLVFAFYSTLGSRCPHDICVIDLCMACAVGRSLVLGHFFLAAFLRCWERKLYAMLVQTKNST

SEQ ID NO: 296609 - protein, 120 aa, Zea mays
  unsure (1)..(120): unsure at all Xaa locations
  Clone ID: MRT4577_33582C.1.pep
MEDYGGVASLVASGVVFWSTAFLLLRALLPKRSYDFCNRAVSTMHAVTGVALGCLSVQDWASPVSPVASPSSPRQMRALAVTLSYMIYDGACCHLSXDARLDNALHHLISIVGLAAVLAY

SEQ ID NO: 296610 - protein, 148 aa, Zea mays
  Clone ID: MRT4577_33583C.1.pep
MVRSRGHLALSTRLMNVGLASLCRGGWLDRAESVLVDAIRLGLPPDVVTYNTLLAAYCRVDGLDAGLAVVHRMREAGVRPDAVTYNSLITGADRSGLTVRALDLFDEMLRSGVAPDSWSYNALMHCLFRSGHPEHAYRVFADMAERGV

SEQ ID NO: 296611 - protein, 46 aa, Zea mays
  Clone ID: MRT4577_33584C.1.pep
LKNVRDQTNGISVQQKQTFWSSIKTIISIALSLDKSISLSINAYNL

SEQ ID NO: 296612 - protein, 63 aa, Zea mays
  Clone ID: MRT4577_33585C.1.pep
EKFYCHFCFLLAGDLFKVEIHARDKKKEDSRPCAFGTSSRFLRSGTKISTPNELWGYKAGYKE

SEQ ID NO: 296613 - protein, 63 aa, Zea mays
  Clone ID: MRT4577_33586C.1.pep
MAKEGTGVVDPMLVWKLSGNKTNMEVKKKVVKEIAAENNVSVDFSELQEVVEQDGSGNDPHHH

SEQ ID NO: 296614 - protein, 66 aa, Zea mays
  Clone ID: MRT4577_33587C.1.pep
VTSPTRPQGGARRRTPRGRSTPGSARAAAASSPASFTWAAPADWERGGGAAPTRGAGPGMEMGMSE

SEQ ID NO: 296615 - protein, 76 aa, Zea mays
  Clone ID: MRT4577_33588C.1.pep
VKRAAPAYPISIIFFPLFQSITTSPQSLRNIRFNLNPRALDKTSSFSLILFLSLTHRRRRQSEKRRERKVVLHILK

SEQ ID NO: 296616 - protein, 83 aa, Zea mays
  Clone ID: MRT4577_33589C.1.pep
NPHPYVQTQNVLCQKKNWDKKSSYPGEFFKHTWKKKRFFEGWSWATKKESGITVPPHLPVWFHHKFFPPSTLIQDATGPFFCP

SEQ ID NO: 296617 - protein, 452 aa, Zea mays
  Clone ID: MRT4577_3358C.1.pep
MSGGLRNGSASKLEKVEVASTSSFGADVDPRAIDLAMRIAERMFLKMKEDEAKNKIEEEENDRWRPNDESTSSQGSSFKFTSHMCFVANGSDSESESEDEEEQESDSEDEDDLQQFFAQLSKKHRMSFLKLMKRAEEQKEMLHKQEDFLIRKIEDLEKLTKEHEKLKCSHDDLVQRYEDISIEQIKAVNHLSYIAQLENKNAMFKNTIEKLNIKNLALQEKHDMLVCSHNKFMDSYIMLEMAHEVVLTNLKSYQPHVCTCTQIETILPCANNCCYQASQSSIELEISGISDISITQENKELKEENERLKRSLTQLKGKCHAQPSQDNRDNMVKKLEKGTTVACTKPLQKNTKLSKKGMRKIHEKSKRSDRRCYGCKEKGHEIDSCPHMKNQDLERSRKMTIKKDESKRQMHCKDKHRICYNCREKGHLFKPHRKNEALENELKRFYLALERI

SEQ ID NO: 296618 - protein, 77 aa, Zea mays
  Clone ID: MRT4577_33590C.1.pep
VLDARARPSLSFYNRSARSCSTHYNGQGSIIWRRKKAGNRACSTTNWRSRGETKNLDLLRLWTGYASNVTTLYTDGS

SEQ ID NO: 296619 - protein, 82 aa, Zea mays
  unsure (1)..(82): unsure at all Xaa locations
  Clone ID: MRT4577_33591C.1.pep
RVVGNIRTLGLRNSNLTDRYFRRSLRSSLRTRRRIXNTLLLGIMVHGNTSVLRLLTNGSGALLIQQSTLLILSLNLSVIGNV

SEQ ID NO: 296620 - protein, 56 aa, Zea mays
  Clone ID: MRT4577_33592C.1.pep
LVCRVRRSSNRRLCRHWLVAFSLCPFPSCICYSGWTRDCLCGRININILACLMSYT

SEQ ID NO: 296621 - protein, 156 aa, Zea mays
  Clone ID: MRT4577_33593C.1.pep
HWVPRGRPGEHSLPDGSWGDAALFSAYDRLINTLACIVTLTRWSLEPEMRGRGLSFLGRNMWRLATEDEESMPIGFELAFPSLIELAKSLGVHDFPYDHQALQGIYSSREIKMKRIPKEVMHTVPTSILHSLEGMPGLDWAKLLKLQSSDAPFLFS

SEQ ID NO: 296622 - protein, 575 aa, Zea mays
  Clone ID: MRT4577_33594C.1.pep
RPRVRPRVRNEENKNSCKKISSLQHQLDLSSKDQEAQQNILSQIEEVKRENILLQAKNTEMEQELLKAQKCSHDNMDKLHDVEKNYVHLRDNLKNLEDKISNLEDENHLLRQKALNLSPRHSRTGSYHCGSSPCSPKSFVESSPVKLAPPPHNQTESRRSRMNSDRYEDYHDVLHRCIKDDMGFKKGKPVAACIIYKCLLYWGVFEAERTTIFDFIIHTINTTLKAENENDILPYWLANTSALLCMLQRNLRSKGFIMAASRSSSDTHLSEKANETFRTPLRAFGQQISMSHIDARYPAMLFKQQLTASLEKIFGLIRDNLKKEISPLLSLCIQAPKLARGGSGRRSRSPDVALQQPISTHWDRIVKFLDSLMDRLHKNFVPSFFTRKLVTQVFSFINVQLFNSMLLRRECCTGSNGEYVKSGLCVLEKWIVDTEEHAGAAWDELQFIRQAVDFLIIPQKSKKTIEQIKKNICPALSVRQIYRLCTMYWDDKYGTHSVSAEVVARMRDMVSNDMQNPVSNSFLLDDDLSIPFTTEEIAEQVPDVDMSNIETPASLRHVHSAQFLTQHLQPPYTSR

SEQ ID NO: 296623 - protein, 92 aa, Zea mays
  Clone ID: MRT4577_33595C.1.pep
SRPNSASTQPSQESDPVNFVHSSFIGQADQNADMTEKRLYRAIRDRQILPILLPETTSASKRHLCRVSSPCERLGKPSAVLLGAQIDLERLH

SEQ ID NO: 296624 - protein, 57 aa, Zea mays
  Clone ID: MRT4577_33596C.1.pep
NTRRDKGDTNPAKTKATHQKAPPTKGSAATRAGDSTQTPVVWQQTPPLHSYLIQWVS

SEQ ID NO: 296625 - protein, 45 aa, Zea mays
  Clone ID: MRT4577_33597C.1.pep
VRVGLGLSPCQESLVQRTWARSVTEDTSPDYNSAGRGSPISDLDC

SEQ ID NO: 296626 - protein, 74 aa, Zea mays
  unsure (1)..(74): unsure at all Xaa locations
  Clone ID: MRT4577_33598C.1.pep
EAARLTAHAIMMNKSGQIVNAYXPXLDCDTSNIVCKVAELITNIDRRSVTELAKESKFLKNGYAGMVKMIYTKP

SEQ ID NO: 296627 - protein, 92 aa, Zea mays
  unsure (1)..(92): unsure at all Xaa locations
  Clone ID: MRT4577_33599C.1.pep
RLGIVVTDXDKGCRYSTKDFKGSGPGCKVDTVDTTGAGNTYASLTTSKQTHGRLTLTQXERLRGALMGSYSRVPVWTIKKGSIPGLSRVTIA

SEQ ID NO: 296628 - protein, 513 aa, Zea mays
  unsure (1)..(513): unsure at all Xaa locations
  Clone ID: MRT4577_3359C.1.pep
MDAQYDVTQEWLDRVKIARKGLRGTKRSLRSVCASVWQSDWQTGCQLWYYIEFFVDSLLLELVAPRRLGVSYIDPRAIDLAMKIAERMFLKMKEDEAKNKIEEEENDRWRPNDESTSSQANGSDSESESENEEEHESDSEDEDDLQKFFAQLSKKNRMSLLKLMKRAEEQKEMLHKQEDVLIEKIKDLEKLTKEHEKLKCSHDDLVQRYEDISIEQIKAIKHSSYIAQLENKNAMLKNTVERLNIENLALQEKHDMLVCSHNKFMDSHIMLEMAHEVVLTNLKSCQPHICTCTQIETILPCANNCCYQASQSSIELEISGISDISITQENKELKEENERLKRSLTILKGKCHAQPSQDNRDNMVKKLEKGTTVACTKPLQKNTKLSKKGMSKIHGKKINAHTICSNNVPMCFNKERSKRSDRRCYGCKEKGHEIDSCPHMKNQDLAGSRNMTIKKDESKRQMLCKDKHHICYNCREKGHLFKDCPMSKYPKPTMSILSYSLRXTQNDICARKV

SEQ ID NO: 296629 - protein, 71 aa, Zea mays
  Clone ID: MRT4577_335C.1.pep
NKTVLSYTAKLVGDGGQERTTDGAVQLRLHSGAESPLQADQEGSGGTARDGAGRQIRGAAATEAQLHDELL

SEQ ID NO: 296630 - protein, 76 aa, Zea mays
  Clone ID: MRT4577_33600C.1.pep
HSLSLCFWFARLVAPFMTTSYEIEPVVVILPPSKATVAHGGERRNVTIVDHTSQKIKKKNTRKKKKKKKKPREGGR

SEQ ID NO: 296631 - protein, 78 aa, Zea mays
  Clone ID: MRT4577_33601C.1.pep
VGPSFHKKRGDQARRGLCSSHDRDSFCKMGGLGPGHDSNDDLSTPKQKLLKKAPAVNVGYFVLVIKVTFVDGVFLKNW

SEQ ID NO: 296632 - protein, 527 aa, Zea mays
  Clone ID: MRT4577_33602C.1.pep
NSARGSAFFVLSFCRNHHLLQLFGRPQWLTVKGRSHSYVHKVREELESMGCQIKTSCEIKSVSSSEGGFRVTVFDGSEETYDRIIFGVHAPDALKILGAEATHEELRILGAFQYVYSDIYLHSDKSLMPRSLSAWSSWNFLGTTSKGVCVTYWLNLLQNIESTSRPFLVTLNPPHVPDHVFLKWYTSHPVPSVAAAKASLELHHIQGNRGIWFCGAYQGYGFHEDGLKAGKAAAQDLLGKESDLLVNPKQMIPSWSEAGARLLVTRFLGQYVSVGNLVLLEEGGTMFSFGEVGKKCHVKSVLRVHDPMFYWKVATEADLGLADAYINGYFSFVDKREGLLNLFLILIANRDANKSSSSAAGKRGWWTPLLLTAGVASAKYFLRHIARRNSVSQTRQNISQHYDLSNEFFSLFLDPSMTYSCAIFKTEDQSLEAAQLQKVCLLIDKAKVERDHHVLEIGCGWGSLAIQLVKQTGCKYTGITLSVEQLKYAQRKVKEAGLEDHISFMLCDYRQIPTQRKYDRIISCEMI

SEQ ID NO: 296633 - protein, 113 aa, Zea mays
  Clone ID: MRT4577_33603C.1.pep
MGEPLLTSLSMENSNSHPCTLLSMDPAGSRPASAESSGGGGAATNGVGSGGDRELFIVPRRESAHPGPPDINLPLSADPLPPPPSWSLDTFDILDVTLGTHNYESEVALTLPS

SEQ ID NO: 296634 - protein, 825 aa, Zea mays
  Clone ID: MRT4577_33604C.1.pep
HASAFEEYYKEQQIVSEEEWDSFMSMLRKPLPATFRINASCQFFQDICSQLENDFRKSLETEVTDDHEEDAIRPLPWYPGNLAWHLNFSRMQLRRNQALESFHEFLKRENEVGNITRQEAVSMVPPLFLNVQPDHHILDMCAAPGSKTFQLLEMIHQSTKPGLLPNALVVANDVDVQRCNLLIHQTKRMCTANLIVTNHEAQNFPGCNLAKFCSKMCMDEAKVQRLEFDRVLCDVPCSGDGTVRKAPDMWRKWNAGMGNGLHHLQVEIAMRGMSLLKVGGRMVYSTCSMNPVENEGVVAEILRRCGDSVELLDVSNELPELARRPGLSTWKVRDRGSWFGVHEDVPRYRKHVISASMFPSGKGSKDSGTGSSSVEVNTDVADADMKDSTDMGEGEQETTVTIDDSNNGDNLKTEEGTKVDCESGEVTTSSSYKKLNSTSIRTEHSDYPLHRCMRIVPHDQNSGAFFIAVLHKLSPLNENQVVDGVRIDQNISKDKTEKLEKDLVSHKASSEENTVHQQVIDNANVLDGEQNRDRDNKSSEDKSSEDSKVNVNEAAKGQAGTRDRRRQQNQGRWRGVDPVIFFKDEVTVKSIVSFYGITDSFPLEGHLVTRNPDTSHVKRIYYVSKSVQDVLELNIKIGERLKITSLGLKIFERQSSKEGSPCTFRLSSEGLPLLLPYITKQILYASAIDFQHLLQYRTIKFPDFVDAKFGEEASALLPGCCVVVLREGHQDIGSIATDPSAIAIVCWKGKTNLCVMVSPLDGKELLERISLRHGLKIPKGDKEKPSQEIAGSDELLDCATEVDDQESLPESKASDIEISDAKEAE

SEQ ID NO: 296635 - protein, 80 aa, Zea mays
  Clone ID: MRT4577_33605C.1.pep
GYSLRFCFFLQKENRPDFRVLTTSTFNFTAVYVLTQRVPLESVSLTGQEFFHSFYNHALAEQTPRAGSNIVTWPTFETLF

SEQ ID NO: 296636 - protein, 54 aa, Zea mays
  Clone ID: MRT4577_33606C.1.pep
TSFCKQNFAHPYTRSCWRWPKMCLNHDVDYRTIFPKCLKQQLNAQLPMCKFETQ

SEQ ID NO: 296637 - protein, 885 aa, Zea mays
  Clone ID: MRT4577_33607C.1.pep
MGGGRKRGRTQRRHFKQGRENVWKHNPQRPPAGEGGEAREDNPSWQPFATENPAFEEYYKEQQIVSEEEWDSFMSMLRKPLPATFRINASCQFFQDICSQLENDFRKSLETEVTDDHEEDAIRPLPWYPGNLAWHLNFSRMQLRRNQALESFHEFLKRENEVGNITRQEAVSMVPPLFLNVQPDHHILDMCAAPGSKTFQLLEMIHQSTKPGLLPNALVVANDVDVQRCNLLIHQTKRMCTANLIVTNHEAQNFPGCNLAKFCSKMCMDEAKVQRLEFDRVLCDVPCSGDGTVRKAPDMWRKWNAGMGNGLHHLQVEIAMRGMSLLKVGGRMVYSTCSMNPVENEGVVAEILRRCGDSVELLDVSNELPELARRPGLSTWKVRDRGSWFGVHEDVPRYRKHVISASMFPSGKGSKDSGTGSSSVEVNTDVADADMKDSTDMGEGEQETTVTIDDSNNGDNLKTEEGTKVDCESGEVTTSSSYKKLNSTSIRTEHSDYPLHRCMRIVPHDQNSGAFFIAVLHKLSPLNENQVVDGVRIDQNISKDKTEKLEKDLVSHKASSEENTVHQQVIDNANVLDGEQNRDRDNKSSEDKSSEDSKVNVNEAAKGQAGTRDRRRQQNQGRWRGVDPVIFFKDEVTVKSIVSFYGITDSFPLEGHLVTRNPDTSHVKRIYYVSKSVQDVLELNIKIGERLKITSLGLKIFWFSYTFALFQERQSSKEGSPCTFRLSSEGLPLLLPYITKQILYASAIDFQHLLQYRTIKFPDFVDAKFGEEASALLPGCCVVVLREGHQDIGSIATDPSAIAIVCWKGKTNLCVMVSPLDGKELLERISLRHGLKIPKGDKEKPSQEIAGSDELLDCATEVDDQESLPESKASDIEISDAKEAE

SEQ ID NO: 296638 - protein, 1018 aa, Zea mays
  Clone ID: MRT4577_33608C.1.pep
MARVACTLRGKRLDGGVSVLSVGVNPVWVVQDMARTRKTTRKSTGPFGVPRHQLAPRHEGSSSGGNDPIRDLEAKVEQLWTELRHRNRVWAQDSQRIAKLSADIRRLQDKLSERDLAVDWAVNSRSVAWDREAKARARVTKLSAALDSLQVYCNTLHEEMPSRTRTHDSAGTSCGREDTPNPPPVPPTLAEAIAALVNATAYNTRFLREIVGNQFQQHGRRIPPQGLRETSYLEFSETCPPLFVKAEDPLEADEWIRVMEQKFGLICCKETQKPLFAAQQLRGPASTWCANFVAVQPTGHQITWEEFKLAFREHYVPEGVLHMKQEEFIRLKQGGDTVMQYLNKFNHLSQYAIDQVNTDLKKKNCFMRGLNDRLQRKMATCLDIPYSRVVSTTLAVEAKNTDHGKSKRFGGDRSNQGPEKRTRLVFIRPSSSPWGCPAIFVKKKDQTLRMCVDYRPLNEVTIKNKYPLPLIDILFDQLTGAQVFSKIDLRSAFEQLKILLTTAPVLAQPVIEKPFDVYCDASDHKSLKYIFTKLELNMRQRRWLELIKDYDLEIHYHPGKANVVADALSRKASCHFLTVRAPNITLCQEMEKLNLGMKQHGTLTQIKLESVLLQKIIDAQRSDKCMEHIHEKIEAGKASCFRKDDQGILWFNDRIVVPKDVRVRQQILDEAHLSRYSIHPGSTKMYQDLKQHYWWTKMKIEIARYVARCDTCRRVKAIHMKTAGPLQSLPIPTWKWEDISMDFIVGLPKTAKGFDSIWVIFDRLTKIAHFLPIKTNYPVVAYAELYIAHILSLHGIPKTIVSDRGPQFVSKFWNELHKFLGTKLLHSSAYHPQTSGQTERVNQILEDMLRACVLEFPQKWDVCLPLAEFSYNNSYQESIKMAPFEALYGRQCRTPLNWSEPGEWWHFRPNLVKETEAKVQWIRHHLKEAQDRQKNYADKRHRRLLFQVKDHVYLKVSPMKGVNRFGVKGKLAPRYIGPFPILEQCGPVAYRLHVPETLIAVHNVFHVSQLKKCLRVPD

SEQ ID NO: 296639 - protein, 35 aa, Zea mays
  Clone ID: MRT4577_33609C.1.pep
HSSNPPSFHPHSQLHFYLFQIKLWVTAILLFYNCY

SEQ ID NO: 296640 - protein, 74 aa, Zea mays
  unsure (1)..(74): unsure at all Xaa locations
  Clone ID: MRT4577_3360C.1.pep
MSSTRKLGYGITTMKRYAYVDEHLLCDIERQHVSVDDIVCHDGSVXAHSESFPELKPDEDAGIIKDFDEPDTLA

SEQ ID NO: 296641 - protein, 632 aa, Zea mays
  unsure (1)..(632): unsure at all Xaa locations
  Clone ID: MRT4577_33610C.1.pep
MDDVSRYAHSPAHLAVLRRDHAALRRLVAALPRLPRAGEVATEEESIAGEAVADAVSAVVDRRDVPRRETPLHLAVRLRDPVAADVLMSAGADWSLQNADGWSALQEAVCTREEAIATIIARHYQPLAWAKWCRRLPRILASISRIRDFYMEITFHFESSVIPFISRIAPSDTYRIWKRGAALRADMTLAGFDGFRIQRSDQTFLFLGDGARPEDAGGKELHPGSLIVLAHKDKEITDALEGAGVQPTESEVAHEVALMSKTNMYRPGIDVTQAELVPHLNWRRQERAEAVGQWKAKVYDMLNVLVTVKSRRVPGAMTDEELFAMDGEEKNGRGAELDAELDEVLTAEERKQLDSALRMGNNEEESEQRCDEGDTGAGHMDEHAAAKDKKGWFGWGGKKGAKGDDKPSKMGSKDETSDPGKQKEKGSGKKKKGGSPAESLKHESEYKKGLRPVLCXLTPDFPLKTDELIPLLDVLANKVKAVRRLRELLTTKLPTGTFPVKIAIPIVPTIRVIVTFTKFEELQPLDEFATPPSSPTQFQDAKTKESEGSGSWYSWVKGGRGTQSSDSGDSRSWKDEVDPFHIPSDYTWVDATEKKRRMKAKKAKSRRGPARKQSSKNTAEGAHRPMMDGFEE

SEQ ID NO: 296642 - protein, 632 aa, Zea mays
  Clone ID: MRT4577_33611C.1.pep
MDDVSKYAHSPAHLAVLRRDHAALRRLVAALPRLPRAGEVATEEESVAGEAVADAVSAVIDRRDVPRRETPLHLAVRLRDPVAADILMSAGADWSLQNADGWSALQEAVCTREEAIATIIARHYQPLAWAKWCRRLPRILASISRIRDFYMEISFHFESSVIPFIGRIAPSDTYRIWKRGAALRADMTLAGFDGFRIQRSDQTFLFLGDGARPEDAGGKELHPGSLIVLAHKDKEITDALEGAGVQPTESEVAHEVALMSKTNMYRPGIDVTQAELVPHLNWRRQERTEAVGQWKAKVYDMLNVLVTVKSRRVPGAMTDEELFAMDGEEKNGRGAELDAELDEVLTAEERKQLDSALRMGNNEEESEERGDEGDAGADHTDASGVTKDKKGWFGWGAKKGAKGDDKPSKVGSKDETSDPGKQKEKGSGKKKKGGSSAESVKHESEYKKGLRPVLWLTPDFPLKTDELIPLLDVLANKVKAIRRLRELLTTKLPTGTFPVKIAIPIVPTIRVIITFTKFEELQPLDEFATPPSSPTQFQDAKAKEPEGSGSWYSWVKGGRGTQSGDSGDGRNWKDEVDPFHIPSDYTWVDATEKKRRMKAKKAKSRRTTARKQSSKNTSSEGGHRPMMDGFEE

SEQ ID NO: 296643 - protein, 68 aa, Zea mays
  Clone ID: MRT4577_33612C.1.pep
QTNRCYSDLFEPGGPNGWNFGFTRNVLVPGPWVWSLETEGVDSSTLDICSVGKFRSATNAARRPYPKG

SEQ ID NO: 296644 - protein, 628 aa, Zea mays
  unsure (1)..(628): unsure at all Xaa locations
  Clone ID: MRT4577_33613C.1.pep
SHGPDLDVXMQILFLGKSGVGKSATINSIFDERKVATDALVPATHRIKKIEGTIKGIRVTVIDTPGLVSHYHGQRRNMKILNSVKHFIKRSPPDIILYFERLDHINSRYSDYPLLKLMTDILGSPMWFNTVLVMTHCSSSPPEGPDGYPLEYDTYTRYCKNVVQRHIQAAVSNTQLDNPFVLIDNHPMCRRNTKGERVLPNGQVWVSELLLLCGATKLLTEANSLLKFQDSFLLSQANTRLPSLPHLLSSLLKPHSSSSSDAIDSQLTEMSDEEDEYDQLPPFRILKKSEYENLTNEQKSAYLDELDYRETLYLKKQWKEGIRRKKLTEAQSDEVGDDYDESASPEIVHMSDMDIPLSFDSDYPVHRYRHIITDDQLFRPVLDPQGWDHDIGFDAINFEASQELKKNVSAAITGQMRKDKEDMYIHSECSVSYNAQRGCSLMGGMDMQTASKDLVCTVHGDAKFHNLPWNSIGGGISVTKFGNKYFAGAKLEDSVTIGRRVKLVANAGRMSGCGQVAHGGGVEITARGKDYPVREGSVTAAVSALSFEKETVIGANLQSDFRVGRGSKISVSANLNSRNLGNLSVRTSTSDHAEIALITVVSLIQFILRRRSAADNKDEQQIGTNLDD

SEQ ID NO: 296645 - protein, 80 aa, Zea mays
  Clone ID: MRT4577_33614C.1.pep
QAKRHAELAERELASAKRMRRQAQVELSRAHAVRDHALRQVNATLLQITCLGCRHKFHARPQLDAVPPRWPAAAATCPPS

SEQ ID NO: 296646 - protein, 78 aa, Zea mays
  Clone ID: MRT4577_33615C.1.pep
IDRDHMRSIFFTNGDRTPSNDGYGYTDGLSEDCRALAERALAIAATRNMFEAVGITINYLAFRASAVGDQYLDLRNEQ

SEQ ID NO: 296647 - protein, 40 aa, Zea mays
  unsure (1)..(40): unsure at all Xaa locations
  Clone ID: MRT4577_33616C.1.pep
SIGTRLFSSHLYLQHRPVCSASSGIASSRARVCVXXRTHD

SEQ ID NO: 296648 - protein, 212 aa, Zea mays
  unsure (1)..(212): unsure at all Xaa locations
  Clone ID: MRT4577_33617C.1.pep
MALAPSHALVVAPFTALCAFLALALLFLYSKATSSSKKTQQLLPPGPAGLPIIGSLHCVVSKRPVFRWIHGLLKDMDTNVLCLRFGAVHVVVVACPETAREVLRTNDAVLASRPETVASALFSFGYKGSILTPYGEQWKKMRRVLSSEILSASMEQRLQRRRAQEATNLVXFLYSQCSASAAACXAXXGDVRHVARHFCGNMNGTLVFGKDT

SEQ ID NO: 296649 - protein, 148 aa, Zea mays
  Clone ID: MRT4577_33618C.1.pep
MTHMFSGSNDVFKYLDEHHSLKWMRCDFNQDIKCDYIANNLVRCFNNWIRDINDFLVPDLVDKIREMIMILWEKRRKFGERLKVKILPTVLHQLNIRTRGLGHLNAVKADLHDADIWDSSNNHHDRHVVKAHLHDCTCEEWQHTSKPC

SEQ ID NO: 296650 - protein, 64 aa, Zea mays
  Clone ID: MRT4577_33619C.1.pep
ARIQLSVLGSATLLHFCFPFLSQLHILNPGEEDLRFSACQSASTAVGRRRRAITYRSSSSMCYY

SEQ ID NO: 296651 - protein, 401 aa, Zea mays
  Clone ID: MRT4577_3361C.1.pep
MTVTPRITVSDGRLTVRGRTVLTGVPDNVSAAHAAGAGLVDGAFVGAHAGEAKSHHVFTFGTLRDCRFLCLFRFKLWWMTQRMGVSGRDVPLETQFMLVEVPASDGDGDDAPAYVVMLPLLEGQFRAALQGNDRDELQICIESGDKAVQTDQAAHMVYLHAGDNPFDTVTAAVKAVEKHLQTFHHRDKKKLPSFLDWFGWCTWDAFYTDVTADGVKHGLQSLSKGGAPPRFLIIDDGWQQIASENKPDPNVAVQEGAQFASRLTGIKENTKFQTKPDGDGDGEQAPGGLKRLVAETKDAHGVKQVYVWHAMAGYWGGVTPTAGTAMERYEPALAYPVQSPGVTGNQPDIVMDSLSVLGLGLVHPRRVRDFYGELHAYLASCGVDGVKVDVQNIIETLGAGH

SEQ ID NO: 296652 - protein, 79 aa, Zea mays
  Clone ID: MRT4577_33620C.1.pep
VAKTPCATHLANFHFWQQYCHHCITYADLMVNQEHATYHQSKLAMHLYLHQTILSIECSLLCSIHPNCTLTSLHYLCLA

SEQ ID NO: 296653 - protein, 89 aa, Zea mays
  Clone ID: MRT4577_33621C.1.pep
TLGALFGAIRVPSKWKWAKPCGVLLGVHPPQLSHRAPPKCSMVFLAPIMHVYPNLGDGLYKTETLFVNKKSLREGVSRPPPCGSPPLCR

SEQ ID NO: 296654 - protein, 54 aa, Zea mays
  unsure (1)..(54): unsure at all Xaa locations
  Clone ID: MRT4577_33622C.1.pep
SSSIKTSNKIDVLVIFFLAPXTSISTKATSQEPHHVHLNEEKNYVAWNECMFLY

SEQ ID NO: 296655 - protein, 116 aa, Zea mays
  Clone ID: MRT4577_33623C.1.pep
LDLTDADGQGVLTMDKCQLQELRVRPVSTSRGSHRTLMPELCMWLWYAPCIELPGGLVLNGATLVAIKPSEEGTGDTVWNETADAAWVLDAFEEPYRTAVKMLLKRRTYSLEMNSF

SEQ ID NO: 296656 - protein, 162 aa, Zea mays
  Clone ID: MRT4577_33625C.1.pep
RPPGRGERGFLPAPQLFPQLGTGFSHPTWGEPSGSFSGVFSFSPIKGGKFFGGPPQGGARFFSPLGGAPLGGALLPKKPIFSLHPIFFFNPSPLKEATHCWGAPFFWSNPAGLVNLAPSPGGGASLLKNPNIWWGFFLANKQKRKKNKKKKTKKKKKKKKKK

SEQ ID NO: 296657 - protein, 229 aa, Zea mays
  unsure (1)..(229): unsure at all Xaa locations
  Clone ID: MRT4577_33626C.1.pep
MPTIIVSVDLECSRCRAKIEKVLNRIQEKGEFCIDDIDLDEKSNKVKVTGPFDPDKLADKLCCKACKIIKQIEFRGSKPPPPPXGEAXRRRXPAPPXAEERKEEAAXAXPPAKGXPGEAXXPPKGEXPPPPXRRREPKPAPXPRVVEVPYPWPYPCPYPXPAWPSADCCCHXGHGGCHCCSCGKAPEAPAPPPMPQYVPQPYPCNPCGGGGGGYRIVCEEDPSYACAIM

SEQ ID NO: 296658 - protein, 170 aa, Zea mays
  unsure (1)..(170): unsure at all Xaa locations
  Clone ID: MRT4577_33627C.1.pep
NPRPAQKGRRDGRTPQPSTRAXHRTQPARHVTHAYRYPERPAGKRGRRRGEAHGSEAKGRXXPXXRGXMASGRRGEXGSAXXVARTRTSCGSXLAGVPARSRHGGTRARRXTVLPGXXAXARXGPGXXGVXVSEXGRSRWRWASXGGVXPSWXXARGXWRCAPCWRGGWG

SEQ ID NO: 296659 - protein, 40 aa, Zea mays
  Clone ID: MRT4577_33628C.1.pep
CCCFLKKKKKKKKKKKKKKKKKKKKKKKKKKKKKKKRGGP

SEQ ID NO: 296660 - protein, 234 aa, Zea mays
  unsure (1)..(234): unsure at all Xaa locations
  Clone ID: MRT4577_33629C.1.pep
VSWDDGRTPRLAEKGEFCIDDIDFDEKNNKVKVTGPFDPDKLADKLCCKACKIIKQIEIVEPPPPPPPKPKEEPKKEEQAPPPPEKKEEAAPPPPAKVEPPKEEPPKEKPPPPKEEPPKEKPPPPKEEKPAPAPPKEEKPAPPPPKVVEVPYPWPYPYPYPAWPSDCCCHHGHGGCHCCSCGKAPEPAPAPAPAPPPPQYFPQYMPQPYPCXLRRGGGYRIVCEEDPSYACAIM

SEQ ID NO: 296661 - protein, 511 aa, Zea mays
  Clone ID: MRT4577_3362C.1.pep
MSGGLRNESASKLEKVEIVSTSSFGADVDPRAIDLAMRIAERMFLKMKEDEAKNKIEEENDRWRPNDESTSSQGSSFKSTSHMCFIANGSDSESESEDEEEQESDSEDEDDLQQFFAQLSKKHRMSLLKLMKRAEEQKEMLHKQEDFLIRKIEDLEKLTKEHEKLKCSHDDLVQRYEDISIEQIKAVNHSSYIAQLENKNAMLKNTIERLNIENLALQEKHDTLVCSHNKFMDSHIMLEMAHEVVLTNLKSYQPHLCTCTQTETILSCANKCCSQESQSSIELELSGTSNVSYAKENNELKEENERLERSLIQLKGKCHAQPSQDNRDNMVKKLEKGTIVACTKPLQKNIKLSKKDMSKHQEKKAKAHDKCLNYASTCSTQGNKQVTLPNKRRCARKCYQCHDKGHEIKSCPYTKDSVLTLERNRLTNHVANKKQGKKESCKIKNQICYTCRRKGHLCKDCPMSEYPKPTMSIHSYSLKRPKNDTCARKPHRKNEALENELKRFYLALERI

SEQ ID NO: 296662 - protein, 108 aa, Zea mays
  Clone ID: MRT4577_33630C.1.pep
FCRLFFGWGLPNFLKKLLIDPIEQEPGCFTIVTDESTLGTLALEPSGERVFTRTQTLKRPLPGLFILTKTFGGRQLEGSTSVSSHFMTERILIWLPWIDTSFQVLSHT

SEQ ID NO: 296663 - protein, 64 aa, Zea mays
  unsure (1)..(64): unsure at all Xaa locations
  Clone ID: MRT4577_33631C.1.pep
KQTRTLVRKSPAGHRVMSVTKQFKRHGKDTNKCPSQWLIVNDKNEHLDPFFTDALSDAXSXXXS

SEQ ID NO: 296664 - protein, 93 aa, Zea mays
  Clone ID: MRT4577_33632C.1.pep
PSAAPSSKGGRRPSSRRRSTTAAGRIAGQPAGPAPASTAFWILDRSSIETWATCTEAHSLVVPSHGVDRRTPDARGNTVQEVPAWRQGSIQCS

SEQ ID NO: 296665 - protein, 345 aa, Zea mays
  unsure (1)..(345): unsure at all Xaa locations
  Clone ID: MRT4577_33633C.1.pep
MPYQYDPKNDXFRPLGNTGLRVSLLSYGGWLTTGGTVKGDPVVEIIKTALDHGVNFFDNAEVYSNGESEREMGRAFKELDVDRSQIVVTTKIFFGTGKSDPNQRGSSRKHIIEGLKASLERLQMDYVDVMFLHRPDYGTPVEETIRAVNTLIQQNKIFYWATSEWSAAQVAEANGICDKLGLIRPIAEQCQYNMLHRERFEVEYDILFKNYGYGTTVWSPLAGGMLTGKYNDGIPEDSRFKTSSMYADTVKELETEKGKAKIAKMRKLGDVAKRLGAXTXAALALAWCAKNPNVSTVILGATKPEQLVQNFEALDLLPKLTDDVIQEIEEILDNKPTPLPTYGRA

SEQ ID NO: 296666 - protein, 128 aa, Zea mays
  Clone ID: MRT4577_33634C.1.pep
TPVVSPIYGARASLQGISCGFLILTSVRAISANMNVSESLKDSARALTQGITRSSCRIWGLPGSRNTTRPLVARSKSSAPVLAHAGSRPAPVLCAGQGLFLRTRTRPCQRSPDRSRQDRLSHHDGGCK

SEQ ID NO: 296667 - protein, 71 aa, Zea mays
  Clone ID: MRT4577_33635C.1.pep
CLSYSIFSFSNFSVQPSFYPPTVISRLGNTNIRYELPSGIKSSTRVFRSSYGSSPPGMVPWPVGCLGLTTT

SEQ ID NO: 296668 - protein, 90 aa, Zea mays
  Clone ID: MRT4577_33636C.1.pep
VQSSLWSGGWLPLKYSGAQRWYLSPIHQLNDVRGHTGAPLIVESYTGERGTRPTVFWPKGSKDRPKKTQANSANHFIMVHSGNGDPKGYH

SEQ ID NO: 296669 - protein, 73 aa, Zea mays
  unsure (1)..(73): unsure at all Xaa locations
  Clone ID: MRT4577_33637C.1.pep
ELGFLIFYYIFXLYVCFNKVSYSSFFIIFLKCFFLLLFLYIXFIIIYFNIFFFSFFFFFFFFFLFFFFFFFFF

SEQ ID NO: 296670 - protein, 76 aa, Zea mays
  unsure (1)..(76): unsure at all Xaa locations
  Clone ID: MRT4577_33638C.1.pep
YITNYXTPKKSHLNIIHPHTHDILQPRLKINKTSLSFPLSHDQSQTSLPSSPTSKSSICQTMIXVELCLLCCSKPD

SEQ ID NO: 296671 - protein, 121 aa, Zea mays
  Clone ID: MRT4577_33639C.1.pep
TRRWSASQSRWSVQGVSADSAACAGPTPGSVASSHRRQLLTGAATAAKPHLRGHRVLRVAGPSARSRVIRRSSWYLESQVPGQEQVPQDEARGGCCDVFVRDLGRRLPVNFGLLDRCLLIM

SEQ ID NO: 296672 - protein, 68 aa, Zea mays
  Clone ID: MRT4577_3363C.1.pep
SLHLMRWPRIGQAPRYGVVVPQEGSLIRLFLLSLFKINQLPFSPVVCKVVHNKRCKRQRIVSKPDVLP

SEQ ID NO: 296673 - protein, 461 aa, Zea mays
  unsure (1)..(461): unsure at all Xaa locations
  Clone ID: MRT4577_33640C.1.pep
MAERLAASLLPAASPSPSARRATVAAAAAASFPSPCSARAGLRLRSRPPLFSQKAAGRGCGLRVVRCMAASDAAQLKAAREDIKELLKSTYCHPIMVRLGWHDSGTYDKDIKDWPQRGGANGSLRFDAELSHGANAGLINALKLIQPIKDKYPGITYADLFQLASATAIEEAGGPKLPMKYGRVDVTAAEQCPPEGRLPDAGPRDPAEHLREVFYRMGLDDKEIVALSGAHTLGRARPDRSGWGKLETKYTKDGPGEPGGQSWTVEWLKFDNSYFKEMXFFLNEIQDMKFLSQLPWKEQKEQDLLVLPTDAALFEDPSFKVYAEKYADDQEAFFKDYGEAHAKLSDLGAKFDPPEGFSLDDXQALHLPTRRRKNSTLVAVGAAVATATADDNNGAASQPEPFIAANYSYGKRELSDAMKQKIRAVYEGFGGSPDKPMQFNYFLNIINLIAGLAFLTSLLGN

SEQ ID NO: 296674 - protein, 111 aa, Zea mays
  unsure (1)..(111): unsure at all Xaa locations
  Clone ID: MRT4577_33641C.1.pep
AGFAVKAGIDGLLDVARRSFCDTSEAIHNLAKKYRDDYNMPNLKITYNIRQGFYFIIPQKDITDRLPNKFIQVVRHGKNLHCSSLELASLNVRNKSSAGXECFSRTELCLG

SEQ ID NO: 296675 - protein, 48 aa, Zea mays
  unsure (1)..(48): unsure at all Xaa locations
  Clone ID: MRT4577_33642C.1.pep
ASNVLQAXTLNRIPEPTVQVPPHRPLSTDFADDNKPAGLAKLTPASEY

SEQ ID NO: 296676 - protein, 58 aa, Zea mays
  Clone ID: MRT4577_33643C.1.pep
MMNTFSTHDGHNDRLSTKDPKSCIESPTFMQSHDPRMANDEFLALTNDIKAGYEVCHP

SEQ ID NO: 296677 - protein, 85 aa, Zea mays
  Clone ID: MRT4577_33644C.1.pep
SLWSCGSRSTGLLRSCCALLPRRSSSSSYIAPNSLFVHETQMDDGFDGLDAVPACLDEDYAYRTVCHDIPLDPNSIVSCHLYLIS

SEQ ID NO: 296678 - protein, 64 aa, Zea mays
  Clone ID: MRT4577_33645C.1.pep
LSTVNSVLPLGDSPLRDDLIHLQPREWNLEEYVGWVWTRSGRNHHPSPAVEPCGGEGEAWGSEG

SEQ ID NO: 296679 - protein, 120 aa, Zea mays
  Clone ID: MRT4577_33646C.1.pep
YREFDIEPMDLLDHLLNFYDYEGKVTDNLQHALSTIISCVISDFLPIIQTSPYAAQPPQRPQRPLRPAVYSTNIASPALHKYHIRAYAIHVELDTTPVCQFLLYGRILILLSARRINKLE

SEQ ID NO: 296680 - protein, 125 aa, Zea mays
  Clone ID: MRT4577_33647C.1.pep
NQHMRRHQKALKRWVPNGKRMEHQLANTSGEGQIVTSQSGKEEQSKVNNKGKPRGIPGRPGKHMGREKKLGSRKQELRSSKLVGRTQGSQKGAPPYIFYFFLYFIPMFFLFSIFFFFSLCLLSIK

SEQ ID NO: 296681 - protein, 107 aa, Zea mays
  unsure (1)..(107): unsure at all Xaa locations
  Clone ID: MRT4577_33648C.1.pep
ISALTLDDRVRYAQDVVIAAATAADEYAYGSAAMIATGCVIARIRHTNHCPVGAASHREQLRARFSGAPGHLHNYLLLATXEDQAPLAQVGSDKAGYISGRTDLPKP

SEQ ID NO: 296682 - protein, 68 aa, Zea mays
  unsure (1)..(68): unsure at all Xaa locations
  Clone ID: MRT4577_33649C.1.pep
SMVWGXSRVIDRNQSVIPRCXGIPFFLILSIPMPKIEIFGTWPKFPLFGILFKKRIPNKGKKGKGWIP

SEQ ID NO: 296683 - protein, 402 aa, Zea mays
  Clone ID: MRT4577_3364C.1.pep
MTVTPRITVSDGRLTVRGRTVLTGVPDNVSAAHAAGAGLVDGAFVGAHAGEAKSHHVFTFGTLRDCRFLCLFRFKLWWMTQRMGVSGRDVPLETQFMLVEVPASDGDGDGDDAPAYVVMLPLLEGQFRAALQGNDRDELQICIESGDKEVQTDQAAHMVYLHAGDNPFDTVTAAVKAVEKHLQTFHHRDKKKLPSFLDWFGWCTWDAFYTDVTADGVKHGLQSLSKGGAPPRFLIIDDGWQQIASENKPDPNVAVQEGAQFASRLTGIKENTKFQTKPDGDGDGEQAAGGLKRLVAETKDAHGVKQVYVWHAMAGYWGGVTPTAGTAMERYEPALAYPVQSPGVTGNQPDIVMDSLSVLGLGLVHPRRVRDFYGELHAYLASCGVDGVKVDVQNIIETLGAG

SEQ ID NO: 296684 - protein, 86 aa, Zea mays
  Clone ID: MRT4577_33650C.1.pep
PPPWMAWSPPLWSVSGPPTLKKNLPGRTPPKGHYGPLSALVMSSHFQMFLPCGAITPFVSQISPCRSINVGNRVHLVFVAQWLPMP

SEQ ID NO: 296685 - protein, 138 aa, Zea mays
  Clone ID: MRT4577_33651C.1.pep
MYKSSKFPSKQPHQKPDNTANPHLNPRPTKKPHPLELRDSYAATKPGAVNTNYPLMKAAALSGQWYTDADELEARVLGGRKQVPPAVGLQEMQGIVERKRELTKKLMLQNAREYNAVRRGHGDLKLLNISKKTETSTN

SEQ ID NO: 296686 - protein, 80 aa, Zea mays
  Clone ID: MRT4577_33652C.1.pep
WEVHPCAHIRGFFFFFKMVSGCFFSPVGAGLSGAPRGPRPFGSFHPRGAGFPPATRPPVCPGPLVGSWLGFGPGGALLGV

SEQ ID NO: 296687 - protein, 66 aa, Zea mays
  Clone ID: MRT4577_33653C.1.pep
TRTRTRTRFDYDSTRLLVHGGHPLHGRARAPAASPYSGIPMHAQARMTTDASLGGRTATCTATSDL

SEQ ID NO: 296688 - protein, 132 aa, Zea mays
  Clone ID: MRT4577_33654C.1.pep
SLSSAAEALKTREFIEANALSPAVATSNASLRKLCQDGNIRDAYKLLTEMSERKIQARNITCNTLINAYCKIADLKSALKFKNKLLEAGLKADPFTYKALIHGFCTTNELTRAIRVMCSMLDAGFTPRYRTN

SEQ ID NO: 296689 - protein, 59 aa, Zea mays
  Clone ID: MRT4577_33655C.1.pep
STAESQGELFCGPANIRGLNSVCRWRIHKPMYIFLRQCDTILGPQTHIYRYRTCHVTSY

SEQ ID NO: 296690 - protein, 75 aa, Zea mays
  Clone ID: MRT4577_33656C.1.pep
SAGNAGTVIPRAQHLVLHTCGTECNPRGSTFRSTQQSLHRTSRSLNRRKDPGVYKIHTTPPRHSLVVLHTVWVLP

SEQ ID NO: 296691 - protein, 49 aa, Zea mays
  Clone ID: MRT4577_33657C.1.pep
EVTFPDSNVKKKKKKKKKKKKKKKKKKKKKKKKKKKKKKKLKKKKKKKV

SEQ ID NO: 296692 - protein, 64 aa, Zea mays
  Clone ID: MRT4577_33658C.1.pep
FKGGSLCPLGWATFWKGDWGGPFWFFPNWGKGDFFQSDLIWEPQGFSHPHVFKPRPINLILGAL

SEQ ID NO: 296693 - protein, 170 aa, Zea mays
  unsure (1)..(170): unsure at all Xaa locations
  Clone ID: MRT4577_33659C.1.pep
SPGCFFPPTPRASIIPVYCGKYTDELIKNAVYIGTPGKGILAADEGTGTMGKLLSTINVHNGEENRXRALRELLLXCPGALHDIRTVILYEETLYQKTNDRLPIVAVHEDGRVLPGINVDKGPMDAXATDYETTTLSADYLGXRCPKYYEAGARIAKWGADLKTGPYEPS

SEQ ID NO: 296694 - protein, 208 aa, Zea mays
  Clone ID: MRT4577_3365C.1.pep
MCFVTNGSDSESEIEDDEEHESDSEDEDDLQQFFAQLSKKNWMSLLKLMKRAEEQKGMLYKQEDFLIRKIEDLEKLTKEHEKLKCSHDHLVQRYEKQEFSGTSNVSYAKENNELKEENERLKRSLTQLKGKCHAQPSKDNRDNMVKKLEKGTTVACTKPLQKNTKLSKKRMSKIQGEKINAHTICSNNVPMCFNKERSKRSDRMCYGC

SEQ ID NO: 296695 - protein, 126 aa, Zea mays
  Clone ID: MRT4577_33660C.1.pep
GLGGPVPVPIRGFLPPFLKPILGVCSPRFWGGWGFIYGPPRGFPPPKVGHPVFSPSSPPPVAQKFPGPPILERGCFSPFFLGILLGAFRGKKKKKKKKKKKKKTQKKKKKKKKKKKKKKKKNKKKK

SEQ ID NO: 296696 - protein, 40 aa, Zea mays
  Clone ID: MRT4577_33661C.1.pep
EITGAGGSELAVTPVAAQADAPDGRASTSGPDVTLEHFLA

SEQ ID NO: 296697 - protein, 41 aa, Zea mays
  Clone ID: MRT4577_33662C.1.pep
MLSCECRRLLFCCRNSLSLVRVSELEKVKVGVALELLGRVG

SEQ ID NO: 296698 - protein, 79 aa, Zea mays
  Clone ID: MRT4577_33663C.1.pep
ITPKQKNFKEGPLGIPFSDTTRDLGFFDKPIDILPLFKPHPVAQHYPRLGPQFNIGPFLEISDIFAKTLIFWNPIFFTG

SEQ ID NO: 296699 - protein, 91 aa, Zea mays
  unsure (1)..(91): unsure at all Xaa locations
  Clone ID: MRT4577_33664C.1.pep
AAPSCGVCLGGPPCGSVFFGALVVSCXAXGVVLALPFSVFCLCLPLPSSRVFFXGRLRLSLPPXXFXLAXXXXRGGRXXVGSSTRAXFRXG

SEQ ID NO: 296700 - protein, 52 aa, Zea mays
  Clone ID: MRT4577_33665C.1.pep
VLRVLPVTKWFPVFLSRANSLVPFFRGGDSPPAVFFLCIPVISEFFLRLVGL

SEQ ID NO: 296701 - protein, 150 aa, Zea mays
  Clone ID: MRT4577_33666C.1.pep
TFLKGDLGEFGYVAPECASNPVGTTKGDAYAFGVVLFELVSGQEAAAAAVGTVDVTGEGFKGTLVDWVYQLKASGRIGDAVDKLLRGKGHEAEIEEFLKVAFACTQPRVRERHSMYRVYHALKSIGEGRDATEQFDEFPLAYNKDDSDTM

SEQ ID NO: 296702 - protein, 119 aa, Zea mays
  Clone ID: MRT4577_33667C.1.pep
MVQRLTYRKRHSYATKSNQTRVVKTPGGKLVYQYTKKRASGPKCPVTGKKIQGIPHLRPTEYKRSRLSRNRRTVNRPYGGVLSGPAVRERIIRAFLVEEQKIVKKVLKIQKTKEKTTKS

SEQ ID NO: 296703 - protein, 107 aa, Zea mays
  Clone ID: MRT4577_33668C.1.pep
RVGAPMGFRCLDGPLEFLGCWWGKAFGRHVLEALKTSQGVGPKVFSLPEYLRFCLGVKKFCTQVGFLGGWGGAMGPYFFVTKNGFKKFQVFFYSIIGPRGLGFCRGI

SEQ ID NO: 296704 - protein, 59 aa, Zea mays
  unsure (1)..(59): unsure at all Xaa locations
  Clone ID: MRT4577_33669C.1.pep
RVMSSYRWPRQFQNGHDVNDWVGPPNNNGVIKEATINPDTTCGNDWVCEHRWRXIRIMV

SEQ ID NO: 296705 - protein, 161 aa, Zea mays
  Clone ID: MRT4577_3366C.1.pep
SFLDCFGWCTWDAFYTDVTADGVKHGLQSLSKGGAPPRFLIIDDGWQQIASENKPDPNVAVQEGAQFASRLTGIKENTKFQTKPDGYGDGEQAPGGLKRLVADTKDAHDVISNVGGKAMALRVRGCGRIGAYCSREPARCLLDSSEVEFSYDADTGLVCVD

SEQ ID NO: 296706 - protein, 52 aa, Zea mays
  Clone ID: MRT4577_33670C.1.pep
SVVFSHRASGCSSLASSACLLLLARDGSLSQQCAHASEVCQPPHGRGAKVSS

SEQ ID NO: 296707 - protein, 97 aa, Zea mays
  unsure (1)..(97): unsure at all Xaa locations
  Clone ID: MRT4577_33671C.1.pep
MTKRTKKAXIVGKYGTRYGASLRKQVTKMEVSQLSKYFCELCGKLAENRIADRIWGSKDCGNAQAGGAYTIITASALSARSTIRRLRQCTEVGYRSL

SEQ ID NO: 296708 - protein, 213 aa, Zea mays
  Clone ID: MRT4577_33672C.1.pep
MVAPDVKAETMKLMDQRGALEAEMDAIIARLTAAGGPGITGGLVDAEGFPRSDIDIPNVLAQRRRLAELRNDHKDVTNKIGKNLEVLHSAKLSRNEQSTSRRSDTTDPSHFGSSQSEPMEEDHVTGLPFAMIDEIADGSPASVDGLQLGDEIVKFGNVEAGDQLQERLMSEALSNEDSQVSLVIIRQGSVVNLTITPRKWHGRGLLGCHFRML

SEQ ID NO: 296709 - protein, 61 aa, Zea mays
  Clone ID: MRT4577_33673C.1.pep
CNKCRCVNAVIRLASIRKPNAPIEDKSIPNMIHAESTQIIYRILKMAKYKPLQDAYVVRHC

SEQ ID NO: 296710 - protein, 36 aa, Zea mays
  Clone ID: MRT4577_33674C.1.pep
EENRQDAEAWYLTQIDELNTQVDVHTPQIQINKTEV

SEQ ID NO: 296711 - protein, 102 aa, Zea mays
  Clone ID: MRT4577_33675C.1.pep
GSSQSEPMEEDHVTGLPFAMIDEIADGSPASVDGLQLGDEIVKFGNVEAGDQLQFGSRSEALSNEDSQVSLVIIRQGSAVNLTITPRKWHGRGLLGCHFRML

SEQ ID NO: 296712 - protein, 76 aa, Zea mays
  unsure (1)..(76): unsure at all Xaa locations
  Clone ID: MRT4577_33676C.1.pep
FGAAGWRVLSFSILYSASVRPSSRSSQQDGPLLLLGHALALLAVGVAVANGVSLSLLGGDGLARXGLKTMDVHLYS

SEQ ID NO: 296713 - protein, 85 aa, Zea mays
  unsure (1)..(85): unsure at all Xaa locations
  Clone ID: MRT4577_33677C.1.pep
IFAANKGGCVVRSLNAMDYEGGAPLHQVDGGEHLDVVDLVLQXGASPRKENTCGQTSVDMADQGTGVRALLAAKQIEASPRMSDD

SEQ ID NO: 296714 - protein, 65 aa, Zea mays
  Clone ID: MRT4577_33678C.1.pep
MCHLSYVLIARRRSVDVVVRAPCTDRRQPARYPSRAWGRRAECASCSCFIHSLCVLHCRGILLIV

SEQ ID NO: 296715 - protein, 136 aa, Zea mays
  Clone ID: MRT4577_33679C.1.pep
SPRSARPARSCAQRLSRARRCLAYERPYMTYTFLYDSISFMHPTFSNDSILVLMVVMTTVLLALVHPPSQRPPRTSTSLGPLFVCCNTLAWRDSYHLPVWQWQHQGVGTELGVHLGYGWWIGLPTRSGERMGKSLV

SEQ ID NO: 296716 - protein, 551 aa, Zea mays
  unsure (1)..(551): unsure at all Xaa locations
  Clone ID: MRT4577_3367C.1.pep
MPATRIVSLRLQSTLLKKGDRLNFNFNRGPERFNRGPGQVQPGSREVQPVSRESSAGVFSQDLTDVDPRAIDLAMRIAERMFLKMKEDEAKNKIEEENDRWRPNDESTSSQGLSFKSTSHMCFIANGSDSESESEDEEEQESDSEDEDDLQQFFAQLSKKNRMSLLKLMKRAEEQKEMLHKQEDFLIRKIEDLEKLTKEHEKLKCSHDGLVQRYEDISIEKIRAINHSSYIAQLENKNVMLKNTIEKLNIENLALQEKHDMLVCSHNKFIDSHIMLEMAHEVVLTNLKSYQPHICTCTQVETILSCANKCCSQESQSSIELEISGISDISITQENKELKEEVGRLRRSLTLLKGKCHAQPSQDNRDNMVKKLEKGTTVACTKPLQRNTKLSKKGMSKIYGKKLNAHTICSNNVPMCFNKERSKRSDRRCYGCKEKGHEIDSCPHMKNQDLARSRKMTIKKDESRRQMHCKDKHRICYSCREKGHLFKVCPKGKIPKPNLSIHSDMLRRPKFDSCARKVMSSPHSRTKAIWVPKSLLANHDGPIMXGYQNIL

SEQ ID NO: 296717 - protein, 65 aa, Zea mays
  Clone ID: MRT4577_33680C.1.pep
LDTVKCITRYQITSGTTARTAPRDVNMKGCESGVCLTSHRLPALLSHRTHVSHRRGKRVLSHGML

SEQ ID NO: 296718 - protein, 37 aa, Zea mays
  Clone ID: MRT4577_33681C.1.pep
KYDKCIIILHHQDTQFNSVTYFGSRRLLAHIQNIAAA

SEQ ID NO: 296719 - protein, 80 aa, Zea mays
  Clone ID: MRT4577_33682C.1.pep
HQRCFPFHWQAILAGIQLILMAGQSPAKKEEWGKPGTPLAWDGPQFLGGIFEWGWGFFFYLKHWGGNWFLGGGEFTWGLG

SEQ ID NO: 296720 - protein, 86 aa, Zea mays
  Clone ID: MRT4577_33683C.1.pep
IIWIRPESGRHSNVGNRKWMVWEPTAKTYKKEFVLKPQRRSLPAFWMVCGGPTPAIEASLFVETSPVFPVWPLDNSSCGKDSVYNL

SEQ ID NO: 296721 - protein, 88 aa, Zea mays
  Clone ID: MRT4577_33684C.1.pep
PQAEKSYFKVPFYRADLSQMVAGRETKVQNLSKFSMNLATQRPAPSTFFLGLHKQHPSLKSRGEKPLLGFEHVGDQVNNPVVVPPFVV

SEQ ID NO: 296722 - protein, 95 aa, Zea mays
  unsure (1)..(95): unsure at all Xaa locations
  Clone ID: MRT4577_33685C.1.pep
MAARVAGKKKGSDSLTIDCTXPVEDMIMEVAXLEKCLQERITVACGXAGYLGDSVTISREKTNVTVTSDRPLSXRYLTYSTLRYLCTHNVRDWLL

SEQ ID NO: 296723 - protein, 61 aa, Zea mays
  Clone ID: MRT4577_33686C.1.pep
MAPLLLLFLLCGHCALLSLATSSRANAKKRDDVKSNSNSRDSGQETRSMNYCSPEETQQQH

SEQ ID NO: 296724 - protein, 140 aa, Zea mays
  Clone ID: MRT4577_33687C.1.pep
MAATALSMSILRAPPPCFSSPLRLRVAVAKPLAAPMRRQLLRAQATYNVKLITPEGEVELQVPDDVYILDFAEEEGIDLPFSCRAGSCSSCAGKVVSGSVDQSDQSFLNDNQVADGWVLTCAAYPTSDVVIETHKEDDLL

SEQ ID NO: 296725 - protein, 104 aa, Zea mays
  Clone ID: MRT4577_33688C.1.pep
STRNFSSVVQPRRGVRGCQGMSASAIIDTENDEEVMVEEEGVWRPTPEDPPARNYFYLDLWTEPTPYGRARWRSNLESKWYMGISSLSIEVTNHVKSERVPGDP

SEQ ID NO: 296726 - protein, 140 aa, Zea mays; identical to SEQ ID NO: 296724
  Clone ID: MRT4577_33689C.1.pep

SEQ ID NO: 296727 - protein, 50 aa, Zea mays
  Clone ID: MRT4577_3368C.1.pep
TLNSFYIFLKNSYKIGMSIRKRIRMFFPLFCCGEKIMFLKNYPKIFLKTS

SEQ ID NO: 296728 - protein, 60 aa, Zea mays
  Clone ID: MRT4577_33690C.1.pep
SHASRFPQMSLVGHLAQFFFVAPVITIGLALRCLWFIFVLLRVARSISAKHILQTPPGKM

SEQ ID NO: 296729 - protein, 108 aa, Zea mays
  Clone ID: MRT4577_33691C.1.pep
WGAKGLFQGRAKKFWLRGNISPPLKGGTKVFPPHPNLGPKRFGMGPQKTPEKQLRGFTAFKKQPQTWKNSGGFFSKNAGGNPVVQNLWQKKKANWEGKIWVPQGGKLF

SEQ ID NO: 296730 - protein, 112 aa, Zea mays
  Clone ID: MRT4577_33692C.1.pep
FQYSMQESMSIRVVCCIFFLIHVHSKASSMGWFISSISSVHIVVLRSSNLRMILCRGRQISYVGSCTTWLYCYIVHDVHHGLCSIIRVSTYVVILLCRWGSSYIAFSYLVSR

SEQ ID NO: 296731 - protein, 116 aa, Zea mays
  Clone ID: MRT4577_33693C.1.pep
MANMRVQYRRRNGYNTTSNRTRVIKTPGGDIRLLHIKKRGTVPKCGDCGSKLSGIPALRPREYSQISKPKKTVQRAYGGSRCGNCVRDRIVRAFLIEEQKIVKKVLKEQEQSQKKK

SEQ ID NO: 296732 - protein, 88 aa, Zea mays
  Clone ID: MRT4577_33694C.1.pep
FLGPCLFVFFFVSDLGMPPLACAFLGCPAVPCLSFVALRLFWFGILCAFRRGLALLGWLGLWLWGCTARSSKSSPFSWCLCGGSKGRV

SEQ ID NO: 296733 - protein, 69 aa, Zea mays
  Clone ID: MRT4577_33695C.1.pep
RTLFTYLKIFIIPPKESNRAAAFIQLDGSTINSPKSISLSLYIQHFILKNSSLPNLIPLYNIPLSPLSL

SEQ ID NO: 296734 - protein, 187 aa, Zea mays
  Clone ID: MRT4577_33696C.1.pep
DISQRLPRGSEATNEALIMEVMVDIALVHKNNALPCLVCKANLAWGLDHGDVDKDLLAAERRGATKMKRGRGSRERHAVFFLTFTGTPTCNGGLHHELLFWADDGAAESQGDGYFFFLEMNCSRSCGDLEAASRQYGMDSPGMIAAGLLFIHYRNLALCRVPNSLSSVLFRALDKELFAECHAKNPR

SEQ ID NO: 296735 - protein, 106 aa, Zea mays
  Clone ID: MRT4577_33697C.1.pep
MIAAAAAKRPFQLARSLTYHHHPGHRPAAASRWRRQHQQHQLADEPRAPRPQAVVLYTTSLRGVRRTFADCAAVRAILRGFRVAVDERDVSMDAALRREVQALLAA

SEQ ID NO: 296736 - protein, 228 aa, Zea mays
  unsure (1)..(228): unsure at all Xaa locations
  Clone ID: MRT4577_33698C.1.pep
MAAAEEEEEWEDGRSVMPEEEDGDIEDVPPPPLLGRNFGSEDEDEDEAGSLNSQSQWWPRSFREATDTYTIAAPPGLRHLVVGDCNGLGSDLKLPLLSDKLDGRQDSSNNLLPVADPFGSVLSEGRFSDRVQQAPTTPGCNLTQTVFNGVNVLAGIGIFSAPYTIREAGWASLVVLAFFAVVCCYTGVLLKYCFESKDGVKTFPDIXELAFWRIGRFLISIXLYTELY

SEQ ID NO: 296737 - protein, 60 aa, Zea mays
  Clone ID: MRT4577_33699C.1.pep
PHPPMVRLLQRTGGRSLLKMVEPLFLGTGGLLKFNLLFSQLFRDKLPPVKKVHMKKGGVT

SEQ ID NO: 296738 - protein, 145 aa, Zea mays
  Clone ID: MRT4577_3369C.1.pep
MTVTPRITVSDGRLTVRGRTVLTGVPDNVSAAHAAGAGLVDGAFVGAHAGEAKSHHVFTFGTLRDCRFLCLFRFKLWWMTQRMGVSGRDVPLETQFMLVEVPASDGDGDGDDAPAYVVMLPLLEGQFRAALQGNDRDELQICIES

SEQ ID NO: 296739 - protein, 34 aa, Zea mays
  Clone ID: MRT4577_336C.1.pep
YAALILRAYSLRIGSWTQPKRGCNPGNSGPDLQG

SEQ ID NO: 296740 - protein, 78 aa, Zea mays
  Clone ID: MRT4577_33700C.1.pep
KKKKGLATPPKLKQSKMGGGFCWGLGWGSFSIAKWKPNQPVFFFASQKKNKIKTQQQKEKKKNKKKTARAAPLKEPRL

SEQ ID NO: 296741 - protein, 191 aa, Zea mays
  unsure (1)..(191): unsure at all Xaa locations
  Clone ID: MRT4577_33701C.1.pep
ARRACSSRPPCGTWPPASPTAPSASPAPARRPRSRSPPPPPPPPRRRRPRSPSPSPTAPPRRPRRRRRSCCASPGRTPGTGPRRFPSPGPPRRPPPSXPPPPQXPTASPPPPXTPPHPPARSLLGPXPPPGTARPRPRPRSQPPGSTSSPSPAPRWCWPWATWRRSSSRRSSRARSPGRGPSSPCPAPTGS

SEQ ID NO: 296742 - protein, 78 aa, Zea mays
  unsure (1)..(78): unsure at all Xaa locations
  Clone ID: MRT4577_33702C.1.pep
SIAKEGVCMKWVTVHTGMCCECWSGVAGALGILDXVXGPKFLENVYLPTGDWSARPRQILEVDGKKAGVQVFERTSGI

SEQ ID NO: 296743 - protein, 202 aa, Zea mays
  Clone ID: MRT4577_33703C.1.pep
RSTASSSRRAPPRRGAPPPALLSAYAALGRPRHARDLFDEMPDPGLVSRTAMARAHAASGQAAQALAVFGDMIADGVLPDNVALAVALAACHTTASLPAAGMAAARRPGKMVHALIVTSGIVPDVFVSTELIRVYGEYGELSLSRRLFDAMPVRSTVSWNAMVHQYIRHSNVGDAYELFLAMPRRDVVSWNTMIAGYSLVGR

SEQ ID NO: 296744 - protein, 67 aa, Zea mays
  Clone ID: MRT4577_33704C.1.pep
GTPFYFYLFSPGLSHAFPRGRGAMVGLELPRRQLLLKGLISGPILTSTELSYLSILSRHAPLLSPGK

SEQ ID NO: 296745 - protein, 108 aa, Zea mays
  Clone ID: MRT4577_33705C.1.pep
TPAPTHARPCPAPSSSPPVLPSSPPPLPPRDPPHPTPYRAVPETQRPDPFIQLVAIVITSTCITWPDGWKGGGDHFTSLRRDGVANSTRVLREKGNVEGRCRMSTNYC

SEQ ID NO: 296746 - protein, 574 aa, Zea mays
  unsure (1)..(574): unsure at all Xaa locations
  Clone ID: MRT4577_33706C.1.pep
FDATGIRKIXKKFDKRFGYKFTDYYVSTRANHPYSQLQQIFKQVGVVAVVGALGELVPYLQDHQGSLANIYDYPSLILKDPVIEQINHSVQKLTHSTSFLQFLGQHALIVPGDMQSGSDLGDDKDYHFLSLLLNLVNTFLYMVNTYIIVPTADDYSVSLGAAATVCGVIIGSMAVAQIFSSVYFSAWSNRSYFRPLVFSCIMLFLGNLLYALAYDLNSLTVLIAGRLLCGLGSARAVNRRYISDCVPLKTRLQASAGFVSASALGMACGPALAGLLQTKFKIYGLTFNQNTLPGWVMCLAWIAYLFWLWISFKEPGHIATENSVSTQSSDSGRRVSGNLEGGLGEPLLIDAKAGQDEDDEDNDDPEESHTPATSLAAAYRLLTPSVKVQLLIYFMLKFAMEILLSESSVVTTFYFKWTTSTVAIFLAVLGLTVLPVNVIVGSYVTNLFQDRQILVASEIMVLIGIVMSFCFTPHYSVPQYVTSALITFVFAEVLEGVNLSLLSRVMSSRLSRGTYNGGLLSTEAGTLARVAADMTITAAGYLGQGRLLNATLLPSLVICLASIVATFCTYNSLY

SEQ ID NO: 296747 - protein, 68 aa, Zea mays
  unsure (1)..(68): unsure at all Xaa locations
  Clone ID: MRT4577_33707C.1.pep
SRDSSVPVAGGVAIEXNKLLCEPVLESIIGEHGVSPAAKLSLAARVSELLTKGTAAATLRAEPVSVTA

SEQ ID NO: 296748 - protein, 54 aa, Zea mays
  Clone ID: MRT4577_33708C.1.pep
LFGMFPTRETDHANYSGTPERTVGRVKQVEAAAHGARTGAGGSIHGVARKLFAG

SEQ ID NO: 296749 - protein, 52 aa, Zea mays
  Clone ID: MRT4577_33709C.1.pep
LKFMDYAAQPFLVIESFEIVPLEVPPFSESLFLSPPEVVVSQAWPYFGITHH

SEQ ID NO: 296750 - protein, 525 aa, Zea mays
  Clone ID: MRT4577_3370C.1.pep
MSGGLRNESASKLEKVEVASTSSFGADVDPRAIDLAMRIAERMFLKMKEDEAKNIIEEVENDRWRPNDESTSSQGSSFKSTSHMCFVANESDSESESEDEEEHESDSEDEDDLQKFFAQLSKKNRMSLLKLMKRAEEQKEMLHKQEDILIGKIKDLEKLTKEHEKLKCSHDDLVQRYEDISIEQIKAINHSSYIAQLENKNAMLKNTVEKLNIENLALQEKHDMLVCSHNKFMDSHIMLEMAHEVVLTNLKSYQPHMCTCVEIETILPCANNCCYQASQSSIELEISGISDISITQENKELKEEVGRLRRSLTLLKGKCHAQPSHDNRDNMVKKLEKGTTVACTIPLQNNAKFPKKGMSKHQEKKAKAHDKCLNHASTCSTQGNKQATLPNKRRCTRKCYQCHEKGHEIKSCPYIKDSGLTLERKRLTNHVANKKQGKKESCKIKNQICYTCRRKGHLCKDCPMSKYPKPTMSIHSYSLRRPKNDTCARKPHRKNEALENELKRFYLALERIQLYGRLQAYMFIL

SEQ ID NO: 296751 - protein, 424 aa, Zea mays
  Clone ID: MRT4577_33710C.1.pep
GPSGQVKAAISEFTDFALIWWREYKQKLPINSVITWTQLKTAMRHRFVPSYYARDLLNKMQRFQQGSLYVEEYYQELQKGMLRCGLVESDDAAMARFRGGLNREIQDILDYKDYFDITTLFEYACKAEREVQGRRSKTYTNSFAGRGPTHSSTPSSPAPSTPSTTSRTGTTKPVAPPAKGAASSTGCTRDIQCHRCRGFGHMIWDCPNKRTLLIRDNGEYSSASDSEETSHAMIATNHAENEEVHVDPIDADRYESLVVQRVLSTQVAQAEKNQRHTLFHTKGVVHERSIRIIIDSGSCNNLASTALVEKLSLPTRTHPHPYHIQWLNDGGKIKLICPVTHLSMPDVYPTDLPPGLPPLRGIEHQIDLISGASLPNRAPYRTNPDETKEIQRQVQTLLDKGYIRESLSPCSVPVLLVPKKDGSW

SEQ ID NO: 296752 - protein, 40 aa, Zea mays
  Clone ID: MRT4577_33711C.1.pep
LSTKIQYVSITLADGQFSDQFKRMMIIMRRLRSRCSSKTA

SEQ ID NO: 296753 - protein, 46 aa, Zea mays
  Clone ID: MRT4577_33712C.1.pep
LNYLTLHFQICIISVIRCQLYRNMFFYTINNARIELKSCIYPNPRH

SEQ ID NO: 296754 - protein, 185 aa, Zea mays
  unsure (1)..(185): unsure at all Xaa locations
  Clone ID: MRT4577_33713C.1.pep
PSVRDDSFLNKEDHGVEPRXEHYAAFIDALGRNHQLEEATEFIKDLPSRIGPGTAGSWGALLGACRLHGNIELAEEVAEFLFRLEPGNSGRYVMMSNIYAAAGQWDDARRVRGLMKEKGLKKDQAYSWIEVRSAKHVFVADDISHCEADKIYEMLGKLLDHMSVAEDPTEHQLNFCLDLSGTAHV

SEQ ID NO: 296755 - protein, 72 aa, Zea mays
  Clone ID: MRT4577_33714C.1.pep
SSRAAARLERPVVPTHVARRRCKHSCRQHRRHQQQGRQEGWHYVCHCLRRDVAMRVIERERERMRDECANAG

SEQ ID NO: 296756 - protein, 88 aa, Zea mays
  unsure (1)..(88): unsure at all Xaa locations
  Clone ID: MRT4577_33715C.1.pep
DEVCFXSRAIXRYIASKYASXXXDLLPXTXXAAXLEVWLXVESHHFXPXXVXXGVPAAREAAPGWRPXDXAVVDKXXXQLANVLDVYE

SEQ ID NO: 296757 - protein, 87 aa, Zea mays
  unsure (1)..(87): unsure at all Xaa locations
  Clone ID: MRT4577_33716C.1.pep
GGKKGGSGGGKRGGKKGGGEEGGRRRKGXNRGXIGKRNGGGGGKGGXEKRGGGGVDGEKXGGGGRTSSETXSAGHGGNGSVGGVGTM

SEQ ID NO: 296758 - protein, 146 aa, Zea mays
  Clone ID: MRT4577_33717C.1.pep
CYHYLLLQGKLDPVVGRQDQIERVTQILGRRTKNNPCLIGEPGVGKTAIAEGLAQRIANWDVPETIEGKKSVGSMDEDDDSPASGSGRHKKKLRLIMGLHDGSAKVQTGTSLNTLGSLGYEIDHGWRQRIAVCHSKLGDQPKRSHG

SEQ ID NO: 296759 - protein, 146 aa, Zea mays
  Clone ID: MRT4577_33718C.1.pep
CYHYLLLQGKLDPVVGRQDQIERVTQILGRRTKNNPCLIGEPGVGKTAIAEGLAQRIANWDVPETIEGKKSVGSMDEDDDSPASGSGRHKKKLRLIMGLHDGSAKVQTGISLNTLGSLGYEIDHVWRRRIAVCHSKLGDQPKRSHG

SEQ ID NO: 296760 - protein, 71 aa, Zea mays
  Clone ID: MRT4577_33719C.1.pep
AGACPSQGSAAPTLHRCPFSLYSLPPDPSLIECLCTCDIILLSSLHISVRRQAQSMLHVHDLTRRLVLLRR

SEQ ID NO: 296761 - protein, 94 aa, Zea mays
  unsure (1)..(94): unsure at all Xaa locations
  Clone ID: MRT4577_3371C.1.pep
FYPTAVIQFSKGPFGKNILFPLLFFSAGPGTFFYFPPPQQYTCFKEILFPPFKKWMLNPQLHQGACPFQLAGVXWTNYSPHRRFCLRFRPGGLE

SEQ ID NO: 296762 - protein, 180 aa, Zea mays
  unsure (1)..(180): unsure at all Xaa locations
  Clone ID: MRT4577_33720C.1.pep
VISIHSSSQNDDKXKASXRPQHSSQSSGQQQSSFRPPAPRGRGGRGFGGRYGDXPRKIYCLFYGEDKGHTTRTCQITIQKQKEITEAEARQNQPKQVLHTASCYSPYIPEYVGNQPATSVASASHSQAFWXAPLPPSLPPAHSQSQQPEGRQHPQQQRDFREDSKARTINNTVPESKHIY

SEQ ID NO: 296763 - protein, 146 aa, Zea mays
  Clone ID: MRT4577_33721C.1.pep
LPPSFSPSISQQRPVPVQALLWSAWIYPTQSPYSLRATTSSLHTWSSTPISMASPAFSRRARLQVPFLAEFPAAYLTSAGAPAPPFMAMPCCSSVLAAGDDAWSSNLTPHRLSIPIFSSSTHRSCLVDLPRTTAYPWLSMYTVLCA

SEQ ID NO: 296764 - protein, 80 aa, Zea mays
  unsure (1)..(80): unsure at all Xaa locations
  Clone ID: MRT4577_33722C.1.pep
SPPTLAPVEVTSSDGYVLESGNISPYRSTXCTCDGTMMADRSANTLQQVYGIKNDAKMKKTMRRPLASGRISPVHAAMWA

SEQ ID NO: 296765 - protein, 214 aa, Zea mays
  unsure (1)..(214): unsure at all Xaa locations
  Clone ID: MRT4577_33723C.1.pep
AGGPLPLSPADGSGAARAFIYPPPRAAESPPGSHPPXSAPRRAVPREQASQSSKRRKXRKASHPPRPPPXPRRLDXQHHPCPRRRRRRRRRWEAPSRSPRPRPSRSPALSSSSRSAARTSPMSPSRSRSRSRRRARRSTPCAPVSCRQRGGRAGRRRRRRRGDAGARSXRAVRARRXSTMRAPRARPGPPRPPPPLRRRRRRPPAGTRRGRRSV

SEQ ID NO: 296766 - protein, 77 aa, Zea mays
  Clone ID: MRT4577_33724C.1.pep
LLRPMFMASSPAGERTSMLLVMNLRVRSVRCRCRFRLRRVGLSSGDVLCAIRPVVACGELSSASLRVGKRSRPASRY

SEQ ID NO: 296767 - protein, 91 aa, Zea mays
  Clone ID: MRT4577_33725C.1.pep
HSSRSTHHTRESACTLASYLMFYCDQGLVPWRKKWPLEAALTFSCEPSPTHAAAGAADPALSQLRPTLSTRAEAILKCINGSSVTYLSLCY

SEQ ID NO: 296768 - protein, 52 aa, Zea mays
  unsure (1)..(52): unsure at all Xaa locations
  Clone ID: MRT4577_33726C.1.pep
AIYQHTIHHIINKQYGTNRLVPQIHKYQCLLFPPVRQXTRPATWGGIPLFFL

SEQ ID NO: 296769 - protein, 231 aa, Zea mays
  Clone ID: MRT4577_33727C.1.pep
LEAGGIHYSSPSLPPTEDSFPRPAPSPSSGERSREAAHKFLARENLSSPLSLYISAYLPAQISCRIGLVFRLGKGDGFSVSRDLHDGEHGSSGLHRRGIRGSRHADAQVRAVAKAASVAALEQFKISADRYMKERSSIAVIGLSVHTAPVEMREKLAVAEELWPRAIQELTSLNHIEEAAVLSTCNRMEIYVVALSWNRGIREVVDWMSKKSGIPASELREHLFMLRDSDA

SEQ ID NO: 296770 - protein, 71 aa, Zea mays
  Clone ID: MRT4577_33728C.1.pep
QCLMTCIIKNSDTQRTGVRRRRSGPKPVPDDLVHHPDEAFGRLVFRQLQELCDPRVGELVVINLPSAVVRI

SEQ ID NO: 296771 - protein, 117 aa, Zea mays
  Clone ID: MRT4577_33729C.1.pep
MMASTAPAASTAVAFGAAATPRGPASASAALCARVPAAAGGMRRSGVAVRCDAGADAQVRAVAKAASVAALEQFKISADRYMKERSSIAVIGLSVHTAPVEMREKLAVAEELWPRAI

SEQ ID NO: 296772 - protein, 88 aa, Zea mays
  Clone ID: MRT4577_3372C.1.pep
GGGERRGRWIARPRGHAGGGSCSRCVWGVLRGPPPGRETGPGSSRGAGESSATSRLTWRRTSPAYGLAMDDVRHRGGCGSWRTRGGTP

SEQ ID NO: 296773 - protein, 535 aa, Zea mays
  unsure (1)..(535): unsure at all Xaa locations
  Clone ID: MRT4577_33730C.1.pep
MMASTASATAAAAVAFGAAAKPRXTGGGGAPXARVPAGGRRRSGVVVRCDAGVEAQAQAVAKAASIAALEQFKISADRYMKERSSVAVIGLSVHTAPVEMREKLAVAEELWPRAIQELTSLNHIEEAAVLSTCNRMEIYVVALSWNRGIREVVDWMSKKSGIPASELKEHLFMLRDSDATRHLFEVSAGLDSLVLGEGQILAQVKQVVRSGQNSGGLGKNIDRMFKDAITAGKRVRSETNISSGAVSVSSAAVELALMKLPKSEALSARMLLIGAGKMGKLVIKHLIAKGCKKVVVVNRSVERVDAIREEMKGIEIVYRPLSEMYEAAAEADVLFTSTASETPLFTKEHAEALPTISDAMGGARLFVDISVPRNVSACVSEIGSARVYNVDDLKEVVEANKEDRLRKAMEAQTIIAEELKRFEAWRDSLETVPTIKKLRSYADRIRASELEKCLQKIGDDALTKKTRRAIEELSTGIVNKLLHGPLQHLRCDGGNSRTLDETLENMHALNRMFGLDTEKAIVEQKIKAKVEKIQN

SEQ ID NO: 296774 - protein, 60 aa, Zea mays
  Clone ID: MRT4577_33731C.1.pep
FGLTTPGRLVTGEQPNMCAVSKPDHSHCGHTQIVKISSLKKLSYTLLKSMLLYIFMNKQK

SEQ ID NO: 296775 - protein, 44 aa, Zea mays
  Clone ID: MRT4577_33732C.1.pep
NHGPLALRHLGLVPQLQHGASVISHIPRCEALSVRMQPPMCSKA

SEQ ID NO: 296776 - protein, 129 aa, Zea mays
  unsure (1)..(129): unsure at all Xaa locations
  Clone ID: MRT4577_33733C.1.pep
EELAGTLLINLGHTLVIKRMNGGTFTACENLYLWNKMMPSGAMHLYGGAQYHGTMAELRLVVXSTICPPISRDXTANAXGVQDIHDGTNYSTTACVIGVSNTRDTLETFLDQRVLKLSYILEETDPNLC

SEQ ID NO: 296777 - protein, 64 aa, Zea mays
  Clone ID: MRT4577_33734C.1.pep
EKKLGFIKREVNFVFLKSFFFFFFIIYYMFFYFICFIYIFFYFFFFFFFFFFFFKFCMCVRTSG

SEQ ID NO: 296778 - protein, 102 aa, Zea mays
  unsure (1)..(102): unsure at all Xaa locations
  Clone ID: MRT4577_33735C.1.pep
NPXDRTRPFRFLISSLSVFLPPLCFTPIRCLFHYGSQSISPMQPPYIFLHHIGHRSAFVIPAILADGSCGEGEEHIDVALGAEVVGHGQGRGEHSLLGVSSR

SEQ ID NO: 296779 - protein, 52 aa, Zea mays
  Clone ID: MRT4577_33736C.1.pep
SHPIEVLLHKSDVHFSLLPFLSTTPTYTSPFPKRSTNLPLNLLHTTTAFYLL

SEQ ID NO: 296780 - protein, 65 aa, Zea mays
  Clone ID: MRT4577_33737C.1.pep
FRPLWPPGPLFLAWLLLLCLVCLYANKDPTFRACEREERIVPCFASRPLLLAAAPFFLAKDYGPP

SEQ ID NO: 296781 - protein, 54 aa, Zea mays
  Clone ID: MRT4577_33738C.1.pep
VKASMREGFPATNHICYGRGSRILPFTITFQDSVSVDILQALITCLNGLLMDLS

SEQ ID NO: 296782 - protein, 313 aa, Zea mays
  Clone ID: MRT4577_33739C.1.pep
VEYVVNLKFGEEPNYAKCISLFDGIVGPNPDIRPINTDGAQKLIYQVGQNRGRLIVDENDDEQPKKKIRMGMPATQWISVYNARRPMKQRYHYNVADNRLLQHIQKGNEDGLFISSVASSSNLWALIMDAGTGFTSQVYELSSYFLHKEWIMEQWERNFYITALAGANNGSSLVIMSRGTQYAQQSYKVSDTFPFKWINKKWKEGFYVTAMATAGSRWAVVMSRNAGFTSQVVELDFLYPSEGIHMRWDNGYRITATAATWDQAAFILSIPRRKPTDETQETLRTSAFPSQHVKDKWSNNLYLASICYGRSVS

SEQ ID NO: 296783 - protein, 401 aa, Zea mays
  Clone ID: MRT4577_3373C.1.pep
MTVTPRITVSDGRLTVRGRTVLTGVPDNVSAAHAAGAGLVDGAFVGAHAGEAKSHHVFTFGTLRDCRFLCLFRFKLWWMTQRMGVSGRDVPLETQFMLVEVPASDGDGDDAPAYVVMLPLLEGQFRAALQGNDRDELQICIESGDKAVQTDQAAHMVYLHAGDNPFDTVTAAVKAVEKHLQTFHHRDKKKLPSFLDWFGWCTWDAFYTDVTADGVKNGLQSLSKGGAPPRFLIIDDGWQQIASENKPDPNVAVQEGAQFASRLTGIKENTKFQTKPDGDGDGEQAAGGLKRLVAETKDAHGVKQVYVWHAMAGYWGGVTPTAGTAMERYEPALAYPVQSPGVTGNQPDIVMDSLSVLGLGLVHPRRVRDFYGELHAYLASCGVDGVKVDVQNIIETLGAGH

SEQ ID NO: 296784 - protein, 124 aa, Zea mays
  Clone ID: MRT4577_33740C.1.pep
FGSKGVRSNGWCQNRGNMAKLWPLFGVVLTHPFVSSPKSGGGLKIKGGGFISQAEKMARPAPNFFLVGRKKKGGPLVGGAIWEEGIFPRQGGGEKYLTKFFPLHYIILIKGGNVCPHGGQKNFY

SEQ ID NO: 296785 - protein, 79 aa, Zea mays
  unsure (1)..(79): unsure at all Xaa locations
  Clone ID: MRT4577_33741C.1.pep
WAVVMSRNAGFXSQVVELDFLYPSEGIHMRWDNGYRITATAATWDQAAFILSIPGRKPSDETQETLRTSAFPSQHVKVA

SEQ ID NO: 296786 - protein, 80 aa, Zea mays
  Clone ID: MRT4577_33742C.1.pep
MPTEHLKCVNLKIFKLADWLDKVSILCFEVVEKDGSNHLDDNTTEEELEAAREIELERLPTPETLKNLEDFCEEWGMQYD

SEQ ID NO: 296787 - protein, 69 aa, Zea mays
  unsure (1)..(69): unsure at all Xaa locations
  Clone ID: MRT4577_33743C.1.pep
QIWDTAGQERFRTITGSYYRGAHGIIGVYDVADQXSSNNVHQSVNDFDRYARANVNKLLVGNKCDPTDN

SEQ ID NO: 296788 - protein, 69 aa, Zea mays
  Clone ID: MRT4577_33744C.1.pep
RSLVLEKSYLMIGGRRLFLLDYRGALALWGGLGSGPFWITALYLFLIVHIPVWLDPSYCLLARKFSCGF

SEQ ID NO: 296789 - protein, 113 aa, Zea mays
  unsure (1)..(113): unsure at all Xaa locations
  Clone ID: MRT4577_33745C.1.pep
VSSTTQTVCLQSEEXEPDNPRPRTREQNDHTRGRQADRTRSHRADKGRTREEXNSXXAGXGRRQEHXTAKKGTPGSHKGXGXPGDEQGNXHXRERXGDEXGXXNXTATKKGRQ

SEQ ID NO: 296790 - protein, 220 aa, Zea mays
  Clone ID: MRT4577_33746C.1.pep
PRVRASIVSVRANPSFVSCQAGYSSWYHRRAANPNLIVGATVGGPDEYDNFADERDNYEQTEATTYNNAPLMGVLARLAAGHGGGGGKFGHHSLAADAVSSSTSINDTNRTSLPSPSPDSEHPSAWPIEIEQNATASWTKQGKTYRRYAVTVTNRSPKTVHELHIGISKLYGQVWGVDKARYGYVLPSWIPSLLAGKSAVFVYVQAAPPADVWVTGYKLI

SEQ ID NO: 296791 - protein, 48 aa, Zea mays
  Clone ID: MRT4577_33747C.1.pep
ATSHLTPFSVGVNACENDRDLAYFNSGGHPFQAECPMYLFYLISALSC

SEQ ID NO: 296792 - protein, 106 aa, Zea mays
  Clone ID: MRT4577_33748C.1.pep
NFILPHPRKNGVLAEQAKPIIDLLNVVLGVDPELKSRSIQKGEAFSVVCGAEEPKAYVRVLGLGPAPQHIGTVGLRFYSATGLQMEILVRAKVQSEKAALDQRVLI

SEQ ID NO: 296793 - protein, 81 aa, Zea mays
  Clone ID: MRT4577_33749C.1.pep
KKKKKKKKKNHKTKKKLKTKFCKNTFHWKDDKNMHLVPPPGALLGVDFQFVAPRGAPWGLHLPGPFPPLWSCITFHCPPFS

SEQ ID NO: 296794 - protein, 511 aa, Zea mays
  unsure (1)..(511): unsure at all Xaa locations
  Clone ID: MRT4577_3374C.1.pep
MSGGLRNESASKLEKVEVASTSSFGADVDPRAIDLAMRIAKRMFLKMKEDEAKNKIEEEENDRWRPNDESTSSQGSSFKSTSHMCFVANGSDSESESEDEEEHESDSEDEDDLQQFFAQLSKRNRMSLLKLMKRAEEQKEMLHKQEDILIEKFKDLEKLTKEHEKLKCSHDHLVQRYEKVSIEQSSTSNALSCVAQLEKENTMLKNTIGKLNIENLALQEKHDMLVCSHNKCMDSHIMLEMAHEVVLTNLKSYQPHLCTCTQIETILSCANKCCSQESQSSIELELSGTSDVSFAQENNELKEEVGXKKELDSFEGKXCHAQPSHDNRDNMVKKLEKGTTAACTNPLQKNAKLPKKGMSKHQEKKAKAHDKCLNHASTCSTQGNKQATLPNKRRCARKCYQCHEKGHEIKSCPYTKDSGLTLERKRLTNHXQTRRKARRXCKIKNQICYTCRRKGHLCKDCPMSKYPKPTMSIHSYSLRRPKNDICARKPHRKNEALENELKRFYLALERI

SEQ ID NO: 296795 - protein, 175 aa, Zea mays
  unsure (1)..(175): unsure at all Xaa locations
  Clone ID: MRT4577_33750C.1.pep
RARAQPRRRTTDSASPDPRARTQPRPRTTDSASPNPRARTQPRPRMTDSTSPDPRARTQPRPRKMDSASPDPRARTQPRPRTTVSASPDPRARTQLRPRTTNPASPDHRAQTQPRPRMTXLRLARPQGSDSASTSEDRLRLARPPGPDSALTSEEPPPRPTSGCRSRDPWGRNAD

SEQ ID NO: 296796 - protein, 711 aa, Zea mays
  Clone ID: MRT4577_33751C.1.pep
MVLGGGPLGAIIGRYPSSSAAAGDDEQGDPGPGGGVIRHDRKCRDWPFLVLFAAFWVAMIVNSSFGFNQGNPLRLTYGLDYKGNICGSRHADPDLYQLDVRYWVNPNQVYQSGLKTSHIELPDAKTICLMECPLPAEDGLNFVCDYPEGDIRLSVDDWIDRDYDYFEYLTPDMRNSSLQLQGPCYPVIFPSVNVYWSCQFIARASNASLKHWKDMGGVTIDENMLIDRTIHDAINSKSAVMKRYVADIGKSWPVLILCGGLLPLFLSMIWLLMIRFFVAGMSWITVVVFNALVVSVTMFFYIKAGWIGHDPLTVVIGESDPYVSIGGRDINHLHAASVLMTVIMILAFLTSIAIARRIMKATSVLKVAAKVVGEVQALIIFPVVPYLILAIFYTFWFSAALHLFSAGQVIQNDCNTDCCSYDLKLGKVNCDRCCGYTIHYTPHIGIAILFHLFGCYWATQFFIGCSSTIIAGSVASYYWARGEISHDIPFHTVVSSLKRLLRYSLGSVALGSLIVSIVEWVRFILESLRRRLKFVDSARGSRFGKTVSSSSQCCLGCIDWTLKSVNRNAYVMIAITGKGFCKASVLATGLIMNNVLRVGKVNVIGDVILLLGKLCVSLLCALFAFLMLDEHKYRSGHNKISSPLVPVLLSWALGYIVAKLFFAVVEVSIDTMVLSFCQDSEEHQGNARYAPPLLIETLDEESELRRLTQGP

SEQ ID NO: 296797 - protein, 116 aa, Zea mays
  Clone ID: MRT4577_33752C.1.pep
MHSGISDNLTRIWMKKYLFEQNPIMLYQQTYARHKSCFHCVSSWRTVNHEDWSAHWLFSDPLLDSAQTSISSEQKGMHSGISDNLTRIWMKCIENCHSKTLRQLLYDHGKLTSVKE

SEQ ID NO: 296798 - protein, 74 aa, Zea mays
  unsure (1)..(74): unsure at all Xaa locations
  Clone ID: MRT4577_33753C.1.pep
MVLGGGPLGAIIGRYXTPPSPPVTINKGTXPGGGAIRHDRKCRDWPFLVHFAFFWGAKNWNLRMRFNQGNSLRL

SEQ ID NO: 296799 - protein, 55 aa, Zea mays
  Clone ID: MRT4577_33754C.1.pep
AHASGAVDSHVPSRPSTSTGTARNLFRNPPSFFHSYHNSLIDTCSDFLISLIPTC

SEQ ID NO: 296800 - protein, 130 aa, Zea mays
  Clone ID: MRT4577_33755C.1.pep
IRHEGEVQALIIFPVVPYLILAIFYTFWFSAALHLFSAGQVIQNDCNTDCCSYDLKLGKVNCDRCCGYTIHYTPHIGIAILFHLFGCYWATQFFIGCSSTIIAGSVASYYWARGEISVNFSLRNLTLVSG

SEQ ID NO: 296801 - protein, 72 aa, Zea mays
  Clone ID: MRT4577_33756C.1.pep
PRGRFQIRGTELNGCGVGCMSFLYESSLGLMDGAIGASMSFLLFIVSAKYEEWNRIGLIAGIETLFYSIPRI

SEQ ID NO: 296802 - protein, 69 aa, Zea mays
  Clone ID: MRT4577_33757C.1.pep
IQSPLTANRTRGLSNKLPPPRRDRRLNSQPRPRHSERPEGQMRQTGHWLIPEACTRRLKRTSGKAKPIL

SEQ ID NO: 296803 - protein, 59 aa, Zea mays
  Clone ID: MRT4577_33758C.1.pep
CLRLRGGIIEPSLMALARIYNQDKKICRKCYARLHPRAVNCRKKKCGHSNQLRPKKKIK

SEQ ID NO: 296804 - protein, 92 aa, Zea mays
  Clone ID: MRT4577_33759C.1.pep
MPADLSGTWNLLSSDNFEGYMLALGIDFATRKIAKLLKPQIVSEQYGDSFSINTCSSLRNYLLKFNVGEEFVEDNKGLDNRICMSTVTWEID

SEQ ID NO: 296805 - protein, 98 aa, Zea mays
  Clone ID: MRT4577_3375C.1.pep
SEEGKRGKNRKYLGAIVHVFTGLAGNGRLKLGAWGSRTRSSDGPLLYWAATGAAAQAAPVGDPPLPAPGVRRAGAPKPRAPGAAAAAVLGALTLTHTH

SEQ ID NO: 296806 - protein, 92 aa, Zea mays
  unsure (1)..(92): unsure at all Xaa locations
  Clone ID: MRT4577_33760C.1.pep
SPFSSGHLDHHTSLAPTSSRSSIPTASSPPSNASLQNHSPSRTTSSPHAASXSTGPQGVEACLPSEGSXSKPTRSSPSSPTSACPAPRSPTS

SEQ ID NO: 296807 - protein, 57 aa, Zea mays
  Clone ID: MRT4577_33761C.1.pep
SSVPSPFSFRVFFVVFWWLFIRSPVSSCAVVVGGTLKTTAFSEDALQHSGLSHEEES

SEQ ID NO: 296808 - protein, 150 aa, Zea mays
  Clone ID: MRT4577_33762C.1.pep
SLCRVFRDPGLAQGPRRQDQVFSTGFKISPVFSLVVVIFIVGLYGPARHGAFGQPVPWNPPVPLLSPGPPSGGFPVSSPPQSSSIFASRHGYHKLWIPLFVHLDCVRPGRRMPFRCVRLVTCYGFDAKLFACSVTEFSQAGVFVPWLFLL

SEQ ID NO: 296809 - protein, 74 aa, Zea mays
  unsure (1)..(74): unsure at all Xaa locations
  Clone ID: MRT4577_33763C.1.pep
PPPFFLLILCIFSFDCPGRFRRVRIRWXRTCPCFLPIIKFHLGVHTLVSRRTVPPRGRRAYEGNRGGGGDDSMP

SEQ ID NO: 296810 - protein, 74 aa, Zea mays
  Clone ID: MRT4577_33764C.1.pep
LFSEKIQGGKNYFLTPKNTPHTNLKPNFSNLQNNTFLDKPPKNKLKPLKKTKTHIIRKYTLHLKTNFLLPNKKP

SEQ ID NO: 296811 - protein, 70 aa, Zea mays
  Clone ID: MRT4577_33765C.1.pep
MVANVLLWFNLTAVFVKVKVYKLGPASVFHVYQRILWVPTKKLKKTPLNKGRPPAGIKLVKQVIKYGPRA

SEQ ID NO: 296812 - protein, 172 aa, Zea mays
  Clone ID: MRT4577_33766C.1.pep
RTRGLYDHLHPKASAAPSPVASSWKLRIKILLDASRGIEYLHSYAVPPIIHRDIKSSNILLDGGWTARVSDFGLSLTGSPEPSSEESRSQQLAVTTKAAGTVGYMDPEYYGLHHLTVKSDVYGFGVVMLESLTGRRAIFKEAEGGSPVSVVDYAVPSIMGGELAKVLDPRAP

SEQ ID NO: 296813 - protein, 57 aa, Zea mays
  Clone ID: MRT4577_33767C.1.pep
ASISDIHYLIPWQWLIHWSLPLYSSNNFSDRASSSLMIMSHVCDSKPLWRCHVLDYI

SEQ ID NO: 296814 - protein, 91 aa, Zea mays
  Clone ID: MRT4577_33768C.1.pep
GNERKKVGSLLVGVCGGDGGREEKEGGEELPAPDVEPGDDRPPPAPARLYSHVSACACAAARPARSVWCFQLRVGSRPASSPPWRRERRSS

SEQ ID NO: 296815 - protein, 72 aa, Zea mays
  Clone ID: MRT4577_33769C.1.pep
SLFYHFLLPTRVSFSYFIALPTQLTNSSSSTCFLYQHIFQISSNYLNKFTSHLHQTYPYFSIIKVIFFYVTS

SEQ ID NO: 296816 - protein, 402 aa, Zea mays; identical to SEQ ID NO: 296683
  Clone ID: MRT4577_3376C.1.pep

SEQ ID NO: 296817 - protein, 28 aa, Zea mays
  Clone ID: MRT4577_33770C.1.pep
QCTISRNILIAAQIYVGTSPDDIVLLLV

SEQ ID NO: 296818 - protein, 184 aa, Zea mays
  Clone ID: MRT4577_33771C.1.pep
QELFVFHVHSSTDDHAGVEARLHWFLQASAAACLAAALIGAARLPADLQLAAGLVRSASLAFQGLWCVVIGVAWVPGMLPAGCYLDGSGVHLRCRGEDSLRHAIAVVNLQFGWCMVLVVGIYVYVCKRYPAGAWSHGEEYGRLPEAEAADEDDDSHHHDMKTPNCKQLAAHDDVHEFTSLEIDV

SEQ ID NO: 296819 - protein, 72 aa, Zea mays
  Clone ID: MRT4577_33772C.1.pep
DTETLRLRFASTSIGTLFTSYKNFILFYRSDNKSVGLKYMLAQSTILSKKYKGVLRLIRRPSTGRVGGRSVD

SEQ ID NO: 296820 - protein, 69 aa, Zea mays
  Clone ID: MRT4577_33773C.1.pep
APVGIIGSPIVLSFWDSEIIACWCQNIESVSLFRKATCNCLLKATSNSTWKLKMTLFFQPANNATTGRI

SEQ ID NO: 296821 - protein, 95 aa, Zea mays
  Clone ID: MRT4577_33774C.1.pep
RPSSFMKKCASSVWWRFLAWIFKLSGFCFLYIPYSGAALVHVDIVLHIFQLTHVKMLPRYLTSLPYSCCNSSLWLLKKGDGTPPMIHVIVDNILV

SEQ ID NO: 296822 - protein, 239 aa, Zea mays
  Clone ID: MRT4577_33775C.1.pep
GTDKTKPTKRKLGWGVDLNRSTNIISTNCLLSLTSTGLWSGGAANTHLILTAIPPLSTNLLLFSLFVASPLATQPPTRHPPPPPAPPAPEKGPGIRGHLLLLGDGHARILPEILAHVRQFIVFFLSKRKDSIPFRGLDLPSSKGKACPVIFLYLGEPCDGLVDPRIMSGGNSSRRQQRRVVAGGGEALLRQEDPALGRRRPATEQSRELFMIGAPLFEDTQNTHKTKAKEFFCALLAHW

SEQ ID NO: 296823 - protein, 352 aa, Zea mays
  unsure (1)..(352): unsure at all Xaa locations
  Clone ID: MRT4577_33777C.1.pep
MMEGGSRADGRNPNQLRPFTCTGNPLHRAHGSARWAQGDTVVLAAVYGPKPGTRKGENPEKASIEVVWKPKTGQIGTLLFPSSSLRPTAARVTGSLKWRVVFAGRQEREYEMTLKRTLQSICLLTVHPNTTSVVLQVVGDDGSXFPLDVAVIXLAAFMFICLLSCINIKVHFTTDFSLIFDNLLXLGSTYRIMYEHERIGTXRFGLRSESLSDLWLFLNVVRAKHMRSCGXCAINASCAALAFAGIPMKHLAVAISCGVMDNGVVILDTSRAEEQQARSFAHLVFPNSRKSVESKDTTQRDEESERGLITCITHGAMSEDDYFNCIERGVMASSRISDFMRKTLQKEASRDA

SEQ ID NO: 296824 - protein, 148 aa, Zea mays
  Clone ID: MRT4577_33778C.1.pep
MPSRYPGAVTQDWEPVVLHKSKQKSQDLRDPKAVNAALRNGVAVQTVKKFDAGSNKKGKSTAVPVINTKKLEEETEPAAMDRVKAEVRLMIQKARLEKKMSQADLAKQINERTQVVQEYENGKAVPNQAVLAKMEKVLGVKLRGKIGK

SEQ ID NO: 296825 - protein, 163 aa, Zea mays
  Clone ID: MRT4577_33779C.1.pep
MAGKAGGLKGVALIGGSANSTVAGVIHFFEDPSTRYTEVRGKVTGLTPGRHGFHIHVFGDTTNGCNSTGPHFNPHNKPHGAPFDDERHLGDLGNIVANEDGDAEVFIRDLQISLSGPHSILGRAVVVHADPDDLGRGGHELSKSTGNAGARIGCGIIGIQSSV

SEQ ID NO: 296826 - protein, 562 aa, Zea mays
  Clone ID: MRT4577_3377C.1.pep
MVLSMDAQFDVTQEWLDRVKIARKGLRGTKRSLWSVCASVCQSDWQTGCQLWYYIEFFVDSLLLELLAPRRLGVSYVDPRAIDLAMRIAERMFLKMKEDKAKNKIEEENDRWRPNDESTSSQGSSFKSTSHMCFIANGSDSESESEDEEEQESDSEDEDDLQQFFAQLSKKHRMSLLKLMKRAEEQKEMLHKQEDFLIRKIEDLEKLTKEHEKLKCSHDDLVQRYEDISIEQIKVVNHSSYIAQLENKNAMFKNTIERLNIENLALQEKHDMLVCSHNKFMDSHIMLEMAHEVVLTNFKSYQPHICTCTQVETILSCANKCCSQESQSSIELEISGISDISITQENKEFKEEVGRLRRSLTILKGKCHAQPSQDNRDNMMKKLEKGTTVACTKPLQKNIKLSKKDMSKTQGEKINAHIICSNNVPMCFNKERSKRSDRRCYGCKEKGHEIGSCPHMKNQNLARSRKMTIKKDESKGQMHCKDKHHICYNCREKGHLFKVCPKGKNPKLNLTIHSDMLRRPKFDSCARKVMTSPHSRTKAIWVPKSLLANLGGPIQKWVPKCN

SEQ ID NO: 296827 - protein, 210 aa, Zea mays
  Clone ID: MRT4577_33780C.1.pep
PRVRPRVRPRVRPRVRPADVKGVALIGGSANSTVAGVIHFFEDPSTRYTEVRGKVTGLTPGRHGFHIHVFGDTTNGCNSTGPHFNPHNKPHGAPFDDERHLGDLGNIVANEDGDAEVFIRDLQISLSGPHSILGRAVVVHADPDDLGRGGHELSKSTGNAGARIGCGNVKPFKFVVLQIIGKRLSFFLISSFKATITESSKPEVEMRRFL

SEQ ID NO: 296828 - protein, 47 aa, Zea mays
  Clone ID: MRT4577_33781C.1.pep
HSGGAHSFFNPKWGFVILADFPFGPFLYVLLKKNPRLSPKFPKKAPS

SEQ ID NO: 296829 - protein, 113 aa, Zea mays
  Clone ID: MRT4577_33782C.1.pep
CFFFFFFGGACGFVTVPSGGLLLLFPLCRGCVCQGRVLCSVVLSAFFWARGASLSLFPGVRGLLVLLLLHSLLVLMALFSLCRFPFLRACRCCSASLLRGWGFLGVFCAAAFL

SEQ ID NO: 296830 - protein, 43 aa, Zea mays
  Clone ID: MRT4577_33783C.1.pep
CVEVERAEIRVLDPGGDEDLAIVNLGWVLQSRATTRDLLRFSR

SEQ ID NO: 296831 - protein, 113 aa, Zea mays
  Clone ID: MRT4577_33784C.1.pep
GNNVGKNTKKTGRIYYTQVATTPEGEPVMMGTFLVASHPVIILFDSGASHTFISKTFVEQHHISCHEFKEGFKIHSPGGHIFTREVAYQVPVTMAGRNFPANMIVFLNKCKFM

SEQ ID NO: 296832 - protein, 157 aa, Zea mays
  unsure (1)..(157): unsure at all Xaa locations
  Clone ID: MRT4577_33785C.1.pep
IRLEVHRQVFCLALNPYNEWAAITDSTDKTVKLYDLTKRHTLLHTCVCHKEEDFXVGWTAKTEPILAXDIWAEALMVWDLNRIEHEQTPEDAQDRPAELWLIHESHTSKSSHVSXNHCEDWVTASVIEDNILHMWQMADHIYLDEAELPTDDELENL

SEQ ID NO: 296833 - protein, 93 aa, Zea mays
  unsure (1)..(93): unsure at all Xaa locations
  Clone ID: MRT4577_33786C.1.pep
SFLDPKGPGGSPGXEKPVALPPGGKGYQEELPKENLKKAASPPGNITLRVPKNPPEPGGVLGVFKRGHPSHPPLGAKGPKDVKIPGVWAPPPK

SEQ ID NO: 296834 - protein, 73 aa, Zea mays
  Clone ID: MRT4577_33787C.1.pep
TPQGTIFCCSSPLYRFWRSKQGGSSRGELVPRGPFSPKRPQFALKKPAQEKNLDDPGPNQGPQLKKGLGAPPR

SEQ ID NO: 296835 - protein, 50 aa, Zea mays
  Clone ID: MRT4577_33788C.1.pep
DREVLTNQVGVYPRESEAASSKGYRNNSEALWPEAKGRNERNQCVPIYPE

SEQ ID NO: 296836 - protein, 339 aa, Zea mays
  Clone ID: MRT4577_33789C.1.pep
MPNLECRMYEQRFPEVDAAVMIQVKHIADMGAYVSLLEYNNIEGMILFSELSRRRIRSISSLIKVGRQEPAIVLRVDRDKGYIDLSKRRVSEEEAHACEDRYNKSKLVHSIMRHVAETLEIDLEPLYQRIGWPLYRKYGHAFEAFKLIVADPDAILDALTYEEKEVGPDGQEVTKVVPAVTPEVKDSLVKNIRRRMTPQPLKIRADIEMKCFQFDGVLHIKAAMKKAEAAGNDNCPVKIKLVAPPLYVLTTQTLDKDQGISVLTTAVKACTAEIEKYKGKLVVKEPPRAVSEREDKLFLDQIDSLMEQNAEVDGDADSEEEEDTGMGDVDITNSGVAAY

SEQ ID NO: 296837 - protein, 651 aa, Zea mays
  unsure (1)..(651): unsure at all Xaa locations
  Clone ID: MRT4577_3378C.1.pep
MVIPAGDKEVQTDQAAHMVYXHAGDNPFDTVTAAVKAVEKHLQTFHHRDKKKLPSFLDWFGWCTWDAFYTDVTADGVKHGLQSLSKGGAPPRFLIIDDGWQQIASENKPDPNVAVQEGAQYVHCTHRISLINHGWLPARRSFQTLTKTGXASRFASRLTGIKENTKFQTKPDGDGDGEQAAGGLKRLVAETKDAHGVKQVYVWHAMAGYWGGVTPTAGTAMERYEPALAYPVQSPGVTGNQPDIVMDSLSVLGLGLVHPRRVRDFYGELHAYLASCGVDGVKVDVQNIIETLGAGHGGRVAITRAYHRALEASVARSFPDNGCISCMCHNSDMLYSARQTAVVRASDDFYPRDPASHTVHVASVAYNTVFLGEFMQPDWDMFHSLHPAAEYHGAARAIGGCPIYVSDKPGNHNFELLRKLVLPDGTVLRAQLPGRPTRDCLFSDPARDGASLLKIWNLNKCGGVVGVFNCQGAGWCRVTKRTRVHDASPGTLTGTVRADDVDAIARVAGDGGGWDGETVVYAHRTRELVRLPRGVALPVTLGPLQYEVFHVCPLRAVVPGFSFAPVGLLDMFNAGGAVEECDVISNVGGKAMALRVRGCGRFGAYCSREPARCLLDSAEVEFSYDADTGLVSVDLPVPEQELYRWTLEIMV

SEQ ID NO: 296838 - protein, 78 aa, Zea mays
  Clone ID: MRT4577_33790C.1.pep
RFYKLDHNSMYIGTMRIITAGDCETPAWHLVRGTCSCLAQTYINFILKLLGYLHVPYNTYLFMITIYETEPFLYTFFS

SEQ ID NO: 296839 - protein, 135 aa, Zea mays
  Clone ID: MRT4577_33791C.1.pep
KSTDLEAGRTPMPPPPPPGPPYQRRRRGASSQIGPLAVGYGPVTAVQRQLPLPAPRRTAGGSGAALPTRRRLAALRLPAADRKPPGARLVPPPTLGPYLAEQVRRQEHGGRSSAVRIPVLRRDGSAVGMTFWVES

SEQ ID NO: 296840 - protein, 46 aa, Zea mays
  Clone ID: MRT4577_33792C.1.pep
MERTTFNLQGNKWLQRLFDKRYLWALVYGRNTFSADMVSTQRNESL

SEQ ID NO: 296841 - protein, 121 aa, Zea mays
  Clone ID: MRT4577_33793C.1.pep
MNPRGHRSNRTSLFDGIEEGGIRATSYSSHEIDEQENDGAIDGLQDRVSILKRLSGDIHEEVETHNRMLDRMGNDMDTSRGFLSGTVDKFKMVFETKSSRRMGTLVASFVALFLLVYYLTR

SEQ ID NO: 296842 - protein, 107 aa, Zea mays
  Clone ID: MRT4577_33794C.1.pep
PGLHGSSCTKGLQTDFAGLSSNAPQSAAQEPTTQNPSALRSSQLALYLHQARPPCARRRHGEGKAQGKAHRPPQLLHTRGDRCWTRDRPRTFVKTCRRRRELDLHMA

SEQ ID NO: 296843 - protein, 298 aa, Zea mays
  unsure (1)..(298): unsure at all Xaa locations
  Clone ID: MRT4577_33795C.1.pep
MVANQNITLFILSVGLSIAGFTAGDDDQFVYTGFASSNLTLDGGATVTPSGLLELTNGTVRQKGHGFHPSSVLFYESSSGAVQSFSVSFVFAILSTYPETESGHGLAFFIAPDKNLSGSFPTQYLGLFSDQTNGDPNSHIFAVELDTVQNYDLQDINSYHVGINVNSLRSIRSHDAGYYDDKSGLFKDLSLDSHEAMQXVWVNYNRETTQINVTIAPLNVAKPVRPLLSANYNLSAVITNPAYIGFSSSTGSVSGQHYLLGWSFGINSPAPPIDITKLPEMPRLGQKARSKALQLVPN

SEQ ID NO: 296844 - protein, 62 aa, Zea mays
  Clone ID: MRT4577_33796C.1.pep
ARAKPTGVAHGVARAGTAAPRSSGLGPQQRATHITPEDSGWGLETQAPNNNLRETRNDPTPQ

SEQ ID NO: 296845 - protein, 65 aa, Zea mays
  Clone ID: MRT4577_33797C.1.pep
PRFLRDPPPPPQEDPHLGNQPRNPPLGPIGKKSPFEASKETLKNLAKNPISHQFKMNFELYNMLG

SEQ ID NO: 296846 - protein, 42 aa, Zea mays
  Clone ID: MRT4577_33798C.1.pep
SIYMCNNNSAVKAPKCIYVSIDGASNTFNNWCHLIHASMCAL

SEQ ID NO: 296847 - protein, 55 aa, Zea mays
  Clone ID: MRT4577_33799C.1.pep
DMHSNLSWGPIILPFLHKAAFKTLDSCKWGIVFLSLLLKLQDQYHQLVSSCTPCL

SEQ ID NO: 296848 - protein, 55 aa, Zea mays
  Clone ID: MRT4577_3379C.1.pep
PLLRGPGRLVSFGLPVWVLVLARCFCLPGGFAPFPLKKPPRRGRPPGSVLVDPGI

SEQ ID NO: 296849 - protein, 94 aa, Zea mays
  unsure (1)..(94): unsure at all Xaa locations
  Clone ID: MRT4577_337C.1.pep
LYNNFXPXLTXLXYLILPXPLIFFLXSNTSSIISNTQHXFLNFXKFXXXXSIIXNIXIXSIXKHXXXIKXKTLXXXXSSFIIFXXXILYILHIN

SEQ ID NO: 296850 - protein, 98 aa, Zea mays
  Clone ID: MRT4577_33800C.1.pep
KKGYKIAEEEINSIVKLSSNKSTRTNGFRQIGSRRKNKPRREKEAGIKCKYTVPAYLKYRVASFFFFLQHPSCLVAPNAGKTKCKQACFDYMPQFFFN

SEQ ID NO: 296851 - protein, 106 aa, Zea mays
  Clone ID: MRT4577_33801C.1.pep
NSTLVFTSGQTQQITPNLNWRRLLFTNTTQQAHKKDQMLSSKSPPKKFKSVSPKKIYFRSQLPKMTPKFVGVNGKGEERRNQRCFFILSNTPVRNSPKGHIKSLRK

SEQ ID NO: 296852 - protein, 38 aa, Zea mays
  Clone ID: MRT4577_33802C.1.pep
IIIRLLCRQHESRRIPRISISEHTPFAVPCGYQRGTTW

SEQ ID NO: 296853 - protein, 81 aa, Zea mays
  Clone ID: MRT4577_33803C.1.pep
KLVPVSLRVKKNNLFKVKFFQNHGFFCLQNFFFKGTFLPFFFQKRLNFFFKRNFFNNGPLKPLVFKKINIFGQLKIKNFWL

SEQ ID NO: 296854 - protein, 207 aa, Zea mays
  unsure (1)..(207): unsure at all Xaa locations
  Clone ID: MRT4577_33804C.1.pep
EEVPHIMDCRDFLNSTRPAKATGMDKYSFTVLHLDLASLDRVRHFIASVRQLQMPINKTLXTPTRYQXTAQXSSYTSDGFXIEDWVNHLGHFLLARXELLRDLQAADYPSKRLISVDSMTANTNTLADNEPANDNLXTCLASIGGLNAVGXSIVIYTGEFNGAWAYNDSMECSMLTMPDFHRRDHEDTGVTFESLYPSCIGTTFMIY

SEQ ID NO: 296855 - protein, 91 aa, Zea mays
  unsure (1)..(91): unsure at all Xaa locations
  Clone ID: MRT4577_33805C.1.pep
HTFSTPSMISISGTFVEGCSARCLSRTCAEMAWAIRSHSWHRMYFMSSRLRPLEKLWCGAHPPPYPPVGSRVFCKKTRKPRDSRTGWSPPX

SEQ ID NO: 296856 - protein, 69 aa, Zea mays
  Clone ID: MRT4577_33806C.1.pep
DFCCSPTLEHTPWSLALQLLEVYDISRRPGYLQKCARRQSLLTLRWMLLHELPTTRVTTVKLLPASSAV

SEQ ID NO: 296857 - protein, 47 aa, Zea mays
  Clone ID: MRT4577_33807C.1.pep
MGKPVELAEFAGMPHGFYLHQPGSQATGELIQTVARFVHVVAPEAAA

SEQ ID NO: 296858 - protein, 81 aa, Zea mays
  Clone ID: MRT4577_33808C.1.pep
NPWRRWHLNPPECAGPTIRDPPKLAKKNLEDRGFNGLGPMPFSGWEFYGGTPTFLQGRFLTGGIFLSPDPYPQFKKFRPGL

SEQ ID NO: 296859 - protein, 110 aa, Zea mays
  unsure (1)..(110): unsure at all Xaa locations
  Clone ID: MRT4577_33809C.1.pep
GSPGKKTSTLKGKGAPQGKDKRNIDGEEVHRNDPNQTPREGERXSLNPFFKKLLXARRTHCNNNXPLPRGGTGSKKTEKKPPPQEVPQPATRATKEGRATWRSSPRKRKG

SEQ ID NO: 296860 - protein, 39 aa, Zea mays
  unsure (1)..(39): unsure at all Xaa locations
  Clone ID: MRT4577_3380C.1.pep
SLPSIIIQKARCKIGRATTSLKAQAQTKASFSSXLFHRA

SEQ ID NO: 296861 - protein, 392 aa, Zea mays
  Clone ID: MRT4577_33810C.1.pep
MRGYLESKIRKRTIFLDDNEQQEEEEDVMVVDAAAESVQAQQDAPIESQGSKVQPSSGTAAKHRRATYLYKDTTSIKTKENQASKKKSIVEMLRKSPEDVVDERRKGCSQPTIPSKMKSKEQKNYVDMQWALWFYECGVPFNAATARQFQVIVEATAQFGSGYKPPSPYQLGQPLLKDAVKLTSTMREEHERAWKTIEEIGKEKVVQVITNNGANYKATCRILMERFPSLFWSPCAAHCLDLMLEDIGNLKEFKKPIVRSRRVTTFIYMHGRLLSLMREKTGGADLVRAAAIRLESLYKHKDPLKALFLSEEWNGNKLAKTVAGKLHHLIRDDDDATVGQLTSCFLDVLARMVDDEETRDKIDAQSLDYEALKGEAFSNKMAKNNLENNEPM

SEQ ID NO: 296862 - protein, 70 aa, Zea mays
  Clone ID: MRT4577_33811C.1.pep
SSKQDSVQSPAHDIALVVCLYGQYTSHLCKASIIRFHDCHDIASSIVGLKPLSTVISNSASSGGLAIWSG

SEQ ID NO: 296863 - protein, 202 aa, Zea mays
  unsure (1)..(202): unsure at all Xaa locations
  Clone ID: MRT4577_33812C.1.pep
PRPPRERRAAGAPGPRASPSSSSPETEWCPVQPEQRPVXVNEYEALAASLPFSRAAGDLRSYCSRLALTGAAVALFVGLPVAAFGARGGAGGDALHLTLGATGSGILAVTLAVMRMYLGWAYVGNRLLSATVEYEETGWYDGQVKPVVNRVKFTLVGLAGSLILCILLXGMRTGGRSIPEVYSDVAARSFGPDAFCGEADLS

SEQ ID NO: 296864 - protein, 64 aa, Zea mays
  Clone ID: MRT4577_33814C.1.pep
YLIKKKKKKKKKKKKKKKKKKKKKKKKREKKKKKKKKKGAALFKGSNFTSPCLQRNSFFMGPPK

SEQ ID NO: 296865 - protein, 40 aa, Zea mays
  Clone ID: MRT4577_33815C.1.pep
LYVKDVKDIVDSIVPIINISLKFLTPLFLCSLSKLIKRVL

SEQ ID NO: 296866 - protein, 66 aa, Zea mays
  Clone ID: MRT4577_33816C.1.pep
VCKKTLRKYQYPEPRNSYAVSIPSLLYLTRAVSSSTPIPQVTQEAHHSNRTSASSALTLSEPINEE

SEQ ID NO: 296867 - protein, 249 aa, Zea mays
  unsure (1)..(249): unsure at all Xaa locations
  Clone ID: MRT4577_33817C.1.pep
QLTSMALVQVRFTRAEAPTTISELPGLVCDDISGGQENIPIPATNLVDDPPVPPSGFKYLKSLQIPKDIKIPSSIIKTASKGWGVRTWDTILPGAPICEYTGXVLRRTEDLDGSQNNYCFDIDCLQPMRVLDGREXRAGSEMHLPNLHPENDSDAHPAPEYCIDAHSIGNFARFINHSCQPNLFVQCVLSSHNDVKLAKVMLFAADTILPLQELSYDYGYRLDSVVGPDGKIVKLACHCGAPDCRKRLY

SEQ ID NO: 296868 - protein, 319 aa, Zea mays
  Clone ID: MRT4577_33818C.1.pep
QLTSMALVQVRFTRAEAPTTISELPGLVCDDISGGQENIPIPATNLVDDPPVPPSGFKYLKSLQIPKDIKIPSSIIGCDCEGGCASNKKCLCAQRNGSDLPYVSYKNIGRLVEPKAVVFECGANCSCNHDCVNRTSQQGLQYRLEVFKTASKGWGVRTWDTILPGAPICEYTGVLRRTEDLDGSQNNYCFDIDCLQTMKGLDGREKRAGSEMHLPNLHPENDSDAQPAPEYCIDAHSIGNFARFINHSCQPNLFVQCVLSSHNDVKLAKVMLFAADTILPLQELSYDYGYRLDSVVGPDGKIVKLACHCGAPDCRKRLY

SEQ ID NO: 296869 - protein, 697 aa, Zea mays
  unsure (1)..(697): unsure at all Xaa locations
  Clone ID: MRT4577_33819C.1.pep
MANMDSVVVMEVAPVPIPTFMDATPLNPPLPLVVEELVLRRSARYLNRPTRPNYADQEPPKNPGGRGRGKRKRDEEKPELAAQQGTKTPGRNDSNVEAGERKPMPVTAAVPACCAGVAAEDDATPTGKSAKLRVKETLRAFNSHYLHFVQEEQKRAQAAIQEIEAKGGLKRQTKGGKKKSSKQEAEAEEKEKRPSKRPDLKAITKMQEMNAVLYQEKTIGHLPGLDVGDQFYSRAEMVVLGIHSHWLNGIDYMGMKYQGKKEYANLTFPLATCIVMSGIYEDDLDKADEIIYTGQGGNDLLGNHRQIGSQQLKRGNLALKNSRKNGNPVRVIRGHLSKNSYTGKVYTYDGLYKVVDDWVQNGVQGHVVFKFKLKRLEGQPSLTTSEVRFTRAEAPTTISELPGLVCDDISGGQENIPIPATNLVDDPPVPPSGFTYLKSLKIPKDIKIPSSIIGCDCEGDCASNKNCSCAQRNGSDLPYVSYKNIGRLVEPKAVVFECGANCSCNHDCVNRTSQQGLQYHLEVFKTASKGWXGVRTWDTILPGAPICEYTGVLRRTEDLDGSQNNYCFDIDCLQTMKGLDGREKRAGSEMHLPNLYPENDSDAPPAPEYCIDGSSIGNFARFINHSCQPNLFVQCVMSSHNDVKLAKVMLFAADTILPLQELSYDYGYRLDSVVGPDGKIVKLPCHCGAPDCRKRLY

SEQ ID NO: 296870 - protein, 758 aa, Zea mays
  Clone ID: MRT4577_3381C.1.pep
MTVTPRITVSDGRLTVRGRTVLTGVPDNVSAAHAAGAGLVDGAFVGAHAGEAKSHHVFTFGTIRDCRFLCLFRFKLWWMTQRMGVSGRDVPLETQFMLVEVPASDGGGDDAPAYVVMLPLLEGQFRAALQGNDRDELQICIESGDKAVQTDQAAHMVYLHAGDNPFDTVTAAVKAVEKHLQTFHHRDKKKLPSFLDWFGWCTWDAFYTDVTADGVKHGLQSLSKGGAPPRFLIIDDGWQQIASENKPDPNVAVQEGAQFASRLTGIKENTKFQTKPDGDGDGGGEQAPGGLKRLVAETKDAHGVKQVYVWHAMAGYWGGVTPTAGTAMERYEPALAYPVQSPGVTGNQPDIVMDSLSVLGLGLVHPRRVRDFYGELHAYLASCGVDGVKVDVQNIIETLGAGHGGRVAITRAYHRALEASVARSFPDNGCISCMCHNSDMLYSARQTAVVRASDDFYPRDPASHTVHVASVAYNTVFLGEFMQPDWDMFHSLHPAAEYHGAARAIGGCPIYVSDKPGNHNFELLRKLVLPDGSVLRAQLPGRPTRDCLFSDPARDGASLLKIWNLNKCGGVVGVFNCQGAGWCRVTKRTRVHDASPGTLTGTVRADDVDAIAGVASDGGGWDGETVVYAHRTRELVRLPRGVALPVTLGPLQYEVFHVCPLRAVVPGVSFAPVGLLDMFNAGGAVEECDVISDDGGKAMALRVRGCGRFGAYCSREPARCLLDSAEMEFSYDADTGLVSVDLPAPEQELYRWTLEIMI

SEQ ID NO: 296871 - protein, 95 aa, Zea mays
  unsure (1)..(95): unsure at all Xaa locations
  Clone ID: MRT4577_33821C.1.pep
EGDAVELSVESVLYVGAILEQGDTSRFNLVLRNCYATPTEDKADLVKYXIIRNSCSNQRDSTIHVEENGQSSESRFSVQMFMFAGHYDLVFLHCE

SEQ ID NO: 296872 - protein, 79 aa, Zea mays
  unsure (1)..(79): unsure at all Xaa locations
  Clone ID: MRT4577_33822C.1.pep
XEGIPPDQQRLIFAGKQXXDGRXLADXNIXXXSTLHLXLRLXXXMQIFVKTLXTGKXITLEVESSDXIXDNVXAXDSGP

SEQ ID NO: 296873 - protein, 39 aa, Zea mays
  Clone ID: MRT4577_33823C.1.pep
IYPTYATTQAVGSCLLWCLVCFINFIRFIFVFILVFFYI

SEQ ID NO: 296874 - protein, 207 aa, Zea mays
  unsure (1)..(207): unsure at all Xaa locations
  Clone ID: MRT4577_33824C.1.pep
TRPLIEEVGIEESDVGKECSXSPQILVQKIDSAWKSRSLFLSKELDAPKHSIVKMVTKHPQLLHYSIEDGILPRLNFLRSIGMRNSDILKVLTSLTQVLSLSLEDNLKPKYLYLVNDLKNEVQSLTKYPMYLSLSLDQRIRPRHRFLVSLKKAPKGPFPLSSFVPTDERFCQRWAGTSLEAYHTFRQRLLLTSFTEKSGRKTLVSRR

SEQ ID NO: 296875 - protein, 98 aa, Zea mays
  Clone ID: MRT4577_33825C.1.pep
IFTHIQFIYASQKKRPLGLTTQAAQRNLGGNTLEGPQNGKRAPPNFSPHPGKNPGQNRGTATNFSPNPLEKGVRLAFFFYKTGGGPHPGFSKTPGPLH

SEQ ID NO: 296876 - protein, 41 aa, Zea mays
  Clone ID: MRT4577_33826C.1.pep
GGDKRRDICVWCFIRASNDVFCTYCCFHAYSGLYKPTNRKT

SEQ ID NO: 296877 - protein, 646 aa, Zea mays
  Clone ID: MRT4577_33827C.1.pep
FVHAREEIKAMKRQREAALDDAVEPVKIPKATWMADGTHWPGTWIQPSAEHTRGDHAGIIQVMLKPPSDDPLYGSTGDEGRPLDFTEVDIRLPMLVYVSREKRPGYDHNKKAGAMNALVRSSAVMSNGPFILNLDCDHYVYNSQAFREGMCFMMDRGGDRIGYVQFPQRFEGIDPSDRYANHNTVFFDVNMRALDGLMGPVYVGTGCLFRRVALYGFDPPRSKEHGGCCSCCFPQRRKIKASAAAPEETRALRMADFDEDEMNMSSFPKKFGNSSFLIDSIPIAEFQGRPLADHPGVKNGRPPGALTVPRDLLDASTVAEAVSVISCWYEDKTEWGHRVGWIYGSVTEDVVTGYRMHNRGWKSVYCVTKRDAFRGTAPINLTDRLHQVLRWATGSVEIFFSRNNALLASRRMKFLQRIAYLNVGIYPFTSIFLIVYCFLPALSLFSGQFIVKTLNVTFLTYLLVITLTLCLLAVLEIKWSGISLEEWWRNEQFWLIGGTSAHLAAVLQGLLKVVAGIEISFTLTSKSGGDDVDDEFADLYIVKWTSLMIPPIVIMMVNLIGIAVGFSRTIYSEIPQWSKLLGGVFFSFWVLAHLYPFAKGLMGRRGRTPTIVFVWAGLLSITISLLWVAINPPSQNQQIGGSFTFP

SEQ ID NO: 296878 - protein, 412 aa, Zea mays
  unsure (1)..(412): unsure at all Xaa locations
  Clone ID: MRT4577_33828C.1.pep
EFPDDDEYDLEQAESREHKRWMERQNAKLQEKAKKVEYARVRTLVDNAYKKDPRIQRRKEEEKAEKQRRREAKYLAKKLQEEEAAKAVEEERIRKEEESKKAAEAALHQKKLKEKEKKLLRKEKTRLRTLAAPVIADSHFGLSEANVESACASLDMEQLKKLCDGMDGKDAAGKARLLSNVLRNESSSKEAKKIEGNGVEPSAPKSNSTGGRATEGSNSILNSYEKKERPWGKEEIEMLRKAIQKYPKGTSRRWEVVSEFIGTSRSVEEILKATKTVLLQKPDSSKAFDSFLEKRKPTQSIASPLSTRDEISSTEGAGTASSKAAAQSANSQTANEKAAADPVTDGGPSVSDPDAWTDAQVLALVQALKAFPKDASQRWERVAAAVPCKTVVQCKKKXAAMRENFRSKKSGE

SEQ ID NO: 296879 - protein, 81 aa, Zea mays
  Clone ID: MRT4577_33829C.1.pep
GSSDQQSSSRITICSLKGTRLSLVILDVVGVPPVNLFGAKDRLYPLQTLRHRGPRFPICDGRLRPVCVKYICAYSHYDKII

SEQ ID NO: 296880 - protein, 402 aa, Zea mays
  Clone ID: MRT4577_3382C.1.pep
MLPVGDYFSQNSSMEFFSGYEDMHFDGDLLPPGSNDKVSSGILGTEKDSSVPVLDVPGRNKEESPAGTSGFIEQKDTSNVTNMLPDLNLYHLASTASTHSSHSVSIESLEDSVADARSNKNDLLPSLELVTKMIEDVELLEEKAKVAKRESSVAGTGILTKVEELREMLTHAKEANDMHAGEVFGEKAILTTEARELQSRLQRLSDERNKYLVIIEEIRQTLDQRLVAAQQEIAAAEKEKLEKEVAAQTLLNEQENMMNSIVEESRKLQKEAEENLKLKEFLVERSQIVDMLQGEMTGICEDVSLLKRVVDERLSLSKLQPSAMSSLSSSLHSSHHKSWTSSDRTTEANGSLDKHTLAEPASPARKDLNGDECTVQVSDGNDTGKGVLKRVDSKDGDGWELC

SEQ ID NO: 296881 - protein, 135 aa, Zea mays
  unsure (1)..(135): unsure at all Xaa locations
  Clone ID: MRT4577_33830C.1.pep
FLLLMGVQDTRAEYLLPNEGGTINPFMEVKYNGQKYRTVIRDRDLNPVWNXQFYLNVFDPTRLPKLHLXAYAYHADRSDNSKSCLDPVLIYGTYFYSQPDPXALHYLLEKRTILSRARGQLWLTVFLTDDPSLSV

SEQ ID NO: 296882 - protein, 119 aa, Zea mays
  unsure (1)..(119): unsure at all Xaa locations
  Clone ID: MRT4577_33831C.1.pep
LGRATRPAGSTNGSSFVFMSKGTPXAELSYKVSESFPYKGINKKWKEWFHVTSIATAVNPXRVIMSRNSWVYTHVVEXDFLHPIEGIHLQLETGYMITSTAATNDQPAFILSMPNRKPI

SEQ ID NO: 296883 - protein, 215 aa, Zea mays
  Clone ID: MRT4577_33832C.1.pep
HRHPQPAAKARGVRVPTVGCGRGGRPRPGLLPHPPLAPGTAPCRRAARSGRPWPRAHARLLMAGLCRRPRCVPRSLRSTPRLVRRRPRQRHLGMVALALPSVELLAEFGTRKALAIYMYGPHRSNNGFAVFSRIAIAYAQPKTTLIGVKMAVCPFAMKCDQKGYFMCCCWSEPWQSTVRLRMASFIFFCDQWGSNSNIAFDLDMVVSELIHTART

SEQ ID NO: 296884 - protein, 114 aa, Zea mays
  Clone ID: MRT4577_33833C.1.pep
GCGSNDVVEWRSAIVYDFVTQMVENSGPWHEDSEVAGIRSSRNEKCAHNRRTSLGRRSNIGPRRGESAHVHHSGENKRIAVVRYMRSEASRHLMQITKAHIDRHGSIKCHNWGP

SEQ ID NO: 296885 - protein, 104 aa, Zea mays
  Clone ID: MRT4577_33834C.1.pep
ASEASRNRRGEHICGSGVRCAYVWGLTRRRYSQSCGDVAGLQHGSSRGEELVVAYLLVNILGKHLVEGGVLDFDLARDHTFLLCSRVPALALVVRDEMFKVPAG

SEQ ID NO: 296886 - protein, 110 aa, Zea mays
  Clone ID: MRT4577_33835C.1.pep
CQPARSASSADALMHQLLWLCRRGHDHRRGAFGSLFWGGGDTYAYPSPPRWAEIKKSGGCASIFPHNTAAFSRRNEGVVDEWTLKFCVFFSPSSVCGVQEEFLLARPRDR

SEQ ID NO: 296887 - protein, 48 aa, Zea mays
  Clone ID: MRT4577_33836C.1.pep
GSDVHWPVLAYTVFVLNDIENVVTPLEQELLQSCSGTPGASELYGALG

SEQ ID NO: 296888 - protein, 88 aa, Zea mays
  Clone ID: MRT4577_33837C.1.pep
KKPAKARGRARKKTLGETLFFRLKGKKRRGPSQKPRKLLGGKILKGAKLVLPHGRRDRQKKNLPVLKPFFNWGQKSLNRGGAKNILRG

SEQ ID NO: 296889 - protein, 167 aa, Zea mays
  unsure (1)..(167): unsure at all Xaa locations
  Clone ID: MRT4577_33838C.1.pep
PPTVKGTLYITKXHNYAXRLNVHNILRVVQEALFLVSXSAPPGXPGLADIPKAXQQDGGCRVCDTPINLPGYIXRLPKPAGTEFVEQVLPVAXNNRXPVLYVAGGFASXSEEAHLFVELSGIPSTTTMMGLGNSHSDNPLILCMLQMHGTKSANYAALMVEMGLAFW

SEQ ID NO: 296890 - protein, 165 aa, Zea mays
  Clone ID: MRT4577_33839C.1.pep
MNLGALQSEDASKEIGDKKGGTIEGDHVKGIRRSSRLESNDEMKIDDKATTRAMAKDAFINKGISSNPFSVLNTDNYVLMDVALKLGVELGSSFNEAVENLELIKSLELSRKNLAVQSVKSSFDPNHMVIPDSDVDNIVHNEQEDNTKTDIENVMVLRKGHKICH

SEQ ID NO: 296891 - protein, 78 aa, Zea mays
  Clone ID: MRT4577_3383C.1.pep
KKGVRGPNIYIRCLKTQQFSNRGTYPRGFWEAPPILISFLPKQLQIFRGFLSFKLSRAPGMGNFCHPTFAQSCLKTCP

SEQ ID NO: 296892 - protein, 123 aa, Zea mays
  Clone ID: MRT4577_33840C.1.pep
TGRRTVSPRPPGRWCTSPPLFCAANRPGWHGTDRKLRLDCTYRGWHLGGTSGSCWVFLWVESQGAQSIANKQSLVQCSSVQCSAVPAYMRLYCYQAGRPFWQGRTKMFCHVSGSGHHRQFVQG

SEQ ID NO: 296893 - protein, 65 aa, Zea mays
  Clone ID: MRT4577_33841C.1.pep
GWYLFHSSSWVVICFLCTCRLNHVAFQELALFCSSVRHIGALDRPYKHPTDCHLFLKSYDKNVSP

SEQ ID NO: 296894 - protein, 88 aa, Zea mays
  Clone ID: MRT4577_33842C.1.pep
VSLFLSRKLCPQHSSCSLSPYLGTDPKAEDIGSQDGGSSFSPTRTGAGIIGEKQPPEEIDASRCEESGLHATVAARMRRALRGCCPNP

SEQ ID NO: 296895 - protein, 88 aa, Zea mays
  Clone ID: MRT4577_33843C.1.pep
SEAYMKISVDHGRVGMPLDCSGWLWGSSLRSAISRRVDSSVVLRLGAGILRTIVGSRFVTPIWHYELTLCVTDASVSLELGVSDIRHV

SEQ ID NO: 296896 - protein, 87 aa, Zea mays
  Clone ID: MRT4577_33844C.1.pep
MKPVVSAFNAWSCTVLSVFAIVILSALAGLYRSNHEEFTGGVDDPEDGKAVSDTIFVAVLVYVAFFVFCGFQGFLHTRESRRGAIAL

SEQ ID NO: 296897 - protein, 88 aa, Zea mays
  Clone ID: MRT4577_33845C.1.pep
ARPQIYLATVSPSLGEEQFHGIERRWARNSRCPIRTDSHPCPIHSPGRTSPTKPHAPNGGGCKGRRRWLSHTLISHQATRRGNLVEST

SEQ ID NO: 296898 - protein, 217 aa, Zea mays
  unsure (1)..(217): unsure at all Xaa locations
  Clone ID: MRT4577_33846C.1.pep
VPCQACPEEIVWVDEINXLLNATSDIEACKIIGMDCEWRPNFEKNTKSSKVSIIQIASDKIAFIFDLIKLYEDDPKALDSCLRRVMCSSKILKLGYDIQCDLHQLTRSYGELECFQSYEMVLDMQKLFKGVTGGLSGLSKEILGAGLNKTRRNSNWEQRPLTQNQKEYAALDAVVLVHIFHEHMRRQAQFGVSEGSRVEWRSHVVSRVSCTRTPLRF

SEQ ID NO: 296899 - protein, 444 aa, Zea mays
  Clone ID: MRT4577_33847C.1.pep
MGRYELVRSDDAPAVAADLEAGTAAPCDGYPKRRVFTPSPSPSPAPAPTRYRQRLVSLDVFRGITVLLMIIVDDAGAFIPAMNHSPWDGVTVADFVMPFFLFIVGVALALAYKRVPDKLDASRKALLRALKLFCLGLVLQGGFFHGVRSLSFGVDLQEIRLMGVLQRIAIAYLLTALCEIWIRGDEDVDYGYDLLKRYRYQLFVGAVVAITYMSLLYGTYVPDWEYQTSAPGSTEKHFFVKCGVRGDTSPGCNAVGMIDRKILGIQHLYGRPVYARSKQCSIDSPQNGPLPPDAPSWCQAPFDPEGLLSSVMAIVTCLIGLQYGHVIVHFQKHRERMMNWLIPSFSMLVLAFAMDFFGLHMNKPLYTLSYTLGTAGAAGLLFSGIYTLVDIYGYRRPTVAMEWMGMHALMIYVLIACNVLPIFIHGFYWKEPKNNLLKFIGIGA

SEQ ID NO: 296900 - protein, 95 aa, Zea mays
  Clone ID: MRT4577_33848C.1.pep
HSAPHQVPLHWLHACAPTSALTCSSARPCWPYDVAHGELMVPTSVSRWLMRSSLYNVALLLRTSAGSIVIHEVANGCDCCSGTYIGLVEDKRSAR

SEQ ID NO: 296901 - protein, 216 aa, Zea mays
  Clone ID: MRT4577_33849C.1.pep
SNMLRNGASRLALRSVAAPKSARPAASFTRTTPQLQWATQFGSLAARRPQLAQATAVQLKPASAILRRSLADKTLTEGQKQAESRYAHEEIKPTPETVSSTSSTHPMFSEVGAEQPQNEVDMMAGVKHDVHTIKDTFSLASVPREAYYMGLAGTLPYLATSISTVYLSWELNHSVAGYGMIFSEKNAAYLLTLIEPLQIGYGASIPEFPRRHSLGT

SEQ ID NO: 296902 - protein, 85 aa, Zea mays
  Clone ID: MRT4577_3384C.1.pep
VVSLEPEAKSDDEHPENKPGRECELVSGMTINIPRRAQRKHDEMHLRQAAHMRTQLEATEKMINCTCVLRWVGLLDLSMYYVYTL

SEQ ID NO: 296903 - protein, 32 aa, Zea mays
  Clone ID: MRT4577_33850C.1.pep
VLIACNVLPIFIHGFYWKEPKNNLLKFIGIGA

SEQ ID NO: 296904 - protein, 130 aa, Zea mays
  unsure (1)..(130): unsure at all Xaa locations
  Clone ID: MRT4577_33851C.1.pep
MGAAAAANEGALPEPCGGRRPGAAPMGRYELVRSDDAPVVAADLEAGTAKPCDGYPKRRVPTPSPCPSPSPSPAPAPTRQRLVSLDVFRGITGLLMIIVDDAGAFIPAMNHSPXGGVTVGDFVMPFFLFI

SEQ ID NO: 296905 - protein, 77 aa, Zea mays
  Clone ID: MRT4577_33853C.1.pep
RQMTPYQAAEKDEQARTEDHDDENSGKVIENGKGETGEVHQEEQEQPHSKAQHREGAMSQRPPDTKEQRSDRQSRRV

SEQ ID NO: 296906 - protein, 549 aa, Zea mays
  Clone ID: MRT4577_33854C.1.pep
MPSPTSYLLLNPSKPSSFRRLSAPRLSRFHVSCDAPRGGGRREVIPAGASKAKKQIVFFDAAPPVSQEGGGAVKKAGSEKLTQVGSGNAALALLRRATKMTLSVLSNLPLAISEMFAIAALMALGTVIDQGEAPSYYFEKFPEDNPVFGFITWRWILTPGFDHMFSSPVFLGLLALLATSLMACTYTTQLPMVKVARRWSFTHSGERIRKQEFADSLPQASIQDLGVILMGAGYEVFTKGPSLYAFKGLAGRYAPIGVHLAMLFIMAGATLSATGSFKGSVDVPQGLNFVIGDVMKPRGVLSVAPDVFNTEVHVNRFYMEYYDSGEVSQFYSDLSLFNLDGKEVMRKTIKVNDPLRYGGVTIYQTDWGFSALQVKKNGEGPFNLAMAPLKLNGDKKLFGTFLPLEDSDSSNPNVKGISMLARDLQSIVLYDQDGKFVGVRRPSSKLPIEINGNEILIEDAIGSTGLDLKTDPGVPIVYAGFGALMLTTCISYLSHSQIWALQDGSTVVVGGKTNRAKLEFSEEMNRLLDKVPELISADENLLDTKSTAT

SEQ ID NO: 296907 - protein, 96 aa, Zea mays
  Clone ID: MRT4577_33855C.1.pep
WSALSTSASSRSNTCWLATPETTKPSPREEYRPWQFLLAASRRLVPPSLLANSSYGCVVCPECGAEMRWSSLSSIRSPVFFPASYLKREVRKQKVV

SEQ ID NO: 296908 - protein, 180 aa, Zea mays
  unsure (1)..(180): unsure at all Xaa locations
  Clone ID: MRT4577_33856C.1.pep
RSRGQEGKFVGVRRPSSKLPIEINGNEILIEDAIGSTGLDLKXSIDSFFAFEEICVCLLIXVLLFFPFHQTDPGVPIVYAGFGALMLTTCISYLSHSQXRDCLSRFLLTAELXCLAPIRIYGLVPAAXIWALQDGSTVVVGGKTNRAKLEFSEEMNRLLDKVPELISADENLLDTKSAAT

SEQ ID NO: 296909 - protein, 121 aa, Zea mays
  unsure (1)..(121): unsure at all Xaa locations
  Clone ID: MRT4577_33857C.1.pep
MPSPTSYLLLNPSKPSSFRRLSAPRLSRFHVSCDTPRGGGRSGGGRREVIPAGASKAKKQIVFFDAAPPVSQEGGGAVEKAGSEKLTQVGSGNAALALLRRATKRTLSVLSNXPLAISEMF

SEQ ID NO: 296910 - protein, 46 aa, Zea mays
  Clone ID: MRT4577_33858C.1.pep
GEVSREGMLHPSSMRPQVAGLHWRSTRMSRCVSHGDSMNIMTIMVT

SEQ ID NO: 296911 - protein, 133 aa, Zea mays
  unsure (1)..(133): unsure at all Xaa locations
  Clone ID: MRT4577_33859C.1.pep
FDSAVADRINKVLEFXPLPGENERFKLLKLYLAKXIIKVGAKHEKSWVQFFRGQPQKIXVKGILYDLIREGASRTQGFFGKKIAKIMARVQAPVFGSKDWELPPGLFREVLDYKVVGPKQRRSLAGGEPKQDA

SEQ ID NO: 296912 - protein, 70 aa, Zea mays
  unsure (1)..(70): unsure at all Xaa locations
  Clone ID: MRT4577_3385C.1.pep
VFTEGSRIIFRLSGTGFAEDTIRLYIKQFDFNFXKNSFNAQTALKPLINRALFVSKPKDFPEKKKPTVKT

SEQ ID NO: 296913 - protein, 70 aa, Zea mays
  unsure (1)..(70): unsure at all Xaa locations
  Clone ID: MRT4577_33860C.1.pep
RTRDSVGAIRPLSYQRTQKTITLVRERPASVCCYDMKSCSKLTYSCSTDRCWCNDNGESXGRLHIAPFSD

SEQ ID NO: 296914 - protein, 88 aa, Zea mays
  Clone ID: MRT4577_33861C.1.pep
ATRPRTVGGPWADAWAALRALHVTLTYYSCQTAAASAAYYYYCCFYRPVDRITKPVRLRWRPGRGRRRPWRPWRCTWPGSGGCRAGSA

SEQ ID NO: 296915 - protein, 87 aa, Zea mays
  Clone ID: MRT4577_33862C.1.pep
RITQLSCSTYAAVPSCFGVAVVAGPVGAQEEVEIFQADVGRGGELPEEQTRTGRHGARPTLIVVRGAHRIFQTPIVTCFLSYEFPAG

SEQ ID NO: 296916 - protein, 81 aa, Zea mays
  Clone ID: MRT4577_33863C.1.pep
MEYKLLGFLGGMLKLPNFPGTPVNWNAFSFTGLGLKGDLQLLLGNHGEMGPFGDHLFAVRPWPTEGFSRADMEPDVGPDPW

SEQ ID NO: 296917 - protein, 590 aa, Zea mays
  unsure (1)..(590): unsure at all Xaa locations
  Clone ID: MRT4577_33864C.1.pep
MQLKNESSSVLKTKPSPRILTEAAPWRQQERSATNICREAEGRPRIASVYADIERRVGGFDFLECNNKDFRALRILGALNARDAKDKNDSSGRPMATHRTGYDLTTSGSFQAPISLAKQVDVSIMDGVSLASVAPIAGLRSLRKLPARYSSFTGTNETSTNENIHLRMSRAQLKSEETVSSANSPRPTSSSSPRNVLKNAEPERRSRPPVSPKSPSKKSNEAVSPKGRTRSKPSQVKSHRDEVLQSTGNRISLAKQVDVSIIDCPKPLGGNSTFVPPSNAAATASHKAPSILDSDQNIHSLDNIPSPVSVLDTSFYHKRISDSFKDGETHSSEECWNPNSLPDTPQSKASSEVNQIKPENLEVLIQKLEQLQSMSEEDASIKEVMASVAANKDHQYIYEIMLASGLLHKEHSVTALPGQLQPSNYPINPELFLILEQTKXSQFSHSKLSVELRKAVSXAGKLHRRLVFDLVNETIAQKMIICRSGSQPVKFLQSRKLSGWQLFKDLCTEVDRQIKCPEEEENGNMISDEDTVNGTKDWMSFDTMLHGMVWEIERSIFKGLIDEVIGGETIEKMQFGQRKLQRQLSFSSIN

SEQ ID NO: 296918 - protein, 144 aa, Zea mays
  Clone ID: MRT4577_33865C.1.pep
AGSDADALLAAKAELSDPAGALASWTNATSTGACAWSGVTCNARAAVIGLDLSGRNLSGPVPTALSRLAHLARLDLAANALCGPIPAPLSRLQSLTHLNLSNNVLNGTFPPPLARLRALRVLDLYNNNLTGPLPLAVVGLPVLR

SEQ ID NO: 296919 - protein, 64 aa, Zea mays
  Clone ID: MRT4577_33866C.1.pep
RLPCQSGNEKAKSARGRLFVSFKRPTMTKAERVCVSMLACPASLNCSEMSIPVLFLKNKLCDRF

SEQ ID NO: 296920 - protein, 65 aa, Zea mays
  Clone ID: MRT4577_33867C.1.pep
LISQVDVVSSDNLEHSAGNRHEQRAVPQPRTEGRLHQVLNGLARKQPHAKDVFLKPGQKVLNWTE

SEQ ID NO: 296921 - protein, 53 aa, Zea mays
  Clone ID: MRT4577_33868C.1.pep
EEGDDIMRQGGGSCRGVAGRAGDCKPSCPESWMELEKPSPETHNSESLAAAAG

SEQ ID NO: 296922 - protein, 63 aa, Zea mays
  Clone ID: MRT4577_33869C.1.pep
AVYLGSSGGFSVVTLLAVGRCFAVWWPSWWAFRSPAGVRWHPSSCGAALLYIYFFFFFFPRVR

SEQ ID NO: 296923 - protein, 50 aa, Zea mays
  Clone ID: MRT4577_3386C.1.pep
PTYRIKLTLCTQIDLSSSCHNGETAYISSTHGWLKCLALLFVTLPPGSPQ

SEQ ID NO: 296924 - protein, 72 aa, Zea mays
  Clone ID: MRT4577_33870C.1.pep
SPAPTLAPITNNEYALPPVSSVNRETPFVCCPCKPSPVWCFPLKNVFASFYSRLIFFCEPIQTMIGLKIIPV

SEQ ID NO: 296925 - protein, 90 aa, Zea mays
  unsure (1)..(90): unsure at all Xaa locations
  Clone ID: MRT4577_33871C.1.pep
MTGKANPKKHTAKEIADNIDSATTNRGGGXARQVDRLGLDKGWHAKLVCPLCRNQAPDIKYMQIHHXSRHPKLXYQPEKLLNLHSCDPAA

SEQ ID NO: 296926 - protein, 178 aa, Zea mays
  unsure (1)..(178): unsure at all Xaa locations
  Clone ID: MRT4577_33872C.1.pep
YATRKMSAPTSATSEMPSRTFTNRSGDDDAIPGEDTSEVTRLFAERLQAWKHAVGYLEDYITATEKTNHAHGKEYERVLKTVKDPLKEGHHFDQSLXVGLQACLKTSDQTPRESPTNTTRQPSNSRVPSSLSSSVYTAKLRTRVRSLQKGLAKAARQSTRPACSLRSTLSSSDTFCRI

SEQ ID NO: 296927 - protein, 51 aa, Zea mays
  unsure (1)..(51): unsure at all Xaa locations
  Clone ID: MRT4577_33873C.1.pep
MXAFVYLLLPETKGVPIEQMAGVWRAHWFWSRVLGPESDPDTDEGRARGKL

SEQ ID NO: 296928 - protein, 282 aa, Zea mays
  Clone ID: MRT4577_33874C.1.pep
METDISSCGGGGAQQRGIGPVEVQAATAALRRSEVFHVLKELVGFVLYMHHQIPSVLPSLENEFASLKEEMTEMALQPAELKPSDRRKYNTRKTEVRRRIKKHEKLMNGISTLLCSLQHALDEVSSIEGVVLILGGSLVRPLFVYDITISHGIFGPGSAKEHALTKLAQSVSRKAIRALVSRGAGSLSYTGPSKLFLLVRCSSTLKLPLDFLPKLDFRYSKKVVPLQMHIKCSKSGCSGHNQHHMPLVDSPCSTSESSLSDVIWFQCKHTIRGLPGKASLEG

SEQ ID NO: 296929 - protein, 147 aa, Zea mays
  Clone ID: MRT4577_33875C.1.pep
KPQRKTFFNWGVKKKIFIWDPRKKQRGREKTSPPPRQRRGAGDQTPPKVGAPPIIVEPPPEQNFPFKVFLHPFRHPLLKLGLQGARPTGQGQSSKHPGRRANWQPRSHPNFVFFFAGGTNGAGSVPRGSNINGRSPLSSGNRRSAQS

SEQ ID NO: 296930 - protein, 83 aa, Zea mays
  Clone ID: MRT4577_33876C.1.pep
PTRVLWVHLVTTGPSNNQFSQMGAPFLAKTLRFQLFLPPSPKKVWGGGEKPKPNPCPLLFFHPKGKLVGGPHPPPGVPPEIPA

SEQ ID NO: 296931 - protein, 55 aa, Zea mays
  Clone ID: MRT4577_33877C.1.pep
SDKKPANRESLLNCTEWRTHQYGRVLVNHLNSRAHRYTALKLFRARSSLSIMLPA

SEQ ID NO: 296932 - protein, 41 aa, Zea mays
  unsure (1)..(41): unsure at all Xaa locations
  Clone ID: MRT4577_33878C.1.pep
IEFSYNYRRYMMWNGGVCLFKFSRAPGGFFFKLYLKFWRXR

SEQ ID NO: 296933 - protein, 83 aa, Zea mays
  Clone ID: MRT4577_33879C.1.pep
NGISLCVKWGFSISYQMAEQNSNIGNNQEGGRKSRRAHGILSNVRTRLGILGRVRMQVAGKYQDCTWDWSNVQIHITATSHAL

SEQ ID NO: 296934 - protein, 262 aa, Zea mays
  Clone ID: MRT4577_3387C.1.pep
SVRIPVDPASGSIKLPGDPSYHNLKKIFSAVGRSKGTGPATNRSSKLDMLFANKLHAFVEYETPEDAAKAILELNDEKNWRNGLRVRLLNTCTVKGAGKGKNGMNETDGNSEEDVSTLNHSNEKQFEQSSQLLDVLPEHLFDENFNKEVPKRGKGRGRGGRGHGRGNHQYNNHHHNNQHHQNNQPQYNNHGNNHLGGNRGSLHSVGTTPHNLKTKLEPHPQLPIGANKLPPGPRMPDGTRGFTRGRGKPQAVLPGLCAVGVE

SEQ ID NO: 296935 - protein, 513 aa, Zea mays
  Clone ID: MRT4577_33880C.1.pep
MLLHLVTSSPLTPACPSPKRRTCVVAAAVLVTVRCAASSSSSTPSSSASEAAAAGQRVAKVHSYGTVDYERRSPLRWGTLYRRIAVGHGGRPVGRTLGAWDEGERRLDKWELCRIAKELRKFRRFNLALQVYDWMTERRDRFPLSSSDMAIQLDLIAKVRGVPHAEKYFDELPDAMKDKRTYGSLLNVYAQAMMKEKTEETFEQMRKKGFASDTLPCNVLMNFYVDSGEPDEVLAIIDEMKERNVSFDVCTYNIWIKSCAAKQDAEEMEQVFSQMIADESVVANWTTYTTLASMYLKLGNSEKAEECLKDAEKRTTGREKKCFHYLMTLYSHLGKKEEVYRIWNWYKATFPMIHNLGYQELLSALIRIGDIEGAELLYEEWASKSYSFDPKTMNILLAWYAKEGLITKAEQTVNRFVEKGGNPKPNTWEILATAYMNDDKISEALSCMEKATAVKSASKWKPRPTNVETLLASFKEKNDAEGADRLVSVLTSRGCAEDEEYKSLIDTYAFAGT

SEQ ID NO: 296936 - protein, 426 aa, Zea mays
  unsure (1)..(426): unsure at all Xaa locations
  Clone ID: MRT4577_33881C.1.pep
MLFSRRPLAAAFHLAPLSPPLLLFFASASSSCSPAASAAAASVSGSRGCTAARMDSGAVETASTGAVWSSPSAEPRSISVGKEVFCNRSLNMRNITAVGFDMDYTLAQYKPETFESLAYYGTIEKLVKDLRYPEELLTWEFDWKYMVRGLVLDKKRGNILKMDRHKYVKVAYHGFKELSKEEKVAAYGSTLIRDSFDEPDYALIDTLFSLGEAYLFAQLVDFIDKNPGKVPAGTDYPLMYRDVRSAVDLCHRDGTLKRMVAKDPARYINEDLAIVPMLEMIRKSGRSTFLVTNSLWDYTDVVMNYLCGPYTSGVGSGLNHKWLQYFDIVITGXGLFEVEPDSGKLLNADIQXEDRKPKIKSSTLNTSXKVYQGGNVGHLHRLLSVASSSQILYVGDHIYGDILRSKKVLGMFYLSCIISLVKLGSE

SEQ ID NO: 296937 - protein, 71 aa, Zea mays
  Clone ID: MRT4577_33882C.1.pep
RRPAPAPAPATSVDQFLQLGFRNKLATERGQLLRPPTETEAAAKTPEGIRAPAIIHHPIPTSCTAQICCCP

SEQ ID NO: 296938 - protein, 82 aa, Zea mays
  Clone ID: MRT4577_33883C.1.pep
PLNLFPALFYLLNCLLSIRVQFHKVWGQLMKTGYQNSRFAHQVERFACLYSSQVTNFGLYSPDKYYRPSEDYMPHEFDVLGL

SEQ ID NO: 296939 - protein, 146 aa, Zea mays
  Clone ID: MRT4577_33884C.1.pep
MTAVVESRVVVATPVNAKVMSEKENHVLRISNSLNKQLAHVENTPEAPEAACNERKRKGEARNASIGGGEQENTNNGGRKRSLPAEREARLKRKSTEPPPQVKNLVRSTASSRAAAKAAAAAAPSSRAGGAKQQPGGGNKTRGWVR

SEQ ID NO: 296940 - protein, 51 aa, Zea mays; identical to SEQ ID NO: 190028
  Clone ID: MRT4577_33885C.1.pep

SEQ ID NO: 296941 - protein, 277 aa, Zea mays
  Clone ID: MRT4577_33886C.1.pep
MRLVKLIDACFAKCSTYSYVLHYYSLNHKWLQYFDIVITGSSKPRVHDDNRAGLFEVEPDSGKLLNADIQIGSPRSSHQHSTPVQKVYQGGNVGHLHRLLSVASSSQILYVGDHIYGDILRSKKVLGWRTMLVIPELEQELKLLSESKSTRKELRHLRMERDSIEDKIHHLEWSLKLDDISENQKEKLFSEHDNLLKQRGHVRGLHQEAQRQHHQKFHKVWGQLMKTGYQNSRFAHQVERFACLYSSQVTNFGLYSPDKYYRPSEDYMPHEFDVLGL

SEQ ID NO: 296942 - protein, 194 aa, Zea mays
  Clone ID: MRT4577_33887C.1.pep
SARGDFGLARLYDHGTDPQTTHMVGTMGYLAPELVRTGKASTDTDVFAFGMFLLEVTCGKRPLMMMMMQSTAEGRRDRQFFLVDWVLEHWKNGSLTEAVDGRVQDLDDGYDADEACTVLKIGLLCLHPFPSSRPSMRKIMEYLDGDMPLPELTPTKLNANVLRVMQSNAFSPTVMSYPQLTSSFGTVSDLSGGR

SEQ ID NO: 296943 - protein, 213 aa, Zea mays
  Clone ID: MRT4577_33888C.1.pep
TKPVFFYFFICNCNTLASFLRSSKLSFFELALLCWYSYPLMYRDVRSAVDLCHRDGTLKRMVAKDPARYINEDLAIVPMLEMIRKSGRSTFLVTNSLWDYTDVVMNYLCGPYTSGVGSGLNHKWLQYFDIVITGSSKPSFFHDDNRAGLFEVEPDSGKLLNADIQASKFINSNPSSCHMFFPKLYAILREDRKPKIKSSTLNTSSESYQGGNV

SEQ ID NO: 296944 - protein, 67 aa, Zea mays
  Clone ID: MRT4577_33889C.1.pep
KKPFSTNNRGAGLPFIKRENCKGFFFSLNKVLFNPYITCLKHLNTGILDSLFPCQRRGAQSPPPLFW

SEQ ID NO: 296945 - protein, 490 aa, Zea mays
  Clone ID: MRT4577_3388C.1.pep
MPQMEGSTDQIAAGWFAKEPASERPVGLPRTGSSSRLNAQAPEFVPRGPPPPAPAVVLPPPPQVIRMFAAPPPPPRGGFFSAPQPRPFEYYAPIGERSGFAAKEQQAPELEAEMLPPAAVKTEPVVDGLDDEVVHKITKQVEYYFSDINLATTEHLMRFITKDSEGYVPISVIAGFKKVKTSVRNNVMLAAALRTSSKLVVSDDGKRVKRQQPFTESDLQELQSRIVVAENLPGDPSYQNLKKIFSAVGSLISIRTCYPQTPNGTGPATNRSSKLDMLFANKLHAFVEYETPEDAAKAILELNDEKNWRNGLRVRLLNTCTVKGAGKGKNGMNETDGNSEEDVSTLNHSNEKQFEQSSQLLDVLPEHLFDENFNKEVPKRGKGRGRGGRGHGRGNHQYNNHHHNNQHHQNNQPQYNNHGNNHLGGNRGSLHSVGTTPHNLITKLEPHPQLPIGANKLPPGPRMPDGTRGFTMGRGKPQAVLPGLCAVGVE

SEQ ID NO: 296946 - protein, 68 aa, Zea mays
  Clone ID: MRT4577_33890C.1.pep
GTQQPFYLIFFFKTIKNPFAYRTFFDTNQTKQKAAPGDRTFKNANTENRAGWLGALLNENVPILTRAS

SEQ ID NO: 296947 - protein, 307 aa, Zea mays
  unsure (1)..(307): unsure at all Xaa locations
  Clone ID: MRT4577_33891C.1.pep
MSFSAARVSEHGGEFEEARGMPAEVSWEMLDKSRFFVLGAALFSGVSAALYPAVVLKTHLQVAAPAQAAASAAAAAILRRDGPRGFYRGFGASLAGTVPARALYMAALEATKSVVGSAALRLGVAEPAASAAASAAGGVSAAVAAQVVWTPVDVVSQRLMLQTAPLAAARYRGGTDAFRKILLADGVRGLYRGFGISVLTYAPSSAAWWASYVTAQRLLWRAVGPAAHDSRGAAIALQGASAAAAGSAAALVTMPLDTVKTRLQVMDAGAQAPTLAAAARXALVREGGWSACYRGLGPRWAIMSLSL

SEQ ID NO: 296948 - protein, 101 aa, Zea mays
  unsure (1)..(101): unsure at all Xaa locations
  Clone ID: MRT4577_33892C.1.pep
AVFPLFFPEKGRFXSKSLFMGSGPFTLGALEFSVLGKFRSPHPVPVWKDERPPSXLRGXGGLELNRIFPVGLTQRQALCGFRFKDGFGPGPYLQDPPCAKL

SEQ ID NO: 296949 - protein, 180 aa, Zea mays
  Clone ID: MRT4577_33893C.1.pep
MSFSAARVSEHGGEFEEARGMPAEVSWEMLDKSRFFVLGAALFSGVSAALYPAVVLKTHLQVAAPAQAAASAAAAAILRRDGPRGFYRGFGASLAGTVPARALYMAALEATKSVVGSAALRLGVAEPAASAAARALVREGGWAACYRGLGPRWASMSLSSATMVTVYEFLKRLSAKEGSL

SEQ ID NO: 296950 - protein, 54 aa, Zea mays
  unsure (1)..(54): unsure at all Xaa locations
  Clone ID: MRT4577_33894C.1.pep
LVSTVIILTRITSTRYSCMLMIFIGKPXSTILRTRVRRVTYQHALHEMDNITMQ

SEQ ID NO: 296951 - protein, 164 aa, Zea mays
  unsure (1)..(164): unsure at all Xaa locations
  Clone ID: MRT4577_33895C.1.pep
MLLAARLSSRSRQLYSVRATLXNARVTQARSFAKDAVPDDRPPVTGXDLLKGIFXIEEENKIETALVALKKEIITIEPNDPAAVXSRYAQVMKTVXEKENLLSDSHGIRYTXIVTFAIGIPDARTYFDTLQQFRIKRALIDHLVNDPLMMEALDKIENDIQVPL

SEQ ID NO: 296952 - protein, 126 aa, Zea mays
  Clone ID: MRT4577_33896C.1.pep
PLWFRVVFCVKLLTDYHFPQETAYAMVTPRLGPNSDPPRTAANGLEIAPKQGEQRKVLFFFFFFFFVQILIMRYKERKKKKRNQEKKNTRWIWMHGEVLYWRLEKYYTPATATARQRARYSALYHC

SEQ ID NO: 296953 - protein, 56 aa, Zea mays
  Clone ID: MRT4577_33897C.1.pep
ELQSSSSNRPQTRQQLDFIKNLRPNPRPQDLQTIFLQVLAHQATDQLAQENQHHPQ

SEQ ID NO: 296954 - protein, 262 aa, Zea mays
  unsure (1)..(262): unsure at all Xaa locations
  Clone ID: MRT4577_33898C.1.pep
GRDLRPSRRRRGGFPPGPPSHARFITCPAPRSIPGSPSSSPTKRIDRPQRAAAQPXRPPRPAAPPRRNVKVLRATKTGLGFPAEPTRRSLXRPRRPASHSQLHPRRSTRRPAPRTRPAARPTTRPLLTSPPTPSTISRTRCLWISTRRACWQSPACPPSLCLSPERRPPPPLLLRRPTRRYVWAVVRVFITSPAPCRVSPTCSPTCPSTSSSTRSGSRTSTSILPSTCFLTCVKPMVMAILLNDKRQYRGIQKPSLPTCKFS

SEQ ID NO: 296955 - protein, 119 aa, Zea mays
  Clone ID: MRT4577_33899C.1.pep
CLLVLFFFETKNMRSGRAKGRGAPQNRSFFLKRGPVKTKPWGAPFPQGGGGANLPGGALFIPGGPPNPFSGMGPRAPVFSAYTLTGAVFVLVPNGPVPPDIPWATSPETFFFFGKNSPK

SEQ ID NO: 296956 - protein, 74 aa, Zea mays
  unsure (1)..(74): unsure at all Xaa locations
  Clone ID: MRT4577_3389C.1.pep
RLHKRVIRLLATIFSRRKTAAPSHLRHFXESPNHPRWRKAPCPPQPGPGRAAAPLPHHLTHNNGGALLLQVLHS

SEQ ID NO: 296957 - protein, 132 aa, Zea mays
  Clone ID: MRT4577_338C.1.pep
MHDQWNCYAATASEEGEGKRTRPRRRLFSMRKCSLLQKGHEAQVSMSGPCGSGCGSFWVEGCFARRSCKIRGGGGEEVARITRKNAGAATALLGDDVFSLVVQPGADCALVMAFVVVLDRICWQPYTPRICS

SEQ ID NO: 296958 - protein, 67 aa, Zea mays
  Clone ID: MRT4577_33900C.1.pep
VYEDAALSRVDAEIVVDGHESVDAEEAIAQMAELVHGSSALAHCLGPPAVSVSERRRRRHERTGRMG

SEQ ID NO: 296959 - protein, 47 aa, Zea mays
  unsure (1)..(47): unsure at all Xaa locations
  Clone ID: MRT4577_33902C.1.pep
IHGTTIACTVCRWTVYLLHILTVDNRVYHMGCFRCHLCXDTLKLANY

SEQ ID NO: 296960 - protein, 37 aa, Zea mays
  Clone ID: MRT4577_33905C.1.pep
DWVCDYLRSTILLMVALRCLKNARDNGTSAMHRRYNL

SEQ ID NO: 296961 - protein, 114 aa, Zea mays
  unsure (1)..(114): unsure at all Xaa locations
  Clone ID: MRT4577_33906C.1.pep
QFQVRCSPSLEYTRTXKLVNHIHALSRISGITAHAQCEIDVIYTVPSDPTPHDADPPIPSAITHDHYDADHYGENTKNQKKADEDRVEDVNVSANNKESEKSSPILACATHATD

SEQ ID NO: 296962 - protein, 170 aa, Zea mays
  Clone ID: MRT4577_33907C.1.pep
MMPPMMMPSMVSPMIMPTLMLQQLLASPLQQCQMPMMMPGMMPPMTMMPMPSMMPSMMVPTMMSPMTMASMMPPMMMPSMISPMTMPSMMPSMIMPTMMSPMIMPSMMPPMMMPSMVSPMMMPNMMTVPQCYSGSISHIIQQQQLPFMFSPTAMAIPPMFLQQPFVGAAF

SEQ ID NO: 296963 - protein, 87 aa, Zea mays
  Clone ID: MRT4577_33909C.1.pep
GNHLGIDQHKLAVGAPPLSLISYRRSSHSGWHLTTNRIRVDYQLVPHKQNGSHNVRGSLYRNLSAGFFRMPRIVGFISTSCSRHLHG

SEQ ID NO: 296964 - protein, 67 aa, Zea mays
  Clone ID: MRT4577_3390C.1.pep
GENEGGPFFPIWFPNKKTPGGCKPPRPLVIIKREGVVSKNWGLSKNLALCLLSVNGQFESTPRVTLL

SEQ ID NO: 296965 - protein, 64 aa, Zea mays
  unsure (1)..(64): unsure at all Xaa locations
  Clone ID: MRT4577_33910C.1.pep
GKASRLQVPXRLSLVHPFFLPQAKTLSGRPLKQRRRPXLFHFILLLHLNSHYLFLLTSTTFYFF

SEQ ID NO: 296966 - protein, 70 aa, Zea mays
  unsure (1)..(70): unsure at all Xaa locations
  Clone ID: MRT4577_33911C.1.pep
HLSSVTDDAICKDRLQHMRQHXLXNFYMCKVSKDFVIDAAFTEHASRFFNHSCQPNCRLEKWNQRVCFGP

SEQ ID NO: 296967 - protein, 118 aa, Zea mays
  Clone ID: MRT4577_33912C.1.pep
MLAPAPWMEAQNRLPSRILHHASRPLPARKPPPAHSPPPHPLSGACATASLDQRHAYAITPSLLLPSAVLTFAIAQSIKVLTTWYKENRWDAKQLVGSGGMASSHSATVTALAVAVGL

SEQ ID NO: 296968 - protein, 76 aa, Zea mays
  Clone ID: MRT4577_33913C.1.pep
GKRGGSAGGFMGSTPRVPGLLCCMVSPRFPKLPCLSPLYHRGNWGDPVVSHSCSLMVLLPLWSVRVWPTGPAPSAL

SEQ ID NO: 296969 - protein, 72 aa, Zea mays
  Clone ID: MRT4577_33914C.1.pep
GLPPHFYQGEGGKPVRQCSCHHKGKPRWGLNPPHPRPQIRILGWPMLQLVQELMLPGRVANAPPGSPLNRAR

SEQ ID NO: 296970 - protein, 68 aa, Zea mays
  Clone ID: MRT4577_33915C.1.pep
SQEGSTAPPCDTHCETTTETKSHGRSSCHQLIQKLLTNDEYGRLGVNTDPMATELVFLHPVTRLLRPQ

SEQ ID NO: 296971 - protein, 86 aa, Zea mays
  unsure (1)..(86): unsure at all Xaa locations
  Clone ID: MRT4577_33916C.1.pep
MAKEPMRVLVTGAAGQIEYDLVPMIARGVMLGADQPDILKIIDIPQGTEDLNGEKMEXDDDGVPLLKGNVAKTEVGEDCTEVNENK

SEQ ID NO: 296972 - protein, 67 aa, Zea mays
  Clone ID: MRT4577_33917C.1.pep
FSLYTNAPHTRGRVVFEEVISALTTFKNFITKSRRGTQRGLGLQAVPPPTLMGKTQSELKKRTPAQQ

SEQ ID NO: 296973 - protein, 73 aa, Zea mays
  Clone ID: MRT4577_33918C.1.pep
IMWTNTHIFDKNKKLDFHPTAWGTLMGGLYRHSYKTPIPWTEPTGAIKMLSAKNRLLPHSLSSSGVRWNQYQK

SEQ ID NO: 296974 - protein, 137 aa, Zea mays
  Clone ID: MRT4577_33919C.1.pep
QHPKQRKGKKKGRETKTKATHKKQPPKKKKKRKESKGREERDQQRGKERGRGNKQGTGKKAQNNKKTQREKRPTDRGQSDRKEAKKKKGRAEKAIWQKPKKAKNASVLTRLSLETPGFLKLRTVEKNEPEEADKPAQ

SEQ ID NO: 296975 - protein, 45 aa, Zea mays
  Clone ID: MRT4577_3391C.1.pep
MEGRASSRRGVLLFLLVGVASGNPDGEIFDSASCCYSHADYVFFA

SEQ ID NO: 296976 - protein, 108 aa, Zea mays
  unsure (1)..(108): unsure at all Xaa locations
  Clone ID: MRT4577_33920C.1.pep
SAVGPPATSSPCSRSTPTPASRATLLLADKVQIMVVNDPVITTKDMTXDLVXDTGHAHWKNGDIMLKDDNTLLFGEKAVTDFGVRNPDEIPGXEAGAXDYAVKYAAEV

SEQ ID NO: 296977 - protein, 93 aa, Zea mays
  unsure (1)..(93): unsure at all Xaa locations
  Clone ID: MRT4577_33921C.1.pep
MAAKXYCSLMLLGLSACAVTATIFPQCSQATIASSLSPYLLPAVTFVCENPILQPYRIQHVITVVISPISPLILQHLSSLLHXKPLVXHLLAQ

SEQ ID NO: 296978 - protein, 120 aa, Zea mays
  Clone ID: MRT4577_33922C.1.pep
EFEGPIPVELGECRTLVRVRLQSNRLSGPVPPRFWGLPNVGLLEIRENALSGSVDPAISGAKSLSKLLLQDNRFTGTLPAELGTLENLQEFKASNNGFTGPIPRSIVNLSILYNLDLSNN

SEQ ID NO: 296979 - protein, 67 aa, Zea mays
  Clone ID: MRT4577_33923C.1.pep
LLVLLVTNSEIRSLHGLSPLLFIPGKIDVWSLRTNRVSLSPSSIDPAEYLYLDLFSEIFRVPSYVPT

SEQ ID NO: 296980 - protein, 137 aa, Zea mays
  Clone ID: MRT4577_33924C.1.pep
MELSLASSLPLLLLPLLPLLYFLYLRPDPKKQPRGHGLKVYPILGTLPHFVKNQDRFLEWYTGVMQGSPTHTLAFKVPGPTGGAITADPACVEHILKANFGNYPKGELSVSMLEDFLGHGIFNSDGEQWLWQRKAAS

SEQ ID NO: 296981 - protein, 183 aa, Zea mays
  unsure (1)..(183): unsure at all Xaa locations
  Clone ID: MRT4577_33925C.1.pep
MGSILSATSTTAKSMDQHEASGTDPNKRVKISTYEYGSNPRIIPTLPDELSLQILARSPRIHYLNLKLVCRAWKAAIIGYELSQLRRELGVSEEWVYVLTKAEAYKLHWYALDPVFQKWQRLPPMPSFVNQEESNRTASSAFWMWNVVGSSIRIADYVRGLFWRRNSLDQCPFCGXXSVGVAD

SEQ ID NO: 296982 - protein, 456 aa, Zea mays
  Clone ID: MRT4577_33926C.1.pep
MGSILSATSTTAKSMDQHEASGTDPNKRVKISTYEYGSNPRIIPTLPDELSLQILARSPRIHYLNLKLVCRAWKAAIIGYELSQLRRELGVSEEWVYVLTKAEAYKLHWYALDPVFQKWQRLPPMPSFVNQEESNRTASSAFWMWNVVGSSIRIADYVRGLFWRRNSLDQMPFCGCSVGVADGYLYVIGGFSKAVALNRVCRYDPFLNLWQEVSPMMTGRAFCKAAFLNGKLYVVGGVSRGRNGLLPLRSAEAFDPKTGLWSDLPEMPFARAQVLPTAFLVDVLKPIATGMAPYKGKLYVPQSLYSWPFFFDIGGEIYDPDLNAWSTMPDGLGDGWPARQAGTKLGVVIDDRLYTLEPSSSLDSGKIKRYDSEEDAWVTITPQVPVNDFTGAEAPYLLAGLGGRLHVITKAANNTLQVMQAVVQNNSVSEENVVWTTVASRNFGTAELVSCQVLDV

SEQ ID NO: 296983 - protein, 69 aa, Zea mays
  Clone ID: MRT4577_33927C.1.pep
RHASANSLIQDQNLKRIISGAGGLQMYGDVLTSAPALRKCLSYELAVVAYSNDVAGYMFTDAVLYHVLG

SEQ ID NO: 296984 - protein, 456 aa, Zea mays
  Clone ID: MRT4577_33928C.1.pep
MGSILSATSTTAKSMDQHEASGTDPNKRVKISTYEYGSNPRIIPTLPDELSLQIPARSPRIHYLNLKLVCRAWKAAIIGYELSQLRRELGVSEEWVYVLTKAEAYKLHWYALDPVFQKWQRLPPMPSFVNQEESNRTASSAFWMWNVVGSSIRIADYVRGLFWRRNSLDQMPFCGCSVGVADGYLYVIGGFSKAVALNRVCRYDPFLNLWQEVSPMMTGRAFCKAAFLNGKLYVVGGVSRGRNGLLPLRSAEAFDPKTGLWSDLPEMPFARAQVLPTAFLVDVLKPIATGMAPYKGKLYVPQSLYSWPFFFDIGGEIYDPDLNAWSTMPDGLGDGWPARQAGTKLGVVIDDRLYTLEPSSSLDSGKIKRYDSEGDAWVTITPQVPVNDFTGAEAPYLLAGLGGRLHVITKAANNTLQVMQAVVQNNSVSEENVVWTTVASRNFGTAELVSCQVLDV

SEQ ID NO: 296985 - protein, 60 aa, Zea mays
  Clone ID: MRT4577_33929C.1.pep
GRVRRPVFVFIVTHDGEDREREREAWLREEDVSPRLVSFSSAASVLQALPRRPPVARPPA

SEQ ID NO: 296986 - protein, 57 aa, Zea mays
  Clone ID: MRT4577_3392C.1.pep
NLCADGHKGVLDGLLPLQLDVLHVVRWRRRIAASTALLYSRRRCGGETRRKKEATSA

SEQ ID NO: 296987 - protein, 89 aa, Zea mays
  Clone ID: MRT4577_33930C.1.pep
MSQNNPSQLLPSELIDRCIGSKIWVIMKGDKELVGTLCGFDVYVNMVLEDVTEYEYTAEGRRITKHDQILLNGNNIAILVPGGSPPDAA

SEQ ID NO: 296988 - protein, 54 aa, Zea mays
  Clone ID: MRT4577_33931C.1.pep
KIKLRAGLTVFMLLTQGEVISVARNQNAHDKHQALPPQMLKQIGAVGCLHSLIK

SEQ ID NO: 296989 - protein, 292 aa, Zea mays
  Clone ID: MRT4577_33932C.1.pep
MAPSSYEVAASILLCAEDSSSILDLEAEAEEEALLARSGEPGGGAEFPVPSEECVAGFLESEAAHMPREDYAERLRSGGMDLRVRTDAIDWIWKVHTCYGFGPLTACLAVNYLDRFLSLYQLPEGKAWMTQLLSVACLSLAAKMEETYVPSSLDLQAGDARYVFEAKTIQRMELLVLSTLKWRMQAVTPLSYVDYFLHRLRGGAAPSRRAVLRSAELILCIARGTHCLDFRPSEIALAVAATVAGEERAVDIDRAFTHRVHKERVSRCLEAIQQATATMALPQPLKSEGPSS

SEQ ID NO: 296990 - protein, 39 aa, Zea mays
  Clone ID: MRT4577_33933C.1.pep
GLCPPLISFSHTHHKMVRLMYNKLLFPMWPSNLFCRPLK

SEQ ID NO: 296991 - protein, 130 aa, Zea mays
  unsure (1)..(130): unsure at all Xaa locations
  Clone ID: MRT4577_33934C.1.pep
SSANLPPSAADSRGAVVVVLVAPAGARVQGXGGXGSPVAQAASVQHPXWAPRHGGRGRRGVGGRCCSGLHFSAAAAGPWWRWPAGSLRGIATPSPAAAVCSGAQSNKALLNRRGCCKCGSHALRQVCPSG

SEQ ID NO: 296992 - protein, 72 aa, Zea mays
  Clone ID: MRT4577_33935C.1.pep
LEAGRDLTSLLVIDILLPASRGVTSPTAWNESENRYGRYAEAEMRPPAPPRPPLILRIGGRCSEFRGPSRRM

SEQ ID NO: 296993 - protein, 79 aa, Zea mays
  Clone ID: MRT4577_33936C.1.pep
CPPSAAVVTTIIVARAMITSHNVIVLPSLTTSERVRCNYSKDAKNAAPVSTKGAGALLLAAAGAVTASAGPRLALVDER

SEQ ID NO: 296994 - protein, 95 aa, Zea mays
  Clone ID: MRT4577_33938C.1.pep
QGNHLTGEGRESLLEGGLVTTAYGFRPVPPHQAVLFIRRATHPRSRSNSRTLAALCPGAGYTPSGAFFDAGWSPSNTWRISLKVMPNFFFSSRSM

SEQ ID NO: 296995 - protein, 36 aa, Zea mays
  Clone ID: MRT4577_33939C.1.pep
TPWSCIVRHKLWTNGGSPTTASLVTSMPRALYPFKS

SEQ ID NO: 296996 - protein, 59 aa, Zea mays
  Clone ID: MRT4577_3393C.1.pep
HWHVHIKVAPDAIVNLCEDADVEARALIRKCEGARSYCLISSITGSWVGRTTRIQCRDL

SEQ ID NO: 296997 - protein, 38 aa, Zea mays
  Clone ID: MRT4577_33940C.1.pep
SGSSLLTFNFIHQTQRNCAIKFYTAHLMFATDPCVAYC

SEQ ID NO: 296998 - protein, 72 aa, Zea mays
  Clone ID: MRT4577_33941C.1.pep
NLFRQLGLRHIFVVPRPSRVVGLITRKDLLLGEDNNNVMAELQSTSGGLLNGKMLGGNIHLERPLLDNLVIE

SEQ ID NO: 296999 - protein, 101 aa, Zea mays
  unsure (1)..(101): unsure at all Xaa locations
  Clone ID: MRT4577_33942C.1.pep
MLGRLSLFFIIFDLERLVHTQRELPFLVFTIDTHHRKCTAHFPSLDFHERNCYLNVMLTVIIHDPAPNPTIAKIAFRXPIRYNKHIQLLIACQGLYTCHII

SEQ ID NO: 297000 - protein, 98 aa, Zea mays
  unsure (1)..(98): unsure at all Xaa locations
  Clone ID: MRT4577_33943C.1.pep
IHSFNQSNKNTNAYLRDITLACYRAVHKTIYHRWINIAWRFILSVQKXLAWKNPKLMGVCIVSSIXMPIKXDCCTRLAXGDDHRLXLNXPQRVIGVRA

SEQ ID NO: 297001 - protein, 127 aa, Zea mays
  Clone ID: MRT4577_33944C.1.pep
GVLLVVASAVPSDVVAGQSPSPLRQRAGSALDLRLRVLNCRLAFERYLLPSEERRSQLPLRTPALPVWSDWGISEEGQRIRGPWKRASGWRGGAPRQKRMLGRRPTACLHPHSGTQTRKGVVWKSRA

SEQ ID NO: 297002 - protein, 56 aa, Zea mays
  Clone ID: MRT4577_33945C.1.pep
SAHASTVTRINASDLSRHLASHHLSLHRESFTGVSTGRRLVLHSPQPVHDPVRDPG

SEQ ID NO: 297003 - protein, 118 aa, Zea mays
  Clone ID: MRT4577_33946C.1.pep
FIALFCWCPMVANCMKCAQFYLTLWGQFSMDVCCLIFVHHFIVLVCSFIHASSVMDPFDNSLTHGLGSLLRDVLLFVREIFLSLEYAVIPLLDITPAQCVSQRPDNTPHSVLNRTREQ

SEQ ID NO: 297004 - protein, 481 aa, Zea mays
  Clone ID: MRT4577_33947C.1.pep
MPEPGGRCLGDLGGQRQVLKGWPDLWLVGDKPGLRALSTAAMAAAPQPPPLEADQTLALPDVLLLRVLACLPEPQLTGAASLVCRRWTRLAGRLRRRLAVRDWAFVAHRLPYRFPDLADLDLFPASIAAPTTAVPHGAAASPLLTCGAVSLTLDTSADPPLGACRFIDDDALDRGLAAVAASFPNLSRLSATAASESGGLMAIAVGCPTLQELELHRCTDLALRPVSAFAHLQILRIVAASPALYGTAEGGGVTDIGLTILAHGCKRLVKLELQGCEGSYDGIAAVGRCCAMLEELTIADHRMDGGWLAALAFCGNLKTLRLQSCSRIDDDPGPAEHLGACLTLESLQLHRCQLRDRSALHALFLVCEGAREIQFQNCWGLEDDMFALAGLCRRVKILLLEGCSLLTTRGLESVITSWGDLQSLEVVTCNKIKDEEITPTLAELFSNLKELKWRPDNKSLLAASLVGTGMGKKGRVFFKRV

SEQ ID NO: 297005 - protein, 129 aa, Zea mays
  unsure (1)..(129): unsure at all Xaa locations
  Clone ID: MRT4577_33948C.1.pep
KTFHLSFKFTITPTFSSNYIXTPSFHPHSLPYLTITPSITFFLSTRFPLSPRTILPLHHTHSRALSHHQVAAPAPRSRRPRPRWCRRRVYHLCRRGGHGGGEGDQKECEGEELCXGCPKAVHDRHLRCX

SEQ ID NO: 297006 - protein, 68 aa, Zea mays
  Clone ID: MRT4577_33949C.1.pep
KCSRLSFLMWSRLNVGVSTADPLHVVPKVSHRMLLLRLLRQIGHATARTPLGVRRGGTRHGGSAGRSY

SEQ ID NO: 297007 - protein, 68 aa, Zea mays
  Clone ID: MRT4577_3394C.1.pep
FAFNLGISASCQRVGPHVWKRDSVACCQAQARPGQLSLFLSQNYRPAGRLWAHYSGCWILFQHGMWPV

SEQ ID NO: 297008 - protein, 91 aa, Zea mays
  Clone ID: MRT4577_33950C.1.pep
VVRVELEHERQMQGFDDLVLEDRHDAVHHIGDQYDLHALVVAATREHFVPSSAEPPCAGCTPKSTSSGMISIITTRPVRAMCGHMLMPCVC

SEQ ID NO: 297009 - protein, 56 aa, Zea mays
  Clone ID: MRT4577_33951C.1.pep
EKYQFFGSLKCSTYKYGPKPKSQTTFFQQGNDWWGKEILHYKGQWAFFFNHIMCSL

SEQ ID NO: 297010 - protein, 117 aa, Zea mays
  unsure (1)..(117): unsure at all Xaa locations
  Clone ID: MRT4577_33952C.1.pep
DVYLVDEAADVAISSLRPADARDRYLFTSLYWLTFDGERGIXTRLSASDPSQSPTSLETPLEGEEAEDGXXAIGPEDEMETVYLGNGSAEEDKYVAKCNEQPXIXTEDERLQNTDGI

SEQ ID NO: 297011 - protein, 62 aa, Zea mays
  unsure (1)..(62): unsure at all Xaa locations
  Clone ID: MRT4577_33953C.1.pep
SILCSRIQTFGGEDNQPEENTLAYKLLARALVQHCCSNITSVDRVQCMLGFIKDIXLLQKQK

SEQ ID NO: 297012 - protein, 129 aa, Zea mays
  Clone ID: MRT4577_33954C.1.pep
SSNFIRIQAVRLHKSFWAQHTGHNMFIKPTKPLPPLMTHKPQMFIRQPHPYGGTPQGSRRRRCQRTVFVKMTLVLLTTREAFPQGERAPLLIKKGGGGLSSSSCLPKKNRLFCFGGMPSLPRKPPPTGP

SEQ ID NO: 297013 - protein, 54 aa, Zea mays
  Clone ID: MRT4577_33955C.1.pep
MRQIFSPGGGAAARSLNSNTCYGEQEYSKMLIALNHRCWYKLGPAVATKPSYLP

SEQ ID NO: 297014 - protein, 145 aa, Zea mays
  unsure (1)..(145): unsure at all Xaa locations
  Clone ID: MRT4577_33956C.1.pep
YHPSPTPPPWARRRGSPPSSAPSARPLRTTAAAPPGRRRASARTPTAKXKGKRERRRWLFRRSSSPSPAPAPPAPAPAAXRRSSGTPSRWPWRPRPRPRRRWPRRRRQPRWSASRAPAARRRPQLRAPRPPRRRRHPDRLPRLPR

SEQ ID NO: 297015 - protein, 116 aa, Zea mays
  unsure (1)..(116): unsure at all Xaa locations
  Clone ID: MRT4577_33957C.1.pep
FSKMYIMKDITMWHVPCTREPISCMRRCLHDPRXRYMMYVCERIFLLFVIFFKAASILQVFPAENHLLPVGLVSLRGLWMLAFPLSKGSWLSGFVWDGGSPSKVCARYRHGSSSGR

SEQ ID NO: 297016 - protein, 128 aa, Zea mays
  unsure (1)..(128): unsure at all Xaa locations
  Clone ID: MRT4577_33958C.1.pep
MGLSDILAALYSCLPETPSSPVASLPAVTSDDGGEDRISALPDDILRGVVSRLPAKDAARTAALSPRWRGLWRSTPLVLEDIHLLXSGRRASEAGSSSTRXALAGAVSRVLASHPGPFHWVHISSNCM

SEQ ID NO: 297017 - protein, 70 aa, Zea mays
  unsure (1)..(70): unsure at all Xaa locations
  Clone ID: MRT4577_33959C.1.pep
GRRPXXNFFXRQAIFGGVFLLFFVLQPQGNAICYTSNKPSKLWVTWDKHPLELWAPTTEHTLTASAAIFF

SEQ ID NO: 297018 - protein, 127 aa, Zea mays
  Clone ID: MRT4577_3395C.1.pep
INAVSPRRHSCVTAWYLPLMQSSRWIEPAVRQLSSGDRGQEAACSRQTSRGLAVSIFYFSKEGVGNVITSSYVLFNWHKDVTAEGMIKSVPSAACVSELDRAVEEMGGNALRTRSGDARRCRAPRRH

SEQ ID NO: 297019 - protein, 168 aa, Zea mays
  Clone ID: MRT4577_33960C.1.pep
MCHTNLLIPINSFACLNGMLANKILVYSVAIVQLQASDFKYPPSPQRHNVLSSERSSNHNLVESTMEKRRTSPAPAYNNTKQNNSNNYSSISSSAPARAIREQKNTLLDSEKLDSARKRLQENYQEAQNAKKQRTIQVMDIHDIPKPKNRNTFVRKSGGSAGFPAKHR

SEQ ID NO: 297020 - protein, 806 aa, Zea mays
  Clone ID: MRT4577_33961C.1.pep
MDIVVGALSGIVDALPGKLGELLEQEYALLSGVRGDVIFLKDELSSMRAAIHYCESLDHHDSQTTGWISLVREVAYDIEDWVDLFSIRVHGGAQSTSGFRAWLSRSVDKLTALPARHTIASELQGLKERVLEISRQRNRYRLGQMVGTTSQHPHDPRLSALFVDPGRLVGFDGKVEDVSKTVMDAGGSNGLRIVSIVGMAGSGKTTLANAVYRRLQADNTFQCSAFVSIGPKPDMVKTVKDMLSRLGDGHRGGEDISQLIPRVRGILEKKRYLAWIDDIWSSEQWGVIRCCFPDNSLGSRIITTSRNDALPTNHHYGSSKFVYKIGLLTDNEARELFLKKAFSSRNDCPQHLVDAFTKVLRRCAGLPLAVVSVAAKLAHKQSREEWEKHGLNLLYSSHSDGSDGLKQILHLSYSDLQPQLRSCLLYLSIFPENSEVETDRLVRRWIAEGLIAASNEDTAISSLNELIGRNLVQPLDLNHDSIPRCCRVHPVIYDFIVCMSMQDNFATVTDAQHVPINNKTVRRLSLNLKSNSKQDQPAARNETTDLSHARSVTVFGHASATPHLTDLKVVRVLDLEGCKGPVCLDGLCKLVLLRYLSLRGTDVSELPAAIGDLRCLETLDVRSTKVEELPPSIVRLQKLMHLLAGSAKLPDGMDKMKALRSLSCAATTKSSANVVEELSKHHNLRQLELYYYATETPGNEKQIKFPADGLQTVKQLCIRCTSPSVTFEPRVLPKVQALVLRFEKGRADDTIGVSGLEHLSSLKHLVLEFEQHDAGAMATVTAVRMAAEGLHLDHQYITLKVDGKKY

SEQ ID NO: 297021 - protein, 100 aa, Zea mays
  unsure (1)..(100): unsure at all Xaa locations
  Clone ID: MRT4577_33962C.1.pep
MTSSSKEDLGGGAYGSAAAVAFVGVEQSRLVFLGXGARYSFDLKELVRTSAYDLGKGSVRTSYTAVLDEGTTVXVKRLKDWADQRRXFYAHMDAVGRVEH

SEQ ID NO: 297022 - protein, 62 aa, Zea mays
  Clone ID: MRT4577_33963C.1.pep
TVGHQCHPDRLCAPPDVLPAAPAAISMKPIQASPPNVLPKPRAGEWTQRVFTWFRDAHHQGI

SEQ ID NO: 297023 - protein, 109 aa, Zea mays
  unsure (1)..(109): unsure at all Xaa locations
  Clone ID: MRT4577_33964C.1.pep
KRGDGKNPGVPKLNRLEENPLFASGGNTKKARPDRLSKKWPTLKGKGPXPCRGPLSAGGGGVTPRGTVTLARALGPVLLVFFPSFFATLAGFPRKALNGGLLLGSQFRV

SEQ ID NO: 297024 - protein, 108 aa, Zea mays
  Clone ID: MRT4577_33965C.1.pep
MRRTSKKSSSSTATASAGPTKAVSKEVERIDQFFYTYADNSSGMIDPEGIETLCSHLEVPHTDVRILMLAWKMGCDKQGYFTLDEWRTGLKALRADSSIPVVKLSSKM

SEQ ID NO: 297025 - protein, 220 aa, Zea mays
  Clone ID: MRT4577_33966C.1.pep
MRRASKKSLSSAATASAGPTKAVSKEVERIDQFFYTYADNSSVMIDPEGIETLCSHLEVPHTDVRILMLAWKMGCEKQGYFTLDEWRAGLKALRADSISKLKKAFPELVQEVTRPSNFQDFYIYAFRYCLTEDKKKCIEIPVACELLNLVLGLQFRPQVDKLSNYLKYQNDYKVINMDQWMGFMRFCNEINFPSLDNYDSDLAWPLILGNFVEWLRENKS

SEQ ID NO: 297026 - protein, 291 aa, Zea mays
  Clone ID: MRT4577_33967C.1.pep
MRPRTRGSHPEGRELVATRREEPEVVPNQTRKRVGSGASQPAATMRRASKKSLSSAATASAGAEQVNEKQNRKRKGVSTNLTSRKAQRGPTKAVSKEVERIDQFFYTYADNSSVMIDPEGIETLCSHLEVPHTDFRILMLAWKMGCEKQGYFTLDEWRAGLKALRADSISKLKKAFPELVQEVTRPSNFQDFYIYAFRYCLTEDKKKCIEIPVACELLNLVLGLQFRPQVDKLSNYLKYQNDYKVINMDQWMGFMRFCNEINFPSLDNYDSDLAWPLILDNFVEWLRENKS

SEQ ID NO: 297027 - protein, 220 aa, Zea mays
  Clone ID: MRT4577_33968C.1.pep
MRRTSKKSSSSTATASAGPTKAVSKEVERIDQFFYTYADNSSGMIDPEGIETLCSHLEVPHTDVRILMLAWKMGCDKQGYFTLDEWRTGLKALRADSISKLKKAFPELVQEVTRPSNFQDFYIYAFRYCLTEDKKKCIEIPVACELLNLVLGLQFRPQVDKLNNYLMYQNDYKVITMDQWMGFIRFCNEINFPSLDNYDSDLAWPLILDNFVEWLRENKS

SEQ ID NO: 297028 - protein, 350 aa, Zea mays
  unsure (1)..(350): unsure at all Xaa locations
  Clone ID: MRT4577_33969C.1.pep
SRTHRSIVSIHAPARGPATGAKETEAPMASFFRDARLPQQRVVEGVPFPAVLVPSAPAGGGLDEFLAAVRSERASRLEPLVRDAGALLLRGFPATTAADFDRAVDAFGYEELPYVGGAAPRTNVVGRVFTANESPPDQKIPFHHEMAQVPTFPSKLFFFCEVEPXGETPIVLSHYIYKRMKEEFPEFVEKLEKEGLVYTRVLGEGDDPSSPIGRGWQSTFLTKDKAVAEERAAKLGMKLEWTGDGVRTVMGPIPAVKWDESRGRKVWFNSMVAAYTGWKDARNDPVKAVTFGDGSPLPADVVAACGRVLEEECVAVPWRRGDILLIDNWAVLHSRRSFEPPRRILASLCK

SEQ ID NO: 297029 - protein, 50 aa, Zea mays
  Clone ID: MRT4577_3396C.1.pep
SIKNLEGGSDLFSAILADKLGIKIGGGLWCPSDPKWRLAVFGDKYSVWPQ

SEQ ID NO: 297030 - protein, 273 aa, Zea mays
  unsure (1)..(273): unsure at all Xaa locations
  Clone ID: MRT4577_33970C.1.pep
MPQAMADAATLSALALFASRLSCRRYHTPWPRACPNPPAPPHSVPVRCRFGDEDLRVLEAALSAGADVPALLATRSAARRLLRSSAAEALAFTAAGASLDGGDERRSLAVADFFSRAFALVGDVESCLAMRYEALLLRDAKYCNDLHLQVSRQEWLTFATDCLDNGFYTIASKAFANALAHIHPSHTGHLDSANSIEEKDKIIEITGLQNXPIQIKSAEYMERRASGVHEKYNLXIRKTKLTGSSMFRLGIKTRNIKKLLRSQERNLGDLKQS

SEQ ID NO: 297031 - protein, 150 aa, Zea mays
  Clone ID: MRT4577_33971C.1.pep
RTHRCSTFSTSPATGTKETEAPMTSFFRDARLPQQRVVEGVPFPAVLVPSARAGSCAGGVDKFLAAVRCERASRLEPLVRDAGALLLRGFPATTAADFDRTVDAFGYEELPIVGSVAPRTNVVGRVFTANDSPPDQKIPFHHEMAQVIDC

SEQ ID NO: 297032 - protein, 52 aa, Zea mays
  Clone ID: MRT4577_33972C.1.pep
NFSHVFDSLSSPPVVVTCLSPRHFVLCVRLFNCPPSIKLFHVKKIGAALRSS

SEQ ID NO: 297033 - protein, 78 aa, Zea mays
  unsure (1)..(78): unsure at all Xaa locations
  Clone ID: MRT4577_33973C.1.pep
GKAVXGWVGRRMQGVGKAVGGDCGRMALMXASANLHCIAYEDPGQNRAPKPFVDAYNNFLSSSRDKCRNHKVLHHIIR

SEQ ID NO: 297034 - protein, 69 aa, Zea mays
  Clone ID: MRT4577_33974C.1.pep
RISLTLLLLQYFGYPRHICLIFPGEIKFQRKREHEPAATTYNSSMSLSIKQSMFIRQSTKLILNLFLQT

SEQ ID NO: 297035 - protein, 99 aa, Zea mays
  Clone ID: MRT4577_33975C.1.pep
REERLLCLVASIRFESSINVCEFVYPSCYQVCQHLWSIYLHVLLFVCFPVHCQVGYRRIGCVPKNLLHIEIDNNVCIIYFYVIVVSSNLIQYLCVVPPP

SEQ ID NO: 297036 - protein, 64 aa, Zea mays
  Clone ID: MRT4577_33976C.1.pep
PVLGRTGCTGGSESAHRKQGCRMMGRRASEGGGRTEVAIRVAVERERARTHAAAASSAIAMVGR

SEQ ID NO: 297037 - protein, 77 aa, Zea mays
  Clone ID: MRT4577_33977C.1.pep
LHRAIGFLEAGRARAARGEMNQPYTTKTAFIVYQALLIYLHLQKHDHYFFFSCMSVHSRGLAQKSNTEYHQTGRLDW

SEQ ID NO: 297038 - protein, 45 aa, Zea mays
  Clone ID: MRT4577_33978C.1.pep
VCRLVKLVHVLHQLTFLLAEEAVGHQVPGRVAEHTEVIGGARLVA

SEQ ID NO: 297039 - protein, 128 aa, Zea mays
  unsure (1)..(128): unsure at all Xaa locations
  Clone ID: MRT4577_33979C.1.pep
PSPTFTHILREGNFLYGEAGPNTIHIPSCPKLXSVFNATLKYKNQMHNTIILSNTNYRTPSFLNLTTHLPXMLXRHKALIAKNFSTTHHNNLSSIVIIPLFFKARDDTYTLILTYHDRYTVHLPTNIT

SEQ ID NO: 297040 - protein, 113 aa, Zea mays
  Clone ID: MRT4577_3397C.1.pep
VPPLENQQSPFGPEARKAFFSRRFPRTPKNGCWGRVRGAFLGPPPVMTENEIGRAAVSKGVETPNFFSGSHRRILGVGKFLPLGGPQNLAPPSPWGISPFAPFRPVNVPVGPG

SEQ ID NO: 297041 - protein, 455 aa, Zea mays
  Clone ID: MRT4577_33980C.1.pep
MRLLPLLLLLLAGAGARASDDPFLSGAANHSYNIDCGGAADFTSAFGRRWLADRFFSAGGAAGMVAEPHRFPQPQERTLRFFPPSSAGKSSCYSLPLPPGRYYLRLFSVYDNYDSKLRTPSFDVSAAATLVLSFRSPWPEPAARYGAYSDLIFPSATEPASDLCFYSLSTDAPAVASIEVSPVHPFGYDGATTGADLVLVNYGRVTCGDSLFGPGFTRDADAFSRVWQADVDFRNNDLSYDAITAGGRKVFGSNQPPNYFPTKLYESAVTTGGDAANEIEYLMPVDTRLSYMVWLHFAEIDAGIGSPGQRVFDVVLAGENVTRIDIFKQVGGFTAFKWTYIVKNLTSSTLSVRLVPVVGRPILCGLENYAMVPLEMRTVPSQVAAMKALKESLKIPARMGWNGDPCAPRAWDAWEGVTCHRGDKGLVITQLDLASQGLKGYITDEISHLKDLVSL

SEQ ID NO: 297042 - protein, 68 aa, Zea mays
  Clone ID: MRT4577_33981C.1.pep
SQKAKPRSLESNVNGLGSEVIDLFIYGLKLMLDQVHLKGCTGLPIMIYKILSKATDDLSTRLFHGLTT

SEQ ID NO: 297043 - protein, 72 aa, Zea mays
  Clone ID: MRT4577_33982C.1.pep
LSFKFLQFPICPLFEFFFFVTKFKTVFWFFFFPPVKKKKKKKKKKKKKKKKKKKKKKKKKKKKKKKKKKKKK

SEQ ID NO: 297044 - protein, 113 aa, Zea mays
  Clone ID: MRT4577_33983C.1.pep
YNIQSKYVNISPPGRWQNSQGNITAMNISTVSSLLAIAVFVGRSDSAHADTPIASLAQPQCPLWKPSLVLVRLPAGTSCPLPPQPPPGLPPWFVLNPLKNDLPKSYEVLTTST

SEQ ID NO: 297045 - protein, 43 aa, Zea mays
  Clone ID: MRT4577_33984C.1.pep
KPYFKFFYGFSCLNLKSPPFDINIRDCRKNGHHIVYLEPNSEL

SEQ ID NO: 297046 - protein, 66 aa, Zea mays
  Clone ID: MRT4577_33985C.1.pep
IYRIPLPPLHGYNIPRYGEQNPCIKTHSKPISPHLLLHHCSFYILLTFYLLSMYKQPSLNHSLPIQ

SEQ ID NO: 297047 - protein, 61 aa, Zea mays
  unsure (1)..(61): unsure at all Xaa locations
  Clone ID: MRT4577_33986C.1.pep
RTYQQGDFILAKVNSLTAMFTXLPFRYYNLPYCQPRDGVKKSSENLCLLLIVDQINNSSYR

SEQ ID NO: 297048 - protein, 65 aa, Zea mays
  Clone ID: MRT4577_33987C.1.pep
CALMYEAINGSNAIAISAYPVTSTVGCKDKPPSNSLASPSALTYLGSSCHWLLAKSHIKQAARVA

SEQ ID NO: 297049 - protein, 60 aa, Zea mays
  Clone ID: MRT4577_33988C.1.pep
EWETHATVLDKLLAWEKKLCHEVKEFEVIKVTYQRKLAVLNKKKQSGASSSSVEKTKSIV

SEQ ID NO: 297050 - protein, 62 aa, Zea mays
  Clone ID: MRT4577_33989C.1.pep
RACPLYSTNVRIGLWSTNVTAGEQLSHRMHQQRFYFTHATDATVYVHHPCSPLFTGTSCPLR

SEQ ID NO: 297051 - protein, 60 aa, Zea mays
  Clone ID: MRT4577_33990C.1.pep
TNKSESIVDLTRLNFLNTQIIVSVELEQIGNKVHNSVGLRYSVGHFAVDFASKMLKANLN

SEQ ID NO: 297052 - protein, 170 aa, Zea mays
  unsure (1)..(170): unsure at all Xaa locations
  Clone ID: MRT4577_33991C.1.pep
RKKHKGKNKKHNRNHKTQTTQNTKPQKQHPKQKKNPKKKPKTEETHTIPRRPKKPHRGPTKQPXKNPSNAIRRAPPRKKREGHKKNPQRRPTTPRGTLQSGPGRXAKPRGGKKNPGGEQPGGPRTREGPPRKGGAPHRNQGPVHNNRHNVRRKYHLQTLNPRGHHPVGHR

SEQ ID NO: 297053 - protein, 52 aa, Zea mays
  Clone ID: MRT4577_33992C.1.pep
MATDNTFLFTWDSSNEGHPDKLCYQFLDAVIDACLAEDPDSKDACETCTNTY

SEQ ID NO: 297054 - protein, 58 aa, Zea mays
  Clone ID: MRT4577_33993C.1.pep
FFFGMEGNEWLYSSSQVRTVAQCLRLPSALRRNLAIMQRHKSCCARMGRRCWGLSTSL

SEQ ID NO: 297055 - protein, 241 aa, Zea mays
  Clone ID: MRT4577_33994C.1.pep
PRVRRNIVKLWCCFHSGDCRLLVYEYMANGSLGDLLHGGKGGLLDWPARHRIMVDAAEGLAYLHHDCGPPIVHRDVKSNNILLDAQLGAKVADFGVARVIGDGPAAVTAIAGSCGYIAPEYSYTLRVTEKSDVYSFGVVMLELVTGKKPVGAELGDKDLVRWVHTGIEKDGVDSVLDPRLAGESSRDDMVRALHVALLCTSSLPINRPSMRIVVKLLLEAAPRARPLESKPKAAEENPLDV

SEQ ID NO: 297056 - protein, 161 aa, Zea mays
  unsure (1)..(161): unsure at all Xaa locations
  Clone ID: MRT4577_33995C.1.pep
MRDMGRDGNGTSFXQLSGKTREELDKVTXDLPKKHGRGGQXGMRAAGVGREKLHTHVRKTNELATQELMNXPALAHATGGRLILAGNADLKTELSQADMXDQRVQPRILKEADVLRGGRKRLXQTIDRYAEKLAKEKYIQEKKLRGEHLEESSQDTAKYAL

SEQ ID NO: 297057 - protein, 118 aa, Zea mays
  Clone ID: MRT4577_33996C.1.pep
PLFFFFFWGGWGVPYTPALGAFEKNTPSSIRPDHYSHKVPLPYLNCPYLPTFTLLESTHLGKPRYNSVYHPISIPLPLQILLHDHHYNLLHQHSPLIELRAQPFTLLPTISITSLNST

SEQ ID NO: 297058 - protein, 70 aa, Zea mays
  Clone ID: MRT4577_33997C.1.pep
LLSIFIHPYKRISGGFFVFSNVSFLPFALLSTTQKKRLSFHRRTPHLTHRLWAAGGLRSITPLKKIPPEP

SEQ ID NO: 297059 - protein, 48 aa, Zea mays
  Clone ID: MRT4577_33998C.1.pep
LNLIRKILKPWDVRRQLHSSLYIICPISTAKLVKHPIPSLKHSCSQVV

SEQ ID NO: 297060 - protein, 358 aa, Zea mays
  unsure (1)..(358): unsure at all Xaa locations
  Clone ID: MRT4577_33999C.1.pep
MAMPTLRLAPDLPPVSRLCFGTMTMGEQSGAACSLRLLDAAYDAGVNFFDSAEMYPVPQRSETRGRSEEPLGGWLRVRRAPRDSAVLATKVAGPSGQMTWIRGGPTSLDSRNIAEAIDGCLRRLGVDYIDLYQIHWPDRYVPMFGETEYDPNCQYTSVPMEEQLEALGRAIDAGXRYIGLSNETPYGLMKFLQLSKDSQLLPKLLTLHNSYNLLCRNFDSGLAECCHHERISLLAYSPMAMGILSGKYHLSDNCGPPDARMNLFKGRYSEGESRYKLQSPKVKAAVKEYTQISAKYGISPVTLAIAFVLRHPLVASAVFGATKLWQLDEVLQATTVHLCEEIVAEINDVHARYPNPCP

SEQ ID NO: 297061 - protein, 165 aa, Zea mays
  unsure (1)..(165): unsure at all Xaa locations
  Clone ID: MRT4577_3399C.1.pep
LQFYQDALPRTIFQARAICTHADRNNXPELTECQGQPSRQASTCVTSFRIQAEDNXHTAAMNTILFQVLITPMLGSTTDHKIENENLDKLKNALXADNEPLTKCKYLAEHFLNLDHQNHAAVTLCCVXAPYPSSVYLYPCVQSXWSAMIERSPVQKDLDLDDPSA

SEQ ID NO: 297062 - protein, 59 aa, Zea mays
  unsure (1)..(59): unsure at all Xaa locations
  Clone ID: MRT4577_339C.1.pep
NTWRISTNGSTTACSDAQKXYQWPVTCHKPRTTSRYDNNLFLVTTDTKRNTSPCRHILH

SEQ ID NO: 297063 - protein, 62 aa, Zea mays
  Clone ID: MRT4577_33C.1.pep
MSGISLSDAIRDSIHALGPTIFTNQNPQLAEVTGDSVLAAPRREDVVPLPRPRAVHGRRRVG

SEQ ID NO: 297064 - protein, 58 aa, Zea mays
  Clone ID: MRT4577_34000C.1.pep
KVQFLDMKQHLTMPVREFCNRLFSKFHTSTSQSACIKLVLLHSVFHLSIELLTQFWFY

SEQ ID NO: 297065 - protein, 82 aa, Zea mays
  Clone ID: MRT4577_34001C.1.pep
MEETAAAAPAEKASSYRYWVREATGDAAPLPVPRKLDPAANGNGNPPPLGSVWNQVSHAPHLVSSHHLHLSVYPCWIGEGTV

SEQ ID NO: 297066 - protein, 86 aa, Zea mays
  unsure (1)..(86): unsure at all Xaa locations
  Clone ID: MRT4577_34002C.1.pep
IPVQTAEPQSESSCXEYTQISAKYGISPVTLAIAFVLRHPLVASAVFGATKLWQLDEVLQATTVHLCEEIVAEINDVHARYPNPCP

SEQ ID NO: 297067 - protein, 179 aa, Zea mays
  unsure (1)..(179): unsure at all Xaa locations
  Clone ID: MRT4577_34003C.1.pep
LRLLDAAYDAGVNFFDSAEMYPVPQRSETRGRSEELLGRWLRARRAPRDSVVVATKVAGPSGQMTWIRGGPTSLDSQNIAEAIDGCLRRLGVDYIDLYQIHWPDRYVPMFGETEYDPNCQYTSVPMEEQLEALGRAIDAGXRYIGLSNETPYGLMKFLQLSKDSQLLPKLLTLQVSSAV

SEQ ID NO: 297068 - protein, 166 aa, Zea mays
  unsure (1)..(166): unsure at all Xaa locations
  Clone ID: MRT4577_34004C.1.pep
ASPSSSSSFLRRPLLCRRPHPIFFLIGYLGVHRPMPLTNTLHRMGAGEGLPSHRRARRARARYXLGHTGRTHRGAAGDESYACVTQDEDXLGQXGASLCRGLMSGAAYALRSNITGLGPPVLPLAEQLRFLAAACSAESAAPSPTSPDCNLPLRNLCIHAARPGVL

SEQ ID NO: 297069 - protein, 98 aa, Zea mays
  Clone ID: MRT4577_34005C.1.pep
KPSTAQTGAQPKNLPLGKTGPAFLFPKKKTPGPQNLPPEPNGHGPPFFLNPWGGEFIPGHPTLGQNNSFPGLKGLFLGLFPKWQLMFQPGPVERVPPI

SEQ ID NO: 297070 - protein, 99 aa, Zea mays
  Clone ID: MRT4577_34006C.1.pep
KLLCIRRKFFPGQKKPISPVKGVPLIKGGTDKFSVTIKKRLGNKALEGVIQFHFTKYDLGEHKKKKSGPGFKFTLWGGGRGNTSRWGEPNHHFEGMENS

SEQ ID NO: 297071 - protein, 419 aa, Zea mays
  unsure (1)..(419): unsure at all Xaa locations
  Clone ID: MRT4577_34007C.1.pep
MDLAPQGLITQQQKANERRPVGSSQIWTRYGVLLPSQQTRKLKEWILTDEQQQLVNASGLGHLALTTGFTIDRSLLTSFCERWNNETNTAHFMGFEIAPSLRDVSYILGIPVTGHVVTAEPIGDEAVKRMCLHYLGESPGNGEQLCGLIRLTWLYRNFHQLPEHPTINKIAYSTRAYLLYLVGSTLFPDTMRGFVSPRYLPLLADFGKIREYAWGAAALAHLYRGLSVAVTPNATTQFLGSATLLMAWIYEYLPITQPQQKNQSTLLPRACRWNXWRSNTWTEKKVMDWRKVFEQLQFSEVNWNPYKDMNPAIVPEYCIAADNICYSRTWLISFNIKEAYVPDRFARQFGREQGRLHGVPMWTRRTXGVSGKTGGLSMLVRLRSSINWLAAISPLLRKPISTPFHYMSLVLDRMMQDAV

SEQ ID NO: 297072 - protein, 196 aa, Zea mays
  unsure (1)..(196): unsure at all Xaa locations
  Clone ID: MRT4577_34008C.1.pep
AFLGHSSRLGRTASPTMRSLKAEAKGEWLPGLPSPYYLDGSLAGDNGFDPLXLAEDPENLRGFEHAELVNGRXAMLGVADMLIPEVLTKAGLINAPQXYDAVKSEYFASSTTMFVDEYILIHYWEIRRWQDIKNTCSVKHDPIFKRYXLPPHESVYPRSVFNPLKFAPTLEINEKVLVNGRLEMLAFLGFLMQHNV

SEQ ID NO: 297073 - protein, 83 aa, Zea mays
  unsure (1)..(83): unsure at all Xaa locations
  Clone ID: MRT4577_34009C.1.pep
LXSSKRPPFGFVFLKKKFFFFFFFLSLKALDWKHFSQNMGRPQTDNNFYPIHKMCQTTGGGGFITTTKKAXXNPPNNKLYNTL

SEQ ID NO: 297074 - protein, 176 aa, Zea mays
  unsure (1)..(176): unsure at all Xaa locations
  Clone ID: MRT4577_3400C.1.pep
CILQYPSLQLEFLGSYLSELSLLDYGLIRSLPSLVAASAVFVARLTLDPHTHPWXISICLISIHSCLIKYKPPTHFVMNGLQSKKMQTLTGYKPSELKDCVAAIHNLQLNRTCQSMVAIREKYRQHRVSLGFDSCTWLLDCLHNSSVLTVEKSLNSSRVYQLCYLLLRSLHHTSIH

SEQ ID NO: 297075 - protein, 50 aa, Zea mays
  Clone ID: MRT4577_34010C.1.pep
FKTIIGLLRIILLLLKIDPYSELSCSIFSSPIILSNIAQDTRHINSFDRL

SEQ ID NO: 297076 - protein, 162 aa, Zea mays
  Clone ID: MRT4577_34011C.1.pep
GPGARVAPSLSRRVPLDAVVVDPLLLLLLADAPASLQQRHLISSMHEQQQPGSPRVACADPICAAPTCDITIPLVPRCPAPLDSLNIKSIKCAFKYVCKLAALRRCRASRVACSTKIPSPWTAHVQLKSDWPGCLMYVYFTHCDLVDGVFICVGVMKKIKEM

SEQ ID NO: 297077 - protein, 60 aa, Zea mays
  unsure (1)..(60): unsure at all Xaa locations
  Clone ID: MRT4577_34012C.1.pep
IFAYLRPFELIPPILGAXXLVPLSLTSILKFXXSVPKFLXVTXLFRXRAXHPWLXREVFS

SEQ ID NO: 297078 - protein, 199 aa, Zea mays
  Clone ID: MRT4577_34013C.1.pep
MATTPPGFTGNLKKALAGLRRISLDGLRWRVFDAKGQVLGRLASQIAVVLQGKDKPTYAPHVENGDMCIVLNAKDISVTGRKMTDKIYYWHTGYVGHLKERRLKDQMEKDPTEVIRKAVLRMLPRNRLRDDRDRKLRIFSGNEHPFHDRPLEPFVMPPRQVREMRPRARRAMIRAQKKQQANRAKEEEDAKNVAAEVTA

SEQ ID NO: 297079 - protein, 72 aa, Zea mays
  Clone ID: MRT4577_34014C.1.pep
FLFFWFYRRVIRWGMPVFLFLWQIDDLCWGRKSLVRRCPLFFFGLFVRQNRRFGCLPCKMDALKTCLWVPRS

SEQ ID NO: 297080 - protein, 162 aa, Zea mays
  Clone ID: MRT4577_34015C.1.pep
VLGRLASQIAVVLQGKDKPTYAPHVENGDMCIVLNAQDISVTGRKMTDKIYYWHTGYVGHLKERRLKDQMEKDPTEVIRKAVLRMLPRNKLRDDRDRKLRIFSGIEHPFHDRPLEAFVMPPRQVREMRPRARRAMLRAQKKQQANRAKEEEDAKNAAAEVTA

SEQ ID NO: 297081 - protein, 62 aa, Zea mays
  Clone ID: MRT4577_34016C.1.pep
ISIRLLLSQPFSASSTIMTASFINSIPRSWCLICESLDFRGWYWITTALWSLRSYQRLCSML

SEQ ID NO: 297082 - protein, 160 aa, Zea mays
  Clone ID: MRT4577_34017C.1.pep
MGVPPRDDDDDPAGHGRPRPRDDDRPPPACPPPPETTTTSAAGPSALAGDPNVWGPDAGEFRPERFLDGSKRSKVDVRGQDLELLPFGAGRRMCPAHGLGLRMVQLVLANLLHGYVWRLPGGMAPEELSMEEKFGISVSRMHQLKAIPDPRLPHHVYFGP

SEQ ID NO: 297083 - protein, 76 aa, Zea mays
  unsure (1)..(76): unsure at all Xaa locations
  Clone ID: MRT4577_34018C.1.pep
QISGETDXAEWXLNYIKEKAPELLSVVACSEVSDSSKGSAEKMCHELGSPFLGKVPMDPQLCKAAEXGGHLCDQNA

SEQ ID NO: 297084 - protein, 478 aa, Zea mays
  Clone ID: MRT4577_34019C.1.pep
MGRAFVYVILGGGVAAGYAALEFARRGGYSRGELCIISEEAVAPYERPALSKGYLLPEGAARLPGFHTCVGANDELLTPKWYKEQGIELVLGTKVISADVRRKTLLTGTGETISYKTLIIATGARALKLQEFGIQGSDASNICYLRNIDDADKLVSVMKSCPGGNAVVIGGGYIGMECAAALVTNKIRVTMVFPEKHCMGRLFTPKIAEFYENYYTSKGVTFVKGTVLTSFEKDTTGKVTAVILKDGRHLPADMVVVGIGIRANTSLFEGQLMMSTENGGIKVNGQLQTSDSSVYAVGDVAAFPIKLFDDDIRRLEHVDSARRTGRHAVASILDPSKTRDIDYLPFFYSRVFTLSWQFYGDNVGEVVHFGDFTSSSPRFGAYWVNKGRIAGAFLEGGSREEYEAISIAVRREAVVTDMGELEKQGLALAIQESQKEVPDSGLAVVGKPTYAWHATAGVIAAVSIAAIGYWYGRKRRRW

SEQ ID NO: 297085 - protein, 131 aa, Zea mays
  Clone ID: MRT4577_3401C.1.pep
SNVPHVVLLSAVSARFLSAMLALVYIDSLSERIPRCRWFAHGFLMCVPRVTIRQGASSISRSATSCSMGRYAHCQSVSWRFLVEALNDLRFSFWRGSASFVPSEAILVWRTNAMGVLDSDRSEHSRSENCR

SEQ ID NO: 297086 - protein, 116 aa, Zea mays
  Clone ID: MRT4577_34020C.1.pep
PRAGRERYHKRGEETRFSALRLSPQFGDYCISYCRLCTSTPSRRYHEASHVIPRRPSRPYIQKPWLRTSTEHEHGIQADGCMDGDQTDGGIDDACDSYFEVTADAGEVVLSCLCGP

SEQ ID NO: 297087 - protein, 172 aa, Zea mays
  Clone ID: MRT4577_34021C.1.pep
MDQKKKINELIETINEKDDILESQEDLLVKENKKFVKLKNAYALEVEKCENLTKELKICNDSISCLRTENDDLIAKIEELNASNVSTSTVEHVTICTRCRDINVDAMNDHIAIIKEENDHIAKLNAKIAEHDMLYNGRRHGIKDGIGFQQGSQTNIKLNASKNRLSNFLRVR

SEQ ID NO: 297088 - protein, 113 aa, Zea mays
  unsure (1)..(113): unsure at all Xaa locations
  Clone ID: MRT4577_34022C.1.pep
PPTPRRKRKEPGGGPLPXGGPMGGKGTPPGPXGLKQSGEKGKSRPRNXWGNPRXPPSPMGKPGPREGNPPPXGGKGPANTRPDGPQGXNGPKNPPKGGPPGPQTCMVYFPFSG

SEQ ID NO: 297089 - protein, 352 aa, Zea mays
  Clone ID: MRT4577_34023C.1.pep
MSRLLPRRRHPSCTSTASLSELASLLDAGRFHRAVDLAKSLLSSHPPAANVPDLYQALAATADTKDGPRARPHSFLCDAASALVVSSARLCQPDGALRLLSLLASAGDGACAGEVCSPLPSLSSCNLLLESLLFVGRHADVRAAFGLLVAAGARPDTFAWNKVVQACVAAGDLDVALAMLRRMGRSEGAPPPDAFSYNVVIAGLWRSGKGSDALKVFDEMVDMGVVPNRITYNTMIDGHVKGGDLEAGFRLRDQMLHDGPKPNIVTYNVLLSGLCRTGRMDETRALMDEMASHSMFPDGFTYSILFDGLTRTGESRTMLSLFAESLKKGVMLGAYTCSILLNGLCKDGKVAK

SEQ ID NO: 297090 - protein, 128 aa, Zea mays
  Clone ID: MRT4577_34024C.1.pep
GWRSAPLCRCPRRALSFGLVVRAPVPWLAPLVPRPRCRVPCAPPRWLRAGGPRVRCGAARVWARAGPPGAPPGAPVFAVVVVVCLGACRLAASACVSAAGRGRRRGSRGGCCRGVSARVFPPLPWLSV

SEQ ID NO: 297091 - protein, 835 aa, Zea mays
  Clone ID: MRT4577_34025C.1.pep
ASELRSLYAAVSSRLDDAGGRHQPRSARRRTTGHLPSKRRRRGAGEVGPGDDDGLPARKQSRRVRRRRELAANPAEGFSVAGDGARRLRTHLWYAKRFSMERRWTFILPVGAQGRGKGSRSVLKRLKNGTTIHDAGYFIPIELDGPEDALLSVLRMVLRPSPAEKTPDLKHLQDQVMRGVCYENAMLWDVRSMHSQIVGPVTYMWRPFSRADDKSGIEGDQCTSHCIHDESGNSSRRQLWIWIHPAALDDGISAIQFACERQIQDSGGVVKCCSLEGKIGRLEVNGCKAMQSLKKILHPTSSSKINTISTSDISASTDTLLDSCIASHLLKASVISNAEILQPGAILSMVVHDPREVSVKGIDSSKIVSHDKQSEVLEEDVAPNANEASSEVANILPLMWMHPGKHDILLSDCRELWDSRQTINPPVSDEVLCKEKHSERIKFFCLDSGNDQEQTTQEKDNFIRSCPVILLKHAREGIPSLGWSIILPLSWVKPFWLFLVSHGAHAIGLRERRWIAAKLRMPCFPYDYPDSKAYASYMSKEAAGFDKVVERRPVAKRPPRVPVPPLWHCIMTCFRKDYDGILGVLEVDDLVRANMVLPKNSSAHCESGDAEPSQANVASLQLHVPRTTQMLRQYVEEFDRKYLSSSSDMKVDSDEPNLASDNTVGMTRFASELCLTRVLIRAFKEGSFEEGAVVCAPLPSELSAWKIRSKEEEEECVEKWELQLPQSHVSSYFSWFDPSTSSLQLPTDGVAREAFRWPIGFVTSGFIHGSNGQDAVAVAFCEAKLLAALRRQQWTHGNLQSREVCVLVRNARSAAYRRALATTVLEHQESDLAFL

SEQ ID NO: 297092 - protein, 89 aa, Zea mays
  Clone ID: MRT4577_34026C.1.pep
FLTFYFTILLIITKKNLPITHPHLLSTNPTIYSMFATTKSHPCPLLLLEHHLLPTNQNYLSYFLSYNHTLSLIKINFPSNFTSFTFLSI

SEQ ID NO: 297093 - protein, 74 aa, Zea mays
  Clone ID: MRT4577_34027C.1.pep
AIPTRPVADTALLQRKPLGPGKPAQDRCLHAAAARTTSTRGGAAGGQTALLHPFRDDGILREAVEPPAATTGDV

SEQ ID NO: 297094 - protein, 113 aa, Zea mays
  Clone ID: MRT4577_34028C.1.pep
AAPPWCVHAVGKCSRGTLSHTSVLALDTPVSSSPIVLGFGHRLTVSTHLQPMPPPSILPSTGRPSLSPPPCLRTTLLFVQHHWSSICQPRWSSSGEPPTILAMACIPCAQLNV

SEQ ID NO: 297095 - protein, 76 aa, Zea mays
  unsure (1)..(76): unsure at all Xaa locations
  Clone ID: MRT4577_34029C.1.pep
LYPPFPSAGFFFLPFPCGLFLCLSLLTSCCGVCDLVFPLLVLGVGPPLLVFPRVLLGRPVKMPPFQKQLQWRKXXN

SEQ ID NO: 297096 - protein, 234 aa, Zea mays
  Clone ID: MRT4577_3402C.1.pep
MENSAAAAAERPRLTRAAAKRSAVVTAVAVAAKRKRVALSQLPTLPNAVLGAHDDDDDKPVRKQRLLPAAKPKPKPKAAPAPAAPAAADDTDDDIQLCKPYASDIYSYLRSMESQAKRRLAVDYIAAVQIDVTPNMRGILIDWLVEVAEEYKLVSDTLYLTVSYIDRFLSAKVLNRQKLQLLGVSAMLIASKYEEISPPNVEDFCYITDNTYTKQEVVKMESDILNVLQFEVGS

SEQ ID NO: 297097 - protein, 142 aa, Zea mays
  Clone ID: MRT4577_34030C.1.pep
KLSLAVYMTRLFHQIVTDSTNICDLEPIGQKNRMQIYVLSHETCQLQKSCHVIEATINHAVQEATNTLHLDHPGSSQALYCSASSEAPVVQPEFLHGSSSLYIVCSCQDRSSLFWSSRVPMCPVYLNLNAPFLSPCSLLSAA

SEQ ID NO: 297098 - protein, 62 aa, Zea mays
  Clone ID: MRT4577_34031C.1.pep
GGFFDYMVGFYCDLRRPICWGELKTPGRIQSTRQLVSVPGQPSARNTLGDRHRKKAHRQAAR

SEQ ID NO: 297099 - protein, 136 aa, Zea mays
  Clone ID: MRT4577_34032C.1.pep
EHSVFLALMPPPSRMTTVPQGVVGLRKMRRALKVLERGSRRLGRCRGGFPGGAGLAGRGEGGSVLCQEGPQPPAREPVGSGRRSQAPPPCRGLPAIRRRGARHSVEVRDGGGPAETAGRRGLLALWTGPGRPRGTQ

SEQ ID NO: 297100 - protein, 73 aa, Zea mays
  Clone ID: MRT4577_34033C.1.pep
MANSSSGLAVNDQCKVNFRELTSRRSFWFIMCRIDYTDMEIKVDLLGGPNQCYGHFTDSLPAKECRYTIYDLD

SEQ ID NO: 297101 - protein, 162 aa, Zea mays
  unsure (1)..(162): unsure at all Xaa locations
  Clone ID: MRT4577_34034C.1.pep
PPPPPFKDPPPFFXKPPPPPGKNTPISLPHRGAPGAFFFFFLPKKAPPPQILGRRYKPPGPFPSXKQNRRYGSLFRSFSPPPLFSGGKLTTPPPPHLVTSPPPPKSGCFPRRFFWGGPQKTNQALGFCSPAPAFFFFGVPSAEPRKLWCSLCSLFCPGFSSV

SEQ ID NO: 297102 - protein, 81 aa, Zea mays
  Clone ID: MRT4577_34035C.1.pep
GRERMSYVMSDAVRSGRHHRGDSARAPIRHHHLGNVCCHGKPLIGRPGLNDGDVFFWESVKKLSISLLLQVLDCEKPPLLI

SEQ ID NO: 297103 - protein, 303 aa, Zea mays
  unsure (1)..(303): unsure at all Xaa locations
  Clone ID: MRT4577_34036C.1.pep
MATEVAETPAPLAEAVPETPAEAPAAPAAEAKPTKAKKASAPKKRANPTHPPYAEXCSLCATLACTHVVYVASGSDGIVDGLLVXMISEAVTSLKERTGSSQYAIAKFVEDKHKDKLPPNFRKLLLGQLKKLVAGGKLTKVKNSYKLPARAPAAAKPKPKSKTAVKKPKAGAKKPKAATKPKPKPKAKSPAKAKPAAKPKAAAKPAAKPKPAAAKPKAAAKPKAKPAAKAKPKAAAAKPKPAAKKAGRPAKAAKTSAKDTPGKKAAPAKKPAAAAKKAPAKKAAPAKKAATPSRKVPSRKAKK

SEQ ID NO: 297104 - protein, 103 aa, Zea mays
  Clone ID: MRT4577_34037C.1.pep
SPETAPQGGGGFCSLGAQKGHRVRPCAPSGGGQGPGDRRARVAGYSLARVHASMTRDFFVQYATVITGVSLCGGVCLERSPVRSYQLLSRGRVRSGLRVTWAK

SEQ ID NO: 297105 - protein, 105 aa, Zea mays
  unsure (1)..(105): unsure at all Xaa locations
  Clone ID: MRT4577_34038C.1.pep
IRAFGEALKGVPQGLGEKSGLSPIYTLTSVKGPQVKGSHPPCGINFKDVGPPPIKKKKVFXTLFGKKQKIFFSPQGGKMIFKIADVFSPSQVFRKKRTDGFFGYG

SEQ ID NO: 297106 - protein, 225 aa, Zea mays
  Clone ID: MRT4577_34039C.1.pep
MYALSMEYSPFFFFPINWVFVSSSGIRFSNLYCDPQIIPGGHKITARQRWQPTPMQLQILENIFDQGNGTPSKQRIKEITAELSHHGQISETNVYNWFQNRRARSKRKQAASLPNNAESEAEVDEESLTDKKPKSDRSLQDNKAMGAHNADRISGMHHLDTDHDQIGGMMYGCNDNGLRSSGSSGQMSFYGNIMPNPRIDHFPGKVESSRSFSHLQHGEGFDMFG

SEQ ID NO: 297107 - protein, 53 aa, Zea mays
  Clone ID: MRT4577_3403C.1.pep
LGPAAFAPGGAIFAFPAGSCCVGFNAGLIVVVAFQNQGTQSGLKGLGIQKRGS

SEQ ID NO: 297108 - protein, 81 aa, Zea mays
  Clone ID: MRT4577_34040C.1.pep
MQKNGAEPTNRMFRLWSASPKRNSRKNRTQATPGTLTTNRKRTEMGRGGGGCKSTHYLQKRKGEKKKRTTHLICQNTMHKH

SEQ ID NO: 297109 - protein, 273 aa, Zea mays
  Clone ID: MRT4577_34041C.1.pep
MEWVDRTKASAAAAAAAADERAGGAEGLAGYVKVMTDEQMEVLRKQISIYATICEQLVEMHRALTEHQDTIAGIRFSNLYCDPQIIPGGHKITARQRWQPTPMQLQILENIFDQGNGTPSKQRIKEITAELSHHGQISETNVYNWFQNRRARSKRKQAASLPNNAESEAEVDEESLTDKKPKSDRSLQDNKAMGAHNADRISGMHHLDTDHDQIGGMMYGCNDNGLRSSGSSGQMSFYGNIMPNPRIDHFPGKVESSRSFSHLQHGEGFDMFG

SEQ ID NO: 297110 - protein, 108 aa, Zea mays
  unsure (1)..(108): unsure at all Xaa locations
  Clone ID: MRT4577_34042C.1.pep
IHIQGTVLEDXHRSNSPPHLGYILVKRHDPSEHGFRHHPPIAKKSMLVHSFVTRFPSSLGTLAVPNAILHLALLAWLSSXRRLRWSPLXGRVGATHAWRGVVFGAAWS

SEQ ID NO: 297111 - protein, 121 aa, Zea mays
  Clone ID: MRT4577_34043C.1.pep
KGRVRRRFKATRFFAVEFTPSPQRESSNSPTVHKKNLAAITPNPTSNPQHASSLPPRSSYQKKETAGPARREMGYKAMPRRNVLWALNNAEANGGTTSVPRMEAAPMIKFSGRQDVERLLK

SEQ ID NO: 297112 - protein, 195 aa, Zea mays
  Clone ID: MRT4577_34044C.1.pep
PKVLFNWLSIVWRPFRFPRLSRCFSNSAAALPRSPPAVPSAVARKLCIASPASAPAAASGSVLSAWWGGLHRSNKGRVRRRFKATRFFAVEFTPSPQRESSNSPTVHKKNLAAITPNPTSNPQHASSLPPRSSYQKKETAGPARREMGYKAMPRRNVLWALNNAEANGGTTSVPRMEAAPMIKFSGRQDVERLLK

SEQ ID NO: 297113 - protein, 348 aa, Zea mays
  unsure (1)..(348): unsure at all Xaa locations
  Clone ID: MRT4577_34045C.1.pep
MAAPDVLPSAPRPPDPMMKAVSLPRVEKGSVFGKRLMLAYLKCGDLGEARTVFDGMPPQAADVRVRTSLMSAYAKAGDLQKVVLLFRQMXCCGVSPDAHAVSCVLKCVASLGSLTNXACAVANALIAVYSRCGRMEDAKRVFDSMHPWDAISWNSMIGGCFSNGWHGTAVDFFSKMWSQGLDSVQSGIDDAALGSKLVFMYVKCGDMGSARRVLDAMSSKGNVHVWNLIMGGDGLVAHGYIVKLGFRAECAVCNALISFYAKSNMIGDAVLVFDIMPRQDTISWNYVISGCSSNGLNSEAIELFIRMWTQGHELDLVTLLSVXLPACXQSRYWFAGRVVHEIFLTTSC

SEQ ID NO: 297114 - protein, 526 aa, Zea mays
  unsure (1)..(526): unsure at all Xaa locations
  Clone ID: MRT4577_34046C.1.pep
MATPPLSSVSTHHRAPPPWPPPKTATSPRITFRCSVLAAPAGRVLEAPTAAPSSWSTKNPPSQALSSDVNLRIQRLCQAGDLAGALRLLGSDGGVDVRSYCTVVQLCGEERSLEAAKRAHALIRASSAAATGXKGSVFGKRLMLAYLKCGDLGEARTVFDGMPPQAADVRVRTSLMSAYAKAGDFQKVVSLFRQMQCCGVSPDAHAVSCVLKCVASLGSLTEGEVIHGLLEKLGLGQACAVANALIAVYSRCGRMEDAKRVFDSMHPWDAISWNSMIGGCFSNGWHGTAVDFFSKMWSQGTEISSVTVLXVLPACAGLGYGLIGKAVHGYSVKSGLLXGLDSVQSGIDDAALGSKLVFMYVKCGDMGSARRVLDAMSSKGNVHVWNLIMGGYAKXDGLVAHGYIVKLGFRAECAVCNALISFYAKSNMIGDAVLVFDIMPRQDTISWNYVISGCSSNGLNSEAIELFIRMWTQGHELDLVTLLSVXLPACXQSRYWFAGRVVHGYSVKTGLIGETSLANWIHCSCC

SEQ ID NO: 297115 - protein, 43 aa, Zea mays
  Clone ID: MRT4577_34047C.1.pep
HVGVGRASNGGRRESCLLFSEGATNRFPRLLRRRWRASVRVVS

SEQ ID NO: 297116 - protein, 110 aa, Zea mays
  unsure (1)..(110): unsure at all Xaa locations
  Clone ID: MRT4577_34048C.1.pep
MLDEDVIFAELSKRISLLITDDDKGADFSAAQIIPDAAAVAATLHGICVTRPCVVTXVAAVATGVHAVPHTTTVSATEWTTAPWRRVNSCSAETMSPLCSSHDPRPGPLT

SEQ ID NO: 297117 - protein, 39 aa, Zea mays
  Clone ID: MRT4577_34049C.1.pep
LAYSGLKSKKLHIRISYTENHYERFFTVNSVHHLRAKRI

SEQ ID NO: 297118 - protein, 180 aa, Zea mays
  Clone ID: MRT4577_3404C.1.pep
LPKNRVIGSGTNLDSSRFRFLMSQRLNIAPTSCHGWIIGEHGDSSVPVWSGVNVAGVRLRELNPNVGTDSDPEKWNELHKEVVNSAYEVIKLKGYTSWAIGLSVASLASSMLRNTNNVHAVSTLVNGEHDIKEEVYLSLPCVLTANGVSHIVKQILTESETSQLQKSAALMHQVQQGLKW

SEQ ID NO: 297119 - protein, 100 aa, Zea mays
  unsure (1)..(100): unsure at all Xaa locations
  Clone ID: MRT4577_34050C.1.pep
MQWPTFFIVAPKKNLVAPILKPWDXEKPXVTELNAIRANPLFLSYSYTEKAPNGTPSQKWHYLNGEWDPPCSGPLNSAGXVGSPHLXASLAFALRPAAFP

SEQ ID NO: 297120 - protein, 344 aa, Zea mays
  Clone ID: MRT4577_34051C.1.pep
MECTCIGHKITKTLRNGPRAHFPFRHKARLVVKGYAQHQGIGYNEVFASVARLEDVRLLLALAAWEGWQVHHMDVKTTFLNDDLQEEVYVKQAPGFAQPGQEHKKFKSQMSDVFKMSDLGVLSYYLSIEVKQDELGITISQERIQKLSGKLIYLVNTRPDLAFSVGYVSRFMEIPHEEHLIAVKHILRFIAGTRDWGLFYPKRNGGKAKLMGFSESDLAGDQDDRKSPSGVLFFLGDSPISWQSTKQKAVWLARLLAEMSGSVVSKPVLRVDNKPAISWIKNPVHHERSKHIDRRFHLIREYANSGQIEVRFIRIEEQLGDILTKPLGKLKFRELCMKIGLRSV

SEQ ID NO: 297121 - protein, 54 aa, Zea mays
  Clone ID: MRT4577_34052C.1.pep
GPRASSYLQRSMCLTRIRTRSSISGARRSCRSSPTRQGPRVRLNVRARGYARVR

SEQ ID NO: 297122 - protein, 103 aa, Zea mays
  Clone ID: MRT4577_34053C.1.pep
RGGLNLLRGKFNPFFVGRVPFFVVVEKFPAPPKAVPFLFLRGTPGTCYFVQLTRGLNGRNLPAILLQRLFLFQPNLKILPLKGGVVGLPCNQPPGHLQWKLPN

SEQ ID NO: 297123 - protein, 350 aa, Zea mays
  Clone ID: MRT4577_34054C.1.pep
MVQIVEHRAETSVDFLVEEGAVSSMPLVANRLVPGTTVVHVAQQHTAAQTSRTLPRTAPGALSVARELLHQPPSSIASLGAMRQWREDIDRLLGLAHSGSTKSRPRAASTKDLRAELNRRRAAEDAPVSRERSNDLRAELNRRRAGEDARVSLERTRERRHNIEGRNLDKDFAAVAPQTPVGARYQVGVPLAGEGCATLADHLRAVSWPSKFRPHLPEKYDANFASAYQQHGMEAHLHAVRQEAGETLRTFISRFTKGVRDEKMLEKLATHDVETVSTLFALADKCARAAEGCAWHSAPQTGAAQAGGPGAIAQDGKKKKKKNRGHEKPYSSALVVAAATGGRGDCNKRP

SEQ ID NO: 297124 - protein, 38 aa, Zea mays
  Clone ID: MRT4577_34055C.1.pep
KKKEKWQCCCVECNIAGFVIIGSVTNTPKETFRNYWDL

SEQ ID NO: 297125 - protein, 56 aa, Zea mays
  Clone ID: MRT4577_34056C.1.pep
FSFEFNIRILFFEIIVYKDEGKNYSLCKRLKQFKNYYCCSFVCIIVHILLYYLLVY

SEQ ID NO: 297126 - protein, 57 aa, Zea mays
  Clone ID: MRT4577_34057C.1.pep
SPVTNHAPLRRCLLLVVSSGAKGYECWAVSPPLAMVTVPSKRESYWSLRTASWMWRG

SEQ ID NO: 297127 - protein, 58 aa, Zea mays
  Clone ID: MRT4577_34058C.1.pep
RPNSKAITHYLQPQLTAGVWQRSSGTSQDCSFDTIVGLVTVTSILDVRLYIRPTATCR

SEQ ID NO: 297128 - protein, 99 aa, Zea mays
  Clone ID: MRT4577_34059C.1.pep
VWPHTPLLYSVGIPKTASTTTFPPLSWASALPRCATLRPPGGPCTCRAALEKGTDRGRASQGIGGEERGDREPSVWRLRQHSGSASGTPSSASAGAARA

SEQ ID NO: 297129 - protein, 77 aa, Zea mays
  Clone ID: MRT4577_3405C.1.pep
SCEVSIGDGVVLTLGYFFFFCFPFIHISLLNKLPELFFHKLVLKFFSGKKWWGGKPSEMLVENLNFAVCSIKIFPPI

SEQ ID NO: 297130 - protein, 56 aa, Zea mays
  Clone ID: MRT4577_34060C.1.pep
AVWLFALPAPVQEFLHALIQRASSTTAWSKPSLRKEELLRLAVQVMQHGDLAPSAG

SEQ ID NO: 297131 - protein, 43 aa, Zea mays
  Clone ID: MRT4577_34061C.1.pep
AEISALSYLCVSARANSALCCIASNDKYPELTEEQSEKNSQES

SEQ ID NO: 297132 - protein, 50 aa, Zea mays
  Clone ID: MRT4577_34062C.1.pep
IQRRRLNEAHRVDRPTPCRLIADRRTRLHQCEEMHEFGSGSFINLSTVYS

SEQ ID NO: 297133 - protein, 101 aa, Zea mays
  Clone ID: MRT4577_34064C.1.pep
KNWGRSPPTKPASGGRRLPAYKKRGARVMAPYFFWGKTKTKFFLEKPNYLPMEMESLFRAKRAKGELGVAGAPKCMGFNFGGGGGPLGALRGRAQQPNPGS

SEQ ID NO: 297134 - protein, 78 aa, Zea mays
  Clone ID: MRT4577_34065C.1.pep
KSLSTLTFLSKTFKQNKAFLFPSLNLTKSSKIIHLSSNPFKTPNRNNNLITFAFHLIMRQKISLTLFFKQTGKTLPHF

SEQ ID NO: 297135 - protein, 64 aa, Zea mays
  Clone ID: MRT4577_34066C.1.pep
LVKRRVEEQPCIRRRRSWRRELLRLLVSRGSPRKVSFNLTASWSVGRTRTLSAHLLTKPLPWCA

SEQ ID NO: 297136 - protein, 69 aa, Zea mays
  Clone ID: MRT4577_34067C.1.pep
SAMEKKRHGIKTIGELFDTLKEASESLPDFKKDDHKAADSAADQRYPGCPGSENLSWRPALSHGWRQAP

SEQ ID NO: 297137 - protein, 104 aa, Zea mays
  Clone ID: MRT4577_34068C.1.pep
QFLLALQVSSTAAVATHQERRTAVPLLPCRVPAAAAPSLSPTPNMSASPLPTTSGGDHIFPSPPRPRHRRCCQVIVDAVAPPRSYGVGHRDESLNGDTAWLATT

SEQ ID NO: 297138 - protein, 273 aa, Zea mays
  Clone ID: MRT4577_34069C.1.pep
QTSLCRALSRSFFLHALFYIPVPYRSCSFFRQSRQPSSHGARDPLLPLSLGSAHPGARAWSCFSPARVPALLPAALPASLFPAASILYSPLQAVLPRCGISLCPAELAPAPSCCSSRPPAPLLAWSSSFLVPVPCVFPVTSMAAPSLSPLSSPLRVRPLVSSLRRARSFLCVPAATSLWCFLPARAKFPCSLALGPCSTVPCCFSARVKFPCRVCLGRKPVCPRRACCSPKRPMLQRPYFSMSFHVGIVSVVSSSGINKQTGAVFRQAGETRP

SEQ ID NO: 297139 - protein, 181 aa, Zea mays
  Clone ID: MRT4577_3406C.1.pep
MSAMPLPSTHPQKISCRRRRPGLQQIRVERLLAYSSNIVAVPGPSRGAPYTISSLDVVGLLAPSSNVSRAADIVCHGSNRSTIPPPPSNDAAMLGPPSGVRICLLRHRHLETHRSRGRGHWWSGAVTWRTMTEEVGKSIKKRHYEEQSPWLMDQLPVAFIEDLALSTTMSLPHTRCPCISE

SEQ ID NO: 297140 - protein, 137 aa, Zea mays
  Clone ID: MRT4577_34070C.1.pep
LAGSRAGWAYRRGRPGRPPLRSLAPVGRVSWAGPAPRAEPPGSRAPRVWLPRRAPEPPGPGALGWLLGGPVPRERWEERMSGREKGEREKGGGERVGVAEGGGGWDKPVPPRFFFFFFFFFFFFFFFFFFFFFFIFF

SEQ ID NO: 297141 - protein, 46 aa, Zea mays
  Clone ID: MRT4577_34071C.1.pep
LPIHHLTVEAPLRRRDDTTLLYATSVWYRDSCSMHCVAVYANDNCY

SEQ ID NO: 297142 - protein, 75 aa, Zea mays
  Clone ID: MRT4577_34072C.1.pep
GRVGFRPPEKTTPNKGRRLMFMDAPAAMFMRATGPPSRSGHWPNQKVQLYNGCIRWCLPGPIYLWSDMLFQMLLA

SEQ ID NO: 297143 - protein, 228 aa, Zea mays
  unsure (1)..(228): unsure at all Xaa locations
  Clone ID: MRT4577_34073C.1.pep
PEPEPSPYPLPEPSPYPDPWPXPEPXPSPXPDPDPWPEPEPEPSPXPDPDPWPEPEPEPSPXPDPRPDPXPXPYPEPDPEPCPWPDPCPSPYPDPCPCPYPEPEPAPDPAPEPAPEPEPEPAPAPDPAYDPAPEPALDPEPEAEPEPEPEPDAEPEPEPPAPPPPPMPMLIPAPIPMPAPLPPPRSMPRSFRETRPSDVRTRAASTATRKAVMVGARGILLSPDLPFL

SEQ ID NO: 297144 - protein, 86 aa, Zea mays
  unsure (1)..(86): unsure at all Xaa locations
  Clone ID: MRT4577_34074C.1.pep
FCLCCLVPFFWCSRPAWRVLFCVAAGGXVFLFWSPVGALVFASAALLRGGFVVSLRVALVVPPGCRLRFLCHRACGSPGVLRRCPP

SEQ ID NO: 297145 - protein, 192 aa, Zea mays
  unsure (1)..(192): unsure at all Xaa locations
  Clone ID: MRT4577_34075C.1.pep
YTEREENIVQSCLFATCPEPEPXRSRVPRXPEPVPSPYPLPEPSPYPEPWPXPEPXPSPXPDPDPSPEPEPEPSPXPDPRPNPXPXPYPEPDPEPCPWPDPCPSPYPDPCPCPYPEPEPAPELAPEPAPEPEPEPAPDPAYDPAPEPAPDPEPEAEPEPEPEPDAEPEPEPPAPPPPLMKTPIPAPIPMPER

SEQ ID NO: 297146 - protein, 249 aa, Zea mays
  unsure (1)..(249): unsure at all Xaa locations
  Clone ID: MRT4577_34076C.1.pep
MVPRKGREHQSSENIVQSCLFATCPEPEPXRSRVPRXPEPVPSPYPLPEPSPYPEPWPXPEPXPSPXPDPDPWPEPEPEPSPXPDPRPDPXPXPYPEPDPEPCPWPDPCPSPYPDPCPCPYPEPEPAPDPAPEPAPEPEPEPAPDPAYDPAPEPAPDPEPEPDAEPEPEPPAPPPPPMPMLIPAPIPMPAPLPPPRSMPRFLRETRPSDVRTRAASTATRNTVMVGARGILLTFLSFPCIYERPASRYP

SEQ ID NO: 297147 - protein, 48 aa, Zea mays
  Clone ID: MRT4577_34077C.1.pep
QKCSPVVPTVANTSKRDVRRNILRGIKHAAQHTVGPSSGSWFGRTAGV

SEQ ID NO: 297148 - protein, 72 aa, Zea mays
  Clone ID: MRT4577_34078C.1.pep
NDMPVPARLMFFCNYSKLTSFEVPNPSFEHLKYQPTILFTMSTLLVFPLHGKPACISLNNLNGSSPPIQSHV

SEQ ID NO: 297149 - protein, 115 aa, Zea mays
  Clone ID: MRT4577_34079C.1.pep
QLRYDYHAGFWGVMGRECIGIVPPFIREFNYPMAKNCAGGDTGVFVNGRELHQRDLDLLVGRGLPRTSGMSYSIEMSGNVIDEATGKKLRSLGKLAPTIEKLKRGFGMHVPEEFR

SEQ ID NO: 297150 - protein, 70 aa, Zea mays
  unsure (1)..(70): unsure at all Xaa locations
  Clone ID: MRT4577_3407C.1.pep
WCGEGYELVYVERRWGVMVFGKKGLLVLWGIGVINNGGVRVIVFFSGDDMRKGALWRLKMNGFLGAXRVT

SEQ ID NO: 297151 - protein, 148 aa, Zea mays
  Clone ID: MRT4577_34080C.1.pep
MGKSKKGGSSSHHSGDKRKRELTPPSEDFDNSEYSEEEFSSESEGSPAPASPPVSSDDSDDSQGITAEVWTYIRAVESAGLEGSNESEYSSDEEDSSDSSEEGSSGDDDEGDGDGGSGKGGDGSGKGGGGDGGSGSKGSSKGSNKASG

SEQ ID NO: 297152 - protein, 146 aa, Zea mays
  Clone ID: MRT4577_34081C.1.pep
MSDFFFGSPFRRLFHARPFHAVDWSSAAAAAMDWVETPSSHVLRVNVPGLGKDDVKVQVDEGKVLTIRGAPPAAKEKGKEDEEEGTVWHVAERGKPEFARAVALPENVRVDGIRAGLENGVLTVVVPKEVAPARPKPRSIAVSSKL

SEQ ID NO: 297153 - protein, 182 aa, Zea mays
  unsure (1)..(182): unsure at all Xaa locations
  Clone ID: MRT4577_34082C.1.pep
MIRRLMRGRDGKEHQPWCTSTCYRYYAKTFNKPRRTYEKERLDAQLNLFVEYXGLRRERELWRLPHALSRIRIAARHLLTLDYKNPRRIFEVEALLRRVNRYVLLXEGQNWLDYVLALTADNFLARRLLTLVFNAEMIKSIHHARVLIKQRHIXVGRXIGHVPSFMQIGESEXHFDFSLSSP

SEQ ID NO: 297154 - protein, 91 aa, Zea mays
  Clone ID: MRT4577_34083C.1.pep
KNAQRFEIGTSIQPKQKRNHNRQLNISHYSLQKGSGTLDKENLSGRVQTLNSNLHYYNTEFSTCDFISLIFISTLTSKNWGSTRLVTCFVQ

SEQ ID NO: 297155 - protein, 62 aa, Zea mays
  Clone ID: MRT4577_34084C.1.pep
PRFFSPSPKVEGTNRAFPKKKKKGLPKKKKKKKNKKKKKKKKKKKKKKKKKKKKNSKRGARY

SEQ ID NO: 297156 - protein, 65 aa, Zea mays
  Clone ID: MRT4577_34085C.1.pep
RRNPSSLPILVLDAHHRAGFNRGRIRQALAQRFVVQKKAVPWILYRSSEFKLYPCDEWAPSPPSV

SEQ ID NO: 297157 - protein, 29 aa, Zea mays
  Clone ID: MRT4577_34086C.1.pep
MKGSAITGPIGKECADLWPRIASAANAIV

SEQ ID NO: 297158 - protein, 473 aa, Zea mays
  unsure (1)..(473): unsure at all Xaa locations
  Clone ID: MRT4577_34087C.1.pep
MYEGWKKRSDLSSEWVVKTDAFLDRDFAQSQTGTDVRCPCSKCRNIYFLDRRTMSIDLYNNDYMSGCEVWVHHGQDSPLRIVSEDRSDEEANYDRMEEMLDDDPPTLEVHKFFELLKASEELLHEHTEVFVHIFMTRLMDIKSKFAFSNNCYIELLNLISDVLLENHKMPKDMYSPRRFSRVSETVNEKKCTICGEPSFVEVENDDGVTVMTEDPFRFERNAFRKDTIVTRGPPKRLSGPLILVRLNDLNLNEHGNRFEGFGTKHNWTHKCGLWELPYVKALILMHNVDVMHQERNMGERIINTCLNIPDKTKYNPKARKDLALICSQPTLELGENEKKPRAPYSLKPKRKKQLMKWLKNLKFLDGYATGFRRSVNLRTSKFSGLKSHDYHIIMEILLPVMFHGFVKNEVWKALEELSYFYRHLCAKEIKKEMIEKLEQQIPVFVCKLEKXFPPGFFNPMQHLLVHLPYEAKE

SEQ ID NO: 297159 - protein, 79 aa, Zea mays
  Clone ID: MRT4577_34088C.1.pep
NQKMNVLSRHIYASAVNEAVGTATVCYPLTSRGGLNKKSRSKSNVLYTGAVSFCSVQSPQRRQAIYARRIMPLVYREML

SEQ ID NO: 297160 - protein, 89 aa, Zea mays
  Clone ID: MRT4577_34089C.1.pep
YVLMHATRLANMQAKVNGESGWQHARDVNQPAHRSSPLNTRREADMVGLVGGSTARADARSSQPAERQHARIGPWTTYNPAGHAPHLHH

SEQ ID NO: 297161 - protein, 60 aa, Zea mays
  Clone ID: MRT4577_3408C.1.pep
KSISCRIYGQRSCLDQKLTAIVAWILPASYHLHSGMSASIAQIQSNYFTIFLHASCLVYE

SEQ ID NO: 297162 - protein, 79 aa, Zea mays
  Clone ID: MRT4577_34090C.1.pep
RAQHSLHTSRSVSLLPSHSVEHKSSWMFFASHTSPLTAALFFFTYATCGTVTPTSARASPKSAADHAILRLFIILVRVG

SEQ ID NO: 297163 - protein, 167 aa, Zea mays
  unsure (1)..(167): unsure at all Xaa locations
  Clone ID: MRT4577_34091C.1.pep
RQRRPPSSRQKSRNEKTRPKPRRGHPKRRPSDPANNRSPGATPGNSSXRSPRQRXQGQRPGPRHQRRAQRSQRQQQQPPRERKETPTTGRRPNRSGTKTPQRGKRRARNGNKNEKPKKSNRRKRKGEXNTQPRQPQKXXXAERRPGSHQSPRHRAQEHRRGAQRRRR

SEQ ID NO: 297164 - protein, 398 aa, Zea mays
  Clone ID: MRT4577_34092C.1.pep
MAGRLTGAAASSPLSRALLLLAALGLFSISFLSLRSLRPAADPADKSRPLLRLHSSSTVYHSPEAFAVGYAEMERSFKVYIYPDGDPKTFYQTPRKLTGKYASEGYFFQNIRESRFRTDDPDQAHLFFVPISPHKMRGKGTSYENMTVIVKDYVEGLINKYPYWNRTLGADHFFVTCHDVGVRAFEGLQFMVKNSIRVVCSPSYNVDFIPHKDIALPQVLQPFALHEGGNDIDNRIILGFWAGHRNSKIRVILARVWENDTELAISNNRISRAIGELVYQKQFYRTKFCICPGGSQVNSARISDSIHYGCVPVILSDYYDLPFNDALDWRKFAVILRERDVYQLKNILKSISQEEFISLHKSLVQVQKHFVWHSPPVSYDAFHMVMYELWLRHNVIKY

SEQ ID NO: 297165 - protein, 79 aa, Zea mays
  unsure (1)..(79): unsure at all Xaa locations
  Clone ID: MRT4577_34093C.1.pep
PPRGPPRGRPAPGPTKKKRRSPPPNHPREGPRENGKKPNSRHPHXEVRRRTTAPPRHCTHSQPKVRGDTPLLIAAKRVN

SEQ ID NO: 297166 - protein, 279 aa, Zea mays
  unsure (1)..(279): unsure at all Xaa locations
  Clone ID: MRT4577_34094C.1.pep
MAGRLPGAAASSPLPRALLLIAALVLFSISFLSLRSLRPAADPALASAADKYRPLLRLQSSSSVYHSPEAFTAGYAEMERSFKVYIYPDGDPKTFYQTPRKLTGKYASEGYFFQNIRESRFRTDDPDQAHLFFVPISPHKMRGKGTSYENMTVIVKDYVEGLINKYPYWNRTLGADHFFVTCHDVGVRAFEGLPFMVKNSIRVVCSPSYNVDFIPHKDIALPQVLQPFALPEGGNDIENRTTLGFWAGHRNSKIRXILARVWENDTELAISNTRISRAI

SEQ ID NO: 297167 - protein, 36 aa, Zea mays
  Clone ID: MRT4577_34095C.1.pep
THSYAHASAHSSVHLFDHSFDQSYRRPWIINIKGVT

SEQ ID NO: 297168 - protein, 66 aa, Zea mays
  Clone ID: MRT4577_34096C.1.pep
SFNNFKKILKYLNKPPPPKKKKKKKKKKKKKKKKKKKKKKKKKKKKKKKKKKKKKKKKKKIKQKKK

SEQ ID NO: 297169 - protein, 67 aa, Zea mays
  Clone ID: MRT4577_34097C.1.pep
GGKKFTLSPQNSSNLGANRSPGNIELYWSTNLIKAPPFFTVLGGGLGGPLIGTGIGFPKEFNPPLPW

SEQ ID NO: 297170 - protein, 59 aa, Zea mays
  Clone ID: MRT4577_34098C.1.pep
SVRQSLHRPRKIVKCQHWLRAIFVVLVSTCLVPAGQQLSIARTTLVRPHGHCSRAALTI

SEQ ID NO: 297171 - protein, 120 aa, Zea mays
  unsure (1)..(120): unsure at all Xaa locations
  Clone ID: MRT4577_34099C.1.pep
PNRKRYLAPYKEQKYHITXATRPIGAKEVFNYAHSLLKNVIKRSFIVLKMKWRILLSLPSFSLRKQSKIIIAYMVLYKFIRDSATHNRDFRNFVSSANKNDVEIRESNSGPTNKLDMSVF

SEQ ID NO: 297172 - protein, 70 aa, Zea mays
  Clone ID: MRT4577_3409C.1.pep
CCVLRLCYICKDDVHLDVVGDRLGSHPLRKVLSSSIIASVHMPHNLCYCHVSLACISTSQLQLVSFVCRN

SEQ ID NO: 297173 - protein, 53 aa, Zea mays
  Clone ID: MRT4577_340C.1.pep
LNPLAVVNPLVAAFVQQQQLVPYTQFSLMTPPPPWQQPIVGGAIFRLHMRCTR

SEQ ID NO: 297174 - protein, 98 aa, Zea mays
  Clone ID: MRT4577_34100C.1.pep
MGLSFTNLFIRLFAKKEMRILMVGLDAAGKTTILYKLKLGEIVTTIPTIGFNVETVEYKNISFTVWDVGGHDKIRPLWRHYFQITHGLIFVVDSNDRD

SEQ ID NO: 297175 - protein, 86 aa, Zea mays
  Clone ID: MRT4577_34101C.1.pep
TVCLRCAGRKGRGIFKQCFPPKLEGQAVDGCERVAGWGTHSRNVPFHVNKGTGDCSSRPASIWIFSGSTFKNLNSHPLCRAVVDSW

SEQ ID NO: 297176 - protein, 58 aa, Zea mays
  Clone ID: MRT4577_34102C.1.pep
RTRGVLDRRTRGLTRGRQVVRGGPFLTIRPLFFRSCKTSAVLTYGSQQCMMRPQCRGT

SEQ ID NO: 297177 - protein, 106 aa, Zea mays
  Clone ID: MRT4577_34103C.1.pep
FFPLCVGLRLAGLRSLLVGVFTFRLALRVPSLLVALFWFRPDHLGPRVVVSLVALFGLCACSLRVHVLFVPVVGGVLVFFALPCPWCPCCGCKLKWCCGVGGRSRG

SEQ ID NO: 297178 - protein, 93 aa, Zea mays
  Clone ID: MRT4577_34104C.1.pep
LPAPGCVLGLVLSARLARRGFPLSVLLFSSCCLRSGCLLFCLSSGVPRAGRRPVGSVGVSRVLRSSSPVCPSCASVWTVAWVGPGVPGRSLPG

SEQ ID NO: 297179 - protein, 244 aa, Zea mays
  Clone ID: MRT4577_34105C.1.pep
MAVSGEKPPPPPPPPPPPATASGGTARKLILALLTCLSSALLYRQIQPLPPKIPGTPGGPPVTATRTRLSDGRYLAYLETGVPREKAKHRLVFVHGFDSCRHDALPISTELAQELGVYMLSFDRPGYAESDPHPARTEESIALDIAELADNLQLGRKFYLAGFSMGGEIMWSCLKYIPHRLSGVAILGPVGNYWWPGLPSNVSRDAWYQQLPRDQWAVWVAHHLPWLTYWWDTQKLFPGSSVIA

SEQ ID NO: 297180 - protein, 40 aa, Zea mays
  Clone ID: MRT4577_34106C.1.pep
LNKPALMVLGYSISFEQPCMLSHEVFSPKLCLANICIISI

SEQ ID NO: 297181 - protein, 212 aa, Zea mays
  unsure (1)..(212): unsure at all Xaa locations
  Clone ID: MRT4577_34107C.1.pep
MAASGDPGSAESYRSPLAARYASREMCFLFSDRYKFQTWRQLWLWLAEAEQTLGLPITDEQIQEMKSNLNNIDFQMAAEEEKRLRHDVMAHVHTFGHCCPKAAGIIHLGATSCYVGDNTDLIILRNAFDLLLPKLARVISRLADFAKDRADLPTLGFTHFQPAQLTTVGKRCCLWIQDLCMXDLQNXKAXVRDEAALRGVKGTTGXAASXLQ

SEQ ID NO: 297182 - protein, 388 aa, Zea mays
  Clone ID: MRT4577_34108C.1.pep
MQSSKTRSSRRQKIADLVDGSTDHDKENILVDSNFTSNTKRGNNSMSSKSNTKTLQSSKAVLDESSVIKRNGYGTLDVPEPTWFILSGHRLLRKEYRAILRRLRGRVCRDSHHWSFQATHLVTTEMRRTEKFFAAAAAGRWILKPDYLTASNEAGKFLEEEPFEWHGEGLNIGDTISLDAPRKWRQLRQRTGYGAFYGMQVIIYGECIAPTLDTLKRAIRCGDGTILATSPPYTRFFKSSVDFAVVSAGMPSADAWVQEFMRHSIPCISADYLVEYVCKPGHPLGKHVLFNMHDLAERSLQKLMKNQEDAPGSCSACGSDNREVPMLVCGGDGRSQSSGCGVRTHADCCNPPVEGCDGGEWLCGRCDQQKSAKKAKKTAAKPRVLKQR

SEQ ID NO: 297183 - protein, 72 aa, Zea mays
  Clone ID: MRT4577_34109C.1.pep
KAKRLTPYMLNHLYYAAYLSLLIIIWKLLLSPANDTSSTSIIRSMLSTNVLIASVMTPSIHSHSHAYLLIYV

SEQ ID NO: 297184 - protein, 127 aa, Zea mays
  Clone ID: MRT4577_3410C.1.pep
SSASALLLLTLQHLPGSLVTLCTYHRTLSGSVIPAPLQISAPPLGSATVPCARFLRLPSLRACSSSVACHLLDRTSSLIVPISPWFVFAKFSELPTEGVKILDEVVAEEVFAPVPVHQVDGASNWLF

SEQ ID NO: 297185 - protein, 666 aa, Zea mays
  unsure (1)..(666): unsure at all Xaa locations
  Clone ID: MRT4577_34110C.1.pep
MDRSRSKRGYHYDQDSPPPRSKQRFDRRSGGGQNANSSYHRRGPLGGGGSDRRGFLPPAPAPPPPPPPPPLPPSSATAGGGAGPTTTTTSFRILCPECKAYGFPPGFVALVRHDSGSLFTVHPPFAGDYVRVIETVDGARREADGRPPMFSPAQEALLMVHRRILETDADDGDEDGEYGXGARTPGXGKTTTRLIVPKMHVGCLLGKGGKIIEQMRMETKTHIRILPRDQHTPRCVSLSEEVVQVVGDGNCVKKAVAIITDRLKESLHRDRGPFRGRMNSPEPRISQEDDYLGVSQMPAYEESLGRSDQIRNNTSMEPPGYEFDSNDGIGDXHPDILYDDIIFRILCPNDKVDNLVATNDGILEMLQADVGVDVRLSDIIAGSDERVVIITSREGPDHELFPAQEAVLHIQTHIVDLGPDKDNIITTRLLVPSSEIACFDGREGSLSDIQRQTSANVQILPKEDLPLCALESDELIQIVGEISAARNALIQVTTKLRSFLYREMSGPIQVGNINVHGAISPVAGSPGGPNLGNDMPMSAYHQASQLATSWHSKDSGGSASGSFDQGSNIIDEIRQGATKRFAVPLVTRSTLEVVIPNSAVASLTMRAGSKLAQISEISGATVTLAEDRPDILEKVVRISGTPEQASKAENLLQGFILSIPDDIPSG

SEQ ID NO: 297186 - protein, 1376 aa, Zea mays
  unsure (1)..(1376): unsure at all Xaa locations
  Clone ID: MRT4577_34111C.1.pep
MASRRLRTLKAIGGCLLKQLIIFYPSPIPQSDLRHAINSHRDARSSINASRNQRHENEIRHREEYDQDHGVPARSHATRVESAAASINGPIQGWSRRHITDSPPQDRHHEHQQEDTCGVSALTSRLRAIQWPPNFKVSNVDKYESKQDPRGWLAVYTTAARATEATKDVMNAYLPIVLGQEALQWLRHLPRHCIDDWRSNDSAFVRAILQKASTTSKQLFRKADLYITADEWAQDLIGGAKPAPPAPRRDANQQPDRRWEKRPREEVHAAGPPVARARGAPHGGEQTLDDILDAQCPYHKDMRHTLRNCRDFKHSVENXDHSSLYRLPHHEEXGEPRQPQQQEGGGGGAFPRVDGEVNVIFGGHGSQENRRQQKLNDGXVLAAITSAPALYRWSEYTITFSRVDQWLNFDHPGKYPLLVDPAXGVALKDLTESDTHFFGIVPTEGEYPLRHIYMPITFGTPENYRTEFLRFKVASFNCGCNAIIGRLGLAKFMAILHYSYMILKMPGPQGIITESTLVRFLQDNRDVFTWQPTDMLGVLRELVEHKLKVYPQARPIRQKLRRFTPDKREAIRAELARLVAVGFIREVLHPEWLANPILVLKKNKVDWRMCVNYTDLNKHCPKDPFGLPRIDQVVDSTAGCSMLSFLDCYSGYHQISLAKEDKEKTAFITPFGAFCYASMPFGLKNMRETYQRAIQTCLVDHWGKRVEAYVDNVVIKTEKSENFIEDLQLVFNILRRYRWKLNPEKCVFGVPAGKLLGFIVSHREIEANLEKIEAIMRMEAPRSQKKVQRLTECMAVLSRFISRLGEKGLPFYKLLKKVDNEVLGPSKKKYPQVQKLLYAVLLTARKLRHYFNDHKVIVVTGFPIGDILHNKEAIGRIAKWACELGAHDIEFRLRKAVKTQTLVDFISEWTKQQVPDNPEATEVWRMYFDGSLKLQGAGAGILFIAPRGEQLKYAFQLLFPASNNVAEYEALIHGLNIAISLDIKRLMVYGDSLVVISQINKDWDCSTDSMGKYCTTIRKLEDKFEGLEFHHVERDHNVATDALSKLGFSRARVPPGIFVQEVPRPSIPSDQAEECNTLSQPESDSNDWREPIIRYIKNEEELDDKATAERTARQSAHYTLIGAALYRRGVTGVLMKCISSVTGKQLLDEIHAGQSGIHVASRTLVGKVSRSSFYWPTAKSDATKLVQRYEACQFLSKQMXWGLDMIGPFKRAQGGYTHXKAVEFIQDIIFKFGIPNSMITDLGSNFTSSEFFDFSEQWSIQIKYASVAHPRANGQVERANGMILEALRKKVFDKNEKFVGKWIRELPYVVWSLITQPSRALHGNTPFFMVYGSEAVLPADLKFGAPRLVFESIAEAEATRLEDIDVLEKKRLNTVI

SEQ ID NO: 297187 - protein, 67 aa, Zea mays
  unsure (1)..(67): unsure at all Xaa locations
  Clone ID: MRT4577_34112C.1.pep
GGRPFFFFFIFFFSFFFFFFFFFXASGKILNLVLIPSKKRPHYNHYNFPQIFIKKLYLCENMDQKHC

SEQ ID NO: 297188 - protein, 98 aa, Zea mays
  Clone ID: MRT4577_34113C.1.pep
CFLLSALNAQECTNTGWQDFLPSYAPWSFLNLCYSDHFRTLLTSCYCYPSFAGSSTPPGSSDSQNPLVNPMHSNPQFHLASYVHLPPSFHIHQPYYMT

SEQ ID NO: 297189 - protein, 67 aa, Zea mays
  Clone ID: MRT4577_34114C.1.pep
APAPVSSRPSYGNPVAISSANLRENRPPRTSPQTQPRSSSPQIPPQIAPRPSRRLAGTNQQRVVQRP

SEQ ID NO: 297190 - protein, 111 aa, Zea mays
  unsure (1)..(111): unsure at all Xaa locations
  Clone ID: MRT4577_34115C.1.pep
AARGLELAPKPSRWKTRRRRRCRSFSRSPLGCECSASAPREGFMFQMDCFKXXERDCRGXNXSIXXXFXQXTXXYXIXPXIXHXHXXXXXXQFFXXKINTXXLKIFFFFXX

SEQ ID NO: 297191 - protein, 74 aa, Zea mays
  Clone ID: MRT4577_34116C.1.pep
HENEFACHQTFTHLEAVPNESLLLANGPCLEIRRADPMTSHEDLLAEHEFGVGVQMRRRHGGLGEGIVGFGSGV

SEQ ID NO: 297192 - protein, 126 aa, Zea mays
  Clone ID: MRT4577_34117C.1.pep
TPSCPLAFFARSTLTLSASVPFKSPGTPTPRSVSGPGRIAFFFDKKAPPLFLVLLLQLLFQHRFFFAHRLYLFARFNFFPPSFSEFSPLLFLTCYIKVTFFLKFEHFSTFLIFDLFNFFADFFKNF

SEQ ID NO: 297193 - protein, 49 aa, Zea mays
  Clone ID: MRT4577_34118C.1.pep
PLDHASGQFEDKFDTLAHIGRVWVQISLIYINVFGVQMTIVSPLPIPLR

SEQ ID NO: 297194 - protein, 191 aa, Zea mays
  unsure (1)..(191): unsure at all Xaa locations
  Clone ID: MRT4577_34119C.1.pep
MDPLLAAAMNHAAAHPGLRIHLVGPTNDIFSRDHLAPSSRQRTKRRCNLRFTTRSARVGSQNGDQTLSPSKIPQRDWFPSDFTFXAATSAYHIXVARNEDGKDQRNCHHFCHNHPQRDTXGAHSHIAPNSYHMYKTDVXLLKEMRMDAYKFSISCPRILSKATQEXGINPVVIKYYTNLINLLLENAIESI

SEQ ID NO: 297195 - protein, 44 aa, Zea mays
  Clone ID: MRT4577_3411C.1.pep
NQDRVICFFICMDITCYTCSIRLLCHHSCTCLGLCLYFWILLRR

SEQ ID NO: 297196 - protein, 72 aa, Zea mays
  Clone ID: MRT4577_34120C.1.pep
SKCLATQLFSSFNSFLKDGRIRLKVCSPDSINLQHNCLGTSIAPRTNRSCAPPKRGLHSHVASQATLGCQTL

SEQ ID NO: 297197 - protein, 92 aa, Zea mays
  Clone ID: MRT4577_34121C.1.pep
HYPVNVSISEDGKIFEVRNFIGQRVVLRTVMLDGVVVERSANKDEIILRGNDIENVTTSAAQIHQSTRVHNKDIRKFLDGIYVSEGGPIEAQ

SEQ ID NO: 297198 - protein, 57 aa, Zea mays
  Clone ID: MRT4577_34122C.1.pep
ARNSARELSKVPFFFYRTHNTNWGGFFYRISATPTSALYLIRDDYTTDNILFNGQYT

SEQ ID NO: 297199 - protein, 60 aa, Zea mays
  Clone ID: MRT4577_34123C.1.pep
GKQFQFAMIYFYIQGGGQTTNKELKGPFVFLLKTPNGKHIKKTGALSKGARKKKRCRPIF

SEQ ID NO: 297200 - protein, 45 aa, Zea mays
  unsure (1)..(45): unsure at all Xaa locations
  Clone ID: MRT4577_34124C.1.pep
AALLRTFSFLGFEIVRPGHPVVXERPDACFMAYTFERESAGEEEE

SEQ ID NO: 297201 - protein, 350 aa, Zea mays
  unsure (1)..(350): unsure at all Xaa locations
  Clone ID: MRT4577_34125C.1.pep
TSRPAQFLGEVYVKVVERDHLPRRERNHSFSSGHIPPSSDGNAFYGRRCLLLLAVLLPLRRLPLPAPRPLFAAPSARAAPRXSTVVALHKRNPKRLKYAAERQFTRGDAGLLRVEVEPSGGDFWKLDPIIDLINRGAVGVIPTDTVYSVVCDLSNNESIERLRRLKGIGDSKPLSILCRSLRDIDTYTTGFPQGTNQGQANIFRVVKRAIPGPYTFILPASKQFPKQCIKHGSSTRYAKRRQVGVRIPDDPICQAILQNLDEPLICTSVKYLSEDEWILDPVIIADLYEPLGLDFIVDGGPRIADPSTVVDMMGANPTVIRQGKGLKLDWMVAKDEEEDEAQSMFSFKSA

SEQ ID NO: 297202 - protein, 360 aa, Zea mays
  unsure (1)..(360): unsure at all Xaa locations
  Clone ID: MRT4577_34126C.1.pep
TRTAQFLGEVYVKVVERDHLPRRERNHSFSSGDIPPSSDGNAFYGRRCLLLLAVLLPLRRLPLPAPRPLFAAPSARAAPRXSTVVALHKRNPKRLKYAAERQFTSLWWLGFARTKRGDAGLLRVEVEPSGGDFWKLDPIIDLINRGAVGVIPTDTVYSVVCDLSNNESIERLRRLKGIGDSKPLSILCRSLRDIDTYTTGFPQGTNQGQANIFRVVKRAIPGPYTFILPASKQFPKQCIKHGSSTRYAKRRQVGVRIPDDPICQAILQNLDEPLICTSVKYLSEDEWILDPVIIADLYEPLGLDFIVDGGPRIADPSTVVDMMGANPTVIRQGKGLKLDWMVAKDEEEDEAQSMFSFKSA

SEQ ID NO: 297203 - protein, 55 aa, Zea mays
  Clone ID: MRT4577_34127C.1.pep
STRSSTVSISCIVVSNFDMRVVLSWSGIIIVASIDMAEWQQVLYDMISLSVSVSA

SEQ ID NO: 297204 - protein, 427 aa, Zea mays
  Clone ID: MRT4577_34128C.1.pep
MGRHSCCYKQKLRKGLWSPEEDEKLMNHITKHGHGCWSTVPKLAGLQRCGKSCRLRWINYLRPDLKRGAFSEEEEDLIVELHAVLGNRWSQIATRLPGRTDNEIKNLWNSSIKKKLRQKGIDPNTHKPLLVEVERSKAAPTTSTERTSESNDVDPSSGAALGNSSHLLLSETAQSPQLPALGKHRRETTSLAHLRVPPKELFLDQLASGHENLTGCRTAGPVPNFPFQQLMCYNNEFGNKNGASNNSLWFNHNETSGSTISTVMPPVSPSTLSTSTGLNRSPDNPHSGGTAIQSTQFYWDTANPSSCSSRGSSGSNGLGFELQSTSSLLESSVFPWTELTPDKNSQVHLGEELKWPDLLHGTFTDTPATMQNLSQSLYEDVIKAESQFNIEGLCAAWSQNLQPQQHLQVSDLYDKDLQRMSLSFENI

SEQ ID NO: 297205 - protein, 108 aa, Zea mays
  Clone ID: MRT4577_34129C.1.pep
RYHGRNRNRSPPPQRRGPRARDDYRGGGGGGRGKGTRYYRSHNGTGKGGKHSRYYYGAGKGGKHSRYYYGGRRRHGSPPRGARSPVRENNEERRAKIYQWNRERKGKQ

SEQ ID NO: 297206 - protein, 170 aa, Zea mays
  unsure (1)..(170): unsure at all Xaa locations
  Clone ID: MRT4577_34130C.1.pep
MPPVSPSTLSTSTGLNXSPDNPHSGGTAIQSTQFYWDAANPSSCSSRGSSGSNGLGFELQSTSSLLESSVFPWTELTPDKNSQVQLGEELKWPDLLHGTFTDTHATMQNLSQSLYEDVIKAESQFNIEGLCAAWSQNLLSFKSCCLYLYMHVARLFCISESWLIFLSHCK

SEQ ID NO: 297207 - protein, 57 aa, Zea mays
  Clone ID: MRT4577_34131C.1.pep
RVPCSSFPLITMDDGESEVIIITVVGRYQQRNICLLTHCCFNLLYHVLCVCVLRLYW

SEQ ID NO: 297208 - protein, 62 aa, Zea mays
  Clone ID: MRT4577_34132C.1.pep
RTLVTAGINKAGKITRHTRQQEHGTPALCIYSFLLTDGPRPHSNEHTGVHDHKDNRISRAKQ

SEQ ID NO: 297209 - protein, 74 aa, Zea mays
  Clone ID: MRT4577_34133C.1.pep
TLPLIEKITSANFLQKPKKDKLPARFKNARFYSKVFSRTQLRLNMKLLLKTENLEVEPTFALYKEQGPPLLYKI

SEQ ID NO: 297210 - protein, 67 aa, Zea mays
  Clone ID: MRT4577_34134C.1.pep
PYALFDLPSSVTVTDVIPEYACCRSLLVCLCCAIMSSHLIIKRTRIRVRTRPYTVGTDSFSCIQSST

SEQ ID NO: 297211 - protein, 38 aa, Zea mays
  Clone ID: MRT4577_34135C.1.pep
RSACAHLWPCSPRALIPPAIRESGWPSGPGRKFSGPAT

SEQ ID NO: 297212 - protein, 107 aa, Zea mays
  Clone ID: MRT4577_34136C.1.pep
SARVNRKPHRSGRRKKNKRRWDPNYPKPNRSGYNFFFAEKHYTLKTLYPNREREFTKMIGQSWNSLSPEERMVYQNIGLRDKERYKRELTEYKEKMKLRQTSEVGRP

SEQ ID NO: 297213 - protein, 75 aa, Zea mays
  Clone ID: MRT4577_34137C.1.pep
FNRDNPGFFEKPRFVWFYFGNRKTPPPVFPRGRGQASPFRFWKAPRFILRPALFFLFGKGFTLAPFKKICPGSPH

SEQ ID NO: 297214 - protein, 224 aa, Zea mays
  unsure (1)..(224): unsure at all Xaa locations
  Clone ID: MRT4577_34138C.1.pep
MLPSKRSASADGGEPKRAKLGESPSAARVGTSNGTRNGAAPEIDEDLHSRQLAVYGRETMRRLFAADVLVSGLDGLGAEIAKNLALAGVKSVTVHDVKMVEMWDLSGNFFLSEQDIGKNRALACVSKLQELNNAVLVSALTEELTIEHLSKFQAVVFTDISLEKAYEFDDYCHSHQPPISFIKAQVCGXLFGSVFCDFGPELLVLTXDGEDPHTGIIASISNDT

SEQ ID NO: 297215 - protein, 59 aa, Zea mays
  Clone ID: MRT4577_34139C.1.pep
VDIVTTSISYFRGVLAPSSLAIGFVGEPHSSLPNRVPIRLLLHQLRSMQLGWAPGSSAS

SEQ ID NO: 297216 - protein, 122 aa, Zea mays
  unsure (1)..(122): unsure at all Xaa locations
  Clone ID: MRT4577_3413C.1.pep
AAAAVDAWAIARDPASWPDAPDAFQPERFLGAAAAVDVRXAHFELLPFGSGRRICPAYDLAMKLVAAGVANLVHGFAWRLPDGVAAEDVSMEEHVGLSTRRKVPLFAVAEPRLPVHLYSATE

SEQ ID NO: 297217 - protein, 50 aa, Zea mays
  unsure (1)..(50): unsure at all Xaa locations
  Clone ID: MRT4577_34140C.1.pep
GGVLVGGGGEAEDEVGVAGDGAAFEVVRAFVVVEGVLCAXDGAVVDXGFG

SEQ ID NO: 297218 - protein, 82 aa, Zea mays
  unsure (1)..(82): unsure at all Xaa locations
  Clone ID: MRT4577_34141C.1.pep
KQLKMFKVALADFVKEALKPXWKDGQMSREVHKTIVKKVVDKVTSTVENTPPTKEKIDVYMTYSKEKLNKLVQAYVGKYAKA

SEQ ID NO: 297219 - protein, 299 aa, Zea mays
  Clone ID: MRT4577_34142C.1.pep
MPRLGQDSGPQSIHNMEMQPMSPNVQSQSLQGLPLVPASSSADMAGVPVPHNAVKSEEVSRVTASLAQYFGNTAFGAGTVGLQPSQPNMNASLMATPPAVPPPVQPNPWPWAQQQTGIVQPGLPVPPQQQQQQQQAPQSFQTPIAVGGSNGNSMLIPNAGASVGPAAVAAKETAPPESKKGEKKNADAEKKNGDAERRNAEAEAQEDGDKGKKGKDSKQLKMFKVALADFVKEALKPTWKDGQMSREVHKTIVKKVVDKVTSTVENTPPTKEKIDVYMTYSKEKLNKLVQAYVGKYAKA

SEQ ID NO: 297220 - protein, 59 aa, Zea mays
  Clone ID: MRT4577_34143C.1.pep
MAAKIVTLLALLALLVSATNAFIIPQSSPASKAIFPHILPPITLMGFEHTTLQNYTLQL

SEQ ID NO: 297221 - protein, 46 aa, Zea mays
  Clone ID: MRT4577_34144C.1.pep
GPGRKDQRGLESLGIGNKVLVFIVWTSRSDGWCRTLLQKGKLSVCF

SEQ ID NO: 297222 - protein, 96 aa, Zea mays
  unsure (1)..(96): unsure at all Xaa locations
  Clone ID: MRT4577_34145C.1.pep
MTNTSILACSDPQYFNLMTNIKNGINELDMIERLPSRELLHRDHDELDCDNDHIISTDYMTYILTNDTVHGQSXHHKVNVNDSITLIFDDKEAASF

SEQ ID NO: 297223 - protein, 77 aa, Zea mays
  Clone ID: MRT4577_34146C.1.pep
RVFKDFFFDVPKHGNHQGFILYQDSSSQDFNVLLFSCHSVLLALSTNNASLCSQCCSMFFSIYKNVKTSNSPITYIK

SEQ ID NO: 297224 - protein, 77 aa, Zea mays
  Clone ID: MRT4577_34147C.1.pep
TGGFITRGLAIAKAWVWGKGNKQQFGSFTWGQKHHTRPNSLTTRSKFTLLPLFFKFYNPPWVPVLHVFFIGGGVYHP

SEQ ID NO: 297225 - protein, 404 aa, Zea mays
  Clone ID: MRT4577_34148C.1.pep
VPPELAGLIFTDNSSWIRSRKFRLGLRVSSGFCQGIRVMEAKTEAFTVKDHRGELYKKHYPPALKDEVWRLEKIGKDGSFHKRLNSSGIYTVEHFLQFLVRDQQKLRSILGSNMSNRMWESLIEHAKTCVLSGNHYIYYSSDARNVGAIFNNIYEFTGLIADDQFISAENLTENQRVFADTLVKQAYADWINVLEYDGKALLKFNQKKKYVTTRSETAKASASYPASNGLVNSQKELPGGPVNAEQSSLNNASQDRTRIPSMSMGNQVAREYAGNPQHMTPSITMQCDTSSLIPGGQFSGGSSVQTQTSRSSNMLALRPTQQPQNLDFSGLGQSTQPSGTNPFADWSRLQESSVDEYLMDEIRATSHELLENDEMQHMLRFLSVGGAPTGLNNVDGFPSYASPA

SEQ ID NO: 297226 - protein, 209 aa, Zea mays
  unsure (1)..(209): unsure at all Xaa locations
  Clone ID: MRT4577_34149C.1.pep
RVDLASEKLSPRSEPPSDPSKYTAADVRITDQKLRLCDICGAFLSVYDNDRRLADHFGGKLHLGYMLIREKQKELQEXSMLRDWNLMRSSSYPWIQQSLSVGKCKHRRVQTMEQRNKRRPGKAEDDRRSREHSKDRNGRSSRDREPERRDRVESRDGRRDYERDRDRRHDRDRRHDRDRDRDYDRSRGHDSRRRERSRSRERSRRHERY

SEQ ID NO: 297227 - protein, 232 aa, Zea mays
  Clone ID: MRT4577_3414C.1.pep
MATPPGGGCALTAAASTGRHLRQIHAHLVTSGHLSSLGPTLLHRLISLHPPHLQLAYAHRLLLSIPSPPLDLFNLLLPPLASSPDPAAAAGLYIHLRRRGLGPDAHTLPHVLKALARLGPGCLPLVACTHAEAVKTGLARAVVYVPNALMSAYSACGHLHRAMQVFDEMPRWTVVSWNTVLTACADNGRHDWCAGMFVNMLEAGSVPNQTTFVVMLTAAAELGNLALGKWAH

SEQ ID NO: 297228 - protein, 78 aa, Zea mays
  Clone ID: MRT4577_34150C.1.pep
LARRPEPPSDPSKYTAADVWITDQKLRLCDICGAFLSVYDNDRRLADHFGGKLHLGYMLIRDKQKELQVLSVMYRFLL

SEQ ID NO: 297229 - protein, 86 aa, Zea mays
  Clone ID: MRT4577_34151C.1.pep
SRRRCSSHIPREDACSSPIDTMAVFSDLHTADGLNSLEAHLAGKTYVLVTPLLRVTYRSSARCRRNLGADFLKTAGGNETVPAVLT

SEQ ID NO: 297230 - protein, 407 aa, Zea mays
  Clone ID: MRT4577_34152C.1.pep
MDAFRKQLDVLMGANRNGDVEEVSRNYYDRDVCRLFLAGLCPHDLFQLTKMDLGPCSKIHSLQLRKDYEEAKAKGTENFDRELEDMIERLIVECDRKIQRALKRLADDDANAAIAISVSEVTLTDDILQLSKQIKEKMAEVDAFDFEGRTDDKIKAQEVVEELRAKRADMQATLLLDAFNKDRASLTQPAPPQVAAVPPPAPPDARTQEIINEKLKKAEELGEQGMVDEAQKALEEAEALKKLAPRSEPPSDPSKYTAADVRITDQKLRLCDICGAFLSVYDNDRRLADHFGGKLHLGYMLIREKQKELQEQRNKRRPGKAEDDRRSREHSKDRNGRSSRDREPERRDRVESRDGRRDYERDRDRRHDRDRRHDRDRDRDYDRSRGHDSRRRERSRSRERSRRHERY

SEQ ID NO: 297231 - protein, 344 aa, Zea mays
  Clone ID: MRT4577_34153C.1.pep
MEAFLAGLFRAPPRAVPAPRGTPLPSLPLFYGRRRRRPSSSVVCMAEPYLIAKLDSAEKAWKEMSVRLADPDIVSDPSEYQKIAQSVSELDQVVTTYRQFKDCERQLEETKALEKENEGDPDMLEMIASELETLSNQLAELEEKMKFLLLPSDPLDSRNILLEVRAGAGGDEAGIWAGDLVRMYQRYCERNNWKFKPVSCSEAEMGGYKTYVMEVKGKQVYSKLKFESGVHRVQRVPLTEAMGRVHTSTATVAIMPEADEVDVVIDPKDIELKTARSGGAGGQNVNKVETAVDLIHKPTGIRIFCTEERSQLQNRERAFQLLRAKLYEIKLREQQESFRNQRKL

SEQ ID NO: 297232 - protein, 132 aa, Zea mays
  Clone ID: MRT4577_34154C.1.pep
SIARPIFWNVVSDFKYAKISLSVLSINKIHCGILQEQRNKRRTGKTEDDRRSREQSKDRNGPPSRDRDSERRDRVESRDGRRDYDRERDRRHDRDRRHDRDRDRDYDRSRGYDSRRRERSRSRERSRRHERY

SEQ ID NO: 297233 - protein, 407 aa, Zea mays
  unsure (1)..(407): unsure at all Xaa locations
  Clone ID: MRT4577_34155C.1.pep
MDAFRKQLDVLMGANRNGDVEEVSRNYYGRDVXRLFLAGLXHASPLILRSRCPHDLFQLTKMDLGPCSKIHSLQLRKDYEEAKAKGTENFDRELEDMIERLIVECERKIQRALKRFADDDAMAAMATSVSEVTLTDDRLKLSNQIKERAXSYGITVTENEEAKIVISSTMNKQNTHVAXLQEQRYIKTTGKTSGDRRSTEHSKDRNGPPSRDRDSERRDRXVSRSEEEIMIEIAIGRKDRDRRHDRDRDRDYDRSLRYDSMRIERSRSRXAPVSMRDTKCYSDADSLCLSGAKYHLCYLLXILSNXANLQEQRNKRRPGKAEDDRRSREHSKDRNGRSSRDREPERRDRVESRDGRRDYERDRDRRHDRDRRHDRDRDRDYDRSRGHDSRRRERSRSRERSRRHERY

SEQ ID NO: 297234 - protein, 408 aa, Zea mays
  Clone ID: MRT4577_34156C.1.pep
MDAFRKQLDVLMGANRNGDVEEVSRNYYDRDVCRLFLAGLCPHDLFQLTKMDLGPCSKIHSLQLRKDYEEAKAKGTENFDRELEDMIERLIVECDRKIQRALKRLADDDAKAAIAISVSEVTLTDDILQLSKQIKEKMVEVDAFDFEGRTDDKIKAQEVVEELRTKRADMQATLLLDAFNKDRASLTQPAQPPQVAAAPPPAPPDARTQEMINEKLKKAEELGEQGMVDEAQKALEEAEALKKLARRPEPPSDPSKYTAADVWITDQKLRLCDICGAFLSVYDNDRRLADHFGGKLHLGYMLIRDKQKELQEQRNKRRTGKTEDDRRSREQSKDRNGPPSRDRDSERRDRVESRDGRRDYDRERDRRHDRDRRHDRDRDRDYDRSRGYDSRRRERSRSRERSRRHERY

SEQ ID NO: 297235 - protein, 73 aa, Zea mays
  Clone ID: MRT4577_34157C.1.pep
MHVGPNDPRFFPSNPFSAPFGGLGSVPPGGRYDPIGPPDVPGFEPSSFVRRPRRPPGGSTHPDLEFFQQGPDF

SEQ ID NO: 297236 - protein, 138 aa, Zea mays
  Clone ID: MRT4577_34158C.1.pep
ASSASRSTRRGHADGTASPCPQSSSSPDDRRRRRLDGARSDSSPRFPDLPAAAHVTQEVEVPTTTADQESTISPTKRDPSVDVEQASADEEEVPESVAEGNMSFEEVQVHTEITNEPVHEKTQTLTPMIQLLLMMQSM

SEQ ID NO: 297237 - protein, 301 aa, Zea mays
  Clone ID: MRT4577_34159C.1.pep
MVNDAAAMAVVRAARPALRGAHDGVAFAAHAAFLADGYSLCAVGPAALADPSPLGDEEVGIDGWNIMENCYAFLYSKEEKGKKKRVLVKCLVIGEVLAIDVLDLEAQDKAPYNIQINVKDFFVEEQPKNYGDMYKNFTSLIETVNSNVLCKLDGDGSGAEAAKSTAAAAAKNSDGRSSPIQSSGDPGPRTADPSGLIYPPIAPIGSDDLYPGPGAGFYPHSGIGSGGSMHVGPNDPRFFPSNPFSAPFGGLGSVPPGSRYDPIGPPDVPGFEPSSFVRRPRRPPGGSTHPDLEFFQQGPDF

SEQ ID NO: 297238 - protein, 121 aa, Zea mays
  unsure (1)..(121): unsure at all Xaa locations
  Clone ID: MRT4577_3415C.1.pep
VSEASSSTTSLPSLSSATGGSVTASLVHVTTLLPPSAPSAAAAVAAAGDSPHGLVVARPACVAFHDLSTLEATSTFDAADGAAAAGSVKCVTHLPGXGTAAVTGHQDGRLRLWRAFSRSRA

SEQ ID NO: 297239 - protein, 47 aa, Zea mays
  unsure (1)..(47): unsure at all Xaa locations
  Clone ID: MRT4577_34160C.1.pep
KQPPSRTWYCRPAGKLPPGHNTATAXPTTRATRRRHVLYGDDPSGTA

SEQ ID NO: 297240 - protein, 155 aa, Zea mays
  Clone ID: MRT4577_34161C.1.pep
MSTATAPRLPAPRSGASYHYQTTAAPAANTLSFAGHARQAARASGPRLSSRFVASAAAVLHKVKLVGPDGTEHEFEAPDDTYILEAAETAGVELPFSCRAGSCSTCAGRMSAGEVDQSEGSFLDDGQMAEGYLLTCISYPKADCVIHTHKEEDLY

SEQ ID NO: 297241 - protein, 123 aa, Zea mays
  Clone ID: MRT4577_34162C.1.pep
HSAVPVVCSVSSSCNADLLVSSSRNIVSQHSSLCSLEHGQSYRACTKTGSCTWARPSFQPRQLPSPISRPNCRPSAHKNSRSARVPAKQALLRACDLRRWGPSVSMPRSSEPQVAAGAHLCTG

SEQ ID NO: 297242 - protein, 125 aa, Zea mays
  unsure (1)..(125): unsure at all Xaa locations
  Clone ID: MRT4577_34163C.1.pep
ANLNFYFFWDRKIPGVFSTWLWGAKIGTFILXSTXIFYATNNTFSTPKRPLAPSPKWLKYTTLDSFXNRDKLVSFHPVAPTQCAQTSTSDVHEHNLFIDQNLLSPSTXYEPSIQNSHKISFHTFF

SEQ ID NO: 297243 - protein, 67 aa, Zea mays
  Clone ID: MRT4577_34164C.1.pep
NWEKKKGFSPTNFWLKFKGWGCLTKGALRSDGIAPGFYFFELGKHKKGWGGPSFQKGVGLNKKLVKR

SEQ ID NO: 297244 - protein, 124 aa, Zea mays
  unsure (1)..(124): unsure at all Xaa locations
  Clone ID: MRT4577_34165C.1.pep
QGSSRQQAATTAARSEAATTADNAEGPGRTHQDEPGPENIPDPGRRAXNRDNEDHRSPAGTALTKDRQEDGKKNNKSTTGTPPRRPTTGTGARESPQTNTQAPGDRGAARPNGQHSRPRNDHQR

SEQ ID NO: 297245 - protein, 132 aa, Zea mays
  unsure (1)..(132): unsure at all Xaa locations
  Clone ID: MRT4577_34166C.1.pep
PTRSTLFTMYQMLASWLXASXHLLTPLNXPMEDKCWEASDDYCCILQXVWKLXLADVVDLHXLLMDPDXYLRFRSQLALRAPPGSECAYVCFLSTVLLHVARDSRDLKRLKPCGLGIEVNPSGSPWMQDAGI

SEQ ID NO: 297246 - protein, 121 aa, Zea mays
  Clone ID: MRT4577_34167C.1.pep
MSPPAAIYEPTVAPTGIKGKVVVPETVSTTLTGQGQSKLLEQFGGKWDEFKFAPIRESQVSRAMTRRYFQDLDNYAESDVVIVGAGSCGLSTAYVLAKARPDLKIAILEASVSPCGGAWLG

SEQ ID NO: 297247 - protein, 44 aa, Zea mays
  Clone ID: MRT4577_34168C.1.pep
CIRRFFVSISKRCFPCYFIQQLISAFLRFLVTTCKDHVLQLYRC

SEQ ID NO: 297248 - protein, 77 aa, Zea mays
  Clone ID: MRT4577_34169C.1.pep
KPPPKVGTGLFNPRRNKAPKKISQKLAPPPNVATIPFGENEKKRVGPKATGFGRGFPVFLCPLGQWGKAYLKRGFDL

SEQ ID NO: 297249 - protein, 107 aa, Zea mays
  Clone ID: MRT4577_3416C.1.pep
SLDHRRSHEGFAGFTLLIMDDKNKVKKEIDGPLGPPPRKGGLKFAPKVPQKKPAKVVPKKEPVEERKEDALDKELLMKLKMSQNKYPSRIKSDEKRKNPGFCSPHAL

SEQ ID NO: 297250 - protein, 105 aa, Zea mays
  Clone ID: MRT4577_34170C.1.pep
GTPNPFDKKYYFAFFPKKGFFKWDKGFFTHRDPKGGPTRFGFNKAPFFDHFPRSLVKITQLAFLPGSGGKIPRNCSLGNPPLGIFFLSPPQFKPPPGDKGLPPPA

SEQ ID NO: 297251 - protein, 73 aa, Zea mays
  unsure (1)..(73): unsure at all Xaa locations
  Clone ID: MRT4577_34171C.1.pep
GFPGVFEAKHSFIFRGLFLMVADPGAPPVFPGYSNXSVFRVVFAHGKAFGFFKSHSRVFFFQKVGDFWVLKIF

SEQ ID NO: 297252 - protein, 72 aa, Zea mays
  unsure (1)..(72): unsure at all Xaa locations
  Clone ID: MRT4577_34172C.1.pep
LPRPPPLPSAPPXXPPLPGARDYSPPPSKPSPVLHIPSSPPSAWPPPPPFSSPPLPRHSRAPPPLPRPRSLL

SEQ ID NO: 297253 - protein, 224 aa, Zea mays
  unsure (1)..(224): unsure at all Xaa locations
  Clone ID: MRT4577_34173C.1.pep
MLCTAASWPSSLSSPLQFSQKLTLKETVVSSSICKHGKSNMFTIVNRGNKPLGFREVKTTPLSQGGKAKLIRLRPPHGSGNLGANPANSCPLTPLGFLERAATVFSDCPSVVYHDTVFTWFQTHRRCLRLASALVSLGIXRGDVVSVLLPNVPAMYEMQFGVPWSGAVLNNINTRLDAGTVAVLLHHSGSKLVFVDXSSLQLIGDALRLLPPGHPIPHVIPVED

SEQ ID NO: 297254 - protein, 35 aa, Zea mays
  Clone ID: MRT4577_34174C.1.pep
FLYRYYIIMLGMFNDFLMYYGSMYISWFMFDGVYF

SEQ ID NO: 297255 - protein, 72 aa, Zea mays
  unsure (1)..(72): unsure at all Xaa locations
  Clone ID: MRT4577_34175C.1.pep
LPRPPPLPSAPPXXPPLPGAVPFSPPPSKPSPVLHIPSSPPSAWPPPPPFSSPPPPRHSRAPPPLLRPRSLL

SEQ ID NO: 297256 - protein, 216 aa, Zea mays
  unsure (1)..(216): unsure at all Xaa locations
  Clone ID: MRT4577_34176C.1.pep
LPRPPPLLSAPPSTXRLFPAPFLXSPPPSKPSPVLHIPSSPPSAWPPPPPFSSPPLPRHSRAPPPFXPPPLTPLTVTVSHDDAIPDASRLFEKLIIETACLARVGRADEARSRLSTAGCGESYARLLAAQVLFVDGKLDEAIAAFEELAREDPADYRPLFCQGVLYLALGREAESESMLERCREVGGDALIIDPSLMITPNVETEFDGEKPEPAKV

SEQ ID NO: 297257 - protein, 148 aa, Zea mays
  Clone ID: MRT4577_34177C.1.pep
FSKFATLWSTLIACLMSRSTGAIRLPPRYHESFDMTTVSISVPPSAAVHHDQARADRCPRSPSPAAALRGRRRASMGARSPARVRVGRATRVRAGRRARGAPPGTRQTGSERSGGGGGGARGWQCGEVGAAGEVGDRDAAESGEREGR

SEQ ID NO: 297258 - protein, 88 aa, Zea mays
  unsure (1)..(88): unsure at all Xaa locations
  Clone ID: MRT4577_34178C.1.pep
PKKVGIVVIYGIWCGAGVVKYLMKREVFKRSRXFCVFCVIFVVNMKVFEICGCMVCAKVMAGGGYTLNTAIVGSVRIKIFLLREQTGG

SEQ ID NO: 297259 - protein, 273 aa, Zea mays
  Clone ID: MRT4577_34179C.1.pep
MDPKVGVALTLSLVGGLSTSLGALLAILNHAPNNRTLGILQGFATGLMLSMSFFDLAYDAVNAIGFLRGNLWFFAGALLFSTIADVFPEPDCSAADENGKQQGGKELMMRHRRRVIFSVIVTAIVAGVSLQNFPVGTAAFLGTTKGFRVGLNLALAIALHYIPEGISVALPAYFATSSKWQAFKLATLSGFAEPLGVIIVAYLFPSNLNPEILEGLLGLVGGVMAFLTLYEMLPLAFEYAGRKDAVKAVFVGMAFMSMSLYFLDASLPKEMSA

SEQ ID NO: 297260 - protein, 113 aa, Zea mays
  Clone ID: MRT4577_3417C.1.pep
QWKLNHIAVRLPLPWNRIVSQLFWSLTQTRNLSRYLWVLGVVLVELVIVPCHENLDLPLDACIDPLKHKFKLLNPVSNQLLYSLSLYASSGCAQLMHLFVYLPVLCQHIQQHF

SEQ ID NO: 297261 - protein, 78 aa, Zea mays
  Clone ID: MRT4577_34180C.1.pep
GPCLFHRGSGFRIMPPPEVPVPIPAALRYPPPGLAFASPRGSFQAFRRLCMFPFPFSLGLLVPPSTVLVSVPVFFSGG

SEQ ID NO: 297262 - protein, 136 aa, Zea mays
  Clone ID: MRT4577_34181C.1.pep
PPPVQFKAPQTPLTQFKNKGMPSFGGQIKKKGCWEKKESQKRKSTKTRSHGGGAKRCSNPKKILIFGITPPTFFFFSPLHLKVQQTPSCEKIKPYSNLLKNKPPHYPQKKKKKKKKKKKKKKKKKKKKKFFKKPKP

SEQ ID NO: 297263 - protein, 46 aa, Zea mays
  Clone ID: MRT4577_34182C.1.pep
MSCPWASYGTLQPGTVTCNCALNGHTCRYRSATNSRADEPTIQRRP

SEQ ID NO: 297264 - protein, 35 aa, Zea mays
  Clone ID: MRT4577_34183C.1.pep
RQRYYVAYGLGYSLTLAEKRTESNIIKLDLIARLS

SEQ ID NO: 297265 - protein, 51 aa, Zea mays
  Clone ID: MRT4577_34184C.1.pep
TIEMKRKNIVPKKKKKKKKKKKKKKKKKKKKKKKKKKKKKKPKKKKNFKKK

SEQ ID NO: 297266 - protein, 90 aa, Zea mays
  Clone ID: MRT4577_34185C.1.pep
HGILPDQPRLIFAGKTFEDGGRVYNYDGQKDNTIDLQLGTRGSMQLYFKTATGTPITDEDEHIDHIYHTYGTIHDKEGIRTNQNHVIYAG

SEQ ID NO: 297267 - protein, 75 aa, Zea mays
  Clone ID: MRT4577_34186C.1.pep
PPGTPPPHTPTDGDTPRPRYQGFLGMAPQPILQQHPQKGQVRGLWAAQKAHQLPARWGLQQPTPCPYAAAGGVPP

SEQ ID NO: 297268 - protein, 152 aa, Zea mays
  unsure (1)..(152): unsure at all Xaa locations
  Clone ID: MRT4577_34187C.1.pep
KNRVSPTPRARRSTRYXEMQIRVGTLRSSYMTTPRPPKPGKQSLRHIPAAASRDIEQPNTAQIMHILYRTEMRGTKNIRCQEEAGSGRNLLLLGDLLLELARLLPQAPPVPWAASSRPDTARARTRPEGRRGAGATLPRDERAPRAECPAGP

SEQ ID NO: 297269 - protein, 80 aa, Zea mays
  Clone ID: MRT4577_34188C.1.pep
PSCAATHVQLANLYGSIGCWDDVARVRKVMKERGLKTNIGCSWIEVGNKVYTFTAENRSKNQVNNVLVVLDCLQSHGSQV

SEQ ID NO: 297270 - protein, 208 aa, Zea mays
  Clone ID: MRT4577_34189C.1.pep
MHKDMEYPRRTLLHTPFSGHPSGPSQPIDGATATDGSNFDANVVMILAVLLCALICALGLNSIVRCALRCSSRVVVGPEPNQVTRLVQSGLRRKALRAMPVLVYSPGLRINAANPTCAICLSDFEAGEHVRVLPKCNHGFHVRCIDRWLLARSTCPTCRQSLFGVPQKASGCSEASRAAEPEPAPAPAPARSVLVPLRPEGLVTHYDF

SEQ ID NO: 297271 - protein, 63 aa, Zea mays
  Clone ID: MRT4577_3418C.1.pep
MDPNMKQLQEALVDIETDAEKVLLARHQLVENDKIRNGNREALTALRKQARTCKTSVPSPFEV

SEQ ID NO: 297272 - protein, 269 aa, Zea mays
  Clone ID: MRT4577_34190C.1.pep
WDPRGRPAAQPTAEVLPSEAILAPNTSTVALTLTPANGQSSQQLPTTDEETAEPGPNPPEELTPAVEAASEAEAELPVVADPAPQPLEAQLTAAVEPQPAQVEVLAAPAAPVSSDVADAAPIAPELDNESLPKSITPDVLVSAEVLTPTADAKPASIRSKTSLHSLGSTSHLPAPNPVETTAEEAPQVDEPTVEAPLPVLQVEAATPEVPASEEMAPTPEVKEAKQPAKEEAVRHLTIEEFHVEHIRRGRQESPSTKPKKNQALAGRFK

SEQ ID NO: 297273 - protein, 83 aa, Zea mays
  Clone ID: MRT4577_34191C.1.pep
PSLRRAARGPSARVRVLRPVVLCPEPARVVATYQVPGRCPYCGGVVVAADVESTPRLCFVPLCFRIRRRFYCSLCSRRLVSVA

SEQ ID NO: 297274 - protein, 61 aa, Zea mays
  Clone ID: MRT4577_34192C.1.pep
FPVTLCKLFFKKNVNFFQKLIELGATDLLVPGVLPIGCFPLYLTLYNTSSKADYNARTGCL

SEQ ID NO: 297275 - protein, 43 aa, Zea mays
  Clone ID: MRT4577_34193C.1.pep
VWHLEGALSSNAANVVFSSRKRFSLQFPSFKATKYRIQDFMQI

SEQ ID NO: 297276 - protein, 397 aa, Zea mays
  Clone ID: MRT4577_34194C.1.pep
MRVGPRRHSCLPPTPAAAMAVAHAPPRRGVLPLLLVAALVAALPATCAAARSKKSYTAIFSFGDSLSDAGNLIVNGTPKALTTARPPYGMTFFRKPTGRCSNGRLVVDFLAEHFGLPLPPPSQAKGKDFKKGANFAITGATALEYSFFKAHGIDQRIWNTGSINTQIGWLQDMKPSLCKSEQDCKDYFSKSLFVVGEFGGNDYNAPLFSGVPFSDVKTYVPLVAKAIANGVEKLIELGATDLLVPGVLPIGCFPLYLTLYNTSSKADYNARTGCLRRYNRLAFHHNRELKQQLDELQKKYPKTKIMYGDYFKAALQFVVNPGKFGFSTALQACCGAGGQGNYNFNLKKKCGEQGASVCSNPSSYVSWDGIHMTEAAYRKVANGWLNGPYAQPPILKS

SEQ ID NO: 297277 - protein, 49 aa, Zea mays
  Clone ID: MRT4577_34195C.1.pep
CVFLSLLQESLFVFRICGVCVLFLVSVAPQLVVLEIKPKNVVFPRYPRT

SEQ ID NO: 297278 - protein, 203 aa, Zea mays
  Clone ID: MRT4577_34196C.1.pep
MFSLFYGLWKHVFSKAEFHVLILGVHKAGKTTLLEKLKSIYLKGEGLPHDRIVPTVGLNIGRIEDANVKLVFWDLGGQPGLRTIWEKYYEEAHAVIYVIDSASASSFEDAKSALEKVLRHEDLHGAPILIFANKQDSPAAVTEEELARHLHLKELDERPCMFQAGSAFNGTGIKHGVDWLVEEMERSKRTEALRARTEAAGKI

SEQ ID NO: 297279 - protein, 80 aa, Zea mays
  Clone ID: MRT4577_34197C.1.pep
EGVPRERGEKGVKGRGAKSVKIPIRGFLGERCRIGYKGDLKGAPNIRLTGETRKSGRKREGRKEKEGGIGSWQGEGLLWG

SEQ ID NO: 297280 - protein, 66 aa, Zea mays
  Clone ID: MRT4577_34198C.1.pep
CEGHWERCPEAALLPASKVVSSTRAGSSLLMPGTERSGGRGPLGLCHCILSWGTPNFSEGHTPCLP

SEQ ID NO: 297281 - protein, 159 aa, Zea mays
  Clone ID: MRT4577_34199C.1.pep
MFSLFYGLWKHVFSKAEFHVLILGVHKAGKTTLLEKLKSIYLKGEGLPHDRIVPTVGLNIGRIEDANVKLVFWDLGGQPGLRTIWEKYYEEAHAVIYVIDSASASSFEDAKSALEKVLRHEDLHGAPILIFANKQVDIYLYLSWFIYSLKLHALAQQFF

SEQ ID NO: 297282 - protein, 46 aa, Zea mays
  Clone ID: MRT4577_3419C.1.pep
IKKKTKKKKKKKKKKKKKKKKKKKKKKKKKKKKKKKKFFPFAREPP

SEQ ID NO: 297283 - protein, 178 aa, Zea mays
  unsure (1)..(178): unsure at all Xaa locations
  Clone ID: MRT4577_341C.1.pep
WIRYDNPFVSYASLIFCVIQLSKGLYLEALSIELVLLTIWKEALDACSLLMDTSDGENFSKSSQEHFLAKSGHSPMNVVQRLDFTPTASIFSWLESGFMKAYDRAEKISHVLRKSXLGTLILLTPFVLILVSNXYFLLDNTEMPDAMDVAFQTALEYGKSGAVSITICGFFDGFCGKI

SEQ ID NO: 297284 - protein, 37 aa, Zea mays
  Clone ID: MRT4577_34200C.1.pep
RSHHRQRTTEATTYSPKHSILVLDPLRWSNGRVSPVR

SEQ ID NO: 297285 - protein, 79 aa, Zea mays
  Clone ID: MRT4577_34201C.1.pep
GRAPFSQEGAAAAVFHACCRSRHGGEQAWVGTMEEEAAGRDELRAARALLAVKAAAVHRPASNRTTRPHQARRFRYPAT

SEQ ID NO: 297286 - protein, 80 aa, Zea mays
  Clone ID: MRT4577_34202C.1.pep
MLFFFLTTTCTRCPCTSYATQHTSPMTSCCQTLVSFKKLCRSRPTRLEHWPPYHFAITNSHKGASAACVRLHFLTLDHDL

SEQ ID NO: 297287 - protein, 153 aa, Zea mays
  Clone ID: MRT4577_34203C.1.pep
PRGRPGGPSLSAFYIMAESTPSQIHRRRRHGRRSRSLTWRLASRTCLSRSGSSEKPRSVPRLTESELPNVQRSLTLSHLNAAKRDTTNIHEDSHENAVVIDHTVRRRTAIRKIDALKGYYARRKNRCRAMLISSASIDNMIDTPVRQELQCSV

SEQ ID NO: 297288 - protein, 71 aa, Zea mays
  Clone ID: MRT4577_34204C.1.pep
FFFFFFFFFFVPCEESPKLESLALTLKVHKEARSKGGKQHTQIHSKMRTHTAKNRAQKTISKFSLKRSSNH

SEQ ID NO: 297289 - protein, 245 aa, Zea mays
  Clone ID: MRT4577_34205C.1.pep
SRMLKSCLDVSSMRLGVPFIAPRQLGAVESISRRQFLPFVAWRTGQSGAPPDTVRCTTGHCPVRISFLLWRSRPLAVQSRWRTGQSGAPCECWLLPRVARGLCGRPLARPTVGSPDSPVHHRTVTVACPVRISFLIWHSRPLQLWAGWRTRHCPVHHRTVRCPIRPLARATRRPRIARPTIALAAVGSLDSPVNYIRTPPSVPESGQFAGSQPGAPDTVRCTTGQSGAPRPKLSLSKLFYPVSST

SEQ ID NO: 297290 - protein, 42 aa, Zea mays
  Clone ID: MRT4577_34206C.1.pep
FKSIMKFYLWGSFCCIMNSNFMFNLKQTIIVRKLCTKSNPRM

SEQ ID NO: 297291 - protein, 184 aa, Zea mays
  Clone ID: MRT4577_34207C.1.pep
EYLVCSSMRLGVPFIAPRQLGAVENKSGRPSLPSVIGRTGQSGAHRTVSGARFLSLNGEADRCRSGSRWRTGHVRCTPDSPVPPSDRWLGHVSRAESAADRWPGRPLAHRTVRCTPNSPVIFSRTPSANSRERPLRPRQPGAPDTVRCTTGQSGAPDRSSLLAVYSQLFFFSFFFLFPILRQVY

SEQ ID NO: 297292 - protein, 158 aa, Zea mays
  Clone ID: MRT4577_34208C.1.pep
TIPVLCSIYFLVRHSRPLGLGSGWRTGHCPVHIRQSGVPNRPLARATRRPLIAQPTVGHERCWLTGQSGAPPNSPVIFSRNAFYFSRERPVCRRASLGTGQSGTPQAGSGLAEPSHSFSISFPLFLAMSRSVVEVFLSSRFTFPFNCPSRLLQVYSNK

SEQ ID NO: 297293 - protein, 139 aa, Zea mays
  Clone ID: MRT4577_34209C.1.pep
ESSANYAGRGGRGDRGRGRGARGRWRGRAGPSSRISDNRGRGSNARPPCQICGKEGHTAIRCWHRNDDSYNTDPPMVAMAATSSTKIDPNWYVDTGATDHITSDLDRLMLRERYHGGEQVQVGNGAGPSDEEKAPGRTI

SEQ ID NO: 297294 - protein, 301 aa, Zea mays
  Clone ID: MRT4577_3420C.1.pep
MALVVMCGQPCSGKTAAATCLAVALHSCSPDLTVRIIDESSLHLRRNDSYKDMVVEKNLRGLLRSEVDRSVSRDSIIIVDSLNNIKGYRYELWCLARASGVRYCVLFCDTEVDHCKEWNSNRQEKGEPAYDTNIFEDLVSRFEKPDRRNRWDSPLFELFPSRDELVETAPVIAEAVSYLTKKVDSKTRDVKVLQPTIATQTVRTTEANSLYEMDKATQEVVNAIVEAQSCGLGLAVNKISIGPNLPTIKLERSVGLPELRSLRRTFIKLAGQYSLSGPPPPTDADSAKRMFVDYLNRELGA

SEQ ID NO: 297295 - protein, 42 aa, Zea mays
  Clone ID: MRT4577_34210C.1.pep
CYYEPGMPNEPFSIHIDPGSSYRQGFFESLQSAVPSLFKPHP

SEQ ID NO: 297296 - protein, 167 aa, Zea mays
  Clone ID: MRT4577_34211C.1.pep
STMLKGCLVLSSMRLGVPFIAPRQLGAVESIPGRQFLPSVAWRTGQSSAPPDTVRGGFLSFFSEADRWHFGAVGAPDTVRCTPDSPVPPSDRWLGHVSRAESAADRWPGRPLAHRTVRCTPNSPVIFSRTPSANSRERPLRPRQPGAPDTVRCTTGQSGAPDRSSLL

SEQ ID NO: 297297 - protein, 80 aa, Zea mays
  Clone ID: MRT4577_34212C.1.pep
LSISNFRAFRKSKPHIYVRLEVCTCLFEQKCNDSPLSSLIKRCLIFYWIHMLQPHMIVIVSPAPSSSKSRGVYKKNAFCS

SEQ ID NO: 297298 - protein, 321 aa, Zea mays
  Clone ID: MRT4577_34213C.1.pep
DGGAREFKEIVLEVMQVGGVLNVGDFVPALRWLDPQGVAAKMKKLHRRFDDMMDEIIAGYREARRVAADGEESKDLLGLLLSMVDERPFDSGEEVRITETDVKALILNLFVAGTDTTSTIVEWSLAELIRHPEILRQAQEEMDAVAGRGRLVTESDLRSLTFFNAVIKETFRLHPSTPLSLPRMAAEECEVAGYRVPRGSELLVNVWGIARDPALWPDPLEFRPARFLPGGSHADVDVKGADFGLIPFGAGRRICAGLSWGLRMVTLTSATLVHAFDWELPAGQTPDKLNMEEAFTLLLQRAVPLVARPVPRLLPSAYEIA

SEQ ID NO: 297299 - protein, 230 aa, Zea mays
  Clone ID: MRT4577_34214C.1.pep
MAPSFTSLLSAANSAAAATASRLPSAAAGRASTFVRFPHHPTGWAGASVAAPRTARKRAPGVAYATAATEKSIYDYTVKDIDGKDVPLKKFKNKVLLIVNVASQCGLTTANYTELSHIYEKYKTQGFEILAFPCNQFGAQEPGSNTQIKQFACTRFKAEFPIFDKVDVNGPNTAPIYKFLKSSAGGFLGDLVKWNFEKFLVDKNGKVIERYPPTTSPFQIEKDIQKLLAA

SEQ ID NO: 297300 - protein, 43 aa, Zea mays
  Clone ID: MRT4577_34215C.1.pep
PIPGAGSIKRGGGTLATPSTLPASIPSLLGHPVPLSLRYMFTP

SEQ ID NO: 297301 - protein, 127 aa, Zea mays
  Clone ID: MRT4577_34216C.1.pep
PLYIVFSSIQPLEQRVHFCLRNNPLHTHIPPVSHTTLQQLTNIHYHRPQHKSPFGKITLTTTASLWNIGLPTSSEAASSCHRRLRSLSFILTPFPSVLPGLIFSISNLQILASAAPTITNNPFHKSS

SEQ ID NO: 297302 - protein, 79 aa, Zea mays
  Clone ID: MRT4577_34217C.1.pep
APARPDTVGLRASRPARAPPPCSDRDTDPEQRPSRDAPAPSRPRPHASPAAEHPAQDRPEPLQPDYAAPQPSPTRPGAP

SEQ ID NO: 297303 - protein, 39 aa, Zea mays
  unsure (1)..(39): unsure at all Xaa locations
  Clone ID: MRT4577_34218C.1.pep
HLDIIVKLIKVEVEYXTXIYGLIVIWSSKITPTRPRTRG

SEQ ID NO: 297304 - protein, 224 aa, Zea mays
  unsure (1)..(224): unsure at all Xaa locations
  Clone ID: MRT4577_34219C.1.pep
PPLCSICQHKAPVFGKPPRWFSYAELEVATGGFSRANFLAEGGFGSVHRGVLPDGRAVAVKQHRLASSQGDVEFCSEVEVLSCAQHRNVVMLIGFCVENKRRLLVYEYICNGSLDTHLYXHKIAVGAARGLRYLHEECRVGCIIHRDMRPNNILVTHDFEPLVGDFGLARWQPDGDMGVETRVIGTFGYLAPEYAQSGQITEKADVYSFXVVLVELVTGRKAVD

SEQ ID NO: 297305 - protein, 74 aa, Zea mays
  Clone ID: MRT4577_3421C.1.pep
LLPVCLPCSVDMVGVSTYIRRVVLNSNRTSLLMHTRIWIITCCGCTAQNIHMSASRLVVKYETIIMRDYEPLRD

SEQ ID NO: 297306 - protein, 85 aa, Zea mays
  Clone ID: MRT4577_34220C.1.pep
QYPSTLASINRSIWHRDTEPRYSQVQSHVCSETTRISFVLQAAASTSSSGFFTRRQSSTHHPRVALVWSMTMLIVSAISSGDLVW

SEQ ID NO: 297307 - protein, 81 aa, Zea mays
  unsure (1)..(81): unsure at all Xaa locations
  Clone ID: MRT4577_34221C.1.pep
SLDPLEAGALFFFFFFSTFFCFLQWFFFMFCALQAXAGQLHKEERSSLQMSQRQKVQNNKKPTNRTKAVQSGKIHIFTRTG

SEQ ID NO: 297308 - protein, 55 aa, Zea mays
  Clone ID: MRT4577_34222C.1.pep
MSRIVWCLSLRSYSSFSVEDIFLHVGSEVGSASVYAYVARVGVPVGIARVDRRVS

SEQ ID NO: 297309 - protein, 117 aa, Zea mays
  unsure (1)..(117): unsure at all Xaa locations
  Clone ID: MRT4577_34223C.1.pep
QEDPHQAQGGGDXPREAATGAHRGPRQEADGAAGGKRAEQEAPHGTQGDPGGXQEKMMRTRHGTQGPGXQXGPPPPPARGEXEXPKEQFHGGQCVGLACRERECDPHQKKNGXXSTS

SEQ ID NO: 297310 - protein, 167 aa, Zea mays
  unsure (1)..(167): unsure at all Xaa locations
  Clone ID: MRT4577_34224C.1.pep
MMAASSSSSNLSDHLVQDDLXPWPSSSSSLPFTPAAPHHSAIIGGNSQQWCQQPLALNCADRHHSDELEVLLSAQGSHHHSHSHPASPVIPPQLSSSLLTMQDHLGFQWSNCGGGGFLDTSPSTPPTNGQLQHDGHDDDKIEAEGTLITNSSRPSCAGTATIVASFH

SEQ ID NO: 297311 - protein, 63 aa, Zea mays
  Clone ID: MRT4577_34225C.1.pep
NLFLGFAKKKGSKNKGALKFGMLRDNPPLGAKFVAMPFKKQRWGIFFHGTPGVCLSTNFAGPG

SEQ ID NO: 297312 - protein, 111 aa, Zea mays
  Clone ID: MRT4577_34226C.1.pep
NIFSRTKLGKDLSNTKPISVKIKTITSIPQADGSKNPSKPPPLNNSNLNCSKKLVKNPPPPNPMAWGQLLTPGSPPTKPFFWTLSIWSKTSKNPLTAGQPHLLYSKTKPPL

SEQ ID NO: 297313 - protein, 105 aa, Zea mays
  Clone ID: MRT4577_34227C.1.pep
DFLFNNFLNILPYPQGLGPLLTIQSNLYSQNPDSTNHLFGTTQGTGTTILTLLPGFHPQTQTLLLTYISHHHLAISFIFLIAIHIYPTNFTILHIIKHLFIITYS

SEQ ID NO: 297314 - protein, 88 aa, Zea mays
  unsure (1)..(88): unsure at all Xaa locations
  Clone ID: MRT4577_34228C.1.pep
AGCSQAGMAVLFSPDLXTKVVEGCENPNFXPYAIQQAIAVGKLPQSRLFLQQSWSSYHIATLXHLLGHNIXAQQLQQLVLANLTNYCE

SEQ ID NO: 297315 - protein, 181 aa, Zea mays
  Clone ID: MRT4577_34229C.1.pep
RFLPNRFSQKRVKKLNVPQLPEAENKLKQTPHDSCGRIELGQSGFHDMPRRRRKQSQSVSQRDKGAETRHVRRPTNRPITQHLMRLLPSPRGSRNHMTPLHGVETAAQANNCQSSSTAVVKESRGRRKLSAAGGSQLERPSDGADGEATVGVLVATRGDKAKAREVGAGPCQGGRASLVPN

SEQ ID NO: 297316 - protein, 43 aa, Zea mays
  Clone ID: MRT4577_3422C.1.pep
MAPRGRKRKAEAAVVAVAEKRETLANGGDGMEEATVVIEHCTS

SEQ ID NO: 297317 - protein, 206 aa, Zea mays
  unsure (1)..(206): unsure at all Xaa locations
  Clone ID: MRT4577_34230C.1.pep
MEIVHYAAVQDAFSQNGGDDLVNKNNRSRLPDLAHAPGQCDPHKDKRFTASANPPHIPRSHMNACVLGDAHHEPEVSEXITCRTCNAYALKKMNNNNNFDKKLAKNYHGFLTSEAIINHIPRLLGTGLNKARTLPTLVTHHQSLEYNVNETKATDKLQLTKALCMGVADVNLVMHENQIQQNIQMRVNFLVSLLKNNWQNARCLYI

SEQ ID NO: 297318 - protein, 54 aa, Zea mays
  Clone ID: MRT4577_34231C.1.pep
IHFIMGTLLLNFTSLKTPTYKSKFKLHIKKKKKTKHPKNKNTTPYYMPNKQTPT

SEQ ID NO: 297319 - protein, 49 aa, Zea mays
  unsure (1)..(49): unsure at all Xaa locations
  Clone ID: MRT4577_34232C.1.pep
RSSLGHRSLFRRTGFVKVRKNKAYFTRYQVXFRRRPXGRTDYYARKRLV

SEQ ID NO: 297320 - protein, 112 aa, Zea mays
  Clone ID: MRT4577_34233C.1.pep
LLLSLSLYHLSSPPTLQQSLHRRRRRRDAPVGCPRQRKVSCGPCSLSPPRWMKTGNYWPALRSRRRAEVAAALLIGFVACFCPETRAGQDCVKAGGRVIACASVVTLCYAIC

SEQ ID NO: 297321 - protein, 50 aa, Zea mays
  Clone ID: MRT4577_34234C.1.pep
FLSAIVGSDVASAAAQAAISAQSRVDLNDGEIETSINSIKQEGISPSLHI

SEQ ID NO: 297322 - protein, 359 aa, Zea mays
  unsure (1)..(359): unsure at all Xaa locations
  Clone ID: MRT4577_34235C.1.pep
MVPGYDCAASVLLCAEDNAAILGLDDDGEESSWAAAATPPRDTVAAAAAXTGVAVDGILTEFPLLSDDCVATLVEKEVEHMPAEGYLQKLQRRHGDLDLAAVRKDAIDWIWKVIEHYNFAPLTAVLSVNYLDRFLSTYEFPEGRAWMTQLLAVACLSLASKIEETFVPLPLDLQVAEAKFVFEGRTIKRMELLVLSTLKWRMHAVTACSFVEYFLHKLSDHGAPSLLARSRSSDLVLSTAKGAEFVVFRPSEIAASVALAAIGECRSSVIERAASSCKYLDKERVLRCHEMIQEKITAGSIVLKSAGSSISSVPQSPIGVLDAAACLSQQSDDATVGSPAVCYHSSSTSKRRRITRRLL

SEQ ID NO: 297323 - protein, 43 aa, Zea mays
  Clone ID: MRT4577_34236C.1.pep
SSFTPDRTTLHHERSTPFRCCSGSSWWRRLHYKRLLWLTDSMD

SEQ ID NO: 297324 - protein, 99 aa, Zea mays
  Clone ID: MRT4577_34237C.1.pep
RANQPEGAQQGMKQAYESLTDGFGRTSSAIIGNPIKVYNRGAGVGSVLATAVCGAPAAAVAPISASARALHYALLGLRNSLDPEHKKESMYKYQGPSQA

SEQ ID NO: 297325 - protein, 153 aa, Zea mays
  Clone ID: MRT4577_34238C.1.pep
AQRNSEGSLTTTPPLRTTLYDPPEESRVRLRRVRVHMQAQRREHRRKLKPTPLGRLAVPSRRTARGRSMSVFRRRASCNVGALESTPFHLYERRPLPTTTPPLPTCSTTRPQWSPATRCAAPSTRCTTSSPSTTSTTSTWTRSTGSSYADVHG

SEQ ID NO: 297326 - protein, 129 aa, Zea mays
  Clone ID: MRT4577_34239C.1.pep
GLGVDELRFWFSINESSVVSSEIFMFSVSAVFSASEFIESKSPDISQFSLLLSASVSISRFSRSLRCARDERASNSWRWRRIREVLWGIGEDYAQRSREINNRQVVVRDIGYQYYEDFAIPGHPNPNIL

SEQ ID NO: 297327 - protein, 43 aa, Zea mays
  Clone ID: MRT4577_3423C.1.pep
TKIIHCAVQSDQYQGRDGLGILAPCANYNLMVHGYKRPMRTDA

SEQ ID NO: 297328 - protein, 136 aa, Zea mays
  unsure (1)..(136): unsure at all Xaa locations
  Clone ID: MRT4577_34240C.1.pep
MELWVFGYGSVIWNPXGLDFYDKIRCFIEGYKRTFNLVCTDHRRTPEHPARTCTLEAINEAICGGTAYCDKVGPQKELLAAQYLERRECEYDQKIFIDFYEEGHPLQPAVTCALMFVSAPYPIGYKYYLGPAPVQD

SEQ ID NO: 297329 - protein, 138 aa, Zea mays
  Clone ID: MRT4577_34241C.1.pep
MGAADKWLLPLVSVSFVSLLLFLSALSGFSASSALFARLPPPSYVRRGAAAPPSFAYLLAGGRGDGRKLLRLLLAVYHPRNRYLLHLSADAPASERAELAAAVARAAPAVRAFSNVDVVGRPTAGTPMGSSGLAATLR

SEQ ID NO: 297330 - protein, 116 aa, Zea mays
  unsure (1)..(116): unsure at all Xaa locations
  Clone ID: MRT4577_34242C.1.pep
TESSITIDYSSEFPLNXSRATQLDIEPQFQLDRRAIMSINKADVGYNCITSCGSXGRGALGPLCLLVLAYRRLRPEQTGVYFYLAKGLYRSLATHFCQDESRSSSATDIXVKRVVR

SEQ ID NO: 297331 - protein, 138 aa, Zea mays
  unsure (1)..(138): unsure at all Xaa locations
  Clone ID: MRT4577_34243C.1.pep
MGAADKWLLPLVSVSFVSLLLFLSALSGFSASSALFARLPPPSYVRRGAAAPPSFAYLLAGGRGDGRKLLRLLLAVYHPRNRYLLHLSADAPASERAELAAAVARAAPAVRAFANVDVVGRPTVATPMGSSXLAATLR

SEQ ID NO: 297332 - protein, 141 aa, Zea mays
  unsure (1)..(141): unsure at all Xaa locations
  Clone ID: MRT4577_34244C.1.pep
TSWTXPGALQVHLXRHRLXPNGRPLLSDLRPDPQSSPCVHPAWPHPRSPPRPGRAPPTSPPPHPRRPPXRGASRRRRPQSTRLRPPPRPPPTPGTSSPPPTPRARCSRAGARSTGFCSGCRPTRFSCKILTALSKKISFFR

SEQ ID NO: 297333 - protein, 47 aa, Zea mays
  Clone ID: MRT4577_34245C.1.pep
SGLVLLSRCLGLPGCPRSLLVSLFALSFSLVVSSSALSLCIRAAVGA

SEQ ID NO: 297334 - protein, 275 aa, Zea mays
  unsure (1)..(275): unsure at all Xaa locations
  Clone ID: MRT4577_34246C.1.pep
IRHEAFVDSAAMERERESDRCLDPQLWHACAGGMVQMPAVHSKVYYFPQAASEHAQGPVXLPAGRVPALVLCRVAAVRFMADPDTDEVFAKIRLAPVRPNEPGYADDAIGAAAASGAQEDKPASFAKTLTQSDANNGGGFSVPRYCAETIFPRLDYSADPPVQTVLAKDVHGVVWKFRHIYRGTPRRHLLTTGWSTFVNQKKLVAGDSIVFMRTENGDLCVGIRRAKKGGIGGPEFMXPPPPXQPPPPQGGGYAGFSMFLRGEEDGGKMMAAAAP

SEQ ID NO: 297335 - protein, 86 aa, Zea mays
  unsure (1)..(86): unsure at all Xaa locations
  Clone ID: MRT4577_34247C.1.pep
RTRVRPTPPLYVSFPFLHHSLHRKTPNXLAILQFNSFLPLLFHLLHIQSQRQLHLLLQHSSPNIILYPYTHMHNTPTILTSFTLDT

SEQ ID NO: 297336 - protein, 34 aa, Zea mays
  Clone ID: MRT4577_34248C.1.pep
CVFRCSLNRRTSLITPNEFNFYTFKVYNTEEYTK

SEQ ID NO: 297337 - protein, 64 aa, Zea mays
  Clone ID: MRT4577_34249C.1.pep
WKGGPGGEELTRTLMLVIHVLLCGMCLRVPLRCVPRGELVLPGCVLTNSNTILSVIKSFDTLLA

SEQ ID NO: 297338 - protein, 66 aa, Zea mays
  unsure (1)..(66): unsure at all Xaa locations
  Clone ID: MRT4577_3424C.1.pep
PRARAPPAPPPPPPPPAPGPPRARPRGGPGGGPXTRGDPHPPGPKGGPPGVPPQGLSNRLSLLVLF

SEQ ID NO: 297339 - protein, 101 aa, Zea mays
  unsure (1)..(101): unsure at all Xaa locations
  Clone ID: MRT4577_34250C.1.pep
KLSCGCFQPKDIFYEQINMTKRKEAFNCEFHEICDNPPSVSASSLHVVSVFLSCXPVTRVAATANQIPTRGVGRELAPSPPASRFSCFVLRVPWCLAASLP

SEQ ID NO: 297340 - protein, 65 aa, Zea mays
  Clone ID: MRT4577_34251C.1.pep
EEKLKIFFDNFAPHPAEKSLTCSTKIVAPPNELATTVTYCRPQFTCLHVWRAPTTRSTCFFCGSR

SEQ ID NO: 297341 - protein, 107 aa, Zea mays
  Clone ID: MRT4577_34252C.1.pep
CHSSRISCRRQPLREQLHMRLSRGWQGHYSRRPPVHRRMPWSCRSRRVIGASSFRSPSDSLQTYPSALLTSSTHIWSIVAEFHLCLLIVCDCDDSGRPRGTQSPIGV

SEQ ID NO: 297342 - protein, 81 aa, Zea mays
  Clone ID: MRT4577_34253C.1.pep
FSPRRPQSSSRVYRSFFHDLDRWCQGRLAYCACTAPAPSWIRAELTIEHVLFRDISWVHFMFTKLFLLNSSFYFYGDITTN

SEQ ID NO: 297343 - protein, 137 aa, Zea mays
  Clone ID: MRT4577_34254C.1.pep
FSFALFSVKLKRVEVVLCIQVTMSMTDGRLTSNEEATVSCSERHCFKDCNTRNAIIMSFRLPFLQSKAVSSTVLYIHSRYPSYTVGSKRFYPLYLLSVQQRSLNHVLYTQISILYTFSSFIFCTYVFASSFNVLYIF

SEQ ID NO: 297344 - protein, 117 aa, Zea mays
  Clone ID: MRT4577_34255C.1.pep
EETAGGRQQRAGSKEAADAANKKQSQRQQEGAREETGAAQSRQQGTQAPRPPREEPGGPAPSKAPKEAAERAPTPGGGTSGDTDDARRAARAPRRQRPAPAPANGGRTRERTRGEPG

SEQ ID NO: 297345 - protein, 159 aa, Zea mays
  Clone ID: MRT4577_34256C.1.pep
MEAYKVWVRKNRDLVRSLESLANGVTWILPERFANSEIAPEAVYALLGIVSSVNQHIIETPNDGHSLASKEQSIPWALVVSILKDVEAVVEVAAQHFVGDDRKWGFLAVTEAVKACVRLAAFRESGYRMLLQGGEVENEEEDVLEDNQGVKTNGVPAIY

SEQ ID NO: 297346 - protein, 105 aa, Zea mays
  Clone ID: MRT4577_34257C.1.pep
GGGPSPFFFCQGGGWALWFTGFHSVPGGLIPVGAGNRVFFKEPNLCWWQFHKQDLGTFNYPAGDKQWAGWLKMKTKQGFKVGRDWPPFFVPGRAPLYFLQGACAL

SEQ ID NO: 297347 - protein, 95 aa, Zea mays
  Clone ID: MRT4577_34258C.1.pep
YTRFDSDVGEFRAVTELGRPSAEYYNKQKEYMEQLRATVDTACKHDYEISESFLVPRTVEPKVTVYPSKTQPLEHHNLLVCSVSDFYPGSVEVRW

SEQ ID NO: 297348 - protein, 225 aa, Zea mays
  unsure (1)..(225): unsure at all Xaa locations
  Clone ID: MRT4577_34259C.1.pep
PVRPSVLAHWFYNDADASVVAIYVYDINNSANQLEPRQKEFLLAGNNNRVQQVYGSSIEQHSSQNIFNGFFSXLLSEALGINTVAAKRLQSQNDQRGEIVHVKNGLQLLKPTLTQQQEQAQAQYQEVQYSEQQQTSSRWNGLEENFCTIKARVNIENPSRADSYNPRAGRISSVNSQKFPILNLIQMSATRVNLYQNAILSPFWNVNAHSLVYMIQGQSRVQVVS

SEQ ID NO: 297349 - protein, 55 aa, Zea mays
  Clone ID: MRT4577_3425C.1.pep
MGLFRGSFTLLVGMGCGVYIAQNYNVPNVKKLFNTYVFLAKHIEETYRKPKKDDD

SEQ ID NO: 297350 - protein, 63 aa, Zea mays
  Clone ID: MRT4577_34260C.1.pep
VNYQDRAPHTPTPLPSNTKSPPSTPTTPTHATIISIHNLHQSTIHIHYTNTANNLAVINFTAT

SEQ ID NO: 297351 - protein, 66 aa, Zea mays
  Clone ID: MRT4577_34261C.1.pep
FPSSETDRRGEPPRRRLQPLCPLRSVPISRPRSMSPVPLSFFALTVIGLPLPLIIHNLHFNLTLSF

SEQ ID NO: 297352 - protein, 60 aa, Zea mays
  Clone ID: MRT4577_34262C.1.pep
VQIHKEPVKIHLGVPGVGKYRQRIDSTEAADGADACARVRGRVDERVDGRVGGRVGGRVG

SEQ ID NO: 297353 - protein, 67 aa, Zea mays
  Clone ID: MRT4577_34263C.1.pep
THNTIAGVTLGRSRVGQAHWHDAASSAYASITRHLRRLLHPHRTQRRRLLSPSRAPSKSSRASNFLA

SEQ ID NO: 297354 - protein, 42 aa, Zea mays
  Clone ID: MRT4577_34264C.1.pep
NRETHHFIYCMHDQARLNWNNALLATAKGPAKGPAKGPAQGP

SEQ ID NO: 297355 - protein, 207 aa, Zea mays
  Clone ID: MRT4577_34265C.1.pep
LSLNQTLTSSWYQRRLRSSPSPPSASLFQSWPPTLPATPTSSLVAPPTPVVLPTIFVPPRTADSSRRLTTAPSVDLLRQPPLSKPAQTPRLLPLPSVAVLLPTSPATSRPSPWLANALRPPAQPTTARSSTTKSQPPTRRVGTCVATVPTPIPSLRSMPRLSASSTSAASSPSSSTLRRHPSPSGAASSSSSSASTPLPTTCCAMPP

SEQ ID NO: 297356 - protein, 51 aa, Zea mays
  Clone ID: MRT4577_34266C.1.pep
RVREEARELAPPPTPKRQPRDTQRCSRTHLMAACHEGISAEQLVPQALPSL

SEQ ID NO: 297357 - protein, 653 aa, Zea mays
  unsure (1)..(653): unsure at all Xaa locations
  Clone ID: MRT4577_34267C.1.pep
MASVSVVLLQRSSSRVRGYIRLQRIASSSVTLVLEGEGHWWWSNSRGRDERFGARTVHHMAGSVEGXKTAACRXGGQVAMAPGVVTGGVEDAYGEDRATEDQTVTPWAVCIASGHSLLRDPRHNKGLSFTEKERDTHYLRGLLPPVVLSQDLQEKRMLQNVRQFQVPLQRYTALMDLQERNERLFYKLLIDNVEELLPVVYTPTVGEACQKYGSIFRRPQGLYISLKEKGRILEVLRNWTEKSIQVIVVTDGERILGLGDLGCQGMGIPVGKLALYTALGGVRPSACLPITIDVGTNNEDLLKDEFYIGLKQRRATGQEYSEFLDEFMAAVRQNYGQKVLVQFEDFANHNAFTLLEKYRTNHLVFNDDIQGTAAVVLAGIVAALKSVGGTLADHTFLFFGAGEAGTGIAELVALEISRQANVSVEEARKKIWLVDSKGLIVASREETLQPFKKRYAHEHEPVKDLLGAVKAIRPTALIGSAGVGQSFTKEVIEVMSSINERPIVLALSNPTSQSECTAEQAYTWSQGRAIFGSGSPFDPVKYNDKLFVPAQANNAYIFPGFGLGVVISGAVRVSDDMVLAAAEALAEQVTPEHIEKGLIYPPFSIIRKISANIAAHVAAKAYDLGMATQLPRPKDLVKYAESCMYSPVYRSYR

SEQ ID NO: 297358 - protein, 185 aa, Zea mays
  unsure (1)..(185): unsure at all Xaa locations
  Clone ID: MRT4577_34268C.1.pep
QVIVVTXGERILGLGDLGCQGMGIPVGKLALYTALGGVRPSAXALTCEYTVLNXYVSIQFFISSLMMXFSSMLIXCLPITIDVGTNNEDLLKDEFYIGLKQRRATGQEYSEFLDEFMAAVRQNYGQKVLVQFEDFANHNAFTLLEKYRTNHLVFNDDIQGTAAVVLAGIIAALKSVGGTLADHTF

SEQ ID NO: 297359 - protein, 37 aa, Zea mays
  Clone ID: MRT4577_34269C.1.pep
HASAEESAVQSVSVFRMIHDSCVLIFPSLWEQDGSAS

SEQ ID NO: 297360 - protein, 55 aa, Zea mays; identical to SEQ ID NO: 297349
  Clone ID: MRT4577_3426C.1.pep

SEQ ID NO: 297361 - protein, 124 aa, Zea mays
  unsure (1)..(124): unsure at all Xaa locations
  Clone ID: MRT4577_34270C.1.pep
GRAIFGSGSPFDPVKYNDKLFVPAQANNXXYIFPGFGLGVVISGAVRVSDDMVLAAGKHNLQDFRKEDHSFLFXQLSLIDSASICLRIXAEALXTGMATQLPRPKDLVKYAESCMYSPVYRSYR

SEQ ID NO: 297362 - protein, 334 aa, Zea mays
  Clone ID: MRT4577_34271C.1.pep
MAPPHSHRSFRGWQNASHVALVLVLVSVLFLSKARPSAGARSLLELYKPPASALLTYHNGAVLQGRIPVTILWYGRFAPAQKAVVTDFLQSLTTTATSPTAPPSPSVSQWWGTIDQLYLSKARSGGGSDDGSAQVALVGQAADEGCSLGKRLALSQLPQLAARAGPAAKGGVALVLTAQDVAVDGFCTSRCGLHGSDAGAGAAYVWVGNAETQCPGQCAWPFHQPLYGPQAPALVPPSGDVGMDGMVVNIASMVAGAVTNPFRDGFYQGDKDAPLEAATACTGVYGSGAYPGFAGNLAVDGTTGASYNANGANGRKYLLPALFDPATSTCSTLV

SEQ ID NO: 297363 - protein, 48 aa, Zea mays
  unsure (1)..(48): unsure at all Xaa locations
  Clone ID: MRT4577_34272C.1.pep
PTRPRMSTCTSILYFEVHTXISSTADTCQISTKTHSHMLKDHTPTEDT

SEQ ID NO: 297364 - protein, 51 aa, Zea mays
  Clone ID: MRT4577_34273C.1.pep
TPKKVSILFIPLLSTAAQKALATVDKSGMKSTDAFSQSLLSRSHFAIFLFS

SEQ ID NO: 297365 - protein, 60 aa, Zea mays
  Clone ID: MRT4577_34274C.1.pep
VRPHYRKLRCNDENNPSDENLKRRLKKGEAKDEGLHIPSVEGVVDTWYRVGSSIFILVVL

SEQ ID NO: 297366 - protein, 120 aa, Zea mays
  unsure (1)..(120): unsure at all Xaa locations
  Clone ID: MRT4577_34275C.1.pep
FTTIPRFRLYMILSYKLPLRTRRWANLLLCGLFSKLYKDSNRKYKFVMHLVDVYGPFAFFKGCXHIYGDXFDDTNMERLRSTMVMRSPEDDMFNYDPKTIDWDDYFYRIHIPGVLKYVCK

SEQ ID NO: 297367 - protein, 98 aa, Zea mays
  Clone ID: MRT4577_34276C.1.pep
ARARAGQPVPSGDPLHPAQQGPRHRDQRKHHKGLHQQRVLEVDHGQRAPEVAAPRRSHHGLASLHARHDGHGVEELHGPTHQVRGGSGGWLRVVPGLS

SEQ ID NO: 297368 - protein, 168 aa, Zea mays
  unsure (1)..(168): unsure at all Xaa locations
  Clone ID: MRT4577_34277C.1.pep
TDERAASSDTGADAQFLQTSLSLTLNYEAIIQSWGSSPWTGGGERPHVKLDTRWPHDYTNMWVVGGVVGHGGEDLPGTPRLGMDGGREARVSRYREKRRTRLFSKKIRYEVRKLNAEKRPRMKGRFVKRATAGXAASPSLASLNAAGLLHVWLLSLRVCISRHVVMKS

SEQ ID NO: 297369 - protein, 106 aa, Zea mays
  Clone ID: MRT4577_34278C.1.pep
MRCLFRRRPRTYPGLESFCFIDKANILALFSTLAMDAKKFKEEREAYWNGLKVRLEHAAQADTIEGFVAANPAAKNTAPKFLDAPRADDLSLEKVSDDPFGVYPGP

SEQ ID NO: 297370 - protein, 54 aa, Zea mays
  Clone ID: MRT4577_3427C.1.pep
CASSVSLPWRSSGPLVLWVGRVAFARFFWLTLPSCPWPSAELRARGPGRCCRSG

SEQ ID NO: 297371 - protein, 66 aa, Zea mays
  unsure (1)..(66): unsure at all Xaa locations
  Clone ID: MRT4577_34280C.1.pep
KGVVGXHYILXSKKTPXFFITPXPPSKXSFFNTIIXLFFFHPKKKKKKXPLSKKKKPRGEKXTPFF

SEQ ID NO: 297372 - protein, 78 aa, Zea mays
  Clone ID: MRT4577_34281C.1.pep
SLITLLYATLQAEAPLTVTGLLNSLGLEKYIVLFQAEEVDMAALRQMGESDLKDMGVPMGPRKKILLAVGPQSKQRQI

SEQ ID NO: 297373 - protein, 58 aa, Zea mays
  Clone ID: MRT4577_34282C.1.pep
SISTRLNGLHINHRSLSLCSKLTHYKLTARVARTNNSRVDQYTTRHEMLPVDNHASSS

SEQ ID NO: 297374 - protein, 50 aa, Zea mays
  Clone ID: MRT4577_34283C.1.pep
IHIILTRCPLRSGRCMRVGGWPPKEPEHLPLWTPYLFLPSNDASLSYHQI

SEQ ID NO: 297375 - protein, 157 aa, Zea mays
  unsure (1)..(157): unsure at all Xaa locations
  Clone ID: MRT4577_34284C.1.pep
VGDWVPRRPAGLHKRREERAFFPEQGSFLSRGDPSHNVGSRHDSMHRRXRHTAAKGECXRKNRISELAPRPFNTKLSSKKTLRSHLARDXNAKRRALEIDTGNYSCXSEAVTRKTRILEEVYNASNNXVRTTQTLVNIAIAXVDGAAFKNGVLTHYG

SEQ ID NO: 297376 - protein, 67 aa, Zea mays
  Clone ID: MRT4577_34285C.1.pep
NSIREKKVSVLLSTLTETLFYVWSDGRRLCLHQMAQTPRCFFFSFFHSFRGSHHRLNKTFRPSEPNP

SEQ ID NO: 297377 - protein, 131 aa, Zea mays
  Clone ID: MRT4577_34286C.1.pep
HGRAYPFNQTTKTNQKSSEHGIFSIKVCVRGGKLNKKFLGARITNNTPPLTGERGNPFFFFYRLSPEKLVKTLFVLAPPAKPPKKKTPPLRCPPGPRENWFPQFLKKLPPFKKRKKNHCPFGEKMVFQNPP

SEQ ID NO: 297378 - protein, 119 aa, Zea mays
  Clone ID: MRT4577_34287C.1.pep
TSPRSAIQDRVGGTRHHTTTTSTYSCPNLRLQRRKIRQPQPITHTRNTRTVAPYVRAATRTYTREAISWRYSRASNVPGDTPYRTRAARATYADVRVRTQNANRGTAGAGTRNERERCC

SEQ ID NO: 297379 - protein, 147 aa, Zea mays
  Clone ID: MRT4577_34288C.1.pep
EKGFKMSKSIGNVVDPEKIIVGGKNHREEPGYGADVLRLWVSSVDYTTDVLIGPQILRQMSDMYRKLRGTMRFLLSNLHDWKPDNSVPYNDLPKIDKYALFHLETVMTSMKDRYESYQYYKVYQILQRYATAGLFNCYLDAAKDHLY

SEQ ID NO: 297380 - protein, 134 aa, Zea mays
  unsure (1)..(134): unsure at all Xaa locations
  Clone ID: MRT4577_34289C.1.pep
SVIGVHLQCQVALQGEXGDSCPQDEGSLQYLTVGLLFAPHAGSSQNQRPAADDDSASSAVVVSHHSSDDEHRRAHAGVTLAQVEEVTLPKVVDYFHRYADASVYRMLWKARHGAAYIQVAKAASGSGTETQMIQ

SEQ ID NO: 297381 - protein, 40 aa, Zea mays
  Clone ID: MRT4577_3428C.1.pep
LSELCTHPYLTHRPRTILSLLARRSTSPCQQAKGSCFALQ

SEQ ID NO: 297382 - protein, 143 aa, Zea mays
  Clone ID: MRT4577_34290C.1.pep
RAPFLPRPRLSMAPSPCRPPCCSAPSPSPSSPSPISSILQPSSPCCPPCRWCAPPPYHVALPFLQQVCRSCFPMAPKSPALSHGRPSLPCSRLAPLCSFFPMAAHLSVAAPRCRTSSCSLAPSAPVWCLTKCPSGFPCSGQSY

SEQ ID NO: 297383 - protein, 50 aa, Zea mays
  Clone ID: MRT4577_34291C.1.pep
RTRGRTRGIKAMLSGSEAAYISYLNNSLANSSSVQTLTMKVLLWRYLRWL

SEQ ID NO: 297384 - protein, 42 aa, Zea mays
  Clone ID: MRT4577_34292C.1.pep
MSHPACHRAGVVHRDLKPENLLISEDGVLKVADFGQVNISEP

SEQ ID NO: 297385 - protein, 87 aa, Zea mays
  Clone ID: MRT4577_34293C.1.pep
MPTQDHLRRDIKFLHDALLHPHTMHPYKPENCYEHGKRSAMVLLDCKQFTKHYDLEQEFLPQNPSMLHLWCQVEVLDQVGDPPCIPP

SEQ ID NO: 297386 - protein, 109 aa, Zea mays
  Clone ID: MRT4577_34294C.1.pep
SFNVNQKTFGLLLGKDILGPFGGGFWGGGKPQLELGKIYGQNNWGGTTPPDKEKTPRGRAPQSLTWDPKKKTSTPKFYLGTVSGGKNPPPFFMEPVKKRFKTLNGIMFG

SEQ ID NO: 297387 - protein, 88 aa, Zea mays
  Clone ID: MRT4577_34295C.1.pep
RKIQGRLNCSKSRLGNSNDWVTKCLFTFSEGKDFLHFFPPRKKTGGYLLGGVGGDVFTLGLSGGAHTRPGGPDLSVVSVGPQLGGAGF

SEQ ID NO: 297388 - protein, 137 aa, Zea mays
  Clone ID: MRT4577_34296C.1.pep
HLSMIHLLFLVTMGISFSRSISAVVACNKYRPLRPSEVLFQWYTEPEPSAASSIRRSTRLVDLARGVCWLLVGILVGDQQAVDRRRGATRPSARVYAAICSVHSANSRSFAAWRNVSAVQVHQQLRVGRCLVARAVS

SEQ ID NO: 297389 - protein, 181 aa, Zea mays
  unsure (1)..(181): unsure at all Xaa locations
  Clone ID: MRT4577_34297C.1.pep
MARFNPYENNGGTCLAVAGADYCVVAADTRLSIGYSILSRDHSKISQLSDKCVLASSGFQGDIKALQKALAAKELIYEHNNNKKMSCPAMAQLLSNTLYYKRFFPYYAFNVLAGLDTQGKGCVFTYDAVGSYERTGYSAQGTGSALMMPVLXDXQLKSPXSPLLLPAXDAVTPLSGSDAXD

SEQ ID NO: 297390 - protein, 540 aa, Zea mays
  unsure (1)..(540): unsure at all Xaa locations
  Clone ID: MRT4577_34298C.1.pep
MEDLGLWKQAWMWVLSQKHILAWAHTAACGSRERLAFLVDPHWPAVSRACATSSRLALAALRQWRGCTARGVLAVASLGPAAVFVILWSFFVCMTSPACALYALLSLGAAAAVVHYMGYTPGLVIVGLFGIFIMWMYGYFWITGMLLVAGGCMCSLKHARYVIPVLTSYAVYSVAVRVGWLGVFLTLNLSFLTNDLLNKLGQGYEGSTEESQFEDMKDSDPVMDEFYRSCEFPSVPDSEPETVSCAKPYCSAPIQDVLHVQKEVPPSKIVKSDSTSLDEIKRIMDASDVSEALGVPRNKSIDNERYQKENLRMVLLVXPDKNMGNQLACESFNKLQTAYEVLSDFTKKNSYIQQLSKVDSQKMTLXMMCXVSQQMGGMEFLSNVSTRIQCTXFSNYNIWICTKRXTKTKARVCEGCDQFHQAKDGEGWVETGCSPSSKVEVPRAFVCAESKRFDVSEGATXEGXMACMTKTHRAKTVVNIVGAESMPQVSYSSRYDVSWDGARSPQEQLEXLAAEGLVSRGLCCQPQMRXKSWTTVKLPQ

SEQ ID NO: 297391 - protein, 73 aa, Zea mays
  Clone ID: MRT4577_34299C.1.pep
KNLSSDFMKDKVSLIALHRMIFLNRVIELIALSVSLFNQQTHLFNTIYVQVLVLKCEICKRTTYTARRQLFTT

SEQ ID NO: 297392 - protein, 149 aa, Zea mays
  unsure (1)..(149): unsure at all Xaa locations
  Clone ID: MRT4577_3429C.1.pep
MAWWRARVVASVRRAWLAVAVAAARARVRKGECGGVLSLHRDVQTCGYQDVQVMWNMLSSEKEAAAGALPKPPRRKRPSSVWRLPLWPXGRPAPPRGEAAAAAASPTEWYSWLVSHGRVGGHRPDHGTSSSTSQARPTKIVSVRLPSQA

SEQ ID NO: 297393 - protein, 54 aa, Zea mays
  Clone ID: MRT4577_342C.1.pep
REEGSKDKMESISEKPLAQGNPTQNPDQLGSYGGGGGGPYIYYMIRGTGSKLGS

SEQ ID NO: 297394 - protein, 229 aa, Zea mays
  Clone ID: MRT4577_34300C.1.pep
MARKRRAPSPPPPPQEESSSEESGSEELEEPPRLPELRSPPQAAANNADSSEADTDSDTDAQAFQMRQVPRSLTKHTHPVPQPESDPEEEEGESSESEHENPVPVVQKKAAAAAVLSKAEQERKRPPSDPAPTGKAKKMKAVATPLAKAKKGKAELEKPAPEATPAGNAKKGKAELEKPTFDAIPAGKAKKGKAKEAAPEATPSGKGEEGWGQTREVSSARSLTFRQQV

SEQ ID NO: 297395 - protein, 68 aa, Zea mays
  Clone ID: MRT4577_34301C.1.pep
LASGRPGEAIVVRSDQAEPLPPAPVASVRPLQIEDTARLNAGEPTSALLRTLAGLQALSEGPLVDAVT

SEQ ID NO: 297396 - protein, 74 aa, Zea mays
  Clone ID: MRT4577_34302C.1.pep
PHDTQILPTARLSEKLVRKKLKQKGPLQDLRGSMVNLSSPQHRISSPSDRALPCRISGGLEHIIICTYVVHIRH

SEQ ID NO: 297397 - protein, 112 aa, Zea mays
  Clone ID: MRT4577_34303C.1.pep
DGEPKTSPKLGITQKRGPWGKQWDTSVQRRQGPLRDKMGGKAPRYWAQGPGGSAGNTQDWENTRGGPGKTSENPHHLIPGLIWGPKNGFLPLYFPRFWAFFSHHFLFHRPWG

SEQ ID NO: 297398 - protein, 488 aa, Zea mays
  Clone ID: MRT4577_34304C.1.pep
MASLWLARASSQLARRAAARRPPPRPGRHGSGQPTSSWFLGSVPQAALGSPALDTSRRGFCSVRRFAGESSAAAAAAAVVDEEPESGFAAGDQQAVDFPGGKVSFVAEMNFLPESTRERINCYRVLDDDGRTISGSRFQEVSRELALKMYSEMVTLQIMDTIFYEAQRQGTISFYLTSNGEEAINIASAAALSMDDIVLPQYREPGVLLWRGFTLQEFANQCFGNKLDYGKGRQMPIHYGSNRLNYFTVSSPIATQLPHAVGAAYSLKMDKKDACAITYFGDGGTSEGDFHAALNFAAVMEAPVIFFCRNNGWAISTPTTEQFRSDGVVIRGQAYGIRGIRVDGNDALAVYSAIHAAREMAVTEGRPILVEALTYRVGHHSTSDDSTKYRPVDEIEHWRTARDPISRYRKWVQGNDWWSDAEESELRSRVRKELLQAIQVAERMPKPPVTELFTDVYDKIPSNLHEQEQLLRDTIMRHPADYPTDVPV

SEQ ID NO: 297399 - protein, 301 aa, Zea mays
  unsure (1)..(301): unsure at all Xaa locations
  Clone ID: MRT4577_34305C.1.pep
RNSRVDPRVRGRVGGRVGFQLPHAVGAAYSLKMDKKDACAITYFGDGGTSEGDFHAALNFAAVMEAPVIFFCRNNGWAISTPTTEQFRSSNSVSSYTDPWQLQVNNAMSCXILVVLXDGVVIRGQAYGIRGIRVDGNDALAVYSAIHAAREMAVTEGRPILVEALTYRVGHHSTSDDSTKYRPVDEIEHWRTARDPISRYRKWVQGNDWWSDAEESELRSRVRKELLQAIQVAERMPKPPVTELFTDVYDKIPSNLHEQEQLLRDTIMRHPADYPTDVPVGVVLRYAEGLTRKSSFGQSRF

SEQ ID NO: 297400 - protein, 127 aa, Zea mays
  unsure (1)..(127): unsure at all Xaa locations
  Clone ID: MRT4577_34306C.1.pep
MDEEHPSGVYCYSEIEEVTASGEGVYERYYKEDKEDKHIQLLGEDVAILDGYLRLYNLTWIDXRTDPEHPTRTWTIEIDYEAICWGIAYCVKAGPERXLKAMQYLERAXCEYAXNISLDFYMEGDPL

SEQ ID NO: 297401 - protein, 192 aa, Zea mays
  Clone ID: MRT4577_34307C.1.pep
MASLWLARASSQLARRAAARRPPPRPARHGSGQPTSSWFLGSVPQAALGSPALDTSRRGFCSVRRFAGESSAAAAAAAVVDEEPESGFAAGDQQAVDFPGGKVSFVAEMNFLPESTRERINCYRVLDDDGRTISGSRFQEVSRELALKMYSEMVTLQIMDTIFYEAQRQGRISFYLTSNREEAINIASAAAL

SEQ ID NO: 297402 - protein, 78 aa, Zea mays
  Clone ID: MRT4577_34308C.1.pep
PRVVPGGDLAKGQGPGCIFSHPPRVGGVFFPLGPKFALMFPKGPFGPWFLGKGKEKGGFSQACGDLGAPQKEFKEVGV

SEQ ID NO: 297403 - protein, 21 aa, Zea mays
  Clone ID: MRT4577_34309C.1.pep
FNQLSMWNFGGYLKQRKQLLN

SEQ ID NO: 297404 - protein, 139 aa, Zea mays
  unsure (1)..(139): unsure at all Xaa locations
  Clone ID: MRT4577_3430C.1.pep
TPEYETKDTDILAAFRVFPQPGVPPEEAGAAVAAESSTGTWTTVWTDGLTSLDRYKGRCYHIEPVPREETQFIAYVAYPLDLFEEGSVTNMFTSIVGNVFGFKALAALRLEDLRIPPAYTKTFQGPPHGIQVXRDKLNK

SEQ ID NO: 297405 - protein, 136 aa, Zea mays
  Clone ID: MRT4577_34310C.1.pep
ARRLLFFSPCSPAYGLWSPSPAPARALPLPPLPQVWPRRVSLRPWPPVELLSAEAPAPSIAFPSSLRAPPCSQPFPARLAGAPYALLAIASRGVRCCVVLQAVRPSLILSCTTLPRTCHIRCRLLFTSSPDRKCRH

SEQ ID NO: 297406 - protein, 140 aa, Zea mays
  unsure (1)..(140): unsure at all Xaa locations
  Clone ID: MRT4577_34311C.1.pep
GRGFFFFFLCGANRFQXDYMTYRTXIYXITKQSMFPDSVVYEGQYDDKPQFFRGESGANDAIIPLLDHICEVPMPKNPLTDILIEFREYRPKPHRAFLKYVRETAAEVGVRDFLTKSGDLGLAVLYLRLLDHIRSFRWRH

SEQ ID NO: 297407 - protein, 289 aa, Zea mays
  unsure (1)..(289): unsure at all Xaa locations
  Clone ID: MRT4577_34312C.1.pep
LAHFNDIQDHVSSKGRGASSFLFGRGLSADPLNICKTTEGRSQFISEDNISSGRCQLLKEDLINATVDVSDISESFDSCPYYLSEHTKHALMSAAFVHLHCKNYFKFTKDISSLSQRVLLSGPTGTDMYQEYLVKALAKYFGARLLTIDSSMLFGGQTSKESESYKKGDRVRYIGSVQSTGVILDGQSPPDFGSQGEIFLPFEENRSSKVGVRFDKKILGGNNLGGNCEVDHGLFCSVDSLCPDIPGWEVTSKHPLDVIFEFISEKFRMXPFYLFLKDTEKIVAIMITI

SEQ ID NO: 297408 - protein, 225 aa, Zea mays
  unsure (1)..(225): unsure at all Xaa locations
  Clone ID: MRT4577_34313C.1.pep
TPIGRLGFSRPAGTTTGHRLKDTYQLTARKALWYLCQLIEWHLGSTPMKYFPPLDRNRPAWAARIRNLGSLGSLEAAEKDPTIVAMSGYLLSLDDPCEQLCRRVRALTQHAEEVEVRWRKSRLDLAQAEARVANAESRIVLAEEKLWEQADHHSKLLRDISLVDRVKRKDPHPQNSDGTNVLEGTPVYLFQPRRRICGPXSPTPPPSPQPDDEEGPREIIVGTDV

SEQ ID NO: 297409 - protein, 90 aa, Zea mays
  unsure (1)..(90): unsure at all Xaa locations
  Clone ID: MRT4577_34314C.1.pep
SNAPVFFNCSGLTXPSXXIYTTFLNEQTHSLLLRTFPISFPXFYLTNIFTTHTLIKLXFKIPKKIIILQQAPKISSHFFFSLSIYHINKH

SEQ ID NO: 297410 - protein, 101 aa, Zea mays
  Clone ID: MRT4577_34315C.1.pep
LVILVIMLANARRHYHTAGQQPVRSSTLAACHSASSTPETEPAGAGNAVACWSPYPISEGTKLAKPLESASKVMHILLDEVNTACTATPALSRSCGRRGRR

SEQ ID NO: 297411 - protein, 79 aa, Zea mays
  Clone ID: MRT4577_34316C.1.pep
DPTTEWCLYRSLCWTCLKSKPSQSVLILNKVFFNWCYRYPKSISYIIVLHSIPSCMATISMQHTHFHNNYSLKMTSICR

SEQ ID NO: 297412 - protein, 47 aa, Zea mays
  Clone ID: MRT4577_34317C.1.pep
NRIDSVIWRNVLQTRPWQFLLCIQLATMFIHLDADYVVNYILGKLFR

SEQ ID NO: 297413 - protein, 100 aa, Zea mays
  Clone ID: MRT4577_34318C.1.pep
ARGWARALFASSSSVRRWLHRPGAPRSQGLADETAAVADRDRSGVCGGAHAACGQQQQHGAGGRPVGEQVKGVLHDKGPTASQALAVAALFPLGGLLLVL

SEQ ID NO: 297414 - protein, 47 aa, Zea mays
  Clone ID: MRT4577_34319C.1.pep
TTKHALRSRASILAIPLTPSFSFLSDLPLMQRLKIQICQGVLRPSFV

SEQ ID NO: 297415 - protein, 100 aa, Zea mays
  Clone ID: MRT4577_3431C.1.pep
MLLLPPPHPGAARGDRTGQSGSLQTEDGRFRRGGFGSAPAAASFSELSMFHITRTSWYPQVMHPGGGSGRTTTHRPLRTARRRAAGDGDASPGAGAREPP

SEQ ID NO: 297416 - protein, 68 aa, Zea mays
  Clone ID: MRT4577_34320C.1.pep
CITLFINRHYGALRSRLHLMVNRSLLACSDRVGVILVMNSLRVMETLLRLTWTQLDGQTSDLDLMSVR

SEQ ID NO: 297417 - protein, 86 aa, Zea mays
  Clone ID: MRT4577_34321C.1.pep
KKTPQGPPRWISHLYDKHDYHRTLIASHNPVCTNTGPWCKGENTRLSHACKGTTPATLSLYEHSCTIRCRDLPRQPHPSPMQGAKL

SEQ ID NO: 297418 - protein, 49 aa, Zea mays
  Clone ID: MRT4577_34322C.1.pep
RGTPPPGSLPFIFFSILLGFGCYFLGKHRGREEMGTRNPWHIYGSAMSA

SEQ ID NO: 297419 - protein, 48 aa, Zea mays
  Clone ID: MRT4577_34323C.1.pep
SMMASARPWFLCCLCSHSMARTKLLHTQGVGTMMSPSVARRSHFYEAV

SEQ ID NO: 297420 - protein, 75 aa, Zea mays
  unsure (1)..(75): unsure at all Xaa locations
  Clone ID: MRT4577_34324C.1.pep
RLPPSTPKHTLFXTSRSNRFDVPRQYLPQLFNFSVSNPLSVMTNVRTINDITYLEACIYNHTKSNLYMHQVDFEP

SEQ ID NO: 297421 - protein, 218 aa, Zea mays
  unsure (1)..(218): unsure at all Xaa locations
  Clone ID: MRT4577_34325C.1.pep
MASFSYGGAPPPSHSGLRHYPTVHRPGLLPATAACTRGGAELLRRQSRATTPRTKLAEKMVREKLLMGLPPPSSYDTAWLAMVPAPGSARASRFPQCVEWIMQNQRSDGSWGLQGRQGDDPSLLIKDALSSTLACVLALKTWGVGDEHVGKGLRFIGHNLSSVTTDGDVXQGPVGFNVIFPGMLARCIGMGVEMPLAPXDVDGIFRLRDKELPSLAAG

SEQ ID NO: 297422 - protein, 76 aa, Zea mays
  Clone ID: MRT4577_34326C.1.pep
NVVFFFFFFFFFFFFFFFFFLGKQPHSPFFGGFTGYKRESFSFFSKENSLQPPLKKPLAGGFKFFFKPKGIPQPLN

SEQ ID NO: 297423 - protein, 179 aa, Zea mays
  Clone ID: MRT4577_34327C.1.pep
LSLNLRASAAGGCSMEDAEAGAARKRKRGGDGEEAGGGAYDGKEKELLGEDGDDGRYEGIAEEAVAEVMRWLEAEIADDSAAPQPAAGFVTINGNEESCGPSFSAAASTVMASVDTRAGAPPPPPVPWPWPEPEPERLLPAPGVGVDVETGTGTGTGGEAADEEWLARLLTCGALLEGV

SEQ ID NO: 297424 - protein, 85 aa, Zea mays
  Clone ID: MRT4577_34328C.1.pep
LIESEESNFHTLPRLTRSAIQTLAPTSLAKENQMQRAPKSLRNYWPPCAINSRPQRSSRIYFFSIPPSGCLQITTRPAAVHLPKK

SEQ ID NO: 297425 - protein, 73 aa, Zea mays
  Clone ID: MRT4577_34329C.1.pep
MQRPGWCPIAADGLVRAPPVEVLADNDLVSNVLKLFTRTCIFLYWMSGAQVWKNLFRINVLKPFTKNKEKGGR

SEQ ID NO: 297426 - protein, 73 aa, Zea mays
  unsure (1)..(73): unsure at all Xaa locations
  Clone ID: MRT4577_3432C.1.pep
AHAQRTLHGLQPXEASIFENKTTFNELNQLAEEARRRAEMARLREVSTLKGKMESVVKQKGLDIETIQQSYTV

SEQ ID NO: 297427 - protein, 45 aa, Zea mays
  Clone ID: MRT4577_34330C.1.pep
WSCPIIQGPLARVPPKKKKKKKQKKKKKKKKKKKKKKKKKKKKKK

SEQ ID NO: 297428 - protein, 58 aa, Zea mays
  Clone ID: MRT4577_34331C.1.pep
KARRALPEATLPWPTLRLPWRRPSSPQTHLMARTTTQPIRISAPRAPNHHQELPRVTK

SEQ ID NO: 297429 - protein, 104 aa, Zea mays
  Clone ID: MRT4577_34332C.1.pep
GLKKHTPRGVKSFWGKGPISKERCFFDPYASGNRSINIRKLGAPPQKRKAPWALKYCLGNTLPQFPFRTQRRFRFFFFPNKGSPPSEQSPKNCLLFFFVQKNFF

SEQ ID NO: 297430 - protein, 79 aa, Zea mays
  Clone ID: MRT4577_34333C.1.pep
ACILVMVPRFHTLPRAVHAQAQARTLARARPVHCQCSDAEATTSRSVGCRLRRREPGAGGEEAGEPEAGDERGECQPGR

SEQ ID NO: 297431 - protein, 89 aa, Zea mays
  Clone ID: MRT4577_34334C.1.pep
ALRMASTRVISTLSIAAATRQDHGDMHKLDGQHKWLTHRTCMLQNTVSTDASHYLSVISRPCIAYHVLSIGYPQQYNVQHPAAILCSTV

SEQ ID NO: 297432 - protein, 85 aa, Zea mays
  Clone ID: MRT4577_34335C.1.pep
IVLCYTRRRICSLFAAACCGCNPAAAAASTVFFSLWIAAAAVQTAATVSACSQPNTPMVIWKSTTVRTLLLKKKKKNKKKKKKGP

SEQ ID NO: 297433 - protein, 96 aa, Zea mays
  unsure (1)..(96): unsure at all Xaa locations
  Clone ID: MRT4577_34336C.1.pep
ACLQLRSTTLPATTLSLLARCTPLRRARMRXGASDSSADKKRNITTRASIYETASTLFLLLMDLEDQGPTLNETNSSLPVRVGEEGDGRQPLAGAA

SEQ ID NO: 297434 - protein, 62 aa, Zea mays
  Clone ID: MRT4577_34337C.1.pep
LASGLKPLRAQLTTTNQPTERGTKGELSVLSDNPLGPDPACGRGQGRPQLRRRSGLRRPPPR

SEQ ID NO: 297435 - protein, 65 aa, Zea mays
  Clone ID: MRT4577_34338C.1.pep
AHASEKKKKKKKNYNKKKKKKKKKERGLFFFNDPTLPTLAFNDIISFIVLPKLILLSVFLQLMDC

SEQ ID NO: 297436 - protein, 228 aa, Zea mays
  Clone ID: MRT4577_34339C.1.pep
MEDLNKFYASFWKQSSSSLSSLHSVHEHKLMNLGSKRNQTQEVSTNYNKRKSLSGIVELSSDVRSSIRRKSGAYRGGIDLEKPSVYGDAVEAIGCSGLGNLANQNGKSQDVSPQNNSLAESLQLCRDWKTSRVSVGSVGSSHTPDCQSPTKTSNNEARQSLFDLNVPPEESLLMPSTLFPSSSTYCGNFSDRPRETSEKERVSGIGSTKGSSITVITPDSAADSSGMW

SEQ ID NO: 297437 - protein, 91 aa, Zea mays
  Clone ID: MRT4577_3433C.1.pep
MYAAPTAATTTTMPPAVTHDDLSLRKAQERRATRSSGQVAVSLVALSVLCGLVAFILCLAAEGSRSEVSHYLMSVGGSKDQLDMCVYNSSG

SEQ ID NO: 297438 - protein, 179 aa, Zea mays
  Clone ID: MRT4577_34340C.1.pep
MATASVSFKSREDHRKQLELEEARKAGLAPAEVDEDGNEINPHIPQYMSSAPWYLNAEKPSLKHQRKWKSDPNYTKAWYDRGARLFQANKYRKGACENCGAMTHNKKACMDRPRNVGAKYTNMNIAPDEKVESFELDYDGKRDRWNGYDTSTHTRVIQDYEAREEARKKFLKEQQLKKL

SEQ ID NO: 297439 - protein, 212 aa, Zea mays
  Clone ID: MRT4577_34341C.1.pep
MSSSAAAPRVPGAARRLSQSPKPPGARDKEPPPPQREDGDKARRRNLLPSPASARGAAASMLLRRAAGAGGGRGSSYVHPSSSLSVSCASEASTESFCSRASTGRIGRRPAGPPAGAPRRRAAGSAGPPSARPAAAASASRKVPSSGVVPGGGAAATTVHHQAVPPVVAGGLLNGEPTAAASAGPPRCPWITPNSGRWSKQIIHALIYGYFR

SEQ ID NO: 297440 - protein, 89 aa, Zea mays
  Clone ID: MRT4577_34342C.1.pep
ARSSGFSPDAAPIRCLTPRSPGPFPCRFRCCLRRSEPFLRILALCRWVIIFAGYYVCCLFLVFVFLLYFWVFCFNFICLFCLFCFGSGT

SEQ ID NO: 297441 - protein, 42 aa, Zea mays
  Clone ID: MRT4577_34343C.1.pep
VEQLGRMFKPDFKAIKKRIEDLITRDYLERDKDNPNVYRYLA

SEQ ID NO: 297442 - protein, 79 aa, Zea mays
  Clone ID: MRT4577_34344C.1.pep
ATRPPTRPPTRTRTVDFKKKKQKGRGSLGGGPRHKKEPRTRTKALHPTKAPSTHTSLTVCSGAAPTSINPPTICSIMKA

SEQ ID NO: 297443 - protein, 71 aa, Zea mays
  Clone ID: MRT4577_34345C.1.pep
FFFFFFFFFFFFFFFFFFFFFFFLRTKKFPSPFFYRGGGGNKLQGTLHYLFLYRLKPKPGKKKKRGGGARP

SEQ ID NO: 297444 - protein, 101 aa, Zea mays
  Clone ID: MRT4577_34346C.1.pep
YSSFTLYRGYTSLPTSHATYLPRGLEVPFISTEETRRGSTTRPFQSSTSSRKLATDSGRRKHRNPSSRKLNRQSNPRASLYFVATPPCLPLSGKIISPWLS

SEQ ID NO: 297445 - protein, 123 aa, Zea mays
  unsure (1)..(123): unsure at all Xaa locations
  Clone ID: MRT4577_34347C.1.pep
MAPKAEKKPAAKKPAEEEPAAEKATAGKKPKAEKRLPAGKSAGKEGGEKKGKKKAKKSVETYKIYIFKVLKQVHPDIGISSKAMSIMNSFINDIFEKXLVLPGELAKHAVSEGTKAVTKFTSS

SEQ ID NO: 297446 - protein, 238 aa, Zea mays
  Clone ID: MRT4577_34348C.1.pep
MSGPPSTTSAIRIASVVRNGRTPSNSSTSAIRVAYPPTNGVQPPALYKVAPPAAFFRTQQQAISSPNKQPPPPRSRREEAQSRNRRPIPMAPKAEKKPAAKKPAEEEPAAEKATAGKKPKAEKRLPAGKSAGKEGGEKKGKKKAKKSVETYKIYIFKVLKQVHPDIGISSKAMSIMNSFINDIFEKLAAEAAKLARYNKKPTITSREIQTSVRLVLPGELAKHAVSEGTKAVTKFTSS

SEQ ID NO: 297447 - protein, 149 aa, Zea mays
  Clone ID: MRT4577_34349C.1.pep
MAPKAEKKPAAKKPAEEEPAAEKAPAGKKPKAEKRLPAGKSAGKEGGEKKGKKKAKKSVETYKIYIFKVLKQVHPDIGISSKAMSIMNSFINDIFEKLAAEAAKLARYNKKPTITSREIQTSVRLVLPGELAKHAVSEGTKAVTKFTSS

SEQ ID NO: 297448 - protein, 161 aa, Zea mays
  unsure (1)..(161): unsure at all Xaa locations
  Clone ID: MRT4577_3434C.1.pep
FGTIRPTPTVPPHHRWRPPSPARPRPRPSPPAPSRSDAPPSSAATWPRRSLPPAAGPPSPSSTPPQPRXSPPPGPPASHXLPPRRRLLGPRAPRFSXPAPRLSSMWTPPQRPPPGATGPSSPSTASPSRARGGSSRLAARPGLGGWCTPAQPTWSLLLPGM

SEQ ID NO: 297449 - protein, 149 aa, Zea mays
  Clone ID: MRT4577_34350C.1.pep
MAPKAEKKPAAKKPAEEEPAAEKATAGKKPKAEKRLPAGKSAGKEGGEKKGKKKAKKSVETYKIYIFKVLKQVHPDIGISSKAMSIMNSFINDIFEKLAAEAAKLARYNKKPTITSREIQTSVRLVLPGELAKHAVSEGTKAVTKFTSS

SEQ ID NO: 297450 - protein, 94 aa, Zea mays
  Clone ID: MRT4577_34351C.1.pep
ELQQISTTNNFTICSSLSQTTEPREPATNFVLLFHTEKKARLQHVKHCLDCSTPQSALCQSSPMMTTWHWNLLQLHKAHFFAICLYPMASTVSE

SEQ ID NO: 297451 - protein, 74 aa, Zea mays
  Clone ID: MRT4577_34352C.1.pep
DYFLGQHGMCGRDGGREHHSRTADGRFRVGVDLVVQVPLQPVLVRCGAVDKSRVWCRGRDRRHIKVMSSLRRLQ

SEQ ID NO: 297452 - protein, 149 aa, Zea mays; identical to SEQ ID NO: 297449
  Clone ID: MRT4577_34353C.1.pep

SEQ ID NO: 297453 - protein, 46 aa, Zea mays
  Clone ID: MRT4577_34354C.1.pep
DKNCMSAGHTLIFSFQDYTLLTKIQRIEWNNRCMSSAVFLSVKCSF

SEQ ID NO: 297454 - protein, 87 aa, Zea mays
  Clone ID: MRT4577_34355C.1.pep
REIRKYQKSTELLIRKLPFQRLVREIAQDFKTDVRFQSHAVLALQEAAEAYLVGLFEDTNLCAIHAKRVTIMPKDIQLARRIRGERA

SEQ ID NO: 297455 - protein, 62 aa, Zea mays
  unsure (1)..(62): unsure at all Xaa locations
  Clone ID: MRT4577_34356C.1.pep
MCGTHNRYDINNHFSVKYVCTSALLRDMCISRSVICTNSECIKPXHFSLKSLDKKLCIIFVS

SEQ ID NO: 297456 - protein, 148 aa, Zea mays
  Clone ID: MRT4577_34357C.1.pep
LDTKFHYRNPALCRVLGALPSAFYRALGKEVFAECRTQQSSTLGNDCIYQEEDSRHRKTLGKDYFAECQTLGESRRSTKDRQQPSISDGRYLCRVSGFGTQQISYFAECLTSDTRQRMLCRVPFVYTRLSIFFFLFPTKLFVVCSYTI

SEQ ID NO: 297457 - protein, 66 aa, Zea mays
  unsure (1)..(66): unsure at all Xaa locations
  Clone ID: MRT4577_34358C.1.pep
QYSWSSLXTCLKLWYFLKSGLNQQSYLSYQVQNAGLETIGLRPANSXQXSXXTNSGVYEQFMQKYH

SEQ ID NO: 297458 - protein, 119 aa, Zea mays
  Clone ID: MRT4577_34359C.1.pep
FLCRCPVPPFGGAARLPWGAGRLRGSPLLRGCPSSPPPGRFRPSWPVAVRLPALRCSARAGSLLLTALGWSFLAGCPPSSPPGLLFPPAFFFSAWAPARPRSVPIRPGWLPSGLVPRLR

SEQ ID NO: 297459 - protein, 42 aa, Zea mays
  Clone ID: MRT4577_3435C.1.pep
IDGRSYAHEQVPLLMWSFAYPLHNRRARSGLLGWRSRVFNMW

SEQ ID NO: 297460 - protein, 83 aa, Zea mays
  Clone ID: MRT4577_34360C.1.pep
FRGEKTSPDPQSDWPKPKAPGNTGVGPPGLGHLPGPVYENGGSANGAKSGPPPPGRGQQDGSGGVKGKKTFKDPPPLSKNCLL

SEQ ID NO: 297461 - protein, 130 aa, Zea mays
  Clone ID: MRT4577_34361C.1.pep
LHLGVNVKMITGDQLAIGKETGRRLAMGTNMYPSTALLGDKNTAVDGLPIDELIEKDDGFSGVCPEHKYEIVKRLQDKKHIVGMTGDSVNDAPVLNKADMDLVEDDTTDSDLSAGDIMLTEPGLGVIGSA

SEQ ID NO: 297462 - protein, 78 aa, Zea mays
  Clone ID: MRT4577_34362C.1.pep
AVFSPCPGICLTPSVLCIPPYARNKHGDMLFFTNQNLMYSFFVALVHCMFSMGTFFRFLLPGGGKVGFLPIKQALGGW

SEQ ID NO: 297463 - protein, 89 aa, Zea mays
  Clone ID: MRT4577_34363C.1.pep
PVVTTQGTRGSPTMLGAVPFPSSFKVGSCFFPNPDLLFFWAHCVICRASVLCHSKFWGSGSKKKKKKKKKKKKKKKKKKKKVLCVVTTA

SEQ ID NO: 297464 - protein, 96 aa, Zea mays
  unsure (1)..(96): unsure at all Xaa locations
  Clone ID: MRT4577_34364C.1.pep
PLSCCLVWHPQDGYQAFPKLCIRCNVCGPRPYPLGSFFWIHVAPKAVCRSFGRRIYVNLALGLAPPFWGKKTPXYWGRPPTDELAGPAINSGPVRA

SEQ ID NO: 297465 - protein, 67 aa, Zea mays
  Clone ID: MRT4577_34365C.1.pep
KKAFILNAIYLYLYIYIYIYMDGLYYRLHDKQKAFCEGFFRKTIGYSNSSRHRSSHDLVKITQQQAI

SEQ ID NO: 297466 - protein, 56 aa, Zea mays
  Clone ID: MRT4577_34366C.1.pep
TCWNITRIICWICLDTRGSFILVVEDVMGLLANMLVRIHFMFFTRFSPKEKKFVSV

SEQ ID NO: 297467 - protein, 98 aa, Zea mays
  Clone ID: MRT4577_34367C.1.pep
MACTTTGACNNLWGVWVGELSQALNGTWQAVAVAATHGLGEDDDPRLPSQHQQRPWRGDYRSRRITKALRGAVACGTATREGDSARCRGALSDTTLYL

SEQ ID NO: 297468 - protein, 47 aa, Zea mays
  Clone ID: MRT4577_34368C.1.pep
TCSWLRDALMSVMFLHAASQYLYTARSRRLSELSESVTEEAQKRASH

SEQ ID NO: 297469 - protein, 94 aa, Zea mays
  Clone ID: MRT4577_34369C.1.pep
DGDEPPFVEKNLWLLRHWSCVQFAKKKTGPGGVGKIRCEEIQWHLRVSGSLELPSSTTFRVFDLLMVGLICGCGRSLSLFSFVVVTDVLVEDCF

SEQ ID NO: 297470 - protein, 86 aa, Zea mays
  Clone ID: MRT4577_3436C.1.pep
GPATELKGTPRKIKKMFLSPGQKKFASRGKDIPFFFFFFFQKGKIQQDARFIVFLQPGWELILGKLCGVLWPRTRSDIQHQELKKQ

SEQ ID NO: 297471 - protein, 55 aa, Zea mays
  Clone ID: MRT4577_34370C.1.pep
KFTEIAWPNPKPIAEDAKGVGKTHHFRLGNLICYCSDIYELLLIPQLMLNDTPAH

SEQ ID NO: 297472 - protein, 92 aa, Zea mays
  unsure (1)..(92): unsure at all Xaa locations
  Clone ID: MRT4577_34371C.1.pep
EEVISSLHESLNIXYIRTPETTESQVKDSSLCVSGEILAAGTSSPKTEGKHEETVNKESDMKVPTVSLKVSESVIDVKTTMESISNTSTQSL

SEQ ID NO: 297473 - protein, 106 aa, Zea mays
  unsure (1)..(106): unsure at all Xaa locations
  Clone ID: MRT4577_34372C.1.pep
SSEPIYDTIYNSSIKCDVYWGEYLYGDIDSKLCTTMFPVISNIMSIDITVLAPSSLNINVYAPSEIKYILXIVYSILVSLISFHXMLIFKDXTNDSVPFIFHLKCF

SEQ ID NO: 297474 - protein, 53 aa, Zea mays
  Clone ID: MRT4577_34373C.1.pep
LMISLALGGRNSSLNHNKKLGYNSGLIKLKTHQSIATYAWSIDQHFFVTRCSI

SEQ ID NO: 297475 - protein, 191 aa, Zea mays
  unsure (1)..(191): unsure at all Xaa locations
  Clone ID: MRT4577_34374C.1.pep
ILHPPRGHWRTAYATWRAHHRAKCAPFSSTIKQNEIRLIAEGLLRCYVSYAILLPPEKXIKEIVFKAMEHALRNLVAVADIISNRAPDLHPPSHAYTSVAFLHVCAXHTNNDLAHCRLTRHXISMIFLTLPPRELNKHTPGKQDPPFVEHPKLPDVAQLWRSPCRPSRQQFQWLDYEHSYPQERGRWIRRY

SEQ ID NO: 297476 - protein, 85 aa, Zea mays
  Clone ID: MRT4577_34375C.1.pep
VWQLSARRSCPFPLFMGLGLFFFSFDPRLFILKFLGFALIAYWPGFVFQGSKKRSLFFFFSHREHQFVQFSFLKVFGFFSETKVF

SEQ ID NO: 297477 - protein, 74 aa, Zea mays
  Clone ID: MRT4577_34376C.1.pep
RGLILSNSWRAQKKEADESCQIALEYLRSEVITIRNVALKKDRILFSLVERLNPSEPKFKAQPRANKVEVKYLK

SEQ ID NO: 297478 - protein, 87 aa, Zea mays
  Clone ID: MRT4577_34377C.1.pep
ELRSSLYAVYDVTIAYKHRLGDFVDKGCGVHPSEVHIHVRMGELHHIPTTEDKITEWMWKRCMQKDQLLADIFMNGHFSCERTEGDL

SEQ ID NO: 297479 - protein, 315 aa, Zea mays
  Clone ID: MRT4577_34378C.1.pep
MSKAAGSNMLQAAPAVKAISAVSQTKPRRAKHRQVNAADKSPRHMKVNRGNSKAASKESLSCGEMLRQISLAACGLKQREEIAPSSVNFFTDFRKNSIFSSSDVDERMPEKATNAESTPSEQPIVDHMQDDYWSDILINVEEPLSSLKKKIYKSKKRANKKAPQVKKPPVNSLATAENADEPRSEGNQDTENGEQLRNKTKLFSANGSQQNGTKSGEEMENSFLSGLVLHFSRPSDVPSCSDLIKIFSQYGPVNEAKAEVANSTSSAQVIFKRRMDAEAAFAGAGKISALGPALTSFRLTDFPASASGNKASHGA

SEQ ID NO: 297480 - protein, 99 aa, Zea mays
  Clone ID: MRT4577_34379C.1.pep
HTSKGSRLFFFIFKTPFPINGTPPFFCFSQQKFVTKILWGGFFTRNGGCWELNSNLLHANDGPEGFFHPHLVFALATPGCPNAWFGETGFTPGGGSIWG

SEQ ID NO: 297481 - protein, 48 aa, Zea mays
  Clone ID: MRT4577_3437C.1.pep
LVSAQPEPDRTPTGSLEGGIKQLRTYSRIFLVPKIHINKKNAFNFPRT

SEQ ID NO: 297482 - protein, 68 aa, Zea mays
  unsure (1)..(68): unsure at all Xaa locations
  Clone ID: MRT4577_34380C.1.pep
KQLKSEHPKKRTPPDFRTLDGEKRRATRGXEKEREEKAKRSGRLRGAGXXCKRVHASSVTXPPTRQAS

SEQ ID NO: 297483 - protein, 175 aa, Zea mays
  unsure (1)..(175): unsure at all Xaa locations
  Clone ID: MRT4577_34381C.1.pep
GKTEERREKGREKSQRSGRKGAGKRRGHRGGNPRKPPRRRAPPKGPGPXGPIKGGQKCGKARSGAGPPPRIKPSWRKGGKXLQRPIKVGNSQRFFPRQDRSPPPTSRVNMEIKRHNKKKEAMERGKARRHVKTGTLLERARPFFFFFFFFLFFFFFFFSPPPPHFFFXXRLYPRD

SEQ ID NO: 297484 - protein, 241 aa, Zea mays
  unsure (1)..(241): unsure at all Xaa locations
  Clone ID: MRT4577_34382C.1.pep
MFPVTGSPKCVAFRSKHTRKYLGSVQAGSEESAGGGKFFEELSHGADDVDVLASPYTRFYLEPSKEHDGLLHVRCCHKNKYWVAKHVGEGSGHWIIGIVNEPEDDLSKPSCTLFEPIPLADTDNNLSIRFFRPQQTTSSESDMTKEKGTTEEAYLFLGTGGHEKAVDQVKSLHDFSAIDLSKQLVLPXYVAFXGDNDMYLRARIIQKRNYLGFSSSDIADSTVVNTIFPXXANGNVRIXSN

SEQ ID NO: 297485 - protein, 57 aa, Zea mays
  Clone ID: MRT4577_34383C.1.pep
TLLFSTHLMLFKRLNVRPPPRSYLYNKHIDQIASLNQSINLPIGPSIRARSTSSFPS

SEQ ID NO: 297486 - protein, 215 aa, Zea mays
  Clone ID: MRT4577_34384C.1.pep
NGYVHKFNDAIRPNILNPSRHFPCGRRPCHPPSRRLLPLFPLSSAPPSPPPSSLCSLHRAKPPRTAPLPVEPLAQAALGPRPSEAPTRPAVRARRRPPDDPTLQAPYAPGPARARSTPEQEAEPPRAEPLHAPREPPAEDLAPPVVSENSGSNSSSLSSSRVSLGCSGGDTGASTSGSVGGCGEGSWGKNGLDVKVSSLDVAYASGGVGGGGEPT

SEQ ID NO: 297487 - protein, 102 aa, Zea mays
  Clone ID: MRT4577_34385C.1.pep
MAASSKVVCACILIVLVISSHADARRLVAATCNGTEGGACKGGIFVQGYAGLSARQKMAATATSTEQVVGGGGEGMPATTTDSRPTAPGNSPGIGNKGKINN

SEQ ID NO: 297488 - protein, 91 aa, Zea mays
  Clone ID: MRT4577_34386C.1.pep
EGERAGPLRILPHISGGRLEAVQVVAYGNSHARRLGGFAGQVGVVAESDGKVAIIGVEPANVQLDGHGATAIVCAPARPWHRVRLRVFLRV

SEQ ID NO: 297489 - protein, 74 aa, Zea mays
  Clone ID: MRT4577_34387C.1.pep
APPAAVNCSMALPYIFAFRLFSVSRRRSECSSVLLQPVVRSCARLPVRGHCLHLSKVVRFGLGAGGAKASADAW

SEQ ID NO: 297490 - protein, 48 aa, Zea mays
  unsure (1)..(48): unsure at all Xaa locations
  Clone ID: MRT4577_34388C.1.pep
RSRPSTPXARSSYYTYTQGGADMCNRRLHRTSMACFFIRTCLNKRYLV

SEQ ID NO: 297491 - protein, 76 aa, Zea mays
  Clone ID: MRT4577_34389C.1.pep
RPFFFFLGGFFLFFSVFFTIFVFFGTVISSLIHSRGIKDILQLLDCTGEQHYNRVFRALFLQWFGRKLKALTLFGR

SEQ ID NO: 297492 - protein, 97 aa, Zea mays
  Clone ID: MRT4577_3438C.1.pep
IVNRNKYGNGASIFTTSGVSARKFQTDIEAGQVGINVPIPVPLPFFSFTGSKASFAGDLNFYGKAGVQFFTQIKTITQQWKESSPQRVSLSMPTSQK

SEQ ID NO: 297493 - protein, 106 aa, Zea mays
  Clone ID: MRT4577_34390C.1.pep
MTYSSFSSDRPDADGGGAKNPPGPSPSPSVEDAMSFVQMVKEAFKERQPDKYGLFLRVMEDFRNQRLDIAEVASTAKALFQDNPDLALRFNVFLPKGHQIQLGLDE

SEQ ID NO: 297494 - protein, 118 aa, Zea mays
  unsure (1)..(118): unsure at all Xaa locations
  Clone ID: MRT4577_34391C.1.pep
AWHFYSLLAVSASANTLTVIPQRSQQYHLSXATAVGFQYPTIQSYMVQEAIQASIILSLAIXLQQPYAXLLQQPSLXNLFLQRIAVQLLQHHMLPTINQVVVDKLVCYLQQQQMLYIK

SEQ ID NO: 297495 - protein, 71 aa, Zea mays
  unsure (1)..(71): unsure at all Xaa locations
  Clone ID: MRT4577_34392C.1.pep
HGXARARNPGRRTPAGRKPSQRRAEHQRAGRAPPRPGGAKXPGPPGPPGTATNTTQTGPRTETRTGRAAQA

SEQ ID NO: 297496 - protein, 59 aa, Zea mays
  Clone ID: MRT4577_34393C.1.pep
ATSRAARSRPSVITCMITGSTFPSSSSQPLVGHFQSKTCFDMYSPDSRGMLKCRSLVGA

SEQ ID NO: 297497 - protein, 139 aa, Zea mays
  unsure (1)..(139): unsure at all Xaa locations
  Clone ID: MRT4577_34394C.1.pep
LAPEARREPKNTKGANKHPKRTRTGTRTKRGERAPEKNQGGGRKKVTKRKRPHSGNKNQDKTTKESIHKERTKRXRKKRPRREKTHXKKEQPSKKRQSTKXPTKKKGAKQKSGTRTRGATRKSGPSPRRRTSSPKRGHN

SEQ ID NO: 297498 - protein, 72 aa, Zea mays
  Clone ID: MRT4577_34395C.1.pep
CNSARGRLARRHPPALLFPSSRRRTRLIALWALNLPGVEGGLDMAWDPGTFAFHFDTNQVVSLIVSTFYSTP

SEQ ID NO: 297499 - protein, 93 aa, Zea mays
  Clone ID: MRT4577_34396C.1.pep
YHRLRTRIWHASHHSGSLSLTKSPVRVHSMIGGVRVSPNISAWSASFHITWRQQLASFRTARAKSQTPGPVVVVTTAESGCHGHSQQVRYGQE

SEQ ID NO: 297500 - protein, 82 aa, Zea mays
  Clone ID: MRT4577_34397C.1.pep
ESLNQTGFSNANLTPTPEPSSQELVTQSTFFFFYQILGRGGFLWIAKIGLEKFMGPTKRKKFFTLDKGRPKTIHKNQAGVGF

SEQ ID NO: 297501 - protein, 101 aa, Zea mays
  Clone ID: MRT4577_34398C.1.pep
PAVHRSLPRCCALGGVPGGPCPPGCPAPCFSRLALSALGPVVLQVFCPWVVVASPVLGWSCVRSCGSCFEFPVVVSCFGLLLVRSLFSINPPQNLKKKKKY

SEQ ID NO: 297502 - protein, 216 aa, Zea mays
  unsure (1)..(216): unsure at all Xaa locations
  Clone ID: MRT4577_34399C.1.pep
LGTSRPAGVLLFYALTSELLKRSLSSTVSPSPAAAAEAQALLRWKSSLLPPNSTSSSSSSPLSSWLPGAAGSVCTSWAGVTCADGXRRITGVALQGAGLAGTLEALNLAAFPALTALNLRXNRLAGAIPTTISKLTSLVSLDLSSNRLTGGIPXALGTLPALRVLVLRNNSLGGAIPASLXRLHALERLDLRATRLASRLPPEDGGAWRASGSLIS

SEQ ID NO: 297503 - protein, 122 aa, Zea mays
  unsure (1)..(122): unsure at all Xaa locations
  Clone ID: MRT4577_3439C.1.pep
AGPARKTGSTHPAVDRQGGSTKQRGPEVRATRQNTRKAAQETKRRQQPKRGTKAAGEPRKIPHTQPEXEXEPHNDHDNSEKQTNTXNTIXPKGAKGQKGAQRRNQTKKTSQRKSPGDADPAR

SEQ ID NO: 297504 - protein, 187 aa, Zea mays
  unsure (1)..(187): unsure at all Xaa locations
  Clone ID: MRT4577_343C.1.pep
MLLSFSPHFSPLLISLPSTSACKPHARLRPVHASASASTSPELLGKSALRRISDKLRSLGYLETVSEPPTPAPNKSGDAPSPGEIFVPTPAQLPRHRVGSTLDPSWATGDGEASSTSRQRRRGRGRDASGSPSAPPSAAELALPRDELRRLQGIGIRVRKRLKVGKAGITXGIVNGIHERWRNREVV

SEQ ID NO: 297505 - protein, 917 aa, Zea mays
  Clone ID: MRT4577_34400C.1.pep
MAMMGSTSEKLYLCQVPNFGFEMIKLRPGLPKVHWTRTTVGGPNDLGGSVTAGIGAKPISSDIIKHFKKNFQYLSKKISFILTLSLSGSTHLVIPDMPHTRKTAHKSTGPIGVPRHQLAPRHEGSNNGNNDPIRDLEAQVEQLRTELHHQNRVWAEDSQCIAELSAEVGRLRYSERDSAIDWAINSRSITWHREAKARARVDELSTTLCNLQVYCNTLHEKVHVLYGRLHSDVPADPIAMGARPSGTAGEGPDAELDLFKPPPSTNLADERCHQGLVRMTVRVLPVAGKILQIHHLYHQRWPRLSLPWLTRLSIIPAFYARWRVTNSSSKAEGLLHRDRVKPHTWTSLKRVPHPLFVKAEDPLEADEWIRVIEQKFGLIRCTETQKSLFAAQQLRGPASTWWGNFVAIQQAGHQVTWDEFKLAFREHYIPEGVLHMKQEEFIRLKQAGDTVMQYLNKFNHLSQYAIDQVNTDLKKKNCFMRGLNNRLQRKMVTCLDLTYSRAVTTALAVEAKNTGQGKSKGFGGDRSNQRPKKRTSSSTGCFNCGKSGHFIKDCPYPRQNKSNNQQNSGSSNQGKGNMANNSAGKNVKKTGRIYYTQVATTPEGEPIRVRPKDIPKTAFTTRYGLFKYLVMSFGLTNAPAHLTYLMNSVFMPELDKFVVFIDDILIYSRNEEEHAKHLRIVLTRLREHQLYAKFSKCAFWLEEIQFLGHVLSANGIAVDPSKVQDILEWKSPTIVHQVRSFLGLAGYYRRFIPDFSKIVKPITSLLKNDIKFNWSSKCNEAFEQLKLELNMRQRRWLELIKDYELEIHYHPGKANVVADALSRKASCHCLTVKTSDTTLCQEMEKLNLGMIQHGTLIQLKLESILLQRIIDAQRSDKGMKHIHEKIEADKTNCFRRDNQGIVWFNNRIVVPKDDEVH

SEQ ID NO: 297506 - protein, 82 aa, Zea mays
  Clone ID: MRT4577_34401C.1.pep
GTLGVRPGTSFLLPVVHSLLGRYRLGVIKGAPCTRNTRLHPPHCYMHPTYRITAGTLMGARVRREGSRPALAEKGAGHTGGG

SEQ ID NO: 297507 - protein, 80 aa, Zea mays
  Clone ID: MRT4577_34402C.1.pep
TSLGCYRTLFVSQVHARIGLFTGAIGATQTKATHPSRLRQYTYMPPQQGRKLKSYKKKLGRNHKENTRTRELIAGRYLHP

SEQ ID NO: 297508 - protein, 79 aa, Zea mays
  unsure (1)..(79): unsure at all Xaa locations
  Clone ID: MRT4577_34403C.1.pep
APRKQFATKVVRKSAPTTGVLNIPNRCGPGTVALREIRKYQKSTELLIRKLPFQRXVREIAQDFKTDFRFQSHSLLSLQ

SEQ ID NO: 297509 - protein, 94 aa, Zea mays
  Clone ID: MRT4577_34404C.1.pep
NGREHFYRSCHDNKVPRKFCRNTNKSPQPGSIIKFPRSQKKGEGPKKLLFFKISWITPSRLWLARGPRACPRQQEVAPTAPPEAGSPKSSARCC

SEQ ID NO: 297510 - protein, 89 aa, Zea mays
  Clone ID: MRT4577_34405C.1.pep
QIKRPLGQVTQQTPLVLQYFASHSMFSSKRVHFNFFYKYSGIQTSGHSFKRGIIKHALEQEGQSKLGGNQFPFGAPFFAAWGGVFFVLF

SEQ ID NO: 297511 - protein, 46 aa, Zea mays
  Clone ID: MRT4577_34406C.1.pep
SRTPEEHSAQRQRRRLIAIQNFVFTVDQNISIDLYFTNNILVPFIL

SEQ ID NO: 297512 - protein, 109 aa, Zea mays
  Clone ID: MRT4577_34407C.1.pep
PPPALGCLPEQPGSPTAPPGPTGSGSGGALPLGGVPVRRGVAPVRSRGPPLRTAPLGGWPPRTDRGPVCRFAGPFSGAGLVGFPRPPSGWFLSSQGVVPARARLRPRPF

SEQ ID NO: 297513 - protein, 1967 aa, Zea mays
  unsure (1)..(1967): unsure at all Xaa locations
  Clone ID: MRT4577_34408C.1.pep
MDRASCDLPAGGADKLLRPSPXDPARGSXRPFGLRRTCLGFPPVSEEDHPALPRHPPPATSTIRGNSGHAGGVTLSAVGPARVSAARTPAGAMSGVVLAPETTTGVTSPQRANPKRTDDAITLAKDLLGVSLVPEITVHSVPDATSPPSIDQQVPSVFHHVPFRFSFDPPSDPASVSAFARAYPDLPGYHMWSSWDRLTTVSTSGPAGSEEDDDSDFGWDFSGLSDPSAMRDFMSMCDYRRCGCSDDVHGVRDEGDDPRRECFHSDRGYHRYDSHLGAPRAGQAPVPASHPNISRQRTVAKPYEQAWRLVELRQNFEQEXAWRARAGGARHRLRDVQRLIVDEARAGLPPAFSGVGQNLAAASMLLRTMPEPSTTEGRRIQGELKDLLEDAAVRRAESSASRRQGCPLEHRATPSRRIREASVRTERTRDGTPAAPDRLNSEQHHRDRRARLEERVRRGYHPRRGGRYDSEEDRSPSPKPPSPRVFSRAIRRAPFLARFRALTTITKYSGETRPKLWLADYRLACQLGGTNDDNLIIRNLPLFLSDAARAWLEHLPPTQISDWDDLVKAFAGNFQGTYVRPRNSWDLRSCRQQPRESLREYIRRFSKQRTKLPNITDSNVIGAFLAGTTCRDLMSKLGRKTPTKASKLMDIATKFASGRXPSAEGGKDQGNNKKXGNKEEEFPEVRHCFMIYGGQVENPSARHRKQERREVYLVKVAAPVYLDWSNKPIIFDQGDHPDYVPSPGRYPLVVDPVIGNARLTKVLMDGGSSLNIIYAETLGLLGIDLSTIRAGAAPFHGIVPDKRVLPLGQLDLPVCFGTPSNFRRETLTFEVVEFQGTYHAVLGRPCYAKFMAVPNYTYLKLKMPSPKGIITVGSTYRHAYECDMECVEYAEAIAESEALITDLDCLSKEAPHAKRHAGNFEPVEAVKTVALDPSSDACKHEAVLVDFLRANAKIFAWSPSDMPGIPRDVVEHSLDIRAGARPVKQHLRRFDEEKRRAIGEEVHKLMAAGFIKEVFHPEWLANPVLVKKKGGKWRMCVDYTGLNKACPKVPYPLPRIDQIVDSTAGCETLSFLDAYSGYHQIKMKESNQLATSFITPFGMYCYTTIPFGLRNAGATYQRCMNHVFGEHIGRTVEAYVDDIVVKTRKASDLLSDLEVTFGCLRAKGVKLNPEKGIEANPEKIAAITNMGPIKDLKGVQRVMGCLAALRRFISRLGEKGLPLYRLLRKAERFTWTPEAEEALGNLKALLTNAPILVPPAAGEALLIYVAATTQVVSATIVVERREEGHALLIQRPVYLISEVLSKTKIRYPQIQMLLYAVILTRRKLRHYFESHPVTVVSSFPVGEIIQCREASGRIAKWAVELMGETTSFAPRKAIKSQVLADFLAERVDTQLPTAPIQDELWTMYFDGLLMKTGAGVGLLFISPLGKHVRYVQRLHFPASNNVAEYKALGDSQLVIDQVMKNSHCRDRKMEAYCDEVRCLEDKFHGLELNHFARRYNGTADELAKIASGRTTVPPDVFSRNIYQPSVKLDDAPEPDETSAQPEVPSAAEGETLCIEGERNGVAPNQHWQTPYLXISSEESCPLTRPKLGDWLGAPSRSFYWVMKKSCTTAAPQAFSNDAYPSPKDKSCYKKYTRGLAVTMQHLGPSSEMLSDKXYWPTAMADATRIVRSCRGCQFYARQTHLPAQALQAIPITWSFAVWGLDLVGSLQKAPGGFKHLLVAIDKFSKWIEVVAFFTNIIHRFGVPNSIITDNGTQFTGKKFLDFCEDHHIRVDWAAVAHPMTNGQVERANGMILQGLKPRIYNDLNKFGKRWITELPSVVWSLRTTPSRATGFSPFFLVYGVEAILPTDLEYGSPRTKAYDDQSNQTNREDSLDQLEEARDMALLQSTRYQQSLRRYHARRVRPRGFQVGDLVLRLRQDTRGRHKLTPPWKGPFIIAKILKPGTYKLANDQGEVYNXLGTSNSYVAFTL

SEQ ID NO: 297514 - protein, 131 aa, Zea mays
  Clone ID: MRT4577_34409C.1.pep
GKTLFFFGRYILGAKIQHILVKAKFQRGGDHEKKGFSNIHPVLDEWVKKPVIPAFGQLCFERGPGIEKRGHKMLPNNHWGPARQYNISPNLAWGRVIKIWLPQTQKGSPLSGVGLPRAGMKPNLLGDFFPP

SEQ ID NO: 297515 - protein, 68 aa, Zea mays
  Clone ID: MRT4577_3440C.1.pep
IVGITLINSWVLLRSSLACYLLVSTRARPAHIFCVRNPILLEIQFETLIQYLSYLLLVVLQLLAGQVP

SEQ ID NO: 297516 - protein, 918 aa, Zea mays
  Clone ID: MRT4577_34410C.1.pep
MPFGLRNAGATYQRCMNHVFGEHIGRTVEAYVDDIVVKTRKASDLLSDLEVTFRCLKAKGVKLNPEKCVFGVPRGMLLACIVSERGIEANPEKIAAITSMGPIKDLKGVQRVMGCLAALSRFISRLGERGLPLYRLLRKTECFAWTPEAEEALGNLKALLTKAPVLVPPADGEALLVYVAATTQVVSAAIVVERQEEGHALPVQRPVYFVSEVLSETKIRYPQGQKLLYAVILTRRKLRHYFESHPVTVVSSFPLGEIIQCREASGRIAKWAVEIMGETISFAPRKAIKSQVLADFVAEWVDTQLPTAPIQPELWTMFFDGSLMKTGAGAGLLFISPLGKHLRYVLRLHFPASNNVAEYEALVNGSRIATELGVRRLDARGDSQLVIDQVMKNSHCRDPKMEAYCDEVRRLEDKFFGLELNHIARRYNETADELAKIASGRTTVPPDVFSRDLHRPSVKIGDAPEPEAPSARPEVPSAQPEVPSAPEPEALDVEEEQSGAAPDRDWQAPYLRYLRRGELPPDRAEARRVARRAKSFVLLGDEEELYHRSPSGILQRCVSIAEGQELLREIHSGACGHHAAPRALVGNAFRQGFYWPTAVADATRIVRTCEGCQFYAKQTHLPAQALQTIPITWPFAVWGLDLVGPLQKAPGGYAHLLVAIDKFSKWIEVRPLNSIRSELAVAFFTNIIHRFGVPNSIITDNGTQFTGKKFLDFCEDHHIRVDWAAVAHPMSNGQVERANGMILQGLKPRIYNDLNKFGKRWMKELPSVVWSLRTTPSRATGFTPFFLVYGAEAILPTDLEYGSPRTRAYTDQRNQASREESLDQLEEARDRALLHSARYQQSLRRYHARGVRSRDLQVGDLVLRLRQDARGRHKLTPPWEGPFVIAKVLKPGTYKLANNQGEIYGNAWNIKQLRRFYP

SEQ ID NO: 297517 - protein, 55 aa, Zea mays
  unsure (1)..(55): unsure at all Xaa locations
  Clone ID: MRT4577_34411C.1.pep
HVFVVDLPVRLEKSATYDEIKAAVKAQAKGNLKGILGFVXEDPVSPHFQGGSRFS

SEQ ID NO: 297518 - protein, 965 aa, Zea mays
  Clone ID: MRT4577_34412C.1.pep
MPFGLRNAGATYQRCMNHVFGEHIGRTVEAYVDDIVVKTRKASDLLSDLEVTFRCLKAKGVKLNPEKCVFGVPRGMLLGFIVSERGIEANPEKIAAITNMGPIKDLKGVQRVMGCLAALSRFISRLGERGLPLYRLLRKAECFTWTPEAEEALGNLKALLTNAPILVPPAAGEALLIYVAATTQVVSAAIVVERREEGHALPVQRPVYFISEVLSETKIRYPQIQKLLYAVILTRRKLRHYFESHPVTVVSSFPLGEIIQCREASGRIAKWAVEIMGETISFAPRKAIKSQVLADFVAEWVDTQLPTAPIQPELWTMFFDGSLMKTGAGAGLLFISPLGKHLRYVLRLHFPASNNVAEYEALVNGLRIAIELGVRRLDARGDSQLVIDQVMKNSHCRDPKMEAYCDEVRRLEDKFYGLELNHIARRYNETADELAKIASGRTTVPPDVFSRDLHQPSVKTDDTPEPEKASAQPEAPSAQPEAPSAPEGEALHVEEERSGVTPNRNWQAPYLQYRRRGELPLDQAEARRVARRAKSFVLLGDEEELYHRSPSGILQRCISIAEGRELLQEIHSGACGHHAAPRALVGNAFRQGFYWPTAVADATRIVRTCEGCQFYAKQTHLPAQALQTIPITWPFAVWGLDLVGPLQKAPGGYTHLLVAIDKHYRKTMYFRRPPLLPTVPRVPSEISIFPAAHGQPSEIRLFPTASQPPVGNKPISDGWPTGPSEISGRPLTAVSRAAPRPRTQPTHTRTHTRVLTTPRRRRQDPPPGPSPATCPVRRGRPDAQGAAAPKPARRRPEASAPPPRRQRAAAPTPARRRPDASAPPPRRPRSQSAAAPTPALTERRRPDARSQRAAAPTPAHLPRPRTARRRRRASSRPRPALPTAAARGSPEPSPSVAVRCTLARCIEPIRPGPDCVLHGSNENRIEPLLARSTTGANMLGHHARHVGKLDTVAACDSNRLHLPLV

SEQ ID NO: 297519 - protein, 939 aa, Zea mays
  Clone ID: MRT4577_34413C.1.pep
MPFGLRNAGATYQRCMNHVFGEHIGRTVEAYVDDIVVKTRKAPDLLSDLEVTFRCLKAKGVKLNPEKCVFGVPRGMLLGFIVSERGIEANPEKIAAITSMGPIKDLKGVQRVMGCLAALSRFISRLGERGLPLYRLLRKAECFAWTPEAEEALGNLKALLTKAPVLVPPADGETLLVYVAATTQVVSAAIVVERQEEGHTLPVQRPVYFISEVLSETKIRYPQVQKLLYAVILTRRKLRHYFESHPVTVVSSFPLGEIIQCREASGRIAKWAVEIMGETISFAPRKAIKSQVLADFVAEWVDTQLPTTPIQPELWTMFFDGSLMKTGAGAGLLFISPLGKHLRYVLRLHFPASNNVAEYEALVNGLRIAIELGVRRLDARGDSQLVIDQVMKNSHCRDPKMEAYCDEVRRLEDKFFGLELNHIARRYNETADELAKIASGRTTVPPDVFSRDLHQPSVKLDDAPEPEVPSAQPEVPSAQPEVPSAQPEVPSVQPEAPSAQPEVPSAPEGGALNVEEGQSGATPDQDWQAPYLQYLRRGELPLDQVEARRVARRAKSFVLLGDEEELYHRSPSGILQRCISIAEGRELLQEVHSGACGHHAAPRALVGNAFRQGFYWPTAVADATRIVRTCEGCQFYAKRTHLPAQALQTIPITWPFAVWGLDLVGPLQKAPGGYTHLLVAIDKFSKWIEVRPLNSIRSEQAVAFFTNIIHRFGVPNSIITDNGTQFTGKKFLDFCEDHHIRVDWAAVAHPMSNGQVERANGMILQGLKPRIYNDLNQFGRRWMKELPSVVWSLRTTPSRATGFTPFFLVYGAEAILPTDLEYGSPRARAYTEQSNQASREESLDQLEEARDRALLHSARYQQSLRRYHARGVRSRELQVGDLVLRLRQDARGRHKLTPPWEGPFVIAKVLKPGTYKLANNQGEIYGNAWNIKQLRRFYP

SEQ ID NO: 297520 - protein, 100 aa, Zea mays
  Clone ID: MRT4577_34414C.1.pep
TSGRGCGSRRCRRRRQEEEERVEARSSTTAARSERRTSIDRSASRMNQIGRRTCQLSAGDPPQRSKVAIFCELLTRLSNVIGLSGGVITRQRSSIYWGLV

SEQ ID NO: 297521 - protein, 932 aa, Zea mays
  Clone ID: MRT4577_34415C.1.pep
MPFGLRNAGATYQRCMNHVFGEHIGRTVEAYVDDIVVKTRKASDLLSDLEVTFRCLKAKGVKLNPEKCVFGVPRGMLLGFIVSERGIEANPEKIAAITSMGPIKDLKGVQRVMGCLAALSRFISRLGERGLPLYRLLRKAECFAWTPEAEEALGNLKALLTKAPVLVPPADGEALLVYVAATTQVVSAAIVVERQEEGHALPVQRPVYFVSEVLSETKIRYPQVQKLLYAVILTRRKLRHYFESHPVTVVSSFPLGEIIQCREASGRIAKWAVEIMGETISFAPRKAIKSQVLADFVAEWVDTQLPTAPIQPELWTMFFDGSLMKTGAGAGLLFISPLGKHLRYVLRLHFPASNNVAEYEALVNGLRIAIELGVRRLDARGDSQLVIDQVMKNSHCRDPKMEAYCDEVRRLEDKFFGLELNHIARRYNETADELAKIASGRTTVPPDVFSRDLHQPSVKLDDAPEPEAPSAQPEVPSAQPEAPSAQPEAPSAQPEVPSAPEGGALHVEEGQSGATPDRDWQAPYLQYLRRGELPLDQAEARRVARRAKSFVLLGDEEELYHRSPSGILQRCISIAEGRELLQEVHSGACGHHAAPRALVGNAFRQGFYWPTAVADATRIVRTCEGCQFYAKRTHLPAQALQTIPITWPFAVWGLDLVGPLQKAPGGYTHLLVAIDKFSKWIEVRPLNSIRSEQAVAFFTNIIHRFGVPNSIITDNGTQFTGKKFLDFCEDHHIRVDWAAVAHPMSNGQVERANGMILQGLKPRIYNDLNKFGRRWMKELPSVVWSLRTTPSRATGFTPFFLVYGAEAILPTDLEYGSPRARAYTEQSNQASREDSLDQLEEARDRALLHSARYQQSLRRYHARGVRSRDLQVGDLVLRLRQDARGRHKLTPPWEGPFVIAKVLKPGTYKLANNQGEVYGNAWNIKQLRRFYP

SEQ ID NO: 297522 - protein, 546 aa, Zea mays
  Clone ID: MRT4577_34416C.1.pep
MLLGFIVSEWGIEANPEKIAAITNMGPIKDLKGVQRVMGCLAALSRFISRLGERGLPLYRFLRKTERFTWTPEAEEALGNLKALLTSAPILVPPAAGEALLIYVAATTQMVSAAIMVERREEGHAFPVQRPVYFISEVLFETKICYPQIQKLLYAVILTRRKLRHYFESHPVTVVSSSPLGEIIQCREASSRIAKWAVEIMGKTISFAPRKAIKSQVLADFVAEWVDTQLPATPIQPELWTMFFDGSLMKTGAGASLLFISPLGKHLRYVLLLHFPATNNVAEYEALVNGLRIAIELGVRHLDARGDLQLVIDQVMKNSHCRDPKMEAYCDEVRRLEDKFYGLEFNHIARRYNETVDELAKIASGRIMVPPDVFSRDLHQPSVKTDDTPEPEKVSALPEKAPGGYTHLLVAIDKFSKWIEVRPLNSIRSEQAVAFFTNIIHRFGVPNSIITDIGTQFTGRKFLDFCEDHHIQVDWAAIAHPMTNGQVECANGMILQGLKPRIYNDLNKFGRRWMKELPSVVWSLRTTPSRATGFTPFFLVYGAEAI

SEQ ID NO: 297523 - protein, 546 aa, Zea mays
  unsure (1)..(546): unsure at all Xaa locations
  Clone ID: MRT4577_34417C.1.pep
MLLGFIISERGIKVNLEKIAAITNMGPIKDLKGVQRVMGCLAALSRFISRLGEKGLPLYRLLRKAERFTWTPEAEEALGNLKALLTNAPILVPPAAGEALLIYVAATTQVVSATIVVERQEEGHALLVQRPIYFISEVLSETKIRYPQIQKLLYAVILTRRKLRHYFESHPVTEVSSFPLGEIIQCREASGRIAKWAVELMGETISFAPRKAIKSQVLADFVAEWVDTQLPTSPIQPKLWTMYFDGSLMKIGAGAGLLFISPLGKHVRYMLRLHFPASNNVAEYEALVNGLCIVIELGVWRLDARGDSQLVIDLVMKNSHYRDPKMEAYCDEVRRLEDKFYGLELNHIARLYNETADELAKIASGQTMVPSDVFSRDIHQPXSVKIDDTPEPEEASAQPEVPSAAEGEALRVEGERNGVTPNPNWQTPYLXISTEESYPSTRPKLGDWRYAPSRSSYWGMKRSSTTAATQAFSNDAYPSPKDKSCCKRYNRRLAVTMQHLEPSWETLSDKFSTGRPWWPTPLGLYALAKGVNSTQDIHTYPLRPYR

SEQ ID NO: 297524 - protein, 892 aa, Zea mays
  Clone ID: MRT4577_34418C.1.pep
MPFGLRNAGATYQRCMNHVFGEHIGRTVEAYVDDIVVKTRKASDLLSDLEVTFRCLKAKGVKLNPEKCVFGVPRGMLLGFIVSERGIEANPEKIAAITSMGPIKDLKGVQRVMGCLAALSRFISRLGERADGEALLVYVAATTQVVSAAIVVERQEEGHALPVQRPVYFVSEVLSETKICYPQVQKLLYAVILTRRKLRHYFESHPVTVVSSFPLGEIIQCREASGRIAKWAVEIMGETISFAPRKAIKSQVLVDFVAEWVDTQPPTAPIQPELWTMFFDGSLMKTGAGAGLLFISPLGKHLRYVVRLHFPASNNVAEYEALVNGLRIAIELGVRRLDARGDSQLVIDQVMKNSHCRDPKMEAYCDEVRRLEDKFYGLELNHIARRYNETADELAKIASGRTTVPPDVFSRDLHQPSVKIDDAPEPEAPSAQPKAPSTQPEAPSAHPEASAVQPEVPSAPEGEALDVEEEQSGATPDRNWQAPYLQYLRRGELPLDQAEARRVARRAKSFVLLGDEEELYHRSPSGVLQRCISIAEGQELLQEIHSGACGHHAAPRALVGNAFRQGFYWPTVVADATRIVRTCEGCQFYAKQTHLPAQALQTIPITWPFAVWGLDLVGPLQKAPGGYTHLLVAIDKFSKWIEVRPLNSIRSEQAVAFFTNNIHRFGVPNSIITDNGTQFTGKKFLDFCEDHHIRVDWAAVAHPMSNGQVERANSMILQGLKPRIYNGLNKFGKRWMKELPSVVWSLRTTPSRATGFTPFFLVYGAEAILPTDLEYGSPRTRAYNDQSNQASREDSLDQLGEARDKALLHSARYQQSLRRYHARGVRSRDLQVGDLVLRLRQDARGRHKLTPPWEGPFVIAKVLKPGTYKLANNQGEIYGNAWNIKQLRRFYP

SEQ ID NO: 297525 - protein, 420 aa, Zea mays
  Clone ID: MRT4577_34419C.1.pep
MQLRRLSPLLASPRRRLRLRSPTNPSSATMSPGAAHLATAADPDEDLCASAGASEAEVPAPAPHLPPLPVSAEERLERAWAHWRRLGSPRLLVAPMVDNSELPFRMLCRRYGADAAYTPMLHSRIFSENEKYRSMEFTTCKEDRPLFVQFCANDPDILLQAAKKVEPYCDYVDINFGCPQRIARRGNYGAFLMDNLPLVKSLVQNLAANLHVPVSVKIRVFPRLEDTLAYAKMLEEAGASLVAVHGRTRDEKDGKKFRADWDAIKAVKDALRVPVLANGNIRHMEDVKNCLEHTGADGVLSAETLLENPAVFAGFRTKEWKEDGDENGDGGLDQADLVIEYLKLCEQYPVPWRMVRSHVHKMLGDWFRVHPEVREELNKQNKLTFEWLHDMVMRLKDLGGRVPLYRKETALGQTLASSNA

SEQ ID NO: 297526 - protein, 50 aa, Zea mays
  Clone ID: MRT4577_3441C.1.pep
KTPLSKFGSSRPHMEVRGLQTPCSLEGFRKSGHYRDYRQLWVRGPIVYRG

SEQ ID NO: 297527 - protein, 289 aa, Zea mays
  Clone ID: MRT4577_34420C.1.pep
WVPRGRPGQHQASIIYLDISRTGVKDKIPDWFWHTVSEAKYLYMSGNELTGNLPTHLGDMALVHLNLSSNNLTGPVQTFPRNVGMLDLSFNSFSGTLPLSLEAPVLNVLLLFSNKIGGSIPESMCNLPLLSDLDISSNLLEGGIPRCFATMQLDFLLLSNNSLAGSFPTVLRNSTNLKMLDLSWNKLSGRLPTWIGELTGLSFLRLGHNMFSGNIPLEILNLSSLQFLDLSSNNLSGAIPWHLEKLTGMTTLMGNRQDISSIPLYIRGNGENDISIDEFEEVFFDITKG

SEQ ID NO: 297528 - protein, 781 aa, Zea mays
  unsure (1)..(781): unsure at all Xaa locations
  Clone ID: MRT4577_34421C.1.pep
AYSGYHXIRMKESDQLVTSFITPFGMYCYVTMPFGLRNAGATYQRCMNHVFGEHIGRTVEAYVDDIVVKTRKASDLLSDLEVTFRCLKAKGVKLNSEKCVFGVPRGMLLGFIVSERGIEANPERIAAITSMGPIKDLKGVQRVMGCLAALSRFISRLGERGLPLYRLLRKAECFAWTPEAEEALGNLKALLTKAPILVPPADGEALLVYVAATTQVVSAAIVVERQEEGHALPVQRPVYFVSEVLSETKIRYPQVQKLLYAVILTRRKLRHYFESHPVTVVSSFPLGEIIQCREASGRIAKWAVEIMGETILFAPRKAIKSQTGAGAGLLFISPLGKHLRYVLRLHFPASNNVAEYEALVNGLRIAIELGVRRLDARGDSQLVIDQVMKNSHCRDPKMEAYCDEVRRLEDKFYGLELNHIARRYNETADELAKIASGRTTVPLDVFSQDLHQPSVKINDTPEPEATSVQPEVPSAQPEASSVQPEVPSAPEGEALHVEEEQNGATPDRNWQTPYLQYLRQGELPLDQAEARRVARRAKSFVLLGDEEELYHRSPSGILQRCISIAEGQELLQEIHSGACGHHAAPRALVGNAFQQGFYWPTVVADATRIVRTCEGCQFYAKQTHLPAQALQTIPITWPFAVWGLDLVGPLQKAPGGYTHLLVAIDKFSKWIEVRPLNNIRSEQAVAFFTNIIQRFRVPNSIITDNGTQFIGRKFLDFCEDHHIRVDWAAVAHPMSNGQVERANGMILQGLKPRIYNDLNKFGKRWMKELPSMVWSLRTTPS

SEQ ID NO: 297529 - protein, 448 aa, Zea mays
  Clone ID: MRT4577_34422C.1.pep
MEAYCDEVRRLEDKFFGLELNHIARRYNETADELAKIASGRTTVPPDVFSRDLHQPSVKVDDSPEPEAPSAQPEAPSVQPEVPSAPGAEALHVEEEQSGATPDRNWQAPYLRYLRQGELPLDQAEARRVARRAKSFVLLGDEEELYHRSPSGILQRCISIAEGQELLQEIHSGACGHHAAPRALVGNAFRQGFYWPTAVADATRIVRTCEGCQFYAKQTHLPAQALQTIPITWPFAVWGLDLVGPLRKAPGGYTHLLVAIDKFSKWIEVRPLNNIRSEQAVAFFTNIIHRFGVPNSIITDNGTQFTGRKFLDFCEDHHIRVDWAAVAHPMSNGQVERANGMILQGLKPRIYNGLNKFGKRWMKELPSVVWSLRTTPSRATGFTPFFLVYGAEAILPTDLEYGSPRTRAYNDQSNQASRGESLDQLEEARDKALLHSARYQQSLRRYHA

SEQ ID NO: 297530 - protein, 73 aa, Zea mays
  unsure (1)..(73): unsure at all Xaa locations
  Clone ID: MRT4577_34423C.1.pep
YVKLVKAFCSERNVHLVTVRVAKNLGEWSGLSEIHSQGXASKVLGCSCVVVKHYGEXCQGLSIVQQYVKLLYM

SEQ ID NO: 297531 - protein, 123 aa, Zea mays
  Clone ID: MRT4577_34424C.1.pep
MPRGSIGGSPERGAETYTVRSGHVSALDPRLALIKAWVFSIPESRDPAVSGPDPTQRGPEPILGVRFTPMDVLDLTQRPGLYIQGSNTFPWGLDSLLTPWSISSSLPTWRSRSRPRGGVGCCC

SEQ ID NO: 297532 - protein, 223 aa, Zea mays
  Clone ID: MRT4577_34425C.1.pep
MASELGLAPPAKRPTPSPTTITAIGDDLLLEIFLRLPSLPSLVRAALACRTFLDAVRSSPAFRRRFRALHPPQLLGFFIDSCRSNPFVPFRSRSDPDLAAAIRGADFLLTRLPEDSDSSPGWHIETCYGGCVVLVNLSTYQVAAYNPLTQALHLFPFPTTNGILVKGLPEFIFLSEEDQEARMVCVQHRNKPEQVPAPSSCFLTGHQGSGRSCRWVETPQPSQ

SEQ ID NO: 297533 - protein, 142 aa, Zea mays
  unsure (1)..(142): unsure at all Xaa locations
  Clone ID: MRT4577_34426C.1.pep
WTFEHSVXHAYKLQQALXVSVXLEQPSAQLQQXTLAHLTIQQFDAQTDDASTHLAGVNALCYLQQQLIKYNPLALGNVSGYQQLQHLPQVVTALTELAMVNPIRYLQQEQLMSSSPVAMGNAPTYLLQQLLQQHVLQQIVPS

SEQ ID NO: 297534 - protein, 78 aa, Zea mays
  unsure (1)..(78): unsure at all Xaa locations
  Clone ID: MRT4577_34427C.1.pep
RTRGVNLSTSACVFMTAIGLDYITXQENYLYTSFSGFYGGLSRLVVGIKQLLPDQEXNLFVLKIKAKGIPSLVAWISI

SEQ ID NO: 297535 - protein, 119 aa, Zea mays
  Clone ID: MRT4577_34428C.1.pep
NTTIYYKVGYRLYIPPAGKLPIYPYNMDRPKLTEAQAPRGEQLLEHDMTGHRELLPYGMARKLQNLHRDFNEIMTASAFVNAETSNLAFGNNCIARVGDKITHDPYLKSCTGRSALTIK

SEQ ID NO: 297536 - protein, 106 aa, Zea mays
  Clone ID: MRT4577_34429C.1.pep
IKRKPSGFELPANRGTSFTFPQEWEDLWARVCMGLLPMTMHFFSHSDLDKGGGQKNKTIGFLAPYEMNERIGGSISTGELGSWRPKFWPGVKIKSPPPAPRGFTPV

SEQ ID NO: 297537 - protein, 29 aa, Zea mays
  Clone ID: MRT4577_3442C.1.pep
RSYIGSPIRVRLVSSVWRRHRTNDRMYML

SEQ ID NO: 297538 - protein, 74 aa, Zea mays
  unsure (1)..(74): unsure at all Xaa locations
  Clone ID: MRT4577_34430C.1.pep
HNSVPSKATNILCLIMLLGLCASADTGTIFPXCSEAPILSFITPYLXQPTTSCCENPILNPSRTHRAIXTGILP

SEQ ID NO: 297539 - protein, 69 aa, Zea mays
  Clone ID: MRT4577_34431C.1.pep
MCVPAIFTLSPQTIYPAPPPPLFFSLLSLGSPRLILSALYTYLSFLVTHYDNPKSTIQAALERIELDSI

SEQ ID NO: 297540 - protein, 133 aa, Zea mays
  Clone ID: MRT4577_34432C.1.pep
DGHPFRACMPGQIQLPRRRQLLTSVPPSLAGQPAFGAGFPSTKGAWLPRTAAAGHSGPDKDRSDEGGPGHANERELDANGGGRNNQAANGAPSSSFPGPFGWPGAFGSLAGGGFNLGIGTQGVGPTGSGPRVP

SEQ ID NO: 297541 - protein, 99 aa, Zea mays
  Clone ID: MRT4577_34433C.1.pep
VRARVRPRTLSCLLSTRVKGSGPTAMALLHFFLMEAPFLLHTPTLAEPLQQPWPILFSPLLSPARKEHQGQSALLPGFTCAAAQESMDVSSPCFYASME

SEQ ID NO: 297542 - protein, 92 aa, Zea mays
  Clone ID: MRT4577_34434C.1.pep
MTKRTKKVGVTGKYGTRYGASLRKQVKKVEVTQHAKYTCTFCGKVTVKRQATGIWDCKSCKRTVAGGAYTVATPAAAAMRSTLRRLREIAEV

SEQ ID NO: 297543 - protein, 827 aa, Zea mays
  unsure (1)..(827): unsure at all Xaa locations
  Clone ID: MRT4577_34435C.1.pep
MSFGLRNAGATYQRCMNHVFGEHIGRTVEAYVDDIIVKTRKASDLLSDLEVTFRCLKAKGVKLNPEKCVFGVPRGMLLGFIVSERGIEANPEKIAAITSMGPIKDLKGVQRVMGCLAALSRFISRLGERGLPLYRLLRKAECFTWTPEAEEALGNLKALLTKAPILVPPAAGEALLVYVATTTQVVSAAIVVERQEEGHALPVQRPVYFVSEVLSETKIRYPQVQKLLYAVILTRRKLRHYFESHPVTVVSSFPLGEIIQCREASGRIAKWAVEIMGETISFAPRKAIKSQVLADFVAGWVDTQLPTAPIQPELWTMFFDGSLMKTGASAGLLFISPLGKHLRYVLRLHFPASNNVAEYEALVNGLRIAIELGVRRLDARGDSQLVIDQVMKNSHCRDPKVEAYCDEVRRLEDKFYGLELNHIARRYNETVDELAKIASGRTTVPPDVFSRDLHQPSVKIDDTPEPEAPSAQSEVPSXPDRGTLGTARGXQLGXVPSVQPETPYLQYLYQEELPLDRAEARRVARRAKSFVLLGDEKELYHRSPSGILQRCVSVTEEGTQGLHAPAGRHRQILQVDQGPTSEQHQVRAGGGVLHQHHPSLRVPNSIITDNGTQFTGRKFLDFCEDHHIRVDWAAVAHPMSNGQVERDNGMILQGLKPRIYNNLNKFGKRWMKELPSVVWSLRTTSSRATGFTPFFLVYGAEAVLPTDLEYGSPRTRAYSDQSNQASREDSLDQLEEARDKALLHSARYQQSLRRYHARGVRSRDLQVGDLVLRLRQDPRGRHKLTPPREGPFVIAKVLKPGTYKLANSQGEVYGNAWNIQQLRRFYP

SEQ ID NO: 297544 - protein, 835 aa, Zea mays
  Clone ID: MRT4577_34436C.1.pep
MNHVFGEHIGRTVVAYVDDIVVKTRKASDLLSDLETTFKCLRAKGVKLNPEKCVFGVPRGMLLGFIVSERGIEANPEKIAAITNMGPIKDLKGVQRVMGCLAALSRFISRLGKKGLPLYRLLRKAERFTWTPEAEEALGNLKALLTNAPVLVPPAAGEALLIYVAATTQVVSAAIVVERREEGHALLVQRPVYFISEVLSETKIRYPQIQKLLYVVILTRRKLRHYFESHPVTVVSSFPLGEIIQCREASGAGAGLLFISPLGKHVRYVLRLHVPASNNVAEYEALVNGLRITVELGVRRLDARGDSQLVIDQVMKNSHCRDPKMEAYCDEVRRLEDKFYGLELNHITRRYNETTDELAKIASGRTTVPPDVFSRDIHQPSVKIDDTPEPEEASAQPEVPSTAEGEALRVEGDRNGVTPNPRWQTSYLQYLHRGELPLDKAEAQRLARRAKSFVLLGDEKELYHRSPSGILQRCISVAEGQELLQETHSGACGHPAAPRALVGNTFRQGFYWPTAVADATRIVRSCQGCQFYARQTHLPAQALQTIPITWSFAVWGMDLVGPLQKAPGGFSHLLVAIDKFSKWIEVRPLTSIRSEQAVAFFTNIIHRFGVPNSIFTDNGTQFTGKNFLDFCEDHHILVDWAAVAHPMTNGQVERANGMILQGLKLRIYNDLHKFGKRWMKELPSVVWSLRTTPSRATGFSPFFLVYGAEAILPTDLEYGSPRTKAYDDRSNQTSREDSLDQLEEARDVALLHSARYQQSLRRYHARRVWSRDFQVGDLVLRLRQDARGRHKLTPPWEGPFIIAKILKPGTYKLANDQGEVYNNAWNIQQLRRFYP

SEQ ID NO: 297545 - protein, 124 aa, Zea mays
  unsure (1)..(124): unsure at all Xaa locations
  Clone ID: MRT4577_34437C.1.pep
MPHKPDPTQPEEARARETXGEAGTXTARASKSGPNGHTPKKNGEDRGEETDKDRKGRRDNAKHTEQNRQAKGARASRHGDGRDKKAHKEPERDRKKGKNSKHSGNNRTHDKEENARTKTNRTRA

SEQ ID NO: 297546 - protein, 955 aa, Zea mays
  Clone ID: MRT4577_34438C.1.pep
MPFGLRNAGATYQRCMNHVFGEHIGRTVEAYVDDIVVKTRKASDLLSDLEVTFRYLKAKGVKLNPEKCVFGVPRGMLLGFIVSERSIEANPEKIAAITSMGPIKDLKGIQRVMGCLAALSRFISRLGERGLPLYRLLRKAECFAWTPEAEEALGNLKALLTKAPVLVPPADGEALLVYVAATTQVVSAAIVVERQEEGHALPVQRSVYFVSEVLFETKIRYPQVQKLLYAVTLTRRKLRHYFESHPVTVVSSFPLGEIIRCREASGRIAKWAVEIMGETISFAPRKAIKSQVLADFVAEWVDTQLPTAPIQPELWTMFFDGSLMKTGAGVGLLFISPLGKHLRYVLRLHFPASNNVAEYEALVNGLRIAIELGVRRLDARGDSQLIIDQVMKNSHCRDPKMEAYCNEPRGEQRFPPDVFSRDLHQPSVKIDDTPKPEAPSVQPEVPSAQPEAPSARPEVPSVQPEVPSASEGEALRIEEERSGATPDPNWQTPYLQYLRQGELPLDRAEARRVARRAKSFVLLGDEKELYHRSPSGILQRCISVAEGQELLQEIHSGACGHHAAPRALVGNAFRQGFYWPTAVADATRIVRTCEGCQIYAKQTHLPAQALQTIPITWPFAVWGLDLVGPLQKAPGGYTHLLVAIDKFSKWVEVRPLNSTRSEQAVTFFTNIIHRFGVPNSIITDNGTQFTGRKFLDFCEDHHIRVDWAAVAHPMSNGQVERANGMILQGLKPRIYNDLNKFGKRWMKELPSVVWSLRTTPSRATGFTPFFLVYGAEAVLPTDLEYGSPRTRAYNDQSNQASREDLLDQLEEARDKALLHSARYQQSLRLYHARGVRPRDLQVGDLVLPLRQDARGRHKLTPPWEGPFVIAKVLKPETYKLANSQGEVYRQRLEHPTATSFLPLRCFQVVHIPRTHAKFSHQGRVGLASAKPDPPSGAKRGGTPSALKFSLKPNDG

SEQ ID NO: 297547 - protein, 105 aa, Zea mays
  unsure (1)..(105): unsure at all Xaa locations
  Clone ID: MRT4577_34439C.1.pep
GTLEPAGGPARHGGGAAXPXPKAPPPXKDTPHPATTGAPNRPPPAPPPPPPRAPTPTPDPAGARGGEHPHRPHAGRDEAGAPRPRRAEPGRQGNPSSAHDPHPGR

SEQ ID NO: 297548 - protein, 140 aa, Zea mays
  unsure (1)..(140): unsure at all Xaa locations
  Clone ID: MRT4577_3443C.1.pep
AASATAENPNGKALQSEKAARGETGIHGQRLQQQLQTQPGAASFAMRLLPCETGSPQSLGXQHPGTLYQXALRFRDHARTLXEEEATAWTRAAATXRAKHRVATSPXGRARGAGRHRQGSKRLRGALAAGTTSRDGATAS

SEQ ID NO: 297549 - protein, 695 aa, Zea mays
  Clone ID: MRT4577_34440C.1.pep
MPFGLRNAGATYQRCMNHVFGEHIGCTVEAYVDDIVVKTRKASDLLSDLEVTFRCLKAKGVKLNPEKCVFGVPRGMLLGFIVSERGIEANPEKIATITSMGPIKDLKGIQRVMGCLAALSRFISRLGERGLPLYRLLRKAECFAWTPEAEEALGNLKALLTKAPVLVPPADGEALLVYVAATTQVVSAAIVVERQEEGHALPVQRPVYFVSEVLSETKIRYPQVQKLLYAVILTRRKLRHYFESHPVTMVTSFPLGEIIQCREASGRIAKWAVEIMGETISFAPRKAIKSQTGAGAGLLFISPLGKHLRYVLRLHFPASNNVAEFEALVNGLRITIELGVRRLDARGDSQLVIDQVMKNSHCRDPKMEAYCDEVRRLEDKFFGLELNHIARRYNETADEMAKIASGRTTVPPDVFSRDLHQPSVKIDDAPEPEAPSAQPEVPSAQPEAPSAQPEVPSAPEGEALDVEEGQSGATPDQDWQAPYLQYLRRGELPLDQAEARRVARRAKSFVLLGDEGELYHRSPSGVLQRCISIAEGQELLQEIHSGACGHHAAPRALVGNAFRQGFYWPTAVAHATRIVRTCEGCQFYAKQTRLPAQALQTIPITWPFAVWGLDLVGPLQKAPGGYAHLLVAIDKFSKWIEVRPLNSIRSEQAVAFFTNIIHRFGVPNSIITDNGTQFTGKKFLDFCEDHHIRVD

SEQ ID NO: 297550 - protein, 60 aa, Zea mays
  Clone ID: MRT4577_34441C.1.pep
NKNNIDPCKKLSNFYLLRMTHFVWGGIKGGASATGGIEKGCPLWGFPPPSGTPGWNGGFF

SEQ ID NO: 297551 - protein, 1922 aa, Zea mays
  unsure (1)..(1922): unsure at all Xaa locations
  Clone ID: MRT4577_34442C.1.pep
MAADNTPAEQHSGLSRRLPRRRRRRRGNRGQAGGGTSSAVERVDGVGAPTGDTSGIDFASETKTSAVSPQHANSKRTDDASTLAKDLLGVTLVPEMTVQSAPDVTSSPPVDQEVLTDSHLMPFGFSLDPPSDFASVDAFIEASPNPSGYGMRSPWDRLAAVSTCGPSGSEEDDEPDFCWDFSRLGNPSAMRDFMIACDYCLSDCSDDNRSLGDEDCGPSRECFHIDLGGPGEGNHLGIPENGDPPKPAPRVDILRELAVVPVPAGGQPPAGEARHLPQGIQHRIADDARARPPPASSGVSQNLAAAAINLRAMPEPSTTEGRRIQGELKNLLEDAAVRRAESSASRRXGYPSEHRAATSRYMREALVHTGRTRNTAPAAPGRLGNEHPHRNRRAHLDEKVRRGYHPRRGGHYDSGEDRSLSPEPPGPQAFSWAIRRAPFPTRFXTPTTITKYSGXETRPELWLADYRLACHLGGTDDDNLIIRNLPLFLSDTARAWLEHLPPGQISNWDDLVQAFAGNFQGTYVRPGNSWDLRSCRQQPGESLRDYIRRFSKQRTELPNVTDSDVIGAFLAGTTCRDLVSKLGRKTLTRASELMDIATKFASGQEAVESIFRKDKQPQGRQPEDVPEASTQRGTKKKGKKKSQAKRDATDADLVAAAEYKNPRKPPEGANLYDKMLKEPCPYQQGPVKHTLEECAMLRRHFHKAGPPAEGGRARDDDKKEDHKAGEFPEVHDCFMIYGGQVANASARHRKQECREVCSVKVAAPVYLDWSDKPITFDQGDHPDRVPSPGKYPLVVDPVIGNVRLTKVLMDGGSSLNIIYAETHGLLWIDLSSVRAGAAPFHGIIPGKRVQPLGQLDLPVCFGTPSNFRRETLTVEVVGFRGTYHAVLGRPCYAKFMVVPNYTYLKLKMSGPNGVITVGPTYRHAYECDVEYREYAEALAKSEALIADLESPSKEAPDVKRHAGNFESAETEAVLVDFLRANTDVFAWSPSDMPGIPRDVAEHSLDIRARARPVKQPLRRFDKEKRRAIGEEIHKLMAAGFIKEVFHPEWLANPVLVRKKGGKWRMCVDYTGLNKACPKVPYPLPRIDQIVDSIAGCETLSFLDAYSGYHQIRMKESDQLATSFITPFDMYCYVTMPFGLRNAGATYQRCMNHVFGEQIGRTVEAYVDDIVVKTRKASDLLSDLEVTFRCLKAKGVKLNPEKCVFGVPRGMLLGFIVSERGIEANPEKIAAITNMGPIKDLKGEQRVMGCLAALSRFISRLGERGLPLYRLLRKAECFTWTPEAEEALGNLKALLTNAPILVPPAAGEALLIYVAATTQVVSATIVVERREEGHALPIQRLVYFISEVLSETKICYPQIQKLLYAVILTRWTLRHYFESHPVTVVSSFPLGEIIQCREASGRIAKWAVEIMCETISFAPRKAIKTQVLADFVAEWIDTQLPTAPIQPELWTMFFDGSLMKTGAGVGLLFISPLGKHLRYVLRLHFPASNNVAEYEALVNGLRIAIELGVRRLDARGDSQLVIDQVMKNSHCRDPKMEAYCDEVRRLEDKFYWLELNHIARRYNETADELAKIASRRTTTPYLXISTEESYPSTEPKLGGWRGAPSRSSCWETGRSSTTAAPRASSNDAFPSLKARSSYKRYTRGLAVITQRLEPLLEMPSDKXYWPTAVADATRIVHTCRGCQFYARQTHLPAQALQTIPITWPFVVWGLDLVGPLQKAPRGYTHLLVAIDKFSKWIEVRPLNNIRSEQAVAFFTNIIHRFGVPNSIITDNGTQFTGRKFLDFCEDHHIRVDWAAVAHPMTNGQVERANGMILQGLKPRIYNDLNKFGKRWMRELPSVVWSLRTTPSRATGFTMFFLVYGAEAILPTDLEYGSPRTRAYDDQSNRANREDSLDQLEEARDMALLHSARYQQSLRRYHARGVRS

SEQ ID NO: 297552 - protein, 750 aa, Zea mays
  Clone ID: MRT4577_34443C.1.pep
MNHVFDEHIGRTVEAYVDDIVVKTRKASDLLSDLEVTFRCLKAKGMKLNPEKCVFGVPRGMLLGFIVSERGIEANPEKIAAITSMGPIKDLKGVQRVMGCLAALSRFISRLSERGLPLYRLLRKAECFAWTPEAEEALGNLKALLTNAPILVPPAAGEALLIYVAATTQLRHYFESHTVTVVSSFPLGEIIRSREASGRIAKWAVEIMGETISFAPRKAIKSQVLADFVAEWVDTQLPTAPIQPELWTMFFDGSLMKTGAGAGLLFVSPLGKHLRYVLRLHFLASNNVAEYEALVRRLEDKFYGLELNHIARRYNETADELAKIASGRTTVPSDVFSRDLHQPSVKTDDTPEPEKASAQPEAPSAQSEVPSARSEVPSAPEGEALCVEGEQSEVTPNQNWQTPYLQYLHRGELPLDQAEARRLARCAKSFVLLGDGKELYHRSPSGILQRCISITEGQELLQEIHSGACCHHTAPRTLVGNAFRQGFYWPTAVADATRIVRTCEGCQFYARQTHLPAQALQTIPITWLFAVWGLDLVGPLQKAPGGYTHLLVAIDKFSKWIEAVAFFTNIIHRFGVPNSIITDNGTQFTGRKFLDFCEDHHIWVDWAAVAHPMTNGQVERANGMILQGLKPRIYNDLNKFDLEYGSPRTKAYADQNNRANREDSLDQLEEARDMALLHSARYQQSLRRYHARGVRSRDLQVGDLVLRLRQDARGRHKLTPPWEGPFVIAKILKPKTYKLANSRGEVYSNA

SEQ ID NO: 297553 - protein, 178 aa, Zea mays
  unsure (1)..(178): unsure at all Xaa locations
  Clone ID: MRT4577_34444C.1.pep
ETARWRAAPWHLSSTAFAGKAVNVPSSLFGEARVTMRKXAAKAKPAPSSGSPWGGGDPVLYLDPLSGSPPSYLTDEFPDYYGWYTRALXSDPVTAAKNRDLDVIHSPWAMLXHVRCLFPELLARNGVKFXQAVRFKDLSXIFKEGGLDYLXTPTLIHPQSILAIWAXLVTLMCAIKGY

SEQ ID NO: 297554 - protein, 872 aa, Zea mays
  unsure (1)..(872): unsure at all Xaa locations
  Clone ID: MRT4577_34445C.1.pep
MNHVFGEHIGRTVEAYVDDIVVKTRKASDHLSDLETTFKCLKAKGVKLNPEKCVFGVPRGMLLGFIVSERGIKANPKKIAAITNMGPIKDLKSVHRVTGCLAALSCFISRLGERGLPLYRLLRKTECFTWTPEAEEALRNLKALLTNAPILVPPAAGEALLIYVAATTQVVSAVIVVERREEGHALPVQRPVYFISEVLSETKIRYPQIQKLLYAVILTRRKLRHYFESHPVTMVSSFPXGEIIQCREASXLPAAPIQPELWTMFFDGSLMKIGAGAGLLFISPLGKHLRYVLRLHFPASNNVVEYEALVNGLRITIELGVRRLDARDDSQLVIDQVMKNSHCRDPKMEAYCDEVRRLEDKFYGLEVNYVARRYNETADELVKIALARTTVPPNVFSRDLHRPSVKTNDTPEPEKVSALPEVPSTQPEAPSAQLEAPSAPEGEALRVEGERNGVPPDRDWQTPYRQYLHRGELPLDRAEARRLARRAKSFVLLGDGKELYHRSPSGILQRCISIAEGQELLQEIHSGACGHHAAPRALVGNAFRQGFYWPTVVADATRIVRTCQVCQFYARQTHLPAQALQTIPITWPFAVWGLDLVGPLQKAPGGYTHLLVAIDKFSKWIEVRPLNSIRSEQAVAFFTNIIHRFGVPNSIITDNGTQFTDRKFLDFYEDHHIRMDWAAVAHPMTNGQVERANGMILQGLKPRIYNDLHKFGRRWMKELPLVVWSLRTTPSRATGFTPFFLVYGAEAILPTDLEYGSPRTRAYDDRHNQTNREDSLDQLEEARDMALLHSARYQQSLRRYHARGVWSRDLQVGDLVLRLQQDARGRHKLMPPWEGPFIIAKILKPGTYKLANSQGEVYSNAWNIRQLRRFYP

SEQ ID NO: 297555 - protein, 65 aa, Zea mays
  Clone ID: MRT4577_34446C.1.pep
PTRPRTRGGIIWTSSFFAGGKKRHSIKNFRAHSRLHPLSVPILSTYHIFIYWTPLQLYCAPVYNR

SEQ ID NO: 297556 - protein, 962 aa, Zea mays
  Clone ID: MRT4577_34447C.1.pep
MGSLRQPLQPGTVLRFGSLEFMSLDDSYDMILLPPPCDNDNGGRQPARRRRNRRRLPRVAEEQHSSSSRLLPRRRRGRQGNQGQAGGSASSAVEQVDSAGTPTSGAPGIDFAPETKTSAVSPRHAKPEQVDDASALAKSLQDVALVPEATVQSVLDVTSSPLDDQKVSTDSHPMSFGFSLNPPSNLDLADAFVEASPNPLGFRMRSPWDRLMDVSTYGPSGSEEDDDPSICWDFSGLGNPSAMRDFMTACDFCLSDCSDGSRSLDDEDCGPSRECFHVDLGGPSEGNHLGMPENGDLPRPVPRADIPRELAVVPVLAGGHDPQLEQLRGAQARFDEGAGALEPIRRDVGQAWAGQPPAGEIRHLPQGLQHRVADDVRFRPPPASSGVGQNLAAAAMLLRAMPEPSTTEGRRIQGELKNLLEGTAVRRAESTASRRQGYPSEPHAATSRFMQEASVYTGRTRNTAPVAPGRLGNEQHHRDRRAHLDERGTYVRPGNSWDLRSCRQQPGESLRDYIRRFSKQRTKLPNITDSDVIGAFLACTTCRDLVSKLGRKTPTRASELMDIATKFASSQEAVEAIFRKDKQPQCRPSEDAPEASTQRGAKKKGKKKSQAKRDAADADLVAAAEYKNPRKPPGGANLFDKMLKEPCPYHQGPVKHTLEECVMLRRHFHRAGPPSEGGRARDDDKKEDHQAGEFPEVRDCFMIYGGHAANASARHRKQERREVCSVKVAAPVYLDWSDKPITFDQADHPDHVPSPGKYPLVVDPVVGDVRLTKVLMDGGSSLNIIYAETLGLLRVDLSSVRVGAVPFHGIIPGKRVQPLGRLDLPVCFGTPSNFRRETLTFEVVGFRGTYHAVLGRPCYAKFMAVPNYTYLKLKMPGPNGVITVGPTYKHAFECDVECVEYAEALAESEALIADLENLSKEVPDVKRHAGNFEPVETVKAVPLDHSGDASKQIRIGSGLDPK

SEQ ID NO: 297557 - protein, 1082 aa, Zea mays
  Clone ID: MRT4577_34448C.1.pep
MGSLQQPLRPGTVLRFGTLEFVSFDGSYDMILLPPPRDDDNGGRQPARRRRNRRHLPRVVEEQRSSSLRSLPRQRRRRRGHQDQAGGRASLTVERIDAPDAPTEGTPDVGLAFKTEASAVPPRHADPEPEDDAGALAESLQDVALVPEMTVQPVPDVTTSLLVDQKVPTNSHLASFQLGLNPPNDLALAGALIEASATPLGFRMRSPWDRLTDVSTYGPSGSEEDDDPNICWDFSGLGNPSAMRDFMTACDYCLSDCSDGSRGLGNESCGPGRECFHIELGDPSEGNHLGMPEDGDLPRPVPRADIPRELAVVPAPAGGYDPQLEQVREAQARLNEGTGALEPIRRDVGQVWAGQPLAGEIRHLPQGLQHRVANDVRVRPPPASSGVGQDLAATAMLLRATPEPSTTEGRRIQGELKNLLEGAAARRAESTASRRQGYPSEPHAVTSRFMREASVYTGRTRNTAPAAPGHLGNEHHRHNRRAHLDKRVRRGYHPRRGGRYDSGEDRSPSPEPPGPQAFSRAIRRAPFPTRFRPPTTITKYSGETRPELWLADYRLACQLGGTDDDNLIIRNLPLFLSDTARAWLEHLPPGQISNWDDLVQAFAGNFQGTYVRPGNSWDLRSCRQQPGESLRDYIQRSSKQRTELPNITDSDVISAFLAGTTCRDLVSKLGRKTPTRASELMDIATKFASGQEAVEAIFRKDKQPQGRPSEEAPEASAPRGAKKKGKKKLQSKRDAADADLVAAAEHKNPRKPPGGANLFDKMLKEPCPYHQGPVKHTLEECIMLRRHFHRAGPPAEGGRARDDDNNEDHQAGEFPEVHDCFMIYGGHAANASARHRKQERREVCSVKVAAPVYLDWSNKPITFDQADHPDHVPSPGKYPLVVDPVVGNVRLTKVLMDGDSCLNIIYAETLKLLRVDLSSVRAGAAPFHGIILGKRVQPLGRLDLPVCFGTPSNFRRETLTFEVVGFRGTYHAVLGRPCYAKFMAVPNYTYLKLKMPGPNGVITVGPTYKHAFECDVECVEYAEALAESEALIADLENLSKEVPDVKRHAGNFEPAETVKAVLLDPSGDTTKQIRIGSGLDPK

SEQ ID NO: 297558 - protein, 56 aa, Zea mays
  Clone ID: MRT4577_34449C.1.pep
LTDKEYHFLVAVRVPDHGFNHGKTSGDEPTRPSKLRIMCLSPKVYVQIEHSVYHLW

SEQ ID NO: 297559 - protein, 109 aa, Zea mays
  Clone ID: MRT4577_3444C.1.pep
SSCAERFASSYEPPDSRTAAAGTEAAIRGPAGSAAATGTRAVQSSAKAVEPLRRMISQSTCLKVKFILQIHEGIPCVPGYSFFFLGFRTTAVGYSAFCGLLLSYLVGRW

SEQ ID NO: 297560 - protein, 976 aa, Zea mays
  unsure (1)..(976): unsure at all Xaa locations
  Clone ID: MRT4577_34450C.1.pep
GARQPTRRRRNRQRLPHVVEEQHSGLSRPLPRRRRRRRGNQGQAGGGTSSVVERVDGTDAPTGGXSGINLASETKTSVVSPQHANPKQTDDASTLAKDLLGVTLVPETTVQSAPDVTSSPPVDQEVPTDSHLVPFGFSLDPPSDFALVDALVEASPNPLGYRMRSPWDRLTAVSTYGPSGSEEDDEPDFSWDFSGLGNPSAMRDFMTACDYCLSDCSDGSRSLGDEDCGPSRECFHVDLGGPDEGNHLGMPENGDPPRPVPRVDILRELVVVPVPAGGHDPQLEQIREMQARLDEGAGTLEPFRRDIGQEWASQPPAGEVRHLPQGIQHRIADDVRVRPPSVSSGVGQNLAAAAILLRAMLEPSTTEGRRIQGELKNLLEDAAVRRAESSASRRQGCPSEHRAATSRFMREASVHTGRTRNTAPAAPGRLGNEHPHRNRRTHLDERVRRGYHPRHGGRYDSGEDRSPSPEPPGPQAFSRAIRRAPFPTRFRTPTTITKYSGETRPELWLADYRLAYHLGGTDDDNLIICNLPLFLSDTARAWLEHLPPGQISNWDDLVQAFAGNFQGTYVRPGNSWDLRSCRQQPGESLRDYIRRFSKQRIELPNVTDSDVIGAFLAGTTCRDLVSKLGRKTLTRASELMDIATKFASGQEAVEAIFRKDKQPQGRLPEDVPEASTQGCTKKXGKKKSQAESDGADADLVAAAEYKNPRKPPXKGPVKHTLEECVMLRRHFHKAGPPAEGGRARDDDKKEDHKAGEFPEVHDCYMIYGGRVANALARHRKQERREVCSVKVAAPVYLDWSDKPITFNQDDHPDRVPSLGKYSFVVDPVIGNVRLTKVLMDEGSSLNIIYAETLGLLRIDLSSVRAGATPFHRIIPGKRVQPLGQLDLPVCFGTPSNFRRETLTFEVVGFRGTYHAVLGRPCYAKFMAVPNYTYLKLKMSGPNGVITVGPTYRHAYECDVECVEYAEALAESRLEGG

SEQ ID NO: 297561 - protein, 86 aa, Zea mays
  Clone ID: MRT4577_34451C.1.pep
HGSAHVKYARHGISLLYTLDRELLARTAAVGSTPVPSSSTTRASVTTLASSMPLQGSRAPGLTYDLMAGQGSAVQQAYIAASVIRG

SEQ ID NO: 297562 - protein, 85 aa, Zea mays
  Clone ID: MRT4577_34452C.1.pep
VADAVMPDNLCHRWSLEGWAPSGGWQIGSQQPAWRERNHGHRLSLTRGRRDGRVTAAVVGGSARRVSGEQSAAAADAHASRPRIT

SEQ ID NO: 297563 - protein, 64 aa, Zea mays
  Clone ID: MRT4577_34453C.1.pep
RLISQEFPNRPQRKNSFSSRKHLRESDLSNHPDYEREDPKTSTFITSRCQPRQKGSQPGLGKKS

SEQ ID NO: 297564 - protein, 56 aa, Zea mays
  Clone ID: MRT4577_34454C.1.pep
RGPHLTLFFHLKRTHTHPRYQKQAELPLFTFSSTKILSLPFAILHGAQPLTPYGKA

SEQ ID NO: 297565 - protein, 129 aa, Zea mays
  Clone ID: MRT4577_34455C.1.pep
MARILLQPNKDDHATAFHSHTGAPATSLLLLLVAATAVAAVVVSLCTSGKNARPWKQRRSSLAPAPQQEHEQEQDGGGGMSRNKQLLASLSGIGVKAARRSPPASAWSSGGGDDAYVDADGDGTVEEEA

SEQ ID NO: 297566 - protein, 114 aa, Zea mays
  unsure (1)..(114): unsure at all Xaa locations
  Clone ID: MRT4577_34456C.1.pep
SLAPALVSSHGVRLLVRGLRWGWCLRAWRPRGPRWRSRARWGPRCPPPGREHRXQRRGGGGGXEDGAXDTLHLHHWMRRLVIGTSAPQGRWLCNGSLVVLPHAQMGGKQRRPAG

SEQ ID NO: 297567 - protein, 37 aa, Zea mays
  Clone ID: MRT4577_34457C.1.pep
MTKRTKKAGLVGKYGTRSGASLRKSIHKMEVSQYSKN

SEQ ID NO: 297568 - protein, 75 aa, Zea mays
  Clone ID: MRT4577_34458C.1.pep
FCPLLSLEKGEFIVTASENANVYFYDLARPNNSCVNKLQGHGSPVIGVAWNHGENFLASSDSDGTVIVWKRSKTS

SEQ ID NO: 297569 - protein, 90 aa, Zea mays
  unsure (1)..(90): unsure at all Xaa locations
  Clone ID: MRT4577_34459C.1.pep
CWGGRPVRASSLFRPLSXRGCVARRLGWVSXGFSRXRRCXXPACALGPRVVLLFPLCPPRRFFFGPRRAALVLFSPRPSAGLFFRPPLLL

SEQ ID NO: 297570 - protein, 93 aa, Zea mays
  Clone ID: MRT4577_3445C.1.pep
ASQASVRGLQCGNEHPSSMVSSYLDHFFYRWVRCLIFSLCTGYMKSVWDGPHSITCQYDVFSIEDRSCTLHGLYRTHCLGTAEKFRVEPQDML

SEQ ID NO: 297571 - protein, 89 aa, Zea mays
  Clone ID: MRT4577_34460C.1.pep
LTTPRPSLRRDFPRFLNALLCISSVVAASYTLIMRACFVSVLVTRSEPYVFMMIAPAARCIPLALADRTTSPVAAAARAMSSAQAPAIA

SEQ ID NO: 297572 - protein, 46 aa, Zea mays
  Clone ID: MRT4577_34461C.1.pep
HIHLFDAITLLACVLHRTIAYFPLHLYSTHTHNEFARHMVRLTRPS

SEQ ID NO: 297573 - protein, 58 aa, Zea mays
  Clone ID: MRT4577_34462C.1.pep
STLYGTFCLCWNLTDKGFSRIRGASVSAHRLLSYNVPVARSNKPLVLLDKIHLVLNAL

SEQ ID NO: 297574 - protein, 26 aa, Zea mays
  Clone ID: MRT4577_34463C.1.pep
LLIIHLIKYYTISIIIFNIRHIQIPL

SEQ ID NO: 297575 - protein, 117 aa, Zea mays
  Clone ID: MRT4577_34464C.1.pep
MTTAADAAVDDYHHSDGFVMPDVLAKGREACYKARDAFYACIEKHADKKPTEIATMGLLYPADCKKSRADFVSNCRPTWVKHFDRQYCAKKRVQRLLDGDGDRRGPMSLPQPYTFKQ

SEQ ID NO: 297576 - protein, 117 aa, Zea mays; identical to SEQ ID NO: 297575
  Clone ID: MRT4577_34465C.1.pep

SEQ ID NO: 297577 - protein, 889 aa, Zea mays
  Clone ID: MRT4577_34466C.1.pep
MTLSPLVDQEVPTDSHPTSFGFSLNPPSDRALAGALVEASPNPLGFRMRSPWDRLTDISTYGPSGSEEDDEPNICWDFSGLGNPSAMRDFMTACDYCLSDCSDGSRSLGDEGCGPSRECFHVDLGGPSEGNHLGMPEDDDLPRPAPRVDIPRELAVVPVKAGGHDPQPEQIRGGFQHRVANDVRDRPPPASSGVGQNLAAATMLLRAMPEPSTTEGRRIQGELKNLLEGAAVRRAESSTSRRRGYPSEPHAATSRFMREASVYTGRTRNTAPTAPGRLGNEHHHRDRRAHLDERVRRGYHPRRGGRYDSGEDRSPSPEPPGPQAFSRAIRRAPFPTRFRPPTTITKYSGETRPELWLADYRLACQLGGTDDDNLIIRNLPLFLSDTAHAWLEHLPLGQISNWDDLVQAFAGNFQGTYVRPENSWDLRSCWQEPRESLRDYIRRFSKQRTELPNITDSDVIGAFLAGTTCRDLVSKLGRKTPTRASELMDIATKFASGQAAVEATFRKDKQPQGRPSEDAPEVSTQRGAKKKGKKMSQAKRDAADADLVAAAEYKNPQKPPGGANLFDKMLKGSCPYHQGPVKHTLEECVMLRRHFHRAGPPAEGGRARDDDKKEDHQAGEFPEVRDCFMIYGGQAANASARHHKQERREVCAVKVAAPVYLDWSDKPITFDQADHPDHVPSLGKYPLVVDPVIGDVRLTKVLMDGGSSLNIIYAETLELLRVDLSSVRAGAAPFHGIIPGKRVQPLGQLDLPVCFGTPSNFRRETLTFEVVGFRGTYHAVLGRPCYAKFMVVPNYTYLKLKMSGPNGVITVGPTYKHTFECDVECVEYAEALAESEALIADLESLSKEVPDVKRHAGNFELVETVKAVPLDPSGDASKQIRIGSGLDPK

SEQ ID NO: 297578 - protein, 1047 aa, Zea mays
  Clone ID: MRT4577_34467C.1.pep
MGSLQQPLRPGTVLRFGTLEFMSFDGSYDMTLLPPPRDYDNGGRQPARRRRNRRRLPRVVEEQHSGSLRSLPRQRRRRRGRQGQTGGHASPAVERIDAPDAPTEGTPDVDLAFETEASAVPPRHADPEQEDDAGALAESLQDVALEPEMTAQPVPDVTTSLHVDQKVTTNSHLASFRLGLNPPNDLVLAGALIEASATPLRFCMRSPWDRLTDVSTYGPSGSEEDDDPSIGWDFSGHGNPSAMRDFMTACDYCLSDRSDGSRSLGDESCGPSRECFHIELGDPTEGNHLGMPEDGDLPRPVPRADIPRELAVVPAPAGGYDPQLEQVREAQARLNEGTGALEPIRRDAGQAWVGQPLAGEIRHLPQGLQHRVANDVRIRPPPASSGVGQNLATAAMLIRAMPEPSTTEGRRIQGELKNLLEGAAARRAESTASRRQGYPSEPHAATSRFMREASVYTGRTRNTAPAAPGHLGNEHHRRDRRAHLDERVRRGYHPRRGGRYDSGEDRSPSPEPPGPQAFSRAIRRAPFPTRFRPPTTITKYSGETRPELWLADYRLACQLGGTDDDNLVIRNLPLFLSDTARAWLERLPPGQISNWDDLVQAFAGNFQGTYVRPGNSWDLRSCRQQPGESLRDYIRRFSKQRTELPNITDSDVIGAFLAGTTCRDLVSKLGRKTPTRASELMDIATKFASGQEAVEAIFRKDKQPQGRPSEEAPEASAPRGAKKKGKKKSQSKRDAADADLVAAAEYKNPRKPPWRAGPPAEGGRAHDDDKNEEHPAGGFPEVRDCFMIYGRHAANTLARHRKQERREVCSAKVVAPVYLDWSDKPITFDRADHPDHVPSPGKYPLVVDPVVGDVRLTKVLMDGGSCLNIIYAETLKLLRVDPSSVRAGAAPFHGIIPGKRVQPLGRLDLPVCFGTPSNFRRETLTFEVVGFRGTYHAVLGRPCYAKFMAVPNYTYLKLKMPGPNGVITVGPTYKHAFECDVECVEYAEALAESEALIADLENLSKEVPDVKRHAGNFEPAETVKAVPLDPSGDTTKQIRIGSGLDPK

SEQ ID NO: 297579 - protein, 109 aa, Zea mays
  unsure (1)..(109): unsure at all Xaa locations
  Clone ID: MRT4577_34468C.1.pep
MTIGGYYQGTLPARLCSLPFGSRCEEGNYTXDPFLGARHILLAHALAVSLYRDSYHADQXDDGSDSPFLCGDTSLGRKLANXEGFALMNNSQIGWITHSTMFPDYPSLD

SEQ ID NO: 297580 - protein, 715 aa, Zea mays
  Clone ID: MRT4577_34469C.1.pep
MGCLAALSRFISRLGERGLPLYRLLRKAECFTWTPEAEEALGNLKALLTNAPILVPPAAGEALLIYVAATTQVVSATIVVERREEGHALPVQRPVYFISEVLSETKIRYPQIQKLLYTVILTRRKLRHYFESHPVTVVSSFPQGEIIQCREASGRIAKWVVEIMGETISFAPRKAIKSQVLVDFVAEWVDTQLPTALIQPELWTMFFDGSLMKTGAGAGLLFISPLGKHLRYVLRLHFPASNNVAEYEALVNGLRIAIELGVRRLDARGDSQLVIDQVMKNSHCRDPKMEAYCDEVRRLEDKFYELELKHIARRYNETADELAKIASGRTTPEAPSVRPEVPSAPEGEALRIEEGRSGVTPNRNWQTPYLQYLHRGELPLDRAEARRLARRAKSFVLLGDGKELYHRSPSGILQRCIPIAEGQELLQEIHSGACGHHATPRALVGNAFRQGFYWPTAVADATRIVRTCEGCQFYARQTHLPAQALQTIPITWPFAVWGLDLVGPLQKALGGYTHLLVSIDKFSKRIEVRPLNSIRSEQTVAFFTNIIHRFGVPNSIITDNGTQFTGRKFLDFCEDHHIRVDWAAVAHPMTNGQVERANDMILQGLKPRIYNDLNKFGKRWMKELPSVVWSLRTTPSRATGFTLFFLVYGAEAILPTDLEYGSPRMRAYVDQSNQVNREDSLDQLEEARDMALLHSARYQQSLRHYHARGVRSRDL

SEQ ID NO: 297581 - protein, 139 aa, Zea mays
  Clone ID: MRT4577_3446C.1.pep
HARGHTCSSSCWRLARSSGSTTKPRNRRSRPARSTQAIYSFSSSPPKKRRIPIQLCQHRFSLFPSRGIACALAVIFKPQLSAPYVEQIVAKLRGLHTDAQPIGFVYPLSVSLFSVAARIGPGLSVCSNDSKFSPHLSSL

SEQ ID NO: 297582 - protein, 87 aa, Zea mays
  unsure (1)..(87): unsure at all Xaa locations
  Clone ID: MRT4577_34470C.1.pep
NVNEXQHGVTXANQDIVTVLQSPSETRSKSHTTAETQSRCRWEIQPDQTTXGYGREMEHLQLCAAAAVYSVKRHFLSVGLEIFTGAT

SEQ ID NO: 297583 - protein, 51 aa, Zea mays
  Clone ID: MRT4577_34471C.1.pep
MRDSLNNGNDEMYLDSTACMNTVCSRTLSIYVVHTPSHAWHTATYVYACRD

SEQ ID NO: 297584 - protein, 118 aa, Zea mays
  unsure (1)..(118): unsure at all Xaa locations
  Clone ID: MRT4577_34472C.1.pep
ARARTRRKHNXRSTPTKRQPGQRERPSRGQQQQRAXKLQTKPERTPQRTTPSITAPVRIPSTTTAMVAPSKRGKXPATLSQDQPLPEEPATTGPRPDLRPGLRRARDGAWSDRCCPGV

SEQ ID NO: 297585 - protein, 51 aa, Zea mays
  Clone ID: MRT4577_34473C.1.pep
VYPSGGINGCLKNKNRFTVWPPLVVLKKKTIIKKKKKIDKKKKKKKKKKKT

SEQ ID NO: 297586 - protein, 1032 aa, Zea mays
  Clone ID: MRT4577_34474C.1.pep
MGSLQQPLRPGTVLRFESLEFMSFDGSYDMILLPPPRDNDNGGRQPARRRRNRRHLPRVVEEQHSSSLRPLPRQRRRRWGNQGRAGGRASSAVERIDAPDAPTEGTPGVDLAFETKAGAVPPRHADPEQEDDASALAESLQDVALVPETTVQPVPDVTTSPLVDQKVLTNSHLTSFRLGLNPPGNLALAGALIEASATPLGFCMRSPWDRLTDVSTYGPSGFEEDDDPSICWDFSGFGNPSAMRDFMTACDYCLSDCSDSSRSLDDEDCGPSRECFHVELGDPSEGNHLGMPEDGDLPRPVPRADIPRELAVVPVPAGGHDPQLEQVRGAQARLDEGAGALEPIRRDVGQGQAVAASSGVGQNLTAAAMLLRVMPESSTTEGRRIQGELKNLLEGAAARRVESTASRRQGYPSEPHAATSRFMREASVYTGRTRNTAPAAPGHLGNEHHRRDRRAHLDDRVHRGYHPRRGGRYDSGEDRSPSPEPHGPQAFSRAIRRAPFPTRFRPPTTITKYSGETRPELWLADYRLACQLGGTDDDNLIIRNLPLFLSDTTRAWLEHLPPWQISNWDDLVQAFAGNFQGTYVRPANSWDLRSCRQQPRESLRDYIRRFSKQRTELPNITDSDVIDAFLAGTTCRDLVSKLGRKTPTRASELMDIATKFASGQEAVEAIFRKDKQPQGRPSEEAPEASTPRGAKKKGKKKSESKRDTADADLVVAAEYKNPRKPPGGANLFDKMLKEPCPYHQGPVKHTLEECVMLRRHFHRAGPPAEGGRARDDNKNEDHQAGEFPEVRDCFMIYGGHTANASARHRKQERREADHPDHVPSPGKFPLVVDPIIGDVRLTKVLMDGGSCLNIIYAETLRLLRVDLSSVRAGAAPFHGIIPGKRVQPLGRLDLPVCFGTPTNFRRETLTFEVVEFRGTYHAVLGRPCYAKFMAVPNYTYLKLKMPGPNGVITVGPTYKHAFECDVECVEYAEALAESEALIADIEDLSKEVPDVKRHAGNFEPAETVKAVPLSPGGDDSKQIRIGSGLDLK

SEQ ID NO: 297587 - protein, 73 aa, Zea mays
  Clone ID: MRT4577_34475C.1.pep
NSTTVLKSPSKTRILITHPQLEHRADADGRSSLTKPQRLCREMEHLQLSAAAAVYSVKRHFLSVGLEIFTGAT

SEQ ID NO: 297588 - protein, 1056 aa, Zea mays
  Clone ID: MRT4577_34476C.1.pep
MGSLQQPLRPGTVLRFGSLEFMSLDSSYDMILLPPPCDSDNGGRRPARRRRNRRRLPRVAEEQHSSSPRPLPRRRRRRWGNQGQAGGSASSAVERVDGASTPTGGAPGVDLAFETKTSAVSPRHANLEQTDDASTLAKGLLDVTLVPETTVQSVPDVTSSPPVDQEVPTDSHLMPLGFSLDPQSGFTLADALVEASPNPLGFRMRSPWDRLTDVSTYGPSGSEEDDVPDFCWDFSGLGNPSAMRDFMTACDYCLSDCSDSSRSLGNEDCGPSRECFHVDLGGPSEGNHLGMPEDGDLPRPVPRVDIPRELAVVPVQAGGHDPQLEQICGVQARLDEGAGALEPIRQDVGQEWAGQPPTGEMRHLPQGFQHRIADDVRMRPPPTSSGVGQNLAAAAMLLRAMPEPSTTEGRQIQGELKNLLEGTAVRRAESSASQRQGYPSEHHAATSRFMREASVHTGRTRNTAPVALGRLGNEHHHRDRRAHLDERVRRGYHPRRGGRYDSGEDRSPSPEPPGPQAFSRAIRWAPFPTQFRPPATITKYSGETRPELWLADYRLACQLGGTDDDNLIIRSLPLFLSDTARAWLEHLPPGQISNWDDLQPGESLRDYIRRFSKQRTELPNITDSDVIGAFLAGTTCRDLVSKLGRKTPTRASELMDIATKFASGQEAVEAIFRKDKQPQGRPPEDAPEASTQRGAKKKGKKKSQAKRDAADADLVAAAEYKNPRKPPGGANLFDKMLKESCPYHQGPVKHTLEECAMLWRHFHRAGPPAEGGRACDDDKKEDHQAGEFPEVRDCFMIYGGQAANASARHRKQERREVCSVKVAVPVYLDWSDKPITFDQADHPDHVPSPGKYPLVVDPVIGDVRLTKVLMDGGSSLNIIYAETLRLLRVDLSSVRAGAAPFHGIIPGKRVQPLGQLDLPVCFGTPSNFRRETLTFEVVGFRGTYHTVLGRPCYAKFMVVPNYTYLKLKMSGPNGVITVGPTYKHAFECDVECVEYAEALAESEALIADLESLSKEVPDVKRHAGNFEPVETVKYVPLDPSSDASKQVQIGSELDPK

SEQ ID NO: 297589 - protein, 128 aa, Zea mays
  unsure (1)..(128): unsure at all Xaa locations
  Clone ID: MRT4577_34477C.1.pep
KKKQEKKKQRKKRKYKKQKTKRKXKEKKKNKNKKKKKTKKRGKKKKKLKKKKWVKENQIKKKIKKESPIKKKKGEKKLKKTLYPKRNNNNPLKKRIFQESKNNKNLWTGVKKPQKCPPLKKKVLGPPP

SEQ ID NO: 297590 - protein, 1082 aa, Zea mays
  unsure (1)..(1082): unsure at all Xaa locations
  Clone ID: MRT4577_34478C.1.pep
MGSLQQPFQPGTVLRFGSLEFMSLDGSYDMILLPPPRDSDNGGRQPARRRRNRRRLPRVAEEQHSGLSCRLPRRRRKRRGNQGQAGGGTSLAVERVDSAGAPMGDTSGVDLASETKMSAVSPQHANSKQTDDASTLAKDLLGVTLVSETTVQSGPDATSSPPVDQEVPTDSHLVPFGFSLDPPSDFASVEALIEACPNPPGYGMRSPWDRLTAVSTYGPSGSEEDDEPNFCWDFSGLDNPSAMRDFMTACDYCLFDCSDGSRSFGDEDCGPSRECFHVDLGGPGEGNHLGIPENGDPPRPAPRVDILRELAVVPVPAGGQDAQLEQIREMQARLDEGAGTLEPFQRNIGREWADQAPTGEARHLPQGIQHRIADDVGARPPPASSGVGQNLAAAAILLRAMSEPSTTEGRRIQEELKNLLEDAAVRRAESSASRRQGYPSEHRAATSRFMREASVHTGRTRNTAPAAPGRLGNEHHHRNRRTHLDERVRRGYHPRCGGRYDSGEDRSPSPEPPGPQAFSRAIRRAPFPTRFRTPTTITKYSGETRPELWLADYRLACQLGGTDDDNLIIRNLPLFLSNTTRAWLEHLPPGQISNWDDLVQAFAGNFQGTYVRPGNSWDLRSCRQQPGESLQDYIRRFSKQRTKLPNVTDSDVIGAFLVGTTCRDLVSKLGRKTPTRASELMDIATKFASGQEAVEAIFRKDKQPQGRQPEDVPEASAQRGTKKKGKKKSQAKRDAADADLVAAAEYKNPRKPPGGANLFDKMLKEPCPYHQGPVKHTLEECAMLRRHFHKVGPPAEGGRAHNNDKKEDHKAGEFPEVHDYFMIYGGQVANASARHRKQEHREVCSVKVAAPVYLDWSDKPITFDQGDHPDXVPSPGKYPLIVDPVIGNVRLTKVLMDGGSSLNIIYAKTLGLLRIDLSSVWAGAAPFHGNVPGKRVQPLGQLDLPVCFGTPSNFRRETVTFEVVGFRGTYHAVLGRPCYAKFMAVPNYTYLKLKMSGPNGVITVGPTYRHAYECDVECVEYAKALAKSEALVADLESLSKEAPDVKRLAGNFEPAEMVKSVPLDPSNDASKQIRIGSELDPK

SEQ ID NO: 297591 - protein, 992 aa, Zea mays
  unsure (1)..(992): unsure at all Xaa locations
  Clone ID: MRT4577_34479C.1.pep
MGSLQQPFRPGTVLRFGNLEFMSLDGSCDMILLPPPRDSDNGGRQPTRRRGNRRRLPHMVEGRHSGLSRPLPRRPRRRRGNQGQAGSGTSLAVKRVDSAGVPTEGASGIDLASETKTSTASPQHANLKQMHDASTLAKDLLGITLVPETTVQSVPDATSSPTVDRKVPTDSHLASFGFGLDPPSDYASVSTLIVASPNPLGYRVWSPWDRLTADSTYEPSGSEEDGEPDLCWDFSGLGNPSAVRDFMTACDYCLSDCSDGSRGLDNEDCGPSRECFHVDLGGPGEGNHLGMPENGDPPRPVPRVDILRELAVVPILAGGPDPQLEQIRERQTRLDEGAGTLVPIRRDIGQEWAVQPLAGEARHLPQDIQHRIADDVRVRPPPDSSGVGQNLAATAILLRAMLEPSTTKGRRIQGELKNLLENAAVRRAESSASRRQGFPSEHRAATSRFMREASVHSGRTRNTAPAVSGRLGNERHHHSRRAHLDDRARRGYHPRRGGRYDSGEDRSPSPEPPGPKVFSRAIRRAPFPTWFRTPTTITKYSGEARPELWLADYRLAFQLGGTDDDNLIIRNLPLFLSDTARAWLEHLPPGQISNWDDLVQAFAGNFQGTYRTELPNVTDSDVIGAFLAGTTCRDLVSKLGRKTPTRASELMDISTKFASGQEAVEAIFRKDKQPQGRPPEDAPEASTQCGAKKKGKKKSQAKRDAADADLVAATEYKNPRKPPGGANLFDKMLKESCPYHQGPVKHTLEECAMLRRHFHRXPPAEGGKALDDAKEEDHXDYVPSLGRYPLVVDPIIGNVRLTKVLMDGGSGLNIIYAKTLGLLRIDLSSVRTGAAPFHGIVPGKRVQPLGQLDLPVCFGTPSNFQKETLTFEVVGFRGTYHAVLGRSCYAKFMAVPNYTYLKLKMPGPNGVITVRPTYRHAYECDVECVEYAEALAESEALIADLESLSREAPDVKRHAGNFEPAETVKSVPLDPCNDASKQIRIGSKLDPK

SEQ ID NO: 297592 - protein, 76 aa, Zea mays
  Clone ID: MRT4577_3447C.1.pep
PSRGMAWALAVIFKPQLFAPYVDQIVAKLRGLHTDAQPIGFVYPLSVSLFSVAARIGPGLSVCSNDSKFSPHLSSL

SEQ ID NO: 297593 - protein, 44 aa, Zea mays
  Clone ID: MRT4577_34480C.1.pep
YFFFFFFSYFSFLSIMDTIKTTYPTTPTNNTINSSNNPFYPLPS

SEQ ID NO: 297594 - protein, 806 aa, Zea mays
  Clone ID: MRT4577_34481C.1.pep
MSLDGSYDMILLPPPCDSDNGGRQPARRRRNRRRLPRAVEEQHSSSPRPLPRRRRRRRSNQGQAGGSASSAVEQVDGASAPTGGASGIDLAFETKTSAVSPQHADSEQTDDASTLAKGLLDVTLVHETTVQSVPDVTSSPPVDQEVPTDSHLMPLGFSLDPPSGFALADALVEASPNPLGYRTRSPWDLLTDVSTYGPSRSEEDDEPDSCWDFSGLGDPSAMRDFMTACDYCLSDYSDASVHTGRTRNTAPAAPGRLGNEHHHRDRRAHLDEWVRRGYHPRRGGRYDSGEDRSPSPEPPGPQAFSRAIRRAPFLTRFRPPTTITKYSGETRPELWLADYRLACQLGGTDDDNLIIRNLPLFLSDTARACCRQQPGESLRDYIRRFSKQRTELPNITDSDVIGAFLAGTTCRDLVSKLGRKTPTRASELMDIATKFAFGQEAVEAIFRKDKQPQGRPPEDAPEASTQRGAKKKGKKKSQAKRDAADADLVAAAEYKNPRKPPGGANLFDKMLKEPAGPPAEGGKARDDDKKEDHQAGEFPEVCDCFMIYGGQAANASARHRKQERREVCSVKVAAPVCLDWSDKPITFDQADHPDHVPSSGKYPLVVDPVVGDVRLTKVLMDGGSSLNIIYAETLRLLRVGLSSVRAGAEPFHGIIPGKRVQPLGQLDLPVCFGTPSNFRRETLTFEVVGFRGTYHAVLGRPCYAKFMAIPNYTYLKLKMSGPNGVITVGPTYKHAFECDVECVEYAEALAESEALIADLESLSKEVPDVKCHAGNFKPAEMVKSVPLDPSSDASKQVRIGSELDPK

SEQ ID NO: 297595 - protein, 580 aa, Zea mays
  unsure (1)..(580): unsure at all Xaa locations
  Clone ID: MRT4577_34482C.1.pep
AESSASQRRGCPSEHHATSSRRMREASVHTERTRDGTPAAPDRLGSEQHHREHRARLEERVRRGYHPRRGGRYDXLGGTDDNNLIIRNLPLFLSDAARAWLEHLPPTQISDWEDLVKAFARNFQGMYVRPGNSWDLRSCRKQPGESLREYIRRFSKQRTELPNITDSDVIGAFLAGTTCRDLVSKLGRKTPTKASELMDISTKFASGQEAVEAIFRKDKQPKGRQKEDAPEASVQRGTKKKTRKKAQAKRDAVDADLIAADEHRNPRKPPGGANMFDKMLKESCPYLRGPIKHTLEECDMLRRYFNKAGPSAEGGKDQGNNKKGGDKEEEFPEVHNRFMIYSGKVANASAQHRKQERQEVYSVKVATPVYLDWSDKPITFDQGDHPDCVPSLGRYPLVVDPVIGNARLTKVLMDGGISLNIIYTETLGFLGVDLSMIRAGAAPFHGIVPGKRVLPLGQLDLPVCFRTPSNFRNETLTFEVVGFRGTYHALKLKMSGPRGTITVGSTYRHAYECDVECVEYAEALAESEALIADLDCLSKEVPPKRHADNFEPAEAVKSVPLDPSNNAGKKVKIGSKLDPK

SEQ ID NO: 297596 - protein, 745 aa, Zea mays
  Clone ID: MRT4577_34483C.1.pep
MGGLQQPLRPGTVLRFGSLEFMSFDGSYDMILLPPPCDNDNGGRQPAHRRRNRRHLPRVVEEQHSSSLRPLPRQRRRRRGNQGQAGGRASSAVERIDAPDAQTEGTPGVDLAFETKASAVPPRHADLEQEDDASALAESLQDVALVPEMMAQPVPDVTTSLRVDQKVLTNPHLTSFRLGLNPPSNLALAGALIEASATPLGFRMRSPWDRLTDVSTYGPSGSEEDDDSSICWDFSGLGNPGAMRDFMTACNYCLSDCSDGSRSLNDEGCGPSRECFHIELGDPSEGNHLGMPEDGDLPRPVPRADIPRELAVVPVPAGGHDPQLEQVRGAQARLNEGTGALEPIRRDVGQVWAGQPPAGEIRHLPQGLQHCVANDVRVRPLPASSGVGQNLAAAAMLLRAMPEPSTTEGRRIQGELKNLLEGAAARRAESTASRRQGYPSEPYAATSRFMREASVYTGRTRNTAPAAPGHLGNEHHRRDRRAHLDERAFSRAIRRAPFPTRFRPPTTITKYSGETRPELWLADYRLACQLGGTDDDNLIIRNLPLFLSDTARAWLEHLPPGQISSWDDLVQASAGNFQGTYVRPGNSWDLRSCRQQPGESLRDYIRRFSKQRTELPNITDSDVIGAFLAGTTCRDLVSKLGRKTPTRASELMDIATKFASGQEAVEAIFRKDKQPQGRPSEEAPEASTPRGAKKKGKKKSQSKRDAADADLVFRQDAQGAVPKPSGARLFDKMLKEPCPNHQGLV

SEQ ID NO: 297597 - protein, 87 aa, Zea mays
  Clone ID: MRT4577_34484C.1.pep
DVCLNLANETTPKSNWSTGLRLTAPTNYTFAASRCSERPNGHIEHHVSPIQVGAVHARAGFNQTPLNKLQSRGRTADHHGVAILGGH

SEQ ID NO: 297598 - protein, 123 aa, Zea mays
  Clone ID: MRT4577_34485C.1.pep
LHHPAELRPHRADGSPTQPGASPLAGGSPTLAGAPLSRRRIPHPARSSVRATDGFTNEAATTLPAPGSPPPAHPASSGPHGQDLGTPPTLPAPHPPMLDGRRIRPHAIMHCFDLSMQRLILMH

SEQ ID NO: 297599 - protein, 85 aa, Zea mays
  Clone ID: MRT4577_34486C.1.pep
FCEMYVQQDQAQPVIRFSCFLVLFVLTRQIVSDHEVSVPFSQIFWSTFDTCVQTVCIISPGYLFALDALYFCIYDWAHWKEELNS

SEQ ID NO: 297600 - protein, 108 aa, Zea mays
  unsure (1)..(108): unsure at all Xaa locations
  Clone ID: MRT4577_34487C.1.pep
SHPLSCLDIFHPPFSPSSYSSFLNGPLPFPSLCIPPLPPLSLLSRPLILFPCLLNIFSLPSSPFIFFRQLFSFFFPPFVFSLSSSSXXXSFIFICLSIYFHIFVIFII

SEQ ID NO: 297601 - protein, 93 aa, Zea mays
  Clone ID: MRT4577_34488C.1.pep
RLRHHLFSKSVNLTHTDFVTKSDRENDRVAYLTQLPHSNHCNITKCRRLGNTPASVNNSAKHRKIGCLDYLEHAAYSYTSLYSNFTTIYHQQG

SEQ ID NO: 297602 - protein, 55 aa, Zea mays
  Clone ID: MRT4577_34489C.1.pep
SIAKNSIFKPVLAPDMESLWGFSASLGALGGDATRGLFDHHLGAQVKFWLNALFC

SEQ ID NO: 297603 - protein, 361 aa, Zea mays
  Clone ID: MRT4577_3448C.1.pep
MHNRIEEMYHHQQQLQSHSHFLSSRQTFPPERHMLLQGGSIPAEPGLVLSTDAKPRLKWTPELHERFVEAVNQLGGPDKATPKTIMRLMGVPGLTLYHLKSHLQKYRLSKNIHAQANGVNAKNVIGCTMAMDKPLEGNGSPASHLNLGTQTNKSVHIGEALQMQIEVQRRLHEQLEVQRHLQLRIEAQGKYLQSVLEKAQETLSKQNAGSVGVETAKMQLSELVSKVSTECLQHAFTGFEEIDGSQILQGHTIQLGDGSVDSCLTACDGSQKDQDILSISLSAHRGKEIGGMTFDIQEKERGREDLFLDKLSMTPPGQLDRRERGSFSMTRKAAKLDLNINDTTDGPQNCKKIDLNGFNWT

SEQ ID NO: 297604 - protein, 81 aa, Zea mays
  Clone ID: MRT4577_34490C.1.pep
NEARESGHGCIIAGETIIDLSGSNVAAKRLHVLTTSLFCRNVGGCSLPMKRPRKASAPWIRSAAPAAVSRARRAREQKCSG

SEQ ID NO: 297605 - protein, 563 aa, Zea mays
  Clone ID: MRT4577_34491C.1.pep
RRRPTPSSSAGAQLPPPVPLPTRRPRSSSGSSLRRSILSSAPSSILHQIQKDAPHEMEVEVAKYSRGQGADLKALGDKKLKGQLSVKEKLYGQSAKAAANAEKWLMPNDGGILEPGHLEKTYRFSQEDILTEVDLLRCCRPFDMILPVLGPYNIGYTSNGRYMLVGGRKGHLAMMDMLHMDLIKEFEVRETVRDVTFLHNEQLYAVAQKKYPYIYNRHGTEIHCLKEHGKALKLQFLSKQFLLASINSFGQLHYQDVSTGEMVANYRTGLGRTDVMRGNPYNAVIGLGHAGGKVTMWKPTSVKPLVTMLCHHGPVTAVAFDRGGNLMATAGVDRKIKIWDLRKYEVVRSYPMRAQSLDFSQKGLLACSNGSQVEIYRDFGGHDYRLYMKHKIVKGYQVGKVVFRPYEDILGIGHSMGFSSILVPGSGEPNFDTFVDNPMETTKQKREKEVHALLDKLPPETIMLNPNTIATVRAPKKKEKKTKEEIEEEMADAVEAAKNTERKKKTKGRSKPSKRAKKKEEDVFKAKRPFLEQSDKVDGRPDKKQRIGELPKALQRFAKKPQS

SEQ ID NO: 297606 - protein, 87 aa, Zea mays
  Clone ID: MRT4577_34492C.1.pep
SLAAICEQLFWRGQGMLASIQFIVRFFLQPLLSFFCSGGSLVPYSPSVSCKYAICICTSPPHRSKVTRGRNTESNIESNFQGWFIFP

SEQ ID NO: 297607 - protein, 253 aa, Zea mays
  unsure (1)..(253): unsure at all Xaa locations
  Clone ID: MRT4577_34493C.1.pep
RRRPTPSSSAGAQIPPPVPSPTLRPRPSSGSSLHWSILSSAPSSILHQIQTVKHPVPVQVQTQDAPHELEMEVEVAKYSRGQGADLKALGDKKLKGQLSVKEKLYGQSAKAAANAEKWLMPNDGGILEPGHLEKTYRFSQEDILTEVDLLSSRKPFDMILPVLGPYNIGYTSNGRYMLVGGRKGHLAMMDMLHMDLIKEFEVRETVRDVTFLHNEQLYAVAQKKYPYIYNRHGTEIHCLKGHGKSXLKLQFLS

SEQ ID NO: 297608 - protein, 89 aa, Zea mays
  Clone ID: MRT4577_34494C.1.pep
EAMSREQQMPRRRFIAIPFSSGCRSHSSNDCGPPASQLAPDRARGGGGTRLRALVMGWAGLVRQPGVTGRRRRPFLPPHARLGSHPMWR

SEQ ID NO: 297609 - protein, 267 aa, Zea mays
  unsure (1)..(267): unsure at all Xaa locations
  Clone ID: MRT4577_34495C.1.pep
DLPGGGGGGKYGFSLRRGVAMDPARDVILAYMQNGEPLAPDHGFPVRVIVPGFIGGRMVKWLKRIIVASSECESXYYHYRXXRVLPSHVDADLANAEAWWYKPECVINELNINSVITTPGHDEVLPINALTTQRPYTIKGYAYSGGGRKVTRVEVTLDGGETWHVCSLDHPERPTKYGKYWCWCFWSVDVEVLDVLGAKEIAVRAWDEAMNTQPEKLVWNLMGMMNNCWFRXKINACRXHKGEIGMVFEHPGQPGNQPGGXWMARQK

SEQ ID NO: 297610 - protein, 133 aa, Zea mays
  Clone ID: MRT4577_34496C.1.pep
SLDPLRETTVPGRTGKNTCYSILSPSILALHIYGRNLTGARSEKCWMWAGLSHRKIQYHCPRTQAPCTTTRAMDALQFSRARPEPVNAPSVHMITSLQQKEVGVSDEAQVLPWRPHRRYIRPSAMVYLTLLSV

SEQ ID NO: 297611 - protein, 48 aa, Zea mays
  Clone ID: MRT4577_34497C.1.pep
YIGYPIFPFLAPQLDIYLSTMLGCGPSAVRMWDFSPCKGRINARSLLS

SEQ ID NO: 297612 - protein, 33 aa, Zea mays
  Clone ID: MRT4577_34498C.1.pep
REGLTAIYCGCNKPNTLTNVPLILIHGPPTLFI

SEQ ID NO: 297613 - protein, 56 aa, Zea mays
  Clone ID: MRT4577_34499C.1.pep
EGPIRGEVLKKRPVFSPTTMMVMSDKKIVQWDMKPGPITPSFSYYFKACEHHNFCG

SEQ ID NO: 297614 - protein, 197 aa, Zea mays
  Clone ID: MRT4577_3449C.1.pep
CDTLHINDAFQQVQRHLQLRIEAQGKYLQSVLEKAQETLSKQNAGSVGVETAKMQLSELVSKVSTECLQHAFTGFEEIDGSQILQGHTIQLGDGSVDSCLTACDGSQKDQDILSISLSAHRGKEIGGMTFDIQEKERGREDLFLDKLSMTPPGQLDRRERGSFSMTRKAAKLDLNINDTTDGPQNCKKIDLNGFNWT

SEQ ID NO: 297615 - protein, 62 aa, Zea mays
  Clone ID: MRT4577_344C.1.pep
DALNVLQGVRLLACRGHYTIDLAVGVGAGILFDMLSGWYFHAKNAPEKHCRSCQCHKALLSR

SEQ ID NO: 297616 - protein, 81 aa, Zea mays
  Clone ID: MRT4577_34500C.1.pep
WKIRGPEKNLDKCLDRGHTIPQNYILFKNRRGESQLKRFSLGDAPPSRNRGGALKTGGIALERCFLLALTEGVKRGCLRLP

SEQ ID NO: 297617 - protein, 74 aa, Zea mays
  unsure (1)..(74): unsure at all Xaa locations
  Clone ID: MRT4577_34501C.1.pep
VXLXXLVXPXXCPXVXCLPGRXXGXAXGVAVXGGPXXGXAXAKRXXRRRHLRASLSXXPLSRXAAXGLFGLLXE

SEQ ID NO: 297618 - protein, 1043 aa, Zea mays
  Clone ID: MRT4577_34502C.1.pep
MGSLQQPLQPGTVLRFGSLEFMSLDGSYDMILLPPPDDSDNGGRQPARRRRNRRRLPRVVEEQLSSSPRPLPRQRRRRRGNQGQAGGSASSTVERVDSPSAPTGGASGIDLAFETKTSTVSPRHAYSEQTDDAGTLAKGLQDVTLVPEMTAQSVPDVTSSPPVDREVPTDSHLTSFGFSLDPPSGFALAGALVEASPNPLGFRMRSPWDRLTDVSTYGPSGSEEDDEPSFCWDFSGLGNPSAMWDFITACDYCLSDCSDCSRSLGDEGCSPSRECFHVDLGGPSKGNHLGMPEDGGGHGPQLEQIRGVQARLDEGAGALEPIRRDVGQAWAGQPPAGEIRHLPQGFQHRIADDVRVRPPPASSGVGQNLAAAAMLLRAMPEPSTTEGRRIQGELKNLLEGVAVRRAESSASRRQGYPSEPRAATSRFMREASVYTGRTRNIAPAAPGRLGNEHHHRDRRACLDERVRRGYHPMRGGRYDSGEDRSPSPEPPGPQAFSRAIRRAPFPTRFRPPTTITKYSRETRPELWLANYRLACQLGGTDDDNLIIRNLPLFLSDTARAWLEHLPPGQISNWDDLVQAFAGNFQGTYVRPENSWDLRSCRQQPGESLRDYIRRFSKQRTELPNITDSDVIGAFLAGTTCRDLVSKLGRKTPTRASELMDIATKFASGQEAIEAIFRKDKQPQGRPSEDDPEASTQRGAKKKGKKKSQAKRDAADADLVAATEYKNPRKPPEGPVKHTLEECVMLRRHFHRVEPPAEGGRARDDDKKEDPQAGEFPEVRDCFMIYGGQAANASAFHRKQERREVCSVKVAAPVYLDWSDKPITFDQDDHPDHVPSPRKYPLVVDPIIGDVRLTKVLMDGGSSLNIIYAETLVLLRVDLSLVRAGAAPFHGIIPGKRVQPLGRLDLPVCFGTPSNFRKETLTFEVAGFRGTYHAVLGRPCYAKFMAVPNYTYLKLKMSGPNGVITVGPTYKHAFECDVECVEYAEALAESEALIADLESLSKEVPDVKRRAGNFELAETVKAVPLDPSNDASKQIRIGSELDPK

SEQ ID NO: 297619 - protein, 584 aa, Zea mays
  Clone ID: MRT4577_34503C.1.pep
MQARLDEGAGTLEPFRRDIGQEWVGQPPAGEVRHLPQGIQHRIADDVRAFSRAIRRALFPTRFRTSTTITKYSGETRPELWLADYRLACHLGGTDDDNLIIRNLPLFLSDTALAWLEHLPPGQISNWDDLVQAFAGNFQGTYRTELPNVTDSDVIGAFLAGTTCRDLVSKLGRKTPTRASELMDIATKFASGQEAVEAIFRKDKQPQGRQPEDVPEASTQRGTKKKGKKKSQAKRDAADADLVAAAEYKNPRKPPRGANLFDKMLKEPCPYHQGPVKHTLEECAMLRRHFHKVGPPAEGGRARDDDKKEDHKVVEFPEVHDCFMIYGGQVANASARHRKQERREVCSVKVAAPVYLDWSDKAITFDQGDHPDRMPSLGKYPLVVDPVIGNVRLTKVLMNGGSSLNIIYAETLGLLRIGLSSVRAGAAPFHGIIPGKRVQPLRQLDLPVCFGTPSNFQRETLTFEVVGFRGTYHAVLGRPCYAKFMAVPNYTYLKLKMSGPNGVITVCPTYRHVYECDVECVEYAEAFAESEALIADLESLSKEAPDVKRHAGNFEPAGTVKPVPLDPSNDASKQIRIGSELDPK

SEQ ID NO: 297620 - protein, 87 aa, Zea mays
  unsure (1)..(87): unsure at all Xaa locations
  Clone ID: MRT4577_34504C.1.pep
HNPGHAESMYGSVILSTIGLDVLIWLTQQLVDVLIWLTQQLVLFNGATRTVEIDVLVCHNQCFLRAXDLASRSAPSTELGLGRTRQV

SEQ ID NO: 297621 - protein, 45 aa, Zea mays
  Clone ID: MRT4577_34505C.1.pep
FPSNKLLEKFNFKAELLLNFGKSFGTYSVPEPISFIKQFKFGFLK

SEQ ID NO: 297622 - protein, 1067 aa, Zea mays
  unsure (1)..(1067): unsure at all Xaa locations
  Clone ID: MRT4577_34506C.1.pep
MGCLQQPLRPRTVLRFGSLEFMSLDGGYNMILLPPPRDDDNGGRQPTRRRRNRRRLPRVVEERPSSSSCPFPRRRRGRQGDQGQAGGSASLAVERADSTGTPTRGAPGIDFAPESKTSAVSPRHAHPEQADDASALAESLLDVTLAPETTVQSVPDVTSSPLVDQKVPTDSHPTSFGFSLNPPSDLALADALVEASPNPLGFRMRSPWDRLTDVSTYGPSGSEEDDGPSICWDFSGLGNPSAMRDFMTACDYCLSDCSDGSRSLGDEDCGPSHECFHVNLGGPSEGNHLGMPXDGDLPRPVPRVDIPRELAVVPVQAGGHDPQLEQIRGAQARFDEGAGALEPIRRDVGQAWVGQPPAGEIHHLPQGFQHRVADDARVRPPPASSGVGQNLAAAAMLLRAMLEPSTTEGRRIQGELKNLLEGVAVRRAESSASRRQGYPSKPHAVTSRFMREASVCTGRTRNTAPAAPGRLGNEHHHHDRRAHLDERVRRGYHPRRGGRYDSGEDRSPSPEPPGPQAFSRAIRRAPFPTRFRPPTTITKYSGETRPELWLADYRLACQLGGTDDDNLIIRNLPLFLSDTARAWLEHLPPGQISNWDDLVQAFAGNFQGTYPGESLRDYIRRFSKQRTELPNITDSDVIGAFLAGTTCRDLVSKLGRKTPTRASELMDIATKFASDQEAVEAIFRKDKQPQGRPPEDAPEASTQRGAKKKGKKKLQAKRDAADADLVAAAEYKNPRKPPEGANLFDKMLKEPCPYHQGPVKHTLEECVMLRRHFHRAGPPAEGGRARDDDKKEDHQAGEFPEVRDCFMIYGGQAANALARHHKQERREVCSMKVAAPVYLDWSDKPITFDQADHPDHVPSPGKYPLVVDPVIGDVRLTKVLMDGGSSLNIIYVETLGLLRVDLSSVRAGAAPFHGIIPRKRVQPLRRLDLPVCFGTPSNFRRETLTFEVVGFRGTYHAVLGRPCYAKFMVVPNYTYLKLKMPGPNGVITVGPTYKHAFECDVECVEYAEALAESEALISDLESLSKEAPDVKRHAGNXEPVETVKAVPLDPSSDTSKQIRIGSGLDPK

SEQ ID NO: 297623 - protein, 494 aa, Zea mays
  Clone ID: MRT4577_34507C.1.pep
MVERRYTEEEEALEIKSLRRIIAAYANYQDAAERDVERYERSFKMLPTAHKKLLFHLGLKYQSLRWCISMNASFIMKMLEAFEPPFDMSQYIDADVHAHPSILHDHSHMDCTHSSERGDCSIIAISRSNLSLDEQHDSPKEYTKRHEPSRETDNNKGGEDHMAGCSQPVGNMGMSQGAGIACNGDKNTGAAAYFQDKDVSASSAIENVALRHCTASSLKLNVPPIDVDKVRCIVRNIVRDWGDEGQKERDECYKPILEELNRLFPNRSDQRPPSCLVPGAGLGRLALDISSLGFVSQGNEFSYYMLICSNFILNHTQEANEWSIYPWIHSNCNSLSDNDQLRPVSFPDIHPSSAGITEGFSMCAGDFVEVYSEESQESAWDAVVTCFFLDTAHNIVEYIEIISKVLKDGGVWINLGPLLYHFADSYGPDDDMSIELSLEDVKKVAYHYGFTMEVEKMIETTYTANMKAMMQNRYRAAFWTMRKDASRSKACKPR

SEQ ID NO: 297624 - protein, 1295 aa, Zea mays
  unsure (1)..(1295): unsure at all Xaa locations
  Clone ID: MRT4577_34508C.1.pep
MSGVVLAPETTTGVASQQRANPKRTDDTGTLARDLSDISLAPKIMTHSIPDATSPPSINQEVPSVFHPVPFRFSFDPPGDPTSVSAFARAYPDLPGYHMWSTWDRLTVVSTSGPAGSEEEDDPDFSWDFSRLCDPSAMRDFMSACDHCLSGYSDDGHSLDDEGYDPSRECFHIDQEDHDEDNHLGMPGNDDAHVPASRVEIPRELAMLRQNIEQEWAGRALAGGARHRARDVQRNIIDDARAGLPPAFSGASHNLAVAAMLLRTMPEPSITEGRRIQGELKDLLENAAVRRAESSASRRRGGPSEHHAASSRRMCEASVHTEDTGDWTPAARDRLVDEQHRCVRRARLEEKDDLVKAFAGNFQGTYVHPGNSWDLRSYRQQPGESLREYIQRFSKQCTGLPNITDSYVIGAFLTSTRCRDLVSKVGHKTPTKASELMDIATKFASGQEAVEAIFRKDKQPQGRQKEDAPEASVQRGTKKKTRKKAQAKRDAVDADLVADAEHRNPRKPPEGANMFDKMLKELCLYHRSPIKHTLEECDMLQRYFNKEGPSAEGGRDQGNNKKXGDKEEEFPEETLTFEVVGLRGTXVLGRPCYAKFMVVPNYTYLKLKMPNPRGTITIGSTYRHAYECDVECVEYVEAIAESEALIADLDCLSKEAPDAKRHAGNFEPAEAVKSVSLNPSNDASKKGHSEEVHKLMAAEFIKEVFHPEWLANPVLVKKKGATYQRCMNHVFGQHIGRTDEAYVDDIVVKTRKASDLLSNLEITFRCLRAKGVKLNPEKCVFEDPRGMLLGFIVSERGIEANLEKIAAITNMGPIKDLKGVQRVMGCLAALSCFISLLGEKGLLLYRLVRKAEHFTWTPEVEEALGNLKALLTNAPILVPPXAAGEALLIYVAATTQVVSAAIVVERREEGHALLIQRPVYFISEVLSETKIRYPQIQKLLYAVILIRRKLRHYFESHPMTVVSSFPXGEIIQCQEASGRIAKWVVELMGETLSFAPRKAIKSQVLADFLAEWVDTQLPTAPIQAELWTMCFDGSLMKSEAGAGLLFISPLGKHVRYVIRLHFPASNNVAEYEALVNGLRIAVELGVRRLDARGDSQLVIDQVMKNSHCRDRKMEAYCDEVRRLEDKFYGLELNHVARRYNETADELAKIASGRMTVPPNVFSRDIYQPSVKLDDAPEPEETSAQTEVPSAAEGEALRVEREQNGVTPNLNLQTPYLEYLLREELPLDKVEARRLARCAKSFVLLGDEKELYHCSPSGILQRCISVAQGQQLLQEILSGACGHHAALRAPRGGVNR

SEQ ID NO: 297625 - protein, 899 aa, Zea mays
  Clone ID: MRT4577_34509C.1.pep
MPFGLRNAGATYQRCMNHVFGEHIGRTVEAYVDDIVVKTRKASDLLSDLEVTFRCLKAKGVKLNPEKCVFGVPRGMLLGFIVSERGIEANPEKIAAITSMGPIKDLKGVQRVMGCLAALSRFISRLGERGREALGNLKALLTKAPVLVPPADGEALLVYVAATTQVVSAAIVVERQEEGHALPVQRPVYFVSEVLSETKIRYPQVQKLLYAVILTRRKLRHYFESHPVTVVSSFPLGEIIQCREASGRIAKWAVEIMGETISFAPRKAIKSQVLADFVAEWVDTQLPTAPIQPELWTMFFDGSLMKTGAGVGLLFISPLGKHLRYVLRLHFPASNNVAEYEALVNGLQIAIELGVRRLDARGDSQLVIDQVMKNSHCRDPKMEAYCDEVRRLEDKFFGLELNHIARRYNETADELAKIASGRTTVPPDVFSRDLHQPSVKIGDAPEPEVPSAQPEAPSAQPEVPSAPEGEALDAEEEQSGATPDQDWQAPYLQYLRRGELPLDQVEARRVARRAKSFVLLGDEEELYHRSPSGIVQRCTSIAEGRELLQEIHSGACGHHTAPRALVGNAFRQGFYWPTAVADATRIVRTCEGCQFYAKRTHLPAQALQTIPITWPFAVWGLDLVGPLQKAPGGYTHLLVTIDKFSKWIEVRPLNGIRSEQAVAFFTNIIHRFGVPNSIITENGTQFTGKKFLDFCEDHHIRVDWAAVAHPMSNGQVERANGMILQGLKPRIYNDLNKFGKRWMKELPSVVWSLRTTPSRATGFTPFFLVYGAEAILPTDLEYGSPRTRAYTDQSNQASREESLDQLEEAWDRALLHSVRYQQSLRRYHARGVRSRELQVGDLVLRLRQDARGRHKLTPPWEGPFVIAKVLKPGTYKLANNQGEIYGNAWNIKQLRRFYP

SEQ ID NO: 297626 - protein, 58 aa, Zea mays
  Clone ID: MRT4577_3450C.1.pep
YPPHAHIRTTRGEALLNTCDRALPTQYIRRKPSLHHASTPYKGEPRGGPPPAAEGQGG

SEQ ID NO: 297627 - protein, 802 aa, Zea mays
  Clone ID: MRT4577_34510C.1.pep
MRDFMTACDYCLSDCSDGSRSLDDEDCGPSRECFHVDLGGPSEGNHLGMPENGDLPRPVPRVDILRELAVVPVLAGGHDPQLEQIRGVQARLDEGAGTLEPIRRDIGQEWAGQPPTGEVRHLPQGIQHRIADDVRVRPPPTSSGVGQNLAAAAMLLRAMPEPSTTEGRRIQGELKNLPEDAAVRRAESSASRRQGYPSEHRAATSRFMREASVHTGRTHNTAPVAPGRLGNEHHHRNRRPHLDERVRRGYHPRRGGRYDSGEDRSPSSEPPGQQAFSRAIRRASFPTRFRTPTTITKYSRETRPELWLADYRLACQLGGTDDDNLIIRNLPLFLSDTARAWLEHLPPGQISNWDDLVQAFAGNFQGTYVRPRNSWDLRSCRQQLGESLRDYIRRFSKQRTELPNITDSDVIGAFLAGTTCRDLVSKLGCKTPTRASELMDIATKFASGQEAVEALFRKDKQPQGRPPEDVPEASTQRCAKKKGKKKSQAKRDVADADLVAAAKYKNPRKPPGGANLFDKMLKESCPYQQGAIKHTLEECAMLRRHFHKVRPPAEGGRARDDDKKEDHQAGKFPEVRDCFMIYGGQAANASARHRKQERREVCSVKVAAPVYLDWSDKPITFDQADHPDRVPSPGKYPLVVDPVIGDVRLTKVLMDGGSSLNIIYAETLGLLRVDLSSTLTFEVVGFRGTYLAVLGRPCYAKFMVVPNYTYLKLKMLGPNGVITVGPTYRHAFECDVECVEYAEALAESEALITDLENLSKEVPDVKRHAGNFEPAETVKSVPLDPSSDASKQIRIGSELDPK

SEQ ID NO: 297628 - protein, 881 aa, Zea mays
  Clone ID: MRT4577_34511C.1.pep
MGSLQQPFQPGTVLRFGSLEFMSLDSSYDMILLPPPRDSDNGGRQSARRRRNRRHLPHVAEERHSSLSRPLPRRRRRRRGNQGQAGGGTSSAIELVDGAGAPTGGTSGIDLASETKTSAVSPQHANSKQMDDASTLAKDLLGITLVPKTTVQSAPDTTSSPPVDQEVPTDSHLVHFGFSLDPPSDFASVDALIEASPNPLGYCMRSPWDRLTTVSTYGPSGFEEDDEPDFCWDFSELGNPSAMRDFMTACDYCLSDCFDGSRSLGDEDCGPSRECFHVDLGGPGEGNHLGTPENGDPPRPAPRVDILRELAVVPVPAGGHDPQLEQIHEMQARLDEGAETLEPFRRDIGQEWAGQPPAGEARHLPQGIQHRIADDVRARPPPASSGVGQNLAAATILLRAMPEPSTTEGRRIQGELKNLLEDAAVRRAESSASQRQGYPSEHCAATSRFMREASVHTGRTRNTAPAAPGRLGNEHPHRNRRTHLDERVRRGYHPRRGGRYDSGEDRSPSPEPPGPQAFSRAIRRAPFPTRFRTPTTITKYSGETRPELWLADYRLACQLGGTDDDNLVIRNLPLFLSDSARAWLEHLRKAGPPAEGGRARDDDKKEDHKAGEFPEVRDCFMIYGGPVANASARHRKQERREVCSVKVAVPVYLDWSDKPITFDQGDHPDRVPSPGKYPLVVDPVIGNVRLTKVLMDGGSSLNIIYAETLGLPRIDLSSVRAGAAPFHGIIPGKRVQPLGQLDLPVCFGTPSNFRRETLTFEVVGFRGTYHAVLGRPCYAKFMAVPNYTYLKLKMPGPNGVITVGPTYRHAYECDVECVEYAEALAESEALIADLESLSKEAPDVKRHADNFEPAETVKSVPLDPSNDASKQIRIGSELDPK

SEQ ID NO: 297629 - protein, 984 aa, Zea mays
  Clone ID: MRT4577_34512C.1.pep
MGSLQQPLQPGTVLRFGSLEFLSLDGSYDMILLPPPCDNDNGGRQPAHRRRNRRRLPRMVEEQHSSSPRPLPRRRRRRRGNQGQAGGGTLSAVERVDGAGAPTGGASGIDLASETKTSVVSPQRANPKQTDDASTLAKGLLGVTLVPKTTVHLDPPRDFALADALVEASPNPLGFRMRSPWDRLTDVSTYGPSGSEEDDVPDFCWDFFGLGNPSAMRDFMTACDYCLSDCSDGSRSLDVEDCGPSRECFHVDLGGPSEGNHLGMPEDGDLPRPLPRVDILRELAVVPVQAGGHDPQLEQIRGVQAKLDGGAGTLEPVRRDVGQQWVGQPPAGEMRHLPQGFQHRIADDVRMRPPPASSGVGQNLAAAAMLLHGELKNLLEGATVRRAESSASRRQGYPSEHRVATSRFMREASVHTGRTRNTAPAAPGRLGNEHHHRDRRAHLDERVRRGYHPRRGGRYDSGEDRSPSPEPPSPQAFSRAIRRAPFPTRFRPPTTITKYSGETRPELWLADYQLACQLGGTDDDNLIIRNLPLFLSDTARAWLEHLPPGQISNWDDLVQAFTGNFQGTYVRPGNSWDLRSCRQQPGESLRDYIRRFSKQRTELPNITDLDVIGAFLAGTTCRDLVSKLGRKTPNRASELMDIATKFASSQEAKPPGGTNLFDKMLKEPCPYHQGPVKHTLEECAMLRRHFHRAGPPAEGGRARDDDKKEDHQAGEFPEVCDCFMIYDGQAATSSARHRKQERWEVCSVKVAAPVYLDWSDKLITFDQADHPDHVPSPGKYPLVVDPIIGDVRLTKVLMDGGSSLNIIYAETLGLLRVDLSSVWAGATPFHGIIPGKRVQPLGQLDLPVCFGAPSNFRRETLTFEVVGFRGTYHAVLGRPCYAKFMAVLNYTYLKLKMSGPNGVITIGPTYRHAFECDVECVEYAEALAESEALIADLESLSKEVPDVKRHAGNFEPAETVKSVPLDPGSDASKQIRIGSELDPK

SEQ ID NO: 297630 - protein, 71 aa, Zea mays
  Clone ID: MRT4577_34513C.1.pep
GGKKHNPRDKRGDKGGVPLPNKGGKMLEKGVGKGVFFKKPTGKKGIFSKANKLGKARGFPGPRVVKKGQGN

SEQ ID NO: 297631 - protein, 45 aa, Zea mays
  Clone ID: MRT4577_34514C.1.pep
FLSCRKIIPFPLSKVLIGCFIFLPLFPKLIYSVCNKILKVICFIL

SEQ ID NO: 297632 - protein, 1053 aa, Zea mays
  Clone ID: MRT4577_34515C.1.pep
MGSLQQPFHLGTVLRFGSLEFMSLDGGYDMILLPPPRDNDNGGRQPARRRLNRRRLPHVAEEQHSGLSRRLPRRRRRRRGNQGQAGGGTSSAVERVDDAGAPTGDTSGIDLASETKTSAVSPQHANSKRTDDASTLAKDLLGVTLIPETTVQSAPDVTSSPPVDQEVPTDSRLVPFGFGLDPPSDPALVEAFIEACTNPPGYHMRSPWDRLTVVSTYGPLGSEEDDEPDFGWDFSGLGNPSAMRDFMTACDYYLSDCSDGSRSFGDEDCGPSRECFHVDLGGPDEGNHLGIPENGDPPRLAPRVDILRELAVVPVPARGQDAQLEQIREMQARLDEGAGTLEPLRRNIGREWVDQAPAGEARHLPQGIQPRIADDVRARPPPASSGVGQNLATTAILLRAMPEPSTTEGRRIRGELKNLLEDVAVRRAESSASRRQGYPSEHRAATSRFMREASVHTGRTRNTAPAAPGRLGNEHHHRNHRAHLDERVHRGYRPRGGGRYDSGEDRSPSPEPPGPQAFSRAIRRAPFPTQFRTPTTITKYSGERRPKLWLADYQLACQLGGMDDDNIVICNLPLFFSDSARAWLEHLPPGQISNWDDLVQAFAGNFQGTCRQQPGESLRDYIRRFSKQRTELPNVTDSDVIGAFLAGTPCRDLVSKLGRKTPTRASELMDIATKFASGQEAVEAIFRKDKQPQGRQPEDVPEASTQRGTKKKGKKKSQAKRDAADADLVAAAEYKNPWKPPGGANLFDKMLKEPCPYHQGPAGPPAEGGMAHHDDKKEDHKAEEFPEVRDCFMICGGQVANASARHRKQERREVCSVKVAAPVYLDWSDKPITFDQGDHPDRVPSPGKYPLVVDPVIGNVRLTKVLMDGGSSLNIIYVETLELLQIDLSSVRAGAAPFHGIIPGKRIQPLGQLDLPVCFGTPSNFRRETLTFEVVRFRGTYHAVLGRPCYAKFMAVPNYTYLKLKMPGPNRVITVGPTYRHPYECDVECVEYAEALTESEALITDLESLTKEAPDVKRHAGNFEPAETVKSVPLDPSNDASKQIRIGSELDPK

SEQ ID NO: 297633 - protein, 126 aa, Zea mays
  unsure (1)..(126): unsure at all Xaa locations
  Clone ID: MRT4577_34516C.1.pep
DDYIAFKDKTTGAKKYFVRPNTDILPPPHTIDVIVTMQAQKEAPPDMQCKDRFLVQRVIAAXGTLIKDITADMFTKESTNVVNDAKLKVIYMPPSKPPYPVHEESEEGSSPTPSLSDGINLNYQQT

SEQ ID NO: 297634 - protein, 857 aa, Zea mays
  Clone ID: MRT4577_34517C.1.pep
MTGEVLAPETTTDVVSPQRANPKRTDDASTLVKDLLGVNLVPEMTVHSVPDATSPPSIDQMVPSVFHPVPFRFSFDPPSNPASVSAFVKAYPNLPGYHTWSCWDRLMVVSTYGPPGSEEEDDPDSGWDFSGLRDPIAMRDFMTACDYCLSGCSDDGHNLDDEGCGPSRECFHVDLGDRDEGNHLGMPEDNDPPGPTSRVDIPRELDVVPVPAGGQDTQLEQIREMQARLNEEAGQLVQLRQNVEQEWAGRALAGEARHQAQDVQRRIVGRKLCLLKARVPPEHRATTSRLMREDLVHTGRTRDRTPEAPDRLGNEQHHHDRRARLDERVRRGYHPQAWRTDDDDLIIRNLPLFLSNFARAWLEHLPPAQISNWDDLVKAFTGNFQGTYVRPGNSWDLRSCHQQPEESLREYIRRFSKQRTELPNITDSDVIGAFLTGTTCRDLVSKLGRKTPTKASELMDIATKFTSGQEAVKTIFRKDKQPQGQQQEDIPKASAQRGTKKKAKKKSQAKRDATDADLVAAAEHRNPRKPPGGANLFDKMLKESCPYHQGPVKHTLEECVMLRRYFHKAGPPAEDGKGQDNKKKEGDKAEEFPEVHGCFMIYGGQVANGSARHRKQECREVCSVKVAAPVYLDWSDKPITFDQGNHPDCVPSPGRYPLIVDPVIANARLTKVLMDGGSSLNIIYAETLMLLEIDLSTIRAGAAPFHGIVPGKRVLPLGQLDLPVCFGTPSNFRRETLTFEVVGFRGTYHAVLGRSCYAMFMVVPNYTYLKLKMSGPNGVITVGSTYRHAYECDVEYAEALAESEALIADIECLSKEVPDAKSHAGNFEPAEAVKSVALDPSNDACKQVRISSELDPK

SEQ ID NO: 297635 - protein, 87 aa, Zea mays
  Clone ID: MRT4577_34518C.1.pep
FSSTCVFTAVCDASVVLTMRTSSARSTECAGPHIQSSHPPADHRRRRRTRVLERCVPYSPWTSSLDPHRFPSHSRASCNLFRAADQE

SEQ ID NO: 297636 - protein, 186 aa, Zea mays
  Clone ID: MRT4577_34519C.1.pep
WRRNLAAPAISIPSAELLLLYADTSFSPSSARHALLGGGIAARPSVLLAPDARPPVHPHGRTQLLLGPARPFPYAQAPLSFLSKLSPMVASPCSEVFLVSCPFLFGLFLGWRSGCALLPELIVLAMAAVALPWCPCPDLACAPGSSSYAARGFPAPHPLQLAAVQLVMARLFPGAPPCCAHRLPAR

SEQ ID NO: 297637 - protein, 73 aa, Zea mays
  Clone ID: MRT4577_3451C.1.pep
GPGLLISPRPPPPPIHLLLRGCCSQQNPSRPRNPLLPMCYSRPLASSPFAANRQSLWRQEEGRKEKGRTQRGG

SEQ ID NO: 297638 - protein, 67 aa, Zea mays
  Clone ID: MRT4577_34520C.1.pep
INWHQNYVLAVCLFTIHSLTHANNKDAIFEHNSTHHLPTYLLHFTVARALQLVSSCSSCRLMTLSPP

SEQ ID NO: 297639 - protein, 353 aa, Zea mays
  unsure (1)..(353): unsure at all Xaa locations
  Clone ID: MRT4577_34521C.1.pep
MAAMGWSDLPSELLTDIAGRINELADIARFRSVCSSWRSAARDAVAAPPPQPPWLLLPSSPXLGSSSAPGRTESTQTSACPAPPQRCTTAAPAPTCTRXPHGWVLAIDPTDLAASLVHPFTGATRPLPPLPFFFAETEDLAWDWSPHGVMASSGEGLLFCAADPTTAASWSPIRALYDCNASSINYAGGKFFVFEEDVCRTTIVDAVTLAIAAVIPAPAVELPAEARVAVAGDELFLLVKSKWMYLFSDDVDFSKAFHVNHRSVNSAWQELTGIGERALFVDSHHGFAVPTAGFGNLESNTIYSVSSKKVNYSVSAFSLETRTSKKLACRLNDQEMAMRGEMPSWIVPRLDEV

SEQ ID NO: 297640 - protein, 92 aa, Zea mays
  unsure (1)..(92): unsure at all Xaa locations
  Clone ID: MRT4577_34522C.1.pep
GGPPAASDALKDQGNEQLKAVRYLKDGALYTQAIKLDPDNGTLYSNRAXTFLAFVKLSKTLGDAXTTVTLRAQWEKGTFRKGCILKAMERYE

SEQ ID NO: 297641 - protein, 251 aa, Zea mays
  unsure (1)..(251): unsure at all Xaa locations
  Clone ID: MRT4577_34523C.1.pep
PSRPSFSSLSCVSRLVLSVGGGLLSAALAALALLRAGWRVRRRSWGAVAPLPVVGWLFVPPLGFWVPGGFRAALRPPGWPSPPLSRLLGALRALAPRRASRRALALRALSAFLXXXPXXXXXPXAPPSPXXXXPLPPPGPAPPSPXXLSPPPSXXPPPFLPSFLSXXXLPCXXPPPPPXAPXXPPPFXPXPPPXPPXPSPPPPXXPPPPPPXPPPPXPPPPPPPPPPXXPPPPPPXXPPPXPPPPPPXPPP

SEQ ID NO: 297642 - protein, 272 aa, Zea mays
  unsure (1)..(272): unsure at all Xaa locations
  Clone ID: MRT4577_34524C.1.pep
MVSNTLHAAAILLREGGDWDWFINLSASDYPLVTQDDLLHVLSELPRQLNFIEHTSDIGWKEYQRAKPVIIDPGLYSLQKSDVFWITEKRSVPTAFKLFTGSAWMVLTHQFIEYCIWGWDNLPRTVLMYYANFLSSPEGYXFHTVICNVPEFRNTTVNHDLHFISWDNPPKQHPHYLTLADFDGMVNSNAPFARKFGREDPVLDKIDQELLARRPDGFVPGGWTDLLNTTEKGKPFTVERVQDLRPGPGVDRLKKLVTGLLTQEGFDDKHCL

SEQ ID NO: 297643 - protein, 73 aa, Zea mays
  Clone ID: MRT4577_34525C.1.pep
MQARHCSADGQRKKAEEHHKKEEGEHHKKDGGEHKEGIVEKIKDKITGEHGDKSGDHKEKKKKKNKKKKKKGP

SEQ ID NO: 297644 - protein, 65 aa, Zea mays
  Clone ID: MRT4577_34526C.1.pep
MARALSAKGAAVASKKKGSVSFTIDCTKPVEDKILEDASLVQLLHDRINVARGKDGNLGDSVTIS

SEQ ID NO: 297645 - protein, 61 aa, Zea mays
  Clone ID: MRT4577_34527C.1.pep
CSHDPCSGSTSKVRCRNAPMLGSLPFGQIALLQTSIVCPICTLVRLARSGNRCEWPMRCAV

SEQ ID NO: 297646 - protein, 208 aa, Zea mays
  Clone ID: MRT4577_34528C.1.pep
MPNQTHQYHSVHPQHMPYPHGPYMQPQQQQQAPPYSYQADQQPQMPQTTYNQAQQPPMPQPSYNQGQNQQPPMPQPSYNQGQSQQPPMPQPSYNQGQVQQPPMPQPSYNQGQQSMMPQSAYNQVQQPQIPQSYNQSQQPPGVRIPQSQGQHPQQSLSFHHPSQASQSPQVSQPQGLKMTSQQGQPQHGGVHSAWKITTVTWATKSIEG

SEQ ID NO: 297647 - protein, 37 aa, Zea mays
  Clone ID: MRT4577_34529C.1.pep
VDVLWCDNLGATYLSSNPVFHARTKHIEVDFHFVREK

SEQ ID NO: 297648 - protein, 159 aa, Zea mays
  Clone ID: MRT4577_3452C.1.pep
MATELTVQSERAFQKQPHIFLNHKVGGPRKNTRSRRWYKDVGLGFRTPKTAIEGTYIDKKCPFTGMVSIRGRILTGTVMSTKMHRTLIIRREYLHFIPKYSRYEKRHKNLAAHVSPAFRVEPGDQVVVGQCRPLSKTVRFNVLRVLPRKGKAAKQFNKF

SEQ ID NO: 297649 - protein, 951 aa, Zea mays
  Clone ID: MRT4577_34530C.1.pep
MAADNPPAGGGIDDIFPAWWKSNIRAHSVPSPANGGGGGAIKARREAALRWPSSESTPPMPRRRARQTSTSRSRRRQAPSPRDALTPNKKTTPARSRKACRTSPSLGNPSVVRDFMTACDYCLSDCSDGSRSLGDESCGPSCECFHIELGDPSEGNHLGMPEDGDLPRPAPHADIPRELAVVPAPAGGYDPQLEQVREAQARLNEGTGALEPIRRDVGQAWVGQPLAGEIRHLPQGLQHHVANDTRVRPPPASSGVGQNLAATAMLIRAMAEPSTTEGRRIQGELKNLLEGAAARRAESTASRRQGYPSEPHAATSRFMREASVYTGRTRNTAPAAPGHLGNEHHRRDRRAHLDERVRRGYHPRRGGRYDSGEDRSPSPEPPGPQAFSRAIRRAPFPTRFRPPTTITKYSGETRPELWLADYRLACQLGGTDDDNLIIRNLPLFLSDTARAWLEHLPPGQISNWDDLVQAFAGNFQGTYVRPGNSWDLRSCRQQPGESLWDYIRRFSKQRTELPNITDSDVIGAFLAGTTCRDLVSKLGRKTPTRASELMDIATKFASGQEAVEAIFRKDKQPQGRPSEEAPEASAPRGAKKKGKKKSQLKRDAADADLVAAAEYKNPRKPPGGANLFDKMLKEPCPYHQGPVKHTLEECVMLRRHFHRAGPPAEGGRARDDDKNEDHPAGEFPEVRDCFMIYGGHTANASARHRKQERREVCSVKVAAPVYLDWFDKPITFDQADHPDHVSSPGKYPLVVDPVVGNVRLTKVLMDGGSCLNIIYAETLRLLRVDLSSVRAGAAPFHGIIPGKRVQPLGRLDLPVCFGTPSNFRRETLTFEVVRFRGTYHAVLGRPCYAKFMAVPNYTYLNLKMLGPNGVITVGPTYKHAFECDVECVEYAEALAESEALIADLENLSKEVPDVKRHAGNFEPAETVKAVPLDPGGDTAKQIRIGSGLDPK

SEQ ID NO: 297650 - protein, 148 aa, Zea mays
  Clone ID: MRT4577_34531C.1.pep
MPLIPPSFNTPPYRESWNPSRSRPEIPGWPQGPEHQFLPFSQLVGVTPAPFLTHPQLFRFNQHVAPNGGPLLQRQQLWPFNQLVFPPPPLFYKQPFLGGPPLKKALFYFWGTPHTTGQKKALSKKKNNKKKKKKKTPPPRPLRIQVST

SEQ ID NO: 297651 - protein, 821 aa, Zea mays
  Clone ID: MRT4577_34532C.1.pep
MRDFMTACDYCLSDCSDDGHSLDDEDCGPSRECFHVDLGGLDEGNRLGMPEDGDPPRPAPRVDILRELVVVPVPAGGQDTQLKQIREMQARLDEEAGPLVQLRQNIGQEWAVRAPPGEARHLAQDVQHRIADDARARLPPASSGVGQNLAAAAILLRAMPKPSTTEGRRIQGELKNLLEDAAVRRAESSASRRQGYPLEHRAATSRFMREALVHTGRTRNTAPAALGRLGNEHHRRDRRAHLDEKVRRGYHPRRGGRYDSGEDRSPSPEPPGPQAFSRAIRWASFPTRFRTPTTITKYSGETRPELWLADYRLACQLGGTDDDNLIICNLHLFLSDAARAWLEHLPPAQISNWDDLDLRSCRQLPGESLRDYIRRFSKQRIEMPNITDSDVIGAFLAGTTCRDLVSKLGRKTPTRASELMDIATKFASGQEAVEAIFWKDKQPQGRQPEDVPEASAQRDTKKKGKKKSQTKHDAADADLVAAAEHRNPRKPPRGANLFDKMLKESFPYHQGPVKHTLEECVMLWRYFHKVGPPMEGGRAHNNDKKEDHKAEEFPEVHDCFMIYGGQVANASARHRKQERREVCSVKVAAPVYLDWSDKPITFDQGDHPDRVPSPGKYPLVVDPVIGNVRLTKVLMDGGSSLNIIYVETLGLLQIDLSSIRAGTAPFHGIIPGKRVQPLGQLDLPVCFGTPYNFRKETLTFEVVGFRGTYHAVLGRPCYAKFMVVPNYTYLKLKMSGPNEVITVGSTYRHAYKCDVECVEYAEALAESEALIVDLESLSKEVPDAKRHAGNFEPAEAVKSVPLDPSDDASKQIRIGSELDPK

SEQ ID NO: 297652 - protein, 69 aa, Zea mays
  Clone ID: MRT4577_34533C.1.pep
RAPSPPGANWSIFLFPPTRIQLLQKFLGIVFPPHQRVGGQNWVIPPPGLFKHQENENNQTFNSPLKTLR

SEQ ID NO: 297653 - protein, 1013 aa, Zea mays
  Clone ID: MRT4577_34534C.1.pep
MGSLQQPLRPGTVLRFGSLEFMSLDSSYDMILLPPPRDNDKGGRQPARRRRNRRHLPRMVEEQHSSSPRPLPRHRRRRRGNQGQAGGRASSAVERIDVPSAPTEGTPGVDLAFEMKASAVPPRHANPEQVDDASALAESLQDVALVPETMVQPVPDATMSLLVDQKVPTNSHLTSFRLDLNPPSDLALAGALVEASATPLGFPMRSPWDRLTDVSTYGPSGSEEDDDPSICWDFSGFDNLSAMRDFMTACDYCLSDCSDGSRSLDDEDCDPSRECFHVELGDPSEGNHLGMPEDGDPPRPVPRADIPRELAVVPVPAGGHDPQLEQVRGAQARLNEGAGALETIRRDVGQAWVGQPPAGEIRHLPQGFQHRVANDVRVRPPPASSGDGQNLAAAAMLLRAMPEPSTTEGRRIQGELKNLLEGAAARRAESSASRRQGYPSEPHAATSRFMREASVYTGRTRNTAPAAPGHLGNEHHRRDRRAHLDERVRRGYHPRRGGRYDSGEDRSPSPEPPGPQAFSRAIRRAPFPTRFRPPTTITKYSGETRPELWLADYRLACQLGGTDDDNLIIRNLPLFLSDTARAWLEHLPPGQISNWDDLVQAFAGNFQGTYVRPGNSWDLRSCRQQPGESLRDYIRRFSKQRTELPNITDSDVIGAFLAGTTCRDLVSKLGRKTPTRASELMDIATKFASGQEAVEAIFRKDKQPQDRPSEEAPEASTQRGAKKKGKKKSQSKRDAADADLVAAAEYKNPRKPPGGANLFDKMLKEPCPYHQGPVKHTLEECVMLRRHFHRVGPPAEGGRAHDDDKKEDHQAGEYPEVRDCFMICDGHAANASARHSKQERREVCSVKVVAPVYLDWSDKPITFDQADHPDHVPSPGKYPLVVDPIVGDVRLTKVVGFRGTYHAVLGRPCYAKFMAVPNYTYLKLKMPGPNGVITVGPTYKHAFECDVECVEYAEALAESEALIADLENLTKEVPDMKRHAGNFEPAETVKVVPLDPSGDTSKQIRIGSGLDPK

SEQ ID NO: 297654 - protein, 84 aa, Zea mays
  Clone ID: MRT4577_34535C.1.pep
VTHVQPPHALLCLWLIHSKPIQDPPTRVIIFLDSFSEHVLLGGASWLYRNIPTTRREREREREQLSYGVWEGGRESAFPGAASN

SEQ ID NO: 297655 - protein, 237 aa, Zea mays
  Clone ID: MRT4577_34536C.1.pep
MKVAAPVYLDWSDKPITFDQGDHPDCVSSPGRYPLIFDPVIGNARLTKVLMDGGSSLNIIYAETLGLLGIDLSMIRAGAAPFHGIVPDKRVLPLWQLDLPVCFRTLSNFRKETLTFEVVGFRGTYHAVLGRPCYAKFMVVPNYTYLKLKMTGPNGTITVGSTYHHAYECDMECVEYAEAIVESEALIADLDCLSKEVPNAKRHAGNFEPAEAVKSVPLDPSNDADKKVRIGSELDPK

SEQ ID NO: 297656 - protein, 339 aa, Zea mays
  Clone ID: MRT4577_34537C.1.pep
HPPIHSLARPRLQPPLNPLARAQRGGGVAASEDSLRILSSKNFRSAYDGYAAAARGAGVRVGVGVGVSSSSGLHLPASPSAFGDTTHTKVFVGGLAWETNSGRLRRFYERFGDILEAVVITDRHSGRSKGYGFVTFREAESARKACEDPTPVIDGRRANCNLASLGRAQHPVPPGRPSSAGSYFGVPVPRAFYLGGYGHTRPFPLGYYQGFPVPQYSYPSYGTEYIYPQGTLNSYSGQQYLPIYGVSAAANTSNQAFSQLSPSVSGGGNGYLSVHSYNVPGNQYVQLTGSNFSGASPTARPSIQTSFLVATPVPAHPHLIIPAPSPQFTQASGSDQSAS

SEQ ID NO: 297657 - protein, 211 aa, Zea mays
  unsure (1)..(211): unsure at all Xaa locations
  Clone ID: MRT4577_34538C.1.pep
MRRHGWQLPYHPLQVVAVSVFVALAFAFYVFFAPFVGRKVFQDAAMGLYTPLVLCVFFLYIWCAATDPADPGVFKSKKYQRLYGGCKHRRLKESIQGVSDVGLRLEGTGEKREHEVADANEKSMTELKNKSSSCCSAIFSAFLLIFRPLSFVFSCCQSREWSSEQQDSEDGMFFCSLCEVEVFEYSKHCRVCDKCVXDGFDHHCRWLNNCI

SEQ ID NO: 297658 - protein, 1071 aa, Zea mays
  Clone ID: MRT4577_34539C.1.pep
MVLRFGSLEFMSLDGSYDMILLPPPCDNDNGGRQPARRRRNRRRLPRVVEEQHSSSPRPLPRRRRRRRGNQGQAGGSASSAVERVDGTSTPTGGAPGIDPALETKTSAVSPQRADSGQTDDASALAKGLLDVTLVPETTAQSVPDVTSSPPVDQKVPTDSHPTSFGFSLDPPSDFALAGAHVEASPNPLRFRMRSPWDRLTDVSTYGPSGSKEDDEPSICWDFSGLGNPSAMRDFMTACDYCLSDCSDGSRSLGDEDCGPSRECFHVDLGGPSEGNHLGMPEDGDLPRSVPRVDVPRELAVVPVQAGGHDPQLEQIRGVQARLDEGAGALEPIRRDVGQAWAGQPPAGEIRHLPQGLQHRIADDVRFRPPPASSGVGQNLAAAAMLLRAMPEPSTTEGRRIQGELKNLLEGTAVRLVESSASRRQGYPSEPHAATSRFMQEASVCPGRTRNTAPAAPSRLGNEHHHRDRRAHLDERVRRGYHPRRGGRYDSGEDRSPSPEPPGPQAFSRAIRRAPFPTRFRPPTTITKYSGETRPELWLADYRLACQLGGMDDDNLIIRNLPLFLSDTARAWLEHLPPGQISNWDDLVQAFAGNFQGTYVRPGNSWDLRSCRQQPGESLRDYIRRFSKQRTELPNITDSDVIGAFLAGTTCRDLVSKLGRKTPTRASELMDIATKFASGQEVVEAIFRKDKQPQGRPSEDAPEASTQRGAKKKGKKKSQAKRDAADADLVAAAEYKNPRKPPGGANLFDKMLKEPCPYHQGPVKHTLEECVMLRRHFHRAGSPVEGGKARDDDKKEDHQAGEFPEVHDCFMIYGGQAANASARHRKQERREVCSVKVAAPVYLDWSDKPITFDQADHPDHVPSPGKYPLVVDPVIGDVRLTKVLMDGGSSLNIIYAETLGLLRVDLSSVRAGAAPFHGIIPGKRVQPLGQLDLPVCFGTPSNFRRETLTFEVVGFRGTYHAVLGRPCYAKFMAIPNYTYLKLKMPGPNGVITVGPTYKHAFECDVECVEYAEALAESEALIADLESLSKEVPDMKRHAGNFEPAETVKSVPLDPSSDASKQVRIGSELGPK

SEQ ID NO: 297659 - protein, 107 aa, Zea mays
  Clone ID: MRT4577_3453C.1.pep
DAWADAWADAWADAWAALSPRVAFLDHQRSLLTVGNSHLKQRIAALAQDKIFKDAHQEALKKEIERLRHVYQQQQMKVATTGGADIAAAASMQARQELLACEGAAIR

SEQ ID NO: 297660 - protein, 132 aa, Zea mays
  Clone ID: MRT4577_34540C.1.pep
RLISIGLIHLAYAELHSSISYISMSLSDTGPIRLHLWLHAPSRLRFKLSETARATVTLGSLAPSIGATSWFPGTSVDHDNDNLMNARMTACQARTNAVNTATLLFLVLLQSKGTSRYKCLDAQFNLHFGLNH

SEQ ID NO: 297661 - protein, 88 aa, Zea mays
  unsure (1)..(88): unsure at all Xaa locations
  Clone ID: MRT4577_34541C.1.pep
AVSKASSSHSLHAXESHGRSHVRTXTSLEGGILKEVMERSAEEQSSGLLGGANRSLSSRLFLSEHWTDGKDDVKPATQRRPLWESNMP

SEQ ID NO: 297662 - protein, 136 aa, Zea mays
  unsure (1)..(136): unsure at all Xaa locations
  Clone ID: MRT4577_34542C.1.pep
LVIDVRPLNNIRFEQAVAFFTNIIHRFGVPNSIITDNGTXFTSRKFLDFCEDHHIRVDWAVVAHPMTNGQVERANDMMLQGLKPRIYSDLHKFGRRXIKELPSVVWSLRTTPSRATGFTPFFLVYGAEAVLPTDLE

SEQ ID NO: 297663 - protein, 146 aa, Zea mays
  Clone ID: MRT4577_34543C.1.pep
GPHTNTNFQMHNHLKADLHWINPSYICWTPFQHKLHFHEPVRYRTNKAASVASCSITLAIKLSETARATVTLGSLAPSIGATSWFPGTSVDHDNDNLMNARMIACQARTNAVNTATLLFLVLLQSKGTSRYKCLDAQFNLHFGLNH

SEQ ID NO: 297664 - protein, 314 aa, Zea mays
  unsure (1)..(314): unsure at all Xaa locations
  Clone ID: MRT4577_34544C.1.pep
GGRQPAHRRQDRRRLPHVAEEQHSGLSRRLPHRQRRRRGNQGQAGGGTSSAVERVDGVGAPTGDTSGVDLASETKTSAVSPQHANSKXTNDASTLAKDLLGVTLXLDPPSDFASVEAFIEACPNPPGYGMRSPWDRLTAVSTYGPSGSEEDDEPDFCWDFSGLGNPSAMQDFMIACDYCLSDCSDGSRSFGDEDCSPNRECFHVDLGVPSEGNHLGIPENGDPPRPAPRVDILRELAVVPVPAGGQDAQLEQIREMQARLDKGAGTLEPFRRNIGQEWADQAPAGEARHLPQGIQHCIADDVRARPPPVSSGVG

SEQ ID NO: 297665 - protein, 129 aa, Zea mays
  Clone ID: MRT4577_34545C.1.pep
WLIPRWINPSYICWTPFQHRLHFHELVRYRIIKAASGSITRIRFKPSGKVRATLALGSLAPSIGTTSRFPGTSVDHDNDNLMNARMISCQARTKAVDTATLLFLVLLQSQGTSRYKCLDAQFSLLFGLN

SEQ ID NO: 297666 - protein, 101 aa, Zea mays
  unsure (1)..(101): unsure at all Xaa locations
  Clone ID: MRT4577_34546C.1.pep
PRARRNIDNFGFPAQQPSDPIGXRKSRGRGTQANIAXIXEPYRYKRASTTNSGKVTEEHMSESAGSSXERHXGRERGDYKEDPNATGTRAGDPKPAKIHQA

SEQ ID NO: 297667 - protein, 85 aa, Zea mays
  Clone ID: MRT4577_34547C.1.pep
QLFPSGSNIGAVHGCGEVGCTKSCSEKDLIYMTLLFPSCGIRTHTIRLRTSLTPPHHSGRTFNSRNLRLVLRLHFIIHLLCRQFA

SEQ ID NO: 297668 - protein, 704 aa, Zea mays
  Clone ID: MRT4577_34548C.1.pep
MRPPPASSGVGQNLAAAAMLLRAMPEPSTTEGRRIQGELKNLLEGATVRRVESSASRRQGHPSEHRVATSRFMREASVYTGRTRNTAPVAPGRLGNEHHHRDRRAHLDERVRRGYHPRRGGRYDSGEDRSPSLEPPGPQAFSRAIRRAPFPTWFRPPATITKYSGEMRPELWLADYRLACQLGGTDDDNLIIRNLPLFLSDIARALLEHLPPGQISNWDDLVQAFTGNFQGTYVRPGNSWDLRSCRQQPGESLGDYIRRFSKQRTELPNITDSDVIGAFLAGTTCRDLVSKLGRKTPTRASELMDIATKFASGQEAVEAIFRKDKQPQGHPPEDAPEASTQRGAKKKGKKKSQAKCDAADVDLVATAEYKNPRKPPGGANLFDKMLKEPCPYHQGPVKHTLEECAMLRRHFHRAGPPAEGGRARDDDKKEDHQAGEFPEVRDCFMIYGGQAANASARHRKQERREVCSVKVAAPVYLDWSDKPIIFDRADHPDHVPSPGKYPLVVEPIIGDVRLTKVLMDGGNSLNIIYAETLGLLHVDLFSVRAGAAPFHGIIPEKRVQPLGQLDLPVCFGTPSNFRRETLTFEVVGFRGTYHAVLRPCYAKFMAVPNYTYLKLKMSGPNGVITVGPTYKHAFECDVECVEYAEALAESEALIADLESLSKEMPDVKRHASNFEPAETVKSVPLDPSSDASKQVRIGSELDPK

SEQ ID NO: 297669 - protein, 89 aa, Zea mays
  Clone ID: MRT4577_34549C.1.pep
EENQNLKNHNLMLSVEHDNLKALHHNLDIECCQLKATIAETKAENESLTTENHSAERKLQQLRVEIDGLMAETTVIMNNLDKERILQQR

SEQ ID NO: 297670 - protein, 87 aa, Zea mays
  Clone ID: MRT4577_3454C.1.pep
EKIAPSSISPQPASRGKKKKKRHSARAERCKGTPGRCNLGLRRWRRPAATAQVLARGGQPRSAAVYTVLEDFGSKCSPRRPWRRRAL

SEQ ID NO: 297671 - protein, 590 aa, Zea mays
  Clone ID: MRT4577_34550C.1.pep
MPEPSTTEGRRIQGELKNLLEDVAAFSRAIRRAPFPTRFRTPTTMTKYSGETRPELWLADYRLACQLGGTNDDNLIIRNLPLFLSDTARAWLEHLPPGQISNWDDLVQAFADNFQGTYVRPGNSWDLRSCRQQPGESLRDYIRRFSKQRTELPNVTDSDVIGAFLAGTTCRDLVSKLGCKTPTRAGELMDIATKFASGQEAVEAIFRKDKQPQGRQPEDVPEPSARRDTKKKNKKKSQAKRDATDADLVAAAEYKNPRKPPGGANLFDKMLKEPCPYHQGPVKHTLEECVMLRRHFHRARPPAEGGRARDDDKKEDHQAGEFPEIHDCFMIYGGQAANASARHRKQERREVCAVKVAAPVYLDWSDKPITFDQADHPDHVPSPGKYPLVVDPVIGDVRLTKVLMDGGSSLNIIYAETLGLLHVDLSSVRAGAAPFHGIIPGKRVQPLGQLDLPVCFGTPSNFRRETLTFEVVGFRGTYHAVLGRPCYAKFMAVPKYTYLKLKMPGPIGVITVGPTFKHAFDCDVECVEYAEALAESEALIADLESLSKEVPDVKRHAGNFDPVETVKAVPLDPSGDASKQIQIGSGLDPK

SEQ ID NO: 297672 - protein, 402 aa, Zea mays
  Clone ID: MRT4577_34551C.1.pep
MDIATKFASSQKAVEAIFRKDKQPQGRQPEDVPEASAQRGTKKKGKEKSQVKRDATDANLVAAAEHKNPRKPPGGANLFDKMLKESCPYHQGPVKHTLEECVMLRRYFHKAGPPAEGGRAPDNDKKEGHKAEEFPEVHDCFMIYGGQVANASAQYRKQERQKVCSVKVAALVYLGWSNKPITFDQDDHPDRVPSPGKYPLVVDPVIGNVRLTKVLMDGGSSLNIIYADTLGLLQIDLSSIRAGAAPFHGIIPGKRVQPLGQLDLPVCFGTPSNFRKETLTFEVVGFRGTYHAVLGRPCYAKFMAVPNYTYLKLKMSGPNGVITVGPTYRHTYECDVECVEYAEALAESEALIADLESLPKEVPDAKRHAGNFEPAEAVKSVPLDPSNNTSKQIRIGSELDPK

SEQ ID NO: 297673 - protein, 107 aa, Zea mays
  Clone ID: MRT4577_34552C.1.pep
SHRPSLFFFFFFFFPLFLFFLDLLFFLSPPQPTPYQKHQNLNQTIKKLTKKTLFYKPQSQISTNITHPKPTPPLSHKQPHPTQKYSNLPTKHHLITKFNPPFNHKPY

SEQ ID NO: 297674 - protein, 100 aa, Zea mays
  Clone ID: MRT4577_34553C.1.pep
RQELIPDLTNLKKEPEKGVFLWARKIQLKQLEKPAFWFVTRGGGGGGTRDQGTGDKKNPRVAEKTLGEGFSWCPGGGGFFTGGELAPRESALGGGAGGLF

SEQ ID NO: 297675 - protein, 449 aa, Zea mays
  Clone ID: MRT4577_34554C.1.pep
SQLLGLLEKTRIFVPKGRWLMGCLDELGILEQGQCFIRASSPSLNNCLVKYGSRLSAANTNAETILGTIVMAKNPCLHPGDVRILEAVDVPELHHLVDCLVFPKKGERPHANEASGSDLDGDLYFVTWDENLIPPGKKSWNPMDYSPAEAKQLPRAVSQHDIVGFFLKNMVNEKLGPISNAHVVHADMSEYGAMDEKCIQLAELAATAVDFPKTGKIVSMPASLRPKLYPDFMGKEDAISYRSEKILGRLYRSIQEASSDDLVPEETCTSNNLPYDADMEVAGAADFLSSAWQCKCSYETQLNALLNQYGVRTEAELVTEHIWSLPKYSSRRQGDIKERLKNAYYALHKEFRSIFESIVTDQTEISDDEKSRFYEMKASAWYQVTYHPEWVQKSREMFKSDCEDMPARLSFAWIAVEHLARIKIRCRGEVKVDSPRPVERLAAYISGSM

SEQ ID NO: 297676 - protein, 73 aa, Zea mays
  unsure (1)..(73): unsure at all Xaa locations
  Clone ID: MRT4577_34555C.1.pep
PSNRSIYRGMGSGKPARLGSGGVGSDHLTQSRERRPMPGWVRLGGSRLGWWWDGLFWPSWEEKRXRAHLRPSL

SEQ ID NO: 297677 - protein, 275 aa, Zea mays
  Clone ID: MRT4577_34556C.1.pep
MAVTFQHKIILRPGSIFCFGTISSVADDEGTLHRLADPPERKPSLEISEKIEVRQEKARPPALLKKITSSKLGAEGPSARRTPLSTSPMREWTRIIRKKEAKDHQADLSVPPLSKENKKKIAVTVTPFYPDVLFIGRVESPPISDDEPTAPGEEPPQRESRRRRNRRQNIRRHHEAGERDPAQPVSRDEVSEIGETPEERVFRERRNSRRRNLNPDFARAMNTPSEVGGVLARIADGLPRTPDAEGYRRLFTQAANHLLPLAHPPNDLRHAIKSR

SEQ ID NO: 297678 - protein, 104 aa, Zea mays
  Clone ID: MRT4577_34557C.1.pep
IGYLEAGRDLPPAPALHLPLPRHRRRRGRSGSGSRSERRRQRLPPPPLASRLAPLPPVLRTPAGDPVCVPPSLSPPASGGSSNGARPRRLRRARPEGSRGGGGG

SEQ ID NO: 297679 - protein, 52 aa, Zea mays
  unsure (1)..(52): unsure at all Xaa locations
  Clone ID: MRT4577_34558C.1.pep
MNLYGMPLSTNVVRKNTVLNGKGLFFXNAPFEHNTGPHRQRDFLALNPVGQI

SEQ ID NO: 297680 - protein, 52 aa, Zea mays
  Clone ID: MRT4577_34559C.1.pep
LVVWYHVESYTPPNFNSLQGSSAISSADLFGHPANNSSVDLSASDLINRISF

SEQ ID NO: 297681 - protein, 50 aa, Zea mays
  Clone ID: MRT4577_3455C.1.pep
TNMYLYIALRNFPWDTWMVRLYCRLCYLQSPTFNSLHTRLTYTHIPTQWG

SEQ ID NO: 297682 - protein, 47 aa, Zea mays
  Clone ID: MRT4577_34560C.1.pep
NGFFFFGQRITCFKIKNWAGKLLRQCCNLAPDFVGIHNLVDFYKKQN

SEQ ID NO: 297683 - protein, 107 aa, Zea mays
  unsure (1)..(107): unsure at all Xaa locations
  Clone ID: MRT4577_34561C.1.pep
MIKENVTVDNSSCIRSIAFIYIGADGKPYKEGPWGFCHAGTEYKIDLSRLYQSLTDISETTGPVYNIDNLVRSLNICTNKRSYGPYXGTRXTPILVKVMNKRHVAGF

SEQ ID NO: 297684 - protein, 63 aa, Zea mays
  unsure (1)..(63): unsure at all Xaa locations
  Clone ID: MRT4577_34562C.1.pep
RGLKCPTHDRIASSSRSLSVWRQMLSVRSAKHEPGAEPARVNVKITATCRCYTXSGSARTTTP

SEQ ID NO: 297685 - protein, 54 aa, Zea mays
  Clone ID: MRT4577_34563C.1.pep
SLDKRLSIAKMKTALEQPLLLSMTRQRRGGINTGHKGRGREIPDRFLTATHISI

SEQ ID NO: 297686 - protein, 53 aa, Zea mays
  Clone ID: MRT4577_34564C.1.pep
IYSNCDCAITKRTWAYLTAANKNAGLRPAMDPGALFMSPHGPTLHLKESSVLG

SEQ ID NO: 297687 - protein, 642 aa, Zea mays
  Clone ID: MRT4577_34565C.1.pep
MAEEQHPGLSRHLPRRRRRRRGNHGQAGGSTSLAVERVDDAGAPAGDTSGVDLASETKTSVVSPQHANPKRTNDASTLAKDLLGVSLVPEITVQSVPDATSSPSVDQEVPPVFHPVPFRFSFDPPSDPASVDAFIKVYPNLPGYHMWSTWDRLTAVSTYGPPGSEEYDEPDSGWDFSGLGNPSAMRDFMTACDYCLSDYSNGGHSLDDEDCGPSRECFHVDLGGLDEGNHLGMPEDDDPPRLAPRVDILRELAVVPVPAGGQDTQLEQIREMQAKLDEEAGQLVQLRQNIGQEWDDLVKAFAGNFQGTYVRPGNSWDFRSCRQQPGESLQDYIRRFSKQRTELPNITDSDVIGAFLAGTTCRDLVSKLGRKTPTRASELMDIATKFATGQEAVEAIFRKDKQPQGRQPEDVPEASAQRGTKKKGKKKSQVKRDAADADLVAAAEHRNPRKPLGGANLFDKMLKESCPYHQGPIKHTLEECVMLRRYFHKAGPPAEGGKGHDNDKKEGHKAEEFPEVHDCFMIYGGQVANASARHRKQERWEFMAVPNYTYLKLKMSGPNGVITVGSTYRHAYECDVECVEYAEALAESEALIADLESLSKEVPDAKRHTGNFEPTEAVKSVPLDPSNDASKQVWIGSELDPK

SEQ ID NO: 297688 - protein, 95 aa, Zea mays
  Clone ID: MRT4577_34566C.1.pep
MANRSVAMGVALAFVAMTALCCAPGAAELPRLDHPARSDGSLKLLVVGDWGRKGTHNQSRVADQVSNGSAILYIPSSELPITASQCVQTPWPSTP

SEQ ID NO: 297689 - protein, 237 aa, Zea mays
  unsure (1)..(237): unsure at all Xaa locations
  Clone ID: MRT4577_34567C.1.pep
HIYSFQTLSAPDLRDPGISAIIASKLREFHSLDMPGSKSVLXIWERLRNWLRTAKSLYSSSDETEEFCIRLMEEEIAALENEFSGECERVGFCHNDLQYGNIMIDEETRLLTIIDYEYAGFNPVAYDIANHFCEMAADYHSEKPHILDYSKYPDTDERKQFVRTYLSSSGEESEEEVENLIKSIEKYTLASHLVWGLWGIISDHVNDIDFDYKDYARQRFEQYWLKKPTILASQTAE

SEQ ID NO: 297690 - protein, 884 aa, Zea mays
  unsure (1)..(884): unsure at all Xaa locations
  Clone ID: MRT4577_34568C.1.pep
ANSEQTDDASMLAKGLLGVTLVPETTVQSVPDVTLSPHVDQEVPTGSHLTPIGFSPDPPSDFALADALIEASPNPLGSRMRSLXDWLTDVSTYEPSGSEEDDEPDFYWDFSGLGNPSAMRDFMTACDYCLSDCSDGSRSLGDEDCGPSRECFHVDLGGPSEGNHLGMPENGDLPRPVPHVDILRELAVVPVPAGGHDPQLEQIRGVQARLDEGAGALEPIRRDVEQEWAGQPPAGEMRHLPQGIQHRIADDVRVRPPPASSGVGQNLAAAAMLLRAMPELSTTEGRQIQGELKNLLEGAAVRRAESSASRRQGYPSEHRAATSRFMREASVHTGRTRNTAPAAPGRLGNEHHHRDRRAHLDERVRRGYHLRRGGRYDSGEDRSPSPEPPGPQAFSRAIRRAPFATRFRPPTTITKYSGETRPELWLVDYRLACQLGGTDDDNLIIRNLSLFLSDTARAWLEHLPPGQISNWDDLVQAFAGNFQGTAPELPNITDSDVIDAFLAGTTCRDLVSKLGRKTPTRASELMDIATKFASGQEAVEAIFRKDKQPQGHPPEDAPEASTQRGAKKKGKKKSQAKRDAADADLVTATEYKNPRNPPPRRAGPPAEGGRARDDDKKEDHQVGEFPEVRECFMIYSGQAANASARHRKQERREVCSVKVAAPVYLDWSDEPITFDQADHPDHVPSPGKYPLVVDPVIGDVRLTKVLMDGGSSLNIIYAETLGLLRVDLSSVRAGAAPFHGIIPGKRVHPLGQLDLPVCFGTPSNFRRETLTFEVVGFRGTYHAVLGRPCYAKFMVIPNYTYLKLKMSGPNGVITVGPTYKHAFECDVECVEYAEALAESEALIADLESLSKEVPDVKRHTGNFEPAETVKSVPLDPSSDASKQI

SEQ ID NO: 297691 - protein, 163 aa, Zea mays
  Clone ID: MRT4577_34569C.1.pep
LVPCVRSGFPVAHLGSVSEHGDTKELLELLLPVLKVTFQKLSQSVSTFRKVHDNNTVSYGKTIHTIQDNGVDFYINGHDHCLEHISSRDSPLQYFTSGGGSKAWRGVFHPNKDKLRFFYDGQGFMSLQLNQDQAHFIFYDVFGNILYRWSSRHPQPSTYLDEE

SEQ ID NO: 297692 - protein, 113 aa, Zea mays
  Clone ID: MRT4577_3456C.1.pep
RPWSPVGDENSLLSQWNRWKDMASWSPRCWSRGRHLWSVPGAPTSCGSCGAPDVLMMKEPGSGEVLVSRAGFLAKNEMYFNLLRIGSGAAEGAALFFCAAHRYMLVENDRRDS

SEQ ID NO: 297693 - protein, 1032 aa, Zea mays
  Clone ID: MRT4577_34570C.1.pep
MGSLQQPLRPGTVLRFGTLEFMSFDGSYDMILLPPPRDNDNGGRQPARRRRNRRHLPRVVEEQHSSSPRSLPRQRRRRRGHQGQAGGHASLAVEQIDAPDAPTEGTPDVDLAFNTKASAVPPRHADPEQEDDAGALAESLQDVALVPEMTVQPVPDVTTSLLVDQKVPANSHLASFRLGLNPPNDLVLAGALIEADATPLGSRIRSPWDRLTDVSTYGPSGSEEDDDPSVCRDFSGLGNPSAMRDFMTACDYCLSDGSDGSRSLGDESCGPSRECFHIELGDPSEGNRLGMPEDGDLPRPVWADQPLVGEIRHLPQGLQHRVANDVRVRPPPASSGVGQNLAAAAMLLRAMPEPSTTEGRRIQGELKDLLEGAAARRAESTASRRQGYPSEPHAATSRFMREASVYTGRTRNTAPAAPGHLGTEHHRRDRRAHLDERVRRGYHPRRGGRYDSGEDRSPSPEPPSPQAFSRAIRRAPFPTRFRPPTTITKYSGETRPELWLADYRLACQLGGTDDDNLIIRNLPLFLSDTARAWLEHLPPGQISNWDDLVQAFAGNFQGTYVRPGNSWDLRSCRQQPGESLRDYIRRFSKQRTELPNITDSDVIGAFLAGTTCRDLVSKLGRKTPTRASELMDIATKFASGQEAFEAIFRKDKQPQGRPSEEAPEASAPRGAKKKGKRKSQSKRDAADADLVAAAEHKNPRKPPGGANLFDQMLKEPCPYHQGPVKHTLEEYIMLRRHFHRAGPPAEGGRARDDDKNEDHQAGEFPEVRDCFMIYGGYAANASARHRKQERREVCSVKVAAPVYLDWSDKPITFDQADHPDHVPSPGKYPLVVDPVVGNVRLTKVLMDGGSCLNIIYAETLKLLRIDLSSVRAGAAPFHGIIPGKRVQPLGRLDLPVCFGTPSNFRRETLTFEVVGFRGTYHAVLGRPCYAKFMAVPNYTYLKLKMPGPNGVITVGPTYKHAFECDVECVEYAEALAESEALIADLENLSKEVPDMKRHAGNFEPAETVKAVPLDPSGDTTKQVRIGSGLDPK

SEQ ID NO: 297694 - protein, 394 aa, Zea mays
  unsure (1)..(394): unsure at all Xaa locations
  Clone ID: MRT4577_34571C.1.pep
MANRSVAMGVALAFVAMTALCCAPGAAELPRLDHPARSDGSLKLLVVGDWGRKGTHNQSRVADQMGRVGEKLDIDFVISTGDNFYKNGLKGVRDQAFEESFMDIYTAQSLQKPWYSVLGNHDYRGNALAQLSPVLRKIDDRFICMRSFIVNAELVDFFFVDTTPFQLEYWTHPGKHRYDWRGVAPRGKYIANLLKDLDVAMKKSTARWKIVVGHHTMRSVSEHGDTEELLELLLPVLKXHFISYLNRFHLSERSIIITLFLWKKIHTVQDNGVDFYINGHDHCLEHISSRXVQAPYDTEMNSXTFSPFPSYEPCEISSSVXPLQYFTSGGGSKAWRGVFHPNKDKLRFFYDGQGFMSLQLHQDQAHFIFYDVFGNILYRWSSRHPQSSMYLDEE

SEQ ID NO: 297695 - protein, 1045 aa, Zea mays
  unsure (1)..(1045): unsure at all Xaa locations
  Clone ID: MRT4577_34572C.1.pep
MGSLQQPLQPGTVLRFGSLEFMSFDGSYDMILLPPPCDNDNGGRQPARRRRNRRRLPRVVGEQHSSSPCPLPHRRRRRRGNQGQAGGSASSAVERVDSAGTPTRGAPDIDLAFETKTSTVSPRHANPEKADDASALAESLLNVTLVPETTAQSVPDVTSSPLVDQKVPTDSHPTSFGFSLNPPSDLALADALVGASPNPLGFRMRSPWDRLTDVSTYGPSGSEEDDEPSICWDFSGLGNPSAMRDFMTACDYCLSGCSDGSRSFDDEDCGPSRECFHVDLGGPSEDNLLGMPEDGEPPRPVPRVDIPRELAVVPVPAGGHGPQLEQIRGMQARLDEGAGALEPIRRDVGQAWANQPPAREICHLPQGLQHRVADDVRVRPPPASSGVGQNLAAAAMLLRAMPEPSTTEGRRIQGELKNLQEGAAVRRAESSASRRQGYPSEPHAATSRFMQEASVYTGRTRNTAPAAPGRLDNEHHHRDRRAHLDERVCRGYHPRRGGRYDSGEDRSPSPEPPGPQAFSRAIRRAPFPTRFRPPTTIAKYSGEKRPELWLVDYRLACQLGGTDDDNLIIRNLPLFLSDTARAWLEHLPPGQISNWDDLVQAFAGNFQGTYVRPGNFWDLRSCRQQPGESLRDYIQRFSKQRTELPNITDSDVIGAFLAGTTCRDLVSKLGRKTPTRASELMDIATKFASGQEAVEAIFRNDKQPQGRPSEDAPEASTQRGAKKKGRKKSQAKRDAADADLVAAAKYKNPRKPPGGANLFDKMLKEPCPYHQGAVKHTLEECVMLRRHFHRAVPPAEGGRARDDDKKEDHQAGEFPEVRDCFMIYGGHAANPSSRHRKQERREVCSVKVAAPVYLDWSDRPITFDQADHPDHVPSPGKYPLVVDPVIGDVRLTKVLMDGGSSLNIIYAETLGLLRVDLSSVRAGAAPFHGIIPGKRVQPLGRLDLPVCFGTPSNFRRETLTFEVVRFRGTYHAVLGRPCYAKFMAVPNYTYLKLKVPGPNGVITVGPTYKHAFECDVECVEYXEALAESEALIANLESLSKEVPDL

SEQ ID NO: 297696 - protein, 655 aa, Zea mays
  Clone ID: MRT4577_34573C.1.pep
DYHSASRRQGYPSKHRAATSRFMREASVHTGRTRNTAPAAPGRLGNEHHHRDRRAHLDKRVRRGYHPRCGRRYDSGEDRSPSPEPPGPQAFSRAIRQASFPTRFRTPTTITKYSGETRPELWLVDYRLSCQLGGTDDDNLIICNLPLFLSDTTRAWLEHLPPGQISNWDDQVQAFAGNFQGTYVCPGNSWDLRSCRQQPGESLRDYIRRFSKQRTELPNITDSDVIGAFLAGTTCRDLVSKLGRKTPTRASELMDIATKFASGQEAVEAIFQKDKQPQGRPPEDAPEASTQRGAKKKGKKKSPAKRDAADADLVATAEYKNPRKPPGGANLFDKMLKEPCPYHQGPVKHTLEECAMLRRHFHRAGPPAEGGRAHDDDKKEDHQAGEFPEVRDCFMIYGGQAANASARHRKQERREVCSVKVAAPVYLDWSDKFITFDQADHPDHVPSPGKYPLVVDPIIGDVRLTKVLMDGGSSLNIIYAETLGLLRVDLSSVRAGVAPFHGIIPGKRVQPLGQLDLPVCFGTPSNFRRETLTFEVVGFRGTYHAVLGRPCYAKFMAVPNYTYLKLKMSGPNGVITVGPTYRHAFECDVECVEYAEALAESEALIADLESLSKEVPDVKRHAGNFEPAETVKSVPLDPGSDASKQIRIGSELDPK

SEQ ID NO: 297697 - protein, 726 aa, Zea mays
  unsure (1)..(726): unsure at all Xaa locations
  Clone ID: MRT4577_34574C.1.pep
PLVSLPAVGSRVVYFPQGHSEQVAASTNKEIESQIPNYPNLPPQLICQLHNVTMHADAETDEVYAQMTLQPLNPQELKDPYLPAELGSANKQPTNYFCKTLTASDTSTHGGFSVPRRAAEKVFPPLDFTQQPPCQELMAKDLHGNEWKFRHIFRGQPKRHLLTTGWSVFVSAKRLVAGDSVLFIWNDNNQLLLGIRRANRPQTVMPSSVLSSDSMHIGLLAAAAHAASTNSRFTIFYNPRASPSEFVIPLVKYVKAVYHTRISVGMRFRMLFETEESSVRRYMGTITGICDLDSVRWPNSHWRSVKVGWDESTAGERQPRVSLWEIEPLTTFPMYPSPFPLRLKRPWPTGLPSLHGGKDDDLANSLMWLRDTANPGFQSLNFGGLGMSPWMQPRLDATLLGLQPDMYQAMATAAFQDATKQASPTMLQFQQPQNIAGRASPLLSSQILQQAHHQFQQQPYLQNISESTIQAQGQSEFLKQQIQRSQSFNEQKPQMQHQQESQQQQQPQCLPVPPNISKCNQPDYDQXQSISNALSPFSQRSPSFSVFTYGDXTILPFSDFPLDHTLNSSGCLDDSGYVPPCSDNSDKVNRPPATFVKVYKSGTYGRSLDITRFSSYHELRRELGRLFGLEGQLEDPLRSGWQLVFVDREEDVLLVGDDPWQEFVSTVSCIKILSPQEVQQMGKQGLELLSSAPARRLGSSCDDYVSRQESRSLSTGIASVGSVELG

SEQ ID NO: 297698 - protein, 814 aa, Zea mays
  Clone ID: MRT4577_34575C.1.pep
MPFGLRNAGATYQRCMNHVFGEHIGRTVEAYVDDIVVKTRKASDLLSDLEVTFRCLKAKGVKLNPEKCVFGVPRGMLLGFIVSERGIEANPEKIAAITSMGPIKDLKGVQRVMGCLAALSRFISRLGERGLPLYRLLRKAECFTWTPEAEEALGNLKALLTKAPILVPPAAGEALLVYVAATTQVVSAAIVVERQEEGHALPVQRPVYFVSEVLSETKIRYPQVQKLLYAVILTRRKLRHYFESHPLPTAPIQPELWTIFFDGSLMKTGAGAGLLFVSPLGKHLHYVLRLHFPASNNVAEYEALVNGLRIAIELGVRRLDARGDSQLVIDQVMKNSHCRDPKMEAYCDEVRRLEDKFYGLELNHIARRYNETADELAKIASGRTTVPPDVFSWDLHQPSVKIDDTPEPEAPSVQPEVPSAQPEAPSARPEAPSVQPKVPSAFEGEALRIEEERSGATPDRNWQTPYLQYLRQGELPLDRAEARWVARRAKSFVLLGDEKELYHRSPSGILQRCISVAEGQELLREIHSGACGHHVAPRALVGNAFRQGFYWPTAVAVATRIVRTCEGCQFYAKQTHLPAQALQTIPTTWPFAVWGLDLVGPLQKAPGGYTHLLVATDKFSKWIEAVAFFTNIIHRFGVPNSIITDNGTQFIGRKFLEFCEDHHIRVDWAAVAHPMSNGQVERANGMILQGLKPRIYDDLNKFGKRWMKELPSVVWSLRTTPSRAMGFTPFFLVYGAEAVLPTDLEYGSPRTRAYDDQSNQASREDSLDQLEEARDKALLHSARYQQSLRRYHARGVRPRDLQEGDLVLRLRQDA

SEQ ID NO: 297699 - protein, 411 aa, Zea mays
  unsure (1)..(411): unsure at all Xaa locations
  Clone ID: MRT4577_34576C.1.pep
AEAPDATPKNHXQQQQPQCLPVPQHQQMQQQNMTNYQSISNALSPFSQLSPVSQSSPMALQTILPFSQAQSFTDTNVGSLSPSNGNTMQNTLRPFSSEAVSHLSMPRPTAIPVADPWSSKRVAVESLLPSRPQVSSQMEQLDPAPASIPHSSALAPLPGRGCLVDQDVNSDPQNHLLFGVSIDSQSLLMQGGIPGLQNGNDSAAIPYSTSNFLSPSQNDFPLDHTLNSSGCLDDSGYVPPCSDNSDKVNRPPATFVKVYKSGTYGRSLDITRFSSYHELRRELGRLFGLEGQLEDPLRSGWQLVFVDREEDVLLVGDDPWXKHCMRRCFFFFSAFFLTLRWQPNPXEFVSTVSCIKILSPQEVQQMGKQGLELLSSAPARRLGSSCDDYVSRQESRSLSTGIASVGSVELG

SEQ ID NO: 297700 - protein, 899 aa, Zea mays
  Clone ID: MRT4577_34577C.1.pep
MGSLQQPFQPGTVLRFGSLEFMSLDGGYDMVLLPPPRDSDNGGRQPARRRRNQQRLSHVAEEQHPGLSRRLPRRRRRRRGNQGQAGGDTSSAIERVDGTGAPTGDTSGVDLASETKTSAVSPQHANSKRTDDASTLAKDLLGVTLVPGTTVQSAPDVTLSPPIDQEVPTDSHLVPFGFSLDPPSDFASVEAFIEACPNPPGYHMRSPWDRLTVVSTYGPSGSEEDDEPDLCWDFSGLGNPSAMRDFMTACDYCLSDCSNAILLCAMPEPSTTEGRRIQRELKNLLEDAAVRRAESSASRRQGYPSEHRAATSRFMREASVHTGRTRNTAPAAPGRLGNEHHHRNRRTHLDERVHRGYHPRRGGRYDSGEDQSPSPEPPGPQAFSRAIRRAPFPTRFRTPTTVTKYSGETRSELWLVDYRLACQLSGTDNDNLIIRNLPLFLSDTARAWLEHLPPGQISNWDDLVQAFADNFQGTYCTELPNVTDLDVIGAFLAGTTCRDLVSKLGRKTPTRASELMDIATKFAFGQEAVEAIFQKDKQPQGRRPEDVPEASTQRDTKKKGKKKSQAKHDAADADLVAAAEYKNPQKPTEGANLFDKMLKESCPYHQGPVKHTLEECVMLRRHFHKAGPPAEGGRAHNNDKKEDHKAEEFPEVHDCFMIYGGPVANASARHRKQERREVYSVKVAAPVYLDWSDKPITFDQGDHPDRVPSLGKYPLVVDPVIGNVRLTKVLMDGGSSLNIIYAETLGLLRIDLSLPLGQLDLPVCFGTPSNFRRETLTFEVVGFRGTYHTVLGRPCYAKFMAVPNYTYLKLKMPGPNGVITVGPTYRHTYECDVECMEYAEALAESEALIADLESLSKEAPDVKRHAGNFEPTETVKSVPLDPSNDASKQIRIGSELDPK

SEQ ID NO: 297701 - protein, 67 aa, Zea mays
  Clone ID: MRT4577_34578C.1.pep
LMCSRVGVTSHIFSFSSFEYTTFRGDLIILISYLILGYFHKLLTSSFVKVLPQKILSLYVPYNLIHR

SEQ ID NO: 297702 - protein, 94 aa, Zea mays
  Clone ID: MRT4577_34579C.1.pep
MRPPQSVVMKRNPRVTSSRRKCRKAHFTGPSSVRRVLMCVGLSTELRHKNNVRNMPILFYDEVQVARGTYKGREGKVVQVHRRWCVIHGERLTR

SEQ ID NO: 297703 - protein, 63 aa, Zea mays
  Clone ID: MRT4577_3457C.1.pep
GGRKQRKKEWEEGRDRRKEQLQGAAASPAGLGREDGRMSGELRTAFLELGCVRLGPQLSLRNP

SEQ ID NO: 297704 - protein, 1056 aa, Zea mays
  unsure (1)..(1056): unsure at all Xaa locations
  Clone ID: MRT4577_34580C.1.pep
MGSLRQPLQPGTVLRFGSLEFMSLDGSYDMILLPPPRDNDNGGRQPARRRWNRRHLPRVVEERHSSSPRPLPRQRRRRRGNQGQAGGRASSAVERIDAPSAPTGGASGVDLAFETKASAVPPRHTNPEQVDDASTLAEGLQDVALVPKTTAQSVPDMTMSLLVDQKVLTDSHPTSFRLGLNPPSDLALAGALVEASATPLGFRMRSPWDRLTDVSTYGPYGSEEDDDPSICWDFSGFGNPSAMRDFMTACDYCLSDCSDGSRSLDDEDCGPSRECFHVELGDPSEGNHPGMPEDGDLPRPVPRADIPRELAVVPVPAGGHDPQLEQVREALARLDEGAGALESIRRDVGQVWAGQPPAGEIRHLPQGFQHRVANDVRVRPPPASSGVGQNLAAAAMLLRAMPEPSTTEGRRIQGELKNLLEGAAARRAESSASRRQGYPSEPHAATSRFMREASVYTGRTRNTAPAALGHLGNEHHRRDRRAHLDERVRRGYHPRRGGRYDSGEDRSPSPEPPGPQAFSRAIRRAPFPARFRPPTTITKYSGETRPELWLADYRLACQLGGTDDDNLIIRNLPLFLSDTARAWLEHLPPGQISNWDDLVQAFAGNFQGTYVRPGNSWDLRSYRQQPGESLRDYIRRFSKQRTELPNITDSDVIGAFLAGTTCRDLAVEAIFRKDKQPQGRPSEEAPEASTPRGAKKKGKKKSQAKRDAADADLVAAAEYKNPRKPPGGANLFDKMLKEPCPYHQGPVKHTLEECVMLRRHFHKAGPPAEGGRARDDDKKEDHQAXGEFPEVRDCFMIYGGHAANASARHRKQERREICSVKVAAPVYLDWSDKPITFDQADHPDHVSSPGKYPLVVDPIVGDVRLTKVLMDGGSCLNIIYAETLRLLRVDLSSVRAGAAPFHGIIPGKRVQPLGRLDLPVCFGTPSNFRRETLTFEVVGFRGTYHAVLGRPCYAKFMAVPNYTYLKLKMPGPNGVITVGPTYKHAFECDVECVEYAEALAESEALIADLENLSKEVPDVKRHAGNFEPAETVKAVPLDPSGDISKQIRIGSGLDPK

SEQ ID NO: 297705 - protein, 121 aa, Zea mays
  Clone ID: MRT4577_34581C.1.pep
LYLFSLSFSSPPSHPSGTFILKFRSAYHHFYSHTFSFPSTTYPHHSHTIHIIFFIFTNNPTSQLPYFPSFITNQHLLSLSYSLPILIINLPLLSHLFLFITHLPPSSFYPSLFSPFTSSLL

SEQ ID NO: 297706 - protein, 661 aa, Zea mays
  unsure (1)..(661): unsure at all Xaa locations
  Clone ID: MRT4577_34582C.1.pep
MGPIKDLKGVQRVMGCLAALSRFISRLGERGLPLYRLLRKAECFTWTPEAEEALGNLKALLTNAPILVPPAAGEALLIYVAATTQVVSAAIVVERREEGHTLPIQRPVYFISEVLSETKTRYPQVQKLLYAVILTRRKLRHYFESHPVNVVSSFPLGEIIQCREASGRIAKWAVEIMGETISFAPRKAIKSQVLADFVAEWVDTQLPTAPIQPELWTMFFDGSLMKTGAGAGLLFISPLGKHLRYVLRLHFPASNNVAEYEALVNGLRIAIELGVRRLDARGDSQLVIDQVMKNSHCRDPKMEAYCDEVRRLEDKFYGLELNRIARRYNETADELAKIASGRTTVPPDVFSRDMHQPSVKIDDTPKPEAPSAQPEVPSAQSEASSAQPEKAPXLRAPAGRHRQILQVDRGXRPLNSIRSEQAVAFFTNIIHRXRGPELHRHRQRHPVHRQKVPGXFCEDHHIRVDWAAVAHPMTNGQVERANDMILQGLKPRIYNDLNKFGKRWMKELPSVVWSLRTTPSRATGFTPFFLVYGAEAILPTDLEYGSPRTRAYANQSNQANREDSLDLLEEARDMALLHSARYQQSLRRYHARGVWSRDLQAGDLVLRLRQDARGRHKLTPPWEGPFVIAKVLKPGTYKLANSQGEVYNNAWNIQQLRLFYP

SEQ ID NO: 297707 - protein, 914 aa, Zea mays
  unsure (1)..(914): unsure at all Xaa locations
  Clone ID: MRT4577_34583C.1.pep
PPTVSTPDLGAGQHEGRGFPLLPVSSPPSCSVSRRPIWAGARGDNSLVGPGTPRGRNADSWRARRRRGNHGKXGGGTSLAVEQVDDAGTPAGDASGVDLASETKTSVVSLQRADSKQTDNTSTLAKDLLGVALVPETTVQSAPDATSSPPVDQEVPTDSHLMRFGFSLDPPSDSASVEAFIEACTNPPGYHMRSPWDRLTAVSTYGPSGFEEDDEPDFCWDFSGLGNPSAMRDFMTACDYCLSDCSDGSRSFGDEDCGPSRECFHVDLGXPGEGNHLAVVPVPAGGQDAQLEQIREMQARLDEGAGTLEQFRRNIGQEWADQAPAGEARHLPQGIQHHIADDVRARPPLASSGVGQNLAAAAILLRAMPEPSTTEGRRIQGELKNLLEDVAVRRAESSASRRQGYPXSEHRVATSRFMREASVHTGHTRNTAPAAPGRLGNEHHHRNHRAYLDKRLGGTDDDNLIIRNLPLFLSDTARAWLEHLPPGQISNWDDLVQAFTGNFQGTYVRPGNSWDLRSCRQQPGESLRDYIRQFSKQRTELPNVTDSDVIGAFLAGTTCHDLVSKLGCKTPTRASELMDIATKFASGQEVVEAIFRKDKQPQGRQPEDVPEASTQRGAKKKGKKKSQPCGRAHNNDKKEDHKAEEFPEVHDCFMIYGGPVTNASTRHRKQERREVCSVKVAAPVYLDWSDKPITFDQGDHPDRVPSPGKYPLVVDPVIGNVRLTKVLMDGGSNLNIIYIETLGLLQIDLSSIRAGATPFHGIIPGKRVQPLGQLDLSVCFGTPSNFRRETLTFEVVGFRGTYHAVLGRPCYAKFMVVPNYTYLKLKMPGPNGVITVGPTYRHAYECDVECMEYAEALAESKALIADLESLSKEAPDVKRHAGNFEPAETVKSVPLGPSNDASKQIWISSELDPK

SEQ ID NO: 297708 - protein, 145 aa, Zea mays
  unsure (1)..(145): unsure at all Xaa locations
  Clone ID: MRT4577_34584C.1.pep
MHPLILLMHSGGDGNDLYLKAXSHFLSLVQRFDKXYDDADEDWNRLSVFKANVRRVRRDELMDAWAKKVVARVCELKELELRRNXVAHCKTRGALHQELIKAKLYEYVVNKDGILDYYHWNFNFVCPTEITEFTGRYEEFDKVNS

SEQ ID NO: 297709 - protein, 50 aa, Zea mays
  Clone ID: MRT4577_34585C.1.pep
SFGTPSLTRCSPISRRLLTLGGRRPPGRWSPFSTRDSTLSRPIYYRPSST

SEQ ID NO: 297710 - protein, 122 aa, Zea mays
  Clone ID: MRT4577_34586C.1.pep
GRNLFPIVGVSRAISTHHVHLSPPSVHVLGIPPYVHALPPWSVNLPPPPAGSSLSSSTTRLPASSKALAFLVCINLVGVRTASLEWYTRVDSPQFTDQRTSATNPHRRTSDRGFWCSAGRSC

SEQ ID NO: 297711 - protein, 62 aa, Zea mays
  Clone ID: MRT4577_34587C.1.pep
PRGLQYLEVIETVTQQAKDANIPDLEVIRILCAWAHVGCPRCCGQALPDCRGHPSAGTAPPW

SEQ ID NO: 297712 - protein, 155 aa, Zea mays
  unsure (1)..(155): unsure at all Xaa locations
  Clone ID: MRT4577_34588C.1.pep
MEERLQLPNEIEEDKAQRARVKRHFRKRAAKAIKDAMHNARVGGGNYDYKKIKGQKTSKSXGANEIYLTEEPHPESGADXLANDMAARRRVANRCAEPGGIAAPHKHQANHGTTGPGHXRAGAGGHAGGGGGVGGVRRGLGGGAGGGGGGGAGGG

SEQ ID NO: 297713 - protein, 190 aa, Zea mays
  unsure (1)..(190): unsure at all Xaa locations
  Clone ID: MRT4577_34589C.1.pep
MADHHDGASPRELVLEACRRNNTELLEETLADLNAAAKKSDKKPADYVADILNNARDGLGNGCLHIAATYGSFEVIDMLLDQEGLEIDEIDRMEQDTPLHKAVRYVXRSKKTSGPMVNXVAMLLDAGCDPRIRNKAKLKPVELVDPRNTELKSMLQKGEFAIQAGGDIVEDDDDGHAGSGSESRCSNNIT

SEQ ID NO: 297714 - protein, 98 aa, Zea mays
  unsure (1)..(98): unsure at all Xaa locations
  Clone ID: MRT4577_3458C.1.pep
GNIHVFLPAVLARKRKMHLGCRYMEWGVRPKQLPSRLRQKVRKYYRERSAATTGYYEMEMNTDLPQRLMRHINRYLXHQLVKQVPLLHGMDXLILHNI

SEQ ID NO: 297715 - protein, 164 aa, Zea mays
  Clone ID: MRT4577_34590C.1.pep
MPAGHGLRSRTRDLFARPFRKKGYIPLTTYLRTYKIGDYVDVKVNGAVHKGMPHKFYHGRTGSVWNVTKRAIGVEINKQVNGRIIRKRIHVRVEHVQPSRCTEEFRLRKVKNDQLKADAKERGEVISTKRQPLGPKPGFMVEGTTIETVTPIPYDVVNDLKGGY

SEQ ID NO: 297716 - protein, 90 aa, Zea mays
  unsure (1)..(90): unsure at all Xaa locations
  Clone ID: MRT4577_34591C.1.pep
MEHAFAFLARALTTPLPAPAVLPRRRPARVAVADAAPERXPPGAVAFTTNYVVPVDAALAGITRPLVEILRDLHKRVPDAILRVFLPARL

SEQ ID NO: 297717 - protein, 164 aa, Zea mays
  Clone ID: MRT4577_34592C.1.pep
MPAGHGLRSRTRDLFARPFRKKGYIPLTTYLRTYKIGDYVDVKVNGAVHKGMPHKFYHGRTGSVWNVTKRAIGVEINKQVNGRIIRKRIHVRVEHVQPSRCTEEFRLRKAKNDQLKADAKLRGEVISTKRQPVGPKPGFMVEGATLETVTPIPYDVVNDLKGGY

SEQ ID NO: 297718 - protein, 43 aa, Zea mays
  Clone ID: MRT4577_34593C.1.pep
TSIQTPLPFASNLASQGLTARSGPRSQHASIPASLPFARRLIL

SEQ ID NO: 297719 - protein, 44 aa, Zea mays
  Clone ID: MRT4577_34594C.1.pep
YKDREISSFFLELCNCYSALALLYSLMQTTCHLGETLVYNFYKI

SEQ ID NO: 297720 - protein, 164 aa, Zea mays
  unsure (1)..(164): unsure at all Xaa locations
  Clone ID: MRT4577_34595C.1.pep
MPAGHGLRSRTRDXFARPFRKKGYIPLTTYLRTYKIGDYVDVKVNGAVHKGMPHKFYHGRTGSVWNVTKRAIGVEINKQVNGRIIRKRIHVRVEHVQPSRCTEEFRLRKAKNDQLKADAKARGEVISTKRQPVGPKPGFMVEGATLETVTPIPYDVVNDLKGGY

SEQ ID NO: 297721 - protein, 164 aa, Zea mays
  Clone ID: MRT4577_34596C.1.pep
MPAGHGLRSRTRDLFARPFRKKGYIPLTTYLRTYKIGDYVDVKVNGAVHKGMPHKFYHGRTGSVWNVTKRAIGVEINKQVNGRIIRKRIHVRVEHVQPSRCTEEFRLRKAKNDQLKADAKARGEVISTKRQPVGPKPGFMVEGATLETVTPIPYDVVNDLKGGY

SEQ ID NO: 297722 - protein, 41 aa, Zea mays
  Clone ID: MRT4577_34597C.1.pep
VHTASAGVPLNDHATWTTANRNNGSQRVMITPVVWTRTNNG

SEQ ID NO: 297723 - protein, 164 aa, Zea mays; identical to SEQ ID NO: 297721
  Clone ID: MRT4577_34598C.1.pep

SEQ ID NO: 297724 - protein, 66 aa, Zea mays
  unsure (1)..(66): unsure at all Xaa locations
  Clone ID: MRT4577_34599C.1.pep
STPPVYFLGNRPYRGPAXFHKASYQGRDLSLLPPLQDSSVQSGKSPCFLSFLSGPRRPSPAVTALR

SEQ ID NO: 297725 - protein, 84 aa, Zea mays
  unsure (1)..(84): unsure at all Xaa locations
  Clone ID: MRT4577_3459C.1.pep
WWSLNFLSYLQQQDVVPFSQLAGVRPTAFFAQTQLLLFSQFGAPDVGSLLLLQQWGPFCHLVLAKPAALSXLPIVGGALVLICV

SEQ ID NO: 297726 - protein, 95 aa, Zea mays
  unsure (1)..(95): unsure at all Xaa locations
  Clone ID: MRT4577_345C.1.pep
QLSSPFGCSRAPSAYRRRKRPVDKLIKALTMSCPFSVAARCQSETISMLVSEMAVADTAFALLAIVVVHRLAITGVAIRCWKGFTGAXRVGXRVG

SEQ ID NO: 297727 - protein, 50 aa, Zea mays
  Clone ID: MRT4577_34600C.1.pep
IKFGHRKARSGVFLTGSQLRYTEFYKQNVGSEREMTYHFTTPLGGFCLLF

SEQ ID NO: 297728 - protein, 62 aa, Zea mays
  Clone ID: MRT4577_34601C.1.pep
LLGGERGPRWEPAPPDGQVASRRGPPQQRGPGPAGPLLGRPRSMLAAAGPAGVGGVCVCPGG

SEQ ID NO: 297729 - protein, 105 aa, Zea mays
  Clone ID: MRT4577_34602C.1.pep
RVELPRHQVARCMFILGDRFSLRDWTPEVDVRYIDIVSIVALSRTLPVVCASGDVQIVVQACRGEGSGHQRAQAQQQQGQGTRSRRHDRCNQTSRETDTYSTLCT

SEQ ID NO: 297730 - protein, 71 aa, Zea mays
  unsure (1)..(71): unsure at all Xaa locations
  Clone ID: MRT4577_34603C.1.pep
XPFFFFFFFFLLTVDATKAEENNLCFFRLNHKVTAAGNNTLFTSAGHNKNKSTNSFLANLIPLYFPKGEKR

SEQ ID NO: 297731 - protein, 48 aa, Zea mays
  Clone ID: MRT4577_34604C.1.pep
IIPVLIRNRTSLAVENPFIVNLLLLVLYSHMKFPSPSGLCFIQPTVIK

SEQ ID NO: 297732 - protein, 75 aa, Zea mays
  Clone ID: MRT4577_34605C.1.pep
ENGPRVIRSDPPDKCSNTWDQADRSGGQGKGPPLINLCMAIRSSLLCCIVFGWSFLSHLQMYFLVLVKFIFSFLF

SEQ ID NO: 297733 - protein, 117 aa, Zea mays
  unsure (1)..(117): unsure at all Xaa locations
  Clone ID: MRT4577_34606C.1.pep
DDAAAAAWRSRSRSRSQHLTVVKAAGTVGYMDPEYYGLHHLTVKSDVYGFGVVMLESLTGRRAIFKSGEGGSPVSVVDYAVPSIAGGELGKVLDPRAXSPRRTRXDVVELVAYTVVH

SEQ ID NO: 297734 - protein, 597 aa, Zea mays
  unsure (1)..(597): unsure at all Xaa locations
  Clone ID: MRT4577_34607C.1.pep
MPEPSTTEGRRIQGELKNLLEGAVVRWAESSASRRQGYPSEPHAATSRFMREASVYTRRTRNTVAAAPGHLGNEHHHRDGRAHLDERVRRGGTNDDNLIIRNLPLFLSDTARAWLEHLPPGQISNWDDXPSLRRQFPGHPGESLRDYIRRFSXKQRTELPNITDSDVIGAFLAGTTCRDLVSKLGRKTPTRASELMDIATKFASGQEAVEAIFRKDKQPQGRPSEDAPEASTPRGAKKKGKKKSQAKRDAADADLVAAAEYKNPRKPPGGANLFDKMLKEPCPYHQGPIKHTLEECVMLRRHFHRAGPPAKGGRARDDDKKEDHQAGEFPEVRDCFMIYGGHAANASARHRKQERGEVCSVKVAAPVYLDWSDKPITFDQADHPDHVPSPGKYPLVVDPVVGDVRLTKVLMDRGSCLNIIYAETLRLLRVDLSSIRAGAAPFHGIIPGKRVQPLGRLDLPVCFRTPSNFRRETLTFEVVGFRGTYHAVLGRPCYAKFMAVPNYTYLKLKMPGPNGVITVGPTYKHAFECDVECVEYAEALTESEALIADLESLSKEVPDVKRHAGNFEPVETVKAVPLDPSGDASKQIRIGSGLDPK

SEQ ID NO: 297735 - protein, 1032 aa, Zea mays
  Clone ID: MRT4577_34608C.1.pep
MGSLQQPLQPGTVLRFGSLEFMSLDGSYDMILLPPPRDNDNGGRQPARRRRNRRHLPRVVEEQHSSSPHPLPRQRRRRRGNQGQAGGRASSAVERNNVPSAPTVGASGVDLAFETKASAVPPRHANPEQVDDASALAEGLQDVALVPKTTAQSVPDVTMSLLVDQKVLTDSHPTSFRLGLNPPSDLALAGALVEASATPLGFRMRSPWDRLTDVSTYGPSGSEEDDDPSICWDFSGFGNPSAMRDFMTACDYCLSDCSDGSRSLDDEDCGPSRECFHVELGDPSEGNHLGMPEDGDLPRPVPRADIPRELAVVPVPAGGHDPQLEQVCGAQARLDEGTGALESIRRDVGQVLTGQPPAGEIHHLPQGFQHRVANDVRVRPPPASSGVGQNLAAAAMLLRVMPEPSTTEGLRIQGELKNLLEGAAARRAESSASRRQGYPSEPHAATSRFMREASVYTGRTRNTAPVAPGHLSNEHHRRDRRAHLDERVRRGYHPRHGGRYDSGEDQSPSPEPPDYRLACQLGGTDDDNLIIRNLPLFLSDTAHAWLEHLPPGHISNWDDLVQAFACNFQGTCRQQPGESLRDYIQRFSKQRTELPNITDSDVIGAFLAGTTCRDLVSKLGRKTPTRASELMDIATKFASGQEAVEAIFRKDKQPQGRPSEEAPEASTPRGAKKKGKKKSQAKRDAADADLVAAAEYKNPWKPPGGANLFDKMLKEPCPYHQGPVKHTLEECVMLRRHFHKAGPPAEGGRARDDDKKEDHQAGEFPEVRDCFMIYGGHAANASTRHRKQERREVCSVKVAAPVYLDWSDKPITFDQADHPDHVPSLGKYQLVVDPIVGNVRLTKVLMDGGSCLNIIYAETLRLLRVDLSSVRTGAAPFHGIIPGKRVQPPGRLDLPVCFGTPSNFRREILTFEVVGFRGTYHAVLGRPCYAKFMVVPNYTYLKLKMPGPNGVITVGPTYKHAFECDVECVEYAEALAESEALIADLENLSKEVPDVKRHAGNFEPAETVKTVPLDPSGDTSKQIRIGSGLDPK

SEQ ID NO: 297736 - protein, 890 aa, Zea mays
  Clone ID: MRT4577_34609C.1.pep
MGSLQQPLQPGRVLRFGSLEFMSLDGSYDMILLPPPCDNDNGGRQPARRRRNRRRLPRVVEEQHSSSPRPLPRRRRRRRGNQGQAGGSASSAVERVDGPSAPTGGAPGVDLAFETKASAVSPRHANLEQADDASTLAKSLLDVNLVPETTAQSVHDVTSSPPVDQKVPTDSHPTSFGFSLDPPSGFALAGALVEASPNPLGFRTRSPWDRLTDVSTYGPSGSEEDDEPSICWDFSGLGNPSAMRDFMTACDYCLSDCSDGSRSLGDEDCGPSRECFHVDLGGPSEGNHLGMPEDGDLPRPVPRVDIPRELAVVPVQAGGHDPQLEQIRGVQARLDEGAGALEPIRRDVGQAWAGQPLAGEIRHLPQGFQHRVADDVRVRPPPASSGVGQNLAAAAMLLRAMPEPSTTEGRRIQGELKNLLEGAAVRRAESSASRRQGYPSEPHATTSRFMREASVYTGRTRNTAPAAPGRLGNEHHHCDRRAHLDERRTELPNITDSDVIGVFLAGTTCRDLVSKLGRKTPTRASELMDIATKFASGQEAVEAIFRKDKQPQGRPSEDAPEASTQRGAKKKGKKKSQAKRDAADADLVAAAEYKNPRKPPGGANLFDKMLKEPCPYHQGPVKHTLEECVMLRRHFHRAGPPAEGGKARDDDKKEDHQAGEFPEVRDSFMIYGGQAANASARHRKQERREVCSVKVAAPVYLDWSDKPITFDQTDHPDHVPSLGKYPLVVDPIIGDVRLTKVLMDGGSNLNIIYAETLGLLRVDLETLTFEVVGFRGTYHAILGRPCYAKFMAVPNYTYLKLKMPGPNGVITVGPTYKHAFECDVECVEYAEALAESEALIADLESLSKEVPDVKRHAGNFEPVETVKSVPLDPSSDASKQVRIGSKLGPK

SEQ ID NO: 297737 - protein, 62 aa, Zea mays
  Clone ID: MRT4577_3460C.1.pep
HQLRKFEGFSYKKRVETRSNHTVNPYSTLPFQMLLYKPDSFGAYRTICLVTGRVVIFCHEKR

SEQ ID NO: 297738 - protein, 63 aa, Zea mays
  Clone ID: MRT4577_34610C.1.pep
AFFGPPRGAPLFVLVGDSPPTLGYTGGALAMGAGVWALARVTVPLGVSTSAAGLLSPLPGGSP

SEQ ID NO: 297739 - protein, 1454 aa, Zea mays
  unsure (1)..(1454): unsure at all Xaa locations
  Clone ID: MRT4577_34611C.1.pep
MTVHSAPDATSPSIDQNVPSVFHPMPFRFSFDPPSDPASVSAFIKAYPNLPGYHMWSSWDRLTTVSTYGPPGSEEEDDPDSGWDFSRLRDPSAMRDFMTACDYCLSDCSDDGHNLDDEGCGPSRKCFHVDLGDHDEGNHLGMPEDDDPPGPTSRVDIPRELAVVPVPTGGQDTQLEQIXNEQHHHDSRAHLDERXCXGYQPRRGGCYDSEEDRSPSPEPPGPRAFSRAIRWAPFPARFRAPTTVTKYLGETRPELWLADYRLACQLGGTDDDNLIICNLPLFLSDAARAWLEHLPPAXISNWDDLVKAFAGNFQGTYVRPGNSWDLRSCRQLPGETLQEYIRRFSKQRTELPNITDSDVIGAFLAGTTCRDLEAVKAIFRKDKASREAEGRRPQGVRPAWHEEEGQEXSQAKRDTADADLVAAAEDRNPRKPPGGANLFDKMLKESCPYHQGPVKHTLEECVMLRRYFHKAGSPAGDGKGQDNHKREGDKAEEFPEVHDCFMIYDGQVANASARHRKQERREVCLVKVAAPVYLDWSDKPITFDQGDHPNCVSSPGRYPLVVDPVIGNARLTKVLMDGGSSLNIIYAETLGLLEIDLSTIRIGAAPFHGIVPRKRVLPLGQLDLPVCFETPSNFRRETLTFEVVGFRGTYHAVLGRPCYAKFMAVPNYTYLKLKMPGPNGVITVGSTYRHAYECDVECMEYAEALAESKALIADLECLSKEVPDAKRHAGNFEPDEAEAVLIDFLHANAEIFAWSPSDMPDILRDIAEHSLDIRARARPVKQHLRRFDEEKRRAIGEEVHKLMAAGFIKEVFHPEWLANPVLVKKKGYHQIKMKESDQLATSFITPFGMYCYTTMPFGLRNVGATYQRCMNHVFGEHISRTVEAYIDDIVVKTRKASDLLSDLETTFKCLGAKGVKLNPEKCVFGVPRGMLLGFIVSKRGIEANPEKIAAITDMGPIKDLKGVQRVMGCLAALSRFISRLGERGLPLYRLLRKAERFTWTPEAEEALRNLKALLTNAPILVPPDAGEALLIYIATTTQVVSAAIIVERREEGHALLVQRPVYFISEVLSETKIRYPQIQKLMYTLVTDQVMKNSHYRDRNMEAYYDEVRRLEDKFYGLELNHIARRYNETADELAKIASGRTMVPPDVFSRDIHQPSIKIDDTPEPXEASAQPEVPSTAKGEALRVEGERNGVTPNPNWQASYLXISSEESCPLTRPKLGDCRGAPSRSPYWVMKRSSTTAAPQAFSNDAYPSPKDRSCCKKYTWGLAVTMQHLEPSWGMPSDKKAPRGCSHLLVAIDKFSKWIEVRPLTSIRSEQAVAFFTNIIHHFGVLNSIITDNGTQFTGKKFPDFYEDHHIRVDWAAVAHPMTNGQVERANGMILQGLKPRIYNDLNKFGKRWMKELPSVVWSLRTTPSRATGFSPFFLVYGAEAVLPTDLEYGSSRTKAYDDRSNQTS

SEQ ID NO: 297740 - protein, 719 aa, Zea mays
  unsure (1)..(719): unsure at all Xaa locations
  Clone ID: MRT4577_34612C.1.pep
MPFGLRNAGATYQRCMNHVFGEHIGRTVEAYVDDIVVKTRKAPDLLSDLEVTFRCFKAKGVKLNPEKCVFGVPRGTLLGFIVSERGIEANPEKIAAITSMGPIKDLKGVQRVMGCLAALSRFISRLGERGLPLYRLLRKAECFAWTPEAEEALGNLKALLTKAPVLVPLADGEALLVYVAATTQVVSAAIVVERQEEGHALPVQRPVYFISEVLSETKIRYPQVQKLLYAVILTRRKLRHYFESHPVTVVSSFPLGEIIQCREASGRIAKWAVEIMGETISFAPRKAIKSQVLADFVAEWVDTQMPTAPIQPELWTMFFDESLMKTGAGAGLLFISPLGKHLRYVLRLHFPASNNVAEYEALVNGLRIAIELGVRRLDARGDSQLVIDQVMKNSHCRDPKMEAYCDEVRRLEDKFYGLELNHIARRFNETADELAKIASGRTTVPPDKXARGLHAPAGRHRQFLQVDRSPTPEQHQVXSRRWRSSPTSSIASGXPNSIITDNGTQFTGKKFLDFCEDHHIRVDWAAVAHPMTNGQVERANGMILQGLKPRIYNDLNKFGKRWMKELPSVVWSLRTTPSRATGFTPFFLIYGAEAILPTDLEYGSPRTRAYTDQSNQASREESLDQLEEARDRALLHSARYQQSLRRYHARGVRSRDLQXGDLVLRLRQDARGRHKLMPXWEGPFVIAKVLKPGTYKLANNQGEIYDNAWNIKQLRRFYP

SEQ ID NO: 297741 - protein, 1025 aa, Zea mays
  Clone ID: MRT4577_34613C.1.pep
MGSLQQPLRPGTVLRFGTLEFMSFDGSYDMILLPPPRDYDNGGRQPARRRRNRRRLPRVVEGQHSGSLRSLPRQRRRRRGRQGQVGGRASSAVERIDAPDTPTEGTPDVDLAFKTEASTVPPRHTDPEQEDDAGALAESLQDVALGPEMMVQPVPDVTTSLLVDQKEDDDPSIGWDFSGLGNPSAVRDFMTACDYCLSDCSDGSRSLGDESCGPSRECFHIELGDPSEGNHLGMPEDGDLPRPVPRADIPRELAVVPAPAGGYDPQLEQVREAQARLNEGTGALEPIRQDVGQAWVGQPLAGEIRHLPQGLQHRVANNVRIRSPPASSGVGQNLATAAMLIRAMPEPSTTEGRRIQGELKNLLEGAAARRAESTASRRQGYPSEPHAATSRFMREASVYTGRTRNTAPAAPGHLDNEHHRRDRWAHLDERVRRGYHPRRGGRYDSGEDRSPSPEPPGPQAFSRAIRRAPFPTRFRPPTTITKYSGETRPELWLADYRLACQLGGTDDDNLIIRNLPLFLSDTARAWLEHLPPGQISNWDDLVQAFAGNFQGTYVRPGNSWDLRSCRQQPGESLRDYIRRFSKQRTELPNITDSDVIGAFLAGTTCRDLVSKLGRKTPTRASELMDIATKFASGQEAVEAIFRKDKQPQGRPSEEAPEASAPRGAKKKGKKKSQSKRDAADADLVAAAEYKNPRKPPGGANLFDKMLKEPCPYHQGPVKHTLEECVMLRRHFHRAGPPAEGGRARDDDKNEDHLAGEFPEVRDCFMIYGGHVANTSARHRKQERREVCSVKVAAPVYLDWSDKPITFDQADHPDHVPSPGKYPLVVDPVVGDVRLTKVLMDGGSCLNIIYAETLKLLRVDLSSVRAGATPFHGITPGKRVQPLGRLDLPVCFGTPSNFRRETLTFEVVGFRGTYHAVLGRPCYAKFMAVPNYTYLKLKMPGPNGVITVGPTYKHAFECDVECVEYAEALAESEALIADLENLSKEVPDVKRHAGNFEPAETVKAVPLDPSGDTTKQVRIGSGLDPK

SEQ ID NO: 297742 - protein, 104 aa, Zea mays
  Clone ID: MRT4577_34614C.1.pep
LARRRRGILNEYGLHREPEPRAHGGPIPPYAQTPALVTLPVLLKRGSRRTRWTSTKSFTSSQCNRTAVASANMLAVLRWRTLLCFISSRCHPSSVGVLCDLHGC

SEQ ID NO: 297743 - protein, 111 aa, Zea mays
  unsure (1)..(111): unsure at all Xaa locations
  Clone ID: MRT4577_34615C.1.pep
PXVRPASVPFLPISFPVNLSSRAVDPFLHRGLTIAVTHAISKGARCLHAAIERPRASLTDLGVPWQRAWHRQLARHRRLLEEERVCCTEANPDDQDIQRQLTYAHEHEPCA

SEQ ID NO: 297744 - protein, 994 aa, Zea mays
  Clone ID: MRT4577_34616C.1.pep
MGSLQQPLQPGTVLRFGSLEFMSLDGSYDMILLPPPRDNDNGGRQPARRRQNRRHLPRVVEERHSSSPRPLPRQQRRRRGNQGQAGGRASSAVERIDVPSAPTGGASGVDLAFETKASAVPPRHANPEQVDDASALAEGLQDVALVPKTTAQSVPDVTMSLLVDQKVLTDSHPTSFRRGLNPPSDLALAGALVEASATPLGFRMRSSWDRLTDVSTYGPSGSEEDDDPRVCWDFSGFGNPSAMRDFMTACDYCLSDCFDGSRSLDDKDCGPSRECLHVELGNPSEGNHLGMPEDGDLPRPVPRADIPRELAVVPVPAGGHDPQLEQVRGAQARLDEGAGALESIRRDVGQVWAGQPPAGEIRHLHQGFQHRVANDVRVRPPPASSEVGQNLAAAAMLLRVMPEPSTTEGRRIQGELKNLLEGAAARWAESSASRRQGYPSEPHAATSRFMREASIYTGRTRNTAPAAPGHLGNEHHRRDRRAHLDERVRRGYHPRRGGRYDSGEDRSPSPEPPGPQAFSRAIRRAPFPARFRPPTTITKYSGETRPELWLADYRLACQLGGTDDDNLIICNLPLFLSDTARAWLEHLPPGQISNWDDLVQAFAGNFQGTYVRPGNSWDLRSCRQQPGESLRDYIRRFSKQRTELPNITDSDVIGAFLAGTTCRDLVSKLGRKTPTRASELMDIATKFASGQEAGPVKHTLEECVMLRRHFHRAGPPAESGRARDDDKREDHQAGEFPEVRDCFMIYGGHAANASARHRKQERREACSVKVAAPVYLDWSDKPITFDQADHPDHVPSPGKYPLVVDPIVGDVRLTKVLMDGGSCLNIIYAETLRLLRVDLSSVRAGAAPFHGIIPGKRVQPLGRLDLPVCFGTPSNFRREILTFECWGRPCYAKFMAVPNYTYLKLKMPGPNGVITVGPTYKHAFKCDVECVEYAEALAESEALIADLENLSKEVPDVKRHAGNFEPAETVKVVPLDPSGDTSKQIRISSGLDPK

SEQ ID NO: 297745 - protein, 709 aa, Zea mays
  Clone ID: MRT4577_34617C.1.pep
MPFGLRNAGATYQQCMNHVFGEHIGRTVEAYVDDIVVKTRKASDLLSDLEVTFRCLKAKGVKLNPEKCVFGVPRGMLLGFIVSERGIEANPEKIAAITSMGPIKDLKGVQRVMGCLAALSRFLSRLGERGLPLYRLLRKAECFAWTPEAEEALGNLKALLTKAPILVPPADGEALLVYVAATTQVVSAAIVVERQEEGHALPIQRPVYFVSEVLSETKIRYPQVQKLLYAVILTRVRRLDARGDSQLVIDQVMKNSHCRDPKMEAYCDEVRRLENKFYGLELNHIARRYNETADELAKIASGRTTVPPDVFSQDLHQPSVKIDDTPEPEAPSVQPEVPSAQPEAPSVRPEAPSVQPEVPSPPDGETPHVEEEQSGATPDRNWQTPYLQYLRQGELPLDQAEARRVARRAKSFVLLGDEKELYHRSPSGVLQRCISITEEGARGLHAPAGRHRKFSKWIEVRPLNSIRSEQAVAFFTNVIHRFGVPNSIITDNGTQFTGRKFLDFCEDHHIRVDWAAVAHPMSNGQVERANGMILQGLKPRIYNDLSKFGKRWMKELPSVVWSLRTTPSRATGFTPFFLVYGAEAVLPTDLKYGSPRTRAYSDQSNQVSQEDSLDQLEEARDKALLHSAQYQQSLRRYHARGVRPRDLQVGDLVLRLRQDARGRHKLKPPWEGPFVIAKVLKPGTYKLANSQGEVYGNAWNIQQLRRFYP

SEQ ID NO: 297746 - protein, 1003 aa, Zea mays
  unsure (1)..(1003): unsure at all Xaa locations
  Clone ID: MRT4577_34618C.1.pep
MGSLQQPLQPGTVLRFGSLEFMSLDGSYDMILLPPPRDNDNGGRQPARQRRNQRRLPRAVEEQHSSSPRYLPRRRRRRRGNQGQAGGSASSAIERVDGASTPTGGAPGIDLALETKTSAVSPQHANPEQTGDAGALAKSLLDVTLVPETTVQPVPDMTSSPPVDQEVPTDSHPSSFGFRLNPPNSSALAGALVEASPNPLGFRMRSPWDRLTDVSTYGPSGSEEDDEPSICWDFSGLGNPSAMRDFMTACDYCLSDCSDGSRSLGDEDCGPSRECFHVDLGGPSEGNHLGMPEDGXWAGQPSAREIRHLPXGFQHRITDDVRVRPPPASSGVGQNLAAAAMLLRAMPEPSTTEGRRIQGELKNLLEGAAVRRAESSASRRQGYPSEPHVATSRFMREASVCTGRTRNTAPAAPGRLGNEHHHRDRRAHLDERVHRGYHPRRGGRYDSGEDRSPSPEPPGPQAFSRAIRRAPFPTRFRPPTTITKYSGETRSELWLADYRLACQLGGTDDDNLIIRNLPLFLSDTARAWLEHLPPGQISSWDDLVQAFAGNFQGTYVRPGNSWDLRSCRQQPGETLRDYIRRFSKQRTELPNITDSDVIGAFLAGTTCRDLVSKLGRKTPTRASKLMDIATKFASGQEAVEAIFRKDKQPQGCPSEDAPEASTQRGAKKKGKKKSQAKRDTADADLVAAAEYKNPRKPPGGANLFDKMLKESAGPPAEGGRARDDDKKEDNQAGEFPEVCDCFMIYGGQAANASARHRKQERREVCSVKVAAPVYLDWSDKPITFDQADHPDHVPSPGKYPLVVDPIIGDVRLTKVLMDGGSSLNIIYAETLGLLRVDLSSVRAGAAPFHGIIPGKRVQPLGQLDLPICFGTPSNFRRETLTFEVVGFRGTYHAVLGRPCYAKFMAVPNYTYLKLKMLGPNGVITVGPTYKHAFECDVECVEYAEALAESEALIADLESLSKEVPDVKRHAGNFEPAETVKAVPLDPSSDASKQIRIGSELDPK

SEQ ID NO: 297747 - protein, 99 aa, Zea mays
  Clone ID: MRT4577_34619C.1.pep
ARSSASHLSCADGCTSIISSAAAACCRAVDMASAAHTGVVGPAAAGCTALLRYPRRVQPPAPSVVSRRSPSSLSPPPRAFLPGVHCRAGTDSGAGGIRT

SEQ ID NO: 297748 - protein, 64 aa, Zea mays
  unsure (1)..(64): unsure at all Xaa locations
  Clone ID: MRT4577_3461C.1.pep
ILHXSLHDALSGSGNPNPQGWPGAWGNQPAGAGGYPGASYPGAYPGQAPPGAYPGQAPPGAYPG

SEQ ID NO: 297749 - protein, 52 aa, Zea mays
  Clone ID: MRT4577_34620C.1.pep
KKKKKKKKKKKKKKKKKKKKKKKKKKKKKKTRKKKKKMKKKKKKKKKKKKKK

SEQ ID NO: 297750 - protein, 766 aa, Zea mays
  Clone ID: MRT4577_34621C.1.pep
MSFGLRNAGATYQRCMNHVFGEHIGRTVEAYVDDIVVKTRKASDLLSDLEVTFRCLKAKGVKLNPEKCVFGVPRGMLLGFIISERGIEANPEKIAAITSMGPIKDLKGVKRVMGCLAALSCFISRLGERGLPLYRLLRKAECFTWTPEAEEALGNLKRPVYFISEVLSETKIRYPQIQKLLYAVILTRRKLRHYFESHPVTVVSSFPLGEIIQCREASGRIAKWAVEIMGEAISFAPQKAIKSQVLADFVAECVDTQLPTVPIQPELWTMFFDGSLMKTGAGAGLLFISPLGKHLRYVLRLHFPASNNVAEYEALVNGLRIAIELGVRRLDARGDSQLVIDQVMKNSHCRDTKMEAYCDEVRRLEDKFYGLELNHIARRYNETADKLAKIASGRTTVPPDVFSRDLHQPSVKIDDTPEPEAPSAQPEEPSAQSEAPSVRPEAPSARPEAPSAPEGEALRVEEERSGVTPNRNRQTPYLQYLRRGELPLDRAEARRLARRAKSFVLVGDGKELYHRSPSGILQRCISIAEGQELLREIHSGACGHHATPRALVGNAFRQGFYWPTAKAPGGYTYLLVAIDKFSKWIEVRPLNSIRSEQAVAFFTNIIHRFGVPNSIITDNGTQFTGRKFLDFCEDHHIRVDWAAVAHPMTNGQVERANGMILQGLKPRIYNDLNKFGKRWMKELPSVVWSLRTTPSRATGFTPFFLVYGAEAILPIDLEYGSPRTRAYVDQSNQASREDSLDQLEEARDMALLHSARYQQSLRRYHA

SEQ ID NO: 297751 - protein, 81 aa, Zea mays
  Clone ID: MRT4577_34622C.1.pep
GFLFNFFGPVFGLFLSPPFRGKGSGIPGGPPIFSNSTVWVPRVFLRPGSPPGPWWGLPPVFGNPWGFYFLFLEKFFPFLTI

SEQ ID NO: 297752 - protein, 68 aa, Zea mays
  Clone ID: MRT4577_34623C.1.pep
VIMGSSLYRVSIHGNVGFADSLCCEHIVWFLDRYTAYMLPAPAHQGGGDLRPLRRQRRGRAEHVDPRV

SEQ ID NO: 297753 - protein, 95 aa, Zea mays
  Clone ID: MRT4577_34624C.1.pep
KTGSPQPRPRVRSMLPMGDPLAALLRSGGNPHSVHGVAIKLGCIVSTFLCNNLLYAYLRRQVPADARRLLDEMPRRNLVYWSVVISGFTHHGGLS

SEQ ID NO: 297754 - protein, 74 aa, Zea mays
  Clone ID: MRT4577_34625C.1.pep
GEGSSVFLFQNCLSQYKGYYLLQPAIKRRPTLQRIHSAPDHLLLGFLVRRPITSSVPALLSSPNSRSPTGILTV

SEQ ID NO: 297755 - protein, 140 aa, Zea mays
  Clone ID: MRT4577_34626C.1.pep
APAHPSTDPLGTGPFAIGLPCSPAHHFISSCSPVVPQLQVAYRNTDILVQAAAAKEQSRASRNPAPSIGGTTGLGETWRTAELGELQGEEGSLGARESSAPASARNSRAICRTSTHSAHIKRTGAAAKISRSEVRRLRRG

SEQ ID NO: 297756 - protein, 555 aa, Zea mays
  Clone ID: MRT4577_34627C.1.pep
WAPRLRIQGASDDFAEGKINTLDELYRTGAKVPSEVFVNSKLTPKLARQMQDVLALCSGSLPSWCYQMTKACPFLFPFETRRQYFYSTAFGLSRALNRLQQQQSDNHSSGGEREVRFGRLQRQKVRVSRNRILDSAAKVMEMFSSQRAVLEVEYFGEVGTGLGPTLEFYTLLSHELQCAQLGLWRATSSYDSGLHTDMKDVIRLDPEDGSSGKELNTDLPGDGMYLIQAPLGLFPRPWPPKVDTSEGSRFFKVLEYFRLIGQVIAKVLQDGRLLDLPLSTAFYKLILGQELDLFDIVSFDSEFGKTLQELQVLVERKQFLESTSGKNQLQVADLCFHGASIEDLCLDFTLPGYPDYVLKEGEGGTIVNIYNLEEYITLVVDATVKSGIKRQVEAFRSGFNQVFDMSSLHIFSPQELDYLICGRQEIWESESLVDNIKFDHGYTAKSPAIVNLLEILSEFTPEQQHAFCQFVTGAPRLPHGGLAALSPKLTIVRKHPSSAVNTSNSTGAVESADDDLPSVMTCANYLKLPPYSTKEIMRKKLLYAILEGRGSFDLS

SEQ ID NO: 297757 - protein, 54 aa, Zea mays
  Clone ID: MRT4577_34628C.1.pep
VVPYPAERSKLLWGVKSLNCNRHFLPIFLFPSSHKFLQKISGVIKNVTLFDEGV

SEQ ID NO: 297758 - protein, 159 aa, Zea mays
  unsure (1)..(159): unsure at all Xaa locations
  Clone ID: MRT4577_34629C.1.pep
ESESLVDNIKFDHGYTAKSPAIVNVSSFVLTCYISYIHPVVVFEKCGSLILALVCSYSRFCQNSXEQQHAFCQFVTGAPRLPHGGLAALSPKLTIVRKHPSSAVNTSNSTGAVESADDDLPSVMTCANYLKLPPYSTKEIMRKKLLYAILEGRGSFDLS

SEQ ID NO: 297759 - protein, 65 aa, Zea mays
  Clone ID: MRT4577_3462C.1.pep
SSGLSYRRPIYSYSSQAPEPGLQKGSIHSLQKFLRALVLQPFCCLQNHVPQIILVLSYPVLELKI

SEQ ID NO: 297760 - protein, 85 aa, Zea mays
  unsure (1)..(85): unsure at all Xaa locations
  Clone ID: MRT4577_34630C.1.pep
IPKTSHASXNLHXPLPNSHSRHINXKKPEFTLLLVRLXPXXTKPISHLSNSSKYTIITPHYPYYNNYSQLPYXNKITSTKTLPLL

SEQ ID NO: 297761 - protein, 39 aa, Zea mays
  Clone ID: MRT4577_34631C.1.pep
YSVWIGGSILASLSTFQQMWISKEEYDESGPGIVHMKCF

SEQ ID NO: 297762 - protein, 115 aa, Zea mays
  Clone ID: MRT4577_34632C.1.pep
GPFFFFFFPFFFFFFFFFFFFFFFFFFFLKDKQFIIYPCTNDNICFMKGIEQTAPSSNHQHSRHAGALATKCETCSTYWSAETDPDLTKTQTARATADTLALCKNPDQLRTSGTS

SEQ ID NO: 297763 - protein, 82 aa, Zea mays
  unsure (1)..(82): unsure at all Xaa locations
  Clone ID: MRT4577_34633C.1.pep
TTHRPAVREDAAPVVISMAEEAPNYNGSQFFVCTVENPCVDGXHVVFGHVVEGMEDVKAIEKVGSRSGDTSKEVKVADCGQL

SEQ ID NO: 297764 - protein, 83 aa, Zea mays
  unsure (1)..(83): unsure at all Xaa locations
  Clone ID: MRT4577_34634C.1.pep
QLYAHYAIGKDVQAIKAVVGKEALLFXDLLYLEFPDKFERKFVAQGAYGPRDIFQSLDFAWAMVRIFPRELFPRISAKTLGPV

SEQ ID NO: 297765 - protein, 91 aa, Zea mays
  Clone ID: MRT4577_34635C.1.pep
ATLTHTAGQSHKVGQQGRLDGSGHLRKSPGLGVRNSGWVGPELPPLSPYPPMEPPDRAGWPVSAALGQFSLLGEPTSACGLVPHSYLRRAS

SEQ ID NO: 297766 - protein, 213 aa, Zea mays
  Clone ID: MRT4577_34636C.1.pep
MRLCLRQAAATSSPLAATLRGKTSTSTLAPHGRLSFSHTTSLQTAPGHRGLRAGWAVRVLPLTEENVEKVLDEVRPSLMADGGNVALHEIDGLVVVLKLQGACGSCPSSTMTLKMGIETRLRDKIPDILEVEQIVDTETGLDLTADNVDKVLDEIRPYLSGTGGGSLELLQIDGYVVKIRIGGPAAGVMTVRVAVTQKLREKIPSILAVQLTE

SEQ ID NO: 297767 - protein, 185 aa, Zea mays
  unsure (1)..(185): unsure at all Xaa locations
  Clone ID: MRT4577_34637C.1.pep
VRSELELELRERAXGEESRGSPWRTTCRWRLTPSSELMEGDEKKGAAAGESQLSFDHGRWPARPPHAFTSSATDPDLPAPIQPSIHNESIHETRQPAPILVTARAMLVSHGLLQVPGGERPIWWSSGAEICMPVREERAEDHEIWVPSAMDWRRGPTTRRKRVEGAGRALGSTTRWSTRLHAGKN

SEQ ID NO: 297768 - protein, 475 aa, Zea mays
  Clone ID: MRT4577_34638C.1.pep
FGGGSPWDSEWGIITTGRAPRRRGWTRRAPLLPRHGSSGGREGGGLSSQPKTFANVFIAVVGAGVLGLPYTFSRTGWAAGSLLLFSVAALTFYCMMLLVACRRRLADEHPKIASFGDLGDAVFGAHGRFAVDVMLVLSQFSFCVGYLIFISNTMAHLYPITAAASSSSALLSPKALVIWAMLPFQLGLNSIKTLTLLAPLSIFADVVDLGAMGVVLGQDVAAWLAKPVPVVAFGGAGALLYGLGVSVYAFEGIGMVLPLEAEAANKSKFGVTLGLSMAFIAVMYGLFGVMGYVAFGDATRDIITTNLGAGWLSAAVQLGLCINLFFTMPVMMNPVYEVAERLLHGKRYCWWLRWLLVVVVGLAAMYVPNFTDFLALVGSSVCVLLGFVLPASFHLKVFGAEMEWPGVLSDVLLVVIGLALAVFGTYTSLLQIFQSSIIAFSRATTIHVLSVVREWLVLDGGNLYAFRTTDFSYSR

SEQ ID NO: 297769 - protein, 79 aa, Zea mays
  Clone ID: MRT4577_34639C.1.pep
LPRSPRRGPKGSKAWRSFDSGRVTGFVNLDYSVGDYKGPLFCFAGVPRFKKKIPYPRRVFPCIWSDPPPSARQLFPRKH

SEQ ID NO: 297770 - protein, 101 aa, Zea mays
  unsure (1)..(101): unsure at all Xaa locations
  Clone ID: MRT4577_3463C.1.pep
AEIGRVRRDKKRALGRVKEITVXPPSDAGKKEAHPLRIFVVLRDFLSTLDRVCREVSQQDRTVVGSARSFRMSAATAMANLRMYGQHARGDDDDEEESWSP

SEQ ID NO: 297771 - protein, 438 aa, Zea mays
  Clone ID: MRT4577_34640C.1.pep
FGGGSPWDSEWGIITTGRAPRRRGWTPRAPLLPRHGSSGGREGGGLSSQPKTFANVFIAVVGAGVLGLPYTFSRTGWAAGSLLLFSVAALTFYCMMLLVACRRRLADEHPKIASFGDLGDAVFGAHGRFAVDVMLVLSQFSFCVGYLIFISNTMAHLYPITAAASSSSALLSPKALVIWAMLPFQLGLNSIKTLTLLAPLSIFADVVDLGAMGVVLGQDVAAWLAKPVPVVAFGGAGALLYGLGVSVYAFEGIGMVLPLEAEAANKSKFGVTLGLSMAFIAVMYGLFGVMGYVAFGDATRDIITTNLGAGWLSAAVQLGLCINLFFTMPVMMNPVYEVAERLLHGKRYCWWLRWLLVVVVGLAAMYVPNFTDFLALVGSSVCVLLGFVLPASFHLKVFGAEMEWPGVLSDVLLVVIGLALAVFGTYTSLLQIFQSSSA

SEQ ID NO: 297772 - protein, 89 aa, Zea mays
  Clone ID: MRT4577_34641C.1.pep
SISVQSYLSIMRRFSWYTADVLAHIESSSTTTTDGTTRTSSQSPKCKPGRCSGTISRTVTRRQRWLVPPSNRYTLLMGKNNTWNSRSSH

SEQ ID NO: 297773 - protein, 76 aa, Zea mays
  Clone ID: MRT4577_34642C.1.pep
PVRALDLLALGPDPETAPQLKVKDYKTQHLPMFYIFAFFVHPIVHGKGPIHNLLPHVPDPVPNNHWAFATNFVPGN

SEQ ID NO: 297774 - protein, 745 aa, Zea mays
  unsure (1)..(745): unsure at all Xaa locations
  Clone ID: MRT4577_34643C.1.pep
MSGVVLAPETMTDVVSPRHANPKRTDDASTLAKDLLGVSLVPEMTVQSALDATSPPSIDQEVPSVFHPMPFRFSFDPPSDPASVSAFVKAYPNLPGYHMWSSWDRLTAVSTYGPPGSEEEDDPNSGWDFSGLRDPSAMRDFMTACDYYLSGCSDDGHSLDDEGCGPSRECFHVDLGGHDEGNHLGMPEDDDPPGPASRVDIPRELAVVPVPAGGQDTQLEQIREMEAKLDEEAGQLVQLRQNIEQEWAGRALAGEARHRSRDVQRHIIDDARARLPPASSGVGHNLAAAAMLLRAMLEPSTTEGRRIQGELKNRLEDVVVRRAKSSASRRQGCPPEHRTTTSQLMWEASVHTGRTRDRTPAAPDRLGNEHHRRDRRARLKEKISNWDDLVKAFAGNFQGMYVRPGNSWDLRSYRQQPGESLREYIRRFSKQRTELPNITDSDVIGAFLADTTCHDLEDVPEASAQRGTKKNAKKKSQAKHDAADADLVAVAEHRNPRKPPGGANLFNKMLKKSCPYHQGPIKHTLEECVMLRRYFHKAGSPAGDGKGQDNNKKEGDKAEEFPEVHGCFMIYGGQVANASAQHRKQERWEVCSVKVAVPVYLDWSDKPITFDQGDHPDCVPSPGRYPLIVNPVIGNARLTNVLMDGGSSLNIIYAETLGLLGIDLSMIRAXLKMPGPNGVITXTSPTYIAESEALIADLECLSKEVPDTKRHTGNFEPDEAVKSVPLDPSNDADKKVRIDSELDPK

SEQ ID NO: 297775 - protein, 107 aa, Zea mays
  unsure (1)..(107): unsure at all Xaa locations
  Clone ID: MRT4577_34644C.1.pep
PERGGGLKRKTPGTPPKPXGMGRRKSPGETQAPRTGGQEQATQIQCRNWDTVEGAQGDTKASGGQTKPRADPXEARCRPRTAMQERTKKRRKPQGTNRWQRQKGERR

SEQ ID NO: 297776 - protein, 1054 aa, Zea mays
  unsure (1)..(1054): unsure at all Xaa locations
  Clone ID: MRT4577_34645C.1.pep
MGSLQQPLQPGTMLRFGTLEFMSFDGSYDMTLLPPPRDYDNGGRQPARRRRNRRRLPRVVEEQHSGSLRSLPRQRRRRRGRQGQTGGHASPAVERIDAPDAPTEGTPDVDLAFETEASAVPPRHADPEQEDDAGALAESLQDVALEPEMTAQPVPDVTTSLHVDQKVTTNSHLASFRLGLNPPNDLVLAGALIEASATPLRFCMRSPWDRLTDVSTYGPSGSEEDDDPSIGWDFSGHGNPSAMRDFMTACDYCLSDRSDGSRSLGDESCGPSRECFHIELGDPTEGNHLGMPEDGDLPRPVPRADIPRELAVVPAPAGGYDPQLEQVREAQARLNEGTGALEPIRRDAGQAWVGQPLAGEIRHLPQGLQHRVANDVRIRPPPASSGVGQNLATAAMLIRAMPEPSTTEGRRIQGELKNLLEGAAARRAESTASRRQGYPSEPHAATSRFMRETSVYTGRTRNTAPAAPGHLGNEHHRRDRRAHLDERVRRGYHPRRGGRHDSGEDRSPSPEPPGPQAFSRAIRRAPFPTRFRPPTTITKYSGETRPELWLADYRLACQLGGTDDDNLVIRNLPMFLSDTARAWLEHLPPGQISNWDDLVQAFAGNFQGTYVRPGNSWDLRSCRQQPGESLRDYIRRFSKQRTELPNITDSDVIGAFLAGTTCRDLVSKLGRKTPTRASELMDIATKFASGQEAVEAIFRKDKQPQGRPLEEAPEASAPRGAKKKGKKKSQSKRDAADADLVAAAEYKNPRKPPGGANLFDKMLKEPCPYHQGPVKHTLEECVMLRRHFHRAGPPAEGGRAHDDDKNEEHPAGGFPEVRDCFMIYGGHAANTSARHRKQERREVCSVKVAAPVYLDWSDKPITFDRADHPDHVPSPGKYPLVVDPVVGDVRLTXGAAPFHGIIPGKXRVQPLGRLDLPVCFGTPSNFRRETLTFEVVGFRGTYHAVLGRPCYAKFMAVPNYTYLKLKMPGPNGVITVGPTYKHAFECDVECVEYAEALAESEALIADLENLSKEVPDVKRHAGNFEPAETVKAVPLDPSGDTTKQIRIGSGLDPK

SEQ ID NO: 297777 - protein, 1040 aa, Zea mays
  Clone ID: MRT4577_34646C.1.pep
MVLRFGSLEFMSLDGSYDMILLPPPCDNDNGGRQPARRRRNRRRLPRVVEEQHSSSPRPLPRRRRRRRGNQGQAGGSASSAVERVDGTSTPTGGAPGIDPALETKTSAVSPQRADSGQTDDASALAKGLLDVTLVPETTAQSVPDVTSSPPVDQKVPTDSHPTSFGFSLDPPSDFALAGAHVEASPNPLRFRMRSPWDRLTDVSTYGPSGSKEDDEPSICWDFSGLGNPSAMRDFMTACDYCLSDCSDGSRSLGDEDCGPSRECFHVDLGGPSEGNHLGMPEDGDLPRSVPRVDVPRELAVVPVQAGGHDPQLEQIRGVQARLDEGAGALEPIRRDVGQAWAGQPPAGEIRHLPQGLQHRIADDVRFRPPPASSGVGQNLAAAAMLLRAMPEPSTTEGRRIQGELKNLLEGTAVRLVESSASRRQGEASVCPGRTRNTAPAAPSRLGNEHHHRDRRAHLDERVRRGYHPRRGGRYDSGEDRSPSPEPPGPQAFSRAIRRAPFPTRFRPPTTITKYSGETRPELWLADYRLACQLGGMDDDNLIIRNLPLFLSDTARAWLEHLPPGQISNWDDLVQAFAGNFQGTYVRPGNSWDLRSCRQQPGESLRDYIRRFSKQRTELPNITDSDVIGAFLAGTTCRDLVSKLGRKTPTRASELMDIATKFASGQEVVEAIFRKDKQPQGRPSEDAPEASTQRGAKKKGKKKSQAKRDAADADLVAAAEYKNPRKPPGGANLFDKMLKEPCPYHQGPVKHTLEECVMLRRHFHRAGSPVEGGKARDDDKKEDHQAGEFPEVHDCFMIYGGQAANASARHRKQERREPITFDQADHPDHVPSPGKYPLVVDPVIGDVRLTKVLMDGGSSLNIIYAETLGLLRVDLSSVRAGAAPFHGIIPGKRVQPLGQLDLPVCFGTPSNFRRETLTFEVVGFRGTYHAVLGRPCYAKFMAIPNYTYLKLKMPGPNGVITVGPTYKHAFECDVECVEYAEALAESEALIADLESLSKEVPDMKRHAGNFEPAETVKSVPLDPSSDASKQVRIGSELGPK

SEQ ID NO: 297778 - protein, 87 aa, Zea mays
  Clone ID: MRT4577_34647C.1.pep
YREELFWLKDFLDGRYDDCLCTNYGMKSFLLIGLVYERTMTHHSLNVADLLRYCWTIEYNVGLVYHSLEIALHDEWISCAKHVYAIH

SEQ ID NO: 297779 - protein, 84 aa, Zea mays
  Clone ID: MRT4577_34648C.1.pep
GVAVAIVIAATCLTVIVLRSVYFKVSRMKYLDRNGAQTFDPGTNTATLKLQPQPQSGYLWKGPDFPAYPVSPSTTAFESTHKPV

SEQ ID NO: 297780 - protein, 911 aa, Zea mays
  unsure (1)..(911): unsure at all Xaa locations
  Clone ID: MRT4577_34649C.1.pep
MSLDGGYDMILLPPPRDNGGRQPARRRRNQRRLPHVAEEQHSGLSRHLPRRRRRRRGNEGQVGGGTSSAVERVDDADAPTGDTSGVDLASETKTSVVSPQHANSKRTDNASTLARDLLGVTLVPETTVQSAPDATSSPPVDQEVPTDSHLVPFGFSFDPPSDLASVEAFIEACTNPPGYHMRSPWDRLTAVSTYGPSGSEGDDEPDFCWDFSGLGNPSAMRDFMTACDYCLFDCSDGSRSFGDEDCGPSRECFHVDLGSFGEGNHLGIPENGDPPRPMPHVDILRELVVVPVPAGGQDAQLEQIHEMQARLDEEAGTLKPFRRNIGQEWADQAPAGEARHLPQGIQHRIANDVRARPPPASSGVGQNLAAASILLRAMPEPSTSEGRRIQGELKNLLEDATVRRAESSSSRRQGYPSEHHAVTSRFMREASVHTGRTRNMAPAAPGRLGNEHHHRNRRAHLNEKISNWDDLVQAFAGNFQGTYIRHGNSWDLRSCHQQPGESLRDYIRRFSKQRTELPNVTDSDVIGAFLAGTTCRDLVSKLGRKTPTRASELMDIATKFASGQEAVEAIFRKDKQPQGRQPEDVPEASTQRGTKKKGKKKSQAKRDAADADLVTAAEYKNPRKPPGGANLFDKMLKEPCPYHQGPVKHTLEECVMLRRHFHKAGPPAKGGRAHNNDKKEDHKAVEFPEVHDCFMIYGVPMANASARHRKXQERREGDQPPDXVPSPGKYPLVVDPVIGNVRLTKVLMDGGSSLNIIYAETLGLLRIDLSSVRVGVTPFHGIIPEKRVQPLGQLDLPVCFGTPSNFRRETLTFEVVGFRGTYHAVLGRPCYAKFMAVPNYTYLKLKMSGPNGCVEYAEALIADLESLSKEAPDVKRHAGNFEPAETVKSVPLNPSNDACKQIRIGSELDPK

SEQ ID NO: 297781 - protein, 167 aa, Zea mays
  unsure (1)..(167): unsure at all Xaa locations
  Clone ID: MRT4577_3464C.1.pep
KAKHQPPKGSNPTGGKKVWGPPKGPQXPLKPTNPPPHFGTPNPRGFFNPPPPXGPPKGPPTPQNPGARGALKEPGFTAPPGGGPPGGKGPPPGGGNPQGGGPPPGVCQKKKNPGGRGGTPLGPXFCPPGGKGGGPPPPRGLGLANKGSQKNRQPPPKGGPTGGGPPP

SEQ ID NO: 297782 - protein, 1134 aa, Zea mays
  unsure (1)..(1134): unsure at all Xaa locations
  Clone ID: MRT4577_34650C.1.pep
MPKPSTTEGRCIQGELKNLLEDAAVRRAESSASRRQGYPPEHRAATFRFMREASVHTGRTRNTAPAALGRLGNEHHRRDRRAHLDEKISNWDDLVKAFAGNFQGTYVRPGNSWDLRSCEERADDIRRFSKQRTELSNITDSDVIGVFLAGTTCCDLVSKLGRKTPTRVSELMDIATKFASSQEAVEAIFRKDKQPQGRQQEDVPEASAQRGTKKKGKKKSQAKRDAADADLVAAAEHRNPRKPPGGANLFDKMLKESCPYHQGPVKHTLEECVMLRRYFHKVGPPAEGGRAHANDKKEGHKAEEFPEVHDCFMIYGGQVANASALHRKQERWEVCSVKVAAPVYLDWSDKPITFDQGDHPDRVPSLGKYPLVVDPVIGNVRLTKIDLSSIRAGAAPFHGIIHGKRVQPLGQLDLSVCFATPSNFRKETLTFEVVGFRGTYHAVLGRPCYAKFMVVPNYTYLKLKMSGPNGYAEALIADLENLSKEVPDAKRHAGNFEPAEAVKSIPLDPSNDASKQVPYPLPRIDQIVDSTAGCETLSFLDAYSGYHQIRMKESDQFATSFITPFSMYCYITMPFGLRNAGATYQRCMNHVFGEHIGRTVEAYIDDIVVKTRKSFDLLSDLETTFKCLKARGVKLNPEKCVFGVPRGMLLGFIVSERGIEANPEKIAAITNMGPIKDLKGVQRVMGCLVALSRFISRLGERGLPLYRLFRKTEHFTWTPEAEEALGNLKALLSSAPILVPPAAGEALLIYVAATTQVRPVYFISEVLSETKIRYPQIQKLLYAVILTRRKLRHYFESHPVTVVSSFPLGEIIQCREASGTGAGLLFISPLGKHLRYVLRLHFPASNNVAEYEALVNGLRIAIELGVRRLDAHGDSQLVIDQVMKNSHCRDPKMEAYCDEVWRLEDKFYGLELNHVARRYNETADELAKIASGRTTVPPDVFSRDLHQPSVKTDDTPEPEEASAQPEAPSAPEGEALRVEEERNGXTPNRNWQTPYLQYLHRGELPLDRAEARRLARRAKSFVLLGDGKELYHRSPSGILQRCISIVEXKAPGGFTHLLVAIDKFSKWIEIRPLNCIRSEQAVAFFTNIIHRFGVPNSIITDNGTQFTGRKFLDFCEDHHIRVDWAAVAHPMTNG

SEQ ID NO: 297783 - protein, 107 aa, Zea mays
  unsure (1)..(107): unsure at all Xaa locations
  Clone ID: MRT4577_34651C.1.pep
RTKPEASMSNRFPHFSRVXLSAMPSPATIGRWSLQRXMRAGPPDQGCGSLSAVWAAITHATTTDGASHKDERSSWQPSVERVPDARSKYHTGHLLRRSAPETTHHRA

SEQ ID NO: 297784 - protein, 514 aa, Zea mays
  Clone ID: MRT4577_34652C.1.pep
MEAYCDEVRRLEDKFYGLELNHIARRYNETADELAKIASGRTTVPPDVFSRDLHQPSVKIDDTPEPEAPSAQPEAPSARPEAPSVQPEVPSAPEGETLHVEGEQSGVTPDQNWQTPYLQYLHRGELPLDRAEARRVARRAKSFVLLGDEKELYHRSPSGILQRCISIAEGQELLREIHSGACGHHAAPRALVGNAFRQGFYWPTAVADATRIVRTCEGCQFYARQTHLPAQALQTIPITWPFAVWGLDLVGPLQKAPGGYTHLLVAIDKFSKWIEAVAFFTNIIHRFGVPNSIITDNGTQFIGRKFLDFCEDHHIRVDWAVVAHPMTNGQVERVNGMILQGLKPRIYNDLNKFGKWWMKELPSVVWSLRTTPSRATGFTPFFLVYGAEAILPTDLEYGSPRTRAYTDQSNQASREDSLDQLEEARDKALLHSARYQQSLRCYHARGVRYRDLQVGDPVLRLRQDARGRHKLTPPWEGPFVIAKVLKPRTYKLANSQGEVYGNAWNIQQLCRFYP

SEQ ID NO: 297785 - protein, 131 aa, Zea mays
  Clone ID: MRT4577_34653C.1.pep
LYALFLLENLCTLCSHRSNRTSLFDGIEEGGIRATSYSSHEIDEQENDGAIDGLQDRVSILKRLSGDIHEEVETHNRMLDRMGNDMDTSRGFLSGTVDKFKMVFETKSSRRMGTLVASFVALLLLVYYLTR

SEQ ID NO: 297786 - protein, 718 aa, Zea mays
  unsure (1)..(718): unsure at all Xaa locations
  Clone ID: MRT4577_34654C.1.pep
MKESDQLATSFITPFGMYCYVTMSFGLRNAGATYQRCMNHVFGEHIGRTVEAYVDDIVVKTRKAFDLLSDLEATFRCLKVKGVKLNPEKCVFGVPRGMLLGFIVSKRGIEANPEKIAAITNMGPIKDLKGVQRVMGCLAALSRFISRLGERGLPLYRLLRKAECFTWTPEAEEALGNLKALLTNAPILVVSAAIMVERREEGHALPVQRPVYFISEVLSETKIHYPQIQKLLYTMILTRRKLRHYFESHPMTVVSSFPLGEIIQCREASGRIAKWAVEIMGVTISFAPRKAIKSQVLADFVAEWVDTQLPTAPIQPELWTMFFDGSLMKTGAGAGLLFISPLGKHLRYVLRLHFPASNNVAEYEALVNGLCIAIELGVQCLDARGDSHLVIDQVMKNSHCRDPKMEAYCDEVRCLEDKFYGLELNHVARRYNETVDELAKIASGQTTXTRGLHAPAGRHRQILQVDRGPTPKQHQVRTGGVILHQHHPSLWGPELHHHRQRHQVXTGRKFLDFCEDHHIRVDWAVVAHPMTNGQVERANSMILQGLKSRIYNDLNKFGKRWMKELPSVVWSLRTTSSRATGFTPFFLVYGAEAILPTDLECSSPRTRAYDDQSNRAGQEDSLDQLEEARDMALLHSARYQQSLRRYHTRGVRSRDLQVGDLVLRLRQDARGRHKLTPPWEGPFVIAKVLKPGTYKLANSQGEVYSNAWNIRQLRRFYP

SEQ ID NO: 297787 - protein, 154 aa, Zea mays
  unsure (1)..(154): unsure at all Xaa locations
  Clone ID: MRT4577_34655C.1.pep
LYALFLLENLCTLCSHRSNRTSLFDGIEEGGIRATSYSSHEIDEQENDGAIDGLQDRVSILKRLSGDIHEEVETHNRMLDRMXLVPHPLLVVRSESTILLTWTNXGNDMDTSRRFLRGRVRKFMQVFETKSSRRMGTLVASFVALFLLVYYLTR

SEQ ID NO: 297788 - protein, 293 aa, Zea mays
  Clone ID: MRT4577_34656C.1.pep
MRRSSTTAAPQASSNGASPSPKKAPGGYTHLLVAIDKFSKWIEVRPLNSIRSEQAVAFFTNIIHRFGVPNSIITDNGTQFTGRKFLDFCEDHHIRVDWAAVAHPMSNGQVERANGMILQRLKPRIYNDLNKFGKRWMKELPLVVWSLRTTPSRATGFTPFFLVYGAEAVLPTDLEYGSLRTRAYSNQSNQASREDSLDQLEEARHKALLHSARYQQSLRRYHARGVRPRDLQVGDLVLRLRQDARGRHKLMPPWEGPFVIAKVLKPGTYKVANSQGEVYGNAWNIQQLRRFYP

SEQ ID NO: 297789 - protein, 761 aa, Zea mays
  Clone ID: MRT4577_34657C.1.pep
MGSLQQPFQPGTTVLRFGSLEFMSLDGGYDMILLPPPRDSDNGGRRHARRRRNRRRLPHVAEEQHSGLSRRLPRRRRRRRGNQGQAGGGTSSAVERVDGAGAPTGDTSGIDLASEMKTSVVSSQHANSKRTDDASMLAKDLLGVTLVPETTVQSAPDVTSSPPVDQEVPTDSHIVPFVFSLDPPSDFASVDAFIEASPNPPGYGMRSPWDRLTVVSTYGPSGSEEDDESDFCWDFSGLGNPSAMRDFMTACDYCLSDCSDGSRSFDDEDCGPSRECFHVDLGGPDEGNHLGIPENGETRPELWLADYRLACHLGGTNDDNLIIRNLPLFLSDTARAWLEHLPPGQISNWDDLVQAFAGNFQGTYVRPGNSWDLRSCRQQPGESLRDYIWRFSKQRTELPNVTDSDVIGAFLTGTTCRDLVSKLGRKTPTRASELMDIATKFASGQEAVEAIFRKDKQPQGRQPKDVPEASTQRDTKKKGKKKSQAKRDAADADLVAAAEYKNPRKPPGGANLFDKMLKEPCPYHQGPVKHTLEECAMLRRHFHKGDHLDRVPSPGKYPLVVDPVIGNVRLNKVLMDGGSSLNIIYAETLGLLRIDPSSVRAGATPFHGINPGKRVQPLGQLDLPVCFETPSNFRRETLTFEVVGFRGTYHAVLGRPCYAKFMAVPNYTYLKLKMSGPNGVITVGPTYRHAYECDVECMEYAEALAESEALIADLESLSKEAPDVKRHSGNFEPAETVKSVPLDPSNDASKQIRIGSELDPK

SEQ ID NO: 297790 - protein, 252 aa, Zea mays
  Clone ID: MRT4577_34658C.1.pep
MGETIPFAPRKAIKSQVLADFVAEWVDTQLPAAPIQPELWTMFFDGSLMKTGAGTGLLFVSPLGKHLRNVLHLRFPASNNVAEYEALVNGLCIAMELGVRCLDARGDSQLVIDQVLKNSHCRDPKMEAYCDEVRRLEDKFYGLELNHIARRYNETADKLAKIASGRTTVPPDVFSRDLHQPSVKTNDTPEPEKVSALPEAPSAQPEASSAPEGEALRVEEERNGVTPNRNWQTLYLQYLHRGELPLDRAEAR

SEQ ID NO: 297791 - protein, 165 aa, Zea mays
  Clone ID: MRT4577_34659C.1.pep
CAALEAAVWDDPHPAPLLRPPPPSAAAPQSVSTLCRTSAATAPPSLLRLLQRRSTDDKRTRKPQASTTFTRNKSLRFPYLPLEMHPPLTLHRHPMCAEIIEEFQKCHLDHPIKKLFGECTDLKIKLDRCFRQEKALKRKANFKESKKFKEQLQAYKREIAEKNEE

SEQ ID NO: 297792 - protein, 55 aa, Zea mays
  Clone ID: MRT4577_3465C.1.pep
YTETVVTGCYRTRLELTPPPSIVELLIELLLRRVCITIFKTTEARVRLHRPDGRC

SEQ ID NO: 297793 - protein, 68 aa, Zea mays
  Clone ID: MRT4577_34660C.1.pep
DQILVQHIKTVLAGLKSRISTQLTAVAKELAVYGEPLDSKAGQSAKLLNILSKNCEAFSSMGGGENED

SEQ ID NO: 297794 - protein, 50 aa, Zea mays
  Clone ID: MRT4577_34661C.1.pep
IEGGDAEAIRLLLPYGSAQLGSTLANLPDLAPIVQEHLPHQLDEQLHLLQ

SEQ ID NO: 297795 - protein, 106 aa, Zea mays
  Clone ID: MRT4577_34662C.1.pep
DAATTLVVVVVSQLAAPAAGCPYCPTPTPTPTTTNTHTAGNPPPSITPGPPSSYLPFTPTGKRHKDTLNLLECEDALNGLVHTIERTNDNDNCCTLLNKEADLYSK

SEQ ID NO: 297796 - protein, 67 aa, Zea mays
  Clone ID: MRT4577_34663C.1.pep
HTQESSSLWSVASCSCCTKWRRHKILLDATASRARRHRYVRHSPCGYTTPGSDLTHAWHPALLTTHY

SEQ ID NO: 297797 - protein, 95 aa, Zea mays
  Clone ID: MRT4577_34664C.1.pep
MKSSTLVAVLLLQTVMVMGILAHSQPADAHDDFPKCCDHCNSWSGAQFCDDVGPKCRDGCVNCRVVQTRPVKTFRCGDGRSAFPYIPCPPPCKKN

SEQ ID NO: 297798 - protein, 94 aa, Zea mays
  Clone ID: MRT4577_34665C.1.pep
DHASTTSPVRPASSRPAFQRHLRVPHHRSTHEHRAFNPSSGAMTATVIIHAAALAVLQLASSSSKTARMASVAQDELSAFVAVAVTSSHHLHKD

SEQ ID NO: 297799 - protein, 78 aa, Zea mays
  Clone ID: MRT4577_34666C.1.pep
KLKTLNYPGHHFRPETIWYKKHYSMCMRGYRPPALPAPIKMAAPQGDFLTPIFQIGGGPHRGGGTIWCNPRAHSRGAG

SEQ ID NO: 297800 - protein, 83 aa, Zea mays
  Clone ID: MRT4577_34667C.1.pep
MLGIAFITLQKVADMSSWPHMFCLVWIDGVLRYLEVLGSAFTLSEVNILIELYTQIINALLRAVGKCILLQQTNATLPTHEIG

SEQ ID NO: 297801 - protein, 52 aa, Zea mays
  Clone ID: MRT4577_34668C.1.pep
VRTAVGLMLLIFPFFGVGFDGLSSIGSSTPSFKTASDAAVDEARGGAGAEEL

SEQ ID NO: 297802 - protein, 77 aa, Zea mays
  Clone ID: MRT4577_34669C.1.pep
KKKKRPKQKKPGGGVQKIKRKRDIFIPTRRNKTGGSTLPHTKGETYGGDKRSFGRPTVKGKKFWGGLTGGTLGPGIS

SEQ ID NO: 297803 - protein, 125 aa, Zea mays
  Clone ID: MRT4577_3466C.1.pep
MIMNTTQKANSVEQDAKVFVKQAPQFKRWGRKHPFVRYGLPLISLTVFGAVGLAHLIQGSKEVTKEKEDMEWEVVETTKALSRTGPVEGAYKPKKLSLEDELKALQQKVDINSYDYKPIPRPSEK

SEQ ID NO: 297804 - protein, 56 aa, Zea mays
  Clone ID: MRT4577_34670C.1.pep
FGVLSALKEVTQRTLTTTRAHATAHLICWKEKRRQFGGSMGGRVAGSPRKRLLRPS

SEQ ID NO: 297805 - protein, 82 aa, Zea mays
  unsure (1)..(82): unsure at all Xaa locations
  Clone ID: MRT4577_34671C.1.pep
HXPVXXXXXXXPXXLFRPXQSXKLLWXXHGXIRMXFPRNKSSXPLKRXXCCLQHHLLSXRNLXQLXSRGAEXQTXARRRWXR

SEQ ID NO: 297806 - protein, 845 aa, Zea mays
  Clone ID: MRT4577_34672C.1.pep
MGSLQQPFQPGTVLRFGSLEFMSLDGSYDMILLPRPRDDDNGGRQPARRQRNRRCLPHMVEEQHSGLSRRLPRRRRRRRGNQGQAGGGTSSAVERVDGAGAPTGDTSGIDLASETKTSVVSPRHANSKRMNDTSMLARDLLGVTLVPKTTVQSTPDVTSSPPVDQEVPTDSHLVPFGFSLDPPSDFASVDALVEASPNPPGYRIRSPWDRLTAVSTYRPSGSEEDDEPDFSWDFSGLGNPSAMRDFMTACDYCLSDCSDGSRSLGDEDSGPSRECFHVDLGGPGEGNHLGIPENGDPPRPAPRVNILRELVVVPVPAGGHDPQLEQIREMQARLDEGAGTLEPFRRDIGQEWAGQPPAGEALQAFAGNFQGTYVRPGKSWDLRSCHQQPGESLRDYIRRFSKQRTELPNVTDSDVIGAFLAGTTCRDLVSKLGRKTPTRASELMDITTKFASGQEAVEAIFRKDKQPQGRQPEDVPEASTQRGTKKKGKKKSQAKRDATDVDLVAAAEYKNPRKPLGGVNLFDKMLKEPCPYHQGPVKHTLEECAMLRRHFHKAGPPAEGGRAHDDDKKEDHKAGEFPEVHDCYMIYCGRVANASARQSKQERQEVCSVKVAVPVYLDWSDKPITFDQDDHPDRVPSPGKYPLVVDPVIGNVRLTKVLMDGGSNLNIINTETLGLLRIDLSSVRAGAAPFHGIIPGKRVQPLGQLDLPVSFGTSSNFRRETLTFEVVGFRGTYHAVLGRPCYAKFMAVPNYTYLKLKMPGPNGVITIGPTYRHAYECDVECVEYAEALAESEALIADLESLSKEAPDVKRHAGNFEPAETVKSVPLDPSNDASKQIRIGPELDPK

SEQ ID NO: 297807 - protein, 82 aa, Zea mays
  Clone ID: MRT4577_34673C.1.pep
RKCNMHVTSSPKSSYLFNIWFLASWIPNYQTTPRRSLLGRDCVSLSVKSAARRLFTSADGIFICPLNVQVMCIRSKKSQCLR

SEQ ID NO: 297808 - protein, 678 aa, Zea mays
  unsure (1)..(678): unsure at all Xaa locations
  Clone ID: MRT4577_34674C.1.pep
WVDQAPAGEARHLPQGIXLCIADDVRARPPPASSGVDQNLAAAAILLHAMPEPSTTEGRRIRGELKNLLEDAAVXRAESSASRRQGYPSEHRAATSRFVREASVHTGRTRNTVPAAPGRLGNEHHHRNHRARLDERVRRGYHPRRGGRYDSGXDRSPSPEPPGPQAFSRAIRRAPFPTRFQTPTTITKYSGETRPELWLVDYRLACQLGGTDDDNLVICNLPLFLSHSARAWLEHLPPGQISNWDDLVQAFAGNFQGTYVRPGNSWDLRSCRQQPGESLRDYIRRFSKQRTELPNVTDSDVIGAFLAGTTCRDLRGTKKKGKKNSQAKRDAADVDLVAAAEYKNPRKPPGGANLFDKMLKESCPYHQGPVKHTLEECAMLRHHFHRVGPPAEGGRAPHDDKKEDHQAEEFPEVRDCFMIYGGPMANASARHRKQERREVCSVKVVAPVYLDWSDKPITFDQGDHPDRVPSPGKYPLVVDPVIGNVRLTKVLMDGGSSLNIIYTETLELLHIDLSSVQAGAAPFHGIIPRKRVQPLGRLDLPVCFGTPSNFRRGTLTFEVVGFRGTYHAVLRRPYYAKFMVVPNNTYLKLKMPGPNGVITVGPTYRHAYESDVECVEYAEALAESEALIADLESLPKEAPDVKRHAGNFEPAETVKSVPLDPSNNASKQIRIGSELDPK

SEQ ID NO: 297809 - protein, 49 aa, Zea mays
  Clone ID: MRT4577_34675C.1.pep
HCMYRGKIKLTMGFRIYKVTDYYYSVYSTDYMFMLILNGLTQSNSIEAD

SEQ ID NO: 297810 - protein, 506 aa, Zea mays
  Clone ID: MRT4577_34676C.1.pep
MRGGTLQINWHDQQPVLSLDFHPVSRRLATAGADHDVKIWEVASDGKLPTATFKTGLVPNTTAHSSAVNVLRFSPSGEYLASGADGGGITLWKLHPADDGEAWKIHKTLLFHHKDVLDLQWSHDGTFLVSASVDNTCIIWEASKGTVQQKLEGHLHYVQGVAWDPLGQPTPPPTRPRTCKIYAKKPQGRSKNAERLNFVCQHTLVKVEYQNHDESKPPTKSHLFHDETLPSFFRRLAWSPDGSFLVLPAGLSKHSSEVINTAYVMSRRDLSRPAIQLPGASKAIVVVRFCPVLFKPRGSNSDGFFKLPYRVVFAVATLNFLYHRHTESVPPILVHAGLHYAAITDIAWSSDAKYLAVSSRDGYCTIIEFENEELGQPHILPGSKEVANGNLTPETKKPVCADSMKVDNSANKLKMEASPVAVGVRAPLLPTENIKRTGELAEGNVTCENKEPVTIDSMEVDADDTKGKEATIPVAAEVTPPPAVPAAKNSASSKPAKRRITPIAID

SEQ ID NO: 297811 - protein, 500 aa, Zea mays
  Clone ID: MRT4577_34677C.1.pep
MGLGVCGSLCQVWVVMRLMVPVMIMVLDDLVKAFTGNFQGTYVRPGNSWDLRSCRQQPGESLRDYIRRFSKQHTELPNITDSDVIDAFLAGTTCCDLVSKLGCKTPTRASELMDIVTKFASGLEAVEAIFRKNKQPQGRQPEDVPEASAQRGTKKKGKKKSQVKRDAADADLVAAAEHRNPRKPPGGANLFDKMLKESCPYHQGPVKHTLEECVMLRRYFHKAGPPAEGGRAHNNDKKEDHKAEEFPEVHDCFMIYGGHVANASARHRKQERREVCSSDKPITFDHPDRVPSLGKYPLVVDPVIGNIRLTKVLMDGGSSLNIIYAETLGLLQIDLSSIRAGAAPFHGIIPGKRVQPLRQLDLHVCFGTPSNFRKETLTFEVVEFRGTYHAVLGRPCYAKFMAVPNYTYLKLKMSGPNGVITVGSMYRHAYECDVECVEYAEALAESEALIADLESLSKEAPDAKRHAGNFEPAETVKFVPLDPSNDASRQVRIGSELDPK

SEQ ID NO: 297812 - protein, 62 aa, Zea mays
  Clone ID: MRT4577_34678C.1.pep
QRTKHVEIDLHFVRDRVALGEVRVLHVPTTSQYADIFTKGLPTSVFIEFRNSLNVRSAPSSN

SEQ ID NO: 297813 - protein, 117 aa, Zea mays
  Clone ID: MRT4577_34679C.1.pep
SIAIGVIRLLAGLLDALFFAAGSGVTSAATGMVASLPLVSSASTSILSIVTGSLFSQVTFPSASSPVLVMFSVGSSGALTPTATGLASILSLLALLSTFMLSAHTGFLVSGVRFPLA

SEQ ID NO: 297814 - protein, 92 aa, Zea mays
  Clone ID: MRT4577_3467C.1.pep
PTSSLVSSALHGCTSKTTRTHLAKTGTQKDAAYIHVCPGVMMHLNTASTDRITAITFDPCLTARINSSNTIMTNQAQLHPFFIPEKKKENRM

SEQ ID NO: 297815 - protein, 1896 aa, Zea mays
  unsure (1)..(1896): unsure at all Xaa locations
  Clone ID: MRT4577_34680C.1.pep
MPRPTPGLGLNLDLGRWSPPRPTPGLGLNLDLGRRSPPRPTLGPGLSLDPGGASASPDLGLGPTTSQGAIITLLLASSGYGEQDRRPIWFAPRRRRGRHGQAGGDTSSAVEQVDGAGAPTGDTSGVDLAFEMKTSVVSPRHANPKQTDDASTLAKDLLGVSLVPEITMQSVPDATSSPSIDREXPTDGRLDXYGPPGSEEDDEPDSSWDFSGLDNPSAMRDFMTACDYCLSECSDSSHSLGDEDCGPSRECFHVDLGGLDEGNHLGMPEDGDPPRPAPRVDILRELAVVPVPAGGQDAQLEQIREVQARLDEEAGQLVQLRQNIGQEWAGRAPAGEARHLAQDVRHRIADDARARLPLASSGVGQNLAAAAILLRAMPEPSTTEGRCIQGELKNLLEDAAVRWAESSASRRQGYPPEHRAATSRFMREASVHTGRTRDTAPAAPGRLGNEHHRHDRRAHLAEKVHRGYHPRRGGRYDSGEDRSPRPNHPGTYVRPGNSWDLRSCRQQPGESLRDYIRQFSKQRTELPNVTDSDVIGAFLAGTTCRDLVSKLGRKTPTRASELMDIATKFASGQEVVEAIFRKEKQPQGRQPEDVPEVSAQHDTKKKGKKKSQAKRDAADADLVTTAEHRNPRKPPGGANLFDKMLKESCPYHQGPVKHTLEECIMLRRYFHKVGPPVEGESAPDNDKKEGLLLLHRAEQFPEVHDCFMIYGGQVANASARHRKQERREVCSVKVAAPVYLDWSDKPITFDQGDHPDRVPSPGKYPLVVDPVIGNVRLTKVLMDGGSSLNIIYAETLGLLQIDLSSIRAGATPFHGIIPGKHVQPLGQLDLPVCFGTPFNFRKETLTFEFMVVPNYTYLKLKMPGPNEVITVGSTYRHAYECDVECMEYAEALAESEALIADLESLSKEVPDAKRHAGNFEPAEAAKSVPLDPSNDTSKQEAVLVDFLHANAEVFAWSPSDMPGIPRDVTEHSLDIRAGARPVKQPLRRFNEEKRRAIGEEIHKLMAAGFIKEVFHPEWLANPVLVRKKGGKWWMCVDYTGLNKACPKVPYPLPCIDQIVDSTAGCETLSFLDAYSGYHQIRMKESDQLATSFITPFGMYCYVTMPFGLRNAGATYQRCMNHVFGEHIGRTVEAYIDDIVVKTRKTSDLETTFKCLKAKGVKLNPEKCVFGVPRGMLLGFIVSERGIKANPEKIAAITNMGSIKDLKGVQRVMGCLAALSRFISRLGERGLPLYRLLRKTEHFAWTPEAEEALGNLKALLTSAPILVPPAAGEALLIYVAATTQVSHLLTVVSSFPLGEIIQCREASGRIAKWAVEIMGETILFAPRKAIKSQVLADFVAEWVDTQLPAAPIQPELWTMFFDGSLMKTGAGTGLLFISPLGKHLRYVLRLHFPASNNVAEYEALVNGLRIAIELGVRCLDARGDSQLFIDQVMKNSHYRDPKMEAYCDEVRRLEDKFYGLELNHIARRYNETADELAKIASGRTMVPPDVFSRDLHQPSVKTDDTPEPEKASAQPEAPSAQPEAPSAPEGEALRAEEERNGVTPDRNWQTPYLXISTGENYPSTESKLGDWRGVPSRSSCWVTERSSTTVAPQASSSDAYPSLRVRNYCRKYTRGLAVITQRLEPLLETPSDRXYWPTAVADATRIVRTCQGCQFYAKQTHMPAQALQTIPITWPFAVWGLDLVGPLQKAPGGYTHLLVAIDKFSKWIEVRHLNSIRSEQAVAFFTNIIHRFGVSNSIITDNDTQFTGRKFLDFCEDHHIRVDWAAVAHPMTNGQVERANDMILQGLKPQIYNDLNKFGRRWTKELPSVVWSLRTTPSRATGFTPFFLVYRAEAILPTDLEHGSPRMRAYDDRGNQTNREDSLDQLEEARDMALLHSARYQQSLRRYHARGVRSRDL

SEQ ID NO: 297816 - protein, 89 aa, Zea mays
  Clone ID: MRT4577_34681C.1.pep
MTSPTLNSYRATTANDVLLLFMFQVYGKAAEGELLGEVGVMSNKPQPFTFRTTRLSQILRIARSKLMDIMRENGEDGQIIRSNFQQVGA

SEQ ID NO: 297817 - protein, 1033 aa, Zea mays
  unsure (1)..(1033): unsure at all Xaa locations
  Clone ID: MRT4577_34682C.1.pep
EGRTTTTSLFITSPFSSPTLPGPGWSICLLRRSPTGTTWSRLSLEISKHRNPRKPLGGANMFDKMLKESCPYHXGPVRNTLEECDMLRRYFNKAGPSAEGGKDQGNNKKGGDKEEEFPEVHNRFMIYGGQVANALARHRKQERREVCSVKVAAPVYLDWSDKPITFDQGDHPDCIPSPGSKRVLPLGQLDLPVCFGTPSNFRKETLTFEVVGFRGTYHAVLGRPCYAKFMVVPIYTYLKLKMPGPKGTITVGSTYRHAYECDVECVEYAEVIAESEALIADPDCLSKEAPDAKRHAGNFELAEAVKSVPLDPSNDASKKEAVXRLSPRKRRNFCVESLGHAWHTEGCRRAXSLDIRAGARPMKQHLRRFDKENLRAIGEEVHKLMVAGFFKEVFHPEWLANPMLVKKKGATYQRCMNHVFGEHIGRTIEAYIDDIVVKTRKASDLLSDLEITFRCLRAKGVKLNPEKCVFGVPRGMLLGFIVSERGIKANPEKIAAITNMGTIKDLKRVQRVMGCLAALSRFILRLGEKGLPLYRLLRKAEHFTWIPEAKEALGNLKALLTNAPILVPPAAGEALLIYVAATTQVVSAAVIVERREEGHALLIQRPVYFVSEVLSETKIRYPQIQKLLYAVILTRRKLRHYFESHTAIKSQFLADFLAEWVDTQLPTAPIQAELWTMYFDGSLMKIRAGAGLLFISPLGKHVRYVIRLHFPASNNVAEYEALVNGLCIAAELGVRCLDARGDSQLVIDQVMKNSHCRDKKIEAYCDEVQRLEDKFYRLELNHIARLYNETTDELAKIASGRTTVPPNVFSSDIYQPSVKLDDAPEPEGPLAQPEKAPGGFTPMLVVIDKFSKWIEVRPLTSIESEQAVAFFTNIIHRFGVPNSIITDNGTQFTGKKFLDFCEGHHIRVDWAAVAHPMTNGQVERANGMILQGLKPRIYNDLNKFGKRWIKELPSVVWSLRMMPSRATGFSPFFLVYGAEAILPTDLEYCSPRTKAYNDQNVAELPELFQLKCLSPALEARPHLNGNNPSIPRI

SEQ ID NO: 297818 - protein, 894 aa, Zea mays
  unsure (1)..(894): unsure at all Xaa locations
  Clone ID: MRT4577_34683C.1.pep
MPFGLRNAGATYQRCMNHVLGEHIGRTVEAYVDDIVVKTRKASDLLSDLEVTFRCLKAKGVKLNREKCVFGVPRGMLLGFIVSERGIEANPEKIAAITSMGPIKDLKGVQRVMGCLAALSRFISRLGERGLPLYRLLRKAECFAWTPEAEEALGNLKTLLTKAPILVPPADGEALLVYVAATTQVVSAAIVVERQEEGHALPVQRPVYFVSEVLSETKIRYPQVQKLLYAVILTRRKLRHYFESHPVTVVSSFPLGEIIQCREASGRIAKWAVEIMGETISFAPRKAIKSQVLADFVAEWVDTQLPTAPIQPELWTMFFDGSLMKTGAGAGLLFISPLGKHLRYVLRLHFPASNNVAEYEALVNGLRIAIELGVRRLDARGDSQLVIDQVMKNSHCRDPKMEAYCDEVRHLEDKFYGLELNHIARRYNETADELAKIASGRTTVPPDVFSRDLHQPSVKIDDSPEPEAPSIQPEVPSAQLEAPSARPEAPSVQPEVPSASEGEALHVEEERSGATPDRNWQTPYLQYLRQGELPLDRAEARRVARRAKSFVLLGDEKELYHRSPSGILQRCISIAEGQELLQEIHSGACGHHAAPRALVGNSFRQGFYWPTAVADATRIVRTCEGCQFYAKQTHLPAQALQTIPITWPFAVWGLDLVGPLQKAPRGYTHLLVAIDKFSKGXGSRTPSSPTTDHHIRXDWAAVAHPMSNGQVERANGMILQGLKPRIYNDLNKFGKRWMKELPSVVWSLRTTPSRATGFTPFFLVYGAEVVLPTDLEYGSPRTRAYSDRSNQASREDSLDQLEEARDKALLRSARYQQSLRRYHARGVRPRDLQVGDLVLRLRQDARGRHKLMPPWEGPFVIAKVLKPGTYKLANSQGEVYDNAWNIQQLRRFYP

SEQ ID NO: 297819 - protein, 311 aa, Zea mays
  Clone ID: MRT4577_34684C.1.pep
MPFGLRNAGVTYQRCMNHVFGEHIGRTVGAYVDDIVVKTRKASDLLSDLEVTFRCLKAKGVKLNPEKCVFGVPRGMLLGFIVSERGIEANPEKIAAITSMGPIKDLKGIQRVMGCLAALSRFISHLGERRLPLYRLKANNGSPGSLLPRPASTLRQDRRHTRARGTLGLARGTLGLVRGTHGSARGTLDPRGPRTCNVSTEESYPSTEPKLGGWRGAPSRSSCWEMGRSSTTAAPQASSSDAFPSPKARSPYERYARGLATITQHPEPLLETPGGYTHPWEGPLVIAKVLKPGTNKLADSQGEVCTNTWNV

SEQ ID NO: 297820 - protein, 59 aa, Zea mays
  Clone ID: MRT4577_34685C.1.pep
CITCIGTRLQALYQLDVRSWVHPNQVYQVDSQHHIRVTMLKPSALDGHAHYPSRQHGYE

SEQ ID NO: 297821 - protein, 1002 aa, Zea mays
  unsure (1)..(1002): unsure at all Xaa locations
  Clone ID: MRT4577_34686C.1.pep
MGSLQQPFQPGTVLRFGSLEFMSLDGSYDMILLPPSRDSDNGGRQPARRRRNRRHLPHVAEEQHSGLSRPLPHRRRRRQGNQGQAGGGTSSAVERVDEAGAPTGGTSGIDLATETKTSAVSPQHANSKQTDDASTLAKNLLGVTLIPETTVQSTPDVTSSLPVDQEXLDPPSDFASVDAFIEASPNPLGXSAMRDFMTACNYCLSDCSDSSRSLGDEDCDPSRECFHVDLGGPGEGNHLGIPENGDPPRPAPRVDILRELAVVPVPTGGHDPRLEQIHEMQVRLDEGAGTLEPFRRDIGQEWAGQPPAGEARHLPQGTQHRIADDARARPPPASSGVGQNLAAAAILLRAMPEPSTTEGRRIERELKNLLEDAAVRRAESSASRRQGYPSEHRAATSRFMREASVHTGRTRNTAPAAPGRLNNEHPHRNRRTHLDERVRRGYHPRRGGRYDSGEDRSPSPEPPGLQAFSRAIRRAPFPTRFRTPTTITKYSGETRPELWLADYRLAYHLGGTDDDNLIIRNLPLFLFDTARAWLEHLPPGQISNWDDLVQTFTGNFQGTYRTELPNVTDSDVIGAFLTGTTCRDLVSKLGRKTPTRASELMDIATKFASGQEAVEAIFRKDKQPQGRPPEDAPEASTQHSTKKKGKKKSQAKRNAADADLVAVAEYKNPRKPLGGANLFDKMLKEPCPYHQGPVKHTLEECAMLRRHFHKVGPRAEGGRARDDDKKEDHKAGEFPEVHDCFMIYGGQVANASARHRKQERREVCSVKVAAPVYLDWSDKPITFDQGEHPDRVPSPGKYPLVVDPVIGNVRLTKVLMDGGNSLNIIYAETLGLLRIDLSSVRAGAAPFHGIIPAKRVQPLGRLDLPVCFGTPSNFRRETLTFEVVEFRGTYHAVLGRPCYAKFMAVPNYTYLKLKMSGPNGVITVGPTYRHAYECDVECVEYAEALAESEALIADLESLSKEAPDVKRHAGNFEPAETVKSVPLDPSNDASKQIRIGSELDPK

SEQ ID NO: 297822 - protein, 114 aa, Zea mays
  Clone ID: MRT4577_34687C.1.pep
GESSHERNHPLLAPLTIHLALDYPPSGARSPRLRSTQSQLLIPTPNPITHRHPRRPTSSRGKRRTQTHQHLTSTRSTSKYNHRTTVSAHPSTRIQWRARNKTGPAHPQAQNQPK

SEQ ID NO: 297823 - protein, 341 aa, Zea mays
  Clone ID: MRT4577_34688C.1.pep
MESGRLIFNAPGSGAGQMLFLDCGAGGGPGGGLFHRGGRPMLGLEEGRGVKRPFYTSPDELLEEEYYDEQLPEKKRRLTPEQVHLLERSFEEENKLEPERKTELARKLGLQPRQVAVWFQNRRARWKTKQLERDFDRLKASFDALRADHDALLQDNHRLRSQVVSLTEKLREKEATEWRRQCRAAAALPAVGVVRASRVTDDVEEPEPEPEPEAEAAAFEERQVKSEDRLSTGSGGSAVVDAADALLYNGRIGGAAVDSSVESYFPGAEVQDQYHGCGTMGPVTHGAGGIQSDDDDGAGSDEGCSYYADEEAAAAFLSEHTHHADGDDEDAGQVSWWWMWN

SEQ ID NO: 297824 - protein, 580 aa, Zea mays
  Clone ID: MRT4577_34689C.1.pep
MDLLGVTLVPETTVQSTPDVTSSPPVDQEVPTDSHLVPFGFSLDPPSDFASVDALVEVSPNPPGYRMRSPWDRLTAVSTYGPSGSEEDDEPDFSWDFSGLGNTSAMRDFMTACDYCLSDCSDGSRSLGDEDCGPSRECFHVDLGGPGEGNHLGIPENGDPPRPVPRVDILRELAVVPVPAGGHDPQLEQIHEMQARLDEGAGTLEPFHRDIGQEWAGQPPAGEARHLPQGLQHRVADDVRARPPPTSSGVGQNLAAAAILLRAMPEPSTTEGRCIQGELKNLLEDVAVRRAESSASRRQGYPSEHRAATSRFMREASVHTGRTRNTAPVAPGRLGNEHPHRNRRTHLDERVRRGYHPRRGGRYDSGEDRSPSPEPPGPQAFSRAIRRASFPTRFRTPTTITKYSGETRPELWLADYRLACHLGGTDDDNLIIRNLPLFLSDTARVWLEHLPSGQISNWDDLVQAFAGNFQGTYVRPGNSWDLRSCHQQPGESLRDYIRRFSKQRTELPKVTDSDVIGAFLAGATCCDLVSKLCRKTPTRASELMDIATKFASGQEAVEAILRKDKQPQGRQPEDVPEASI

SEQ ID NO: 297825 - protein, 95 aa, Zea mays
  unsure (1)..(95): unsure at all Xaa locations
  Clone ID: MRT4577_3468C.1.pep
CRSRGRVGRGSPPSGWGGRRRRRRRPAAAARAGAAGRRRARRRRRARRGRGRGRGGRGRGGRSRAPRXSRCSGSATRXSTTCXRTGPGSGSASIA

SEQ ID NO: 297826 - protein, 956 aa, Zea mays
  Clone ID: MRT4577_34690C.1.pep
MGGAPGIDLALETKTSAVSPQHPNPEQTDDASTLAKGLLGVTLVPKTTVQSVPDVTSSPPVDQEVPTDSHPTSFGFSLDPPSGFALAGALVEASPNPLGFRMRSPWDRLTDVSTYGPSGSEEDDEPSFCWDFSGLGNPSAMRDFMTACDYCLSDYSDGSRSLSDEDCGPSHECFHVDLGGPPEGNHLGMPEDGDLPRLVPRVDIPRELDVVPVQAGGHDPQLEQIRGVQARLDEGAGALEPIHRDVGQAWAGQPPAGEIRHLPQSFQHRIADDVRARPPPASSGVGQNLAAAAMLLRAMPEPSTTEGRRIQGELKNLLEGAAVRRAESSASRRQGYPSEPHAATSRFMREASVYTGRTRNTTPVAPGRLGNEHHHRDRRAHLDERVHRGYHPRRGGHYDSGEDRSPSPEPPGPQAFSRPIRRAPFPTRFRPPTTITKYSGETRPELWLADYRLACQLGGTDDDNLIIRNLPLFLSDTARAWLEHLPPGQISNWDDLVQAFTGNFQGTYVRPRNSWDLRSCRQQPGESLWDYIRRFSKQRTELPNITDSDVIGAFLAGTTCRDLVSKLGRKTPTRASELMDIATKLASGQEAVEAIFRKDKQPQGRPSEDAFEASTQRGAKKKGKKKSQAKRDATDADLVAAAEYKNPRKPPRGANLFDKMLKEPCPYHQGPVKHTLEECVMLRRHFHRTGPPAEGGRARDDDKKEDHQAGEFPEVRDCFMIYGGQAANASARHRKQECWEVCSVKVAAPVYLDWSDKPITFDRADHPDHVPSPGKYPLVVDPVIGDVRLTKVLMDGGSSLNIIYAETLGLLWVDLSSVRAGAAPFHGIIPWKRVQPLGQLDLPVCFGTPSNFRRETLTFEVVGFRGTYHAVLGRPCYAKFMAIPNYTYLKLKMPGPNGVITVGPTYKHAFECDVECVEYAEALAESEALIADLESLSKEVPDVKRQADNFEPAETV

SEQ ID NO: 297827 - protein, 635 aa, Zea mays
  unsure (1)..(635): unsure at all Xaa locations
  Clone ID: MRT4577_34691C.1.pep
LGTSRPAGILFAVQRFGTHKVGYLFASVVLLWLLLIGGVGVYNLLRHDVTVLRAFNPKYILDYFRRNGRDAWVSLGGVLLCFTGTEALFADLGYFSIRSIQLSFGFGLVPAVLLAYIGQAAFLRRYPEQVSNAFYQSTPESIFWPTFVLALAASVIGSQAMISCAFATISHSQALGCFPRVKVLHTSRQYRGQLYIPEVNLLLALVACVVTLASKTTAVIAEAHGICVVLVMLITTLLLTLVMLLVWRVNAACVALFFAVFAAAESVYLSSVLYRFAHGGYIPVAMSAVLVAVMVLWHYVHVKRYKYELERTVSHRQXVRDLLPRCRTVPGVGLFYTDLVQGIPPVFPHLVDKIPSIHAVLLFVSVKHLPVPHVDATERFLFRQVASSSESDTAAGPRVFRCVARYGYRDLLEEASDFAGSLVERLQYYIRDVNLYGVEHQQPGAKVSYPSSRCDSMILMARQRSSVMMLRQSSAASYYSSYXRQRRPSXAAGEGQVHVGGGGHXLHSASERAEQLARARSTGIFAEEMLTPAESFSELSRMGSIGGGGMQAVKISLEEMARIEEEQRFIEREMEXGVVYILGESEVVARPHSSLLKKLLVNYAYAFLRNNCRQGEKMLAIPKSQLLKVGMSYEI

SEQ ID NO: 297828 - protein, 57 aa, Zea mays
  Clone ID: MRT4577_34692C.1.pep
YFFYELNNKLINEFILMCITHTVGPGHGPTLPIIYIQYIVHYVQTRDLCHYMILQVA

SEQ ID NO: 297829 - protein, 84 aa, Zea mays
  Clone ID: MRT4577_34693C.1.pep
CQMTFDLFDDAQGGALKIHLHCIGTTYTVVGRSEADDGGGGGLVGDKEQSVVIRVSRREEVVHSAQQRVEAVVTSCSSLPPLSY

SEQ ID NO: 297830 - protein, 80 aa, Zea mays
  Clone ID: MRT4577_34694C.1.pep
FYFLKNYILSGGTTYYMLLSPLQISITGTFCSSTTYRLFHSLQFHFKDVCYDYSLTYRKISNLFQLSLLHCIKTHAFQTL

SEQ ID NO: 297831 - protein, 67 aa, Zea mays
  Clone ID: MRT4577_34695C.1.pep
NINFYGILKTNYQRGLARIHAQGFRKLIFNGPHLLGQETEHGLNKNRLQGQEGPQTKVPIPILRLYL

SEQ ID NO: 297832 - protein, 62 aa, Zea mays
  Clone ID: MRT4577_34696C.1.pep
GTLLLTHRFGFDFLRNFDGHVHGKALTRWRRRMLRTDTSLSDSAGPRSNTDFTTPTAHTVRY

SEQ ID NO: 297833 - protein, 99 aa, Zea mays
  unsure (1)..(99): unsure at all Xaa locations
  Clone ID: MRT4577_34697C.1.pep
RPRVRVAIIPSMXLSHKIAGFSSHVMKRIQKGPVRGISLKLQEEERERRMDFVPDESAIKVDQIEVDKETLDMLSVLGMADIPGLVKVDPVAVAVPHIW

SEQ ID NO: 297834 - protein, 251 aa, Zea mays
  unsure (1)..(251): unsure at all Xaa locations
  Clone ID: MRT4577_34698C.1.pep
MAAGGDDTTIAQVHSGIDSSNKTLLKSEALYKYVLDTSVLPHEPESMRELRLVTDKHEWGFMQSSPDEASLLRMLIKLSGARRTLEVGVFTGYSLLRTALALPADGKVIAFDVSREYYDIGRPFIERAGVAGKVDFXREGPGXLGQLDELLADPANHGAXFDFAFVDADKPNYVNYHEQLLRLVRVGGTIVYDNTLWCGTVAMPPETPMSDIDRRFSAAIRDLNVRLSADERVEVCQLAIADGVTICRRLV

SEQ ID NO: 297835 - protein, 166 aa, Zea mays
  Clone ID: MRT4577_34699C.1.pep
MARTMLPSPSPHTAVKREIEDAEPTAHTPASLPRKKRRRGGRLPVTPTQLPLSPPLVTPQTIPSVASGDASFAGLTPTPVFSAVKDESGADTGVGSNGRASGKRNDSQDLRSVPRPAAAEPPTLWLNRRRLGLILHELAGAHRWRDAGSVVSTLLSGNRKPDSYEE

SEQ ID NO: 297836 - protein, 62 aa, Zea mays
  Clone ID: MRT4577_3469C.1.pep
IYALHLILLIFLLNHLYNPTSSKFTHLLLNLITTLLQPPHILHLSFLFVPRQNANLRPGRLF

SEQ ID NO: 297837 - protein, 64 aa, Zea mays
  Clone ID: MRT4577_346C.1.pep
NPPSLLHWTAFSLLTIGGAEPSSHGCQAEGPPQSSRTPWCHLILPSYRTDSTLSRHDDQGKLTP

SEQ ID NO: 297838 - protein, 246 aa, Zea mays
  Clone ID: MRT4577_34700C.1.pep
MAPSGDTIALVHSGMDSSNKTLLKSEALYKYVLDTSVLPHEPECMRELRLVTDKHEWGFMQSSPDEAQLLRMLIKLTGARRTLEVGVYTGYSLLATALALPDDGKVIAFDVNRDYYDIGRPFIERAGVAGKVDFREGPALGNLDELLADEANLGAFDFAFVDADKPNYVNYHEQLLRLVRVGGTIVYDNTLWCGTVAMPPETPMSDIDRRFSAAIRDLNVRLSADERVEVCQLAIADGVTICRRLV

SEQ ID NO: 297839 - protein, 248 aa, Zea mays
  Clone ID: MRT4577_34701C.1.pep
MAAGGDDTTIAQVHSGIDSSNKTLLKSEALYKYVLDTSVLPHEPESMRELRLVTDKHEWGFMQSSPDEASLLRMLIKLSGARRTLEVGVFTGYSLLATALALPADGKVIAFDVSREYYDIGRPFIERAGVAGKVDFREGPALEQLDELLADPANHGAFDFAFVDADKPNYVRYHEQLLRLVRVGGTVVYDNTLWAGTVALPPDAPLSDLDRRFSAAIRELNVRLSQDPRVEVCQLAIADGVTICRRVV

SEQ ID NO: 297840 - protein, 307 aa, Zea mays
  unsure (1)..(307): unsure at all Xaa locations
  Clone ID: MRT4577_34702C.1.pep
AVNADECLMTRMQEMSLDYHFAVEQEVGSSTYAFFGFNGTAGVWRISALNEAGGWKDRTTVEDMDLAVRASLKGXWRFLYLGDLMVKSELPSTLKAYRYQQHRWSCGPANLFRKTLVEIVRNKKVTLWKKIHVIYNFFLVRKIVAHAVXTFVFYCXXVIPTTVLVPEVQVPKWGFXVYIPTPGTLLSAVATPRSAHLVVFWTLFENVMSLHRTKATFIGLLEAGRVNEWVVTEKLGDALRTKVPGKKPRMRIGDRLHVLELGVAAYLLFCGCYDIAFGNNRYYIFLFLQSIAFFIVGIGYVGTFVPH

SEQ ID NO: 297841 - protein, 169 aa, Zea mays
  Clone ID: MRT4577_34703C.1.pep
MVGDMVYLKLQPYVQSSLVKRANHKLAFKFFGPYPVIAKIGSVAYKLGLPPSSSIHPVFHVSLLKKALGSNMQVSSTLPPLPDSLQKPVRILQRRQMQTHTGVVPQLLIQWTDWPEELATWEDEAAIIARFPEVAAWGQAVTEGGENVMTSNEPTVRSRPRRERGPTQG

SEQ ID NO: 297842 - protein, 65 aa, Zea mays
  Clone ID: MRT4577_34704C.1.pep
PINQSTRFRPAWPAGLAEALASLRWFELAYARADSGRRKRRRRGRGVETTHTAHRSYACVGYGPP

SEQ ID NO: 297843 - protein, 183 aa, Zea mays
  unsure (1)..(183): unsure at all Xaa locations
  Clone ID: MRT4577_34705C.1.pep
PGPRLIWVVFIGLFFLKGTQKKRGGSTGGQKKPKGGGGPSPPGPLSNSTQPAPSPDPQKLPXLKMGPKKXPQDPGKVGPPQQKKNPGRGKSKSPPWKQTSLNGKRKAFWPGLASGPPLGGLPPLPKRGQGGKGLWLKLPPKTPEPQKAPGAASPQRKPPPPEKGRPPGLGGGAAGPKWKAPGK

SEQ ID NO: 297844 - protein, 67 aa, Zea mays
  Clone ID: MRT4577_34706C.1.pep
TLYILLHLADRLVFSPSYFLTLFHSLEFTRHGEYIHTYTGTCSFSHGGIARLDCAGNDPIGRQLIIL

SEQ ID NO: 297845 - protein, 98 aa, Zea mays
  unsure (1)..(98): unsure at all Xaa locations
  Clone ID: MRT4577_34707C.1.pep
FVSFSLTLSRYFARSDISTFFWYLRVLIWEVSYGAEFTPDAECGYTVILQMTRXVPANEVPIMKGSFMAGXLGKLVLTVNNPASKMKTLLYRSKGKST

SEQ ID NO: 297846 - protein, 87 aa, Zea mays
  Clone ID: MRT4577_34708C.1.pep
SRLANNALVYLCIYSLYLLFIHPINHFPITQWLETGLTWGNDVTVFHVAVDPKMTGVGGLARMGRVIERALTSVPLCVLTEACVGPE

SEQ ID NO: 297847 - protein, 56 aa, Zea mays
  Clone ID: MRT4577_34709C.1.pep
KKYIICLKEGRFPGEGRQQNKKLLLHDRRGCRVGGCARVCWPRYFFASAHASTYVW

SEQ ID NO: 297848 - protein, 82 aa, Zea mays
  unsure (1)..(82): unsure at all Xaa locations
  Clone ID: MRT4577_3470C.1.pep
LXTXLIPSRPRVXXFSVFYDTXIXFXIGASHHMRRPYFGELPPPPFPLLKSAPSTIHTPPALFGKPPSLISPYPTQNRTNNL

SEQ ID NO: 297849 - protein, 486 aa, Zea mays
  unsure (1)..(486): unsure at all Xaa locations
  Clone ID: MRT4577_34710C.1.pep
MGETISFAPWKAIKSQVLADFVAEWVDTQLPAAPIQPELWTMFFDGSLMKTGAGAGLLFISPLGKHLRYVLRLHFPASNNVAEYEALVNGLRIAIELGLVIDQIMKNSHCRDPKMEAYCDEVRRLEDKFYGLEANHITRRYNETADELAKIASARTTVPPNIFSRDLHQPLVKTNDTPEPEKASARPEAPSARPEAPSARPEAPSATEGEALRIEEERNGVTPNRNWQTLYLEYLHRGELPLDRAEAQRLARRAKSFVLLGDGKELYHRSPSDILQRCISIAEGQELLQEIHSGLAGFYWPTAVADATRIVRTCQGCQFYARQTHLPAQALQTIPITWPFAVWGLDLVGPLQKAPGGYTHLLVAIDKFSKWIEVRPLNNIRSEQAVAFFTNIIHRFGVLNSIITDNGTQFTGRKFLDFCEDHHIRVDWAAVAHPMMNGQVERANGMILQGLKPRIYNDLHKFGRQWMKELPLVVWSLXTGFTPFFL

SEQ ID NO: 297850 - protein, 761 aa, Zea mays
  Clone ID: MRT4577_34711C.1.pep
MPFGLRNAGVTYQRCMNHVFGEHIGRTVEAYVDDIVVKTRKASDLLSDLEVTFRCLKAKGVKLNPEKCVFGVPRGMLLGFIVSERGIEANPEKIAAITSMGPIKDLKGVQEGLPLYRLLRKAECFTWTPEAEEALGNLKALLTKAPILVPPAAEEALLVYVAATTQVVSAAIVVERQEEGHALPVQRPVYFVSEVLSETKVRYPQVQKLLYAVILTRRKLRHYFESHPVTVVSSFPLGEIIQCREASGRIAKWAVEIMGETISFAPWKAIKSQVLADFVAEWVDTQLPTTPIQPELWTMFFDGSLMKTGAGAGLLFISPLGKHLRYVLRLHFPASNNVAEYEALVNGLRIAIELGVRRLDARGDSQLIIDQVMKNSHCRDPKMEAYCDEVRRLEDKFYGLELNHIARRYNETADELAKIASGRTTVPPDVFSRDLHQPSVKIDNTPEPEAPSAQFEAPSARPEGELPIDRAEARRVARRAKSFVLLGNEKKAPGGYTHLLVAIDKFSKWIEVRPLNNIRSEQAVAFFTNIIHRFRVPNSIITDNGTQFTGRKFLDFCEDHHIRVDWAAVAHPMPNGQVERANGMILQGFKPRIYNDLNKFGKRWMKELPSVVWSLRTTPSRATGFTPFFLVYGAEAVLPTDLEYGSPRTRAYSDQSNQASREDSLDLLEEARDKALLHSARYQQSLRRYHARGVRSRDLQVGDLVLRLRQDARGRHKLTPPWEGPFVIAKVLKPGTYKLANSQGEVYGNAWNIQQLRRFYP

SEQ ID NO: 297851 - protein, 994 aa, Zea mays
  Clone ID: MRT4577_34712C.1.pep
MGSLQQPLQPGTVLRFGSLEFMSLDGSYDMILLPPPRDNDNGGRQPARQRRNRRRLLCVVEEQHSSSPRPLPRQRRRRRGNQGQAGGRASSGIDLAFGTKASVILSRHANPEQVDDASTLAESLQDVALVPRTTTRSAPDVTMSLLVDQKVLTDSHPTSFRLGLNPPGDHALAGALVEASATPLGFRMRSPWDRLTDVSTYGPSLSEEDDDPSICWDFSGFGNPSAMRDFMTACDYCLSDCSDGSRSLDNKDCGPSCECFHVELGDPSEGGRLGMPEDGDLPRPVPRADIPRELAVVPVPAGGHDPQLEQVRGAQARLDEGAGALEPIRRDVGQVWAGQPPAGEIRHLPQGLQHRVTDVVRVRPPPASSGVGQNLAAAAMLLRTMPEPSTTEGRRIQGELKNLLEDAAVCRAESSASRRQGYPSEPHAATSRFMREASVYTGRTRNTAPATPGHLGNERHHRDRRAHLDERVERTTTTSIIRNLPLFLSDTARAWLEHLPPGQISNWDDLVQAFAGNFQGMYVRPGNSWDLRSCRQQPGESLRDYIRRFSKQRTELPNITDSDVIGAFLAGTTCRDLVSKLGRKTPTRASELMDIATKFASGQEAVEAIFRKDKQPQGRPSEDAPKASTPRGAKKKGKKKSQAKRDAADADLVAAAEYKNPRKPPGGANLFDKMLKEPCPYHQGPVQHTLEECVMLRRHFHKAGPPAKGGRARDDDKREDHQAGEFPEVRDCFMIYGGHAANASARHRKQERREVCSVKVAAPVYLDWSDKPITFDHADHPDHVPSPGKYPLVVDPIIGDVRLTKVLMDGGSCLNIIYAETLRLLRVDLSSVRAGAAPFHGIIPGKRVQPLGRLDLPVCFGTPSNFRREILTFEVVGFRGTYHAVLGRPCYAKFMAVPNYTYLKLKMSGPNGVITVGPTYKHAFECDVECVEYAEALAESEALIADMENLSKEVPDVKRHAGNFEPAETVKAVPLDPSGDTSKQIRIGSGLDPK

SEQ ID NO: 297852 - protein, 983 aa, Zea mays
  unsure (1)..(983): unsure at all Xaa locations
  Clone ID: MRT4577_34713C.1.pep
MGSLQQPLQPGTVLRFGSLEFMSLDGSYDMILLPPPCDSSNGGRQPARRRRDRRRLPRVVEEQHSSSLRPLPSRRRRRRGNRGQAGGSASLAVERVDSAGTSTGGAPGIDLAFETKTSAVSPQRADSKQTNDASTLANGLLGVTLVPETTVQSVPDVTSSPPVDQEVPTDSHLTPLGFSLDPPSDFALAGALVEASPNPLGFRMRSPWDRQTDVSTYGPSGSEEDDVPDFCWDFSGLGNPSAMRDFMTACDYCLSDCSDGSRSLGDEDYGPSRECFHVDLGGPSEGNHLGMPENGDLPRPVPRVDILRELAVVPVQAGXHDPQLEQIRGVPARLDEGAGALEPIRRDVGQEWAGRPPAGEMRHLPXGFQHRIADDARMRPPPASRGVGQNLAAAAMLLRAMPEPSTTKGRQIQGELKNLLEGAAVXRAESSTSRRQGYPSEHRAATSRFMREASVHTGRTRNTVPAAPGRLGSEHHHRDRRAHLDEXDYRMACQLGGMDDDNLIIRNLPLFLSDTARAWLEHLPPGQISNWDDLVQAFTGNFQGTYVRPRNSWDLRSCRQQPGESLRDYIRRFSKQRTELPNITDSSVIGAFLAGTTCRDLVSKLGRKTPTRASELMDIATKFASGQEAVEAIFRKDKQPQGRPPEDAPEASTQRGAKKKGKKKSQAKRDAADADLVAAAEYKNPRKPPRRVGPPAEGGRARDDDKKEDHQAGEFPEGRDCFMIYGGQAANASARHRKQERREVCSVKVAAPVYLDWSDKPITFDQADHPDHVPSPGKYPLVVDPFIGNVRLTKVLMDGGSSLNIIYAGTLGLLHVDLSSVRAGAAPFHEIIPGKRVQPLGQLDLPLCFGTPSNFRRETLTFEVVGFRGTYHAVLGRPCYAKFMVVPNYTYLKLKMPGPNGVITVGPTYRHAFECDVECVEYAEALTESEALIADLESLSKEVPDVKRHTGNFEPAETVKSVPLDPSSDASKQIRIGSELDPK

SEQ ID NO: 297853 - protein, 726 aa, Zea mays
  unsure (1)..(726): unsure at all Xaa locations
  Clone ID: MRT4577_34714C.1.pep
MSFGLRNAGATYQRCMNHVFGEHIGRTVEAYVDDIVVKTRKASDLLSDLEVTLRCLKAKGIKLNPEKCVFGVPRGMLLGFIVSERGIEANPKKIAAITNMGPIKDLKGIQRVTGCLAALSRFISRLGERGLPLYRLLRKAECFTWTPGAEEALGNLKALLTKAPILVPPAAGEALLIYVVATTQVVSVAIVVERREEGHALPVQRPVYFISEVLSETKIRYPQIQKLLYAVILTRRKLRHHFESHPVTVVSSFPLGEIIQCREASGRIAKWAVEIMGETISFAPRKAIKSQVLADFVAEWVDTQLPTAPIQPELWTMFFDGSLMKTGAGAGLLFISPLGKHLRYVLRLHFPASNNVAEYEALVNGLRIAIELGLRRLDARGDSQLVIDQVMKNSHCRDPKMEAYCDEVRRLEDKFYGLELNHIARRSTSCPXPEKASAQPEAPSAQPEAPSAPEEGTRGLHAPAGRHRQILQVDRGPXPLNSIRSEQAVAFFTNIIHRFGVPNSIITDNGTQFTDIKFLDFCEDHHIRVDWAVVAHPMTNGQVERANGMILQGLKPQIYNDLNKFGKRWMKELPSVVWSLRTTPSRATGFTLFFLVYGAEAILPTNLEYGSPRTRAYDDQSNRANREDSLDQLEEARDMALLHSTRYQQSLRRYHARGVRSRDLQMGDLVLRLRQDARGRHKLTPPWEGPFVIAKVLKPGTYKLANSQGEVYNNAWNTRQLRRFYP

SEQ ID NO: 297854 - protein, 992 aa, Zea mays
  Clone ID: MRT4577_34715C.1.pep
MPFGLRNAGATYQRCMNHVFGEHIGRTVEAYVDDIVVKTRKASDLLSDLEVTFRCLKAKGLKLNPEKCVFGVPRGMLLGFIVSERGIEANPEKIAAITSMGPIKDLKGVQRVMGCLAALSRFISRLGERGLPLYRLLRKAECFAWTPEAEEALGNLKALLTKVVSAAIVVERQEEGHALPVQRPVYFVSEVLSETKIRYPQVQKLLYAVILTRRKLRHYFESHPVTVVSSFPLGEIIQCREASGRIAKWAVEIMGETISFAPRKAIKSQVLADFVAEWVDTQLPTTPIQPELWTMFFDGSLMKTGAGAGLLFILPLGKHLRYVLRLHFPASNNVAEYEALVNGLRIAIELGVRRLDARGDSQLVIDQVMKNSHCRDPKMEAYCDEVRRLEDKFYGLELNHIARRYNETADELTKIASGRTTVPPDVFSRDLHQPSVKIDDTPEPEAPSVQPEVPSAQPEAPSAQPEAPSVQPEVPSAQPEAPSARPEAPSVQPEVPSAPEGEALHVEEEQSGATPDRNWHTPYLQYLRQGELPLDQAEARRVARRAKSFVLLGDEKELYHRSPSGILQRCISIAEGQELLQEIHSGACGHHAAPRALVGNAFRQGFYWPTAVADATRIVRTCEGCQFYAKQTHLPAQALQTIPITWPFAVWGLDLVGPLQKAPGGYTHLLVAIDKFSKWIEVRPLNSIRSEQAVVFFTNIIHRFGVPNSIITDNGTQFTGRKFLDFCEDHHIRVDWAAVAHPMSNGQVERANGMILQGLKPRIYNGLNKFGKRWMKELPSVVWSLRTTPSRATGFTPFFLVYGAEAVLPTDLEYGSPRTRAYYGQSNQASREDSLDQLEEARDKALLHSARYQQSLRRYHARGVRPRDLQVGDLVLRLRQDARGRHKLTPPLGGAIRHRQSSEAQNVQAGQQSRRGLRQRLEYPTATSLLPLRYFQVVHIPRTHAKFSHQGRVGLASAKPDSPSGAKRGETPSALKFSSKKDLFYQNIFRAF

SEQ ID NO: 297855 - protein, 514 aa, Zea mays
  unsure (1)..(514): unsure at all Xaa locations
  Clone ID: MRT4577_34716C.1.pep
CSNVSRDRKPSSAKVGSXKAFSRAIRRAPFPTRFRTPTTITKYSGETRPKLWLADYRLACQLGGTDDDNLIIRNLPLFLSDTARAWLDHLPLGQISNWDDLVQAFASNFQGTYRTELPNVTDSDVIGAFLAGTTCRDLVSKLGRKTPTRASELMDIATKFASGQEAVEAIFRKDKQPQGRQPEDVPEASAQRGTKKKNKKKSQAKRDATDADLVAAAEYKNPRKPPRGANLFDKMLKELCPYHQGPDKHTLEECVMLRRHFHRAGPPAEGGRAHNNDKKEDHKAEEFPEVHDCFMIYGRHPDRVPSPGKYPLVVDPVIGNVRLTKVLMDEGSSLNIIYAETLGLLQIDLSSIRAGAAPFHGIIPGKCVQPLGQLDLPVCFGTPSNFRRETLTFEVVGFRGTYHAVLGRPCYAKLMAVPNYTYLKLKMSGPNGVITVGPTYRHAYECDVECVEYAEALAESEALIADLESLSKEAPDVKHHAGNFKPAEMVKSVPLDPSNDASKQIRIGSKLDPK

SEQ ID NO: 297856 - protein, 77 aa, Zea mays
  Clone ID: MRT4577_34717C.1.pep
KMSKARSVRSNSSRHPGTSTIYKNPAYPSMSSDRRNIDRLHYAKHEQQCHQVANYYQIEYTALQVTIVTVIRLIIVQ

SEQ ID NO: 297857 - protein, 100 aa, Zea mays
  unsure (1)..(100): unsure at all Xaa locations
  Clone ID: MRT4577_34718C.1.pep
GSRSSQSLSYLGCTLSGDYGFDPLRLSDPEGTGGFLEPQWLVXVIVIXGRYAMLGSEGAIASEILGKMGIIHVVVXLTMFKSFVYPXPSVTLHYWSDYYI

SEQ ID NO: 297858 - protein, 883 aa, Zea mays
  Clone ID: MRT4577_34719C.1.pep
MAANNPPAGGGIDDVFPTWRKNDFRVYPVASPADGGGGGATKAKQEAAPRRLSKASPNPPGYRMRSPWDRLTAVSTYGPSGPEEDDEPDFCWDFSGLGNPSAMRDFMTACHYCLSDCSDGSRSLGDEDCGPSRECFHVDIGGPGEGNHLGIPENGDPPRPAPRIDILRELGVVPVPTGGHDPQLEQIREMQARLDEGAGTLEPFRRDIGQEWAGQPPAGEARHLPQGIQHCIADDVRARPPLASSGVGQNLAAAAILLLAMPEPSTTEGRRIQGELKNLLEDAAVRRAESSASRRQEYPSEHRTATSRFMWEASVHTGRTRNTAPAAPGRLGNEHHHRDRRAHHDEKVRRGYHPRRGGRYDSGEDWSPSPEPPGPQAFNRAIRRAPFPTRFRTPTTITKYSGETRPELWLTDYQLACHLGGMDDDNLIIRNLPLFLSDTARAWLEHLPPGQISIWDDLVQAFADNFQGTYVRPGNSWDLRSCRQHPGESLRDYIRRFSKQRTELPNVTDSDVIGAFLAGTTCRDLRGTKKKGKKKSQVKRDAADADLVAAAEYKNPQKPPGGANLFDKMLKEPCPYHQGPVKHTLEECAMLRRHFHKAGPPAEGGRACDDDKKEDHKAGEFPKVHDCFMIYGGQVANTSARHRKQERREVCSVKVAAPVYLDWSDKPITFDQGDHPDRVPSPGKYPLVVDPVIGNVRLTMVLTDGGNSLNIIYAETLGLLRIDLSSVRAGAAPFHGIIPGKRVQPLGQLDLPVCFGTPSNFRRETLTFEVVGFRGTYHAVLGRPCYAKFMAVPNYTYLKLKMPGPNGVITVGPTYRHAYECDVECVEYAEALIADLESLSKEAPDVKRHAGNFEPVETVKSVPLNPSNDTSKLIRIGSELDPK

SEQ ID NO: 297859 - protein, 491 aa, Zea mays
  Clone ID: MRT4577_3471C.1.pep
AGRVWIKRSPLDIKVPFETVFSNEESKIRSSMLSEGFMSFASGWNSVDVDSEVSWLPDYADKAHDHKLSCELDTISGSFLPNCARMRYLEALLDRGSKDGLVLIKKWLIEALQHGKLTSASKGWQGATSVSEIRSMVQMLSRDQLSLLKNRGVIQLALAAEMTLREPQSSRWDAFTSAERILSVTSAETPQSLASELRDFINTSTLVESHTQTTSMESSQGLLSFQDVLLLTIIGYILAGENFPTSMAGGPFSWEDERSLKDVIVDSILERPSSVKLRFLDGLDSELEAKARSKDGERNKNSSEVAPSTDDDFDDEWGTWDDSDNTDHQKEEAYGDMQLKLEVRDRVDQLFKFFHKLSSMRLRNQALGEGLAALSRFETDGYSRKCLLYKLLLALLSRYDVPGLEYHSSTVGRLFKSGLGRFGLGQSKPAFGDQSVLIIFVLGGINTLEVREVMTAISESSRPDVELILGGTTLLTPDDMFELMLGSSSFA

SEQ ID NO: 297860 - protein, 496 aa, Zea mays
  Clone ID: MRT4577_34720C.1.pep
MSEEATLEDTPTWIVASVCSVIVLISFVFERALHHLGKALERRRKTLYEALLKLKEELMLLGFVSLLLVVSQDLIQKICIDDSLMEHWMPCRGASATASAHYGVSSSSSSSAVGGGRRMLKGGGAAFGHCSSKGKVPLLSLHALEQVHIFIFVLAITQVVLSVATVLLGLLQMRIWMHWENTIQQEGSSAPKMIARVQKIRFIQDRCKGYEKAAWVIIWLRSFFKQFYGSVSNDDYIAMRLGFVMEHFRGHPKFNFYDYMIKALEKDFKRVVSIKWYYWIFVMIFLLLNVTGWHSYFWISLVPLALLLLIGTKLEHIINRLAYEVASKHAAGQGEGGIVVSPSDELFWFRSPRLVLVLIHFILFQNAFEFAYFFWTLAMFGANSCIMDSLGYSVSRIIICVVVQVLCSYSTLPLYAIVSHMGSSFKSAVFVDDVADNLRGWADGARRRVRRSATGVDASCLGTPAAAGRGWEGAAGWRLIAGRPSRPTQQPRSISF

SEQ ID NO: 297861 - protein, 808 aa, Zea mays
  unsure (1)..(808): unsure at all Xaa locations
  Clone ID: MRT4577_34721C.1.pep
MAEEQHPGLSRHLPRRERRRRGNHGQTGGDTSLAVDRVDDAGAPAGDTSGVDLASETKTSIISPQHANPKRMDDASTLAKDLLDVSLVPEITVQSIPDATSSPSVDQEVPSVFHPVPFRFSFNPPSDPASVDAFIKAYPNLPGYHMWSNWDRLTTVSTYGPPVSEEDDEPDSGWDFSGLDNPSAMRDFMTACDYCLSDYSEGGHNLDDEDCGPSSECFHVDLGGLDEGNHLGRALAEEARHLAQDIQHRVANDARARLSPASSGVGQNLAAAAILLRAMPEPSTIEGRHIQGELKNLLEDAMVRRAESSASRRQGYPXEHRVATSRFMREASVHTGCTRDATPAAPGRLGNEHHHRDCRAHLDEKVCRGYHPRCGGRYDXGGSESLARTTRSASFQPGHTTGAVPDPVPSPDYHHQQTELPNITDSDVIDAFITGTTCRDLVSKLGRKTPIRASELKDIATKFASGQEAVEAIFRKDKQPQGRQQEGIPEASAQRGTKKKGKKKSQAKHDATDADLVAAAGHKNPRKPPGGANLFDKMLKESCPYHQGPVKHTLEECVMLRRHFHKVGPPAEGGKGHDNDKKEGHKAEEFSEVHDCFMIYGGQVANASTRHRKQEHREVCSVKVAAPVYLDWSDKPITFDQGDHPDRVPSPGKYPLVVDPVIGNVRLTKVLMDGGSSLNIIYAETLGLLQIDLSTIRAVLGRPCYAKFMAVPNYTYLKLKMSGPNGVITVGSTYRHVYECDVECVEYTEALAESEALIADLESLSKEVPDAKRHAGNFDPAEAVKSVPLDPRNDASKQVRIGSELDPK

SEQ ID NO: 297862 - protein, 118 aa, Zea mays
  unsure (1)..(118): unsure at all Xaa locations
  Clone ID: MRT4577_34722C.1.pep
TKSIININRTSTTTRPTHRTLRTITNNLPIHHQQHTTIRQTRPTTTHHKKQHHTTRHMPRTQHRQQHXPHHDXHHQHHPNPHHRRRRHHYRSHHHHSRLQLKKKKTDNRCYEEREITD

SEQ ID NO: 297863 - protein, 432 aa, Zea mays
  unsure (1)..(432): unsure at all Xaa locations
  Clone ID: MRT4577_34723C.1.pep
MIYGGQAANASARHRKQERREVCLVKVAVPVYLDWSVKPITFDQADHPDHVPSPGKYPLVVDPVIGDVRLTKVLMDGGSSLNIIYAETLGLLRVDLSSVRXGDAPFHGITPGKRVQPLGQLDLPVCFGTPSNFRRETLTFEVVGFRGAYHAVLXRPCYAKFMAVPNYTYLKLKMSGPNGVITXRPTYKHAFECRREVCGSTPRPLVESEAXHLRPGRASSKEGAERESVMAGNFEANGKWFKSVPLDSXSDASKQVRXLRARSQIGSSARRLLRANADVFAWSPLDMPGIPRDVAEHSLDIRXEPDPSKQPLRRFDEEKRRAIGEEIHKLMAAGFIKEVFHPEWLANPVLVRKKGGKWRMCVDYNGLNKACPKIPYPLPRIDQFVDSTAGCETLSFLDAYSGYHQIRMKESDQLATSFITPXGLYCYVTMSI

SEQ ID NO: 297864 - protein, 236 aa, Zea mays
  unsure (1)..(236): unsure at all Xaa locations
  Clone ID: MRT4577_34724C.1.pep
PGSDDRHIWRLSSTGVYTAKSAYGGFFIGATVFGPSDLIWKSWAPKKCRFFXLWLVALGKCWSADRLARRGLQXHPLCCLFCDQDEETINHLLVSCSFXRQFWFVLLQVVGLQRLSPQPDTSFFLEWWSGSAAVVDEQFQQGFYYIILLGAWLLWKHRNRCVFDGIGIKPDVQHVLSLATEEMRLWGLAGAKGIRMLTCWRVILLDPGHVSLFWSRIVSVLFFYSFSFSFCSLFWG

SEQ ID NO: 297865 - protein, 141 aa, Zea mays
  Clone ID: MRT4577_34725C.1.pep
FSFGIVFWELLPGKLPYENMPPFQAPVFFVQKDLRPPIAVETPPMPGELPQKCWQKDPALSPPFAKIVDILTSIKEAVRSFVPPKRHSGRSPPGKKRGCLCPRFLWSRPPFSFYFWSRAITSEYGPKPFLCSSREVLGPFF

SEQ ID NO: 297866 - protein, 235 aa, Zea mays
  Clone ID: MRT4577_34726C.1.pep
CLLLILQQTVSRLTPWRLLTRAAAPIGRSRRGRLQRSSRRRKTAERQGLARPPRRRRVLPAVDRGEELTPLHTQPATPQLFNLLLKKAFASASTSNRDGHSIHGGSREAAGGIQLHPMRRQPFQCSVIQLLSCQSELGQGYVQAGGGYIDYRLDWTGRRIWDPFPRKTRDLGLGLDSGGGPRRGRENQTTVAVQSNPLGDFFDFFPPPRLSLRLYFLPSFPCGQDILYPGPAGLE

SEQ ID NO: 297867 - protein, 44 aa, Zea mays
  Clone ID: MRT4577_34727C.1.pep
IFSNYFKYKTKLPHSPTHSPINLLRRHTTHMNQNTVRTTVLARH

SEQ ID NO: 297868 - protein, 117 aa, Zea mays
  Clone ID: MRT4577_34728C.1.pep
GEHFLAMQLAARIFIPKSQLPRPLQSVVVQEPSSGECFIVIDSIPVGGLRSWDSCPSGGKCFPIPNGESMWGFCQPISFLFPVKGFSAVSSKRPVGPVATDPPIYLPIAIVMGCVVF

SEQ ID NO: 297869 - protein, 93 aa, Zea mays
  Clone ID: MRT4577_34729C.1.pep
GPCSLRLSNWAPGFLGHGGPNWFGSGLGGITGPDSVARLDAVNNYDGLLLSGMPSTHLILFLALCDLLSGLYLTVHIVRSMLRSPLYSGPDLK

SEQ ID NO: 297870 - protein, 67 aa, Zea mays
  Clone ID: MRT4577_3472C.1.pep
REKTLLLLGRGQRPPADVPAHRYPSLIPHRSSDHNRDAFQVVSNRLALLACGCWLPVCCLCFLLKLC

SEQ ID NO: 297871 - protein, 107 aa, Zea mays
  unsure (1)..(107): unsure at all Xaa locations
  Clone ID: MRT4577_34730C.1.pep
RQGSKRIVVKGLVFRAIVQXGFNXGGAEPLSGFVTKDGPGGIPPKGIPKIVKEKFYFRPGMIIINPAPKKRGNGGYPKRGAYGPFGRGAPRFPWEGGKPPKVGKPFA

SEQ ID NO: 297872 - protein, 220 aa, Zea mays
  unsure (1)..(220): unsure at all Xaa locations
  Clone ID: MRT4577_34731C.1.pep
MPTYSMAKAELLLALVASLVVLPFSSLAVYQDFCIADLSAAATPGGYPCKPPKDVTADDFHYGGLATPGTALKPFKISLGSAVVTTFPGLNGLGISAARMVMVPGGVAPLHSHPGGTELIFVIEGSVVCGFISATLNRVYTKTLYAGDLMVLPQGQLHFQYSHGNTXAVTLSSFSSDNPGLQILDFALFANDLPTEVVNKVTNLXELXIVKLKXLFGPPR

SEQ ID NO: 297873 - protein, 220 aa, Zea mays
  Clone ID: MRT4577_34732C.1.pep
MPTYSMAKAELLLALVASLVVLPFSSLAVYQDFCIADLSAAATPGGYPCKPPKDVTADDFHYGGLATPGTALKPFKISLGSAVVTTFPGLNGLGISAARMVMVPGGVAPLHSHPGGTELIFVIEGSVVCGFISATLNRVYTKTLYAGDLMVLPQGQLHFQYSHGNTTAVTLSSFSSDNPGLQILDFALFANDLPTEVVNKVTNLDELQIVKLKALFGGRG

SEQ ID NO: 297874 - protein, 165 aa, Zea mays
  Clone ID: MRT4577_34733C.1.pep
CSIDSPQNGPLPPDAPSWCQAPFDPEGLLSSVMAIVTCLIGLQYGHVIVHFQKHRERIMNWLIPSFSMLVLAFAMDFLGLRMNKPLYTLSYTLATAGAAGLLFCGIYTLVDIYGYRRPTVAMEWMGMHALMIYVLIACNILPIFIHGFYWKEPQNNLLKFIGIGP

SEQ ID NO: 297875 - protein, 94 aa, Zea mays
  Clone ID: MRT4577_34734C.1.pep
SPNYNKTQIKSYYLLTQHLNHTTTNFHITSLLNLFKTYHTFNSSNQHYNILYYTTHSSNIPLTITHSYFFISIILPTTITPKHNYTPKNIRTSY

SEQ ID NO: 297876 - protein, 93 aa, Zea mays
  unsure (1)..(93): unsure at all Xaa locations
  Clone ID: MRT4577_34735C.1.pep
GGHELLIFVALREXLDXEMNLDPAGCNMGEDDGHYGGSYKVTKGLAAMFCDLRLLDTPICANFFIEMGTXSQMNGLRPVVEGIYMRFHFLTYN

SEQ ID NO: 297877 - protein, 117 aa, Zea mays
  Clone ID: MRT4577_34736C.1.pep
HGSPLSARRDSPPSAARPANARPNALGLAALMARSERVRCNYSKEGGGGSTNGAGVSLLAGAGAATTLLGSALALVDDRMSTEGTRLSLWLRNNLLGRILVGGSDLICFFYTIYTSD

SEQ ID NO: 297878 - protein, 56 aa, Zea mays
  Clone ID: MRT4577_34737C.1.pep
GPQNLFWGIFKILTGPPKSGTSFHHSPIHPGTRFFYPLINPRGGFFKTTTILWGAL

SEQ ID NO: 297879 - protein, 455 aa, Zea mays
  Clone ID: MRT4577_34738C.1.pep
GAGLPLACGLPLLECVYCLACARWAWKRCLHSGEVDSATWGLASADDFEPVPRMCRLVMANYEPDLSPSAPLLFAPPGGYGIDPACVLRRRTYADTRGRVTPYLLYLDHAHADIVLALRGLNLVKESDYALLLDNRLGKRRFDGGYVHNGLLRAAGWVLDAECDLLRELLETYPDYTLTFTGHSLGAGIAAMLTMVVVLNLDKIGNIDRTRTRCYAMAPARCMSLNLAVRYADVITSVSGQDDFLPRTATPLEDIFKSILCLPCLLGLRCLRDTCIPEDAMLKDPRRLYAPGRIYHIVERRTCRCGRYPPVVKTAVPVDGRFEHIVLSCNATADHAIIWIEREAQKALDLMLEEENTLAVPSEQRMERNETLQREHVEEHRAALRRAVTLSVPDGRRPSPYGTFDDVEQHRQQPERSESFPPAGPRQRMSWNDLIERVFDKDEDGQIVLRSSVLL

SEQ ID NO: 297880 - protein, 36 aa, Zea mays
  Clone ID: MRT4577_34739C.1.pep
LSHRTSLPLSYLLLITHTPILQQRRTFPLYLQHHFL

SEQ ID NO: 297881 - protein, 136 aa, Zea mays
  Clone ID: MRT4577_3473C.1.pep
GMVLFEILGRRRNYDPCLEGESKEWFPRWVWEKYEQGEIEHVVSCSCDGIVGGADREKAEIMCKVALWCVQFQPSARPTMNSVVRMLEGEMPIVPPVNPFHYFMESSGGSTSSGLWSGTYQSSSRDPAGPELSPVE

SEQ ID NO: 297882 - protein, 165 aa, Zea mays
  Clone ID: MRT4577_34740C.1.pep
MNVEKLKKMAGAVRTGGKGSVRRKKKAVHKTTTTDDKRLQSTLKRIGVNSIPGIEEVNIFKDDVVIQFVNPKVQASIGANTWVVSGTPQTKKLQDLLPSIINQLGPDNLDNLRRLAEQFQKQASGASGAEAGASAGAVQDDDDDVPELVPGETFEEAAEEKKESS

SEQ ID NO: 297883 - protein, 144 aa, Zea mays
  unsure (1)..(144): unsure at all Xaa locations
  Clone ID: MRT4577_34741C.1.pep
ECSALFLNDDSAKIRETECPPCPRLFCAPCPVPWPHGVECQEFWKLGDSQKGGNYFMLXTFCXQEKWPRCPQCRMYVSPKSGGLFINCRGQPDFCFPCAAPMDRGTPHCWNCPPQRSRFRSFLIMSRGSSLFTMPAPWAVVGDT

SEQ ID NO: 297884 - protein, 147 aa, Zea mays
  unsure (1)..(147): unsure at all Xaa locations
  Clone ID: MRT4577_34742C.1.pep
MNVEKLKKMAGAVRTGGKGSVRMKNKASHKTTTTDDKRLQSTSKRIGVNSVPGIEEVNIFKDDVVIQYVNPKVQASIGANTWVVSGTPQTQKLQDLLASVINQLATDHLHNLRRLAEQLQKQAYGAIGAEDFVNRXAVHDDDDDVPE

SEQ ID NO: 297885 - protein, 92 aa, Zea mays
  Clone ID: MRT4577_34743C.1.pep
GRERDCCLFLWCWRRGRFFLLSETRSAIDSLDKTAKTRRTGVGHAGGLITVATVSKRLDTEAAAADTLKFCTEVRNSDISLTHEFGSDDAAK

SEQ ID NO: 297886 - protein, 153 aa, Zea mays
  Clone ID: MRT4577_34744C.1.pep
MNVEKLKKMAGAVRTGGKGSVRRKKKAVHKTTTTDDKRLQSTLKRIGVNSIPGIEEVNIFKDDVVIQFVNPKVQASIGANTWVVSGTPQTKKLQDLLPSIINQLEQFQKQASGASGAEAGASAGAVQDDDDDVPELVPGETFEEAAEEKKESS

SEQ ID NO: 297887 - protein, 54 aa, Zea mays
  Clone ID: MRT4577_34745C.1.pep
VFIFLFVFIFSSFSEGALNNCLPYLPLYTLGGKKYPLVPPPFSRDFLFFFNSPP

SEQ ID NO: 297888 - protein, 90 aa, Zea mays
  Clone ID: MRT4577_34746C.1.pep
HLAGFFFITRTSFCSSKRAQTYFPFLTTQHPLFYLRVWASIQFFFIYACQVFERKQDLYFRKKGHWGSARPDTYTSPISIFYPLRRSYGG

SEQ ID NO: 297889 - protein, 123 aa, Zea mays
  Clone ID: MRT4577_34747C.1.pep
SSLPFILPRLTRTRTLVILKTRPTSNQIRVRGSNSPRIIPVMQFNSRVLLPWSHQQCTDTPSPLACPRRSAAAKATTAPETSTPSTVTTTTFSTKRTRSRTVPPTSSRMLPRMRSMSPAEEAP

SEQ ID NO: 297890 - protein, 128 aa, Zea mays
  unsure (1)..(128): unsure at all Xaa locations
  Clone ID: MRT4577_34748C.1.pep
DFRQEPLSFCHPLSLGHAVLVGLRVPGAARPHLLQVRLVPIFYVSFLLFFIFXFLFLLFSSFFFIFFIFFLFLIFTSFFFLLTFLFFFSFVLFIFFFILYFIFFSLSLLFYFFYSFYFIFFLYFXFNF

SEQ ID NO: 297891 - protein, 76 aa, Zea mays
  Clone ID: MRT4577_34749C.1.pep
PSSFSSALKEAYSNQGHQAGSQIPLLQILILGGLNSIPRARSFGIKQPSKLSRARNEAAAVAGGVNCPSGRFIAIL

SEQ ID NO: 297892 - protein, 66 aa, Zea mays
  Clone ID: MRT4577_3474C.1.pep
YRIFITISSYPELPPAIMIGSAPPGRDAGRGRGPARAAVVRAAAAARGAAARGGGARARRRGARGR

SEQ ID NO: 297893 - protein, 885 aa, Zea mays
  Clone ID: MRT4577_34750C.1.pep
MFFIPEEFVGDNIRVVRDFPDVFLEELPGMPPDREVEFVIDLLPGTAPISKRPYRMSVEELKELKKQLTELQEVGYIRPSSSPWGAPVLFVQKKDGSQRMCVDYRSLNDVTVKNKYPLPRIEDLFDQMRGARVFSKIDLRSGYHQMRIRPSDIPKTAFSTRYGLYEFIKLQDNQLYAKYSKCEFWIGKVPFLGRIISNGGISVDPAKVKEIMEWRVPTTVTEIRSFLGLTGYYRRFIEGFSKIAKPMTSLLEKGKEFKWDEKCQNSFDLLKKRLMSPPGLGCVLMQEGHVIAYASRQLRKHELNYPTHDLELAAVVHALKIWRHYIMGTKCQVYTDHKSLKYIFTQKDLNLRQRRWLELIKGYDLEIHYHPGKANLVADALSRKEHVHSVIVAQLPDEIVEDFRRLNLGIVAHTEGVTIDVEPTLEQEIRKGQLDDAKIKDIKELITEGRGPEFTEDEQGTIWFKDRMCVPDIKSLRETILKEAHDSDYSIHPGSTKMYQDLKRKYWWYGLKRDVAAHVAMCDVCQRVKAEHQRPAGLLHPLKIPEWKWKEIGMDFITGLPRTQKGYDAIWVIVDRLTKVAHFIPVKTTYKGSQLAELYMARIVCLHGVPKKIVSDRGSQFTSRFWRSFHENMSTKLNFSTAYHPQTDGQTERTNQVLEDMLRACALQHGGSWDKSLPYAEFSYNNSYQASLQMSPFEALYGRKCRTPLYWDQTGERQFFGPELIQEAEEQVRIIRENLRVAQTRQKSYADNRRRPLEFEEGDYVYLKVSPLRGMRRFKVKGKLSPRYIGPFLIFRRVGEMAYQLELPASLSDVHNVFHVSQLKKCLRVPEEHLPMEELGVQGDLTYTEYPIKILDTLTRVTRNKASVLDRAAEIVRYLFGRAFC

SEQ ID NO: 297894 - protein, 113 aa, Zea mays
  Clone ID: MRT4577_34751C.1.pep
WLGQKPEPEVLFMHTRKHGTIYTRTHFPNIMEPLYAHPPAKTLPACEGFAPSHHTMNHLGGAKHIGRHPVELLNISSISGRMLIDDCKIGMLIVLPTHGTAVERLMIFWLGFI

SEQ ID NO: 297895 - protein, 943 aa, Zea mays
  Clone ID: MRT4577_34752C.1.pep
MGREFGATAIILESSSIDLILGMSWLRKAKAVIACGRGTVELTTTKGERFQVNIAVTSSPMRAMFFIPEEFVGDNIRVVRDFPDVFPEELPGMPPDREVEFVIDLLPRTAPISKRPYRMSVEELKELKKQLTELQEAGYIRPSSSPWGAPVLFVQKKDGSQRMCVDYRSLNDVIVKNKYPLPRIEDLFDQMRGARVFSKIDLRSGYHQMRIRPSDIPKTAFSTRYGLYEFTVMSFGLTNALAYFMNLMNKVFMEYLDRFVVVFIDDILIYSKSDSDHEEHLRMVLQKLRDNQLYAKFSKCEFWIGEVPFLGHIISNGGISVDPAKVREIMEWRAPTTVTEIRSFLGLAGYYRRFIEGFSKIAKPMTSLLEKGKEFKWDEKCQESFDQLKERLMTPPVLVMPDLQKGFDIYCDACDQGLGCVLMQEGHVIAYASRQLRKHELNYPTHDLELAAVVHALKIWRHYIMGTKCQVYTDHKSLEYIFTQKDLNLRQRRWLELIKDYDLEIHYHPGKANLVADALSRKEHVHLAIVAQLPDEIVEDFRRLNLGIVAHTEGVTIDVEPTLEQEIRKGQLEDAKIKEIKDLITEGRVPEFTEDEQGTIWFKDKMCVPDIKSLRETILKEAHDSDYSIHPGSTKMYQDLKRKYWWYGLKRDVAAHVAMCDVCQRVKAEHQRPAGLLHPLKIPEWKWEEIGMDFITGLPRTQKGYDAIWVIVDRLTKVAHFIPVKTTYKGSQLAELYMARIVCLHGVPKKIVSDRGSQFTSRFWRSFHENMSTKLNFSTAYHPQTDGQTERTNQVLEDMLRACALQHGGSWDKSLPQKSYADNRRRPLEFEEGDYVYLKVSPLRGMRRFKVKGKLSPRYVGPFLIFRRVGEMAYQLELPATLSDVHNVFQVSQLKKCLRVPEEQLPMEELSVQGDLTYTEYPIKNLDTLTRVTRNKVVKMCKV

SEQ ID NO: 297896 - protein, 56 aa, Zea mays
  Clone ID: MRT4577_34753C.1.pep
VTLHCIARSLRARISPAALTRHQRILACLYNTSRHHGISALPISVTVFCARNHHNI

SEQ ID NO: 297897 - protein, 667 aa, Zea mays
  unsure (1)..(667): unsure at all Xaa locations
  Clone ID: MRT4577_34754C.1.pep
MPLDREVEFVIDLLPGTTPISKRSYRMSVEELKELKKQLTELQEAGYIRPSSSPWGAPVLFVQKKDGSQRMCVDYRSLSDVTVKNKYPLPRIEDLFDQMRGARVSSKIDLRFGYHQMRIRPSNIPKTXFSTRYXFVVVFIDNIXYSKSDSDYEEHLRLVLQKLRDNQLYAKYSKCEFWIDEVPFLEHIISNGGLGYVLMQEGHVIAYTSHQLRKHELNYPTHDLELAAVVHALKRCRHYIMGTKCQVYTDHKSLKYIFTQKDLNLRQRRWLELIKDYDLEIHYHSGKANLVADALSRKEHVHSAVVAQLPDEIVEDFRRLNLGIVAHAEGVTIDVKGYDAIWVIVDRLTKVAHFNPVKTTYKGSQLAELYMARIVCLHGVPKKIVSDRGSQFTSRFWRSFHENMSTKLNFSTAYHPQTDGQTERINQVLEDMLRACALQHGGSWDKSLPYAEFXASLKMSPFEALYGRNCRTPLHWDQPDERQVFGPDILLEAEDNIRMVRENLKAAQSRQRSYADTRRRELSFEVGDYVYLKVSPIRGIKRFRVKGKLAPRYIGPYQIQARRGEVAYQLSLPKNLSAVHDVFHVSQLKKCLRVPEEQLPTKDLEVQEDLTYIEKPTQILETADRVTQRSTIRMCKVKWGHHSEEEATWEREDDLKARYPELFSRQP

SEQ ID NO: 297898 - protein, 74 aa, Zea mays
  Clone ID: MRT4577_34755C.1.pep
PILYISWLHVHADVMYVAHRILNARFVQPWIISMMTMQLSIIVNASLSRIIYLIRTLMSSQLAGRVPGRVGVRV

SEQ ID NO: 297899 - protein, 705 aa, Zea mays
  unsure (1)..(705): unsure at all Xaa locations
  Clone ID: MRT4577_34756C.1.pep
MATPIMLEESSIDVILVTTSTRLAAFLVDGKFVGVNIRVVRDFSDVFPEELKGLKKQLMELQEAGYIRLNSSPWGASVLFVQKKDGSQRMCVDYRSLNNVTMKNKFVVVFIDDTLIYSKSDSDHEEHLRLVLQKLRDNQLYAKFSKCEFWIGEVPFLGHIISNGGISVDPAKKGREFKWDEKCQDSFDQLKKRLMSPPMLVMPDLQKGFDIYCDACGQGLGCVLMQEGHVIAYASRQLRKHELNYPTHDLELTVVVHALKIWRHYIMGTKCQVYTDHKSLKYIFTQKDLNLRQRRWLELIKDYDLEIHYQPGKANLVADALSRKEHVHSAFVVQLPDELAKDFERLNLGVVTHTKGVTIELEPTLEQEIRKGQVGDAKIQEIKDLITEGRVPGFTEDEQGTIWFKDRICVPEIDSLREAILKEAHDSDYSIHPGSTKMYQNLKQKYWWYGLKRDVAAHVAKCDVCQRVKAXIKDPLDYCTXEDTRVEVGRDWYXFITGLPHTQKGYDXYGYQANLKMSLFETLYGRKCRIPLHWXQTGGRQFFGSKLIQGAKEQVRIIRENLRIAQSRQKSYADNRRRLLEFKEGDHVYLKVSPIRVFRRVGEMAYQLELPDSLSDAHNVFHVSQLRKCLRVPEERLPMEELSVQGDLTYTEYPIKILDTLTRVIRNKAIKMCKVQWSHHDEDEATWEREEKLRIDFPHLFPRSP

SEQ ID NO: 297900 - protein, 775 aa, Zea mays
  Clone ID: MRT4577_34757C.1.pep
MGYPYSVRREHYRRDPCSKGERFEVGIAVTTATRLATFLVDGKFVGVNIRVVRDFLDVFPEELPGMPPDREVEFVMDLLPGTAPNSKRPYMMSIEELKELKKQLMELQEDGYIRPRYYRRFIEGFSKIAKPMTSLLEKGREFKWDEKCQDSFDQLKKRLMSPPVLVMPDLQKGFDIYCDACGQSLGCVLMQEGHVIAYASRQLRKHELNYPTHDLELAAVVHALKIWRHYIMGTKCQVYTDHKSLKYIFTQKDLNLRQRCWLELIKDYDLEIHYHPGKANLVADTLSRKEHVHSAIVAQLPDESVEDFKRLNLGIVAHTEGVTIDVEPTLEQEIRKGQVGDAKIQEIKDLITEGRVPEFTEDEQGTVWFKDRMCVPDIKSLQETILKEAHDSDYSIHPGSTKMYQDLKRKYWWYGLKRDVAAHVAMCDVCQRVKAEHQRPAGLLHPLKIPEWKWEEIGYDAIWVIVDRLTKVAHFIPVKTTYKGSQLAELYMARIVCLHGVPKKIVSDRGSQFTSRFWRSFHENMSTKLNFNTAYHPQTDGQTERTSQVLEDMLRACALQHGGSWDKSLPYAEFSYNNSYQASLKMSPFEALYGRKCRTPLYWDQTGERQFFGPELIQEAEEQVCIIKENLRVARTRQKSYAGNRRRPMEFEEGDHVYLKVSPLRGMRRFKVKDKLFPHFIGPFRVFRQVGEMAYQLELTDNLSDVHNLFHASQLKKCLRIPEEQLPMEELNVQGDLTYTEYPIRFLDTLTRFTRNKVVKMCKVQWSYHGEDEAT

SEQ ID NO: 297901 - protein, 270 aa, Zea mays
  Clone ID: MRT4577_34758C.1.pep
MSTKLNFSTAYHPQTDGQTERTNQVLEDMLRACALQHGGSWDKSLPYAEFSYNNSYQASLKMSPFEALYGRKCRTPLYWDQTGERQFFGPELIQEAEEQVRIIRENLRVAQTRQKSYADNRRRPLEFEEGDYVYLKVSPLRGMRRFKVKGKLSPCYIAPFLIFRRVGEMAYQLELPATLSDVHNVFHVSQLKKCLRVPEEQLPMEELSVQGDLTYTEYPIKILDTLTRVTRNKVINMCKVQWSHHGEDEATWEKEEELCIDFPHLFPRSS

SEQ ID NO: 297902 - protein, 1370 aa, Zea mays
  Clone ID: MRT4577_34759C.1.pep
MLNIAQCTDREKVLYASGRLTGPAADWWDSYTAAHDAADTITWAEFSTQFRNYHIPAGMIKIKKKEFLSLKQGSMSVSEYRDKFIQLSRYAPEEVAEDERKQEHFIEGLNGPLQYALVAHTFPSFQRLLDKALAIEHKRVQLGDLKRKAISQGQGSSSVRPRYSSPQSTPTRPGGPRPVQQSPLRTPPPRQATPTGTPTKFSGQSPGTTCFKCGKNGHYANVCPQRMATTPVQNRQQTPGSGKGYSIAKVNQVSVDATPDGGDLVIGMFYVNAIPATILFDSGATHSFMSARYANTNEIPLLNMRKPMIVVTPKGPVEANQMTRRLTLTIMGREFGATAIILESSSIDLILGMSWLRKAKAVIACGRGTVELTTTKGERFQVNIAVTSSPMRAMFFIPKEFVGNNIRVVRDFPDVFPEELPGMPPEREVEFVIDLLPGTAPISKRPYRMSVEELKELKKQLTELQEAGYIRPSSSPWGAPVLFVQKKDESQRMCVDYRSLNDVTVKNKYPLPRIEDLFDQMRGARVFSKIDLRSGYHQMRIRPSDIPKTAFSTRYGLYEFTVMSFGLTNAPAYFMNLMNKVFMEYLDRFVVVFIDDILIYSKSDSDHEEHLRMVLQKLRDNQLYAKFSKCEFWIDEVPFLGHIISNGGISVDPAKVKEIMEWRVPTTVTEIRSFLGLAGYYRRFIEGFSKIAKPMTSLLEKGKEFKWDEKCQDSFDLLKKRLMSPPVLVMPDLQKGFDIYCDACGQGLGCVLMQEGHVIAYASRQLRKHELNYPTHDLELAAVVHALKIWRHYIMGTKCQVYTDHKSLKYIFTQKDLNLRQRRWLELIKDYDLEIHYHPGKANLVADALSRKEHVHSAIVAQLPDEIVEDFRRLNLGIVTHTEGVTIDVEPTLEQEIRKGQIGDAKIKEIKDLITEGRVPEFTEDEQGIVWFKDRMCVPDIKSLREIILKEAHDSDYSIHPGSTKMYQDLKRKYWWYGLKRDVAAHVAMCDVCQRVKAEHQRPAGLLHPLKIPEWKWEEIGMDFITGLPRTQKGYDAIWVIVDRLTKVAHFIPVKTTYKGSQLAELYMARIVCLHGVPKKIVSDRGSQFTSRFWRSFHENMSTKLNFSTAYHPQTDGQTERTNQVLEDMLRACALQHGGSWDKSLPYAEFSYNNSYQASLKMSPFEALYGRKCRTPLYWDQTGERQFFGPELIQEAEEQVRIIRENLRVAQTRQKSYADNRRRPLEFEEGDYVYLKVSPLRGMRRFKVKGKLSPRYIGPFLIFRRVGEMAYQLELPASLSDVHNVFHVSQLKKCLRVPEEQLPMEELSVQGDLTYTEYPIKILDTLTRVTRNKVIKMCKVQWSHHGEDEATWEREEELRVDFPHLFPRSS

SEQ ID NO: 297903 - protein, 81 aa, Zea mays
  Clone ID: MRT4577_3475C.1.pep
ASHPKKKPGGFPPIFEFGKPPKGFFFLVPKKCFLKKIPHKKQKGLYPLRREVFVLGMEAKVEKMKHEPLIREVAYGKEHAS

SEQ ID NO: 297904 - protein, 50 aa, Zea mays
  unsure (1)..(50): unsure at all Xaa locations
  Clone ID: MRT4577_34760C.1.pep
SGRFATGFLXGLVLLARPQFSEMFSHELXTLYQPPKYKAYQYILWVVALV

SEQ ID NO: 297905 - protein, 485 aa, Zea mays
  unsure (1)..(485): unsure at all Xaa locations
  Clone ID: MRT4577_34761C.1.pep
MGEKRRAACGYSQAHAICKPWWSNSCLGGYRMGHSTVGLRERQRQFIHCAKGTVELTSSKGQGFEVEVAVTTTIRLAAFLVDEKLVGDNIRAVKDFPDVFPKELLGIPPDIEVELVIDLSPGTAPIPKRPYMMSVEELKELKKQLMELQEVGYIRSDSSPWXAPDLCVQKKDGSXYFMNLMNKVFMEYLDRFVVVFINDILIYSKSDSDHEEHLILVLLKLRDNQLYAKFSKCEFWIGEVPFLRHIISNGGISVDPAKVKEIMEWRVPTTVTEIRSFLGLAGYYRRFIEGFSKIAKPMTSLLEKGREFKWDEKCQDSFDQLKKRLMSPPVWVMPDLQKGFDIYFDACGQGLGCVLMQEGHVIAYASRQLRKHELNYPTHDLELAAVVHALKIWRHYIMGTKCQVYTDHKSLKYIFTQKDLNLRQRRWLELIKDYDLEIHYHPDKANLVVDALSRKEQVYSAIVAQLPDEIVEDFRRLKPGDSCSY

SEQ ID NO: 297906 - protein, 50 aa, Zea mays
  Clone ID: MRT4577_34762C.1.pep
LKNFYKIYPINFAPMIIIPLFYKTGDDSYTLCLTPHHLYTFHLPTNVSDI

SEQ ID NO: 297907 - protein, 1435 aa, Zea mays
  unsure (1)..(1435): unsure at all Xaa locations
  Clone ID: MRT4577_34763C.1.pep
DTPGKEGTTAAXQQQQQQQQVPLPPPPPPVPPRDKHREFMSHKPPTFASSPDPLDADDWLKSVEKMLNIAQCTDREKVLYASGRLTGPAADWWDSYTAAHDAADTITWAEFSTQFRNYHIPAGMIKIKKKEFLSLKQGGMSVSEYRDKFIQLSRYAPEEVAEDERKQEHFIEGLNGPLQYALVAHTFPSFQRLLDKALAIEHKRVQLGDLKRKAISQAQGSSIVRPRYSSPQGTPTRPGGPRPVPQSPLRTPPPRQATPTGTPTKFAGQSPGTQCFKCGKMGHYANVCPQRIATTPVQNKQQTPGTGKGYSIAKVNQVSVDATPDGGDLVLGMFYVNAIPATILFDSGATHSFMSARYANTNEIPLLNMRKPLIVITPKGPVEANQMTRRLTLTIMGREFGATAIILESSSIDLILGMSWLRKAKAVIACGRGTVELTTTKGERFQVNIAVTSSSMRAMFFMPEEFVGDNIRVVRDFPDVFPEELPGMPPDREVEFVIDLLPGTAPISKRPYRMSVEELKELKKQLTELQEAGYIRPSSSPWGAPVLFVQKKDGSQRMCVDYRSLNDVTVKNKYPLPRIEDLFDQMRGARVFSKIDLRSGYHQMRIRPSDIPKTAFSTRYGLYEFTVMSFGLTNAPAYFMNLMNKVFMEYLDRFVVVFIDDILIYSQSESDHEEHLRMVLQKLRDNQLYAKFSKCEFWIGEVPFLGHIISNGGIAVDPAKVKEIMEWRVPTTVTEIRSFLGLAGYYRRFIEGFSKIAKPMTSLLEKGKEFKWDEKCQDSFDLLKKRLMSPPVLVMPDLQKGFDIYCDACGQGLGCVLMQEGHVIAYASRQLRKHELNYPTHDLELAAVVHALKIWRHYIMGTKCQVYTDHKSLKYIFTQKDLNLRQRRWLELIKDYDLEIHYHPGKANLVADALSRKEHVHSAIVAQLPDEIVEDFRRLNLGIVAHTEGVTIDVEPTLEQEIRKGQIGDAKIKEIKDLITEGRVPEFTEDEQGTVWFKDRMCVPDIKSLRETILKEAHDSDYSIHPGSTKMYQDLKRKYWWYGLKRDVAAHVAMCDVCQRVKAEHQRPAGLLHPLKIPEWKWEEIGMDFITGLPRTQKGYDAIWVIVDRLTKVAHFIPVKTTYKGSQLAELYMARIVCLHGVPKKIVSDRGSQFTSRFWRSFHENMSTKLNFSTAYHPQTDGQTERTNQVLEDMLRACALQHGGSWDKSLPYAEFSYNNSYQASLKMSPFEALYGRKCRTPLYWDQTGERQFFGPELIQEAEEQVRIIRENLRVAQTRQKSYADNRRRPLEFEEGDYVYLKVSPLRGMRRFKVKGKLSPRYIGPFLIFRRVGEMAYQLELPDSLSDVHNVFHVSQLKKCLRVPEEQLPLEELSVQGDLTYTEYPIKILDTLTRVTRNKVIKMCKVQWSHHSEDEATWEREEELRIDFPHLFSSSS

SEQ ID NO: 297908 - protein, 86 aa, Zea mays
  unsure (1)..(86): unsure at all Xaa locations
  Clone ID: MRT4577_34764C.1.pep
IVPHHGCPGIRTSIGVLEEAPEDPILGVTXAYTKDPSPMKANLGAGAYRXTKEGKTVVLNVGRRTEQMLSNNPATCKEHLPITGLA

SEQ ID NO: 297909 - protein, 75 aa, Zea mays
  Clone ID: MRT4577_34765C.1.pep
SNWSIYESGGAPLHPSWLTTRWIRENPANAAYLLGYSCWPSPVTDPYLPRHCRARAKLPHLVLRSTVFDRSTTLH

SEQ ID NO: 297910 - protein, 84 aa, Zea mays
  Clone ID: MRT4577_34766C.1.pep
RANPVDKGDKLKDQILGAGTPASSLQSSCLPPGNGTPEKQGRPPARRGGSPDCTNYSRGLYDWDKTPARRFDCVKLAVKSLAVF

SEQ ID NO: 297911 - protein, 40 aa, Zea mays
  Clone ID: MRT4577_34767C.1.pep
FVNYLYMSIPWLLLSITYAGARDISSPVPPIVLLDTIQIA

SEQ ID NO: 297912 - protein, 50 aa, Zea mays
  Clone ID: MRT4577_34768C.1.pep
SVLGDKSLIPCYGRKKCGHVLINKCESGLQIENKNSNFHNSGSVETLPSL

SEQ ID NO: 297913 - protein, 109 aa, Zea mays
  Clone ID: MRT4577_34769C.1.pep
PLHWILPYSTRLDCWKRASNSSHTTRSVPFLPSKRVDQKSSWIFFASAASPLSAALFFFASATCGSVTATRARASTKSTADDAMLRLSIIFASWQLLNMVKIVQEMTAG

SEQ ID NO: 297914 - protein, 85 aa, Zea mays
  Clone ID: MRT4577_3476C.1.pep
VPSELGRVDTDRSSICSPRRWLARTYMERRGHPRGAPTAGFGLVTQRSGVEAVPHHGGNFPRVGATKQNTLSLHAIEDLHKQGAR

SEQ ID NO: 297915 - protein, 145 aa, Zea mays
  unsure (1)..(145): unsure at all Xaa locations
  Clone ID: MRT4577_34770C.1.pep
GGGGPQFNSQQKKKGPGEXQGPXPNGIPKKAPREGQAKVXPTKKKGVKKRGEKPPGPKEDLKQPKKLGGAGPNGQKGREPGTPGGPKKRAPPPGQLGPGEGGXPGPKTGSRRNPKRKRGWGGPKKPGGKVSPTPKXAPGNPPDPT

SEQ ID NO: 297916 - protein, 96 aa, Zea mays
  Clone ID: MRT4577_34771C.1.pep
GSGEKVVVPERQDPMLVLKFIWMEKNIGIALDQLVPGYGSIPLSPYYFWPRKDAWEELRAKLEEKEWISQKQMIILLNQATDIINLWQQGGGSLST

SEQ ID NO: 297917 - protein, 66 aa, Zea mays
  Clone ID: MRT4577_34772C.1.pep
IPGSTYASSSSHQLVFRYLIALRLLVGCRHRRLQTPCAEAYASVFYDYEHVLSPNMMSERSQHAEP

SEQ ID NO: 297918 - protein, 408 aa, Zea mays
  Clone ID: MRT4577_34773C.1.pep
QNWRLEWKLLGISSRKSLADAAVLALEKNLTEQNYLLAKCKLLNLPCIIDALNDLFGYEINEYVLSTSQMWFQYMTCTPLRRDKYKEILSRLQINRPSFGSQRWYLIFHSLEAALQFNNELPDPQQIDSRYYPAKPSFAQLKAAENFCDLVRAIYHAVNRNSAPGNGALNSQFHAIWNLKMALLRSSTKENIDQVFNIEQMKLKFDQLWRKWYLWLSLAVVLDPRYKFRFLLVCFKEAFGSHAKRYIFEVRGKLYERFLQYSCHVDQQNSDSFDQRTNDLQLDTRGSTPVHATSQNFIEQAAHEELGEVIRYLEAELIPQNANFDILKWWKENALTYPALARLACDILAIPGSAVSAESAFDETDERVGLFNLKLSPELVEALVCTQDWIKSSEIISDEVGGNINMPA

SEQ ID NO: 297919 - protein, 73 aa, Zea mays
  Clone ID: MRT4577_34774C.1.pep
PPPRPRKFLRVLAKWKLWLPKSFPGSPPKGGGEMLGGFFLPPLVLKMFLKLLFFWPLFMVMKAFLNGQNFFFS

SEQ ID NO: 297920 - protein, 200 aa, Zea mays
  Clone ID: MRT4577_34775C.1.pep
MAPTPGDGEELDASLPVPGLPSERHLLPPPHPSLCSGSKRKTIAVGTGAAPIVAGSSSSSHSQTSPSVASADKDIVNPSNVVEVDDSNEVDVSGKRHKRCACHVLNLVARDGMNVIASTIEKVKSLVLTVKGSPLQWEELMNSATECGLETTRGIHQDVSTRWNSTYMMLSDVLYYSDAFVRLKSKDRRRYEKIFPSDDE

SEQ ID NO: 297921 - protein, 50 aa, Zea mays
  Clone ID: MRT4577_34776C.1.pep
RSYNMMWKSRMPVNRSLGSPLLISPSRYYSPPWYTWLRGANKQGARARAE

SEQ ID NO: 297922 - protein, 218 aa, Zea mays
  unsure (1)..(218): unsure at all Xaa locations
  Clone ID: MRT4577_34777C.1.pep
RRLGEAPSCQAPRSPSISASLVISFPWSICRRQPQRSGPVRRGGKRNRGSHSRTHRSRYGLRSAVVGRLFSLSLDNASANEVAVGDIITNLKDVRAALVCDGIFFHIRCACHVLNLVARDGMNVIASTIEKVKSLVLTVKGSPLQWEELMNSAXECGLETTRGIHQDVSTRWNSTYMXLLSDVLYYSDAFVRLSLKNRRKYEKIFLMMNGHGCNIVSA

SEQ ID NO: 297923 - protein, 68 aa, Zea mays
  Clone ID: MRT4577_34778C.1.pep
LTSSIAVQNELKAVINQKQISCLFTISSCPKQSHRPKAFGPAYAESTQHTDAPLIPRSAITSSAPALS

SEQ ID NO: 297924 - protein, 129 aa, Zea mays
  unsure (1)..(129): unsure at all Xaa locations
  Clone ID: MRT4577_34779C.1.pep
IFGLKKGKLTKKKGYFKCLFNAHKPKKKKEKTKLKNWIQKPFYLGRNHLKGKFQKKGGPFLGIPLRPQVLVILGPCFFPGEICIPPLSPXFRNPSLRGKPGGALGVPPQLFWVPFRPLFRGETLLPLVL

SEQ ID NO: 297925 - protein, 27 aa, Zea mays
  Clone ID: MRT4577_3477C.1.pep
VQSNTQLLRKNEGITIRWPAPIEIHLS

SEQ ID NO: 297926 - protein, 71 aa, Zea mays
  Clone ID: MRT4577_34780C.1.pep
MAVARLVAAPFPLAAARARGPRARLLFAPLSALPRRAAAPAMRVASDGNGGGLVPARPGQEAEDAAVTARG

SEQ ID NO: 297927 - protein, 74 aa, Zea mays
  Clone ID: MRT4577_34781C.1.pep
RITSWNPYRRNRSHAAPSSLTYSRAGFKKILGVRGARGRFCPRTRFSFTISGHKELVLHEYQKKIFFIMQHIVG

SEQ ID NO: 297928 - protein, 156 aa, Zea mays
  unsure (1)..(156): unsure at all Xaa locations
  Clone ID: MRT4577_34782C.1.pep
MAAYSFLFTSESWNEGYPDKLCHQLSDDVLDSCLEQDPDSYVGCDTCTYTNMXMVFCXITTYATVYYQKIVRDTCCEIRFTSDCVYLEGHRCKVLVNIKXDSPDIYEGEHGCFTKQYSMIVTAFDTSHMCGYITDDTPELMPLIHVLSTKLGDRLT

SEQ ID NO: 297929 - protein, 286 aa, Zea mays
  Clone ID: MRT4577_34783C.1.pep
MTNGYLFREYIGAQSTGVQFSDVPINAFVSFHFILSFAIDYTPVGQQPKPVPTNGVFSPFWDTGNLSPAAVAAIKASHPNVAVMAGLGGDSVQDIVKAFFTPTSVDTWVANAVTSLTGIINRYGLDGVDVDYEHFADGADVNTFVECIGRLLTQLKQTMPNIATSIAPFEDPVVQKYYQALWSKYSGVIDYVNFQFYAYGDNTDVPTYVMFYNNQLANYPGGKVLASFKTGNVTGLLSPDQGISGAKELQRQNKLPGLFIWSADSSKKSSYGFKYETEAQQIIANH

SEQ ID NO: 297930 - protein, 215 aa, Zea mays
  Clone ID: MRT4577_34784C.1.pep
PQRRLSRCPGPGPAHHSRLQQSSSNRSRLPLLPPLFPNPNQTHHHHYHPQNPHEESPNSSCRGEYDTLLLPCITGLGCLARTFTASETRIVAPLVQLLDEREPPVIKEAVVALTKFACTENHLHVNHCKAIVDDGGARHLVQLVYLGDEVQIEALILLCYIALYVPESEELAQAGVLAVLLWASKQAQMVQDTRVEALLPDAKGRLELFQSRASR

SEQ ID NO: 297931 - protein, 95 aa, Zea mays
  unsure (1)..(95): unsure at all Xaa locations
  Clone ID: MRT4577_34785C.1.pep
SDTDVVMVSEVGEYDRHEIEENEHKHHEHLREVFGIACGAFELYDRDWEKXDPXEIAHMHNINXRYYGAAIVGAGGYVFLENLDTDTVPQVRGVV

SEQ ID NO: 297932 - protein, 42 aa, Zea mays
  Clone ID: MRT4577_34786C.1.pep
GREGFCTYHLKKPSSAFLMSLLRRGKGTPAHQGHGRRRRTTP

SEQ ID NO: 297933 - protein, 96 aa, Zea mays
  Clone ID: MRT4577_34787C.1.pep
PYFDLARRGRLHGAAWCRCCAPRPQRIPVIEITYSQLEESPFAGEQVPSHSREREPTTSQRHLTSSSPAARGGTEPTRRKPSLDSNPNRARTTRAS

SEQ ID NO: 297934 - protein, 45 aa, Zea mays
  Clone ID: MRT4577_34788C.1.pep
PLGQNQSAPGFIIKGQTLIQNTSIRESGNRLTRAPKVLEQLTRHT

SEQ ID NO: 297935 - protein, 47 aa, Zea mays
  Clone ID: MRT4577_34789C.1.pep
NLRAHYFSRRTTHSYIHAIRVDLKHKIKPLLTWWLLHTIPAFWMKCF

SEQ ID NO: 297936 - protein, 54 aa, Zea mays
  Clone ID: MRT4577_3478C.1.pep
FLFYLFNTSGTVQHLLIQLSLQLNILIRDNHLIYADNIQSTEQKSHCVSILEDR

SEQ ID NO: 297937 - protein, 106 aa, Zea mays
  Clone ID: MRT4577_34790C.1.pep
PLFPGGSFNPLGLAEDPGGFAGLRVGGIKEGPPPLFSLLGFFVRALVPGRGPPGTLAGPFAGPVNNKAWALAPHLVPGNLAGAFCLHGGPVAVPFSSVFRVAPVFF

SEQ ID NO: 297938 - protein, 118 aa, Zea mays
  Clone ID: MRT4577_34791C.1.pep
GWVIEPLWKWWSPQSAFHGLNPPPSFHRSCWMPSKSRRIGLCQKATIGFSPEAPRKGRGPLKGKIIDGERPGIVMYISCPLQEPGRKHMGLFWGGGCLIFLSKVFALGAMVPVWVCFL

SEQ ID NO: 297939 - protein, 87 aa, Zea mays
  Clone ID: MRT4577_34792C.1.pep
PLKPPLYYFPSSHASHGRGKSWNDLHKNLSLLLKDTNILMTQRHMLPSDSMPLPNTQPIFKLNKSLPRINHPFTVTAVTDPDPTRSS

SEQ ID NO: 297940 - protein, 45 aa, Zea mays
  Clone ID: MRT4577_34793C.1.pep
PLVAVKLHPDTAAMAQVTAHLECNQWALPPYSFSGCVGRSPRTSG

SEQ ID NO: 297941 - protein, 205 aa, Zea mays
  unsure (1)..(205): unsure at all Xaa locations
  Clone ID: MRT4577_34794C.1.pep
MGDGEDIHPLACDNATGMDKAXFAGDDAPRAVFPRIARRPRHTVVMVDMAQNDTYDRDQAQSKRGILTLKYPIXTGIVSKXDDMEKXWHHTFYNELRVEPEQHPVLLNEAPXLNPIANXQNMTQIMLETFNVPDMYVTIQAALSLXAADRTTDIELDSGDGDSHTVPIYEGYVLHHDILHLDLAESDLTDRLMKILTERGYSFTT

SEQ ID NO: 297942 - protein, 43 aa, Zea mays
  unsure (1)..(43): unsure at all Xaa locations
  Clone ID: MRT4577_34795C.1.pep
RESLQAGRYXXSFPSSTLSFLEIEXXKQKEFFNMKTEXXPSHT

SEQ ID NO: 297943 - protein, 54 aa, Zea mays
  unsure (1)..(54): unsure at all Xaa locations
  Clone ID: MRT4577_34796C.1.pep
EDMVSTRRRALWEPKLLSTLLTSISCFLAPPCKEGPNNYAKMXVESHGSXQGHT

SEQ ID NO: 297944 - protein, 103 aa, Zea mays
  Clone ID: MRT4577_34797C.1.pep
TKAQVNLFIWLGGETCYPHNFFSGGGQKPYSPRGGPNKLLTLSHPLGKMGPPHKGQGGAPSPLGAQTFLQGGGKPWEQPYNFPTAWKFSCFKPPKKIGQKGPP

SEQ ID NO: 297945 - protein, 59 aa, Zea mays
  Clone ID: MRT4577_34798C.1.pep
IALVPCPPNHSPSSSSSLRMNEITRLKTTPKYLFSKSCFEFIVNYCCNIEMMRFGDSRI

SEQ ID NO: 297946 - protein, 79 aa, Zea mays
  Clone ID: MRT4577_34799C.1.pep
ELDEDLKAHQDFAHFETGFGGKIPRIGTLAPSQQGFTFTHSNFLPNGHNPRDPQLAFEKLANLGSCPGPGFGCLFDSCL

SEQ ID NO: 297947 - protein, 41 aa, Zea mays
  Clone ID: MRT4577_3479C.1.pep
DYENGRAILNNQVLGKIERDIGMKLGGKDIGKPIENVHRAI

SEQ ID NO: 297948 - protein, 451 aa, Zea mays
  Clone ID: MRT4577_347C.1.pep
MRECISIHIGQAGIQVGNACWELYCLEHGIQADGQMPGDKTIGGGDDAFNTFFSETGAGKHVPRAVFVDLEPTVIDEVRTGTYRQLFHPEQLISGKEDAANNFARGHYTIGKEIVDLCLDRIRKLADNCTGLQGFLVFNAVGGGTGSGLGSLLLERLSVDYGKKSKLGFTVYPSPQVSTSVVEPYNSVLSTHSLLEHTDVAVLLDNEAIYDICRRSLDIERPTYTNLNRLVSQVISSLTASLRFDGALNVDVNEFQTNLVPYPRIHFMLSSYAPVISAEKAYHEQLSVAEITNSAFEPSSMMAKCDPRHGKYMACCLMYRGDVVPKDVNAAVATIKTKRTIQFVDWCPTGFKCGINYQPPSVVPGGDLAKVQRAVCMISNSTSVVEVFSRIDHKFDLMYAKRAFVHWYVGEGMEEGEFSEAREDLAALEKDYEEVGAEFDEGEDGDEGDEY

SEQ ID NO: 297949 - protein, 66 aa, Zea mays
  Clone ID: MRT4577_34800C.1.pep
IFCFPFQVRQDSTTGISQGPGAFVTKFQVGSYTWFKAMSGNLTFFIMRAPPPTNEKKKQKIKNAHN

SEQ ID NO: 297950 - protein, 68 aa, Zea mays
  unsure (1)..(68): unsure at all Xaa locations
  Clone ID: MRT4577_34801C.1.pep
SPRYMAGTASSAARTRCHSAPRQRRTAXTPSTSRRRGGRARTRPEQRPASPEXVGDEAARDYYLDSFW

SEQ ID NO: 297951 - protein, 167 aa, Zea mays
  Clone ID: MRT4577_34802C.1.pep
NWTAGFGRGPTPPALVGIRPAGPGRGARRLLVLEEFKTEKRLCKMFYAVTLLFLLLWGPYVVASYLRVLVRPGAVPQAYLTASVWLTFAQAGINPVVCFLFNRELRDCFRAQFPCCQSPQTTQATLLFFLFLSLLFSFLFLSFSFFLSFFLSFFLSFFLFLSFFLSF

SEQ ID NO: 297952 - protein, 119 aa, Zea mays
  Clone ID: MRT4577_34803C.1.pep
MPPKKDAKGAASKQSAKPAKKKEGGGGGKAKKKKWSKGKVRDKLNNQVLFDKATYDKLLKEVPAYKLITPSVVSERLKIRGSLARRALDELLQKGMIKQVIKHHAQVIYTRATKGDDPA

SEQ ID NO: 297953 - protein, 99 aa, Zea mays
  unsure (1)..(99): unsure at all Xaa locations
  Clone ID: MRT4577_34804C.1.pep
MSGACEEDKKPLVGGAHINLKGKGQDGNGGFFRIKRGTXLNKPMNPYCDPPSGDMNALAFLFDGPMLPGEQTPDELEMEDSHKIDPLLDQTGGSVPSTT

SEQ ID NO: 297954 - protein, 108 aa, Zea mays
  unsure (1)..(108): unsure at all Xaa locations
  Clone ID: MRT4577_34805C.1.pep
GNQLEDARPLPDSTTQKESPPPLVLRLGGGIQIFVKTLTGKTIPLEVESSAPIDNVKAKIQAKEGFPPDQQXFFFPGKQLEDAPPLADSNIXQKESPLPLVLPPPGGQ

SEQ ID NO: 297955 - protein, 68 aa, Zea mays
  Clone ID: MRT4577_34806C.1.pep
NLVNKLQLHLSHSRQEAFHKNRSYSHHICRTLPIEHIRWFTFSSMAKLASVVMYGMSLSWKSSSTQGW

SEQ ID NO: 297956 - protein, 100 aa, Zea mays
  Clone ID: MRT4577_34807C.1.pep
LSVAFLVGVFFLGRALFFYGPEFFWGGRGLALWPPGGIWRPRRRCVPALDQHGQVFRRHPPALVDLSSRAKQPKRRPWPIRTRLLRGCLPCPSSAGGGFP

SEQ ID NO: 297957 - protein, 98 aa, Zea mays
  Clone ID: MRT4577_34808C.1.pep
TGLLPGFKKLPFLGGLPKITWLPLDIFLPFKGTLGETFFSCNNVGGHHCLPYHCPHGLGLDFHSGLPCPPKSLGFLLDLFPEFTLTGALPGLTAGFFS

SEQ ID NO: 297958 - protein, 67 aa, Zea mays
  Clone ID: MRT4577_34809C.1.pep
RVGLHQPRRRPDPTHVQDPVRENISASLSRVVPAWPLDAYHPCCLSMLRINVNGSPGRWYHACPEHS

SEQ ID NO: 297959 - protein, 51 aa, Zea mays
  unsure (1)..(51): unsure at all Xaa locations
  Clone ID: MRT4577_3480C.1.pep
KLLMGKTRARRVPMRCARRLALGAAVVVPVSAVPAPSVVSMRSXGCLGGGA

SEQ ID NO: 297960 - protein, 696 aa, Zea mays
  Clone ID: MRT4577_34810C.1.pep
MRFLLLITNPFLGPRAGGTSFTRPEEPTPACNSDTPPESPHQLTSHLTFHSRRRSQTGIPRALPLLPRFLLRWAFGRRGWWAETEMISWNDVYTVLTAMVPLYVAMFLAYGSVRWWRIFTADQCSGINRFVAIFAVPLLSFHFISTNDPYAMNLRFLAADTLQKLVVLAGLAACSRLPSRLAAPRLDWSITLFSVSTLPNTLVMGIPLLIAMYGPYAGSLMVQVVVLQCIIWYTLLLFLFEFRAARTLIADQFPDTAAAIASLHVDPDVVSLEGGRAETEAEVAEDGRLHVTVRRSSASRRSLLMATPRPSNLTGAEIYSMSSSRQHSPRGSNFNHADFFAMVDGAPPPPAPGARASSFGAAELYSMHSSRGPTPRQSNFDERSASARSSRPAAVPSHDAKELHMFVWSSGASPVSDVSGLPAFNGGGAGGVNVGAKEIRMVVPAEMPQNGSAGSENENNGAAAAATGEAEGFGFRSGGKTTAEDAEAGEAAGPEQLTKLGSRCSTAELRAKDDGGGGAGSAAQQMPPASVMTRLILIMVWRKLIRNPNTYSSLIGLAWSLVAFRWHISMPAVVAKSIAILSDAGLGMAMFSLGLFMALQPKLIACGWRATGVSMAVRFLAGPAVMAAASLAIGLRGTLLRIAIVQAALPQGIVPFVFAKEYNVHPAILSTMVIFGMLIALPITLIYYILLGLKPV

SEQ ID NO: 297961 - protein, 60 aa, Zea mays
  unsure (1)..(60): unsure at all Xaa locations
  Clone ID: MRT4577_34811C.1.pep
PGTTAXRARDEXASPYRFXQPPRETDAYXHSTLISSRSLLGXRPISWTSELGGGRACPGR

SEQ ID NO: 297962 - protein, 123 aa, Zea mays
  unsure (1)..(123): unsure at all Xaa locations
  Clone ID: MRT4577_34812C.1.pep
MQIFVKTLTGKTITLEDESEDTIDNDQARIQDKEGIPPDXKRLIFAEKQMKDDRTLGDYNIQKEPTLHLEIKIRGAIYESSLQELARKYDQYKMICRKCYARLHPKAVNCRKKKCVHSNQLRS

SEQ ID NO: 297963 - protein, 111 aa, Zea mays
  Clone ID: MRT4577_34813C.1.pep
THAYVDALSDGFPKHTFAICLQSASMHRRCAVEMAVTAVYAFLVPFIRGCSLLFPDRGLWSDGDFHHLRTICCYTVWSGLLNSAGFAPLFTTGIDLGSLGVPCRGCSPLSG

SEQ ID NO: 297964 - protein, 156 aa, Zea mays
  unsure (1)..(156): unsure at all Xaa locations
  Clone ID: MRT4577_34814C.1.pep
HAASAYIAIRRRVLALIDSGRSHTFLHEKFRPLFKNVDLVSAPLFVRVANGELLHYQHKILXIPWQIQDCTLWSDMAFLPIPCYHIIVDMDWLQAFNLMRVDWAQKWLSIPYNGTTATLYGQSSQVPVCTVVELLLVAATVSVNDHSPIPDAVQEL

SEQ ID NO: 297965 - protein, 161 aa, Zea mays
  unsure (1)..(161): unsure at all Xaa locations
  Clone ID: MRT4577_34815C.1.pep
MEDGGKAPAGLGTLRAVLAILQWWGFNVTVIIMNKWIFQXGLETWIGWETGSNRLIACLVXNEKLDFKFPLTVSCVHFICSSIGAYIAIHVLKAKPLIQVEPEDRWKRIFPMSFVFCINIVLXNVSLRYIPVSFMQTFKSFTPATTVILQWLVWSSISSAH

SEQ ID NO: 297966 - protein, 91 aa, Zea mays
  Clone ID: MRT4577_34816C.1.pep
VFQPSYSMPSMSIEKAGLREMKMMERWQERTAEMMREANSAWHKGGDSSSSSMPQGEGGDEDAEEAKARAWDDWKDDNPRGAGNKKLTPCG

SEQ ID NO: 297967 - protein, 185 aa, Zea mays
  Clone ID: MRT4577_34817C.1.pep
GTLRAVLAILQWWGSNVTVIIMNKWIFQKLDFKFPLTVSCVHFICSSIGAYIAIHVLKAKPLIQVEPEDRWKRIFPMSFVFCINIVLGNVSLRYIPVSFMQTIKSFTPATTVILQWLVWSKHFEWRIWASLVPIVGGILLTSVTELSFNIFGFCAAMVGCLATSTKTILAESLLHGYKFDSVRVW

SEQ ID NO: 297968 - protein, 1366 aa, Zea mays
  unsure (1)..(1366): unsure at all Xaa locations
  Clone ID: MRT4577_34818C.1.pep
MILLHTRDDDAKQDEVRMMATAESDDDAIWVPPDEAAAAADSMMQDDDDDDDDYHAGAGEEDDEYEDDDDATSSICRWRHDSDHQSAAHREERQKAMLRAMNGQLRMLAARFLESAGIDTSSWLDIVISLSWEAALAIKPDVGTAVGNQMDPSSYIKVKCLASGTPRQCEVVKGLVFRKNVAHKHMPTKCHNPRLLLLSGLLGHSYVGFSSFSSIEQEKDHLDKSVCEMMEICRPDVVLVERTVSRDIQELLLKEGVTLVLDMKLNRLQRVARCSGAPIVSFSEVLSKPKLKQCDYFHIEKVTEEHNLITCSAGVGSRPSKTLMFLEGFHKPLGCTILLRGANTQELKKIKQVMNYTVFAAYRLVLETSFFEDQRLILNNKDSSKEEVSVARKAGPSSLGSVQETTDSNALNPLDKGFPNQALLPSEGLVVSAVPESPRRFIDILRYHNIYLPVTSSQEATDHQIQDSIHISPNVGVPIGSVESVDHLSDPQEQASSETNQQMALDGPSVSEKHEQSLENIKTSDTDEVDDVLESQSILILLSSQCITKQVICEQSRLSRIRYYGNFDVSLGRYLQDILQKQNLSCSSCGEPPEAHMYSYTHRNGNLTVLVRHLLPKYRLPGESEGKIWMWTRCLRCERESGISRSSRRVIMSAEAHYLSFGKFLELSFSSHSTARRLSICGHSLNTDCLRFFGLGSKVAMFQYSSVEIYNACKPQPTLEFHNSDMHEWYGQEVLATGVTLFSEVTSALQKLKDQFPVKYLSQLEEMLIKEKAEFMDSLAKTVDRNRESSSVDDILNVNWLYQDLLLELYVWDRRLHQLVGCTPAEKAIAANGQTAAAAEAGRIGERMSSIAPFENRCIKEPEKFIEAGTASALLDDAWNDKHCNDQHNTNCECDGGEEKWIWNPVNESRLXFQAGSGSWMXLKRFEVVNHYCPSHLSPLHKHRESGEEMGGSPQFTVGPGGSILCVSEDEISSIISRALAVSEERRHLLMDAVAETEPADTTRSKTMDKSYSSLSESSSASLWSSDSEASISSDDLSSYDTSLLLSSSLHPEIAVNGITALKGRYSVICVHSNQFYNLRRKCCPSELAYVASLSRCKRWDAQGGKSKAFFARTMDGRLIIKQIKKTEFESFIKFAPDYFRHVNHSLDTGSQTCLAKILGIYQVKQTRHGKEIKMDLMVMENILFGHNVSRTYDLKGAIFSRYVSDPNDHAGTVYLDQNFVDDMRVFPIYIGGRAKHLLERAIWNDTSFLTSINVMDYSLLVGVDRQKRELVFGIIDYLRQYTWDKQLETMVKAFLVVPKNESPTVISPRDYKKRFRKFMSKPFLPVPDEWSPESRPPVAWESCAPPGELPGVKPQHPSPILLGGA

SEQ ID NO: 297969 - protein, 124 aa, Zea mays
  Clone ID: MRT4577_34819C.1.pep
LVQLVTGLPLVAKKTCSLKVRCWDPRIPEVVVCTPWRSHTPCKPTICLSLSLSLSLKMDYSAHRKAPIPIKGDRLACMHPLASNTKWRVKTKTLLKPPRVSPTPRSEKPILVTARAEFRASAAC

SEQ ID NO: 297970 - protein, 59 aa, Zea mays
  Clone ID: MRT4577_3481C.1.pep
TFLLENYRFYHDPLSLSIGSFHVSQSLGSDSVQDSRTLLTQVGFTDDTDTIKYCKSAGA

SEQ ID NO: 297971 - protein, 114 aa, Zea mays
  unsure (1)..(114): unsure at all Xaa locations
  Clone ID: MRT4577_34820C.1.pep
GYRVPGGPLGKVVDPLFPGGSFDPLGFPDDPGGFSGLKVKGFXNGPLPLFSMLGFFVQAFVPGKGPLENLAGPFAGPVKKKGWAFAPNFVPGKLARALCLHGCPVNPAGCPRFF

SEQ ID NO: 297972 - protein, 41 aa, Zea mays
  Clone ID: MRT4577_34821C.1.pep
RSISESLAKAMISSSLTHPISYLQLHPLRKQSTGRSLTRHM

SEQ ID NO: 297973 - protein, 55 aa, Zea mays
  Clone ID: MRT4577_34822C.1.pep
SIHASGRRCEYYVKTQLHVHLFSFYLTTIYQGEWEVNRESYPDLPAHEEPINPIK

SEQ ID NO: 297974 - protein, 93 aa, Zea mays
  unsure (1)..(93): unsure at all Xaa locations
  Clone ID: MRT4577_34823C.1.pep
WGAPHFCLLIXHQIPIPVKRKRKGVPVVSKSPTSCEVCIHQQQFLNQQRPVLFGHFNPSFLFQKIRISINRYKIFFNGRGPITGSPRASRIHN

SEQ ID NO: 297975 - protein, 61 aa, Zea mays
  unsure (1)..(61): unsure at all Xaa locations
  Clone ID: MRT4577_34824C.1.pep
GLRQTSRSRVWNKYSKLAGAHFVSTTQPMSHSYSTLPSLAHAKKKKKNILKQQKKRGFMXX

SEQ ID NO: 297976 - protein, 133 aa, Zea mays
  Clone ID: MRT4577_34825C.1.pep
ARRLTKHCLVPGTAFSRACIRGAGRAAARRARTGKALGAGREAEKQAPSAGSEPGRARVATELEQGDGRAGRAWLRAAWASALESSGRRARAGSKRAPGNRSAGGGSWRGREAAMGKEAELGATLGDPAGRRS

SEQ ID NO: 297977 - protein, 272 aa, Zea mays
  Clone ID: MRT4577_34826C.1.pep
MAATLPVPYALRLRAPLPMSRRIPRKPSFPCNRACRAGVRCSAANKPSPPPPTTPDSSEVSSIAKIRSEVLSPFRSVRMFFYLAFMASGTLGGLIALTRLLPALSGSDSASAASTLKGLGIDVAAVSLFAFLYSRESKAKDAQVARLAREERLSRLRLRLRAGAAEGAGSNRPFTLGELRGTTRLVIVAGPAEFVAESFRRSQPFLRELAERAVLAVPFATDGSTPELRLDDGGDDEDGVDDDVARRSKRLWQLTPVFTTEWAQYETNKHTL

SEQ ID NO: 297978 - protein, 82 aa, Zea mays
  Clone ID: MRT4577_34827C.1.pep
ARTSKKGERESRRTFPRIASFAFEGRRRTLSVLAGGGRRSRCFPPGLIHHRPDPTRPGNGPPPSAPVGPTLYLPATPNPSFR

SEQ ID NO: 297979 - protein, 86 aa, Zea mays
  Clone ID: MRT4577_34828C.1.pep
SSSLKGESTIGLFFQVHWTFSCFSIGQLSVEYFILAGSFSSQQTCFQYSVFTWTTILRVIVVIFLQHLLLNKPLFYSQKKKKKRPL

SEQ ID NO: 297980 - protein, 80 aa, Zea mays
  Clone ID: MRT4577_34829C.1.pep
AATRSRSAISGQTYAFGYDQALAKAREARRLSRAAGYILSTETRSCSRRCWASYAATQRHQNKTCHTRWPQALVAIYPLG

SEQ ID NO: 297981 - protein, 107 aa, Zea mays
  Clone ID: MRT4577_3482C.1.pep
VGPTLLESLAVRHHGWCAWSLRPPVSLAVFVQPPWVRSSPALSSKPPHARHPFPCHERATNMEPHRVALRSIQPTCRSELHLDLSSSSCVFVVPAGAPRSLLVFIPW

SEQ ID NO: 297982 - protein, 59 aa, Zea mays
  Clone ID: MRT4577_34830C.1.pep
GLKGLTLCGHARQGFIIRVIGPHYPIKKVALALSKFVYKLQIFTKGGGLFCPLVFQCDQ

SEQ ID NO: 297983 - protein, 80 aa, Zea mays
  Clone ID: MRT4577_34831C.1.pep
EATGLDSEEVSYSMLYLSSEQYSATMPARRRYQRRRRRGSVSYVGLRPSRRNSSATTAPAAFLRPPSMLVRYFCCPLSYT

SEQ ID NO: 297984 - protein, 76 aa, Zea mays
  Clone ID: MRT4577_34832C.1.pep
MGSFKGHGLPGTLFLAVGLWRVWSSASRHAADPSSFRLRACSPAPARGPPRLLDLYVWALLAYVAHVTGSTLFSST

SEQ ID NO: 297985 - protein, 116 aa, Zea mays
  unsure (1)..(116): unsure at all Xaa locations
  Clone ID: MRT4577_34833C.1.pep
MATTILSVFGLLALFVSATNAFIITQCSLAPIAIIPHFLPPVTSICLQHPAVQAYRLQQSLAASVXLQQPIVQLQHQSLAHLTIQTIATQQRQQFLPSLIHLPVLNPVVYLXQQLL

SEQ ID NO: 297986 - protein, 66 aa, Zea mays
  unsure (1)..(66): unsure at all Xaa locations
  Clone ID: MRT4577_34834C.1.pep
RRNICAVVEAETNGGIIYRRSLLAQRIKLTKVHSFPSIVFPLCLFNSIHMRCFLVEHINRGXYNIC

SEQ ID NO: 297987 - protein, 161 aa, Zea mays
  unsure (1)..(161): unsure at all Xaa locations
  Clone ID: MRT4577_34835C.1.pep
GAWAVCTVVETRRLCVPAPWYXPDRVXVLCPFCGEPGRCLSVDFPGDYGCDSAGLVRRPGDYRLPRAELRVXLSCCAVLGALCYHLHELFYRCSDDFGAIVCFXAASXLFREGGLVYLGSLSLVLVHRMLRFWACLLLLFGAHPGCRFGRGLDGLGPGHGP

SEQ ID NO: 297988 - protein, 91 aa, Zea mays
  Clone ID: MRT4577_34836C.1.pep
HASGERRRGKESFSSHLPIPPSLPPFSSYCYCSPGPLARSSSSTSHNYLCSRSFRPSFLPPPLSLFQPPLLLPCLSAEGRQGLSQDGVGRA

SEQ ID NO: 297989 - protein, 62 aa, Zea mays
  Clone ID: MRT4577_34837C.1.pep
DVHVAGAGADVDAVVTDVDDGVGDCDADLVANVDAIGVESVPGRGIGQVVEKHVHVRERVDG

SEQ ID NO: 297990 - protein, 116 aa, Zea mays
  unsure (1)..(116): unsure at all Xaa locations
  Clone ID: MRT4577_34838C.1.pep
STRDMQPLMSEKQVLGNPTTLPTWTPKMNHCCSWDXSGATTLDARTTRLKTXTDDVSGQIHHEVGGLTEVMTLTMYRMAGLTGPIPVCLGVLDNLQVLTCFHTNVSDAMQQCLKRL

SEQ ID NO: 297991 - protein, 55 aa, Zea mays
  Clone ID: MRT4577_34839C.1.pep
KKKVNKEREFTNMLYQKRKTLKIRTNFEAPYEKTFNSLTTPLWSRTSKGSCWRMP

SEQ ID NO: 297992 - protein, 79 aa, Zea mays
  Clone ID: MRT4577_3483C.1.pep
GKRWRAHPGMVLVMFANSGYQVLAKSVLKVGINQVVFWVYRDLLGLLVVAPVAFLREKRVRPPVRPQVLASFALVGFPG

SEQ ID NO: 297993 - protein, 156 aa, Zea mays
  Clone ID: MRT4577_34840C.1.pep
MRPMHLLGVTCLWILSCALLLGGACSDGLLRINLSKKRLDKETLAAAKSARQETNLLRPDDGSRHSLGLSDDDIVPLDNYLDTQYFGGGIGVGTPPQNFTVIFDTGSSNLWVPSSKCYFSIACYLHHKYKSTKSTTYKKNGETCTISYGSGSIAGF

SEQ ID NO: 297994 - protein, 125 aa, Zea mays
  Clone ID: MRT4577_34841C.1.pep
CFPFRTLLDLPGEPGVLDPFHCSLGCYLPGNLPPPAAGLPFRFPFFPLFLSPPGFFGRIRPRCSPVCPCRPRAPPFWLRVSFSPDFFPAWIFSPLCFLFLAKLPCLPFFCFLGLFLACVSSLISF

SEQ ID NO: 297995 - protein, 54 aa, Zea mays
  Clone ID: MRT4577_34842C.1.pep
VNNLWRANRGAAGVTRAGSYAGCRSELYRYMNTRRKTSTTSRMPLILNFTATQA

SEQ ID NO: 297996 - protein, 88 aa, Zea mays
  unsure (1)..(88): unsure at all Xaa locations
  Clone ID: MRT4577_34843C.1.pep
MSHQSHAYHIVPXPXRGPLSXXNDLXPSHVXSLPXHNAXHTRPTXQHTXHIPXMXXXXXRXHIPRPPHTTCXXRPSIRDNPIYYLRSX

SEQ ID NO: 297997 - protein, 62 aa, Zea mays
  Clone ID: MRT4577_34844C.1.pep
PRVRLRVYCFMDLHEYVPMAGTVMFRELLHNYPDSYYIKSLSNSVNIYLSHIIDIDELQKIQ

SEQ ID NO: 297998 - protein, 98 aa, Zea mays
  unsure (1)..(98): unsure at all Xaa locations
  Clone ID: MRT4577_34845C.1.pep
KETPLPMGDALNAYKRLDXIQGHMVIFKESKNLGSNGQGYFAWFLLDNFEWFAGFPERYGIVYVDRNKNCTRYIKEFAKWLKQFNPAKKPSKKILTPV

SEQ ID NO: 297999 - protein, 134 aa, Zea mays
  Clone ID: MRT4577_34846C.1.pep
MGSNTERARKALGAMKLIGFSKKQAIPVLKELLKIFNNNWEPIEDESYRALADAILDRQDSKQTPPSQQGTQAAHADLEPLRSTRDDRQQYLSASLDDTCEDDNETPLVKRPRMGTANFRQSCSHHSNPVFQPK

SEQ ID NO: 298000 - protein, 95 aa, Zea mays
  Clone ID: MRT4577_34847C.1.pep
SYFLGVSLVFFLLQSHTNRHLLLLSFSHPPPMYNCPLERENFNSSKNLTRRPKKNARPLLPTPEHMHHGWTTYPTATLRSPWNDSCVPKDTQKTS

SEQ ID NO: 298001 - protein, 106 aa, Zea mays
  Clone ID: MRT4577_34848C.1.pep
LICNLQHLRCSHRYLSKHLVVFRQFSWLSVRRRHIGQAELQRRCTWADKLELATDPLHFDFTLLSCSAMYRFGSPYVDPSSISYRFVLNLVYFHKCNSHFSRSRTI

SEQ ID NO: 298002 - protein, 60 aa, Zea mays
  Clone ID: MRT4577_34849C.1.pep
VVLTVLGFPVYGITTLAKRFPTHNGLQLTTWTHKALNHDAFTKTTSLHYKQRADCALIKN

SEQ ID NO: 298003 - protein, 255 aa, Zea mays
  Clone ID: MRT4577_3484C.1.pep
TELVTGVQAIFSHFVPTLPAFHQVLVFVCVKSVPVPYVPMDERYLIGRIGPREYRMSRCIVRYGDKDVQKDDDRVPNRLVMSIARFIQLEAEESASSGTGRSYESSTEGRMAVVHTTGTTGTGLVMMASAEDAEGTSLSRSSKSETLRSLQSIYEQESAGTVSRRRRRVRFQIDEEERIEPQVRDELSDLLEAKEAGAAYIIGHSYVKARKNSNFLKTFAINYAYSFLRKNCRGPSVTLHIPHISLIEVGMIYYV

SEQ ID NO: 298004 - protein, 355 aa, Zea mays
  Clone ID: MRT4577_34850C.1.pep
MATVMAAAVSSFPSSSAVVVKASPASPCAAPHFRPRAVRAAIRAQASAVEAPATAKAKKESKKQEEGVVTNLYKPKEPYVGRCLLNTKITGDDAPGETWHMVFSTEGKIPYREGQSIGVIADGVDKNGKPHKVRLYSIASSAIGDFGDSKTVSLCVKRLIYTNDAGEIVKGVCSNFLCDLQPGDNVQITGPVGKEMLMPKDPNATIIMLATGTGIAPFRSFLWKMFFEKHDDYKFNGLGWLFLGVPTSSSLLYKEEFGKMKERAPENFRVDYAVSREQTNAAGERMYIQTRMAEYKEELWELLKKDNTYVYMCGLKGMEKGIDDIMVSLAEKDGIDWFDYKKQLKRGDQWNVEVY

SEQ ID NO: 298005 - protein, 140 aa, Zea mays
  Clone ID: MRT4577_34851C.1.pep
MATVMAAAVSSFPSSSAVVAKASPASPCAAPHFRPRAVRAAIRAQASAVEAPATAKAKKESKKQEEGVVTNLYKPKEPYVGRCLLNTKITGDDAPGETWHMVFSTEGKIPYREGQSIGVIADGVDKNGKPHKVRLYSIAS

SEQ ID NO: 298006 - protein, 150 aa, Zea mays
  unsure (1)..(150): unsure at all Xaa locations
  Clone ID: MRT4577_34852C.1.pep
DDDYSXHGLGWLFLGVPTSSSLLYKEXYIDLYKLGGQYIDLYKVLLCIIQEFGKMKERAPENFRVDYAVSREQTNAAGERMYIQTRMAEYKEELWELLKKDNTYVYMCGLKGMEKGIDDIMVSLAEKDGIDWFDYKKQLKRGDQWNVEVY

SEQ ID NO: 298007 - protein, 594 aa, Zea mays
  Clone ID: MRT4577_34853C.1.pep
MALQGKKLINNPDDVVTEFIEGLVETYPGLQYLDGFPQIKVVLRADVERGSYDKVAVISGGGSGHEPSHAGFVGPGMLTAAVSGDVFASPPVDSILAAIRAVTGPMGCLLIVKNYTGDRLNFGLAAEQAKSEGYKMEMVIVGDDCALPPPRGIAGRRGLAGTILVHKVAGAAADAGLSLAEVAAEAKHASEVVGTMGVALSVCTLPGQITSDRLGPRQMELGLGIHGEPGVAVVELQPVDVVVEHVLKQILSQETQYLPVTRGCNAVLLVNGLGATPIMELMIAARKAVPELQLVYGIAVDRVYTGTLMTSLDMAGLSITIMKSGESILKRLDAPTKAPAWPVGSEGNRPPAKFPVPLPPSPSMKDDEILAPSQELSKQGCILEAVIEASATEIINLMDSLNEWDSKVGDGDCGSTMYRGATAILEDMKKRYPMNDAAGTINEIGATIRRVMGGTSGILYAILCKAAYASLKQSSTVTANKWADALEASIAAVSKYGGASAGYRTMLDALIPASAVLKQRLEAGDDPVTAFIASSEAASAGAESTKQMQAKAGRSSYIAPDLLASIPDPGAMAAAAWYRAAALAVKNKVHGSKS

SEQ ID NO: 298008 - protein, 203 aa, Zea mays
  Clone ID: MRT4577_34854C.1.pep
MANKPSLLSTLPTNPPAQFLKDITDGFSETQMLGEGAFGTVYKGILQDGQPIAVKKLAENAPVAPEKQFKIGVGNLMAMQHPNIVRILGYCREPQRKVIEQSGRYIIVDVVESLLYYEYVPNGNLEKYISDASASRPDWKTCFEIIKGICQGLRYLHKEMDRPIVHLDLHPTNILLDENMVPKITDFGLSRLFGEDNQNNTLC

SEQ ID NO: 298009 - protein, 621 aa, Zea mays
  unsure (1)..(621): unsure at all Xaa locations
  Clone ID: MRT4577_34855C.1.pep
MALQGKKLINNPDDVVAEFIEGLVETYPGLQYLDGFPQIKVVLRADVERGSYDKVAVISGGGSGHEPSHAGFVGPGMLTAAVSGDVFASPPVDSILAAIRAVTGPMGCLLIVKNYTGDRLNFGLAAEQAKSEGYKMEVDRHKYYYVVWQIILVLMPMYHLSSNXMVIVGDDCALPPPRGIAGRRGLAGTILVHKVAGAAADAGLSLAEVAAEAKHASEVVGTMGVALSVCTLPGQITSDRLGPRQMELGLGIHGEPGVAVVELQPVDVVVEHVLKQILSQETQYLPVTRGCNAVLLVNGLGATPIMELMIAARKAVPELQLVYGIAVDRVYTGTLMTSLDMAGLSITIMKSGESILKRLDAPTKAPAWPVGSEGNRPPAKFPVPLPPSPSMKDDEILAPSQELSKQGCILEAVIEASATEIINLMDSLNEWDSKVGDGDCGSTMYRGATAILEDMKKRYPMNDAAGTINEIGATIRRVMGGTSGILYAILCKAAYASLKQSSTVTANKWADALEASIAAVSKYGGASAGYRTMLDALIPASAVLKQRLEAGDDPVTAFIASSEAASAGAESTKQMQAKAGRSSYIAPDLLASIPDPGAMAAAAWYRAAALAVKNKVHGSKS

SEQ ID NO: 298010 - protein, 47 aa, Zea mays
  Clone ID: MRT4577_34856C.1.pep
VNTCVQMACRCIRASGIRKGWPPGFSPTKDAFGQTVMLKKSKVISSL

SEQ ID NO: 298011 - protein, 153 aa, Zea mays
  unsure (1)..(153): unsure at all Xaa locations
  Clone ID: MRT4577_34857C.1.pep
KVLCSHEKVEEAYSLFVEMVDKTELRPWQGTCQHLIGDLLRVNKLEEALSLLKTMKTCKFPPFADPFPPYIAKYGTVEDARNXXKAMTVNTSPEPVAYLHVLKLFFAEGRYSEAQDLLYGCPNHIRKHPDVIKLFGSIKVESASASRLGSRKQ

SEQ ID NO: 298012 - protein, 125 aa, Zea mays
  Clone ID: MRT4577_34858C.1.pep
LETHNKQGEIARRSSACRRAVSSEAAPPPRSAGPTRWDLPFLSRPVNAADILLPCGSGGFRKPVAPLLLFLAGIDDQTEQLLQSRLRPPSALNPFGILERGVLACIAQHLHQFTFFGHLLSCQAC

SEQ ID NO: 298013 - protein, 99 aa, Zea mays
  unsure (1)..(99): unsure at all Xaa locations
  Clone ID: MRT4577_34859C.1.pep
LRLIVXTFRRLPCVHPHSRSPPRRPRIGKRRAKARSWGETKGRRNEERGDGGFTGRLRKGRSQRVGPADRARGAASLDTARRQALLLLAISPCLLCVSS

SEQ ID NO: 298014 - protein, 77 aa, Zea mays
  unsure (1)..(77): unsure at all Xaa locations
  Clone ID: MRT4577_3485C.1.pep
MVLQNDIDLLNPPAELEKLKHKKKRLVQSPNSFFMXTTVFSHSQTVVVCPGCQTVLCQPTGGKARLTEGCSFRRKGD

SEQ ID NO: 298015 - protein, 43 aa, Zea mays
  Clone ID: MRT4577_34860C.1.pep
AEAPYARLDSHLKAYISNTSHRSYAPLYVESSAMTNSVNQLLL

SEQ ID NO: 298016 - protein, 219 aa, Zea mays
  Clone ID: MRT4577_34861C.1.pep
MGAFCSCLQPDYSDHHGNQASSAFRNCMCLRCFTQQLINAYTVLFRAGAVHSVSPAIEATPVDSTESSFDTYRSPPRPLPYDDPRFSPPARDWLRSENPSHSPEESEPLRANEDDEEMETPSIIQKASKTNYNTKMKICSSTYGDKVPPREHGNYFSYFSPSAEDEDVCPTCLEDYDSENPRIVMQCSHHFHLGCIYEWMERSEACPVCGKKMEFDETT

SEQ ID NO: 298017 - protein, 99 aa, Zea mays
  Clone ID: MRT4577_34862C.1.pep
LLYEPRSLIYRLPMNLSPDNQCTCKPRQGRGRGADRQRGGNLPLPTICNKSEKNVYVHRSSIWRALVWPRGTHTTSPIFTGRIYRELAGLTHLYFQNVI

SEQ ID NO: 298018 - protein, 239 aa, Zea mays
  Clone ID: MRT4577_34863C.1.pep
MGAFCSCLQPDYSDHHGNQTSSAFRNCMCLRCFTQQLINAYTVLFRAGAVHSVSPAIEATPVDSTESSFDTYRSPPRPLPYDDPRFSPPARDWLRSENPSHSPEESEPLRANEDDEEMETPSIIQKASKTNYNTKMKICSSTYGDKVPPREHGNYFSYFSPSAEDEDVCPTCLEDYDSENPRIVMQCSHHLPTLAVFMSGWKEVRHALSVERRWSLTRQHNPLAGLYTMAHGLTTNLLI

SEQ ID NO: 298019 - protein, 158 aa, Zea mays
  Clone ID: MRT4577_34864C.1.pep
ILGATHPSAVLFRAGAVHSVSPAIEATPVDSTESSFDTYRSPPRPLPYDDPRFSPPARDWLRSENPSHSPEESEPLRANEDDEEMETPSIIQKASKTNYNTKMKICSSTYGDKVPPREHGNYFSYFSPSAEDEDVCPTCLEGIIAVIIFFSKCIGKMP

SEQ ID NO: 298020 - protein, 71 aa, Zea mays
  Clone ID: MRT4577_34865C.1.pep
QNQPGLSYKRFYYLDFRNNRHTMGLQMGVNQIGGTEGSTSHLSAAVLEGGKTCFLGPINICLQKFSDFGPN

SEQ ID NO: 298021 - protein, 80 aa, Zea mays
  Clone ID: MRT4577_34866C.1.pep
VWSVFITKVTQLLSSSPSKSVPHSLLQFPRRDLLVVTISAAHILTMVKIRRRLTPSVWCPILALHTIPKIICMKFYNCFL

SEQ ID NO: 298022 - protein, 118 aa, Zea mays
  unsure (1)..(118): unsure at all Xaa locations
  Clone ID: MRT4577_34867C.1.pep
ETRGGEANGKRREGKAGXVKHTEARYSANTDDNTIHTPINTRQCANTGKIAEYKNKNRTLEGQYSIKREQEIEXSARKIKXRDGDDHQNKVDGDTPYSXVSGPEKCGTQTKKLPHILT

SEQ ID NO: 298023 - protein, 369 aa, Zea mays
  unsure (1)..(369): unsure at all Xaa locations
  Clone ID: MRT4577_34868C.1.pep
MANSAAPGGVRSFLQAVSTVTEETRTPLRVVQMEGLAVLKIIKHCEEFAPALVTGQLLGLDVGSVLEVTNCFPFPMREEDDEADADGANYQLEMMRCLREVNVDNNTIGWYQSCLLGSFQTVELIETFMNYQESIRRCVCIVYDPSRSSQGVLALKALKLTDSFMDLYRNNGLTGEKYNLFSVAHHCTSLYKYFLYNDFLLLXLREKKLSWVDIFEEIPLKSSNSALVSAFMKELEPESPVTQCDLDRLKLSTAPFMERNLEFLIGCMDDLSSEQNKFQYYNRNLSRQQSQQQAWLQKRRQENMARKAAGEEPLPEEDPSNPIFKPIPEPSRLEGYLVTNQICSYCNHINGVAGQNFDRLYLMKALHED

SEQ ID NO: 298024 - protein, 174 aa, Zea mays
  Clone ID: MRT4577_34869C.1.pep
SLLPFIPGHLSHLVSPVFWLEGIKMPCCQLMLDAIMSMNHAATSTPSWLRRLHAKKGISVPSNLQIDDVIYGDGSQPSLCLPVPTSSDHHHKNLLDTSKNQHQKATETKQCKPPNSETQQSPRFEKPHMSQPQPNAVISNDLGTPSIDPMDTLPLKAFRKKKQSTSSTLRNKSI

SEQ ID NO: 298025 - protein, 91 aa, Zea mays
  unsure (1)..(91): unsure at all Xaa locations
  Clone ID: MRT4577_3486C.1.pep
ERGKGSKARKGRNARASPGQQQKKPAKEQQNPPREGERGPRKASTNPPPGRAGKNDQPGPRRHNARSRARNPQQGPKASRTARSSQSXPQV

SEQ ID NO: 298026 - protein, 88 aa, Zea mays
  Clone ID: MRT4577_34870C.1.pep
LNFEGGPHCKKFDDLKALIGMNKKEDRQYDVRVVFELGDEQVRFVLIPSPLGMEVIVLNSKIAPCCYHQIAVESTCFWVLLVKISFVF

SEQ ID NO: 298027 - protein, 85 aa, Zea mays
  Clone ID: MRT4577_34871C.1.pep
MLSMVGRSVYQGRSGERRRDPAVWRQRNGAGMVGATSEVGTRDLLPSLHVLSGAAGTSVPPSLSSSLTHGTRRWVEPRDWQVRVV

SEQ ID NO: 298028 - protein, 68 aa, Zea mays
  unsure (1)..(68): unsure at all Xaa locations
  Clone ID: MRT4577_34872C.1.pep
LGRGGGGGGFYXFSLPLFTILLPGGNLGKTFTVPEGMPGFLYLKEGYLKKKTATTFFKTLVEIQKHGG

SEQ ID NO: 298029 - protein, 80 aa, Zea mays
  Clone ID: MRT4577_34873C.1.pep
VLLHRGISVVEREPEHTQNQACLDSWPCHQTGPPGSKHKYTPCLTFYSNIRDPATESGIAKTRAKCLGSKTTNGHQPPWS

SEQ ID NO: 298030 - protein, 96 aa, Zea mays
  Clone ID: MRT4577_34874C.1.pep
KLIHTKQQTPRALAYNHLPVPSIFVGMARQMYGSRAAGPSLSAWRDRGVGVEQPVRNLILVGGALEAVAARADRVVGAGCKSTSTRLVFLGKPGRR

SEQ ID NO: 298031 - protein, 58 aa, Zea mays
  Clone ID: MRT4577_34875C.1.pep
NTTKIAKIHCGTCHEVISKYHTVTIACICSSTQLQLYINASDADYCGLALFTQLIDLF

SEQ ID NO: 298032 - protein, 91 aa, Zea mays
  Clone ID: MRT4577_34876C.1.pep
IRHEDTHATRSPPNPAVGTSASRYAAHPPPPLSLPSLDRRSGPWLGPGSSTSVHVCVRANMFMFMFVMMWSGWAVVLDRSRILFQATWWIY

SEQ ID NO: 298033 - protein, 65 aa, Zea mays
  unsure (1)..(65): unsure at all Xaa locations
  Clone ID: MRT4577_34877C.1.pep
GGPIKYMVIQSEPGTVIRGKKGSACITVTNTGQAMVDSIYDEPMTPGQCNMXVERLGDYLVKQGL

SEQ ID NO: 298034 - protein, 94 aa, Zea mays
  Clone ID: MRT4577_34878C.1.pep
MTSWGFPCRKALSKIAGNTLQMELVKWQLNIPAGFKHMVSNNLQTWVIEVTGAAGTVYATQTYQLHVDLPEHYPMEAPHVILLNPVPMHPHIYS

SEQ ID NO: 298035 - protein, 71 aa, Zea mays
  Clone ID: MRT4577_34879C.1.pep
YFFYGDTYNQYTVLHFTTSVLGKPTHYLTLSPYITFPFHQTAVISNRPEPIDLPNIFASLIANGTLPVSAH

SEQ ID NO: 298036 - protein, 135 aa, Zea mays
  unsure (1)..(135): unsure at all Xaa locations
  Clone ID: MRT4577_3487C.1.pep
MKYSTRLLPSLPVTKRRRKRTRPLAEKRNRGVKSKSSSSSPXAWRGGRGSRRSPAGARGRSPXPXRRGRRSSCTQRWWRRRGRRRTPPFRGEPKQGTEKRGKRRRRHRRRRGPYQPGGARRGADRIFPGPAGPSG

SEQ ID NO: 298037 - protein, 87 aa, Zea mays
  unsure (1)..(87): unsure at all Xaa locations
  Clone ID: MRT4577_34880C.1.pep
TALNRLPTTGPGPKALRMGRLEPIVNPEASYRGQVGRRANGKLEHQKKIRLQTAKFQIWHFSKPMAKGLNYPRIQRDHSGSVPVXTT

SEQ ID NO: 298038 - protein, 155 aa, Zea mays
  unsure (1)..(155): unsure at all Xaa locations
  Clone ID: MRT4577_34881C.1.pep
ADTNATTTNAGAPVWNXNEALTGGPHGPILLEDYHLIDKWLHFSREXSPERVVLRARGLRQGFFXCTHYVTTVTCADLLRAPGVREPVIVLFSRXIHYEXLGDKRTRAFQQKFTARANCDLLDNNFPVFFMRDSIKIRHVIHAIKPNLRTNXQEY

SEQ ID NO: 298039 - protein, 73 aa, Zea mays
  Clone ID: MRT4577_34882C.1.pep
SKMPSLEDGNIDQSFNRLEMIIINSGTEACQIDKTLGGGQNLCAWHSKSPCHFINMYSIFKCKYIWSLHNLQN

SEQ ID NO: 298040 - protein, 123 aa, Zea mays
  Clone ID: MRT4577_34883C.1.pep
QARANRGRNLRGCTRAGNFILEKEEDMTMTKKKFHIGYIRYKTAGIIRPAGSTLTTIYKTTAYRYSQVMNALTQRSAGQPFCLPEMHARSDMNIFLTKRNRYPPCSSTDTIYQLTRRTTTTAN

SEQ ID NO: 298041 - protein, 47 aa, Zea mays
  Clone ID: MRT4577_34884C.1.pep
QTGNQPHAEENKQGLKHPRENTMYTKHKDTQALSPAHCVTLGTSLTF

SEQ ID NO: 298042 - protein, 69 aa, Zea mays
  Clone ID: MRT4577_34885C.1.pep
LLYHTTWWKQQDISAYGSPIYTAWKGQAITFLTEKSGPTPNRKKRGCNLSQENAILGNHQHWEKSKLSY

SEQ ID NO: 298043 - protein, 195 aa, Zea mays
  unsure (1)..(195): unsure at all Xaa locations
  Clone ID: MRT4577_34886C.1.pep
MPCLQASSPGSMPYQHHGRGVGCAAEAGAAVGASAGTGTRCGAHDGEVPAEAARHHEHAAPGPGRCCSAVVQRVAAPAEAVWSVVRRFDQPHAYKRLVRSCALLAADGGVGTLREVRVVSALPAASSRERLEVLDHXRXVLTFRAVXGEPRLXNYPPRTPVHLFPLASDALPPLLPSFPVAPSLFSLPLFPPLSP

SEQ ID NO: 298044 - protein, 91 aa, Zea mays
  Clone ID: MRT4577_34887C.1.pep
MAAAAPTRAEVLSLFRSLLRTAKKFSDYNIREYTRRRAADSFRENRALADASAAAAAFSEGKKQLEVAKRQAVVYSLYAPKAKSVMELKVQ

SEQ ID NO: 298045 - protein, 86 aa, Zea mays
  Clone ID: MRT4577_34888C.1.pep
RKKNGTVFQFPKNGVLALFGLFVTPAPKKSRYTPNEQPSLLCGRRPWARNLPFHMFSAFGKTFGLRQHRNRFFTPQVTGTGPWPFL

SEQ ID NO: 298046 - protein, 74 aa, Zea mays
  Clone ID: MRT4577_34889C.1.pep
LSVPSTGSKSRSCCFSISMRQFVIIKVLFIVSSSYKLELFAIFILSSKPYYELSIPTPLSTIDTPQRFLHKTSP

SEQ ID NO: 298047 - protein, 86 aa, Zea mays; identical to SEQ ID NO: 257102
  Clone ID: MRT4577_3488C.1.pep

SEQ ID NO: 298048 - protein, 91 aa, Zea mays
  unsure (1)..(91): unsure at all Xaa locations
  Clone ID: MRT4577_34890C.1.pep
LQPFHVGWRFVHHSSWEVTLPTIHLDQSLCRNICLLXMHIKTSGQFYXVNXDSPVVRPAEQVSTTIVPAGQGHHGTALHKGDRLPPRTYQP

SEQ ID NO: 298049 - protein, 58 aa, Zea mays
  Clone ID: MRT4577_34891C.1.pep
RDWQIQNPSYVSHLATGCGQEGFKCENHMSVEQIKLQRGKTKTWRLGKSGYRGVKPRQ

SEQ ID NO: 298050 - protein, 123 aa, Zea mays
  Clone ID: MRT4577_34892C.1.pep
RISRSAPPVRLTFSPSAWPFIPVEEGSRPGEVISGPKGFQPVPWGIDPSDRGARSDCCTGGQTCTSIVDSEKGVLKPRCRPWVGVPMDSNKPSPPGIKKAQPVPDGGCCQMVKFGLGERKSCC

SEQ ID NO: 298051 - protein, 296 aa, Zea mays
  Clone ID: MRT4577_34893C.1.pep
MRSLHLSPAPPRPPLPTLRRRPAPKPHFSAPSRGAAVGGTSFYSAGRISLPRHLAAAAPEAGAAASGPPDPSPLSAEAEAERAKLAQVSKKLEKTARHFKNVGTLGFWSQLVCTVVSAGILSFSAVATGNVTAPFTFSATAVGIVVAFICVFRSFGYIRLSERLKRTANDPSKAPPRADVVNNLRNSIVLNVVGMAAAVLGLQATVGALVGKALTTSLVPYYQGIPPGQSPVLALDIFLVQASANTILSHFLGLSSSLELLRSVTLSQTEAAPVPKPPLRSVTLSQTEAAPVPKTA

SEQ ID NO: 298052 - protein, 64 aa, Zea mays
  Clone ID: MRT4577_34894C.1.pep
VRLHAGKQAKVLNQIVYELPSEHPLAETRPLRELLGHTPPQVFASGVLGFAVATFTTMIAGLGS

SEQ ID NO: 298053 - protein, 86 aa, Zea mays
  unsure (1)..(86): unsure at all Xaa locations
  Clone ID: MRT4577_34895C.1.pep
MWAPCVGAGPGRGERDEERDQEFPDFPSFIPFLPPLSAANLKVYYATXFTIIVGIMVFGXGFLAPIIALNAYQVDVLSCGWKLNLV

SEQ ID NO: 298054 - protein, 77 aa, Zea mays
  Clone ID: MRT4577_34896C.1.pep
IWHSGEVMYDAFGVRLHVGKQAEVLNQIVYELPSEHPLAETRPLRELLGHTPPQVFAGGVLGFAVATFTAMIAGLGS

SEQ ID NO: 298055 - protein, 63 aa, Zea mays
  Clone ID: MRT4577_34897C.1.pep
GALGSIATTVVVLILFSPASGLLPVHLCSSCPYAPDRPGYGVRWSSPVCRKRVVSCGCQHVYA

SEQ ID NO: 298056 - protein, 96 aa, Zea mays
  Clone ID: MRT4577_34898C.1.pep
NLWIQKVGPAQDTENLPHAGTSQFVVMYDAFGVRLHAGKQAEVLNQIVYELPSEHPLAETRPLRELLGHTPPQVFAGGVLGFAVATFTAMIAGLGS

SEQ ID NO: 298057 - protein, 85 aa, Zea mays
  Clone ID: MRT4577_34899C.1.pep
KKKKKNKKQNYKFFFFFFFLKFFFFFFFFFFFFFFFVLILNISKNLRLVEHLSMGPNSPFIEWDKISLSGVLQLLDWKNFKIFPI

SEQ ID NO: 298058 - protein, 86 aa, Zea mays; identical to SEQ ID NO: 257102
  Clone ID: MRT4577_3489C.1.pep

SEQ ID NO: 298059 - protein, 456 aa, Zea mays
  unsure (1)..(456): unsure at all Xaa locations
  Clone ID: MRT4577_348C.1.pep
MRECTXSIHXIGQAGIQVGNXACWDAXYCLEHXGLQADGQMPGDKTIGGGDDAFNTFFSETGAGKHVPRAVFVDLEPTVIDEVRTGTYRQLFHPEQLISGKEDAANNFARGHYTIGKEIVDLCLDRIRKLADNCTGFQGFLVFNAVGGGTGSGLGSLLLEGLSVDYGKKSKLGFTVYPSPQVSTSVVEPYNSVLSTHSLLEHTDVAILLDNEAIYDICRRSLDIERPTYTNLNRLVSQVISSLTASLRFDGALFVDVNEFQTNLVPYPRIHFMLSSYAPVISAEKAYHEQLSVAEITNSAFEPSSMMAKCDPRHGKYMACCLMYRGDVVPKDVNAAVATIKTKRTIQFVDWCPTGFKCGINYQPPSVVPGGDLAKVQRAVCMISNSTSVVEVFSRIDHKFDLMYAKRAFVHWYVGEGMEEGEFSEAREDLAALEKDYEEVGAEFDEGEDGDEGDEY

SEQ ID NO: 298060 - protein, 129 aa, Zea mays
  unsure (1)..(129): unsure at all Xaa locations
  Clone ID: MRT4577_34900C.1.pep
EDLYGADGLVKERKITSCPVTRFRCGHHAWVQGQAEVKEIRRLRIHQRXKNVELGFSDEERDQELPDFPSFIPFLPPLSAANLKVYYATRFTIIVGIMVFDGFHAPXQVKLGLGXTSYEDSIRSIHLSM

SEQ ID NO: 298061 - protein, 71 aa, Zea mays
  Clone ID: MRT4577_34901C.1.pep
VMYDAFGVRLHVGKQAEVLNQIVYELPSEHPLAETRPLRELLGHTPPQVFAGGVLGFAVATFTAMIAGLGS

SEQ ID NO: 298062 - protein, 69 aa, Zea mays
  unsure (1)..(69): unsure at all Xaa locations
  Clone ID: MRT4577_34902C.1.pep
MVHQPTLKIFCKAYEEYWLTCRNGNVGLPPGNPRDXHHHXTSXMRFNTHVKDXEANPAFTLNYKATGLA

SEQ ID NO: 298063 - protein, 103 aa, Zea mays
  unsure (1)..(103): unsure at all Xaa locations
  Clone ID: MRT4577_34903C.1.pep
TTVVNPPPTEXKRGGTKPGTEGERAHGKNKTGQTRGQRTKTPPHKTHGRDSDGTRRGPRTHRDLGREAARKAKPKWHGPRAGGLKPPPEGEEEKKGGQAPPKK

SEQ ID NO: 298064 - protein, 81 aa, Zea mays
  unsure (1)..(81): unsure at all Xaa locations
  Clone ID: MRT4577_34904C.1.pep
KPATPPRGVAIFKLSRAELVRLRSHVPAXKGAPRFSTYAVLAAHMLPCASLTRGLPXDQPTKLYCATDGPHTVQPPLPEGY

SEQ ID NO: 298065 - protein, 94 aa, Zea mays
  unsure (1)..(94): unsure at all Xaa locations
  Clone ID: MRT4577_34905C.1.pep
RASTRPWSRGLTLFFLVVPLLGGGVVFRVLYLVFVXHPLVLERVWXKTEDKIYVPVSLTYYRYIQLRFSLLLPGXLEASRILNLNNYQYFFGPY

SEQ ID NO: 298066 - protein, 82 aa, Zea mays
  unsure (1)..(82): unsure at all Xaa locations
  Clone ID: MRT4577_34906C.1.pep
XLRTCTKLYELCVCVFVISSDMAIAQAHVAVRFMMDAPPPHVVLVMRVEKAPRSLITITEDHMEMLAPCVSPSVHGHVHTHN

SEQ ID NO: 298067 - protein, 91 aa, Zea mays
  Clone ID: MRT4577_34907C.1.pep
TIYLYSGIRGLIDKSLSPSWLNAQIDCIFFRTYTRTGYALSLAGNGFNWSLHLRIGFKQLRGRGSNFDLLLTSLKDYQICTGGIKTIVLDI

SEQ ID NO: 298068 - protein, 106 aa, Zea mays
  Clone ID: MRT4577_34908C.1.pep
VTWTICCIPGEYWLQPRQICRFPGQGKLASCVGSRNHSCCRNAVVKTVNELCPNSMGDMDPENFEHQKLSDGAFSKTEQGYCVQKTLPGKDLVAPIDTHKGIARIS

SEQ ID NO: 298069 - protein, 95 aa, Zea mays
  unsure (1)..(95): unsure at all Xaa locations
  Clone ID: MRT4577_34909C.1.pep
HFWSDPHCATXVNNWYCALPKNGKVIDIQCVLSVNTEATPKAQGVLHTNMIMLEHNPXYKERYQRKXQELAKGAGFYAVKDTYIYAKTWSIQFIK

SEQ ID NO: 298070 - protein, 71 aa, Zea mays
  Clone ID: MRT4577_3490C.1.pep
HRCFSSNRMNQTNINHRLLALLSPCSPPATASSLGASLMHHPKFDESSSTYTLTTSHSCSPTTLTLFLTLP

SEQ ID NO: 298071 - protein, 106 aa, Zea mays
  unsure (1)..(106): unsure at all Xaa locations
  Clone ID: MRT4577_34910C.1.pep
VLSPGEWRTVACSRDAQRGDQLLSSMVNMAIQIIFYWYVCHXRVRVWLRQSLVLSMISVTVASDLLVAVDRTVRAQVGRHCCRDQRVGSVREHPRDEHQPSVPRHR

SEQ ID NO: 298072 - protein, 80 aa, Zea mays
  Clone ID: MRT4577_34911C.1.pep
KKKKKKKKKKKKKKKKKKFVKNKKESFPSGRNPSLGRVSWAFAFPLGGLSPLSLLGAHFLPLLVAFSLFLGAGFYTAGAG

SEQ ID NO: 298073 - protein, 37 aa, Zea mays
  Clone ID: MRT4577_34912C.1.pep
QEGNPTMLLVLKSGELLQRGDSKKTISVPQAYWLNRS

SEQ ID NO: 298074 - protein, 132 aa, Zea mays
  Clone ID: MRT4577_34913C.1.pep
GGPPFFWRVRVFPVVGPHVCFPVGPCVFFSRGGFFPPCSSPAFVVGPLFPGLPVACSGPCAPPPSRGRDSPVVFGALVPSPGLGVFLLVLLWCVALALGCRCVFWTVAAGGIPLLCTKYPRCDVCLRGIYLR

SEQ ID NO: 298075 - protein, 89 aa, Zea mays
  Clone ID: MRT4577_34914C.1.pep
VSSTGPIVFLFGICSHVSVQRLFYPARLLDVLWACCILLRDWSSDSMLPFKFVPHREFLDVYRIIGYSDIFWSVRACWVGSTLYHKTPM

SEQ ID NO: 298076 - protein, 137 aa, Zea mays
  unsure (1)..(137): unsure at all Xaa locations
  Clone ID: MRT4577_34915C.1.pep
MIDGHQHWAFLLTPGIENPSPTFXRQMMHNXGIPLAAGFGSTPYSTERSMPSHGLQRYLTDYVLTRCASNLYEMTLITPATANEAHMHMKAPAGPGSNTRLTTLDRNVRKTHQNTXRHTAADASRNMHYLLRVRKHH

SEQ ID NO: 298077 - protein, 173 aa, Zea mays
  Clone ID: MRT4577_34916C.1.pep
VVRAVRGGALIQLAELLLAALLPAARSLSPSSSSRTLAPAHLLSFPAQLFFLSRHFHSARSSLPASKLPARPLIFLCSISSSPVFPVCAPGRSSELALTLAHGGSLSSLPTTATPLPSSLRAVVLQLGYSAPISLAARPALSVSLSLARRLRSLLLPLSPVRFIVIFRIILIP

SEQ ID NO: 298078 - protein, 74 aa, Zea mays
  unsure (1)..(74): unsure at all Xaa locations
  Clone ID: MRT4577_34917C.1.pep
MGKRKSAAXPPSKKRMDNLDTDFSCPFCNHGSSVECRIDMKNLIGEASCRIWXENFTTTVYALTEPIXIYSEWI

SEQ ID NO: 298079 - protein, 73 aa, Zea mays
  Clone ID: MRT4577_34918C.1.pep
FGATPGGLCAFPRYKRSKPDSNNQLEAHTLTIVHTSVDNRHVCIHMIYNAFDRNICCNTRQSNSLQRYMGRTP

SEQ ID NO: 298080 - protein, 50 aa, Zea mays
  Clone ID: MRT4577_34919C.1.pep
KFLLSKLKALQFFVGRSIKAKASVGFAYTKDGAPNPTFPNFSQGLKETKG

SEQ ID NO: 298081 - protein, 62 aa, Zea mays
  Clone ID: MRT4577_3491C.1.pep
FYFFWNITGNREVRVTKAGRPVGVLKNNEEGKRKAMHGLTSFVHDKTPEIMPAVNKFFTDPK

SEQ ID NO: 298082 - protein, 100 aa, Zea mays
  unsure (1)..(100): unsure at all Xaa locations
  Clone ID: MRT4577_34920C.1.pep
MAATIQSXVRRRQIVXDARGNPXTYQVDVXFCSDGTFSGAGGPRGASTVVYEALELTDGGYDYLGRGPXQAENNGNCGMGPAVIGEAPTGQTEMDHCLVE

SEQ ID NO: 298083 - protein, 111 aa, Zea mays
  unsure (1)..(111): unsure at all Xaa locations
  Clone ID: MRT4577_34921C.1.pep
GGFYPGRRDRETQSNLPKRGEEKRGQAKRERKRGGEKNRRKKQKEKKKRKXKSKKKGSGKKKGDNTKRKGRRKKKKTGRGTNAAAQKNKQAGPQKGGENGPRGGRNFANNP

SEQ ID NO: 298084 - protein, 97 aa, Zea mays
  Clone ID: MRT4577_34922C.1.pep
PMARNTPPLPSVFLWDSEPVRHFWWGSFIKGPRSCAGGGHPESWSVPPAYPLWLDLVFGSPSSGLEGPIGVWIVEPWRSVDLPSQGVVLWVPAINKL

SEQ ID NO: 298085 - protein, 89 aa, Zea mays
  unsure (1)..(89): unsure at all Xaa locations
  Clone ID: MRT4577_34923C.1.pep
XSTPRFRGSHAPHRGRRGLSLESSRSTXRIARCHGAFRKLLGERERERRPLSGGGGDGGVGSRPADRAAEAVRAAHRGGSQGTVPQGHG

SEQ ID NO: 298086 - protein, 161 aa, Zea mays
  Clone ID: MRT4577_34924C.1.pep
MATDVAETPAPLVDAAPEAPADTPAAPAADAKPAKAKKATAPKKRASPTHPPYAEMVSEAIASLKERTGSSSFAIAKFLEDKHKDKLPPNFRKLLNVQLKKLVAGGKLTKVKNSYKLSSATKPKPKPKAATKKPKTGVKKPKAAAKPKAKSPAKPKPATKP

SEQ ID NO: 298087 - protein, 49 aa, Zea mays
  Clone ID: MRT4577_34925C.1.pep
NFFSKCKPNSGVKKKKKKKKKKKKKKKKKKKKKKKKKKKKKKKKKKKKG

SEQ ID NO: 298088 - protein, 168 aa, Zea mays
  Clone ID: MRT4577_34926C.1.pep
MATDVAETPAPLVDAAPEAPADAPAAPAADAKPAKAKKAAAPKKRASPTHPPYAEMVSEAVTSLKERTGSSSYAIAKFVEDKHKDKLPPNFRKLLNVQLKKLVAGGKLTKVKNSYKLSSATKPNPKPKAAPKKAPDNARPLPRRSRRPRCGKRRPPRKAAKPGRDAKI

SEQ ID NO: 298089 - protein, 182 aa, Zea mays
  unsure (1)..(182): unsure at all Xaa locations
  Clone ID: MRT4577_34927C.1.pep
VLGIPLEAAPPFFFGFFFFFFFFFFFFFFFFFFFFFFFFFWPPKTGRQGIPNFPFPPTMGXEIGQKFGPPTKGQQXKPGKPPKRGTPFCKPQNGKRGGPGFEHNPIXRGGGLVSPNRKNKTPKGPPKKKGPIXPPGKGGGLGPPPRGGPPXKNFGGPPKSREGPPPPPPKLGNPGDSSKTNR

SEQ ID NO: 298090 - protein, 179 aa, Zea mays
  Clone ID: MRT4577_34928C.1.pep
LGFGLVADDSLYEFFTLVSLPPYAEMVSEAITSLKERTGSSSYAIAKFVEDKHKAKLPPNFRKLLNVQLKKLVAGGKLTKVKNSYKLSSATKPNPKPDPAPKKPKTGVKKPKAAAKPKAKSPAKPKKAKTSAKATPGKKAPVTKKPAAPAKKAPVAKRAAPAKKAAAPARKAPSRKAKK

SEQ ID NO: 298091 - protein, 125 aa, Zea mays
  Clone ID: MRT4577_34929C.1.pep
IVHMSPSICSPFADAGRPIFGAVARRPNYGLITPKPAPFQTFPSANLILPDRAEPISFVLALPLPTRNGPAAQAAAFASRRVSLQPRSAFQLQPVATTTRSRHTTTALPTAHRHRPGGDPMGETT

SEQ ID NO: 298092 - protein, 138 aa, Zea mays
  Clone ID: MRT4577_3492C.1.pep
TPSSHTGWYMSKGNLFDEPPLVKDGGVGFQGHLRLETGLQMQDGQGSDLLHPAERWWSRGPRAPKSSRISAPTPATTSCQQSSTLRTVSDAASIQTTKKSKCRLMLKHASYYVSEYDVAAAESSTVENTLIRKKDDGT

SEQ ID NO: 298093 - protein, 94 aa, Zea mays
  unsure (1)..(94): unsure at all Xaa locations
  Clone ID: MRT4577_34930C.1.pep
HQFLPLVFLKTSRLPHXINTTYSFIIPHFSLSPITNIPQSLPPLTSTIFKHPTIQTYNLQLSLTYIPLHQPNSQLLQHSFLHLTLQTISSQQHQ

SEQ ID NO: 298094 - protein, 87 aa, Zea mays
  Clone ID: MRT4577_34931C.1.pep
QCMGRMYLTLSRFRFPFAIHRARRFRRAIAAAFLAGKAPSESRMSRHPTNFGHRTRFAVGTSWRQASDGLLCASRIGLIVRDGFLFD

SEQ ID NO: 298095 - protein, 261 aa, Zea mays
  Clone ID: MRT4577_34932C.1.pep
MATDVAETPAPLVDAAPEAPADAPAAPAADAKPAKAKKATAPKKRASPTHPPYAEMVSEAITSLKERTGSSSYAIAKFVEDKHKDKLPPNFRKLLNVQLKKLVAGGKLTKVKNSYKLSSAATKPNPKPKAAPKKPKTGAKKPKAAAKTKAKTPAKAKPATKPKPAAKPKAVVKPKTPAKPKAKPAAKAKPKTAGAKPKPLAKKAGRPAKAAKTSAKDTPGKKAPVAKKSAAAAKKAPAKKAAPSKKAATPVRKAPSRKAKK

SEQ ID NO: 298096 - protein, 247 aa, Zea mays
  Clone ID: MRT4577_34933C.1.pep
MATDVTETPAPLVDAAPEAPADAPAAPAADAKPAKAKKATAPKKRASPTHPPYAEMVSEAITSLKERTGSSSYAIAKFVEDKHKAKLPPNFRKLLNVQLKKLVAGGKLTKVKNSYKLSSATKPNPKPKAAPKKPKTGAKKPKAAAKPKAKTPAKAKPATKPKPAAKPKAVVKPKTPAKPKAKPAAKAKPKTAGAKPKPLAKKAGRPAKAAKTSAKDTPGKKAPAKKAAPSKKAATPVRKAPSRKAKK

SEQ ID NO: 298097 - protein, 257 aa, Zea mays
  unsure (1)..(257): unsure at all Xaa locations
  Clone ID: MRT4577_34934C.1.pep
MATDVAETPAPLVDAAPEAPADAPAAPAADAKPAKAKKATAPKKRASPTHPPYAEMVSEAITSLKERTGSSSYAIAKFVEDKHKDKLPPNFRKLLNVQLKKLVAGGKLTKVKNSYKLSSAATKPNPKPKAAPKKPKTGAKKPKAAAKPKAKTPAKAKPATKPKPAAKPKAVVKPXPKAKPAAKAKPKAAAAKPKPAAKKAGRPAKAAKTSAKDTPGKKAAPAKKPAAAAKKAPAKKAAPAKKAPTPSRKVPSRKAKK

SEQ ID NO: 298098 - protein, 96 aa, Zea mays
  Clone ID: MRT4577_34935C.1.pep
DEWGNMYDEEKGGTLVGEMVIYQNGAVEIIGTLQIHQIFNLEVSVTAPNHMAKISLPLGIIQKITNHLFVNMVILVQTMCLLLNVNDYTMILGQVR

SEQ ID NO: 298099 - protein, 237 aa, Zea mays
  unsure (1)..(237): unsure at all Xaa locations
  Clone ID: MRT4577_34936C.1.pep
MATDVAETPAPLVDAAPEAPADTPAAPAVDAKPAKAKKATAPKKRASPTHPPYAEMVSEAIASLKERTGSSSFAIAKFLEDKHKDKLPPNFRKLLNVQLKKLVAGGKLTKVKNSYKLSSATKPKAAPKKTKTGVKKPKAAAKPKAKSPAKPKPATKPKAAAKSXAPKTPGVKPKPLAKKAGRPAKAAKTSAKDTPGKKAPVAKKSAAAAKKAPAKKAAPSKKAATPARKAPSRKAKK

SEQ ID NO: 298100 - protein, 89 aa, Zea mays
  Clone ID: MRT4577_34937C.1.pep
GPLPLVFPPRGGMQIFVKPLPGKPIPLGVESSAPLANVKAKIPAKGGLPPGQQGLFFAGKQLGEGRPLAGFTLQKGGPPPLGPRPRGGQ

SEQ ID NO: 298101 - protein, 293 aa, Zea mays
  unsure (1)..(293): unsure at all Xaa locations
  Clone ID: MRT4577_34938C.1.pep
MATDVAETPAPLVDAAPEAPADAPAAPAADAKPAKAKKATAPKKRASPTHPPYAEVIGALPLILLPCRAVRASPPRLDLTEXGWSVXMVSEAITSLKERTGSSSYAIAKFVEDKHKDKLPPNFRKLLNVQLKKLVAGGKLTKVKNSYKLSSAATKPNPKPKAAPKKPKTGAKKPKAAAKPKAKTPAKAKPATKPKPAAKPKAVVKPKTPAKPKAKPAAKAKPKTAGAKPKPLAKKAGRPAKAAKTSAKDTPGKKAPVAKKSAAAAKKAPAKKAAPSKKAAALVRKAPSRKAKK

SEQ ID NO: 298102 - protein, 88 aa, Zea mays
  Clone ID: MRT4577_34939C.1.pep
PPSPVFPLRGGLRFFVKTLPGKPITLGVGSSAPLANVKAKIPAKGGFPPGHQGLFFPGNQLGDGPPLAGSPLQKGGPPPLVPRPRGGQ

SEQ ID NO: 298103 - protein, 39 aa, Zea mays
  unsure (1)..(39): unsure at all Xaa locations
  Clone ID: MRT4577_3493C.1.pep
IYXIIKRGPGFIFISSIRHTYTFQYSCCCFSHSLYPFIK

SEQ ID NO: 298104 - protein, 335 aa, Zea mays
  Clone ID: MRT4577_34940C.1.pep
MGTARVRFVVLVLISTFLGVREGRAATFTFVNRCTGTVWPGIQSNAGSSRLDTTGFVLPPGTSRAVPAPSGWSGRVWARTGCGQDGSGKVVCATGDCGSGSLECNGQNAATPATLAEFTLASAGGNDFYDVSLVDGYNLPILVEPAGGAATGASATTCAAAGCTADLNERCPAELRAEGGAGCRSACDAFGRPEYCCSGAYANPNTCRPTAYSQLFKSACPNSYSYAYDDPTSTFTCAGGRDYTITFCPVATPSVKSSSGPGAATTTAAPTGPTPTLPGATPRSAGGGPEGQGVMLGDNSWLASLATGDASSAPALRALPLAPLLLVGLLLLVLL

SEQ ID NO: 298105 - protein, 47 aa, Zea mays
  Clone ID: MRT4577_34941C.1.pep
KLKVQELFSHGILPSSTYLRTSYSHGVFFGALGFLITIDAKIYCKYY

SEQ ID NO: 298106 - protein, 76 aa, Zea mays
  Clone ID: MRT4577_34942C.1.pep
EKLDDNTKGIKLCILIHPYMGTDAEHEPSRDSFLPLSFSPLFFFLLPNKKLRRGFKEGFCLRGSRGGLIKLHPSYS

SEQ ID NO: 298107 - protein, 114 aa, Zea mays
  Clone ID: MRT4577_34943C.1.pep
ELSIRRPPLNYKGGFNLKLGSLTHPYYILIKIPPGKRPKTHSKIPGQKTPKKKKTPPQTKKGKTGFSKKPNPQLTQPPGNSFKNTQGPPGVGTKNPRKKGPKPLSRSQKKNPPP

SEQ ID NO: 298108 - protein, 248 aa, Zea mays
  unsure (1)..(248): unsure at all Xaa locations
  Clone ID: MRT4577_34944C.1.pep
MKYSTVCAAFFAAVVAASDVKQLKTDDFKGFIEEHDLVLAEFFAPWCGHCKALAPEYETAATTLKEKDIALVKVDCTEEQDLCQEYGVEGYPTLKVFRGLENVSPYGGQRKADSLISYMTKQALPAVSEVTKDTLEEFKTADKVVLVGYFAADDKASNETFTAVANGLRDNYLFGATNDAALAKAEGVKQPGLVLYKSFDDGKDVFTEGFDADAIRTFAKVAATPLIGXEVXPETYSDYMGSXLPLAY

SEQ ID NO: 298109 - protein, 44 aa, Zea mays
  Clone ID: MRT4577_34945C.1.pep
ENTVLPQSLHSSHSRCSPLRTVMHCSVCRTSKQHKQVVSNTSDR

SEQ ID NO: 298110 - protein, 62 aa, Zea mays
  unsure (1)..(62): unsure at all Xaa locations
  Clone ID: MRT4577_34946C.1.pep
WYMGQVXPARRPRGTXQXPSTXPLGSPLVXMNDXXLLTDXXPGXCXXTXGEXXEPSDVXRLV

SEQ ID NO: 298111 - protein, 104 aa, Zea mays
  Clone ID: MRT4577_34947C.1.pep
AMHAPNDQAQASDNVTVLWRGLNSIDEDNKDQHNDWENHDETAGSYALQRLRLPPADIIDFRARTHPATQRSHSLNRQRDAHSHVSLTAIRCRAYSAAGSATLA

SEQ ID NO: 298112 - protein, 74 aa, Zea mays
  unsure (1)..(74): unsure at all Xaa locations
  Clone ID: MRT4577_34948C.1.pep
TWVTGCPHPSFLMPPAVHTLSWRPVLXGPGSGHNMCCDWLHVSSPSVRCGLSPPGAGLAPARSGALCLSAPPLR

SEQ ID NO: 298113 - protein, 91 aa, Zea mays
  unsure (1)..(91): unsure at all Xaa locations
  Clone ID: MRT4577_34949C.1.pep
PQKPAPHPRGGGPYPGSRGFVHPHPGEQKPGPPGAGNPLKGPPAQLLRPQVPPAGGXRGKPLRPPPPTRHKRGPPPPXGSGGTGPPPVVVN

SEQ ID NO: 298114 - protein, 125 aa, Zea mays
  Clone ID: MRT4577_3494C.1.pep
SVSLICTVTPASSNSEETRNTLKFAHRAKHIEIQVSQNKIMDEKSLIKKYQNEICQLKEELDQLKRGILSGTPSKDVIEDNVILWKQKLEDGNVKLQSRLEQEEAAKAALLARIQRLTKLILVST

SEQ ID NO: 298115 - protein, 128 aa, Zea mays
  unsure (1)..(128): unsure at all Xaa locations
  Clone ID: MRT4577_34950C.1.pep
ADCAVLIIDSTTGXCDAGISKDGHTRQHALLALTLGVNHTICXMHRMDATTHKYSEARHEYIENEDSFYLKNVDTTVIRSPLLTILGCEGDDMIDRSTNLDWYKGPSLLEALEPIXEPMKPSDKPLRL

SEQ ID NO: 298116 - protein, 83 aa, Zea mays
  unsure (1)..(83): unsure at all Xaa locations
  Clone ID: MRT4577_34951C.1.pep
DCPCVADLTNGPXXCQFVDAFSCFSRSTXAQQXGSDCVKPFNILHDCINAHPDAVSNEILDEDDNDDDADESNLRVRARSWSR

SEQ ID NO: 298117 - protein, 61 aa, Zea mays
  Clone ID: MRT4577_34952C.1.pep
MNNQQNKKKKKKKKKKKKKKKKKKKKKKKKKKKKKPHRPGKPHSGGLQPLPLIWAPGVMVP

SEQ ID NO: 298118 - protein, 35 aa, Zea mays
  Clone ID: MRT4577_34953C.1.pep
KFGYQWFPWQSWAQWHLDTHVQCTPGSPPSYQTQR

SEQ ID NO: 298119 - protein, 64 aa, Zea mays
  Clone ID: MRT4577_34954C.1.pep
DFSSSSGAFDVKCYYYIKDCLPRCSAGLRRFYKFSFERPLLHLSRRPRRTINSASCWPSTGLGI

SEQ ID NO: 298120 - protein, 70 aa, Zea mays
  Clone ID: MRT4577_34955C.1.pep
FYYSLVQWSSSLPLSVCTPIPFVHMCCTRTVVRVVNLHISSAVNLLCLIQIGAVSNVHAYLFVDQFLLLE

SEQ ID NO: 298121 - protein, 71 aa, Zea mays
  Clone ID: MRT4577_34956C.1.pep
SCRMGRNPPFNSPPVAGPGFFGPPIGAGMSCCAPYQQPCQGKQVVYFLSTICPGGFGNLVGIPGFSETKKK

SEQ ID NO: 298122 - protein, 60 aa, Zea mays
  Clone ID: MRT4577_34957C.1.pep
GCPPVTRALYLPSCRVIWPCSRITALPGLRNFTIFGCCCRCCATAAAAGSVAFGMVCPRP

SEQ ID NO: 298123 - protein, 46 aa, Zea mays
  Clone ID: MRT4577_34958C.1.pep
RPLRYAYPRCTTSCLPTRFPSPPDAVSLHSLRLRRRRRDTRSFKIL

SEQ ID NO: 298124 - protein, 104 aa, Zea mays
  Clone ID: MRT4577_34959C.1.pep
LPLFKRVIFQMPCPWGNLFFFPPNLTWVPGKSLPSMPECPLSFFMVLLGTHPVFKKKKDLLGKLTPLLKRFISPIPPPLKKTLKLPPKSFPLLEKIKSLAPNFE

SEQ ID NO: 298125 - protein, 85 aa, Zea mays
  Clone ID: MRT4577_3495C.1.pep
HAQHLGSSQLWRIGPAVGVGARAAPHVCSSAQAPSGQRIRLSRSVAAARTPRDAVRVQRQHPSPRAISTSCVVCALARASSIFAA

SEQ ID NO: 298126 - protein, 51 aa, Zea mays
  Clone ID: MRT4577_34960C.1.pep
GTITRVIGYIECRQEKYILGGTYGEETQLSLDFFINPWRLATVCPCTWRRR

SEQ ID NO: 298127 - protein, 76 aa, Zea mays
  Clone ID: MRT4577_34961C.1.pep
GTEGQSPALSLGPELVQTMTAHALRPLPLPVIEQVACGKPCSLLCATNSLHSLDPLLTLGPAGHCCQQLLPLSQVC

SEQ ID NO: 298128 - protein, 46 aa, Zea mays
  Clone ID: MRT4577_34962C.1.pep
PPHTTRHASHTLPVIPSSRTTDTLNSVPLNRKYNYSRCLRRRLHTY

SEQ ID NO: 298129 - protein, 74 aa, Zea mays
  Clone ID: MRT4577_34963C.1.pep
IDREWNTAILFQHRSFCVLGVLILLAQFKADSTFRTYVFSLQALLTLRTNEIAVLFSRTSFKLKRTRGSTREFR

SEQ ID NO: 298130 - protein, 67 aa, Zea mays
  Clone ID: MRT4577_34964C.1.pep
MEDDSRMTKTMKGAVTGLAGGTIWGTVDTTWYNVPRVERIVVLPGLIRTLKKGRTYWASFVTIWGLY

SEQ ID NO: 298131 - protein, 81 aa, Zea mays
  Clone ID: MRT4577_34965C.1.pep
QCKRPRRAYTPLLPISPRTLTTSITTSSCRPRTWTTLTCMTTFKKLSSIYTRSMSVTLTPSVTTIACTADVILSIENAADE

SEQ ID NO: 298132 - protein, 167 aa, Zea mays
  Clone ID: MRT4577_34966C.1.pep
MDDDRDHDQDPDASSPAAPWRRSVKRKLGAEAGDEAGPAARVEAEDERAALREAAAAAQSTASALRVEVEEERLAAASAASEAMAMMLRLQRDKAEVQMELRQFRRFADEKMALDASEIDQLRVLLAQRARRLLRLRSRLREYRLQCLHLGIPLPEGEDLVAQNAAE

SEQ ID NO: 298133 - protein, 129 aa, Zea mays
  unsure (1)..(129): unsure at all Xaa locations
  Clone ID: MRT4577_34967C.1.pep
TWLGFQLLRSIHRRFISGGSSPSHSAALTPYPPPGWRSLARCARACWAGQRRPRPLLPRLRPGRVSMATSSAARRRWPACTATRASSTNHFSTXGCDCYAGYDAPHGPSNAXSMEEALGSLWSHSLSSR

SEQ ID NO: 298134 - protein, 90 aa, Zea mays
  Clone ID: MRT4577_34968C.1.pep
ISAHSCAGGASLSFVSVLLWCTSLSLIWWPVFIWAPSFAILLIQKAGSSRLLVCSSIKKALVLGYVHVHPAPVLSPHPSWVNMCCNSSCE

SEQ ID NO: 298135 - protein, 276 aa, Zea mays
  unsure (1)..(276): unsure at all Xaa locations
  Clone ID: MRT4577_34969C.1.pep
NFGSLQSTIERVCALSSDTLDSVVELALLLLECPQDLARKNVAIFFAAAFVFKAVLDLFDARNGMQKLLDILCGCASGRSGSNSGGAGSSNVNQGNDRSPAEVLTASEKQVAYHTCVALRQYFRAHLLQLVDSIRPSKSIRSIARNTSSARAGCKPFDISNEAMDAVFRQIQRDRKLGLALVRVRWPVLDKFFASNGHVTMLELCKFQAHGDRYLRDLTQYAIGVLHIITLMPQPHVRKSIVQGTLSNNRAGMAVLLDTVKSFDYIDHXVICPALN

SEQ ID NO: 298136 - protein, 81 aa, Zea mays
  unsure (1)..(81): unsure at all Xaa locations
  Clone ID: MRT4577_3496C.1.pep
TPRNHAPLGDKKXGXXXTKXXSRLXAKKEKRXPXXGXXAXXKTTXXXKXKXGEKXTTIPTIXFNVETVEYKNISFTVWDVG

SEQ ID NO: 298137 - protein, 52 aa, Zea mays
  Clone ID: MRT4577_34970C.1.pep
RGPLLGDSGHAHSFSKDNSRPFGMLIEIHLSTTGRICVAMIQTFLLDKSIFV

SEQ ID NO: 298138 - protein, 63 aa, Zea mays
  Clone ID: MRT4577_34971C.1.pep
KWCITGPLLDHSDHCGVLLNKFKDLKMYFQSLWTSVTSVDKSEVAHAFNTFLYYYIIKEFARL

SEQ ID NO: 298139 - protein, 152 aa, Zea mays
  unsure (1)..(152): unsure at all Xaa locations
  Clone ID: MRT4577_34972C.1.pep
MPSRSMSRLSVESASXAAAAAAGRPSXVLCAPRPRRAQQQLVHVHPRGADLILGPPPFLLNESGEEGRCSWAAFGGGSPPARAGNPLVHDPSFLLSQRHPAADPPLELGFFDHLIRTSSYVRRPTPTTTSYTSSTSGSGSSSKSSFGPSSFA

SEQ ID NO: 298140 - protein, 178 aa, Zea mays
  unsure (1)..(178): unsure at all Xaa locations
  Clone ID: MRT4577_34973C.1.pep
MPSRSMSRLSVESASXAAAAAAGRPSXVLCAPRPRRAQQQLVHVHPRGADLILGPPPFLLNESSEEGRCSWAAFGGGSPPARAGNPLVHDPSFLLSQRHPAADPPLELGFFDHLIRTSSYVHRPTPTTSYTSTSSSGSSSKSSFGPSSFAPAVRIQGFDVAACRSSHSGGGGAGGRRE

SEQ ID NO: 298141 - protein, 174 aa, Zea mays
  unsure (1)..(174): unsure at all Xaa locations
  Clone ID: MRT4577_34974C.1.pep
RPVRLPGRPRLRLPPPRPRVRPPSHRPSRCSRPPPSRPPLPPRRRTPLPLLPRLPDVPSAIPRAPHRPCRTRPTSSSXRGPPDQXWAXRLDLAHNLRDPCCSLEIMHPPSPPTTSTPSASXPHPPAPPPPPHHXXPAPPPNNIPPPPPPTXIPIPPPPPPHSNPPPARPPPPAP

SEQ ID NO: 298142 - protein, 106 aa, Zea mays
  unsure (1)..(106): unsure at all Xaa locations
  Clone ID: MRT4577_34975C.1.pep
LLPLSIQRRSKSRKNCLXCGCSXLFGVRWHTSGSLTPMIDQLRTVWCTSKSLPSSSRLKIVVGGSKLYDAWPILSDIFSRDTRDKVEGTRLSGVLPNQLLSYVHSS

SEQ ID NO: 298143 - protein, 66 aa, Zea mays
  Clone ID: MRT4577_34976C.1.pep
TAHASEDAELIRAMRGDKRVVNCVEQHPSGIVLASSGIENDIKIWEPGEGENRSIVQADEVCACCT

SEQ ID NO: 298144 - protein, 86 aa, Zea mays
  Clone ID: MRT4577_34977C.1.pep
HTPRMEIPLAQVRGSVVGNNGVELFIVRGLYCTNTNKDLPKLVRLGFFSQKRKSRVLACVLGPGEPVKTKTCVCPPKKKMYLKTHI

SEQ ID NO: 298145 - protein, 84 aa, Zea mays
  unsure (1)..(84): unsure at all Xaa locations
  Clone ID: MRT4577_34978C.1.pep
MRAPTLPAEGYVPRLDTLRTFIPMDGTLLNKTLIANTLMKHDILVPQPIQAGAAVHQMLSGVPRKLPNSEDVXLKNGTQALTWP

SEQ ID NO: 298146 - protein, 128 aa, Zea mays
  unsure (1)..(128): unsure at all Xaa locations
  Clone ID: MRT4577_34979C.1.pep
SRPRARPPPRRXTXPPPPPHHPRTRTPAAPAPAPAPPRGSAGGHGSPSSWPGAAPPPRARSPPPPRRRSARTPTCRSPTCAGAPGAAAVPPPPPPTPTCSAPCAPRARARAQARRRRDPPSPSPPTRP

SEQ ID NO: 298147 - protein, 61 aa, Zea mays
  Clone ID: MRT4577_3497C.1.pep
LENGLEQSDQAWSYAVIRDSGEGTTRKGHRKAGDIYYRSLGSRVRLTGGSDSKLQVRYVQA

SEQ ID NO: 298148 - protein, 120 aa, Zea mays
  unsure (1)..(120): unsure at all Xaa locations
  Clone ID: MRT4577_34980C.1.pep
LSEATVHTDTNSTPFXGISAPAEKPMIAVQHKGEDKQSASEEIYSMGLINMPEIAEAYLGXTIKNAVGTDPAYLNDSQRHATQDAGXVIAGLNGLRIINEPTAAAIGYGLDKKATSXGEK

SEQ ID NO: 298149 - protein, 96 aa, Zea mays
  unsure (1)..(96): unsure at all Xaa locations
  Clone ID: MRT4577_34981C.1.pep
FQDGWLNNGGKVPPAXEFVKVAQEFFECPSGKKGGVFGWFPRGKMAGPFQEVAFPPPEGTVSAPFKSPPGFPFFLFEGRKNCFGNVGWGDCLLRLF

SEQ ID NO: 298150 - protein, 45 aa, Zea mays
  unsure (1)..(45): unsure at all Xaa locations
  Clone ID: MRT4577_34982C.1.pep
DSDASYGGSQAPERGYGAYSGYRARXIIVGXSGHSSLHYGKRHGY

SEQ ID NO: 298151 - protein, 47 aa, Zea mays
  Clone ID: MRT4577_34983C.1.pep
AGGARFSFLFKIDPKIRFRTSTHAQIYGYRSGHQISPTLYFHQSEAQ

SEQ ID NO: 298152 - protein, 51 aa, Zea mays
  Clone ID: MRT4577_34984C.1.pep
TRCPAGGPLSRVFVSNDHNVDVLILPSSMRDAEELPFKGERPNLGETQNRT

SEQ ID NO: 298153 - protein, 82 aa, Zea mays
  unsure (1)..(82): unsure at all Xaa locations
  Clone ID: MRT4577_34985C.1.pep
GRGSNEFFLQGRYIFGPDVRSVFLTMFLIIAPVVVFCVFVARHLINDFPDSWXISEMVVAVVFTVYDLTLLLCTLGRAKDGS

SEQ ID NO: 298154 - protein, 143 aa, Zea mays
  unsure (1)..(143): unsure at all Xaa locations
  Clone ID: MRT4577_34986C.1.pep
MDHDDTDFQSQNFQLAGEGSNKFPXSVQGHGNSWIEVLSTGSSVVDFSSSAAESCSISKTNNVWSEATSTESVEMLLKSVGENETTGDMDNNAHLKLSGMDSQIDQSSVHPKSSNSLPDSTVVPTEEDQSLSTHSRMTDDLDR

SEQ ID NO: 298155 - protein, 435 aa, Zea mays
  Clone ID: MRT4577_34987C.1.pep
MYVPPPPTGGAGEQPRVYQVWRGSNEFFLQGRFIFGPDVRSVFLTMFLIIAPVVVFCVFVARHLINDFPDSWGISVMVVVVVFTVYDLTLLLCTSGRDPGIIPRNTHPPEPESIDGINDTGVQTPQQFRLPRTKEVVVNGISVRVKYCDTCMLYRPPRCSHCSICNNCVERFDHHCPWVGQCIGLRNYRFFYMFVSSTTLLCLYVFAFCWVYVIKIRAAEHLSIWKALLKTPASIVLIIYCFLCVWFVGGLSVFHLYLMGTNQTTYENFRYRYDRRDNPYNRGTLNNFLEIFCTAIPPSKNNFRARVTVEQGLQQTRSQSRGFMSPSMGKPTIGELEMGRKPVVPWDEPRTAADIRDLEAGFGGMFDEKEGRVAHASPDLSRDLPAEFVEGRTGMHSRQSSWVQRGGDASEASAVQMATVHTAEDSNHVPWSGTR

SEQ ID NO: 298156 - protein, 434 aa, Zea mays
  Clone ID: MRT4577_34988C.1.pep
MYMPPPPPTGGAGEQPRLYQVWRGSNEFFLQGRFIFGPDVRSVFLTMILIIAPVVVFCLFVARHLINDFPDSWGISVMVVVVVFTIYDLTLLLCTSGRDPGIIPRNSHPPEPESIDGINDTGVQTPQQFRLPRTKEVIVNGISVRVKYCDTCMLYRPPRCSHCSICNNCVERFDHHCPWVGQCIGLRNYRFFYMFVFSTTLLCLYVFAFCWVYVIKIRAAEQSSVWKALLKTPASVALIIYCFLCVWFVGGLSVFHLYLMSTNQTTYENFRYRYDRRDNPYNKGVLNNFLEIFCTAIPPSKNNFRARVTAGQGLQQTRSQSRGFMSPSMGKPIGDLEMDRKPVAPWDEPRTAADIRDLEAGLGVMFDEKEGRVAHASPDLSRDLPAEFVEGRSGMHSRQSSWVQRGDAIEASAVQMANARTTEASNNVAWSGTH

SEQ ID NO: 298157 - protein, 335 aa, Zea mays
  Clone ID: MRT4577_34989C.1.pep
MASRRFFYDDPYDYYYTSPYHYAYPYYRYQHPDPSRGVGGFFPAAAEAAPEAVKVDPRPRVESSRSVSVPVRFVGSDPEPVRGAARMPPAAVPRKRAPSAEAAAMLLQAAARGFMARKSVRAVREVEREAAEVGEKVAREAEALRGDARARIAVGETLMKMLLRLDAVRGAREYRKRVTKRVLALQDAVDALEPKPAPDSEVVAEENESEVTSEMVDDSAEATEMPVAAEHSGGVGVNAAAETVADMEVDGGKADSEAVPEAVKESENKQDDGHINGDQTEVSNEGEWEMVADEAEPTTAATGSTGAPLQTPMTSEVTRPTGEAGAADSALDTRK

SEQ ID NO: 298158 - protein, 120 aa, Zea mays
  Clone ID: MRT4577_3498C.1.pep
AMHKQNEAYVGYDRELLTTNCTVQGYISAAMRDTCTARFRRESKSSDTPRCYAGGSGLTVLMQIPLHRTGAAAHTPLPCRHRSSRPERWFFSLRAACSACTQQQHLPGGSHGPRGVSHAW

SEQ ID NO: 298159 - protein, 96 aa, Zea mays
  unsure (1)..(96): unsure at all Xaa locations
  Clone ID: MRT4577_34990C.1.pep
MAGGDRXRDADEXETRNHMMQNLFGDQSEDEDDADDDDVAEMVDEDNGHQPQSPLVVXWERHQELDDDAYDDEEEDARSHCARRASGYHSEEVDGE

SEQ ID NO: 298160 - protein, 95 aa, Zea mays
  Clone ID: MRT4577_34991C.1.pep
NRAGGDIRAFGTSGNPSGGWGLWAAPRGETSVFWGGPNLSPGRLALGLGLVFQKKSPPPLKGGVLWAPLGDPALFWGAFHFRGGHGPLGGGPNGG

SEQ ID NO: 298161 - protein, 64 aa, Zea mays
  Clone ID: MRT4577_34992C.1.pep
WARTTRFLQSRLGAEAKLTRQLQLLAVGTPAASMTRQLFEAILVLAMGVNSLKREGADLVGLAV

SEQ ID NO: 298162 - protein, 81 aa, Zea mays
  Clone ID: MRT4577_34993C.1.pep
LWKRDQTTLLGSAMKHATLVEKGEPLVGATKFVDVFLLVLLGSLGGRTTGCRRNNGGTFGHHYGTTTGRTHNHLENGGTGG

SEQ ID NO: 298163 - protein, 76 aa, Zea mays
  Clone ID: MRT4577_34994C.1.pep
DTWSGSGPPSASMSTTSATGPLSNVPKLMSFWDDELIMCHSYKIDEPWISVLNTQYSLWNNANHHHRANLRTSLAR

SEQ ID NO: 298164 - protein, 39 aa, Zea mays
  Clone ID: MRT4577_34995C.1.pep
RWHPCKQSTICAIHPTVFVKPTSILARTRHWWCPPLNFL

SEQ ID NO: 298165 - protein, 79 aa, Zea mays
  Clone ID: MRT4577_34996C.1.pep
YVNKRLKRAKPTWRAMYRKQHKQDIHAEAVNKRRRATKKPYSRSIVGASFEVIQKKRADKPEVSDAAREAALREIKERI

SEQ ID NO: 298166 - protein, 82 aa, Zea mays
  Clone ID: MRT4577_34997C.1.pep
KGCLRKLFGSTPPKVQAVYYVLCTPATAEYKHFNLNTRFQSRHEHLFIYIRHRKHFGPRWFFRALEKVFDQWFGPSLNNIVS

SEQ ID NO: 298167 - protein, 47 aa, Zea mays
  Clone ID: MRT4577_34998C.1.pep
VRLPRYSGGWNWNQYVIRYMYTAAGCHLFNTTVHVYIIKIKEYIDVS

SEQ ID NO: 298168 - protein, 82 aa, Zea mays
  unsure (1)..(82): unsure at all Xaa locations
  Clone ID: MRT4577_34999C.1.pep
RVRRSRVCPRSLTRGDDWAAVVAALRGYTHVFFGRLAATSATXSRRRXLLXXTMYFEAXASSQYFEQHIAVSASSSTAQLRR

SEQ ID NO: 298169 - protein, 843 aa, Zea mays
  unsure (1)..(843): unsure at all Xaa locations
  Clone ID: MRT4577_3499C.1.pep
MDRGWMYNVPRPNPSYIRNLRSFIEAANKHANLRKSKEILCPCIDCDNKIAWRDTRVIQSHLLKRGFKNNYTIWSEHGELDPCEVPGNDERVVGILELKVDGKVDNVDANQDFDEEFDCEEMLRHMEPEMLSSVGSQKGLSKMEGLESASKEPLYDESKGCDKEFTTLRTVLELLKLKASAGYXDTRRATIXDCVKKFPKKNKNKKSTIGPESDDDTFYDMDGKKKSKIPALVMWYLPVIDRLKRLFSNPREAELMCWHAENRKQNNKQIRHPADASQWKNFDLMYPEFAKETRNVRFALGTDGMNPFGEKRSVHSTWPVTLTMYNLPSWMCHKRKYIMLTILIQGPKSAGVDIDVFLEPLMEDMTKLWNEGVRIWDEYCHEYFNLRAIIFVTIHDSPGGATLSGQKTKGKNGCVVCVDGTASMYLKSSKKLVFMGHRRFLMKQHKYRKMKEEFNNELESKGKNKGEKRKRTDPSTYTTFKKQSIFFKYLPYWKDMEICHSIDLMHVTKNVFDSIIGTLLGMPSFSSNISKLVRMKDLSLFGYNSHDCHVMMTVFLPIAVRALETEHVKVVITRLCYFFNAVSQKVIALEDLDYLKAYIIETMCKLEMCFPPSFFDMQVHLIIHLVDQIKILGPLYLHHMFQLERYLGVLKGYVRNRAHPEGSIMEGYTTEEVIESCIYYISDGTMIGVPVPKHEGKLCGRGRMGKKTFRVEDYKLVHCAHGSVLQHLTIAEPYIEEHLDELRKENQNRTEDWIMREHKHRFSEWLMDKNIPFGDSLEEKTMKNLASRPSCFVTSWQAYDINGYTFYTKSKDMKSVAQNSGVRIDAFDLHGHKTTYFGFIEEI

SEQ ID NO: 298170 - protein, 119 aa, Zea mays
  Clone ID: MRT4577_349C.1.pep
DSSHAYDDYRSTTLRFDEAQSKDGSRRSAAAGSARCTTTRHAICGYLTLLLLVIYFRNTIIELLCHRRCFYSRHSNLRKLLHETLAGNNPVKVLHEAMVKSWTPAYDQPRGSNKYSDRM

SEQ ID NO: 298171 - protein, 103 aa, Zea mays
  Clone ID: MRT4577_34C.1.pep
PTVEQWITSPMARCGSTGRPTRRRARAPPHDHPRAWQGPEYAWTYPEGQMLVSRSLDDGSNSLYLFSCQRLILSSRLYSHGYGPDNDGVGGRSRHTRRGIRFG

SEQ ID NO: 298172 - protein, 196 aa, Zea mays
  Clone ID: MRT4577_35000C.1.pep
NSLCRARSLLQSLLGVLRAHLPRLLSARIPARGVFPLAKIVLARCRRLVRVPLLLQLWRFIAAVPYPMRAPLFVRVCSSSLFQSSAQFSLLPCRGRRVPARSSRPASPCCELSSSLRTLSSFFPCLPSARILSARHSVSSSRTIIASIASSLATVILTASARQTCNSIYSTLPYRRQARRTSFFSARFRRTPNPGY

SEQ ID NO: 298173 - protein, 101 aa, Zea mays
  Clone ID: MRT4577_35001C.1.pep
AVPLEELHSAGTFIMEQARLQAIMGDFSLDNLTTASTTHVCTRVMGTFGYLTPEYASSGKLTDKSDVFSFGVMLLELLTGRRPIDTINFIEDSLLDWARPL

SEQ ID NO: 298174 - protein, 136 aa, Zea mays
  unsure (1)..(136): unsure at all Xaa locations
  Clone ID: MRT4577_35002C.1.pep
RRFPPQPQGGNPGPGAQYPPGGPRPGSPFPFPLPPGPQKPPLPPGPNKTLAVPRFGVWDKQNPPMGGQGFPXVLKGEAPPGXRPGPXPPPPVQPPKXCFCPTPQGPPAGGDPGRGRPKGPSCPGFTGACFPGSKNE

SEQ ID NO: 298175 - protein, 90 aa, Zea mays
  Clone ID: MRT4577_35003C.1.pep
LPLARVVRVAEHEVQRLLGGAAAAEAERAAQPERLRPLNPGRRWVVASLGFNSMSALPKARSFSSAGLCVRPDVSCSLGVVCRLDVGVAR

SEQ ID NO: 298176 - protein, 56 aa, Zea mays
  Clone ID: MRT4577_35004C.1.pep
VISLSLFSLGVFLFFFGEHTQHISYNFLNTQNLGLKGIITTAYQKQKNKTGCTSLT

SEQ ID NO: 298177 - protein, 179 aa, Zea mays
  unsure (1)..(179): unsure at all Xaa locations
  Clone ID: MRT4577_35005C.1.pep
YIHPLDCHDETGMLYAGFAXDDVXWCVFPRPCDGRPRHTXVMVVMLHKDAYVAYQAQSKSGILTXLKNPIEHVFVNNXDDMXKICHHTFYNELRVAPEEHPGLLTEAPLNPXAINHKMTHFMFETFNVPAMYVPIHSELSLYSSVRTTGIVLDSADADIHTVPIYDGYALPHDILRLDL

SEQ ID NO: 298178 - protein, 169 aa, Zea mays
  unsure (1)..(169): unsure at all Xaa locations
  Clone ID: MRT4577_35006C.1.pep
MEREDADGALDSWAQFCTLSNELLAGDGDLAVGPRLAPVVGDLCTRGLATLVRDYFLHSLEETFRNHAVKKFWQHFHPYCSASTVDRIKFCVKEHWPEEILSKALEDICLERGYQEKCVLVLVQVLQSYEDRMPRKKIKEEVCSSSLMPRYQLMVSSVLLTXLPLSFPG

SEQ ID NO: 298179 - protein, 961 aa, Zea mays
  Clone ID: MRT4577_35007C.1.pep
MSEDKIVAGALKLSLSEEMHLGFLELMSKTNTEKIVKETLEGLSEDTSDSDSYDVDSGGEDSEDRPWRPNDGEKTTPTPEDNEVVIFRSFLKAGLRFPLSRFVVVLKIYQIYLHQLTPEAVIRLGIFVWAVRSQGLEPSAKSFCNIHELVYETKPWGKEQYHNNFGCYSFGARSGSSCPVPTFRKRWPGEWMKEWFYVKNDLKVREDIKDIIMRPIWQRFGLRKPKVEMDEADEECQRAFGVVCSFIGTRDLMQEHIAFRVWPLADNWEMPKETVKETDEGGLIRLKYTFKYGDKFVEPDDDWLKSIENVSDELLGAYSKAENTALSAAFGGRKKKRLNRVFDAIRFIYPDYYYPMRGQKRKNTSPAKDTASAAPGEPAPKRKKVKVFTHPPRCIEPATVPEFIGEASSATEAREPTPALKSEEMAEAPAIEKTGEERTKERKTLDALSPSSKVEAAKSQKGPAATPKRKRMVNVLDVLETIKSSSTTPKKTVEVSTEAFVAETSKQQFETEAGPSESTKIQPLEVEKMSKASLETEKAKITEPILTEEIGTATPKASSKIHDYIVRHASGKKLSEEEIFEANHYARELKYPRGPVVFNGTNEDDFLYCLPDNKELSVCWEMARSMGFPKLEAGLCAMTKDDLADSLAYNSLKVLILSNALRAQKNAEDESCTIALNNLRTEVIRLRNEALEKDKILLTLVEKMKEDEANSKTQAEAQKREIEDLRKQLARAKEERILEETKRELSDQWADHLEVNVKELRASKKRCYDKSIECVKKIKSSFASVGAFSSEENFTRGNPEGPIEWISREADVFDEILNSRGDICAFSGARGIVTILEKKGCEHVKSLAQSEATLSSEDIKDPSAEVSQVGGKFFTDIWDNGGRKMAQEIIQRSEKGIHDAREVARAAEKNTGPEGQLEPAEASADPPPKGDDEIRQMAEAIMDEVVNQLLNEAAEVVLRED

SEQ ID NO: 298180 - protein, 52 aa, Zea mays
  Clone ID: MRT4577_35008C.1.pep
ALERVTAREREIGLIMILFDLFPGAMRLINSHMADRLLLQTVQLTRYFIGLM

SEQ ID NO: 298181 - protein, 111 aa, Zea mays
  Clone ID: MRT4577_35009C.1.pep
RANCKAPHHRAQRGQRGHARTAVSVRDIRVFPPLERGTGRAKNCNHTPYRAPWAPQNNPPPPPPWQKTRPNRPRGGRARKQKLFFFFFFFFFFFFFFLFFFSFVSSSFFSR

SEQ ID NO: 298182 - protein, 42 aa, Zea mays
  unsure (1)..(42): unsure at all Xaa locations
  Clone ID: MRT4577_3500C.1.pep
RMFWQAHCPVSTAQHVLACSRMERTRGSNDTWYSMSFAACSX

SEQ ID NO: 298183 - protein, 180 aa, Zea mays
  unsure (1)..(180): unsure at all Xaa locations
  Clone ID: MRT4577_35010C.1.pep
MASSMLSNAAVATTVVNRNAGAQASMVGLKSVAAFPLTKEXTNDLSSLPTNGGRVQCMKVWPTQNMKRYETLSYLPPLTTDQLARQVDYLLNNKWVPCLEFETEHGFVYREHHNSPGYYDGRYWTMWKLPMFGCTDPAQVLNELEECKKEYPNAFIRIIGFDSNRQVQCVSFIAYKPEGY

SEQ ID NO: 298184 - protein, 204 aa, Zea mays
  Clone ID: MRT4577_35011C.1.pep
MAALGSSVTSRGLALHTSVCVVFLHRRHGNPVIPAAPSRHQRSLATGLTTSSSGMNNAFPIIKGTTRIPAVGPGPANPAGGNLPIPSSMPPWAKWVAGAVILAIPIYRRFRTLEDKIEKTTEVAIEVVDTVAEAAEKVAGEVAGAFPGNDGLREAASKIKTVADEIEEDAEKAEALIEKVDEIKKEVDSIVDPIIDKVVKDKEI

SEQ ID NO: 298185 - protein, 81 aa, Zea mays
  Clone ID: MRT4577_35012C.1.pep
RRQKHPKKMWRSNPLVDTQVLGERPEQELSPCGVLVNMERFQELWMEERVKLSSMLARCSIEDFIQRLSTLSQALSRTYFR

SEQ ID NO: 298186 - protein, 67 aa, Zea mays
  Clone ID: MRT4577_35013C.1.pep
GHCVRPGIRSHSAVSHTEATSQHLPTKQFAPRVQTAKQAMDMVFYKHASRGGGIKHKGVAKPLYPMK

SEQ ID NO: 298187 - protein, 62 aa, Zea mays
  Clone ID: MRT4577_35014C.1.pep
NKMVTYSYNDLLLLLPSYSTRVFFPLVPLVPPKQCFIQYLLTQSIRSSTVCYLCLSNICLDP

SEQ ID NO: 298188 - protein, 108 aa, Zea mays
  unsure (1)..(108): unsure at all Xaa locations
  Clone ID: MRT4577_35015C.1.pep
NKSIGPSFKNXRDMGKTLPVSPNKCPWLEYAPVYPACVKYAKRPRTLWPFTNSWDTFNGQGATPCSCPLIPWVVGVSPRVPVTFAQRLSPLSFPFLPFFCTHFPRFSS

SEQ ID NO: 298189 - protein, 42 aa, Zea mays
  Clone ID: MRT4577_35016C.1.pep
HYVDALLDETRPPNTECLRPIHSFLRIESCSALSPQIVLNKL

SEQ ID NO: 298190 - protein, 106 aa, Zea mays
  Clone ID: MRT4577_35017C.1.pep
RWSVVRGEGVATDRWGRSASEGKRASERGWRVGLACQRERVRGVRGRLRARAGRLMGRGRGMRRRAGGEAVATWARIGPAGGELLSFFLFIFYNSFHFCFFLHKII

SEQ ID NO: 298191 - protein, 96 aa, Zea mays
  Clone ID: MRT4577_35018C.1.pep
IGANRVQRRRDMDAWRVTSMSGSLCSRPHLRRQAVRRQEAGGSFDRCLAAPDASQLVARMRFLPPFLLSSRRSPVHHTTAQKHHFEPQSQLAWRIQ

SEQ ID NO: 298192 - protein, 66 aa, Zea mays
  Clone ID: MRT4577_35019C.1.pep
KTSITTRPSSYSDPFYLPHPSNYLAFPCHNFLHFHCPPFYNSGPRKPYGPQTLFPFQTIPFSPTHL

SEQ ID NO: 298193 - protein, 69 aa, Zea mays
  Clone ID: MRT4577_3501C.1.pep
IIWGVTKKGKNPADLESGGLQGAKTKNPRFPQGLPFSPKQPFGGYIKGPSLLPVFFKNLPSPMACGGLN

SEQ ID NO: 298194 - protein, 68 aa, Zea mays
  Clone ID: MRT4577_35020C.1.pep
TYILQRREFSCYRGNKKWTSRSALAVKKNSFSFTLVKTEPTLCQYFLIVSRMVCRFYTPCWGFSHKFY

SEQ ID NO: 298195 - protein, 50 aa, Zea mays
  Clone ID: MRT4577_35021C.1.pep
LTHWCSLLTLYRMVRPTQMYSAYYSLPTTSVPYLCLATIIIPLIDNLYLL

SEQ ID NO: 298196 - protein, 83 aa, Zea mays
  unsure (1)..(83): unsure at all Xaa locations
  Clone ID: MRT4577_35022C.1.pep
SCWFRRLNGCPSPGQMPMGTRSTINIGEFLYNGPALRNLLPXWGKKKAPPPPRRVXGKKKKKXFPIPVPRVDPLNLHVTMFLI

SEQ ID NO: 298197 - protein, 264 aa, Zea mays
  unsure (1)..(264): unsure at all Xaa locations
  Clone ID: MRT4577_35023C.1.pep
NNCVERFDHHCPWVGPRVRGXRWFLFIASTTFLCLYVFGFCWVNLLLISRRYGVSFGSAVAESPVSGCLIVYTFVTAWFVGGLTAFHSYLVCTNQTTYENFRYRYERKANPFNRGAGHNIAEIFFSPIPPSRNDFRAKVSPADPDAAALYYLGPLSSESRISFYTRASLSFDMAKASFDLNYSAKRTSVASSDFSDIYGGGDGALDRVSTAHQQPRHSIFGGPGRESKKAEDEADAVTAELGATMHMRYGAAAGRTRGREFEAV

SEQ ID NO: 298198 - protein, 112 aa, Zea mays
  Clone ID: MRT4577_35024C.1.pep
GTDSAAYPQQCFPITPGSSSRLSCVWSQQTILTIHTTIYCESLGLCNTATRVVVILCALSLALAPSYNNHHSCHSASLFWPTQQRSNSSPSVVVPSVRVLMSHRSIDTAFFI

SEQ ID NO: 298199 - protein, 103 aa, Zea mays
  unsure (1)..(103): unsure at all Xaa locations
  Clone ID: MRT4577_35025C.1.pep
MMNREPGDWHCRARQHLNFXRRDACQRCSEPRGVGDRSGGGGHLRGRGGTSFVRVYSAGSDVPPGDWYXFCGAHILDSRSNCLMCSAYIDEADGTCDSDMSRS

SEQ ID NO: 298200 - protein, 143 aa, Zea mays
  Clone ID: MRT4577_35026C.1.pep
MGCTGTQTQQQRLRLRPPRGRGSSYSFVFVLRALTLTLLILLAVFAQPASSRRPLPLVDDHHNNGVVKAAAAAAATDVILLLPPLHADAEKAMVVAAPSSVLPPVEEDEDRRRHWLAGGRHQWLLNKKPRGKAPPSAPSKRTN

SEQ ID NO: 298201 - protein, 149 aa, Zea mays
  unsure (1)..(149): unsure at all Xaa locations
  Clone ID: MRT4577_35027C.1.pep
LRQAIIWLVIQKVVVRAGNVLKFIGQIGLLFEQAPDGDRXLCXGSVMKSLELGSXVRSALVAVVARPTARASPDRCIPRHISGGGRRSFFRWQMRYLCSPRLRVCRLMAXWFRHKNKCLVVNGMYVGGPALCDLPHMCVDCQSISRHFT

SEQ ID NO: 298202 - protein, 79 aa, Zea mays
  unsure (1)..(79): unsure at all Xaa locations
  Clone ID: MRT4577_35028C.1.pep
MGRVRTKTVKKSSRHVIERHYSRMXTLDFHTNKKRLEDVAIITSQRLRNKIAGFSTHLMKRXIQKGPXVRGISLKLQEG

SEQ ID NO: 298203 - protein, 149 aa, Zea mays
  unsure (1)..(149): unsure at all Xaa locations
  Clone ID: MRT4577_35029C.1.pep
YRYLSIRSLMVIDIVYALDAPYDPADEPPXHVTSPNENYSARGHCPLRHVSGXCMYQHTDDSCLVDILLHPLANGPXVSMPSVETXYTGSLAAIYASSYSYVSLCXALLPILNTCRCVASHLTYIESESRFLGXGCXMSSAQADVDSDT

SEQ ID NO: 298204 - protein, 760 aa, Zea mays
  Clone ID: MRT4577_3502C.1.pep
MPESSVSHKRKRGRRGPNQMKEGAVMYVTKLNTEGFPEEPLDVVTKFRNSCGSTVRDIVPITLQKWKDLDEDTRNKLWAKLSESFKFPKGIEDAVRKSMLSTMAKMFRGWKAEMNREFVKKNKVPPPKKMGKITQAQWEEFVRQKTELKAKELGETNSQRAKMNKHSHRLGIIEEAIANGTLDPILKDIDERAIRWILGRAALGNPEHNGRARGISSKISWREAFPEYASSYRKHEKSKRTLEETIDERVQKAINDVMNKMKKTECISFELKPGHMSPSIVPSCVGSVQDFTKYPVDDIVEDKPCFLHIPINRSGTKTKQAATGLVKPGLVNYKDNPISSHYAVVQVLEITDSGCQDWEIDFPVEGIITLQEAMNELVLWHRRDIKLGDEPILSQSTPMQQKDSSIIPYPMVQENMTPTSTKIVETFISPLAKELDEGDVDKIVPQNVDANIKKEGKVDTNVEGPTISKKIHQRIATGDVKKPSESVARYLHKLRRVMTNQSKAESASHGVRTRSQIDNFEVWEEDGMIYTRESLRLKTNISIYKKEDVPPKFVNGRPFLTTVQLSKLSTPKIRMHEWYMVASNKYKLEDFTFVVPEDAFWSNDNIDPVRHLFFDDLWSLYHRQRMETNYLTLFASRYKEVAWRHGEEYKDLDDAEFEKAVKQNQRKKMKKGLGGEHPEDKPNLSISLFPYGDKQPPGTVLCDYYVCEWCRVTFHYMVNREDVPKSKINDEWLERDMVSVGVAKVVKDLLYFMRREVLHQ

SEQ ID NO: 298205 - protein, 107 aa, Zea mays
  Clone ID: MRT4577_35030C.1.pep
FSQTCRWRSRKRSKFPRGTARGAVRKTHPIRGAVDSRGNVTSVRTRRRARKRSGEGGCRVRSQHLRTRRCSYRRRSMPRGRGRRRWRRRRGGAAPARQGEREATGGS

SEQ ID NO: 298206 - protein, 67 aa, Zea mays
  unsure (1)..(67): unsure at all Xaa locations
  Clone ID: MRT4577_35031C.1.pep
ISLHLTTLPMIGSTIESTSFLITSTFSIRASTFSESSSISTATVLIXQTATMRPSLPGNEPETSPAT

SEQ ID NO: 298207 - protein, 547 aa, Zea mays
  Clone ID: MRT4577_35032C.1.pep
MPPPAGLPPWPTPSTTRLATPTPTRPPPRTTHVQPPPPPYTRVRLPPPPPATTPLPPRLEPAAPKPAAVATLLPPSTASAASSSSTCLDCVHFGKCSGCTHEVDLDKPPVLQEVANFFKGHGVGDFTFSRGRLSQWRCRAKLAVRGTPENPLIGLYQEGTHSVIDIPECRAHHPSINAAVKLLRQGITELSIQPFDEDAGAGELRYVQMAVTTYNTSIPVDKRYEQGKVQVSLVWNSRDERSQNAEKRNSIIEYLWTNGGPKSSVHLIHSIWANFQTSTSNIIFGHKWRHLKGERDMWERYGGVDISLDPCSFGQANTLSFNSLLHKLNKYVPRSSTVVDLYSGAGVIGLSVAASRKCRSVKCIEINKQSKMSFETSASRLPANLGCTITWHNTDASVEPSHWLEGSSVVIVDPPRKGLHPSVISGLQKVALSERKAYKAKSSLAKVKDEKRPWILRAREAAVHVDNTTTEEGNETWPETLIYISCGWESFKRDCKSLISSKAWQLENAHAFNFFPGTDSIEILAIFKRESEAGQKKKKKAKKKKAK

SEQ ID NO: 298208 - protein, 105 aa, Zea mays
  Clone ID: MRT4577_35033C.1.pep
WGGEEKDDPQLIDGVAIVLDEMSMPRSTYAFTKRIHGDCGAVDITVSRLDFAGEATIQLHVFEVEGSFSLRAGCFTSGLWEEIQIFKGTISEPRALRRCVVAAEH

SEQ ID NO: 298209 - protein, 97 aa, Zea mays
  Clone ID: MRT4577_35034C.1.pep
ERDGKIWMWHRCLKCPWSNGFPPATQRIVMSDAAWGLSLGKFLELSFSNHAAASRVASCGHSLHRDCLRFYGFGKMVACFRYAPISVHSVHLPPHKL

SEQ ID NO: 298210 - protein, 67 aa, Zea mays
  unsure (1)..(67): unsure at all Xaa locations
  Clone ID: MRT4577_35035C.1.pep
ALARIAWLXKADVPTMAQLEEFHSMQRMMIPPYSDDNIDLLLSIDLLRLQGACIAFPGNIVFDAKLV

SEQ ID NO: 298211 - protein, 754 aa, Zea mays
  Clone ID: MRT4577_35036C.1.pep
IRLEISQSGKQRHHVPYRDSKLTFLLQESLGGNAKLAMICAVSPSQSCKSETLSTLRFAQRAKAIKNNAVVNEEKIEDVNALREQIRQLKDELHRMKSNGGIEGNSGSFATGWNPRRSLHLLKMSLGHPTTFQCIKEDSDEEMEIDENDVEKPYNHENMAMSSINVKESKRFQASMNVSAGTSQVEDLDRDKILISIKRSCCSANKFNTGTDVGDGKCKLNIAASIQRGLQVIESHQNNSAWKRASVGLNARIMDIQPCKVDVAIQTDPEEYETRDNPLALVPSCLLEASANESRDPSTCRDLQLVPVDVTVPSDDQKQRHFLKAVEKVLAGAIRREMARDEQCAKQAAEIQQLNRLVQQYKHERECNAVIAQTLEGKIARLESLMDGTLPAEEFMNEEFLSLMNEHKILQKKYENHPDVLHAEIEVKRLQEELDMFRNSVDEKEVLQEEIQDLKNQLHYMLSSSSSIRRLWPPVPLSQGSNSERGTKDIDGDTNFVDTPNWTEAESKWITLTEELRVELEATKSLVGKLQSELDSEKKCSEELKEALQTAIQGAARHLEQYADLQENHFRLLALHRRMREGVEDVKMRAEKAGIKGAELRLINSLAAEISVIKAQNEGLQGQLRDTAEAVQAAGELLNRLKDAEEAETLAKKQALVAEQETEKAYQEIDNLKKNYDQEILALKQRLAEPSPCKDDMVQPQEPNNLEPPMYDTAGSHSRQNWKEFNTLQQGGSFEVSKSTDLNSWFYGYDKCNI

SEQ ID NO: 298212 - protein, 25 aa, Zea mays
  Clone ID: MRT4577_35037C.1.pep
LFLRGTGDACRCGYTEPMLTHRAEG

SEQ ID NO: 298213 - protein, 132 aa, Zea mays
  Clone ID: MRT4577_35038C.1.pep
GRPVVIDLARGCWVVWSFAAPRSFGFVLFRVFAVLSCRLRAGAALPPPHRTDSFVFDRKGNTVSAPVVPPRCVGWCLMPGPRRPSRLFPAPSLSLRRRKCCPRSPPSLLWKRRWRQWSTRGGSARARARASS

SEQ ID NO: 298214 - protein, 133 aa, Zea mays
  unsure (1)..(133): unsure at all Xaa locations
  Clone ID: MRT4577_35039C.1.pep
VIEAPTLARSVAKERRQCRAGVYGTLNLPCEHIAFPIHXAHNLYRRYQPEVDRXAVYACAILKPVPLVPXNTIAVLPTSTQLSARYNTTARDGAKRWNAVATYVPVVPTDCFSRVFRHPVGDLAAAPYMPTIP

SEQ ID NO: 298215 - protein, 445 aa, Zea mays
  Clone ID: MRT4577_3503C.1.pep
MDRGWMYNVPRPHPSYIQNLRSFIEATNKHANLRKSKEILCPCIDCDNKIAWRDIGVIQSHLLKRGFKNNYTIWSEHGELDPCEVPGNDERVVGILDLKVDGKVDNVDANQDFEEFDCEEMLRHMEPEMLSSVGSQKGLSKMEGLESASKEPLYDESKGCDKEFTTLRTVLELLKLKASAGWSDTSFTDLLNFLSQLLPKPNKLPTSTYKAKKLISPIALGVQKIHACPNHCILYRGDFENASRCPVCNVSRYKKSYNQDCVKKFPKKNKNKKSTIGPESDDDTFDDMDGKKKSKNPALVMWYLPVIDRLKRPKSAGVDIDVFLEPLMEDMTKLWNEGVRIWDEYCWKNKGEKRKRTDPSTYTTFKKQSIFFKYLPYWKDMEICHSIDLMHVTKNVFDSIIGTLLGMPSKTKDGLKSRNDLVDLQIRPELHPVDSGKGKPYLPPS

SEQ ID NO: 298216 - protein, 739 aa, Zea mays
  Clone ID: MRT4577_35040C.1.pep
GFGVCVKKSSFTKAGLCRRLVLVCNKWGNGKEDACYQARPTAKTNCQATVVARLLGDDLLHLTDVNLEHNHALNPSAARFLRCYKTLPSGLSKDLVVRAARGECSVAGDIDVPIFDEWGRLKTGQADVLAINAFFTQMQAKLPNSFYVMDFYVEGHLRSVLWADSRSRAAYQYFSDAVWIDTACLRNKYHVPLVSFLGVNHHGQLVLLGCGLLSDESTESFLWLFKSWLTCMKGQPPNAIVTDECVAIKAAVREVFPKTRHRISDWHVVRSISEKIGDLPEYEAMRTNLVTVIYDSLNDNEFEARWKNWIDRFSLQDNEWITFLYENRHLWAPAFLRDTFSAGLCTVSQRESPSTFFEDAVSSETTLVTFLASYMTLLDNKYKMEQQDDFDSLNSSRLLISKYQMEEQLSRLYTLNMFMKFQDELKATMHCQVQLDGSASSFIVIDLTEAGSEMLNKKYEVVHCMATNRMECNCGLFQFHGIVCRHALSVLKWQQVYDIPPCYVLNRWRADFKQLHYLDNPSKDLATSNHVERYDYISLQFLRLVEIGMVSDEKYRHAVRLLKDMKETLLDDNLCRDLEQKLTPAERAIVNGDNHTQPGSSEGGAAKKRRGRPPKKNKEINMDSMVNPYGNKDPLLVSSDVTQKDTFHSASTTSNLGTHVRTHGIVDLMEEVNPSELSFDSRYGVQSGHSHHFGNNQLNTGNTLRFGQSTSAAEQSRVQWVFHNGMYQDDQVTYGRRTS

SEQ ID NO: 298217 - protein, 56 aa, Zea mays
  Clone ID: MRT4577_35041C.1.pep
WLACWYSISSLPVYPSSSPLYIILSSTTITLQTPGTHYFICNVPGHCASGIKLALF

SEQ ID NO: 298218 - protein, 158 aa, Zea mays
  Clone ID: MRT4577_35042C.1.pep
MANALPLIVALVAAAGCAALASATSYTVGDSQGWTTTGVDYSSWASRNTFVVGDTLVFNYVSKAHTVTEVSKAGYDACSGANALSDDDTGSTTITLQTPGTHYFICNVPGHCASGMKLAVAVSASPSGTAPSTGALQVPAMASVVAAAAGAAIKLALF

SEQ ID NO: 298219 - protein, 108 aa, Zea mays
  Clone ID: MRT4577_35043C.1.pep
SPAHSWRSTLNHSAVGSDLYALPNHDTPLGCHQHFHPHECPLLRAIPQASCPARKPPRGTITTTVGTPDDSVVHYVKGYTDAQADVPGDSIRMYADFKVLHRTCLCHW

SEQ ID NO: 298220 - protein, 111 aa, Zea mays
  Clone ID: MRT4577_35044C.1.pep
TNQKQRGGHQRNTPKPAKGVGAIPPKGGITRGEKKKFPNFLWDAFTLARREKPPGGGLGEKGGVGQMGLGGTGPKKGTSGWDFGGQGFLKVGTTNQGGPKPPNLKKYLKNG

SEQ ID NO: 298221 - protein, 155 aa, Zea mays
  Clone ID: MRT4577_35045C.1.pep
MGEEAVHFSVVDAKDCKQSAFEVGDKTYVICRSDDDLKTSAVKIHDKLTQTWLSPTILGEQPLLTKSQSVIPVSDEKILVIEKGVPLNESIWFLEIDTPFVKQQRKIKETEVVSWSKGVIGVGQKPVVISGPSGVGKGTLIAKLMKDYPSKFGFS

SEQ ID NO: 298222 - protein, 260 aa, Zea mays
  Clone ID: MRT4577_35046C.1.pep
MPLSSFSFLRHHLPLPLQLPPTSNRQPPHPRLFHLLLPPFTPRRTFVCQPLTAATDDMAAAAAAASPPTLLEHMGQAGTAADLTVLVAHIQSACKRIAALVASPGNAELSRAKARGGAMAAGRDAPKPLDELSNDIILSALQSSGKVAALASEENDLPIWISDGGPYVVVTDPLDGSRNIEVSIPTGTIFGIYNRLVEVDHLPLEERAQLNSLQSGTRLVAAGYVLYSSATILCINFGAGTHAFTLDWSTGEFILTHPSH

SEQ ID NO: 298223 - protein, 381 aa, Zea mays
  Clone ID: MRT4577_35047C.1.pep
MGEEAVHFSVVDAKDCKQSAFEVGDKTYVICRSDDDLKTSAVKIHDKLTQTWLSPTILGEQPLLTKSQSVIPVSDEKILVIEKGVPLNESIWFLEIDTPFVKQQRKIKETEVVSWSKGVIGVGQKPVVISGPSGVGKGTLIAKLMKDYPSKFGFSVSHTTRSPREKEIDGVHYHFTERIKIEKDISEGKFLEFAHVHGNVYGTSIEAVESVTDEGKRCILDIDVQGARSVRASSLEAIFIFVCPPSFEELEKRLRARGTETEEQIQKRLRNAQAELDQSNEPGLFDHLLVNDDLETCYENLKKLLSLDDDQEDSDDFFNKEDKETASYSIVSKTDSEILLQSETNEGKNGAIHLLALDLSSLSGGAPGRTRGLKIGSVNSF

SEQ ID NO: 298224 - protein, 166 aa, Zea mays
  Clone ID: MRT4577_35048C.1.pep
MTCLIYSLVNWSYRGTETEEQIQKRLRNAQAELDQSNEPGLFDHLLVNDDLETCYENLKKLLSLDDDQEDSDDFCKFKKYFYFHCVLMLHCVFSDGGSHYPSVNKEDKETASYSIVSKTDSEILLQSETNEGKNGAIHLLALDLSSLSGGAPGRTRGLKIGSVNSF

SEQ ID NO: 298225 - protein, 125 aa, Zea mays
  unsure (1)..(125): unsure at all Xaa locations
  Clone ID: MRT4577_35049C.1.pep
MGEEAVHFSVVDAKDCKQSAFEVGDKTYVICRSDDDLKTSAVKIHDKLTQTWLSPTILGEQPLLTKSQSVIPVSDEKILVIEKGVPLNESIWFLEIDTPFVKXTRKIKETEVVSWSKGVIGVGQK

SEQ ID NO: 298226 - protein, 49 aa, Zea mays
  Clone ID: MRT4577_3504C.1.pep
NNDGCYLILFCFLPMDSGGPFHTKEQKGAARQKNERELDRITIKKGGLT

SEQ ID NO: 298227 - protein, 48 aa, Zea mays
  Clone ID: MRT4577_35050C.1.pep
QYTIYLIKKIIFNFYITHPKLYLYPNSTFKTTNPHTPYYYNINHLPSH

SEQ ID NO: 298228 - protein, 125 aa, Zea mays
  Clone ID: MRT4577_35051C.1.pep
MDAYEATKVVFSRIQALDPDHAAKIMGFLLIQDHGEKEMIRLAFGPEALLHTVMAKARKDLGLLPSPGPGTPTSVTAAATHSPFLLSRQKPGALRRRHRAVAALGLVAPRRGRRRPSSPGQQRRQ

SEQ ID NO: 298229 - protein, 41 aa, Zea mays
  Clone ID: MRT4577_35052C.1.pep
KKLTTGRCHLNKLKGFNVTAAAHHKLITQGGHWLKLGPPNF

SEQ ID NO: 298230 - protein, 30 aa, Zea mays
  Clone ID: MRT4577_35053C.1.pep
YFECPGASVPPLMLYYFRNSVLDTHMMRPC

SEQ ID NO: 298231 - protein, 70 aa, Zea mays
  Clone ID: MRT4577_35054C.1.pep
KRWFSPDPPYSNRWGGEVSPPGEGKKNRGGFPPQYKEGPLMTGKWKLIPPPRLVLRGRIDPKGGGALFFF

SEQ ID NO: 298232 - protein, 160 aa, Zea mays
  Clone ID: MRT4577_35055C.1.pep
MRSSWADSVANAEESAPATGAAPAPVANHQNSRPTRSSYVPPHLRGGGRSPENQVPAAAPTPAGAYPSGAVQPAGGYAAAVGGTRWAAPPGAPSAGVGVVRQGGGGRGAVGGGGGGWNSRPGGWGDRRDREPNPFGDSEPAAVDVDFESQQNTGINFDAY

SEQ ID NO: 298233 - protein, 195 aa, Zea mays
  unsure (1)..(195): unsure at all Xaa locations
  Clone ID: MRT4577_35056C.1.pep
KVSFPPVQAVPSFPSSFPKHFSGNDQLRCLIPCAIDQDPYFRMTRDVAPRIGYQKPALIESRFFPALQGENTKMSASDPNSAIYVTDSTKDIKTKVNKYAFSGGQDSVELHRKLGANLEVDVSIKYLNFFLEDDDELERIKKAYKEGRMLTGEVKQLLVTVLSEMVERHKRARAXVTEEMVDAFMAVRPLPNMFG

SEQ ID NO: 298234 - protein, 52 aa, Zea mays
  Clone ID: MRT4577_35058C.1.pep
IKGISHQRAQPYIKTFLILNKKIKNMRAPPLKVKNSQPLSSPPISLLIAPLN

SEQ ID NO: 298235 - protein, 86 aa, Zea mays
  Clone ID: MRT4577_35059C.1.pep
KGLGSVVLTKETPVPATGGAPNLVEAIQGGGFQLPTLSLSFDDFAEPPPGAGGPVPSSEGPNLGGRGGGPKQKNRFPDFVSPAPSP

SEQ ID NO: 298236 - protein, 905 aa, Zea mays
  unsure (1)..(905): unsure at all Xaa locations
  Clone ID: MRT4577_3505C.1.pep
MKEGAVMYVTKLNAEGFPEEPLDVVTKFRNSCGSTVRDIVPITLQKWKDLDEDTRNKLWAKLSESFKFPKGTEDAVRKSMLSAMAKMFRGWKAEMNREFVKKNKVPPPKKMGKITQAQWEEFVRQKTELKAKELGETNSQIAKMNKHPHRLGSTGYHHKVVQWNRIIEEAIANDTLDPILKDIDERAIRWILGRAGLIGEVSTKNQEYADKRKKGEFKPRRENDILTAALGNPEHTGRARGISSKISWREAFPEYASSYRKHEKSKRTLEETIDERVQKAINDVMNKMKKTECISFELKPSHMSPPIVPSSVGSVQDLTKYLVDDIVEDKPCFLHIPINRSGTKIKQAATGLVKPGLVNYKDNPVPPHYAVVQVLEITDSGCEDWEIDFPVEGIITLQEAMNELVLWHRRDIKLGDEPNSTPMQQKDSSIIPHPMVQENMTPTSKKIVETIISPLAKELDEGDVDKIVPQNVDVNIKKKPKVGTNVEGPTISKKIHKRIATDDVKKPSESVARYLHKLXESYDKSIKSGINISWSRHTVPNRQFRSMGRRWNDSYSRIITXKTNISVYKKEGVPPKFVNGRSFLTTVQLSKLSTPEIRMHEWYMVASNKYKLEDFTFVVPEDAFWSNDHIDPVQHLFFDDLWSLYHRQRMETNYLTLFCLMQYMDDKKKQLKTGFLDPLMISQARYKVVARRHGEEYKDLDDAEFEKAVKQNQRKKMKVMAAYIGRAMYNHVQHGKDLIIAPHHFNDHYICIMIFPKDGKVMVFDSLRMEKATYNDFLKILENAYRFYWKDLGGEHPEDKPNLSISLFPYGDKQPPGTVLCGYYVCEWCRVTFHYMVNREDVPKSKINVEWLERDMVSVGVAKVVRDLLYFMRREVLHQQGLFYNTNGNLQKFPELSLYTISHSV

SEQ ID NO: 298237 - protein, 100 aa, Zea mays
  Clone ID: MRT4577_35060C.1.pep
PMGESPPPVMGVMHYDRWRVMVADRIRGRECSCVVWSTRAPPTTCRRTPRRCPACSSRSSRSAQTRSQSPSRPMEVPLGQIAVACGDQKKELSDEAARGR

SEQ ID NO: 298238 - protein, 79 aa, Zea mays
  unsure (1)..(79): unsure at all Xaa locations
  Clone ID: MRT4577_35062C.1.pep
SFXFFFFVITKLLGVLSGKTGGMANSDPYPLKAFPFGVEFQTDYQPHTYYWELGWATKQGFNKYPNGNLNDGRVRQGKF

SEQ ID NO: 298239 - protein, 316 aa, Zea mays
  Clone ID: MRT4577_35064C.1.pep
MAGAGAPAAGLTVNQHQLTAKSYATGATDPCSLQYNRELVNKQNESENMQDSDNLSMLTSMNTGNTGSVFPFSKQNTNPFEVTSSRLEFGLVSSDSLMSSPHSSLENVNLLGSQSMNEHQNPASLQHFVDWPRTPAQGGLSWPEAEDMQAQRSQLSISAPMASSELSSASTSPIHEKLMLSPLKLSREYSPTGLGIAAKRDEVSQLEATWATMFRDSSTGGPLGEVLAKNTATRKQEVARRRRSPLTDYYCWDSGHGMQSSPVGVLQRTTAFGSVSSSTGSSPRVESHGACCDGTSNLMDDDLGSVVVSHPSIRLL

SEQ ID NO: 298240 - protein, 125 aa, Zea mays
  Clone ID: MRT4577_35065C.1.pep
EAGRGSFSAHVFLCSPLLIHRVVLLLSAPHRRALAPRQLVPPENLRSACCYLVAKFSASSSIAAPCSLSCLDGAPPAVEPLPTSCPVHRRTVRAARGSRRSLLDTKPTVAPLHGRNPLDDVHPYT

SEQ ID NO: 298241 - protein, 81 aa, Zea mays
  Clone ID: MRT4577_35066C.1.pep
HGSVKLSHIPRSKMNECMLGDAQHVQEAETIGLDYIDVDALKRLNKNKKLRKRLDKNYHAFLASDAIIKHNPRVLGPGLNK

SEQ ID NO: 298242 - protein, 77 aa, Zea mays
  Clone ID: MRT4577_35067C.1.pep
LTRVRSGIRVTTAGTWPSCPAFSSLAFSSSQHSSICDHITTHTHIYTWSSSSFQQSAARRLTCMRFKGKSADGYGAR

SEQ ID NO: 298243 - protein, 205 aa, Zea mays
  unsure (1)..(205): unsure at all Xaa locations
  Clone ID: MRT4577_3506C.1.pep
MLPAAATAAAPDPSCSTFPSSRRAPPVASRHSFVVATRATGSSGLFSLRCHGRLPCHSRCRCRCRAWWNNERARRVSGASRGRHCRAVASAPDHMDEQPARGRYHPFEEISEAVQLDDGEPAHLTDAESARTIVEVNNKATVMISTLVGDGVHERIILPEFPYLTDENGDIYFEVDNEDALLESIMXEDKIAVTPXISSPVSSTL

SEQ ID NO: 298244 - protein, 288 aa, Zea mays
  Clone ID: MRT4577_35070C.1.pep
MRRGETTTCGAAAAGPSSPGQGQRPSSLGTWRLPQGRGAPFLLGSCSPGHGGEQMLSFSSAAAAAAAASCAASTAAADGGGAMPLYYGTPASCSGLSSVSLSTSMQGAMARVRAPFTPSQWIELEHQALIYKYLAANSPIPHSLLIPIRRSLAASPYPPSYFGTSTLGWGSFQLGYSGNADLEPGRCRRTDGKKWRCSRDAIAPQKYCERHMNRGRHRSRKHELAATGYATGATDPCSLQYDTALVNKPKESENMPDSDHLSMLTSMNTGNTGSVFPFSTQNTITLDW

SEQ ID NO: 298245 - protein, 156 aa, Zea mays
  Clone ID: MRT4577_35071C.1.pep
AISCSPLLFCTETHQTSGDHLAAATPHSTHRGTQASSRPESDRRPSPVPAFWRPSPSGWPARPKRPRPNPYPAPSAGWCALTPQVLEDSTCVLLFRVLRTEEVRPGALRLPIRSSHLCGVARLDVFLGALCHTTSTPDIWPELPIAPLIFGGSGVP

SEQ ID NO: 298246 - protein, 101 aa, Zea mays
  unsure (1)..(101): unsure at all Xaa locations
  Clone ID: MRT4577_35072C.1.pep
ALASRPTPSCSHQPSHRHQWPLPRSTPRPTWRPKKXPVXRPRLRPAGPRSMPPPRPKPRPRLLLLLTPRSFPRTISRHPPRPRPRLLLEPRSPSRPNRSPK

SEQ ID NO: 298247 - protein, 31 aa, Zea mays
  Clone ID: MRT4577_35073C.1.pep
LYKINMCQKVIPLSLMCVSLMNPIKLVIVPH

SEQ ID NO: 298248 - protein, 55 aa, Zea mays
  Clone ID: MRT4577_35074C.1.pep
CVEDGRDGLDAGVHQAFHRQLRVVERLQLATALVAVASVYLGGGRWSQFRRPLDV

SEQ ID NO: 298249 - protein, 51 aa, Zea mays
  unsure (1)..(51): unsure at all Xaa locations
  Clone ID: MRT4577_35075C.1.pep
MASAELSRYVNVYLSXLAEQAERYDVMVDFMEMVAKTVDSEELTVEERYLL

SEQ ID NO: 298250 - protein, 84 aa, Zea mays
  Clone ID: MRT4577_35076C.1.pep
QKTPQWRAGPEGAKTLCNACGVRYKSGRLLPEYRPACSPTFVSSIHSNSHRKVLEMRRKKDGDLGQLPLPVPAALLLGPAVESF

SEQ ID NO: 298251 - protein, 57 aa, Zea mays
  Clone ID: MRT4577_35077C.1.pep
LCAYRCEAAAAPVTLRFFTALAMSSTTMGGSDLARCTAAGSTGLCDCSRLRFRWLAS

SEQ ID NO: 298252 - protein, 266 aa, Zea mays
  unsure (1)..(266): unsure at all Xaa locations
  Clone ID: MRT4577_35078C.1.pep
PTRPPSSNLVDLVRSLSHLFGLDPPLFTRNPPXPPLRLRHRIPRRPSPHHGSPPPLPPPTGGLGVPPXPASPQLAPRPPPTEDPAEVFKRNAVAKLVDMAYADAAALRTAREAEVDALFAVQAELRHRGGIVAQGVRNMGEEMEALERRLQDVMMATDVVEDWVRQNNRRGSNQATEDDEAIEPADVLSRQMIQCTAADLALEDTIYALDKAIQEGSVPFDGYLRSVRALSREQFFHRALSAKVHSAQQQAKVASMAARAPPQYAS

SEQ ID NO: 298253 - protein, 80 aa, Zea mays
  Clone ID: MRT4577_35079C.1.pep
RGREGSGGFFSWWGLLSCPRRPRAWLIGQLAALLVAAVVAVSVLVVGAAVVCDMSNLHFNVVAASWRLRPTDPSGAPSYA

SEQ ID NO: 298254 - protein, 146 aa, Zea mays
  Clone ID: MRT4577_3507C.1.pep
SENGRAENEFAQPTLWLPALGYDFKLATVARNLLVLEYDEEQSKPITRYFQMMNEIVEDAADVRILRRAGVVRGGQEVHELIKNIDSRAMYPSVYMAMDREIDKVREYHDKRMASFFVRNRPGVIWASSVAAISMAAVVASMRKRG

SEQ ID NO: 298255 - protein, 54 aa, Zea mays
  Clone ID: MRT4577_35080C.1.pep
IPRVPSGGFCSTSKKNLGVPSPENFDMLIWPCWGTSVAGLSVGFLLKAGKKIKG

SEQ ID NO: 298256 - protein, 108 aa, Zea mays
  unsure (1)..(108): unsure at all Xaa locations
  Clone ID: MRT4577_35081C.1.pep
MGEAWPWIAKDVTEFIGNTPLVFCGEGSXGCFGRVAVKLXSMEPCSSVKDRXIGYCMITGAXEKGVIAAGVSVLIEPSSGYTGIGLVFMGGGEGLASLLLEQWAGAGM

SEQ ID NO: 298257 - protein, 41 aa, Zea mays
  Clone ID: MRT4577_35082C.1.pep
LYRYPDWRICFQNWSVFYSTNRSRRLLITILGTNNVSTDSR

SEQ ID NO: 298258 - protein, 162 aa, Zea mays
  Clone ID: MRT4577_35083C.1.pep
MDRRMDRLLASCIPGMEAAEREDEGLELSLSLHPLPSSPPRFQAVFACCYCPRKFRSSQALGGHQNAHKVQRNLARRGREAASAPAAPPPVADQGISRASGSESAPTPRSRADHPGADAWHHRRQHYLYPRPAPAGGAQASSGASRAGGEDGEEIIDLSLKL

SEQ ID NO: 298259 - protein, 52 aa, Zea mays
  Clone ID: MRT4577_35084C.1.pep
EGHTSHPSIWLHFTIKNTRGEFAAGSHPLGSEQGRHTIPAAVGEGHYSLFLF

SEQ ID NO: 298260 - protein, 95 aa, Zea mays
  Clone ID: MRT4577_35085C.1.pep
GAFDNPFLGGLFFRGGLFPSDRGFFGGGGGARDGLVSPYGSNAGQGGAGFRGAMVKMGSISPLPGRGGEIRVPSRGVIFFFFPPPLIAFAFGGGE

SEQ ID NO: 298261 - protein, 142 aa, Zea mays
  Clone ID: MRT4577_35086C.1.pep
MASEAVVVHTGGCHCRRLRWQVEAPASVVAWICNCSDCSMRANTHFIVPAAKFKLQAGADEFITTYTFGTHTAKHTFCKTCGITSFYTPRSNPDGVAITVACVDPGTLKHVEYRKFDGRNWEDFFRTSDIAGFSKDDAEAAE

SEQ ID NO: 298262 - protein, 137 aa, Zea mays
  Clone ID: MRT4577_35087C.1.pep
GFLLGLCPDKAPLAGNFFFYCVHTPVLARAWKETQGALAFWVFPPKISQKWFRPPLGVWENKRVFLGFGPGPFAPFGVWVGSFPPKAGVFFLFSPPPPGGFRVGVFLTHWGFLAWNFFLPRAPPFFGGWYFVCFARN

SEQ ID NO: 298263 - protein, 525 aa, Zea mays
  Clone ID: MRT4577_35088C.1.pep
MSPEAGPIMRPADQLLLPFLLLAVASVAAAGGSWENGYGSILRLPSSSPRRFPRSAAVDLIHALNLHPADASPPLSTAGVEGALAPAGTLVERPIRIASFANGGAATSVEDLGHHAGYYRLANTHDARMFYFFFESRGHKDDPVVIWLTGGPGCSSELALFYENGPFNIADNLSLVWNDFGWDKASNLIYVDQPTGTGFSYSSDSRDTRHNEATISNDLYDFLQAFFAEHPKYAKNDFFITGESYAGHYIPAFASRVHQGNKNNEGIHINLKGFAIGNGLTDPAIQYKAYPDYALDMGLITKTQFNRINKIVPTCEFAVKLCGTSGTVSCLAAYFVCNTIFSAIRTIIGNKNYYDIRKPCIGSLCYDFSNLEKFLNLKSVRESLGVGDIEFVSCSPTVYEAMLLDWMRNLEVGIPELLESDIKVLIYAGEYDLICNWLGNSRWVNSMEWSGKEAFVSSSEKPFTVDGKEAGVLKNHGPLSFLKVHDAGHMVPMDQPKAALEMLKRWTSGNLSEPSSSSQRLDFTM

SEQ ID NO: 298264 - protein, 71 aa, Zea mays
  Clone ID: MRT4577_35089C.1.pep
TNRVDIYYILDRLTDMFSYINALPLNVMMDLILRLRTLMRVTMCMPNQRYQTYMLCTNTSIYINIDDHSTY

SEQ ID NO: 298265 - protein, 90 aa, Zea mays
  Clone ID: MRT4577_3508C.1.pep
SPWVDVVCQDGVLALVISFGAFSLPLLSRCDIWEFLLFNLFSLFFKKKKKKKKKKKKKKKKIKKKKKKRKKSLCVVPLLRRICRFHHAGG

SEQ ID NO: 298266 - protein, 109 aa, Zea mays
  unsure (1)..(109): unsure at all Xaa locations
  Clone ID: MRT4577_35090C.1.pep
LACSRXXXLPVFLCXPPCLXFPAAGWXGXXRXLAXFGAALPFXCFPCFPXPCVSSWLSAXVCLXXVVLXSXSPPPCLVSXFGCLAACWLALLXFVASLPLGLLLWRSLV

SEQ ID NO: 298267 - protein, 525 aa, Zea mays
  unsure (1)..(525): unsure at all Xaa locations
  Clone ID: MRT4577_35091C.1.pep
MSPEAGPIMRPADQLLLPFLLLAVASVAAAGGSWENGYGSILRLPSSSPRRFPRSAAVDLIHALNLHPADASPPLSTAGVEGALAPAGTLVERPIRIASFANGGAATSVEDLGHHAGYYRLPNTHDARMFYFFFESRGHKDDPVVIWLTGGPGCSSELALFYENGPFNIADNLSLVWNDFGWDKASNLIYVDQPTGTGFSYSSDSRDTRHNEATISNDLYDFLQAFFAEHPKYAKNDFFITGESYAGHYIPAFASRVHQGNKNNEGIHINLKGFAIGNGLTDPAIQYKAYPDYALDMQVVCTRETRGLXHSHKLEGFCNWQRTNRTSNIVQCVXLISHRIFSAIRTIIGNKNYYDIRKPCIGSLCYDFSNLEKFLNLKSVRESLGVGDIEFVSCSPTVYEAMLLDWMRNLEVGIPELLESDIKVLIYAGEYDLICNWLGNSRWVNSMEWSGKEAFVSSSEKPFTVDGKEAGVLKSHGPLSFLKVHDAGHMVPMDQPKAALEMLKRWTSGNLSEPSSSSQRLDFTM

SEQ ID NO: 298268 - protein, 230 aa, Zea mays
  unsure (1)..(230): unsure at all Xaa locations
  Clone ID: MRT4577_35092C.1.pep
MSPEAGPIMRPADQLLLPFLLLAVASVAAAAGSWENGYGSILRLPSSSPRRFPRSAAVDLIHALNLHPADASPPLSTAGVEGALAPAGTLVERPIRIASFANGGAATSVEDLGHHAGMFYFFFESRGHKDDPVVIWLTGGPGCSSELALFYENGPFNIADNLSLVWNDFGWDKASDLIYVDQPTGTGFSYSSDSRDTRHNEATISNDLYDFLQAFFAEHPSMLXNDFFIT

SEQ ID NO: 298269 - protein, 48 aa, Zea mays
  Clone ID: MRT4577_35093C.1.pep
FLGKMHHMLLHDILHQGQWRMTWRGQWRLFIKKVCRYRTRTLEQRSPD

SEQ ID NO: 298270 - protein, 39 aa, Zea mays
  Clone ID: MRT4577_35094C.1.pep
TKQANLITSLHKAKLGTLWSPNYLSLALLMKFFKPNKQI

SEQ ID NO: 298271 - protein, 90 aa, Zea mays
  Clone ID: MRT4577_35095C.1.pep
QEPDGCISRVDHFSVLRDASYMVDQFCLVPVPYKDVQLDINISPRLSSEYISYLENPVELLNEAAKAAEKDLWKILLSCSMKAFANHLKR

SEQ ID NO: 298272 - protein, 141 aa, Zea mays
  Clone ID: MRT4577_35096C.1.pep
HLSKESCTLLSWGCDLYIVKDHLDVVNAILDTDDSCIRIVRKNGKTSLHTAARIGYHRIVKALIERDPGIVPIKDRKGQTALHMAVKGKNTDVVEELLMADVSILNVRDKKGNTALHIATWKWENFGIMKHRRRGFDETEA

SEQ ID NO: 298273 - protein, 68 aa, Zea mays
  Clone ID: MRT4577_35097C.1.pep
RESFYSQSVDKKPHPKPTCTHILTHHIYPISEEREKTQSRKNVPAEAHTPHIDHPTPRSKFPCTHIPQ

SEQ ID NO: 298274 - protein, 90 aa, Zea mays
  Clone ID: MRT4577_35098C.1.pep
NLQSTRRIVKAVWLVLQITKNIVDQFCLVPVPYKDVQLDINISPRLSSEYISYLENPVELLNEAAKAAEKDLWKILLSCSMKAFANHLKR

SEQ ID NO: 298275 - protein, 106 aa, Zea mays
  Clone ID: MRT4577_35099C.1.pep
DASRNTEKWSTLLMQPSGSCYSRSLKNKIDSIVISRSGERIMIFRRYQPTRRFLLPSRAVLLSSRFFSLPSSLFLPSHFLQSPFPSPASLLLHKQWILMSMRNDMK

SEQ ID NO: 298276 - protein, 284 aa, Zea mays
  Clone ID: MRT4577_3509C.1.pep
MGVFVHLRSLRISFAQFFGLQFGKLCGRGRMGKKTFRVEDYKLVHCAHGSVLQHLTIAEPYKEEHLDELRKENQNRTEDWIMREHKHRFSEWLMDKNIPFGDSLEEKTMKNLASGPSCFVTSWQAYDINGYTFYTKSKDMKSVAQNSGVRIDAFDLHGQKTTYFGFIEEIWELDYGPSMKIPLYKCQWVQHPVGDLKKVGYKDDPWVLAECVAQVFYVLDPADEKMHVVISGKQKFVGVENVGDQDEEYNKYEEMFVFNGTERIKRVEKKIDKNLKPYMRKNGS

SEQ ID NO: 298277 - protein, 452 aa, Zea mays
  unsure (1)..(452): unsure at all Xaa locations
  Clone ID: MRT4577_350C.1.pep
MRECISIHIGQDGIQVGNACCELYCLEHGIQADDQMPGDKTIVGGDDAFNTFFXETGAGNHAPRAVFVDLEPTVIDEVRTXGTYRQLFHPEQLISEKEDADSNFDRGHYTIGKEIVDLCLDRIXKLADNCTGLQGFLVFTLVVDGTGSGLGSLLLXRLSVDYGKKSKLEITVYPSPQDSTSVVEPYNSVLSTHSLLEHTDVAILLDNEAIYDICRRSLDIERPTYTNLNRLVSQVISSLTASLRFDGALNVDVNEFQTNLVPYPRIHFMLSSYAPVISAEKAYHEQLSVAEITNSAFEPSSMMAKCDPRHGKYMSCCLMYRGDVVPKDVNAAVATIKTKRTIQFVDWCPTGFKCGINYQPPSVVPGGDLAKVQRAVCMISNSPSVVEVFSRIDHKFDLMYAKRAFVHWYVGEGMEEGEFSEAREDLAALEKDYEEVGAEFDEGEDGDEGDEY

SEQ ID NO: 298278 - protein, 86 aa, Zea mays
  unsure (1)..(86): unsure at all Xaa locations
  Clone ID: MRT4577_35100C.1.pep
GFLFGMLLLLKRFLDWGLASLAHLGGSPIPKKISFSVFPGNHVWKKFPFPPESACTKTLSFEKSVKKLLLFQEVFPNXTIVVYPQI

SEQ ID NO: 298279 - protein, 128 aa, Zea mays
  unsure (1)..(128): unsure at all Xaa locations
  Clone ID: MRT4577_35101C.1.pep
GRRGLSRGRTRWRTPGRTPGSRRVGSKCKGKGSKSGASMRCPGCQGSXGIKIPVLKGYPHMILQDPASXIEFKVTGQTIIEKDRCPWCKGKKAVIEKRVLDVHVKKGMDHNQKTTFPGETDEPPDTAT

SEQ ID NO: 298280 - protein, 84 aa, Zea mays
  Clone ID: MRT4577_35102C.1.pep
MLLPMIILTGLLQLFQVDQFCLVPVPYKDVQLDINISPRLSSEYISYLENPVELLNEAAKAAEKDLWKILLSCSMKAFANHLKR

SEQ ID NO: 298281 - protein, 55 aa, Zea mays
  Clone ID: MRT4577_35103C.1.pep
KDHHLSHPLQNQCQSNQSLGCLFAHRRPQDSLGKPQVIHRHLRYCQRWCNQVSPV

SEQ ID NO: 298282 - protein, 100 aa, Zea mays
  Clone ID: MRT4577_35104C.1.pep
LSPLYSKAHIRNPVQCVGAHERTKMIYVQHLTRVPPLRREVASSQVLGSLRTSLFDGPLWAEMPSLKEPQRVVGRSGVASDQQERVLCSNNGTGPLACST

SEQ ID NO: 298283 - protein, 119 aa, Zea mays
  unsure (1)..(119): unsure at all Xaa locations
  Clone ID: MRT4577_35105C.1.pep
MDTLHIYTNGSQILPLALLALSANVATGLLFXQCSQQYLXPVTAARFEYPTIQSYRLQEAIAXSILRSXALTVHXPYALLQQPXLMNLYXPRIVAHQLQQQLLPQXKQXVSANLXAYLS

SEQ ID NO: 298284 - protein, 124 aa, Zea mays
  Clone ID: MRT4577_35106C.1.pep
SKTSPPGVIGPHQKHNQKFTCQALPILGKAKQKRGAPQPGETCLGEPMQIHPKTGLPPKGKKHPSCQGQFSTDMTPGFGSTISMTSKGEKGVKTKNWKLQHRNSPNMEGPKKGPAFFSTNHGKG

SEQ ID NO: 298285 - protein, 33 aa, Zea mays
  Clone ID: MRT4577_35107C.1.pep
MARSLSQARRIGVLVAQSISLIHVHRRGYAVAS

SEQ ID NO: 298286 - protein, 123 aa, Zea mays
  unsure (1)..(123): unsure at all Xaa locations
  Clone ID: MRT4577_35108C.1.pep
MVHIILFPIPAGSPQFLGGRATMPTGGTAVMGLSKSGVNGHLKVLRDDIRVIPNPAIRRLAXRRHAVIRISELXIYDETXAAVKIFLXNGIRQVVTYXSSAXRKSDSAMDVVYALWRQRRTLY

SEQ ID NO: 298287 - protein, 55 aa, Zea mays
  Clone ID: MRT4577_35109C.1.pep
LLKGFFFFAFEKQGFFFFDDPEGGSLTKGFYPPVFFFFYHCLGGIFENFLNIGGR

SEQ ID NO: 298288 - protein, 43 aa, Zea mays
  Clone ID: MRT4577_3510C.1.pep
EYIVNKWSYRTGLAVCLMVVGWCVWTKRKGRKRPKYLCSYGGR

SEQ ID NO: 298289 - protein, 42 aa, Zea mays
  Clone ID: MRT4577_35110C.1.pep
TDKSLLKILLNYSFKNLCTLRKAIFRSIYGFDPKLLTLVLLN

SEQ ID NO: 298290 - protein, 87 aa, Zea mays
  Clone ID: MRT4577_35111C.1.pep
WSRARSARRSSLGRGDRIVVVVEADLGYSERTTVGAGGEWCGVHGHVDADPPPNLDSWGLLMRVWDLDSWGLLIAPACICSTWSSCA

SEQ ID NO: 298291 - protein, 82 aa, Zea mays
  unsure (1)..(82): unsure at all Xaa locations
  Clone ID: MRT4577_35112C.1.pep
SARMELFHAGSRRVVASLFDVVFSLSRAPHVWREESRIVRRWGFGVVMIGSRGMFXFVPKKLDKKRVFIGGEAQFILACRGR

SEQ ID NO: 298292 - protein, 41 aa, Zea mays
  Clone ID: MRT4577_35113C.1.pep
GDDKSHLQTVIYYSVPNLITSHRLQHDYRKTLEYPINISKH

SEQ ID NO: 298293 - protein, 178 aa, Zea mays
  unsure (1)..(178): unsure at all Xaa locations
  Clone ID: MRT4577_35114C.1.pep
IASRGLCDRCAEKWSSGNKCASTVQLHAIEVCDLLTPEDSSELVPENNDQLLMALSAAAWSGSDGAATLRLQGHIQQLEXVEAANDGECGEWSGTQVYXYIPTATWSTSTCDFVAENTTMVKNEYTGKTDGTSLKNPSFFTLPSFDLMVGMDWLQCYSPMKVXNKWMVIPYHSSTRSL

SEQ ID NO: 298294 - protein, 150 aa, Zea mays
  unsure (1)..(150): unsure at all Xaa locations
  Clone ID: MRT4577_35115C.1.pep
KKQLLTQTPPPLAKQAPKXPTPAPKRPTKPNNPPQNHNKXPQTPPGPPPQGPTPTHRRPHPGGPPPEPSRAKKRPNRPPGTNPQPHTRPHNKQAGPPKGKPRGPKGGXNKNQGPRTXPGXPKGKPDPPTPLKKQPPPGEXGDLGMAPPPP

SEQ ID NO: 298295 - protein, 107 aa, Zea mays
  Clone ID: MRT4577_35116C.1.pep
HASATLAQLIYKDPEVKEHFHLLKWVTVSDDFSVLNLANKICNASERVLEDAVKKLQEHLKGKRYCWSLLAITNSTFLHASYDVCKLLSTKSSIRRVISCVPNGLVC

SEQ ID NO: 298296 - protein, 81 aa, Zea mays
  unsure (1)..(81): unsure at all Xaa locations
  Clone ID: MRT4577_35117C.1.pep
CMILPXCSLMMFHCLLFGKEKTLQMVPTSFILKINGPASAWDSSQKIKCRKKHLKGTLYLFALCVFPTSSAAEVHLIKPPG

SEQ ID NO: 298297 - protein, 73 aa, Zea mays
  Clone ID: MRT4577_35118C.1.pep
MDIKGLEADKLECRLYVGNLDFRMSESDVIKMFSPFGKITAEDFLWHTRGPKRGEPRGYAFVQYTTKEHSKLS

SEQ ID NO: 298298 - protein, 84 aa, Zea mays
  Clone ID: MRT4577_35119C.1.pep
PRSLPEHISTVRASSSAVSPACDASSVSFSVHAMSHSIQAPRDHSATAAFPDACKWTSSRRTPARLLAPHAGEFGSSSSLLAGL

SEQ ID NO: 298299 - protein, 847 aa, Zea mays
  unsure (1)..(847): unsure at all Xaa locations
  Clone ID: MRT4577_3511C.1.pep
SIQEELQSRLCKKIXPNKNKNKKSTIGPESDDDTFDDMDGKKKSKILALVMWYLPVIDRLKRLFSNPREAELMRWHAENRKQNNKQIRHPADASQWKNFDLMYPEFAKETRNVRFALGTDGMNPFGEKRSVHSTWPVTLTMYNLPSWLCHKRKYIMLTILIQGPKSVGVDIDVFLEPLMEDMTKLWNEGVRIWNEYCHEYFNLRAIIFVTIHDSPGGATLSGQKTKGKNGCVVCVDGTASMYLKSSKKLVFMEHRRFLMKQHKYRKMKEEFNNELESEGAPKPYSGKLVFEIVKNIHVVFGKGKNKGEKRKRTDPSTYTTFKKQSFFFKYLPYWKDMEICHSIDLMHVTKNVFDSIIGTLLGMPSKTNDILKSRNDLVDLQIRPELHPVDSGKGKPYLPPASYNLSVEERTKICKCLRGVKVPTGFSSNISKLVRMKDLSLLGYNSHDYHVMMTVFLPIAVRALETEHVKVVITRLCYFFNAVSQKVIALEDLDYLKAYIIETMCKLEMCFPPSFFDMQVHLIIHLVDQIKILGPLYLHHMFQLERYLGVLKGYVRNRAHPEGSIMEGYTTEEVIESCIDYISDGTMIGVPVPKHEGKLCGRGRMDRKTFRVEDYKLVHCAHGGVLQHLTIAEPYIEEHLDELRTENQNRTEDWIMREHKHRFSEWPSCFVTSWQAYDINGYTFYTKSKDMKSVAQNSGVHIDAFDLHGQKTTYFGFIEEIWELDYGPSMKIPLFKCQWVQHPVGVIVDNYRLTLVDLKKVGYKDDPWVLTECVAQVFYVLDPADEKMHVVISGKQKIVGVENVGDQDEEYNKYEEMFVFNGPERIKRVEKKIDKNLKPYMRKNGSS

SEQ ID NO: 298300 - protein, 64 aa, Zea mays
  Clone ID: MRT4577_35120C.1.pep
FTHYRRVQKRGGFLTVPMERNTHTQRGAPLKNGFYKTRGVNIYPLHMYYVKRDAFSKEKRKALL

SEQ ID NO: 298301 - protein, 167 aa, Zea mays
  Clone ID: MRT4577_35121C.1.pep
MDIKGLEADKLECRLYVGSLDFRMSESDVIKMFSPFGKITAEDFLWHTRGPKRGEPRGYAFVQYTTKEEAQLAKEKMNGKLICGRPMVVHLASERSSLGSSSSHRAVKDKKLAGGSGAKSQYTDTAAKIAAIKNKLKSLEDGGCSTKKPRLNPDNLTEIREQSHKKF

SEQ ID NO: 298302 - protein, 95 aa, Zea mays
  unsure (1)..(95): unsure at all Xaa locations
  Clone ID: MRT4577_35122C.1.pep
MNAVSVSTGHVWRASNVIGLEDKLAHTPCITIPEIKVECTMLKDVHMVAXTTAALRMQNNYYTGPMNGAIRLHKEDDKAEANALDQLMRWKKVNG

SEQ ID NO: 298303 - protein, 44 aa, Zea mays
  Clone ID: MRT4577_35123C.1.pep
ASSCEASCKENRIPALVRWQSVNMVPSQMKCKSEALVSKSSFPT

SEQ ID NO: 298304 - protein, 505 aa, Zea mays
  unsure (1)..(505): unsure at all Xaa locations
  Clone ID: MRT4577_35124C.1.pep
MASSTGSLEHGGFTFTPPPFITSFTELLSGAGDMLGAGADQERSSPRGLFHRGARGVPKFKSAQPPSLPISPPPMSPSSYFAIPPGLSPAELLDSPVLLHSSSNILASPTTGAIPAQRFDWKKAADLIASQSQQDGDSRAAAAGFDDFSFHTATSNAVRAHTTTTSLPSFEEQQQQVEKAAVPSSNRASGGGNGNTKLEDGYNWRKYGQKQVKGSENPRSYYKCTYHSCSMKKKVERALADGRITQIVYKGAHNHPKPLSTRRNSSGGGAAAEELQAGNSSLSAVAAAGCTGPEHSGATAENSSVTFGDDEAENGSQRSDGDEPDAKRWXYVIPPERASEIHYSLPAGRGSQVEXITTVSSCSCNSCIYVCLIRKQEDGENEGSSAGAGGKPVREPRLVVQTLSDIDILDDGFRWRKYGQKVVKGNPNPRSYYKCTTAGCPVRKHVERASHDTRAVITTYEGKHNHDVPVGRGAASRAAAAAAAGSGALMATGGGQLGYQQQQQQ

SEQ ID NO: 298305 - protein, 388 aa, Zea mays
  unsure (1)..(388): unsure at all Xaa locations
  Clone ID: MRT4577_35125C.1.pep
GGSTKLEDGYNWRKYGQKQVKGSENPRSYYKCTYHSCSMKKKVERSLADGRVTQIVYKGAHNHPKPLSTRRNSSGGVAAAEEQAANNSSLSGCGGPEHSGGATAENSSVTFGDDEAENGSQRSGGDEPDXSAGTCDDLTRSIRCSSDPSRVEARGAVCFLCSWKWNXYTPPCMSALLLIRKAEDGENEGCSGAGGGKPVREPRLVVQTLSDIDILDDGFRWRKYGQKVVKGNPNPRSYYKCTTAGCPVRKHVERACHDARAVITTYEGKHNHDVPAGRGAAXALYRPAPPTADTAGHHYLAAARPGVAYQTGQQYGFGDQLGSFGLSGAPAQSGGGGFAFSSGFDNPMGSYMSQHQQQQRQNDAMHASRAKEEPREDMFFPTSLLYTD

SEQ ID NO: 298306 - protein, 128 aa, Zea mays
  Clone ID: MRT4577_35126C.1.pep
LVVQTMSDIDILDDGFRWRKYGQKVVKGNPNPRSYYKCTTAGCPVRKHVERASHDKRAVITTYEGKHNHDVPVGRGAASRAAAAAAAAGSGALMATGGGQLGYHHQQQQQPYTLEMLSSGSYGGGGGY

SEQ ID NO: 298307 - protein, 511 aa, Zea mays
  unsure (1)..(511): unsure at all Xaa locations
  Clone ID: MRT4577_35128C.1.pep
MVGAAGADHQERSPRGLFHRGATRGGGVGVPKFKSAQPPSLPISPPPMSPSSYFSIPPGLSPAELLDSPVLLHSSSNFFASPTTGAIPAQRFDWKQAADLIASQSQQDDSRAAVGSAFNDFSFHAPTMPAQTTSFPSFKEQQQQQVEAATKSAVPSSNKASGGSGGSTKLEDGYNWRKYGQKQVKGSENPRSYYKCTYHSCSMKKKVERSLADGRVTQIVYKGAHNHPKPLSTRRNSSGGVAAAEEQAANNSSLSGCGGPEHSGGATAENSSVTFGDDEAENGSQRSGGDEPDAKRWKAEDGENEGSSGAGGGKPVREPRLVVQTLSDIDILDDGFRWRKYGQKVVKGNPNPRSYYKCTTAGCPVRKHVERACHDARAVITTYEGKHNHDVPVGRGAASRAAAAAAAGSGALMATGXRPARVSAXQQQQPYTLEMLSSGSYGGGXRAPAPPAELLXGGGGFAFSSGFDNPMGSYMSQHQQQQRQNDAMHASRAKEEPREDMFFPTSLLYTD

SEQ ID NO: 298308 - protein, 103 aa, Zea mays
  Clone ID: MRT4577_35129C.1.pep
MESASDVQMQHRAEDSETTIEIKIKTLDSQTYNLRVNKCVPVPLLKEKIATVTGILSEQQRLICRGRVLKDDELLSAYHVEDGHTLHLGVRHPGQAATFGNAA

SEQ ID NO: 298309 - protein, 222 aa, Zea mays
  unsure (1)..(222): unsure at all Xaa locations
  Clone ID: MRT4577_3512C.1.pep
GRPFFFFFLEEKTMKNLISGASCFVTSWQAYDINEYTIYTKSKDIKSVAQNSGVRIDAFDLQGQXYFGFIEKTXELDYGLSMKIPLFKCQWVQHPVGVIVDNYGLTLVDLKKVGYKDDPWVLAECVAQVFYVLDPADEKMHVVISLSTTTSGRAVVALRSFSRPVSGRGPATTSSHSFSSISVVRSSLLLFFFSPLELTKAWISGELQGKTVVSRPLVYPIA

SEQ ID NO: 298310 - protein, 482 aa, Zea mays
  unsure (1)..(482): unsure at all Xaa locations
  Clone ID: MRT4577_35130C.1.pep
MASSTGSLEHGGFTFTPPPFITSFTELLSGAAADMVGAAGADHQERSPRGLFHRGATRGGGVGVPKFKSAQPPSLPISPPPMSPSSYFSIPPGLSPAELLDSPVLLHSSSNFFASPTTGAIPAQRFDWKQAADLIASQSQQDDSKTTAGLRSAAPSTXLLLPRAHHARADHVLPFXSNSKSKRRPKPPXPVEQQGERRRERQXKLEDGYNWRKYGQKQVKGSENPRSYYKCTYHSCSMKKKVERALADGRITQIVYKGAHNHPKPLSTRRNSSGGGAAEELQAGNSSLSAVAAAGCTGPEHSGATAENSSVTFGDDEAENGSQRSDGDEPDAKRCRXGENEGSSAGGGGKPVREPRLVVQTMSDIDILDDGFRWRKYGQKVVKGNPNPRSYYKCTTAGCPVRKHVERASHDTRAVITTYEGKHNHDVPVGRGAASRAAAAAAAGSGALMATGGGQLGYQQQQQQQPYTLEMLSSGSYGGGAA

SEQ ID NO: 298311 - protein, 73 aa, Zea mays
  Clone ID: MRT4577_35132C.1.pep
QFNRKGICSLFQYSVVRKWPIKKVRAIKPVGFQSYSQICSSFNRWAQDCCSRHIFCQGKMRVLLILNYGIVCS

SEQ ID NO: 298312 - protein, 153 aa, Zea mays
  unsure (1)..(153): unsure at all Xaa locations
  Clone ID: MRT4577_35133C.1.pep
ERETSLSSRRPRSSTSRLLTASLTAWKKEIGMVAKRILKELKDLQKDPPTSCSXATADEDMFHWQETIMGPPDSPYAGGVYLKNIHFPPNXPFKPPKVSFQTKAFHPSINMTGSICLDILKQQWRPALTISKGLLSICSLLTNPNPNDPLVPD

SEQ ID NO: 298313 - protein, 126 aa, Zea mays
  unsure (1)..(126): unsure at all Xaa locations
  Clone ID: MRT4577_35134C.1.pep
VFKECFALKTAQAPRKAFLXYFSTATGPIAGMLFISPTLGAFLSDRPMSFACPKVARTRVPVMVLVPTXRMNVLIVRGRXLNVDESDTEVVSVHGLIAWSKGFVNSEKSVAYVPRSDYVYAMRAAV

SEQ ID NO: 298314 - protein, 84 aa, Zea mays
  Clone ID: MRT4577_35135C.1.pep
VEFCFELMYEIGFKVVKNSNLKVFVSISFLEDGVGSVIRFVNGLVVLYVIVRLIVMLKGVEVAVGVCDVVKVVGGCGLGCSLLW

SEQ ID NO: 298315 - protein, 519 aa, Zea mays
  Clone ID: MRT4577_35136C.1.pep
MDDHYYVYLGLALVSLLVVVLAKRRRGPVDGHGLRLPPGPWQLPIIGSMHHLAGQLPHRAMRDLARRHGAVMLLRVGEVPTLVVSSREAAREVMKTHDTAFASRPLSATVRVLTNNGRDIIFAPYGEHWRQLRKVAITELLSARRVLSFRAIREEEVAATLRACAAAAAESPPRPVEMRARLSALVADATVRAVMGDRCRDRDVFLRELDRSIGLSAGFNPADLWPSSRLVGLLSGAVRRAEECRDTVFGILDGIIKEHLQRMDSAGAGAGAGEAAGEDLLDVLLKIHKDGSLQIPLDMDVLKAVIFDIFGAGSETSATTLEWAMAELIRNPKAMQRATAEVREAFGARGAVAEHELGELRYLHLVIRETFRLHPPLPLLLPRQSQEPRRVLGYDVPAGTTVLVNVWALGRDGRYWPGDPEEFRPERFEAEASAVEFKGADFELLPFGAGRRMCPGMAFGLANVELALASLLFHFDWEAPGVSDPAEFDMAEAFGITARRKADLLLRPILRVRLPVPGV

SEQ ID NO: 298316 - protein, 111 aa, Zea mays
  unsure (1)..(111): unsure at all Xaa locations
  Clone ID: MRT4577_35137C.1.pep
EGRPTRCTTTSYSRLTQLSTPNPNRHETTYNPDPDPHYKQXYFSSLPQXTPGYNDSDNHNPAPPYQRDHTPYHGGSPPPPYQRRNPPPVYQARNRPPSXSTNXPPAPPPLY

SEQ ID NO: 298317 - protein, 124 aa, Zea mays
  Clone ID: MRT4577_35138C.1.pep
VPFFNPGQTFYGFDSHNANESGIALPTLATSFYPGAVGAQQAASNISSPSDLSRPMSALALDAHQMQQMQFAAPAPVHGDPNAFLQPWSMPFNSRMSISNPQTILGLGLRRASATSGIQNVRHK

SEQ ID NO: 298318 - protein, 67 aa, Zea mays
  Clone ID: MRT4577_35139C.1.pep
LHVLVANYPSILACCTTAFSTKLQRFRYIALAYGLSGLGMDRSIMAVVAMFYPRLRKDCAPSLLSAS

SEQ ID NO: 298319 - protein, 146 aa, Zea mays
  Clone ID: MRT4577_3513C.1.pep
MASLLCPASSCPSASLRRTAASPAAPSFASSRHYGAPLTFRVASQPPQALAAAPYGYGSDLLRPIDTQTIIIAAAVVSAVSLSLVLGLKGDPVPCDRCAGNGGTKCVFCNDGKMKVENGVVECRVCRGAGLILCKKCAGSGYSKRL

SEQ ID NO: 298320 - protein, 65 aa, Zea mays
  Clone ID: MRT4577_35140C.1.pep
PPNPNPLSKREKQNAKPHGKIFATPKNSYKKFINCFFPNKIFFLPSPTGPKLFVPPPLPINLKAL

SEQ ID NO: 298321 - protein, 60 aa, Zea mays
  Clone ID: MRT4577_35141C.1.pep
RESDEVDEEGTDNGGAKRQVKLSSLGFTGFKRKTEDIESSGKGRCKFFQACKLELVRKFQ

SEQ ID NO: 298322 - protein, 64 aa, Zea mays
  Clone ID: MRT4577_35142C.1.pep
NSASCRACKGRWIGSGSSPAARDRRGRRGRAVYVGAIDEGMSSPLGERTMYPGSTTLLLRATVC

SEQ ID NO: 298323 - protein, 72 aa, Zea mays
  unsure (1)..(72): unsure at all Xaa locations
  Clone ID: MRT4577_35143C.1.pep
MHPYYNTLTCSLHTYLNPKTYIQXISQIIFTTFHVPTMYVAIQACLSLYAIGLTTIIVLDSGDSVSHTVPIY

SEQ ID NO: 298324 - protein, 66 aa, Zea mays
  Clone ID: MRT4577_35144C.1.pep
HLLQPVRTLDGGALDIICKQRNPHLSVKAEDFYYQPRRDSRSHEYALKSLTSEVSLEPEPTGGFTP

SEQ ID NO: 298325 - protein, 66 aa, Zea mays
  Clone ID: MRT4577_35145C.1.pep
SVLQRAVCRPVFLDPRPGEEDDADDEGVGAGAVVGGASAGGAGAVGGGGLPPRRSGPNAGVLLEDL

SEQ ID NO: 298326 - protein, 180 aa, Zea mays
  unsure (1)..(180): unsure at all Xaa locations
  Clone ID: MRT4577_35146C.1.pep
PAGPARIAAATLRALCPRPGYPQSLVEMVGTNLFRAMPPRVPGAALDSVDEEAPAMALACAIEQQTSAHGRAVVLRLLSHVRRPSHREASESRRTNIGREISVFGIQFTSLSVFGTRLACLHSIDTEAREFFVSSVFLLLYSFYVFFYFLSPPGPSAFPTFFCFXKVEAKTKKKKKKFAA

SEQ ID NO: 298327 - protein, 70 aa, Zea mays
  Clone ID: MRT4577_35147C.1.pep
CVIRSLGRGIPIPLIMYDAKMESIALEDAHPRMINLAEGQHCTHKGGELVVKRSPPLAMGSKVPLRSRPW

SEQ ID NO: 298328 - protein, 52 aa, Zea mays
  Clone ID: MRT4577_35148C.1.pep
MATAAAAGLGGCVIVPGADGGFGADSAAGARYQGLDVEQLVERYWPAGGYQV

SEQ ID NO: 298329 - protein, 63 aa, Zea mays
  Clone ID: MRT4577_35149C.1.pep
GHMGMVIAQISNTATATLKNDIARHLPVDRLHLLRLGARLPPLPGAGDHCAIEPRHPPGSAPA

SEQ ID NO: 298330 - protein, 226 aa, Zea mays
  unsure (1)..(226): unsure at all Xaa locations
  Clone ID: MRT4577_3514C.1.pep
MEEKTTKNLASGPSCFVTSWQAYDINGYTIYTKSKDMKSVAQNSGVRIDAFDIQGQKTTYFGFIEKIXELDYGPSMKIPXLFKCQWVQHPVGVIMNNYGXLVLTLVYLKKVEYKDDPXVLAECVAQVFYVLNPADEKMHVVISLSTTTSGRAVVALRSFSRPVSGRGPATTSSHSFSSISVVRSSLLLFFSLHSSSQRHGSPASYRRVQWCARPGPASGFLTIHSL

SEQ ID NO: 298331 - protein, 172 aa, Zea mays
  unsure (1)..(172): unsure at all Xaa locations
  Clone ID: MRT4577_35150C.1.pep
SCVSPRLRPRGGGQHTQNPTAHGGEHQLTFKILXRPSRXYCLTVRXDTGRVAPANPRDQHXSXYTDMRSSTXVKDEVGCPELAVFNKANELGIKHFLGQSHPMELVRFNPEYYCESPLWTWSFDMSKGLRCIRMVNNIRLNFDAFHSDKGHGGVHDSSTVVLWEWSKGYNQS

SEQ ID NO: 298332 - protein, 179 aa, Zea mays
  Clone ID: MRT4577_35151C.1.pep
MPRPPPPGRGTPGARRPIRDFFATWLATLRSPLLPLLRRALSTSSSSGSWDDPLSSAAAAVEAHFQAHWSALDAAARQDPARVIAAGDWRSPLELPFLWLGDVHPSLLTSLLRTLSPSPRLLAAVDRVDRRIRTVPAVDRLRQAQEAFVAAEATGAADVEAFLAELKGVALETNRLRRG

SEQ ID NO: 298333 - protein, 149 aa, Zea mays
  unsure (1)..(149): unsure at all Xaa locations
  Clone ID: MRT4577_35152C.1.pep
MMVSHKIAKNGPADEIELSVAQALFDLANNVADLKKELKPLQISSAKEVETGNGKKAIVIFVPVPQLKAFHKIQQRLTRELEKKFSDRHVVFVAQRRSMAKPIRTSRAKQMRLRSRTLTSVHEKLLEDLVXPTEITGKRTRVQTEQKRI

SEQ ID NO: 298334 - protein, 85 aa, Zea mays
  Clone ID: MRT4577_35153C.1.pep
RPGQGCWRNAGSGCFLDFVADGLLVGRPVRGLTCPRFRFFSLRVPFGRARKGTMLCWCSDADANSRLLYVCVFVPFWDVLKTHDV

SEQ ID NO: 298335 - protein, 147 aa, Zea mays
  Clone ID: MRT4577_35154C.1.pep
SVCDFIIHKFYRVSPYDSLLSIRAQYHLLQMEGHPIKPSSLGWTTCGTASSTEFYHLCHGRGICLNLGQLWRSLSPGKIWRSPHQSCVVSCHGSRQTKYFKPSIPCSSSTVAFSKAGSHLPDLCFSFSSIFSEATVPSKKASLELVP

SEQ ID NO: 298336 - protein, 131 aa, Zea mays
  Clone ID: MRT4577_35155C.1.pep
FFLFLFLFLSFIFLFSFFFFGEQQTPGPGFYPGPLNPGGGGITIYRIGQLNSTGGGGAPNKKKRMRGFSKLTGREGSKGNPRATDPGSQTIGKIYPGENPNTIHMGPHFTLTTIPWERENNYVKPGGINTS

SEQ ID NO: 298337 - protein, 103 aa, Zea mays
  unsure (1)..(103): unsure at all Xaa locations
  Clone ID: MRT4577_35156C.1.pep
VVLLXDHVSVKVRSTCHHRFSINLSVCLLKLLNRVFGVAKITLFILYTCCQLGSHGKFIYYHTIRVIELVPKPGVVCHSNSFVPAALTFGTAPRQSSSVIKFK

SEQ ID NO: 298338 - protein, 116 aa, Zea mays
  unsure (1)..(116): unsure at all Xaa locations
  Clone ID: MRT4577_35157C.1.pep
AQXAFLLPQVVMNALSPGGVRAGALTPWFYIGSTVVRAMPHVYDVIRAQGYVPSSRPSIVFASPRYDRYGVAWDVIVPCTAIVLAALVFLQQLVGSAAPLFRSRRRLGEYEMVSPL

SEQ ID NO: 298339 - protein, 60 aa, Zea mays
  Clone ID: MRT4577_35158C.1.pep
IQPPSGPTDPKSVIALGPLRGIKIVILRPEPAHQLLYEQVSQLGYDQPHASFAFSETSVS

SEQ ID NO: 298340 - protein, 38 aa, Zea mays
  Clone ID: MRT4577_35159C.1.pep
LVTMHNDDSLRYLMTVKTKVQWFRPLNHVLNVTGQPPL

SEQ ID NO: 298341 - protein, 95 aa, Zea mays
  Clone ID: MRT4577_3515C.1.pep
ELPAHELAVSAAPRIPAPCSSGSSSARRPFSPRSPAPCNQQELDLVLQHWRLHPHRRRSSGGKFVEGKAPVLKQETRRLVAHGPLARVGMDRCPN

SEQ ID NO: 298342 - protein, 72 aa, Zea mays
  Clone ID: MRT4577_35160C.1.pep
YPVIVSLSRKLITQQIVSTRLALNRTTAELTDDQIALIYLDLRTTCRITPRGTVRPATYIYVSQFLSSMMKR

SEQ ID NO: 298343 - protein, 100 aa, Zea mays
  Clone ID: MRT4577_35161C.1.pep
RFFPKKKNPRRPKKSTQGWGPKPGASQKTRRPPPPFFLENFPPKPRGAPPPNHMGGKKYIYSPGINLKGNTSPKFLKDLVSPNPCLGKNPPPFFYIPRRP

SEQ ID NO: 298344 - protein, 372 aa, Zea mays
  unsure (1)..(372): unsure at all Xaa locations
  Clone ID: MRT4577_35162C.1.pep
MARRSTPLLRRLLAPSPSLSTPLADAVSRRTVTYMPRPGDGAPRGVTLIPGDGIGPLVTGAVRQVMEAMHAPVYFETYEVHGDMPTVPAEVIESIRRNKVCLKGGLATPVGGGVSSLNVQLRKELDLYAALVNCFNLPGLPTRHDNVDIVVIRENSEGEYSGLEHEVVPGVVESLKVITKFCSERIAKYAFEYAYLNNRKKVTAVHKANIMKLAVSXIGLETCRVFNTTGIXYNEIIXNKSCQAACSNPEQFDVMVTPNLYGNLVANVAAGIAGGTGVMPGGNVGQDHAIFEQGASAGNVGNEKIVEKKRANPVALLLSSAMMLRHLQFPSFADRLETAVKRVIAEGKYRTKDLGGTSTTQEVIDAVIAKLG

SEQ ID NO: 298345 - protein, 169 aa, Zea mays
  unsure (1)..(169): unsure at all Xaa locations
  Clone ID: MRT4577_35163C.1.pep
MARRSTPLLRRLLAPSPSPSPSPSTPLAGAVSRRTVTYMPRPGDGAPRGVTLIPGDGIGPLVTGAVRQVMEAMHAPVYFETYEVRGDMPTVPAEVIESIRRNKVCLKGGLATPVGGGVSSLNVQLRKELDXYAALVNCFNLPGXPTIYDNVDIIVIXXENTEGEYSWLE

SEQ ID NO: 298346 - protein, 83 aa, Zea mays
  Clone ID: MRT4577_35164C.1.pep
TTRLMDSRNRSYFPAQRTLSLNMATEKTRLTVLSCMDSTTTPGRVSPFLYMIHPHFTNKHLTNGLLVFLFTLPVGSSRGPRLS

SEQ ID NO: 298347 - protein, 294 aa, Zea mays
  unsure (1)..(294): unsure at all Xaa locations
  Clone ID: MRT4577_35165C.1.pep
MARRSAPLLRRVLSPAPPSPLAGAVSRRTVTYMPRPGDGAPRTVTLIPGDGIGPLVTGAVRQVMEAMHAPVCFETYEVHGDMPSVPPEVIESIRRNKVCLKGGLATPVGGGVSSLNLQLRKELDPYASLVNCFNLPGLPTRHDNVDIAVIRENTEGEYSGLEHEVVPGVVESLKVMTKFCSERIAKYAFEYAYLNXRKKVTAVHKANIMKLADGLFLESCREVAKKYPGIKYNEIIVDNCCMQLVAKPEQFDVMVTPNLYGNLVANVAAGIAGGTGVMPGGPSYRGSDWDWPSP

SEQ ID NO: 298348 - protein, 91 aa, Zea mays
  unsure (1)..(91): unsure at all Xaa locations
  Clone ID: MRT4577_35166C.1.pep
YTGGGGGXXGQGSGMAFSKLTGGGPTTPAGLIAAAVAHAFALLVAVSVGANIFGGHVNPAVTFGAFVGGNITLVRGLLFWXAHLLGSTGAC

SEQ ID NO: 298349 - protein, 399 aa, Zea mays
  Clone ID: MRT4577_35167C.1.pep
MVGCSRGSLPTWMTAAAARVDLSGGVTPSHQGSPSPPHSSSGPAPAAGADQQLGLFERALSAAGAAFVSAIIVNPLDVAKTRLQAQAAGVLYHQPAQMAALGPDAILSEFRCSPSCTRGLLLGSEPVCPPDCFQYKGTLDVFLKVVRQEGFSRLWRGTNAGLALAVPTVGIYLPCYDIFRNGIEDFTRSNAPGLTPYAPLVAGSVARSLACIACSPIELARTRMQAYKEFRPGLKPPGMWKTLVGVLPPLAGSSQNVQNYRVLWTGVGAQLARDVPFSAICWSTLEPIRRQLLGLLGEDGNAASVLGANFAAGFVAGSLAAGATCPLDVAKTRRQIEKDTEKAMRMTTRQTLTEIWRSGGLKGLFTGVGPRVARAGPSVGIVVSFYEVVKYAIHQRHTS

SEQ ID NO: 298350 - protein, 373 aa, Zea mays
  Clone ID: MRT4577_35168C.1.pep
MARRSTPLLRRLLAPSPSLPTPLADAVSRRTVTYMPRPGDGAPRGVTLIPGDGIGPLVTGAVRQVMEAMHAPVYFETYEVHGDMPTVPAEVIESIRRNKVCLKGGLATPVGGGVSSLNVQLRKELDLYAALVNCFNLPGLPTRHDNVDIVVIRENSEGEYSGLEHEVVPGVVESLEVITKFCSERIAKYAFEYAYLNNRKKVTAVHKANIMKLADGLFLESCREVAKKYPGIQYNEIIVDNCCMQLVARPEQFDVMVTPNLYGNLVANVAAGIAGGTGVMPGGNVGQDHAIFEQGASAGNVGNEKIVEKKRANPVALLLSSAMMLRHLQFPSFADRLETAVKRVIAEGKYRTKDLGGTSTTQEVIDAVIAKLG

SEQ ID NO: 298351 - protein, 111 aa, Zea mays
  Clone ID: MRT4577_35169C.1.pep
CFLGEDGNAASVLGANFAAGFVAGSLAAGATCPLDVAKTRRQIEVCVLFGTLYTSRSIIFHLLPVPYASILYIYCHFLSLFLFFLIYCHFFFVFLFFVPSCLNFRRILKRQ

SEQ ID NO: 298352 - protein, 98 aa, Zea mays
  unsure (1)..(98): unsure at all Xaa locations
  Clone ID: MRT4577_3516C.1.pep
DTWASGDKPIKDLKSKRDADEDKPTGLLYRRETTVCLWLTCVAGGAINSEPLLPKILELVRLGYTCWVVYRYPVFNESRKELAGDIDTLXKKKIARTE

SEQ ID NO: 298353 - protein, 197 aa, Zea mays
  Clone ID: MRT4577_35170C.1.pep
VITKFCSERIAKYAFEYAYLNNRKKVTAVHKANIMKLADGLFLESCREVAKKYPGIQYNEIIVDNCCMQLVAKPEQFDVMVTPNLYGNLVANVAAGIAGGTGVMPGGNVGQDHAIFEQGASAGNVGNEKIVEKKRANPVALLLSSAMMLRHLQFPSFADRLETAVKRVIAEGKYRTKDLGGTSTTQEVTDAVIAKLG

SEQ ID NO: 298354 - protein, 241 aa, Zea mays
  unsure (1)..(241): unsure at all Xaa locations
  Clone ID: MRT4577_35171C.1.pep
MVGCSRGSLPTWMTAAAARVDLSGGVTPSHQGPSSSSPSSGPAPAAGADQELGMYERAFSAAGAAFVSAIIVNPLDVAKTRLQAQAAGVLYHQPAQMAALGPDAHFQILSEFRCSPSCTRGLVLGSEPVCPPDCFQYKGTLDVFLKVVRQEGFVRLWRGTNAGLALAVPXLVGIYLPCYDIFRNXIEDFPRSNAPGLTPYAPLVAGSVARSLACIACSPIELARTRMQAYKEFRPGRKPPG

SEQ ID NO: 298355 - protein, 76 aa, Zea mays
  Clone ID: MRT4577_35172C.1.pep
SEAGPGSCSCARAHSEHPSSPPPRPKSTSQLMVARTNLWRHPCTGSRGPFPRCREGGLSALTGYFASRATVDTEGA

SEQ ID NO: 298356 - protein, 236 aa, Zea mays
  unsure (1)..(236): unsure at all Xaa locations
  Clone ID: MRT4577_35173C.1.pep
GRAAXPGVWLLPSSVSLLSTTPLVPAPSSLIVNPMTALPSDAPPSLRPARPPPTSPPHRRHLAPCSHGRTPSTASSSWGSPDVASWTGSPAARPHPFPKLGSVWKLAIGCRTATSPFQSPTPPWSSWCLLLLSLGRRDAAPYSSSTLWCGVPPSATSSRTSSRAPSSPFPCSDVALFFSHCVRLAQPADPPCSNCRTSLAPAPTIPSHGCAVVLLKLRHRVMVFDCAXLSRRTDCR

SEQ ID NO: 298357 - protein, 59 aa, Zea mays
  Clone ID: MRT4577_35174C.1.pep
DPALIRGKRAPTPLRFLFKGATSHPGNKGSTTPDWTHTTTTNVACKSTQRKLLTVLANY

SEQ ID NO: 298358 - protein, 141 aa, Zea mays
  Clone ID: MRT4577_35175C.1.pep
MEEAASKVDHAPKGKEDAAPASVVDVDAVELEVADILPNMKRLMRSRDRRDRRRERRERRERRRERKQASAAAEAAAAVPSADSPLAYPQSGRDDAPTKDAADRPRDQASSGQHRAKRIVWRLKFPPGSKVIKGKLSSFLS

SEQ ID NO: 298359 - protein, 84 aa, Zea mays
  unsure (1)..(84): unsure at all Xaa locations
  Clone ID: MRT4577_35176C.1.pep
GVLPVLMVFQTENNHPSPTPPARIKEFFHKTKQTGALIXTMTALGAEVQXKTCNILSTQDHAAGVIDRYSEKENSWKGETLDEY

SEQ ID NO: 298360 - protein, 92 aa, Zea mays
  Clone ID: MRT4577_35177C.1.pep
MSTAHALHTLPPLPLQNGTAGDDDRDEDVDEDEVGDGEAMEEDDNDHEDDPPVKYQRLSCNVARMVSMDAAVDIAVAERIVALGTHRGTLHI

SEQ ID NO: 298361 - protein, 86 aa, Zea mays
  unsure (1)..(86): unsure at all Xaa locations
  Clone ID: MRT4577_35178C.1.pep
ACLFDFDLNNEAAVIKKKKKKKKKKKKKKKKKKKKKKKKKKKKKKKXXXXKNKGKMXRDRTHLGGFKFALRGPNLNLQRGIIKNRA

SEQ ID NO: 298362 - protein, 136 aa, Zea mays
  Clone ID: MRT4577_35179C.1.pep
PKEIEREPARHGGPRKVLGLRRPVGRPLPQCPGPAEPPTTHAAREGKETDRSDRAAGVPGGRFGDRRISTSHGAALAVAGRYVLVTVPSRRAERCAKPMQVAARILLLLCQANAKCGRRPPGCVARQHVLVRRRAL

SEQ ID NO: 298363 - protein, 295 aa, Zea mays
  Clone ID: MRT4577_3517C.1.pep
MGVFVHLRSLRISFAQFFGLQFGKLCGRGRMGKKTFRVEDYKLVHCAHGSVLQHLTIAEPYKEEHLDELRKENQNRTEDWIMREHKHRFSEWLMDKNIPFGDSLEEKTMKNLASGPSCFVTSWQAYDINGYTFYTKSKDMKSVAQNSGVRIDAFDLHGQKTTYFGFIEEIWELDYGPSMKIPLYKCQWVQHPVGVIVDNYGLTLVDLKKVGYKDDPWVLAECVAQVFYVLDPADEKMHVVISGKQKFVGVENVGDQDEEYNKYEEMFVFNGTERIKRVEKKIDKNLKPYMRKNGS

SEQ ID NO: 298364 - protein, 360 aa, Zea mays
  Clone ID: MRT4577_35180C.1.pep
RVDHASVEALFGTAAANRKPKPSDKESGESSASLGRSNTPEQIFLLEPRKSHNISIILKSLTVGRDEIIDALRDGQTELGTDVLEKLSRLHISKEEESTILRFSGDPDRLAPTEAFLLRLLLDVPNPIARVNALLFKVNYGAEVAQLKHSLRTLELASQELRTKGLFFKLLEAVLKAGNRMNAGTARGNAQAFNLTALRKLSDVKSTDGSTTLLHFVVEEVVRSEGKRLAINRNYSIRRSGSLARSGHEGGSSAAGFASQGPSREERQSEYMNLGLPIVGGLSTEFANVKRAALVDYDAVVSECAILDGRLNEIKRLLETCSDDGFARGLRGFVRAAEQELKALRGEQERVLELVQKTTE

SEQ ID NO: 298365 - protein, 93 aa, Zea mays
  unsure (1)..(93): unsure at all Xaa locations
  Clone ID: MRT4577_35181C.1.pep
GGILPPRGGGGKQQKKFFSFSLLFGGGPKILKKKKGGGRRIKVWEPACLTKGLILAWAKKPNGGVVHLPNQTASFFLRATPXLGVNYYLIPPL

SEQ ID NO: 298366 - protein, 199 aa, Zea mays
  unsure (1)..(199): unsure at all Xaa locations
  Clone ID: MRT4577_35182C.1.pep
QDDQGDFSSVSMDTAVAIRTLEATYKQSADSVAVESMIAKLTEKEGPCLKGKGRASDAARIVVLTWRSLLIMSRDWKYFWIRLVLYMLIAVSIGTIFTDIGHSLSSVMVRISAIFAFVSFVILLSASGVPAQIDEVKIYSHEEANRHSGTMVFLLGNLLSSIPFLFLVSILSXLDFYLLIGLKNEFSCLMYFVTTIYVC

SEQ ID NO: 298367 - protein, 176 aa, Zea mays
  unsure (1)..(176): unsure at all Xaa locations
  Clone ID: MRT4577_35183C.1.pep
MVHWFAWWRLQRNDGTRHNRNNGGGRGSYSSSMSHKQGGGGRAHAAQTTPCPFPYPFPAGDNNSSSDHGWLNARARWYGAPNGAGPDDXGGSCGCNVMNMPALWEKTLCENEPIFKDMQRCXCCYQMPSMAHPVSSSEVETVMITVMNXYPVARYQLNLRRTAFRAMAKDKHNYEL

SEQ ID NO: 298368 - protein, 85 aa, Zea mays
  Clone ID: MRT4577_35184C.1.pep
ATSGACEGPAAGRMSFNTPIGLRPCSQVQISNGSGHREEESNETPDHKDQGATSLHKHWQNDNRYHCLSNNVNGAFGREPKAPYY

SEQ ID NO: 298369 - protein, 185 aa, Zea mays
  Clone ID: MRT4577_35185C.1.pep
LVFSRSGRLKEAEEFIKQMPMHPDAIGWGTLLSACRLRGDMEIGQWAGENLLEIDPQNPASYVLLCSMHATKGNWNQVAQLRRGMRDRQVKKEPGCSWIKYKNKVHIFSADDQSHPFSKGIYEKLEWLNSKMLEEGYKPDVSSVLHDVADTDKVHMVSHHSEKLAIAFGLMFVPHEMPIRIVKNL

SEQ ID NO: 298370 - protein, 47 aa, Zea mays
  Clone ID: MRT4577_35186C.1.pep
LICNNSYHSASYFLHSGEESLPFNQLTVKNSPANLQQRTTTTIQPAS

SEQ ID NO: 298371 - protein, 78 aa, Zea mays
  Clone ID: MRT4577_35187C.1.pep
RTSSKHYLRNRFSIHALLLHATKCYFLRAGSSPSPRYPSCGSDQFHLGYTHACALAVSSHGRGFRNFHIHGAPIPPQA

SEQ ID NO: 298372 - protein, 70 aa, Zea mays
  Clone ID: MRT4577_35188C.1.pep
QGSVWLVRAIYVPLTRFNSGCVGFSRAPCFVRDLGPGRKPERRLLSVVVVVDGGQGRERALPSSLVDDIL

SEQ ID NO: 298373 - protein, 157 aa, Zea mays
  unsure (1)..(157): unsure at all Xaa locations
  Clone ID: MRT4577_35189C.1.pep
CHAQAHKKSRAASTXTMASTVTAVTPMKGERSGEGRLTMRPTEGTPKGGECRAPWGGPDRVGRGGPFSGAPPSYLTGEFPGDCGWDTGGLSAHPGTFARNRELXVIPSRWAVPGALVCRLPALLSRCGVXLGEAGWCQAGCPGLRRGSAGLPRAAPA

SEQ ID NO: 298374 - protein, 62 aa, Zea mays
  unsure (1)..(62): unsure at all Xaa locations
  Clone ID: MRT4577_3518C.1.pep
PKDNPKNPVVFWGWRRAHFXEPEFFEMGGIFFENPPRFXRFLKPXNWKGGPLRKGFITPPFF

SEQ ID NO: 298375 - protein, 62 aa, Zea mays
  unsure (1)..(62): unsure at all Xaa locations
  Clone ID: MRT4577_35190C.1.pep
MISSLSYLARFVAHSFFVKLHLFHGVSSDIIXDGDQVFTSYSWQRIFXMTGTDLRVTSSYHP

SEQ ID NO: 298376 - protein, 86 aa, Zea mays
  unsure (1)..(86): unsure at all Xaa locations
  Clone ID: MRT4577_35191C.1.pep
PKITHLLMPSTRPVFPRPNPESLPVPSPGXSKPPVSSPPGPPXPLPDPPPPQXSFPPLPPAPVXAPSSPPRGSPPTPPXPLPPPGS

SEQ ID NO: 298377 - protein, 146 aa, Zea mays
  unsure (1)..(146): unsure at all Xaa locations
  Clone ID: MRT4577_35192C.1.pep
MKELIEDYNIXQKGSTLHLVLRLRGGMQIFENTLTGTTXTLEAEFSDTXDCEKPRIHHNEGISPDHHFLIFADKQMEDGRTLSHYNIQKESTLHLALRLRCSMQIFVNTLTGKTITLEVESSDTIDYVNAIIHDKEGIPPDQHNLS

SEQ ID NO: 298378 - protein, 187 aa, Zea mays
  Clone ID: MRT4577_35193C.1.pep
ERQQTQTYLQKSEKSVLVVATSAVDVGVDFKIHVLICESSDSATVIQRLGRLGRHGGFQQYQAYVLIPSQTQWVIASLKEELEEDSSIDRLELSTVIETAFNAPQEFKQYQKIWGELQAQGMLYQMVYGGSRSESKDNLAVTQDLRDRMIESLEKIYQKQINGFGRWWGLSNDAVGKATQEELLRFR

SEQ ID NO: 298379 - protein, 115 aa, Zea mays
  unsure (1)..(115): unsure at all Xaa locations
  Clone ID: MRT4577_35194C.1.pep
ARNQLETYVYNMKNTLGDRDKLVDKLEAEDKEKVEEALKDALECLDDNQSAEKDDYQEKLMDVEAGCNHIVSTVYHWSNSAPGLDTDSGVDDDHXAVXMVVDGTGHVNCHMPNHN

SEQ ID NO: 298380 - protein, 88 aa, Zea mays
  Clone ID: MRT4577_35195C.1.pep
PTRPQAYPTNSKRLSPDPLWSPRRICLLRGKGREGAWARAGAKRHRKVLRDNIHGITKPVIRRLARMGGVKRIFGLIYEESRGVLKIF

SEQ ID NO: 298381 - protein, 78 aa, Zea mays
  Clone ID: MRT4577_35196C.1.pep
LVCPLAVPRVFGSLLLGRDGPALVQVGLLVGAASFEMRWWWGPASLCFCACPRAVVRLWVGFEINAGGTAPSQPYFPA

SEQ ID NO: 298382 - protein, 113 aa, Zea mays
  Clone ID: MRT4577_35197C.1.pep
PNLQPVPRLQQFWRKPTLSGRLWPVIRVAMIIHGVIYAPLIAEGQGVFFCILSYSKMKCLNVNPPLFFMGIRFCGSCFGPFLVQISEPPRRSLGSWKCQSISPLGKGLFIIYL

SEQ ID NO: 298383 - protein, 75 aa, Zea mays
  Clone ID: MRT4577_35198C.1.pep
AKQSRTPPTREKGPRTIRTEARELRPSGPPRGETEGSTKPNQIRDGPGRASKCMDPATQDTLVAREAKASPIERS

SEQ ID NO: 298384 - protein, 108 aa, Zea mays
  Clone ID: MRT4577_35199C.1.pep
RQSWKDALPRGSWCTKLPPTRCFKVTSSINWGNEVDSLFTPYREITISEHGAWCIRPSQFFLNAHDYVSCASSRHSGQVRSHLNKDNQKLPHCVEHHDDGTKAFSGPT

SEQ ID NO: 298385 - protein, 65 aa, Zea mays
  Clone ID: MRT4577_3519C.1.pep
PRKKRVTKSKQPTSSGLVDSHGMVAIACSTCFFTYGLDQSVLGDDDSRMNQIFGINPCWVTMTHG

SEQ ID NO: 298386 - protein, 94 aa, Zea mays
  unsure (1)..(94): unsure at all Xaa locations
  Clone ID: MRT4577_351C.1.pep
FGCNNMVQQELPGGGLLVHQSFCTAEDAVAASPKSVFRCFDAEQVQSAPPPIQWFGLPPYLVFWQKEPDTMXEKAGVLNESPRLLGPFCFSPVY

SEQ ID NO: 298387 - protein, 139 aa, Zea mays
  Clone ID: MRT4577_35200C.1.pep
RPGPIKTESLSLFSRTQARPSLTLLLAVVRRRRSSLFLAGACTPPSERSPTTTSGIPAHARAAAPRQPCPRRSPSSVHPKVEDNPKYLFSKSCFEFIVSYCCNIMMMRFGDSYMIVGILFYTCSQNRTPRQCFNMCMIL

SEQ ID NO: 298388 - protein, 74 aa, Zea mays
  Clone ID: MRT4577_35201C.1.pep
GREPVSLQHTLGDKMEWSLCNYSQEQFPPGHWNLELRQKLHRKISGPNTNSLDQGQKKKKKKKKKKYSALLPLL

SEQ ID NO: 298389 - protein, 62 aa, Zea mays
  Clone ID: MRT4577_35202C.1.pep
FFFFFFFFFFFFFFFFFFFFFFFWPPTPGHGYIFGFSTLPFFYPKFKPTPPLFLSLGREKNW

SEQ ID NO: 298390 - protein, 284 aa, Zea mays
  Clone ID: MRT4577_35203C.1.pep
MARLCCFGAGCSDFTGQGSIASGKGKGCQGQVKICYGYNLVRGMTNHPMEDYHFAELVDVKGNELGLFAIYDGHLGDTVPMYLQKNLFTNILNEEEFCTHTDRAIIKAYEKTDQAILSHTPDLGQGGSTAVTAILVNGRKLWVANVGDSRAVLLKGGEPIQMSIDHDPNVERSVIENRGGFVSNMPGDVPRVCGQLAVSRAFGDRNLKSLLRSEPDIKVEDIDHTAELLVLASDGLWKVMNNQEVVDLAKRYKDPYAAAKQLTVEAQKRDSKDDISCIVVRFKA

SEQ ID NO: 298391 - protein, 61 aa, Zea mays
  Clone ID: MRT4577_35204C.1.pep
HHAYDTSADGLNTVLTLELTLRQFISQPLERLLASTVMINDNHSAADHRNHDTRRTVHARR

SEQ ID NO: 298392 - protein, 67 aa, Zea mays
  unsure (1)..(67): unsure at all Xaa locations
  Clone ID: MRT4577_35205C.1.pep
LLSAFVMSEIRTVYVTDCXRVSTSAXSKAGICLRWSACALDSEVQSALSNPTLQARSTHEVIGLLNV

SEQ ID NO: 298393 - protein, 43 aa, Zea mays
  unsure (1)..(43): unsure at all Xaa locations
  Clone ID: MRT4577_35206C.1.pep
XWGKENRIGYIFNHWANWFRGIGTQTGAKGLKVHGGVTWPSVS

SEQ ID NO: 298394 - protein, 134 aa, Zea mays
  unsure (1)..(134): unsure at all Xaa locations
  Clone ID: MRT4577_35207C.1.pep
PGALTRELKTLLEKFTKPPXPTRRGLQKYWALTTPPLHTHLHRPTPSTPNAVATTPVISPAHNKDKGGLGLEVGARQRPQIGHSTNLTDSITPPNTASTPRGAVRTPPPKSQHSDFSTPTRQKIAPWTFPSSSP

SEQ ID NO: 298395 - protein, 45 aa, Zea mays
  Clone ID: MRT4577_35208C.1.pep
HPCETASTKCRVTRRGCYALNVLLPHPIQAVALYLVLVLNNVLSF

SEQ ID NO: 298396 - protein, 39 aa, Zea mays
  Clone ID: MRT4577_35209C.1.pep
PRRSPQTLRVLAERTDDERGDERGDDHNKTTQALATGAE

SEQ ID NO: 298397 - protein, 97 aa, Zea mays
  Clone ID: MRT4577_3520C.1.pep
FLLKYSPPGKRTFYLHTIPQGQQFFKGQSLFREHPQGSLLRGKNKLSGKATPLLPNGDIQTLNIGQKIRPFHGEPILKPRLIRSWWRAFQPQSKSCS

SEQ ID NO: 298398 - protein, 118 aa, Zea mays
  Clone ID: MRT4577_35210C.1.pep
GRRALSSNKGGSQQQQSALRIRQLLVYCLFGVLAGLVGGLLGMGGGFIMGPLFLELGIPPQVSSATATFTMMFSSSMSVVEYYLLHRFPVPYAAYFTGVAFVGAITGQHCVRQLIAWL

SEQ ID NO: 298399 - protein, 170 aa, Zea mays
  Clone ID: MRT4577_35211C.1.pep
MPMLIPDDVRAKAEIYTGDAAGQEKTRLMLAETELPSGLLPLKDIIECGYVEETGFVWLKQKKRVDHYFAKAGRHVSYATEVCAIAEKGRLKKISGVKAKEMLIWVNLHEICVDDPPTGKLHCKAIGGLSRSFPVEAFEATDALPVPTGRLKKKTEKESADQRREEEGGG

SEQ ID NO: 298400 - protein, 279 aa, Zea mays
  unsure (1)..(279): unsure at all Xaa locations
  Clone ID: MRT4577_35212C.1.pep
PRASAVLCSLENRMISVERMLQYTTIPSEPPLTISERQPNRQWPTKGEIEFLNLHVRYAPQLPFVLKGLTCTLLGGKKTGIVGRTGGGKSTLIQALFRIVDPCIGQVFIDGTDICTIGLHDLRTRLSIIPQDPVMFEGTLRTNIDPLGEYSDEKIWEALDSCHLGDEVRKNELKLDSTVTERGKNWSTGQRQLVCLGRVILKRRKILVLDEATSSVDPITDSLIQKTLKKXLKVLLLDNGEIAEHDAPAKLLEDSSSLFSKLVSEYTMGSDKWRMQESS

SEQ ID NO: 298401 - protein, 163 aa, Zea mays
  unsure (1)..(163): unsure at all Xaa locations
  Clone ID: MRT4577_35213C.1.pep
FEGTLRTNIDPXGEYSDEXIWXALDSCHLGDEVRKNELKLDSTVTEKGKNWSTGQRQLVCLGRVILKRRKILVLDEATSSVDPITDSLIQKTLKQQFLKCTMITIAHRITSVLDSDKVLLLDNGEIAEHDAPAKLLEDSSSLFSKLVSEYTMGSDKWRMQESS

SEQ ID NO: 298402 - protein, 320 aa, Zea mays
  Clone ID: MRT4577_35214C.1.pep
FVQYLMDVVGPELSEPANRISSFQLAGLLETAIRASNAQYDDCYILDRIKVKMMDHGDGDRGWDVFSLEYDARVPLDTVFTASVMKMYLKVFNFLWKLKRVDHSLTGVWKTMKPNCIVSSPFYKEGTSIRAQFVSVLRKCQVLFNEMNHFVTNFQYYIMFEVLEVSWARFSDEMDAAKDLDDLLLAHDKYLNSILEKALLGEHSQGLLRNLFELFDIILQFRSHADRWFERIYELQLRGKGKSKSKDTGSWFDGGRKAMIQLAGELFWKMGEDLDSIAKDYTASLDAFITQLPMQQHVDLKFLLFRLDFTEYYSRVSSNK

SEQ ID NO: 298403 - protein, 59 aa, Zea mays
  Clone ID: MRT4577_35215C.1.pep
ETPSRPSIAYTNSSRATHFDIVCKKLECTYEHNPNNDVNLTHLHLSLLKLSQLTNRPNR

SEQ ID NO: 298404 - protein, 93 aa, Zea mays
  Clone ID: MRT4577_35216C.1.pep
MATLPPRDPPGKPDLTGPNCPQGKKRRPPWPPGAPRRPRGGRQPPHPSRGSTLGPPRARTRGPPSTGAPKRAKRPCPRPRPPGPPPPWPPEPP

SEQ ID NO: 298405 - protein, 164 aa, Zea mays
  unsure (1)..(164): unsure at all Xaa locations
  Clone ID: MRT4577_35217C.1.pep
GGVRSALLLGWFSFWAAPAFPFLLPGGLLCXVVVGFPFLSGGGSAPVLAXRALFPLLXGXXLVLVGPLFFFFFSFFFLFFGAARXRAPFPPXFVVXSFXWGXGPLSPXXXAVWALGLGXXPLWSPVGPVXVGAPFPRSGXRFXRLFPRASFCVPPGLPPVXVGS

SEQ ID NO: 298406 - protein, 175 aa, Zea mays
  unsure (1)..(175): unsure at all Xaa locations
  Clone ID: MRT4577_35218C.1.pep
KQYNENRNANKGDVEPKNNAKNVPSTNNPSAERLPNKESSNNSAVPRQDQTSDGDSGYSRDTRSPKRDTTVSAPSDGSPSSDTLNSKASGWSSSRFHDCTDRQLDDTPAPCSIADIESVLQALQRARISLSAKLSKPVPPSQVTLALPAPXDEHREYDDDDLPTDDGSYGDEKLS

SEQ ID NO: 298407 - protein, 191 aa, Zea mays
  unsure (1)..(191): unsure at all Xaa locations
  Clone ID: MRT4577_35219C.1.pep
NKKKKKKKILPQRGNPPPLKGPYPPKKIERGGFVKTQKTKGYLKGFQGNLKKRGVGKKNNGARKGLFTQKKNRSNPPKNNFFFFFPNRDFTEKIFFVKKKGERVLVSVNPNECPQNGFKVGLTNYEVANXIGLLWAPRGLKTRVLKKKYEGNVKAPGENFSVNPFKKRRPFRALWNVALIRTTTGNRVFGA

SEQ ID NO: 298408 - protein, 171 aa, Zea mays
  Clone ID: MRT4577_3521C.1.pep
MQSLQDKASEWSGVAAADAFAIDEVNVFEALGGTPQPFVDLSTNFYTRVYEDEEEWFREIFSGSKKEDAIQNQYEFLVQRMGGPPLFSQRRGHPALIGRHRPFPVTHRAAERWLHHMQQALETTESINPDTKPKMMNFFRHTAYFLVAGNEMTRQTQSVPPCKHATSKPAE

SEQ ID NO: 298409 - protein, 85 aa, Zea mays
  Clone ID: MRT4577_35220C.1.pep
GATQHHTTTPILGFTHDAPLVFAPARSSSGGSPPNFLASHPDHQTVDLPTRVHAPLPPPPPERPWSWRSTHWRMYLKASVSQGMA

SEQ ID NO: 298410 - protein, 167 aa, Zea mays
  unsure (1)..(167): unsure at all Xaa locations
  Clone ID: MRT4577_35221C.1.pep
MSGVKKVTDVAAKAGKAIDWDGLAKMLVSDEARKEFANLRRTFEDVNXQLQTKFSQEPKPIDWEYYKKGIGSKVVDMYKEAYDSIEIPKYVDTVTPEYKPKFDALLIEMKEAEKTSLMESERIEKEIAELKEMKKKISTMTADEYFAKHPELKKKFDDEIRNDYWGY

SEQ ID NO: 298411 - protein, 52 aa, Zea mays
  Clone ID: MRT4577_35222C.1.pep
LHQYHHQIHLHHPTTTSQLSPNTPYISHLSIISIFYTNNQHFTSFLIKEHHL

SEQ ID NO: 298412 - protein, 90 aa, Zea mays
  Clone ID: MRT4577_35223C.1.pep
MPPSLHPPHLHFHKLKRRHHPAAMAKKGLAAILYKLRDEHCPPSASLPPSTPLRAPLAALRDADAELSEVSEVIFTDDDSLQGSIEHLQE

SEQ ID NO: 298413 - protein, 86 aa, Zea mays
  Clone ID: MRT4577_35224C.1.pep
AAPPGRRSAHTAPQAEIKRPPRPPRTARRAQCSAPKAIPAAPPSLATSNNLCCLPFRHTPNGPLVRKQPEWPQRQQSICIHARPQI

SEQ ID NO: 298414 - protein, 80 aa, Zea mays
  Clone ID: MRT4577_35225C.1.pep
MAAAPAAGGQGGRGMDAVLLDDIIRRLLEVRTARPGKQVQLCESEIRQLCTDCREIFLNQPNLLELEAPIKICGDIHGQY

SEQ ID NO: 298415 - protein, 53 aa, Zea mays
  Clone ID: MRT4577_35226C.1.pep
GGPDVLAGHDTLLDDEGYDYEQGATFVHTTCLLGSCKVFVIQGQCVHCSNLPM

SEQ ID NO: 298416 - protein, 94 aa, Zea mays
  Clone ID: MRT4577_35227C.1.pep
MAYYQEVDYWPEEGKSVAPAGFCPHRSGVQQHGVKEKFEEVDTVLRAGANHHHHHHGHHCGHCFLVLETHVEEDINTCTGEVHERRESFLARAN

SEQ ID NO: 298417 - protein, 133 aa, Zea mays
  Clone ID: MRT4577_35228C.1.pep
KRGVQGSLPQIQGQGAQGLFLVQNQLGCLPRMGPPRFPCCGPFPPRGSRPYPFGGSPDLVVLGVSIPGGREWFFFQTRFSSRTFLGGPRPPLYLRQGFPFCWSSKVPFPGGRPPLPVFFLPPHGKGIPRLYSP

SEQ ID NO: 298418 - protein, 89 aa, Zea mays
  Clone ID: MRT4577_35229C.1.pep
TKNWFWPPMEGFNFRHFPFYRSFWSKTGGVPLTATIQATKTPILGVKPPLIGKKTKMGWFPPSGWGGGVQLKPRLGGPFQRAVLMLPHS

SEQ ID NO: 298419 - protein, 52 aa, Zea mays
  Clone ID: MRT4577_3522C.1.pep
VYGSDQVFIATKVRVSESYYTHMSIFNRSTYLALNPRICQLATEVVRTRSGS

SEQ ID NO: 298420 - protein, 61 aa, Zea mays
  Clone ID: MRT4577_35230C.1.pep
LINRRFMTFFHSNLWTMTPWATQKTSLVQPTINLANTTPSSKNNRNWDLATILTGAIDHSL

SEQ ID NO: 298421 - protein, 76 aa, Zea mays
  unsure (1)..(76): unsure at all Xaa locations
  Clone ID: MRT4577_35231C.1.pep
YXXSTQXXXFXHKIXXXPFTLIIQXIIHFIXHHXIXXPXYXSNYTLXHFIXSSFPLXYQFNIXYFPNIINYIITSK

SEQ ID NO: 298422 - protein, 107 aa, Zea mays
  Clone ID: MRT4577_35232C.1.pep
PPTKKMGILKIHWGAKKSERHSLFLLGTKIGHLMGVYFNSSPRQNPSHVPLHKKGPKISGGLREKKCSNGELKKGPPNNGLKQGIGGGPLPLSPLKSIICPKPCFRS

SEQ ID NO: 298423 - protein, 176 aa, Zea mays
  unsure (1)..(176): unsure at all Xaa locations
  Clone ID: MRT4577_35233C.1.pep
PHVAPPPPPPPPPXSPXPRPAPPPRWFATSPRHPPPPPPPIPPPSPPPSPPRSPSSHPPRPPPPPRTPTSPSTSPTSALPTRSSPRRSPSPLPPPRAPPXPFPLPRPPLAPPLRRCSRPRRPPSRPPPRLSRRPHAPSGVPLRARARHSRRLPLSSGESWARHGRAQGVRRIAWGA

SEQ ID NO: 298424 - protein, 69 aa, Zea mays
  Clone ID: MRT4577_35234C.1.pep
PRQDPNKCIFIKNFAFPFLEQVFQKEGKKGGPQIAQFFGPNHKGFLRKLGTQAGANLIVGAFFNCDLFD

SEQ ID NO: 298425 - protein, 109 aa, Zea mays
  unsure (1)..(109): unsure at all Xaa locations
  Clone ID: MRT4577_35235C.1.pep
NPPPFLPLRANPWAKPNRAPWGAPQNPGAYFPIFPKKKKGPKTPPPXIFLXAPSQYKYSPPPVGAPQPLFLDQKPSFRAYWPPQKRNLPAPLAPPIPWLRKKGPLWPYG

SEQ ID NO: 298426 - protein, 139 aa, Zea mays
  unsure (1)..(139): unsure at all Xaa locations
  Clone ID: MRT4577_35236C.1.pep
CKAGIEELCNLYSIVDKGKLIIQNCIECSSLYLAITGEATAMRCERIRNSMRRSLFLIQNMVPSMLADQVADVHNXXLRNMKFLVDPAEEEAGKAVLKMLRHSDATEELEMHTFLLACSKLNLTSQKAMLIERRAIQKL

SEQ ID NO: 298427 - protein, 67 aa, Zea mays
  unsure (1)..(67): unsure at all Xaa locations
  Clone ID: MRT4577_35237C.1.pep
ATPIXXNKNIYLIKTLIFSNQVHQLRLQHPTKXHYITTLFFNSTPSSYFVLQSFNFFIQTSFFHPIL

SEQ ID NO: 298428 - protein, 95 aa, Zea mays
  Clone ID: MRT4577_35238C.1.pep
EEIENIVSTKKISEPWPPITSGSSPPMQWPSRRVAHRTTRERTGHNEGIFLTKPENSPPEGDRIRDLEVLLGSLNHYTRGPFTGHNSFKCFLSKM

SEQ ID NO: 298429 - protein, 124 aa, Zea mays
  unsure (1)..(124): unsure at all Xaa locations
  Clone ID: MRT4577_35239C.1.pep
MPTNILSXLVLLALFASATNTFIITQCSLAPSSIITHILPPVTSMGFQHPTVQAYRLQQAISASVLQQPIFHLQQQSLAHLTIQTIATQQQQQFLPSLNHLTIVNPAVYLQQQLLASHPLSLAN

SEQ ID NO: 298430 - protein, 77 aa, Zea mays
  Clone ID: MRT4577_3523C.1.pep
KSRRPDRPPRQKGLLYPWKMSGCFFYKKCLAVFFKINKPSKTPYRVPQFPFFFNPSLIFFLFPHFLGKKWVNSYTLW

SEQ ID NO: 298431 - protein, 98 aa, Zea mays
  Clone ID: MRT4577_35240C.1.pep
MAPPRQGGEQAEAGVRDSAPALRAPAHVMARVFSQLDCVDLLSCSLVCKQWYRDSAELREDWRMEYLDAWNQFGLSVTREPQPLCATCAIRSLRSLCP

SEQ ID NO: 298432 - protein, 200 aa, Zea mays
  unsure (1)..(200): unsure at all Xaa locations
  Clone ID: MRT4577_35241C.1.pep
GAGGGGRGRMQAHHRQSYYAVLGVQPGATAAEIRAAYHRLAMRWHPDKIASGGGGADPARAEEAKSRFQQIHEAYQVLSDDKRRALYDAGMYDPLDDDDDQEDVEGFHDFVQEMVSLMAREEPVYSLAELQSMLDGMIKDFTAPQPWPSGFYTGGGGGGGGASSXAARQTKXQEQSTASSRLHPYGFGDAPCFSRTAFSQ

SEQ ID NO: 298433 - protein, 274 aa, Zea mays
  unsure (1)..(274): unsure at all Xaa locations
  Clone ID: MRT4577_35242C.1.pep
CRYRSGIPGSTHASAKNEPEDPEDKEGSRVDKEAPAIKRKPKPTNQVEVKEEAKSNSPVSEKPDPTPAKDKASPEPEKDFVEKAKPSPHPTKDKLKGKDETDSPTVHLGLDSDSESELVIDLGEDPSGREGRKNKKDPKVPSPKQDAIGKPPPSSTSAGNQSPPETPVLTRSATQAPAAGVTVAAATTSTMSTVTVTAPATAVTGSPVKKQRPLLPKETVPAVQRVVWNASTVQQKEVTQSPSTSTITLVTSTQXAALVSSSGSASTLASAINA

SEQ ID NO: 298434 - protein, 48 aa, Zea mays
  Clone ID: MRT4577_35243C.1.pep
IKIHTDGNNLSIESSKLHLQILSITCHMYTIYDARMYRYKLSYHSQKT

SEQ ID NO: 298435 - protein, 122 aa, Zea mays
  unsure (1)..(122): unsure at all Xaa locations
  Clone ID: MRT4577_35244C.1.pep
RLLHWWWCRXRWGVVAVAARQTKQPRAEYGFVTLASLRVRGRAVLQPHGVLTMMAVMNKLIHGSSFYPSGSNGGFLARGGGGRVGTRESHCPPGSGSDLQLQLLWTAGMKEGEVGRWTTRST

SEQ ID NO: 298436 - protein, 89 aa, Zea mays
  unsure (1)..(89): unsure at all Xaa locations
  Clone ID: MRT4577_35245C.1.pep
YMPWVFIITSPTNTASDVEWEDDVQRARALSSWGSISSQSSVPPVIACAFSGAFALSFMLSVPSGLXGGWLSGWLNVIXALSWXLLXKK

SEQ ID NO: 298437 - protein, 84 aa, Zea mays
  Clone ID: MRT4577_35246C.1.pep
APDRVEPKRNEHKWIYSTNGEADLYIRREHGRPRLATKPEIAREGSGRPCAEELTLRKRRRGRWGGGSSRLGGSAPSGLAGERE

SEQ ID NO: 298438 - protein, 56 aa, Zea mays
  Clone ID: MRT4577_35247C.1.pep
KQLYFKLLHPNFFQDPGHTNPLKLLFKLVETTFFLSLTLPTVYNGGLPQTLPKDEI

SEQ ID NO: 298439 - protein, 131 aa, Zea mays
  unsure (1)..(131): unsure at all Xaa locations
  Clone ID: MRT4577_35248C.1.pep
PKFSHFYGEPNGKNYRDPGKKGVPASPSPPRNTRGPPNYKLFYYPPFLSGKKGTGGHTETPVSFVFLGENAGQDSIESKENAVGDPLGGDPGVIPLAGGVGKNQGVGKRARPGGGLXAGPPGGGVPGGWAG

SEQ ID NO: 298440 - protein, 126 aa, Zea mays
  unsure (1)..(126): unsure at all Xaa locations
  Clone ID: MRT4577_35249C.1.pep
MSKRGRGGTAGNKFRMSLGLPVAATVNCADNTGAKNLYIISVKGIKGRLNRLPSACVGDMVMATVKKGEPDLRKKVMPAVIVRQRKLWRRKDGDYMYFEGSAITGPIGKEXADLXPRIGRAENAIA

SEQ ID NO: 298441 - protein, 52 aa, Zea mays
  Clone ID: MRT4577_3524C.1.pep
GFSQVVRCLTIDSPLDSTSVSTSIWNTPMGNPPVHKFGNSSSMREYKLPTRP

SEQ ID NO: 298442 - protein, 140 aa, Zea mays
  Clone ID: MRT4577_35250C.1.pep
MSKRGRGGTAGNKFRMSLGLPVAATVNCADNTGAKNLYIISVKGIKGRLNRLPSACVGDMVMATVKKGKPDLRKKVMPAVIVRQRKLWRRKDGVYMYFEDNAGVIVNPKGEMKGSAITGPIGKECADLWPRIASAANAIV

SEQ ID NO: 298443 - protein, 154 aa, Zea mays
  Clone ID: MRT4577_35251C.1.pep
PTSSPCAAAAAAAALSKRGRGGTAGNKFRMSLGLPVAATVNCADNTGAKNLYIISVKGIKGRLNRLPSACVGDMVMATVKKGKPDLRKKVMPAVIVRQRKLWRRKDGVYMYFEDNAGVIVNPKGEMKGSAITGPIGKECADLWPRIASAANAIV

SEQ ID NO: 298444 - protein, 140 aa, Zea mays; identical to SEQ ID NO: 298442
  Clone ID: MRT4577_35252C.1.pep

SEQ ID NO: 298445 - protein, 129 aa, Zea mays
  Clone ID: MRT4577_35253C.1.pep
SAWLSVVGNCFHLVYSRGGGLRTGSRMGWVSLFGRSLVWGGQPFCLYGQWVLVFPGPNGSSRSTIAHVAVVLDMSYQRPLSVDSICWTNAFRFFMGFPSVRSRCPVRSSFLCPWRLPFSILWGFQFCTP

SEQ ID NO: 298446 - protein, 208 aa, Zea mays
  Clone ID: MRT4577_35254C.1.pep
MAARSPYFAPEEGARCIRPGESPAAALRRILATPGAHQAPCCFDALGARLVERAGFPICFMGGFCVSASRLGLPDVGLISYGEMVDQGRLITEAVSVPVIGDGDNGYGNSMNIKRTVKGYINAGLAGIMLEDQVAPKACGHTEGRKVISREEAVMHIKAAIDTRKESASDIVIVARTDSRQAVSLDEALWRVQAFADAGADVLFIDAL

SEQ ID NO: 298447 - protein, 105 aa, Zea mays
  Clone ID: MRT4577_35255C.1.pep
TAAGRGGTAGNKFRMSLGLPVAATVNCADNTGAKNLYIISVKGIKGRLNRLPSACVGDMVMATVKKGKPDLRKKVMPAVIVRQRKLWRRKDGVYMYFEGNSRHFP

SEQ ID NO: 298448 - protein, 81 aa, Zea mays
  Clone ID: MRT4577_35256C.1.pep
ASNALRRAYKARGENVGAWRQACYAPLVEIAARHGFDIDAVFAAHPRLTIWYVPTRLRQLCHQARGSHAHAAAGLPPPPIF

SEQ ID NO: 298449 - protein, 381 aa, Zea mays
  Clone ID: MRT4577_35257C.1.pep
MAPPALGSQVAAAASVPVGSDSLAKGAALKGNSTLNFRTKPCIGMALAWKNRTQQPRRLNKVLCMSVQQASRSKVAVMPVELEKAKEPPLHLYKPKEPYTATIVSVERLVGPRAPGETCHVVIDHGGNVPYWEGQSYGVIPPGENPKKPGSPNTVRLYSIASTRYGDSFDGKTASLCVRRAVYYDPETGEEDPSKRGVCSNFLCGSKPGDKVQITGPSGKIMLLPEDDPNATHIMIATGTGVAPYRGYLRRMFMEDVPTFKFGGLAWLFLGVANSDSLLYDEEFTNYLQQYPDNFRYDKALSREQKNKSGGKMYVQDKIEEYSDEIFRLLDGGAHIYFCGLKGMMPGIQDTLKKVAEQRGESWDQKLSQLKKNKQWHVEVY

SEQ ID NO: 298450 - protein, 50 aa, Zea mays
  Clone ID: MRT4577_35258C.1.pep
CEFVYLSCILGFTLYAFVSYVASNCEWTLFLLCIVMGMITRIYSVDTIVY

SEQ ID NO: 298451 - protein, 47 aa, Zea mays
  Clone ID: MRT4577_35259C.1.pep
KTESLRDRETDSGEESPAHKDVAFDGDEALLHPRIGNRSLYPCSKKH

SEQ ID NO: 298452 - protein, 65 aa, Zea mays
  Clone ID: MRT4577_3525C.1.pep
DLTKREGTTESLSALHGTPNLLDPSLNVHVLLSNHRSMTGKLQRENMLKFCHYHVHTTNRSLRAT

SEQ ID NO: 298453 - protein, 183 aa, Zea mays
  Clone ID: MRT4577_35260C.1.pep
MPKQRHGKRLGALELEPRPRQDHLYLVFDDWSFGYTIRKVNTSNRFNPPVQRLPRPFFKLEAPHESPEYFASAFGTRILLMHPRDPAGHNLSGSFFPMLDVRSRSLTFGPGLEFPIHPVYLAVGNKLFIIAEASFEMLYLDPQSGSEWSWELLPHPPFQIYDVCSYALYGHSLLVSTENEAFA

SEQ ID NO: 298454 - protein, 57 aa, Zea mays
  Clone ID: MRT4577_35261C.1.pep
SHASGLFSCNMCHKLCYVPVNQCCAICSASESSQGKADVIAYLSSHLCECTTTTNRP

SEQ ID NO: 298455 - protein, 85 aa, Zea mays
  unsure (1)..(85): unsure at all Xaa locations
  Clone ID: MRT4577_35262C.1.pep
VRRLGIRLEPWGRRXQPPPQGGGGGQVCYYYPXSRAGEGXQTQXXPPXXPGTTGPRXGRGRXTKAREDAAGRPXXRRRTEPQERS

SEQ ID NO: 298456 - protein, 118 aa, Zea mays
  Clone ID: MRT4577_35263C.1.pep
CNYLYFERSRGTTMCEVASLENCGFTACTYSCTQNTIGCFVSDNEALKVGHAKILEGLAGCHFWNSFTLNRVHPLFAADLMGYSAPGRSVVTIMPNRVHLFVLQRDSASILGFESQFK

SEQ ID NO: 298457 - protein, 106 aa, Zea mays
  Clone ID: MRT4577_35264C.1.pep
MGAGPRSGGVAGYTRWAERKGWVAGEMEMGHERRPAGGEGSGCYKSNPLNRNLAPEIQEEASKKTRYSRPLMQFLRISWTWLAANPLNRSVDTQLMKMLPTLILID

SEQ ID NO: 298458 - protein, 47 aa, Zea mays
  unsure (1)..(47): unsure at all Xaa locations
  Clone ID: MRT4577_35265C.1.pep
RGRTHAXPXHCSVXILALGAVRETLLTATPIVGSPKLQSASLSDEDQ

SEQ ID NO: 298459 - protein, 202 aa, Zea mays
  Clone ID: MRT4577_35266C.1.pep
VRMILELKPFNYTKWSTTLQATCGKFGLMHDLSTLRPTDAVWAQADFCVRGWMYSTTSDAVLNLAMTDSTQTASALWKAIGEVFQANKAPRAVFLNHEFHSMTQGDLTIDAYCVRMKEKADELRDVGQPVSEPNLVLNLLRGLNEVYSGVADNIGGQQPLTLANARHERLLKELRLANTEKTRAGAALLANVGGSQQQHQEG

SEQ ID NO: 298460 - protein, 96 aa, Zea mays
  Clone ID: MRT4577_35267C.1.pep
SAMQSIEHHELQTHCVTSLMSHKFWCSDQEEDIVLPVYWEMLYTLTSREFVCWPTELDDYSKYSVSSSGLDRFEKSGLMTQLPMFKRCLSMMFDSK

SEQ ID NO: 298461 - protein, 111 aa, Zea mays
  Clone ID: MRT4577_35268C.1.pep
HTIHQSSRLRIRLRKTHGVYPDSPFPRFLSPLRSSLAGARACWRAPGVIDCMRSGMGKCCWKRSRIRRGERMCRPRVLGIRSRTLLELVLALQRHALLRSQVPQQTGGLCR

SEQ ID NO: 298462 - protein, 35 aa, Zea mays
  Clone ID: MRT4577_35269C.1.pep
VSPPRRYVRMIPCVISNPSTYACSPIMIRKHSNND

SEQ ID NO: 298463 - protein, 60 aa, Zea mays
  Clone ID: MRT4577_3526C.1.pep
LKPYFKEKISLKRPHAYFYLDGWVKHPQKFFKHWSFLVYLQNKKPGQVINRGFWGQYFGP

SEQ ID NO: 298464 - protein, 42 aa, Zea mays
  Clone ID: MRT4577_35270C.1.pep
IGTSLVEEDKLEVATSLIEKAKAKGVSLLLPSDIVVECLCAF

SEQ ID NO: 298465 - protein, 91 aa, Zea mays
  unsure (1)..(91): unsure at all Xaa locations
  Clone ID: MRT4577_35271C.1.pep
YKCLAAALIVLTESGRSAHQVARYRPRAPIIAVTRNPQTARQAHLYRGIFPXLCKDPVQEAWAEDVDLRVNFAMNVGKARGFFKKGDVVIV

SEQ ID NO: 298466 - protein, 37 aa, Zea mays
  Clone ID: MRT4577_35272C.1.pep
VSSHRSRRADAAERSPQLMLLKQDMQARLPQPCRTDA

SEQ ID NO: 298467 - protein, 206 aa, Zea mays
  unsure (1)..(206): unsure at all Xaa locations
  Clone ID: MRT4577_35273C.1.pep
SIFDHAHPPFLXLIIATLLSLLSLALTADEASSIAHDHDQLVAFEDELQPNDHVHIDIGIDIKINNPRLLGAHKALQALKQALYSDPNNFTGNWVGPDVCAYNGVTCVPSLHNQSESAVASLDMNAADVAGYLPKDIGLMADLAVLHLNSNRFCGVIPEEIRNMTELYELDASNNRFVGPFPAAVLGIPXLSYLDIRFNDFDGPIR

SEQ ID NO: 298468 - protein, 130 aa, Zea mays
  unsure (1)..(130): unsure at all Xaa locations
  Clone ID: MRT4577_35274C.1.pep
NFYYQAHKEQLGDGQTNSNRVHELEIEPQNDSNPRPXMLKSNGXNGEQFLNRHLPTKLTQDKERQHPQLNILKDHNYKGTTKMTKDRYQSLRGQHKFLRKAEEKQLRAPKDKSYLEGKHRIQEPGXEKGW

SEQ ID NO: 298469 - protein, 89 aa, Zea mays
  unsure (1)..(89): unsure at all Xaa locations
  Clone ID: MRT4577_35275C.1.pep
MSSSPALAVEPHGLPXLERRASSFVVVGSTKKNKTNNPYGIGGGLTTDDDANGRKGNGKEVHQFADNHXSNVDXYSPIYNEDDCAPTGG

SEQ ID NO: 298470 - protein, 130 aa, Zea mays
  Clone ID: MRT4577_35276C.1.pep
SSQICNYIWPHTCRSVVDGQKVNVCKVIKYKHMNQCLHSVCTIKVEQFFENLFAFSKLVVTKLLIFLPTYLHGVSIENRFCFYVIEVLGWRSLDPLLTCHGKSSQLWMSSIFFLLKSFHLIVDYGLVHQG

SEQ ID NO: 298471 - protein, 172 aa, Zea mays
  unsure (1)..(172): unsure at all Xaa locations
  Clone ID: MRT4577_35277C.1.pep
MEQGRNQQHPQQLSSPPVLVAASEIKAPAVPSQQPKPAAPVMSVPRQWPIAFNPLKSSTEEKSVTPKKKKHCNCRNSKCLKMYCECFQELQYCDGCNCSNCGNIVGNENARNEAIEAIRQRNPSAFQPKIGNDSNTLNVRKDNSGAVPLVXKHHKSCHCKKSXCLKKYCDAT

SEQ ID NO: 298472 - protein, 53 aa, Zea mays
  Clone ID: MRT4577_35278C.1.pep
SVAWPMALSKLKAAIWLLRGGKGAEIRRRRWRVRPLPRSPGRRCSSSETTPPP

SEQ ID NO: 298473 - protein, 64 aa, Zea mays
  unsure (1)..(64): unsure at all Xaa locations
  Clone ID: MRT4577_35279C.1.pep
LHXPSHHSRIHPGVHFSFNPSSYSTQLIHLLXQLIIGAFIGGSAIHTVKTPFNRFSAPLYNSIR

SEQ ID NO: 298474 - protein, 60 aa, Zea mays
  Clone ID: MRT4577_3527C.1.pep
EEISIPSSFTGFHPYTIFSTPGWATSPFYEITLRGLLTLTRGGWNPALWMENAMRGQNLF

SEQ ID NO: 298475 - protein, 92 aa, Zea mays
  Clone ID: MRT4577_35280C.1.pep
MAARGFQLRLSRWFQRSHASVSQSQDEDDRGGERNGLMRSHLDQIVPVTDFAGTSNSKALAVRVEPAKTVALKVSMHCYGCAGKVEKQVKKL

SEQ ID NO: 298476 - protein, 59 aa, Zea mays
  Clone ID: MRT4577_35281C.1.pep
RSTPFFCCWEQYFFLFISIGPSDPSAPAVPMPATRGGLCSADSASTRLRFTCLLQCISY

SEQ ID NO: 298477 - protein, 42 aa, Zea mays
  Clone ID: MRT4577_35282C.1.pep
WGSVWSTELRTNKARCGARYSGCVRQTYALSLWLFCPGTAGL

SEQ ID NO: 298478 - protein, 145 aa, Zea mays
  Clone ID: MRT4577_35283C.1.pep
SASAHARTEGGRTGAAWVEQQCRVGVFSAPVPTLQLLHLLLDLPCAAIAVHGHLQRHGLDISSRSRQKSERQTGDSTTRHQKTHVLRVSKATFSGSTRTANALELDVPAKSVTGTIWSKWLLIKPFLSPPRSSSSWDWETLAWDR

SEQ ID NO: 298479 - protein, 180 aa, Zea mays
  Clone ID: MRT4577_35284C.1.pep
MKFDLSMEMDDSHGTMVNKSEENDFEKKGTSDPVVYQLVRVEGDGTLVPATEDDVLQFEHFLHNEKVDLPSIEDADHVEEFFNNDCMLLKKPDLEGGSSKLETVEAHTQKLGANLEDNASTETTKSTVLNDSCCAEKYKADACSRSVCDTSTDPSVSGVNSSMPDFSILRGEVCLDDLTI

SEQ ID NO: 298480 - protein, 652 aa, Zea mays
  unsure (1)..(652): unsure at all Xaa locations
  Clone ID: MRT4577_35285C.1.pep
MKFDLSMEMDDSHGTMVNKSEENDFEKKGTSDPVVYQLVRVEGDGTLVPATEDDVLQFEHFLHNEKVDLPPIEDADHVEEFFNNDCMLLKKPDLEDGSSKLETVEAHTQKLGANLEENILQSLDDSLSPPSDFRIHSQHSDKLLTEQGANVTRQDNASTETTKSTVLNDSCCAEKYKADACSRSVCDTSTDPSVSGVNSSMPDFSILRGEVCLDDLTIRELQEAFRATFGRQTNVKDKIWLKRRITMGLTNSYDVPSSSCVLKDYKIEGXXDAKNDMSDLDERAKTGLRATSVVIYQGNEGDSPSSSYYQSEDQEDSSKRVPIHNDEPQGNLLGEQCTDKRTRKPTKRYIEELSDIETHDSTVKNSSPAKXPAHDELLMKPRVAPFNETGSLGTIYPTRKDTFGGFSVHVPYVSRMRRGRPRKDFISFADKGPSVEPKGIQPSVEMILVKDGDKGNHLRKVPEVPLKVSSENGHVEAVDSKGVRNLQAKVCSAVSKPKIKHGLTRKHHRAWTLSEVVKLVDGVARYGAGKWSEIRKLSFASYSYRTSVDLKDKWRNLIRATQTQLPAQKDGACPRKTNPSIIPIPPSILLRVKELHELQSQGGGFTAPVKFSGQDGKVLQGKGSGFFVIRVMQIYVYASGRCGIYTSKYYLK

SEQ ID NO: 298481 - protein, 82 aa, Zea mays
  Clone ID: MRT4577_35286C.1.pep
NDVYLNQTVTVKSPNSDADIRKEVCDRSSYIVVTRRQCLELVDIINRNPLGRRTDPSLEEAMSMMELPPVKSMNNEVVRQRV

SEQ ID NO: 298482 - protein, 71 aa, Zea mays
  unsure (1)..(71): unsure at all Xaa locations
  Clone ID: MRT4577_35287C.1.pep
ENPRRTQXXRPAAQPPXASRXKSEEXRTXRPXQQXRSPXGEXDAPRSGAKSAAXXXXTRSXTATXASAPAP

SEQ ID NO: 298483 - protein, 248 aa, Zea mays
  unsure (1)..(248): unsure at all Xaa locations
  Clone ID: MRT4577_35288C.1.pep
VKVLPMEIGKLWFLQVLDIGQTSIKEIQSSVVGLTRLMYFEVGCGVKLPSGIGNLHSLEVLVGLTVGKYDACLDSCNHHLVKELGSLTKLRVLQVFWGVLDESIATTLVESLSNLQKLQVLDIRGNKGGNVNLMHEGWVPSQQLRSVTIMFCSLWTLPTWINLSSLSLLSCLVIIVSKVRSEDIKLLGMLRGLRMLSLRIDVYWSPGELLVVTEMEKSVVTADAFPWCGXSAPSIFPRGAAPRLNELR

SEQ ID NO: 298484 - protein, 33 aa, Zea mays
  unsure (1)..(33): unsure at all Xaa locations
  Clone ID: MRT4577_35289C.1.pep
MSRIERFKYVYGPXVVPPRRGGRSRYHCTLFLA

SEQ ID NO: 298485 - protein, 53 aa, Zea mays
  Clone ID: MRT4577_3528C.1.pep
SNKRSARRMLATGHESGLSASFSFAASSQADCSISVVSFHRVSRNDSFNALSI

SEQ ID NO: 298486 - protein, 148 aa, Zea mays
  Clone ID: MRT4577_35290C.1.pep
PCPLPIIPLDKIPYSLIQLYIQGQDFSKHHHSAAPQTKHSKGCRAVDDHCVPMADLTNHVEAVELTTPAYSLEARRQAACRGAVTLPSQSTDATVTGKLRAGHGGLSGARRASTAPPPAVTGDPQTGTWVLPGKTQYQNPKTALPFSS

SEQ ID NO: 298487 - protein, 79 aa, Zea mays
  Clone ID: MRT4577_35291C.1.pep
VRRSLPWSLSHTQRLPLRFIRGSDGRFVDGFLGPQYEHSGSGHLGVDNEQSEVPECVVGDLPEQQPGEGCPHCSQCSGG

SEQ ID NO: 298488 - protein, 82 aa, Zea mays
  Clone ID: MRT4577_35292C.1.pep
MRARQIPLCLQSTTVVGPARLLRRPHPLAPFLLVVAVISHGPTSGPFVSHILLPFSDPVFRLASVPLPFVSERATYVLFQAV

SEQ ID NO: 298489 - protein, 129 aa, Zea mays
  Clone ID: MRT4577_35293C.1.pep
QEAVALKRQEELIREEEAAGLAEIELKAKRSAAEKEKRAKKKQAKQKKNSRRSNKGKSGKSDINKEILMYSSPSGDRILDDFSGQTEEMSSNADNPEEVSDISDSRDDNSDALHVDIEDRESSPVNWET

SEQ ID NO: 298490 - protein, 79 aa, Zea mays
  Clone ID: MRT4577_35294C.1.pep
LGYAIQEMRRQKTLLHRVFRLCPIPYKVQGPKAKNVVNHLAHVCKVLEETSLVCKQNLAPSPFLVVFESTDPRPKNVTL

SEQ ID NO: 298491 - protein, 69 aa, Zea mays
  Clone ID: MRT4577_35295C.1.pep
KNRSLWSCYSVRSSKLIITNVALMSITNNFIAKHTTKSKSSFTWESMWCMPDYLKQMQIARRKPETSSR

SEQ ID NO: 298492 - protein, 43 aa, Zea mays
  Clone ID: MRT4577_35296C.1.pep
LISTFLKVRLLCAFHHNIIKSNMAFFLRISTLYFPLFLKSDVG

SEQ ID NO: 298493 - protein, 36 aa, Zea mays
  Clone ID: MRT4577_35297C.1.pep
SSSSVGWKQKPGCTLVYAITLKPVLPSTPTRRAHRR

SEQ ID NO: 298494 - protein, 62 aa, Zea mays
  Clone ID: MRT4577_35298C.1.pep
VSQSQNRFRLEFTAAAETNHVGTQRGILILVPCQKNVADLYSSFATNLVSNVGIDMWPEQNK

SEQ ID NO: 298495 - protein, 77 aa, Zea mays
  Clone ID: MRT4577_35299C.1.pep
PASQDIPVVEGLAFFSWQKLLPVDACPCLCGTPNSRGRVYWFCRNPLTVQCSVAHLPIFPRLCRLFELFSLAIFLQL

SEQ ID NO: 298496 - protein, 115 aa, Zea mays
  Clone ID: MRT4577_3529C.1.pep
QLVPPKHDDQRSSLNSVSGKTSNSPDSSGFGRTLSKKSLDMALRHMDIRRSIPNNLRPLMTSIPPSSVHSARSGSTRSRTLWTVISLPKGLKGMILMEPFGYRMFRAAGWKISST

SEQ ID NO: 298497 - protein, 222 aa, Zea mays
  unsure (1)..(222): unsure at all Xaa locations
  Clone ID: MRT4577_352C.1.pep
MRECISIHIGQAGIQVGNACWELYCLEHGIQPDGQMPGDKTVGGGDDAFNTFFSETGAGKHVPRAVFVDLEPTVIDEVRTGAYRQLFHPEQLISGKEDAANNFARGHYTIGKEIVDLCLDRIRKLSDNCTGLQGFLVFNAVGGGTGSGLGSLLLERLSVDYGKKSKLGFTVYPSPQVSTSVVEPYNSVLSTHSLLEHTDVSILXLDXEAIYDIWRRSPDIER

SEQ ID NO: 298498 - protein, 130 aa, Zea mays
  Clone ID: MRT4577_35300C.1.pep
KKNIFATLAGPASGGKKNPPNRFFFIWGGNGPGTNKRGPGPFTQIAKTPHPPPPGYYSKKAIQAGPAGWGKKPQPPASYRKGPSQGPQGGLAQWGGTSNGGPGASPALTKAPGLHWVSGGEGGRANFHPF

SEQ ID NO: 298499 - protein, 60 aa, Zea mays
  Clone ID: MRT4577_35301C.1.pep
PAENAQFISWGRHCRTLSRMVMIAPPPNLNWPSKKAPPPSPVGCLINKTRHVVRVVFRYL

SEQ ID NO: 298500 - protein, 55 aa, Zea mays
  Clone ID: MRT4577_35302C.1.pep
KVQSLCLLVSSAWPHNLVTNYTPLLEHLQQCLKLVPQIEIWGSTQEKLLQQCPIS

SEQ ID NO: 298501 - protein, 42 aa, Zea mays
  Clone ID: MRT4577_35303C.1.pep
MLSFLSGATVDVNIEIPLHLQQAEPDQISVSVKSCRTVFTGL

SEQ ID NO: 298502 - protein, 106 aa, Zea mays
  Clone ID: MRT4577_35304C.1.pep
EQRGCLHHRLKTSSSILPLHGDMERHREYLCMGEDVPGKKILGGMSIAHRSWAGMIGLHRCVADPCTVVVIWVLQDKAYEGCRDEFMRSLDRRLPVNYGCWIVVYA

SEQ ID NO: 298503 - protein, 110 aa, Zea mays
  unsure (1)..(110): unsure at all Xaa locations
  Clone ID: MRT4577_35305C.1.pep
GDKAQXSTHDPQXTEDQHQRDPARNKRDRHHPKHXQPTSPAAGKQESRGRDAXQATKGGGGRSXRPEGEEKKTGGRHRGPKTHAGRRGNGRAAPKEKPRAEQPQDGENPG

SEQ ID NO: 298504 - protein, 120 aa, Zea mays
  Clone ID: MRT4577_35306C.1.pep
AWSRPRYFGEQLSGFAFTANGWVQSYGSRCVKPPIIYGDVSRPNPMTVFWSKTAQSMTARPMKGMLTGPVTILNWSFVRNDQPIERPPGQVPAAGEPLLLLLVLLVVEQVVVVVLLLRHG

SEQ ID NO: 298505 - protein, 340 aa, Zea mays
  Clone ID: MRT4577_35307C.1.pep
MVLLLLGCSPASSRPDCSPASRRRCSTAGQKMVRCSLNEETQLNKHGLVSKQLISCLAASLVFVSPPSQAIPAETFARPGLCQIATVAAIDSASVPLKFDNPSDDVSTGMMMRGMTAKNFDPVRYSGRWFEVASLKRGFAGQGQEDCHCTQGVYSFDEKARSIQVDTFCVHGGPDGYITGIRGRVQCLSEEDIASAETDLERQEMVRGKCFLRFPTLPFIPKEPYDVLATDYDNYAIVSGAKDTSFIQIYSRTPNPGPEFIDKYKSYVANFGYDPSKIKDTPQDCEYMSSDQIALMMSMPGMNEALTNQFPDLKLKAPVALNPFTSVFDTLKKLLELYFK

SEQ ID NO: 298506 - protein, 65 aa, Zea mays
  Clone ID: MRT4577_35308C.1.pep
LYHILCWLLSLQLGTPELESTHASTLSPAFFCDATWFASLCALSALEACFHKLHCCSPPRNPHLL

SEQ ID NO: 298507 - protein, 59 aa, Zea mays
  Clone ID: MRT4577_35309C.1.pep
RPPFFFFFFFFFFFFFFFFFFEPSMGIFNINTCIVTTGRTSYFITQGKWGGNGGLKLGS

SEQ ID NO: 298508 - protein, 107 aa, Zea mays
  Clone ID: MRT4577_3530C.1.pep
KASGGVVKHILLARFKEDVTQERLDELIRGYAALVAAVPSMKAFHWGTDVSIENMHQGFTHVFESTFESTEGIKEYIEHPKHVEFANVFLPVLDKVIVIDYKPTSVN

SEQ ID NO: 298509 - protein, 193 aa, Zea mays
  Clone ID: MRT4577_35310C.1.pep
HCERNDVLAGGQCQLAVSDGSAKESDVAEAERIVEEKATKSDENSVLNGKDIQSAVSEVSPEDGDTDEMKEVTEKPALTADGDESSGLAADKGEFLMKDQPQACGSKESCNADLAVAQQCQSPESGCSIKTVMVDGGADPHGAPERHDSVASLGGLLLDVGMISKPSEPSIGSPLSAEGMSGCVAHAESGLSK

SEQ ID NO: 298510 - protein, 200 aa, Zea mays
  Clone ID: MRT4577_35311C.1.pep
MIYGGQVANASARHRKQERREVCSVKVATPVYLDWSDKPITFDQGDHPDCVPSPGRYLLVVDPVIGNARLTKVLMDGGSSLNIIYAETLGLLGVDLSTIRAGRLCYAKFMAIPNYTYLKLKMIGPKGTITVGSTYRHTYKCDVECVEYAEALAKSEALIADLDCLSKEVPDAKRHAGNFEPAEAVKSVSVDPSNDAGKKV

SEQ ID NO: 298511 - protein, 53 aa, Zea mays
  Clone ID: MRT4577_35312C.1.pep
LVSLYLWIRGFLMVSLWPFLFYIRNFFSNNGQFCLVELGVFLYIVVEEDLLSP

SEQ ID NO: 298512 - protein, 1024 aa, Zea mays
  Clone ID: MRT4577_35313C.1.pep
MSFDGSYDMTLLPPPRDYDNGGRQPARRRRNRRRLPRVVEEQHSGSLRSLPRQRRRRRGRQGQTGGHASPAVERIDAPDAPTEGTPDVDLAFETEASAVPPRHADPEQEDDAGALAESLQDVALEPEMAAQPVPDVTTSLLVDQKVTTNSHLASFRLGLNPPNDLVLAGALIEASATPLRFCMRSPWDQLTDVSTYGPSGSEEDDDPSIGWDFSGLGNPSAVRDFMTACDYCLSDCSDGSHSLGDESCGPSRECFHIELGDPTEGNHLGMPEDGDLPRPVPRADIPRELAVVPAPAGGYDPQLEQVREAQARLNEGTGALEPIRRDVGQAWVGQPLAREIRHLPQGLQHRVANDVRIRPPPASSGVGQNLATAAMLIRAMPEPSTTEGRRIQGELKNLLEGAAARRAESTASRRQGYPSEPHAATSRFMREASVYTGRTRNTAPAAPGHLGNEHHRRDRRAHLDERVRRGYHPRRGGRYDSGEDRSPSPEPPADYPLPCQLGGTDDDNLIIRNLPLFLSDTARAWLEHLPPGQVSNWDDLVQAFAGNFQGTYVRPGNSWDLRSCRQQPGESLRDYIRRFSKQRTELPNITDSDVIGAFLAGTTCRDLVSKLGRKTPTRASELMDIATKFASGQEAVEAIFRKDKQPQGRPSEEAPEASAPRGAKKKGKKKSQSKRDAADADLVAAAEYKNPREPPGGANLFDKMLKEPCPYHQGPVKHTLEECVMLRRHFHRAGPPAEGGRAHDDDKNEEHPAGGFPEVRDCFMIYGGHAANTSARHRKQERREVCSVKVAAPVYLDWSDKPITFDRADHPDHVPSPGKYPLVVDPVVGNVRLTKVLMDGGSCLNIIYAETLKLLRVDLSSVRAGAAPFHGIIPGKRVQPLGRLDLPVCFGTPSNFRRETLTFEVVGFRGAYHAVLGRPCYAKFMAVPNYTYLKLKMSGPNGVITVGPTYKHAFECDVECVEYAEALAESEALIADLENLSKEVPDVKHHAGNFEPAETVKAVPLDPSGDTTKQIRIGSGLDPK

SEQ ID NO: 298513 - protein, 101 aa, Zea mays
  Clone ID: MRT4577_35314C.1.pep
TPVPLMGPSIRPYFFFFFFPAPCRLEPPGGKGSYFCPIFVMGPLAFFFPFCFFRRTPESNNPWKKLDLFKKWFPGGPMENYVGKKKKNGNKKAPKNKREGK

SEQ ID NO: 298514 - protein, 888 aa, Zea mays
  Clone ID: MRT4577_35315C.1.pep
MPFGLRNAGATYQRCMNHVFSEHIGRTVEAYVDDIIVKTRKASDLLSDLETTFRCLKAKGVKLNREKCVFGVPRGMLLGFIVSERGIEANPEKITAITDMGPIKDLKGVQRVTGCLAALSHFISRLSERGLPLYRLLRKAECFTWIPEAEEALGNLKALLTNAPILVPPAAGEALLIYVAATTQVVSAAIMVERREEGHALPVQRPVYFISEVLSETKIRYPQIQKLLYAVILTQRKLRHYLESHLVTVVSSFPLGEVIQCREASGRIAKWAMEIMGETISFAPRKAIKSLVLADFVAEWVDTQLPTAPIQPELWTMFFDGSLMKTGAGAGLLFISPLGKHLRYVLRLHFPASNNVAEYEALVNELRIAIELGVRRLDARGDSQLVIDQDKFYGLELNHIVRCYNETADELAKIASGRTTVPPDVFSRDLHQPSVKIDDAPEPEKASAQPKAPSAPKGEALRVEEERSGVMPNRNWQTPYLQYLHRGELPLDRAEARRLARRTKSFVLLGDGKELYHRSPSGILQRCISIAEGQELLQEIHSGACDHHAAPRALVGNAFRQGFYWPTAVADATRIVRTCEGCQFYAKQTHLPAQALQTIPITWPFEVWGLDLVGPLQKAPGGYTHLLVAIDKFSKWIEVRPLNSIRSEQAVAFFTNIIHRFGVPNSIITDNGTQFTGRKFLDFCEDHHIRVDWATVAHPMTNGQVERANGMILQGLKPRIYNDLDKFGRRWMKELPSVVWSLRTTPSRATGFTPFFLVYGAEAILPTDLEYGSLRTRAYDDQSNRANREDSLDQLEEARDMALLHSARYQQSLQRYHARGVRSRDLQVGDLVLRLRQDARGRHKLTPPWEGPFVIANVLKPGTYKLANSQGEVYSNAWNIRQLRRFYP

SEQ ID NO: 298515 - protein, 76 aa, Zea mays
  Clone ID: MRT4577_35316C.1.pep
HYLISLHKNLYNLIHQSPLIFSLFQSSSFISLLSIQLHLSFIHLNYLHFITLLHHLKHYYILLYLTILISLTLIIS

SEQ ID NO: 298516 - protein, 480 aa, Zea mays
  Clone ID: MRT4577_35317C.1.pep
MDDDNLIIHNLPLFLSDTARAWLEHLPPGQISNWDNLVQAFAGNFQGTYVRPGNSWDLRSCRQQSGESLRDYIRRFSKQRTELPNITDSDVIGAFLAGTTCRDLVSKLGRKTPTRASELMDITTKFASGQEAVEAIFRKDKQPQGRPSEEAPEASAPRGAKKKGKKKSQSKRDAADADLVAAAEYKNPRKPPGGANLFDKMLKESCPYHQGPVKHTLEECVMLRRHFHRAGPPAEGGRARDDDKNEDHQAGEFLEVRDCFMIYGGHAANASARHRKQERREVCSVKVAAPVYLDWSDKPITFDQADDPDHVPSPGKYPLVVDPVVGNVRLTKRVQPLGRLDLPVCFRTPSNFRRETLTFEVVGFRGTYHAVLGRPCYAKFMAVPDYTYLKLKMPGPNGVITVGPTYKHAFECDVECVEYAEALAESEALIADLENLSKEVPDVKRHAGNFEPAETVKAVPLDSSGGTTKQIRIGSGLDLK

SEQ ID NO: 298517 - protein, 76 aa, Zea mays
  Clone ID: MRT4577_35318C.1.pep
ARGSMSHPLSTDLGFGDFPAYAPPPSMDPLGAPAVSSATRIQPPLYGGSSSSLLVLELDDRFLLCLRRARRAARPT

SEQ ID NO: 298518 - protein, 1086 aa, Zea mays
  Clone ID: MRT4577_35319C.1.pep
MREASVRTGRTRDGTPAAPDHLGDEHHHRDRRARLEEKVRRGYHPRRGGRYDSEEDRSPSPEPPGPRVFSRAIRRASFPAQFRAATTITKYSGETRPELWLADYRLACQLGATNDDNLIICNLPLFLSNAARAWLEHLPPTQISDWDDLVKAFAGNFQGESLWEYIRWFSKQRTELPNITDSDIIGAFLAGTMCRDLVSKLGRKTPTKASELMDIATKFASAQEAVEAIFRKDKQPQGRQKEDAPKASIQRGSKKKAKKKAQAKRDAIDADLIAAIEHKNPRKPPGGINTFDKMLKESCPYHKGGTLGRRWQGPRQQQEGGDKDEEFPEDRNCFMIYSGQVVNASARHRKQEHREVCSVKVATPVYLDWPDKPITFDQGDHPDYVPSPGRYPLVVDPIIGNARLTKALMDGGSSLNIIYAETLGLLGIDLSTIRAGAAPFHGIVPGKRVLPLGQLDLLVCFGTPSNFRRETLTFEVVGFQGTYHAVLGRPCYAKFMAVPNYTYLKLKMSGPNGIITVGSTYRHAYECDVECVEYAEAIAESEALIADLDCLSKEAPDAKRHTGNIEPAEAVKSVSLDPSNDASKQKKGGKWRMCLDYTGLNKASPKVPYPLPRIDQIVDSTAGCMNHVFGEHIGRTVEAYVDDIVVKTRKASDLLSDLEVTFGCLRAKGVKLNLEKCVFGVPRGMFLGFIVSERGIEANPEKIAAITNMGPIKDLKGVQRVMGCLAAFSRFISRLGERGLPLYRPLRKAERFTWTPEAEEALGNLKALLTNAPILVPPAAGEALLIYVAATTQVRPVYFISEVLSETKILYPKSQKLLYTVILMRRKLRHYFESHPVTVVSSFPMGEIIQCREASGRIAKWAVELMGETISFAPWKAIKSQVLADFLAEWVDTQLPTAPIQPELWTMYFDGSLMKTRAGAGLLFISPLGKHVRYVLRLHFPASNNMAEYEALVNGLRIAIELGVRRLDAWGDSQLVIDQVMKNSHCRDQKMEAYCDEVRRLEDKFHGLELNHVARRYKEIADELAKIASGRTTVPPDVFSRDIYQPSVKLDDAPEPDETSAQPKVPLAAEGEALCIEGQRNGVAPN

SEQ ID NO: 298519 - protein, 386 aa, Zea mays
  Clone ID: MRT4577_3531C.1.pep
PSTPTSRTTVPAKTGASVSRSSTPTLRSTLPSARSTTPSSRAVGPASRTSAPIGRASAPASRSSTPTPTRSIPATRSTTPSSRPSIPAQSKPTSRASTPTRRPSAPSAQHGNLAAPVRSSSISKPGSTMPKGSSPAKTAAPTPSRGSSPTVKSRPWKPSEMPGFSLDAPPNLRTSLPERPTSATRGRPGAPSSRSCSVESGPAGRPRRQSCSPSRGRTLSGSVPSGSSMPAVRRSHLNGGDSVNPVQMGNKMVERVVNMRRLVPPKHDDQRSSLNSVSGKTSNSPDSSGFGRTLSKKSLDMALRHMDIRRSIPNNLRPLMTSIPPSSVHSARSGSTRSRPMSVSDSPLATSSNASSEPSVNNNLMCLDGIYMDDELCSDRAGPYGR

SEQ ID NO: 298520 - protein, 938 aa, Zea mays
  unsure (1)..(938): unsure at all Xaa locations
  Clone ID: MRT4577_35320C.1.pep
GGRQPARRRRNRRRLPRVVEEQHSSSPRPLPRQRRRRRGNQGQAGGSASSTVERVDGPSAPTGXGASGIDLTFETKASAVSPRHANSEQTDDARTLAKGLLDVTLVPETTVQSVPDVTSSPPVDQEVPTDSHPTPFGFSLDPPSGFALADALVEASPNPLGFRMRSPWDRLTDVSTYGPSGSEEDDEPSFCWDFSGLGNPSAMRDFMTACDYCLSDCSDGSRSLGDEDCGPSRECFHIDLGGPSEGNHLGMLEDGDLPRPVPRVDIPRELAVVPVQAGGHDPQLEQIRGVQARLDEGTGALEPIRRDVGQEWAGQPPAEEIRHLPQGFQHRIADDVRVRPPPASSGVGQNLAAAAMLLRAMLEPSTTEGRRIQGELKNLLEGAAVRRAESSASRRQGYPSEPHAATSRFMREASVYPGRTRNTVHAAPGRLGNEHHHRDRRAHLDERVRRGYHPRRGGRYDSGEDRSPSPEPPGPQAFSRAIRRAPFPTRFQPPTTITKYSGETRPKLWLADYRLACQLGGTNDDNLIIRNLPLFLSDTARAWLEHLPPGQISNWDDVVQAFAGNFQCTYVRPGNSWDLRSCRQQPGESLRDYIRRFSKQRTELPNITDSDVIGAFLAGTTCRDLVSKLGRKTPTRASELMDIATKFASGQEALQAKRDAADTDLVAAAEYKNPRKPPGGANLFDKMLKELCPYHQGPIKHTLEECVMLRRHFHRTGPPAEGGRACNDDKKEDRQAGEFPEVRNCFMIYGGQAANASARHRKQERREVCSVKVAAPVHLDWSDKPITFDQADHPDHVPSPGKYPLVVDPIIGDVRLTKVLMDGGSSLNIIYAETLGLLRVDLSSVRAGAAPFHGIIPGKRVQPLGQLDLPVCFGTPSNFRRDTLTFEVVGFRGTYHAILGRPCYAKFMVVHNYTYLKLKMPGPNEVITVGPMYKLIVA

SEQ ID NO: 298521 - protein, 501 aa, Zea mays
  Clone ID: MRT4577_35321C.1.pep
MTSRLMREASVYTGRTRDMTPAAPGRLGNEHHRRDRRARLDEKVHRGYHPRRGGRYNSEEDRSPSPKPPDVIGAFLADTTYRDLVSKLGRKTPTKASELMDIATKFASGQEVVEAIFRKDKHSQGRQQEEVPEAFAQRGTKKKAKKKSQAKRNAADVDLVAAVKHRNPRKPPRGANLFDKMLKESCPYHQGPVKHTLEECVMLRRYFHKAGLPTEGGKGQDNDKKEGDKAEEFPEVHGCFMIYGGQVANASARHRKQERQEVCSVKVAVPVYLVWSDKPITFDQGDRPDCVPSPGKYPLVVDPVIGNTRITKVLMDGGSSLNIIYDETLGLLEIDLSTIRAGAAPFHGIIPGKRVLPLGQLDLPVCFGTPSNFRKETLTFEVVGFRGTYHAVLGRPCYAKFMAVPNYTYLKLKMSGPNGVITVGSTYRHAYECDVECVEYAEALAESEALIADLECLSKEVPDAKRHAGNFEPTEAVKTVALDPSNDACKQVRIGSELDPK

SEQ ID NO: 298522 - protein, 818 aa, Zea mays
  unsure (1)..(818): unsure at all Xaa locations
  Clone ID: MRT4577_35322C.1.pep
MCVDYTGLNKACPKVPYPLPRIDQIVDSTAGCKTLSFLDAYSGYHQIRMKESDQLATSFITPFGMYCYVTMPFGLRNAGATYQRCMNHVFGEHIGRTVEAYVDDIVVKTRKASDLLSDLETTYRCLKAKGVKLNPEKCVFGVPRGMLLGFIVSERGIEANPEKIAAITNMGPIKDLKGIQRVMGCLATLSRFISRLDERGLPLYRLLRKTERFTWTPEAEEALGNLKALLTNTPILVPPAAGEALLIYVAAITQVVSAAIVVERREEGHALPVQRPVYFISEVLFETKIRYPQIQKLLYAVILTRWKLXLLRVASGDCGVILPPGGXIHCREASGAGVGLLFISPLGKHLRYVLRLHFPASNNVAKYEALINGLRIAIELGLVIDQVMKNSHCRDPKMEAYCDEVRRLEDKFYGLEVNHVARRYNETADELAKTYINPQSRPTTRPSPRRPRPSPRHXLAQPEAPSAQPEAPLAPEGEALCIEEERNGVTPNRNWQTPYLQYLHRGELPLDRAEARRLARRAKTFVLLGDGKELYHCSPSGILQRCISIAEGQELLQEIHSGACGHHAAPRALVGNAFRXKEAPGGYTHLLVAIDKFSKWIKVRPLNSIRFEQAVAFFTNIIHRFGVPNSIITDNGTQFTGRKFLDFCEDHHIRVDWAAVAHPMTNGRWMEELPSVVWSLRTTPSRATGFAPFFLVYGVEAILPTDLEYGSPRTRAYDDQSNRTNREDSLDQLEEARDMALLHSARYQQSLRRYHARGVRSRDLQVGDLVLRLRQDARGRHKLTPPWEGPFIIAKVLKPGTYKLANSQGEVYSNAWNI

SEQ ID NO: 298523 - protein, 309 aa, Zea mays
  Clone ID: MRT4577_35323C.1.pep
RGRPGCHSLDTASSAAHQSVQSQSTPSPRYSRKEHAMDPRPEAIVQDYKAANKLKDKVALVTGGDSGIGRAVCLCFAKEGATVAFTFVRGQEEKDAEETLRALRDIGSETGAREPMALPADLGYEANCREVVERVASAYGGRIDVVVNNAAEQYERESIGDVTEADLERVFRTNIFSYFLVSKHAVPRMEPGACIINTSSVNAYKGNKTLLDYTATKGAIVAFTRALSLQLADRGIRVNGVAPGPVWTPLIPASFGKEKVEQFGSQVPMKRAAQPAEIAPSFVFLASNQDSSYMSGQILHVNGGVIVNS

SEQ ID NO: 298524 - protein, 65 aa, Zea mays
  Clone ID: MRT4577_35324C.1.pep
GLAPSATPKATGGFKLEGRNSGLQRGSPPGFPLANTLAWGPVGPILGVGFVLGLKNPGALAQFLG

SEQ ID NO: 298525 - protein, 520 aa, Zea mays
  unsure (1)..(520): unsure at all Xaa locations
  Clone ID: MRT4577_35325C.1.pep
WAVEIMGKXISFTPRKAIKSQVLADFVAEWVDTQLPMAPIQPELWTMFFDGSLMKTRAGAGLLFISPLGKHIRYVLRLHFPASNNVAEYEALVNGLRIAIELGVRRLDARGDSQLVIDQVMKNSHCRDPKMEAYCDEIDGTPELEAPSVRPEVPSAPEGETLRVEGEQSGVTPDQNWQTPYLQYLHRGEIPSDRAEARRVARCAKSFVLLGDEKELYHRSPSGILQRCISIAEGFYWPTAVADATRIVRACEGCQFYARQTHLPAQALQMIPITWPFAVWGLDLVGPLQKAPGGYTHLLVAIDKFSKWIEVRPLNRIRSEQAVAFFTNIIHRFGVLNSIITDNGTQFTGRKFLNFCEDHHIRVDWAVVVHPMSNGQVERANGMILQGLKPRIYNNLNKFGKRWMKELPSVVWSLRTTLSRATGFMPFFLVYGAEAILPTDLEYGSPRTRAYTDQSNQASREDSLDQLEEARDKALLHSARYQQSLRRYHARGVRSRDLQVGDLVLRLRQDARGRHKLTPP

SEQ ID NO: 298526 - protein, 717 aa, Zea mays
  Clone ID: MRT4577_35326C.1.pep
MPFGLRNAGATYQRCMNHVFGEHIGRTVEAYVDDIVVKTRKASDLLSDLEVTFRCLKAKGVKLNPEKCVFGVPRGMLLGFIVSERGIEANPEKIIAITSMGPIKDLKGLRHYFESHPVTVVSSFPLGEIIQCREASGRIAKWAVEIMGETISFAPRKAIKSQVLADFVAEWVDTQLPTAPIQPELWTMFFDGSLMKTGAGAGLLFISPLRKHLRYVLHLHFPASNNVAEYEALVNGLRIAIELGFRRLDARGDSQLVIDQVMKNSHCRDPKMEAYCDEVRRLEDKFYGLELNHIARRYNETADELAKPEVPSALEGEALRVEGERSRATPDRNWQAPYLRYLHQGELPLDRAEARRVARRAKSFVLLGDEKELYHRSSSGILQRCISVTEGFYWPTAVADATRIVRTCEGCQFYAKQTHLPAQALRTIPITWPFAVWGLDLVGPLQKAPGGYTHLLVAIDKFSKWIEVRPLNSIRSEQAVAFFTNIIHRFGVPNSIITDNGTQFTDRKFLDFCEDYHIRVDWAAVAHPMSNGQVERANGMILQGLKPRIYNDLNKFGKRWMKELPSVVWSLRTTPSRATGFTSFFLVYGAEAVLPTDLEYGSPRTRAYSDQSNQASREDSLDLLEEARDKALLHSARYQQSLRRYHAREVRSRDLQVGDLVLRLRQDARGRHKLTPPWEGPFVIAKVLKPGTYKLANGQGEVYGNAWNIQQLRRFYP

SEQ ID NO: 298527 - protein, 60 aa, Zea mays
  Clone ID: MRT4577_35327C.1.pep
LIPASFGKKKVEQFGSQVPMKRAAQPAEIAPSFVFLASNQDLSYMSGQILHVNGGVIVNS

SEQ ID NO: 298528 - protein, 77 aa, Zea mays
  Clone ID: MRT4577_35328C.1.pep
GRNLEQGHPGQLAMGAVRLWAQQARYEHPARIKSSQGRSAGGRIRFKKNQSIHDVRYFKENPTHRRRLPGAKRRGPT

SEQ ID NO: 298529 - protein, 358 aa, Zea mays
  Clone ID: MRT4577_35329C.1.pep
MRALLHLRLINPCSPRAPRLPATPARALVASFSGAWQAPSGRARARAAPPAVRAMASQQVFRAQQQQQQQFPAQQQESQPGKEHAMDPRPEAIVQDYKAANKLKDKVALVTGGDSGIGRAVCLCFAKEGATVAFTFVRGQEEKDAEETLRALRDIGSETGAREPMALPADLGYEANCREVVERVASAYGGRIDVVVNNAAEQYERESIGDVTEADLERVFRTNIFSYFLVSKHAVPRMEPGACIINTSSVNAYKGNKTLLDYTATKGAIVAFTRALSLQLADRGIRVNGVAPGPVWTPLIPASFGKEKVEQFGSQVPMKRAAQPAEIAPSFVFLASNQDSSYMSGQILHVNGGVIVNS

SEQ ID NO: 298530 - protein, 58 aa, Zea mays
  Clone ID: MRT4577_3532C.1.pep
TGFRVPFESQKLTKSGGPPTEATKKNLGSGIQSIFNGRRGQTTRRRPTGGNNNRFCIQ

SEQ ID NO: 298531 - protein, 82 aa, Zea mays
  Clone ID: MRT4577_35330C.1.pep
CSTWSLLLNLVRSLFSFSRRCMFWSWLGSRLSVVVGPVGCSFRVFPPVGSSFLHPCSPVCVVSGGPGPPSVSNMRSRRRRVG

SEQ ID NO: 298532 - protein, 76 aa, Zea mays
  Clone ID: MRT4577_35331C.1.pep
LARTDEGGEGAGYGDCCGGGNVCHGRSGRTELPRHILLDHFRSVATVDRHCDCAGTVRLVHLPHAEPILTLPCSEA

SEQ ID NO: 298533 - protein, 255 aa, Zea mays
  unsure (1)..(255): unsure at all Xaa locations
  Clone ID: MRT4577_35332C.1.pep
MAWRLALPLLLFYSPILLCSSSQEVQDNDPSKLFKSASEMMSLRKYDGALGLLNAVLELDPNHSEAYRQRATVLRHRCRHKEAESDYNKFLELKPGTASVEKELAQLLQAQNALESAYSQSDAGEFSKVLEYVNKIVLVFSPGCLKAKLLKAKALLALKDYSNVISETGFILKEDEDNLDALLLRGRAYYYLADHDVANRHYQKGLRLDPEHSELKKAYFGLXKLLKKDQSAEDNAAKSKFRVAGERLQAALAMD

SEQ ID NO: 298534 - protein, 729 aa, Zea mays
  unsure (1)..(729): unsure at all Xaa locations
  Clone ID: MRT4577_35333C.1.pep
MSGWDEGAVFYSDQAQFPRGGPGGDPAADLTRHSALRKFKEFLRGFTGPTGDFPYRESLVHNRDHVTVAIEDLDAFDAELSDKIRKSPADYLPLFETAAAEVLASLRSKVAGEAGEMEEPVTGDVQIFLSSKENCLSMRSVGADYMSKLVKIAGIAIAASRVKAKATHVTLICKNCRSVRTVPCRPGLGGAIVPRSCGPAAQHANHGCPEKAAEMLQNKYIEIRQKIQKQAHETGRAAVIPIPVRQLEAIIRLSESLAKMRLTSVATPEHVEEAFRLFNXSHSRRCEIRNQRATATQSRDNNSNGPSNFTLDEEMEFKEFAQRPDAYAKLCSMIGPSIYGHSDVKKAIACLFKLWSKKRLPDGVRLRGDIHVLLLGDPSTAKSQFLKFVEKTAPIAVYTSGKGSSAAGLTASVTRDSSSREFYLEGGAMVLADGGVVCIDEFDKMRPEDRVAIHEAMEQQTISIAKAGITTVLNSRTSVLAAANPIAGRYDDLKTAQDNIDLQTTILSRFDLIFIVKDIRMYDQDKRIASHIIKVHASGAAASSANTEGSEGENWLKRYIQYCRATCKPRLSEKAAEMLQNKYIEIRQKMRQQAHETGRAAAIPITVRQLEAIIRLSESLAKMRLTSVATPEHVEEAFRLFNVSTVDAARSGINEHLNLSPEIANEIKQAEAQIKRRMGIGSHISERRLIDELNRMGMNESIVRRALLIMHQRDEVEYKRERHVIVRKA

SEQ ID NO: 298535 - protein, 94 aa, Zea mays
  unsure (1)..(94): unsure at all Xaa locations
  Clone ID: MRT4577_35334C.1.pep
NIIGPAIVGGDLTVQEGIYNYMILHLDKTSNEWTICXQKLTLNTMLTLSLAKCKIKPIVQKIIFYQHIGNVYLIKTIRIXLPLLNAINGSNMLK

SEQ ID NO: 298536 - protein, 93 aa, Zea mays
  Clone ID: MRT4577_35335C.1.pep
QLRPWSLPPRFFFRTPGFFPPPPWGWAPPSAFLAGKKTKPRFSWPKKPKNKKRKKKKEKKKKKKKKLEKKKKKKKKKKKKKKKKKKKKKKKKK

SEQ ID NO: 298537 - protein, 51 aa, Zea mays
  unsure (1)..(51): unsure at all Xaa locations
  Clone ID: MRT4577_35336C.1.pep
MVHVNFYRNYGKTFKKPRRPYEKEXLRCKRELWRVQYSPTNFNSASRRSFS

SEQ ID NO: 298538 - protein, 125 aa, Zea mays
  Clone ID: MRT4577_35337C.1.pep
KGGGPPLPEANSGCWRVWAVPPPRRGLWAKNWGFSGFGRRGPPYPGKPWPNHFWAVWEGTVPLKDIFPVVPPDWLAKFFISGGVRGQNPGRGFQGKKGCQGAFFTDQTSPGFVKSSRWLFPSLAI

SEQ ID NO: 298539 - protein, 66 aa, Zea mays
  Clone ID: MRT4577_35338C.1.pep
RCYTVSYQCQYKNKTALYIHSDSPRTHTLSKGMCLESTRAPDPSQIHSFSLNKARSSFCAKEALLC

SEQ ID NO: 298540 - protein, 47 aa, Zea mays
  Clone ID: MRT4577_35339C.1.pep
SAQSDRACCHKRKQRESDLNTQPPLARLAGSEDFFSLGREPAQQMQG

SEQ ID NO: 298541 - protein, 61 aa, Zea mays
  Clone ID: MRT4577_3533C.1.pep
QDLGVTSDSSFPWGAADGGGWAIPHPNLPIAICLLCVASDIPVSFLDPIRVECPSPRVNLL

SEQ ID NO: 298542 - protein, 105 aa, Zea mays
  unsure (1)..(105): unsure at all Xaa locations
  Clone ID: MRT4577_35340C.1.pep
ACRDRTLTGDYGFDPMGLSDPDGTLGFIEPKWLAYGXLINGRYAMLGFLXAMVSXILGTMGIIRPETGLTWCKTAILPTAGTYNYWADCYTLFRLNMTLMGFADH

SEQ ID NO: 298543 - protein, 74 aa, Zea mays
  Clone ID: MRT4577_35341C.1.pep
SGFTLLGHFPPVRSIMKCSWVMHRDGSSTIDGMYLCYRLYRYRIQELICLLQFIGTLYMLHKVSNLFETFCCFI

SEQ ID NO: 298544 - protein, 110 aa, Zea mays
  Clone ID: MRT4577_35342C.1.pep
KAVPALSDPFADASKGDDLLPAGTEDYIHIRIQQRNGRKTLTTVQGIADDYDKKKLVKAFKKKFACNGTVIEHPEYGEVIQLQGDQRKNICQFLVEIGLAKDDQLKVHGF

SEQ ID NO: 298545 - protein, 860 aa, Zea mays
  Clone ID: MRT4577_35343C.1.pep
MWSTWDRLTAVSTYGPPGSEEDDEPDSGWDFSGLGNPSAMRDFMAACDYCLSDYSDGGHSLDDEDCGPSRECFHVDLGGLDEGNHLGMPDDGNPPRPAPRIDILRELAVVPVPAGGQDAQLEQIREMQARLDEEAGQLVQLRQEIGQEWAGRAPAGEARHLAQDVQHRIADDARARLPPASSGVGQNLAAAAILLRAMPEPSTTEGRRIQGELKNLLEDAAVRRAESSTFRRQGYPPEHRAATSRFMREASVHTRRMRDATPTAPGRLGNDHHRRNRRAHLNKKVRRGYHPRRGGRYDSGEDRSPSPEPPGPQAFSRAIRQVPFPTRFRTPTTITKYSGETRPELWLTDYLLACQLGGTDDDNLIIRNLPLFLSAAARAWLEHLPPAQISNWDDLVKAFAGNFQGTYVRPGNSWDLRSCRQQPGESLRDYIRRFSKQRTELPNITDSDVIGAFLAGTTCRDLVSKLGHKSPTRASELMDIATKFASGQEAVEAIFRKDKQPQGRQQEDVPEVSAQHGTKKKGKKKSQAKRDATDADLVATAEHRNPRKPPGGANLFDKMLKESCPYHQGRAPAEGGRAHDNDKKEGNKAEEFPEVHDCFMIYGGQVANASARHRKQERREVCSVKVAAPVYLDWSDKPITFDQGDHPDRVPSPGKYPLVVDPIIGNVRLTKVLMDGGSSLNIIYAETLGLLQINLSTIRAGVAPFHGIIPGKRIQPLGRLDLPVCFGTPSNFRRETLTFEVVGFRGTYHAVLGRPCYAKFMAVPNYTYLKLKMSGPNGVITVGSTYRHAYECDVECVEYAEALAESKALITDLESLFKKVPDAKCHAGNFEPAEAAKSVPLDPSNDASKQVRIGSELDPK

SEQ ID NO: 298546 - protein, 745 aa, Zea mays
  unsure (1)..(745): unsure at all Xaa locations
  Clone ID: MRT4577_35344C.1.pep
MSFGLRNAGATYQRCMNHVFGEHIGRTVEAYVDDIVVKTRKASDLLSDLEVTFRCLKAKGVKLNPEKCVFGVPRGMLLGFIVSERGIEANPEKIAAITSMGPINDLKGIQRVMGCLAALSRFISRLGERGLPLYRLLRKAECFAWTPEAEEALGNLKALLTKAPILVPPADGEALLVYVAATTQVVSATIVVERQEEGHALPVQRPVYFVSEVLSETKIRYPQVQKLLYAVVLTRRKLRHYFESHPVTVVSSFPLGEIIQCREASGRIAKWAVEIMGETISFAPRKAIKSQVLADFVAEWVDTQLPTAPIQPELWTMFFGGSLMKMGAGAGLLFISPLGKHLRYVLRLHFPASNNVAEYEALVNGLRITIELGVRRLDARGDSQLVINQVMKNSHCRDPKMEAYCDEVRRLEDKFYGLELNHIARRYNETADELAKIASGRTTVPPDVFSQDLHQPSVKIDDTPEPEATSVQPEKAPGXHAPAGHHRQILQVDRGPTPEQHQVRAGGGVLHQHHPSLRGXPNSIITDNGTQFTGKKFLDFCEDHHIRVDWAAGAHPMSNGQVERANGMILQGLKPRIYSDLNKFGKRWMKELPSVVWSLRTTPSRATGFTPFFLVYGAEAILPTDLEYGSPRTRAYNDQSNQASREDSLDQLEEARDKALLHSARYQQSLRRYHARGVRPRDLQVGDLVLRLRQDARGRHKLTPPWEGPFVIAKVLKPGTYKLANSQGEVYGNAWNIKQLRRFYP

SEQ ID NO: 298547 - protein, 73 aa, Zea mays
  Clone ID: MRT4577_35345C.1.pep
CMLHVCLSGRWTCEAVCSETLVHCFRFHAALEFRCHDEPFSSEPLIVTVSSVFVNVGGKSCSFRVWSSKIDPY

SEQ ID NO: 298548 - protein, 761 aa, Zea mays
  Clone ID: MRT4577_35346C.1.pep
MPFGLRNAGATYQRCMNHVFGEHIGRTVEAYVDDIVVKTRKASDLLSDLEVTFRCLKAKGVKLNPEKCVFGVPRGMLLGFIVSERGIEANPEKIAAITSMGPIKDLKGVQKVMGCLAALSRFISRLSERGLPLYRLLRKAECFAWTPEAKEALGNLKALLTKAPILVPPANGEALLVYVAATTQVVSAAIVVERQEEGHALPVQRPVYFVSEVLSETKIRYPQVQKLLYAVILTRRKLRHYFESHPVTVVSSFPLGEIIQCREASGRIAKWAVEIMGETISFAPRKAIKSQLPTAPIQPELWTMFFDGSLMKTGAGAGLLFISPLGKHLRYVLRLHFPASNNVAEYEALVNGLRIAIELGVRRLDARGDSQLVIDQVMKNSHCRDPKMEAYCDEVRRLEDKFYGLELNHIARRYNETADELAKIASGRTTVPLDVFSRDLHQPSVKIDDTPEPEAPSAQPEAPSARPEAPSVQPEVPSAPEGEALDVEEEQSGATPDRNWQAPYLQYLRQGELPLDQAEARRVARRAKSFILLGDEEELYRRSTSGILQRCISIAEGQELLQEIHSGACGHHAAPRALVGNAFQQGFYWPTAVADATRIVRTCEGCQFYAKQTHLPAQALQTIPITWPFAVWGLDLVGPLQKAPGGYTHLLVAIDKFSKWIEDHHIRVDWAAVAHPMSNGQVERANGMILQGLKPRIYNDLNKFGKRWMKELPSVIWSLRTTPSRATGFTPFFLVYGAEAILPTDLEYGSPRTRAYEDQSN

SEQ ID NO: 298549 - protein, 1034 aa, Zea mays
  Clone ID: MRT4577_35347C.1.pep
MGSLQQPLRPGTVLRFGSLEFMSFDGSYDMKLLPPPRDNDNGGRQPSRRRRNRRRLPRVVEEQHSSSPRPLPRQRRRRRGNQGQAGGRASSAVERVNVPSAPTGGASGVDLAFETKASAVSPRHAKPEQVDDASALAKSLQDVALVPEATVQSVLDVTSSPLDDQKVPTDSHPTSFGLSLNPPSDLALAGALVEASSNPLGFRLWSPWDRLTDVLTYGPSGSEEDDDPNICRDFSGFGNPSAMRDFMTACDYCLSDYSDGSRSLDDEDCGPSRECFHVDLGGPSEGNHLGMPEDGDLPRPVPRADIPRELAVVPVSAGGHDPQLEQVRGAQARLDEGAGALEPIRRDIGQAWAGQPPAGEIRHLPQGLQHRVAYDVRVRPPPASSGVGQNLAAAAMLLHAMPEPSTTEGRRIQGELKNLLEGAAVRRAESTASRRQGYPSEPHAATSRFMREASIYTGRTRNTAPAAPGHLGNEHRHRDRRAHLDERAFSRAIRRAPFPTRFRPPTTITKYSGETRPELWLADYHLACQLGGTDDDNLIIRNLPLFLSDTARAWLEHLPPGQISNWDDLVQAFAGNFQGTYVRPGNSWDLRSCRQQPGESLRDYIRRFSKQRTELPNITDSDVIGAFLAGTTCRDLVSKLGRKTPTRASELMDIATKFASGQEAVEAIFRKDKQPQGRPSKDAPEASTPRGAKKKGKKKSQAKRDTADADLVAAAEYKNPRKPPEGANLFDKMLKEPCPYHQGPVKHTLEECVMLRRHFHRAGPPAEGGRARDDDKKEDHQAGEFPEVRDCFMIYGGHAANASARHRKEERREVCSVKVAAPVYLDWSDKPITFDQADHPDHVPSPGKYPLVVDPVVGDVRLTKVLMDGGSSLNIIYAETLGLLRVDLSSVRAGAAPFHGIIPGKRVQETLTFEVVGFRGTYHAVLGRPCYAKFMAVPNYTYLKLKMPGPNGVITVGPTYKHAFECDVECVEYAEALAESEALITDLESLSKEVPDVKRHAGNFEPVETVKAVPLDPSGDASKQIRIGSGLDPK

SEQ ID NO: 298550 - protein, 120 aa, Zea mays
  Clone ID: MRT4577_35348C.1.pep
MRLRMQRVGSCELRGADSLALHFCGLGTHGAHDYYDQLDGYDEAICPMVLISRKGPILDHEINQTMVRPLFHGVKLHAPLDSWHSTTGLKLLFWCLMSRHTRWHWKDESPLGASYQCTSC

SEQ ID NO: 298551 - protein, 436 aa, Zea mays
  Clone ID: MRT4577_35349C.1.pep
MFFDGSLMKTGAGAGLLFISPLEKHIRYVLRLHFPASNNVAEYEDLINGLRIAIELGVRRLDARSDSQLVIDQVMKNSHCRDPKMEAYCDEVRRLEDKFYGLELNHIARRYNETADELAKIASGRTTVPPDVFSRDLHQPSVKIDDTTEPEAPSAQSEVPSAQPEKAPGGYTHLLVAIDKFSKWTEVRPLNNIRSEQAVAFFTNIIHRFGVPNSIITDNGTQFTGRKFLDFCEDHHIRVDWAAVAHPMSNGQVERANDMILQGLKPRIYNDLNKFGKRWMKELPSVVWSLRTTPSRATSFTPFFLVYGAEAVLPTDLEYGSPRTRAYSDQSNQASREDSLDQLEEARDKALLHSAWYQQSLRRYHARGVRSRDLQVGDLVLRLRQDARGRHKLTPPWEGPFVIAKVLKPGTHKLANSQGEVYDNAWNIQQLRCFYP

SEQ ID NO: 298552 - protein, 221 aa, Zea mays
  Clone ID: MRT4577_3534C.1.pep
MALPPHIMALSKGQRLYDACDVVFSSPPVAPTLGDITWLQNILDGVEAADVGIDDGEKPTSSSSDDDLLLPAPAFTRITYVHIHQCDDFSIGVFCFPAGATLPLHDHPEMVVLSKLLYGSVRVRSYDWVAAPPDNSPSPPRRRKRGLARVVAADVVRRAPCPASVLFPRSGGNLHAFSAVTPCAILDVLTPPYSEDHGRPSTYFTDVPVPSLPGFAVLEET

SEQ ID NO: 298553 - protein, 1072 aa, Zea mays
  unsure (1)..(1072): unsure at all Xaa locations
  Clone ID: MRT4577_35350C.1.pep
MGSLQQPLRPGTVLRFGTLEFMSFDGSYDMTLLPPPRDYDNGGRQPARRRRNRRRLPRVVEERYSGSLRSLPRQRRRRRSRQGQAGGRASSAVERIDAPNAPTEGTPDVDLAFETEASAVPPRHADLEQEDDAGALAESLQDVALEPEMTAQPVPDVTTSLLVDQKVTTNFHLASFRLGLNPPNDLVLAGALIEASATSLRFCMRSPWDRLTDVSTYGPSGSEEDDNPSIGWDFSGLGNPSAVRDFMTACDYCLSDYSDGSRSLGDESCGPSRECFHIELGDPTEGNHLGMPEDGDLPRPVPRADIPRELAVVPAPAGGYDPQLEQVREAHARLNGGTGALEPIRRDVGQAWVGRPLAGEIRHLPQGLQHRVANDVRIRPPPASSGVGQNLATAAMLIRAMPEPSTTEGRRIQGELKNLLEGAAARRAESTASRRQGYPSEPHATTSRFMREASVYTERTRNTAPAAPGHLGNEHHRRDRRAHLDERVRRGYHPRRGGRYDSGEDRSPSPEPPGPQAFSRAIRRAPFPTRFRPPTTITKYSGETRPELWLADYRLACQLGGTDDDNLIIRNLPLFLSDTARAWLEHLPPGQISNWDDLVQAFAGNFQGTYVRPGNSWDLRSCRQQPGESLRDYIRRFSKQRTELPNITDSDVIGAFLAGTTCRDLXASELMDIATKFASGQEAVEAIFRKDKQPXGRPSEEAPEASAPRGAKKKGKKKSQSKRDAADAGLVAAAEYKNPRKPPGGANLFDKMLKEPCPYHQGPVKHTLEECVMLRRHFHRAGPPAEGGRAHDDDKNEDHPAGGFPEVRDCFMIYGGHAANTSARHRKQERREVCSVKVAAPVYLDWSDKPITFDRADHPDHVPSPGKYPLVVDPVVGDVRLTKVLMDGGSCLNIIYAETLKLLRVDPSSVRAGAAPFHGIIPGKRVQPLGRLDLPVCFGTPSNFRRETLTFEVVGFRGTYHAVLGRPCYAKFMAVPNYTYLKLRMPGPNGVITVGPTYKHAFECDVECVEYAEALAESEALIADLGNLSKEVPDVKRHAGNFEPAETVKAVPLGPSGDTTKQIRIGPGLDPK

SEQ ID NO: 298554 - protein, 102 aa, Zea mays
  unsure (1)..(102): unsure at all Xaa locations
  Clone ID: MRT4577_35351C.1.pep
VLVLPRGLRASFFRSSRAALFGVFPFALWPLLAAXCGRVPARCCGLPLVAASSLARWSCPVPPCVGGRPSLPRSACWLRWRCWLRRFPCILPPVVAXPSRAT

SEQ ID NO: 298555 - protein, 1554 aa, Zea mays
  Clone ID: MRT4577_35352C.1.pep
MTTGVVSPQHANPKRTDDASTLAKGLLGVSLVPEITVQSVPDTTSSPSIDREWSTWDRLTAVLTYGPPGSEEDDEPDSGWDFSGLGNPSAMRDFMTACDYCLSDCSDDGHNLDDRGCGPSRECFHIDLGGHDEGNHLGIPEDDDPPGPAPRVDILRELAVVPVPAGGQDTQLEQIREMQAKLDEEAGQLVQLRQNIGQEWAGRALAGEARHQAQDVQRRITDDARARLPPASSGVGQNLAAAAILLRAMPEPSTTEGRRIQGELKNLLEDVAVRRAESSASRRQGYPPKHRAVTSRFMQEASVHTGRTRDATPAAPGRLGKEHHRRDRRAHLDEKVRRGYHPRRGGRYDSGEDRSPSPEPPDYRLACQLGGTNDDNLIIRNLSLFLSDAARAWLEHLPPAQISNWDDLVKAFAGNFQGTYPGESLRDYIQRFSKQRTELPNITDSDVIGAFLAGTTCHDLVSKLGRKTPTRASELMDIATKFTSGQEAVEAIFRKDKQPQGRQQEDVPEASAQHDMKKKGKKKSQVKRDAADADLVVAIEHRNPRKPPGGANMFDKMLKESRPYHQGPVKHTLEECVMLRRYFHKAGAPAKGGRGHDNDKKEGNKAEEFPEVHDCFVIYSGRVANASARHRKQERREVCSVKVAAPVYLDWSDKPITFDQGDHPDRVPSPGKYPLVVELVIDNVRLTKIDLSMIRAGAAPFHGIIPGKRVQPLGQLDLPVCFETPSNFRKETLTFEVVGFRGTYHAVLGRPCYAKFMVVPNYTYVKLKMSGPNGVITVGSTYRRAYECDVECVEYAEDLAESEALIADLESLSKEVPDAKRHAGNFEPAEAVFAWSPSDMPGIPRDVAEHSLDIRAGARPVKQPLHRFDEENHRAIGEEIHKLMAAGFIKEVFHPEWLANPMLVKKKGGKWRMCVDYTGLNKACPKVPYPLPRIDQIVDSTAGCETLSFLDAYSGYHQIKIKGNAGATYQRCMNHVFGEHIGRTVEAYVDDIVVKTRKASDLLSDLETTFKCLRAKGVKLNPEKSVFGVPRGMLLGFIVSERGIEANLEKIAAITNIGPIKDLKGVQRAEEALGNLKALLTSDPILVPLAAGEALLIYVAATTQVVSATIVVERREEGHALLIQRPVYFISEVLSETKLRHYFESHPVTVVSSFPLGEIIQCREASGRIAKWAVEIMGETISFAPRKAIKSQVLADFMAEWVDTQLPTAPIQPKLWTMYFDGSLMKTGADAGLLFISPLGKHLRYVLRLHFPVSNNVAEYEALVNGLHITIELGVWRLDARGDSQLVIDQVRRLEDKFYGLELNHVARRYNETADELAKLASGRTTVPPDVFSRDIHQPSVKTDDTPEPEEASAQPEEASAQPEAPLTTEGEELRVEGERDGVTPNRNWIVRSYQRCQFYARQTHLPAQALQTIPITWSFAVWGLDLVGPLQKAPEGFSHLLVAIDKFSKWIEARPLTSIRFEQAVAFFTNIIHRFGVPNSIITDNGTQFTGKKFLDFCEDHHIRVDWAAVAHPMTNGQVERANDMILQGLKLRIYNDLNKFGRRWMKELPSVV

SEQ ID NO: 298556 - protein, 118 aa, Zea mays
  Clone ID: MRT4577_35353C.1.pep
PSHELLFKRCVCQSIHECSTHRLITQPRHLTEQKCNEASTTIYRLYPTFPYYIFRCLIQSRLCRSESRACMWCARITSIIALLHMHMEKCTVLACVRVPFLACMCGLSVSTLASRTHM

SEQ ID NO: 298557 - protein, 672 aa, Zea mays
  Clone ID: MRT4577_35354C.1.pep
MGCLAALSRFISRLGERSLPLYHLLRKAECFTWTPEAEEALGNLKALLTNAPILVPPAAGEALLIYVAATTQVVSAAIVVERREEGHALPVQRPVYFISEVLSETKIRYPQIQKLLYAVILTRRKLRHYFESHPVTVVSSFPLGEIIQCREASGRITKWVVEIMGEAISFAPRKAIKSQVLSDFVAEWVDTQLPTIPIQPELWTMFFDESLMKIGAGAGLLFISPLGKHLRYVLRLHFPVSNNVAEYEALVNGLRIAIELGIRRLDARGDSQLVIDQTWPEAPSVQPEVPSAPEGEALRVEEERSRVTPNRNWQTPYLRYLHRGELPLNRAEARRLARCAKSFVLLGDGKELYHRSLSGILQRCIPIAEGQELLREIHSGACGHHAAPRALVGNAFRQGFYWPTAVADATRIVRTCEGCQFYARQTHLPAQALQTIPITWPSAVWGLDLVGPLQKAPGGYTHLLVAIDKFSKWIEVRPLNSIRSEQAVAFFTNIIHRFRVPNSIITDNGTQFTGRKFLDFCEDHHIRVDWAAVAHPMTNGQVERANDMILQGLKPRIYNDLNKFGKRWMKELPSVVRSLRTTPSRATGFTPFFLVYGAEAILPTDLEYGSPRTRAYADQSNQASREDSLDQLEEARDMALLHSVRYHQSLRRYHARGVRSRDLQVGDLVLRL

SEQ ID NO: 298558 - protein, 1443 aa, Zea mays
  unsure (1)..(1443): unsure at all Xaa locations
  Clone ID: MRT4577_35355C.1.pep
MGSLQQPFRPGTVLRFGSLEFMSLDGSYDMILLPPPCDSDNGGRQPARRWRNRRRLPRVVEEQRSSSPCPLPRRRRRRRGNQGQAGGSASSAVERVDSASAPTGGASGIDLAFETKTSADSPRHANPKQTGDASTLAKGLLDVTLVLETTVQSVPDVTSSPPVDQEVPTDSHLTPFGFSLDPPSGFALADALVEASPNPLGFRVQSPWDRLTDVSTYGPSGSEEDGEPDFCWDFSRLGDPSAMRDFMTACDYCLSDCSDGSRSLGDEDCGPSRECFHLDLGGPSEGNHLGMPEDGDLPRPVPRVDIPRELVVVPVQXGGHDPQLEQIRGVQARLDEGARALEPIRRDVGQAWAGQPPAGEMRHLPXGFQHRIADDEASVCTGRTRNTAPAAPGRLGNEHHHRDRRAHLDERVRRGYHPRRGGHYDSGEDRSPSPEPPGPQAFSRAIRRAPFPTXPTTITKYSGETRPKLWLADYRLACQLGGTNDDNLIIRNLPLFLSDTARAWLEHLPPGQISNWDDLVQAFAGNFQGTYVRPGNYWDLRSCRQQPGESLQDYIRRFSKQRTELPNITDSDVIGAFLAGTTCRDLVSKLGRKTPTRASELMDIATKFASGQEAVEAIFRKDKQPQGRPPEDAPEASTQRGAKKKGKKKSQAKRDAADADLVAAAEYKNPRKPPGGANLFDNMLKEPCPYHQGPVKHTLEECVMLWRHFHRAGSPAEGGRARDDDKKEDHQAGEFPEVRDCFMIYGGQAANASARHRKQERREVCSVKVAAPVYLDWSDKPITFDQADHPDHVPSPGKYPLVVDPVIGDVRLTKVLMDGGSSLNIIYAETLGLLRVDLSSVRAGAAPFHGIVPGKRAQPLGQLDLPVCFGTPSNFRRETLTFEVVGFRGTYHAVLGRPCYAKFMVVPNYTYLKLKMPGPNGVITVGPMYKHAIECDVECVEYAEALAESEALIADLESLYKEVPDVKRHAGNFEPAETEAVLVDFLRANADVLAWSPSDMPGIPRDVAEHSLDIRAGGRPVKQALRRFDEEKRRAIGEEIHKLMAAGFIKEVFHPEWLANPVLVRKKGGKWRMCVDYTGLNKACLKVPYPLPRIDQIMDSTAGCETLSFLDAYFGYHQIRMKESDQLATSFITPFGMYCYVTMSFGLRNAGATYQRYVNHVFGEHIGRTIEAYDDDIVVKTRKASDLLSDLEVTFRCLKAKGVKLNPEKXCVFGVPRGMLLGFIVSERGIEANPEKIAAVTSMGXIKDLKGVQRVMGCLAALSRFIPHLGERGLPLYHLGANNGSPGSLFPRPASTLRQDRRHARARGTLGLAQGTLGSVQGTHGSARGTLGPRGPRTCNFSTEESYPSTEPKLGGWRGASSRSSCWEMGRSSTTAAPQASFSDAFPSSKARSPYERYTWGLATIAQHPEPLLETPGGYTHPWEGPLVIAKILKPGTNELADS

SEQ ID NO: 298559 - protein, 50 aa, Zea mays
  Clone ID: MRT4577_35356C.1.pep
PRVREYKVYGLPTLIFFKNGREVADSRREGAMTKDKFKQYLEPLLTTTVT

SEQ ID NO: 298560 - protein, 674 aa, Zea mays
  unsure (1)..(674): unsure at all Xaa locations
  Clone ID: MRT4577_35357C.1.pep
MPFGLRNAGTTYQRCMNHVFGEHIGRTVEAYVDDIVVKTRKASDLLSDLEVTFRCLKAKGVKLNPEKCVFGVPRGMLLGFIVSERGIEANPEKIAAITSMGPLKGVQRVMGCLAALSRFISRLGERGLPLYRLLRKAECFTWTPEAEESLGNLKALLTKAPILVPPAAGEALLVYVAATTQVVSAAIVVERQEEGHALPVQRPVYFVSEVLSETKIRYPQVQKLLYAVILTRRKLRHYFESHPVLADFVAEWVDTQLPTVPIQPKLWTMFFDGSLMKTGAGTGLLFISPLGKHLRYVLRLHFPASNNVAEYEALVNGLRIAIELGVRRLDARGDSQLVIDQVMKNSHCCDPKMEAYCDEVRRLEDKFYGLELNHIARRYNETADELAKIASGRTTVPSDVFSRDLHQPSVKIDDTSEPEKAPGGXHAPAGRHRQILQVDRGPTPEQHQVRAGGGVLHQHHPSLQGPELHHHRQRHPVHRQKVPGXFCEDHHIRVDWAAVAHPMMNGQVERANGMIYNDLNKFGKRWMKELPSVVWSLRTTPSRATGFTPFFLVYGAEAILPTDLEYGSPRTRAYTDQSNQVSREDSLDQLEEARDKALLHSARYQQSLRRYHARGVRSRDLXDARGRHKLTPPXWEGPFVIAKVLKPGTYKLANSQGEVYDNAWNIQQLRRFYP

SEQ ID NO: 298561 - protein, 85 aa, Zea mays
  Clone ID: MRT4577_35358C.1.pep
FGRLSLRKKNIRKGLKQKRNYINSIYKRMMVYLSASLCLKKSTSPFQYHDEVNIRDEMFQRVGYIFYLKREVCKNAAVSIALSRI

SEQ ID NO: 298562 - protein, 98 aa, Zea mays
  Clone ID: MRT4577_35359C.1.pep
GKSPKKLGWGGKKRGPFFKKKGGFPGVPPPKKFQIGPRFGQPKLGFPRPWGGGQTLTFIPGEEPGQLGTGGLQPIPGDKAGKTGPGVKKPSDFLKGGL

SEQ ID NO: 298563 - protein, 81 aa, Zea mays
  Clone ID: MRT4577_3535C.1.pep
RPLCVMMTALRGRRRNTHVREEESRNPNVTSFPPTWLLISGSKLYLHDTIFDWEIMPRSHRSRRSSPPLVLLALHLQRAPA

SEQ ID NO: 298564 - protein, 73 aa, Zea mays
  Clone ID: MRT4577_35360C.1.pep
CSMFVFLDVHNLPGGFSTGTVSWQQVFGVLALVNPLSFVESRRWPFVGPGSVFSFLGEFQGLVRPNSGFFFLV

SEQ ID NO: 298565 - protein, 76 aa, Zea mays
  Clone ID: MRT4577_35361C.1.pep
QSLSSWWTVGAGWAKTARVTSQPPTVNQTTLSKGSSHPIPYSRPAIATKHTLRVNAKVNKTSNIVIHTIFPLRKGN

SEQ ID NO: 298566 - protein, 46 aa, Zea mays
  unsure (1)..(46): unsure at all Xaa locations
  Clone ID: MRT4577_35362C.1.pep
PTRAVHIQIPTGFDPFTXANAWDSCAAARSKDYVHVPIQQRNGRKN

SEQ ID NO: 298567 - protein, 61 aa, Zea mays
  Clone ID: MRT4577_35363C.1.pep
GHKDSRGSASIFKERQYGLSSEWQDHPELGVLRSKWWHLLVSLRLNEPITGQGMELGVGWR

SEQ ID NO: 298568 - protein, 89 aa, Zea mays
  unsure (1)..(89): unsure at all Xaa locations
  Clone ID: MRT4577_35364C.1.pep
GFSDDLTNNVHGIGHSKENITTNNVSRPFTSGFSIGSCXDSDSIEFSNLANKTGIHNNDDIIXILXSYELQFGVAKEMAGLLQMQQDQV

SEQ ID NO: 298569 - protein, 44 aa, Zea mays
  Clone ID: MRT4577_35365C.1.pep
ADMVNSGVEDVEAIIRCGGHQRDGADETVVWEWERVREKAKRWA

SEQ ID NO: 298570 - protein, 59 aa, Zea mays
  Clone ID: MRT4577_35366C.1.pep
PWLGVPGQILAPTKPIYKLKKPWGAIGLGGSSSGFDLVFLLALCRARPWRAVRPGYSNP

SEQ ID NO: 298571 - protein, 49 aa, Zea mays
  unsure (1)..(49): unsure at all Xaa locations
  Clone ID: MRT4577_35367C.1.pep
TDSXFVPRFLRRLVSNARVFVYSASVLPPGVRYFTDLSVLLALQISEIE

SEQ ID NO: 298572 - protein, 55 aa, Zea mays
  Clone ID: MRT4577_35368C.1.pep
KPLGKDCTDLITILLLSFLHCDSLSCCLWSHTASPLSLSCMLMWPIGMLYKQRSL

SEQ ID NO: 298573 - protein, 55 aa, Zea mays
  Clone ID: MRT4577_35369C.1.pep
RVSHIPECRPPQQSSPGFHGPIVSASVLSLHRQQMLTTSQISHSKLHQVIRERGK

SEQ ID NO: 298574 - protein, 105 aa, Zea mays
  Clone ID: MRT4577_3536C.1.pep
MAGMARNAVLVLVLAGVLLQLCSVMPPVAGADRRALLVDTQLVHGGGGGNVKREASGTCVNGGGNAGPGEATAIEGAAYCHDRQQYVSMTTVGGLTETESVHEAP

SEQ ID NO: 298575 - protein, 33 aa, Zea mays
  Clone ID: MRT4577_35370C.1.pep
NLISIASRRFTVRDLRPPVGHRVRLIWCHLNLI

SEQ ID NO: 298576 - protein, 51 aa, Zea mays
  unsure (1)..(51): unsure at all Xaa locations
  Clone ID: MRT4577_35371C.1.pep
APCGCXVVWAGRTAVSAAVRVVXARFAVAVHGKSCSCEXVLCRNGARPSRG

SEQ ID NO: 298577 - protein, 204 aa, Zea mays
  Clone ID: MRT4577_35372C.1.pep
MATAARERRLPPALPLATLIGRELRAGGSERPALRYGHAGFAKRGEDYFLVKPDCLRVPGDPASAFSVFAVFDGHNGVSAAVYSKEHLLEHVMSALSPDIGREDWLQALPRALVAGFVKADIDFQRKGEVSGTTATLVVIDGFTVTVASVGDSRCILDTQGGELQLLTVDHRLEENAEERERVTASGGEVGRLNLFGGQEVRSY

SEQ ID NO: 298578 - protein, 888 aa, Zea mays
  Clone ID: MRT4577_35373C.1.pep
MGSLQQPLQPETMLRFGSLEFMSLDGSYNMILLPPLCDNDNGGCQPARRWRNRRRLPLVAEEQHPGLSCHLPRRRRRRRGRHGQAGGDTSSAVERVDDAGAPAGDTSGIDLTSETKTSAVSQQRANSKRTDDANTLSKDMLGVSLVPETTVQSIPDATSSPPVDQEDRLTAVSTYGPLGSEEDDEPDSGWDFSGLDNPSAMRDFMTACDYCLSDCSDSSHSLGDEDCGPSRECFHVDLGGLDEGNHLGIPEDGDPPRPAPRVDILQELDVVPIPAGGGGGQDAQLEQIREVQARLDEEAGQLVQLRQNIGQEWAGRAPAGEARHLAQDVQHRIADDARARLPPASSGVGQNLAVAAILLRAMPEPSTTEGRRAESSTSRTQGYPPEQRAATSRFMREASVHTGHTWNTAPAAPGRLGNEYHRRDRRAHLDEKGTYVRPRNSWDLRSCRQQPGESLRDYIRRFSKQRTELPNITDSDVIGAFLAGTTCHDLVSKLGRKTLTRASELMDIATKFASGQEAVEAIFRKDKQPQGHQPEDVPEASAQRGARKKGKKKSQAKCDAADADLVAATEHRNPGKPPGGTNLFDKMLKESCPYHQGPVKHTLGECVMLQRYFHRAGPPAEGGRAHNDDKKEGHKAEEFPEVHDCFMIYGGHVANASARHRKQERREVCSVKVAMPVYLDWSDKPITFDQGDHPDRVPSPGKYPLVVDPVIGNIRLTKVLMDGGSSLNIIYVDLSSIRAGATPFHGIIPGKRVQPLGQLDLPETLTFEVVGFRGTYHAVLGRPCYAKFMAVPNYTYLKLKMSGPNRVITIGSTYRHTYECDVECVEYAEALAESEALIADLESLSKEAPDAKRHAGNFVPAETVKSVPLDPNNDASKQIRIGSELDPK

SEQ ID NO: 298579 - protein, 952 aa, Zea mays
  unsure (1)..(952): unsure at all Xaa locations
  Clone ID: MRT4577_35374C.1.pep
GGRQPARRRRNRRHLPRVVEEQHSSSPHPLPRQRRRRRGNQGQAGGRASSAVERIDVPSAPTGGASGVDLAFETKASAVPPRHANPEQVDDASALAESLQDVALVPETTVQSVPDXLNPPSDLALAGALVEASATPLGFRTRSPWDRLTDVSTYGPSGSEEDDDPSICWDFSGFGNPSAMRDFMTACDYCLSDCSDGSRSLDDEDCGPSRECFHVELGDPSEGNHLGMPEDGDLPRPVWAGQPPAGEVRHLPHGFQHRVANDVRVRPPPASSGVGQNLAAAAMLLRAMPEPSTTEGRRIQGELKNLLEGAAVRRAESSASRRQGYPSEPHAATSRFMREASVYTGRTRNTAPAAPGHLGNEHHRRDCRAHLDERVRRGYHPRRGGRYDSGEDRSPSPEPPGPQAFSRAIRRAPFPTRFRPPTTITKYSGETRPELWLADYRLACQLGGTDDDNLIIRNLPLFLSDTARAWLEHLPPGQISNWDDLVQAFAGNFQGTYVRPGNSWDLRSCRQQPGESLRDYIRRFSKQRTELPNITDSDVIGAFLAGTTCRDLVSKLGRKTPTRASELMDIATKFASGQEAVEAIFRKDKQPQGRPSEDAPEASTPRGAKKEGRKKSQAKRNAADTDLVAAAEYKNPRKPPGGPVKHTLEECVMLRRHFHRAGPPAEGGRAHDDDKKEDHQAGEFPKVRDCFMIYGGHVANASARHRKQERREVCSVKVAAPVYLDWSDEPITFDQADHPDHVPSPGKYPLVVDPIVGDVRLTKVLMDGGSCLNIIYAETLRLLCVDLSSVRAGAAPFHGIIPGKRVQPLGRLDLPVCFGTPSNFRRETLTFEVVGFRGTYHAVLGRPCYAKFMAVPNYTHLKLKMPGPNGVITVGPTYKHAFECDVECVEYAEALAESEALIADLESLSKEVPDVKRHAGNFEPAETVKAVPLDPSGDTSKQIRIGSRLDPK

SEQ ID NO: 298580 - protein, 851 aa, Zea mays
  unsure (1)..(851): unsure at all Xaa locations
  Clone ID: MRT4577_35375C.1.pep
GGRQPARRRRNRRHLPRVVEEQHSSSPRPLPRQRRRRRGNQGQAGGRASSAVERIDVPSAPTGGASGVDLAFETKASTVPPRHTKPEQVDDASALVEGLQGVALVPKTTXAMRDFMTACDYCLSDCSDGSRSLDDEDCGPSRECFHVELGDPSEGNHLGMLEDGDLPRTVPRADIPRELAVVPVPAGGHDPQLEQVRGAQARLDEGAGALESIHRDVGXRVRPPPASSGVGXNLAAAAMLLRAMPEPSTTEGRRIQGELKNLLEGAAAQRAESSASRRQGYPSEPHAATSRFMREASVYTGRTRNTTPAAPGHLGNEHHRRDRRAHLDERVRRGYHPRRGGRYDSGEDRSPSPEPPGPQAFSRAIRRAPFPARFRPPTTITKYSGETRPELWLADYRLACQLGGTDDDNLIIRNLPLFLSDTARAWLEHLPPGQISNWDDLVQAFAGNFQGTYRTELPNITDSDVIGAFLAGTTCRDLVSKLGRKTPTRASELMDIATKFASGQEAVEAIFRKDKQPQGRPSEEAPEASTPRGAKKKGKKKSQAKRDAADADLVAAAEYKNPRKPPGGANLFDKMLKEPCPYHQGPIKHTLEECVMLRRHFRRAGPPAEGGRARDDDKKEDHQAGEFPEVRDCFMIYGGHAANDSARHRKQERREVCSVKVAAPVFLDWSDKPITFDQADHPNHVPSPGKYPLVVDPIVGDVRLTKPLGRLDLPVCFGTPSNFRRETLTFEVVGFRGTYHAVLGRPCYAKFMAVPNYTYLKLKMPGPNGVITVGPAYKHAFECDVECVEYAEALAESEALIADLENLSKEVPDVKRHTGNFEPAETVKAVPLDPSGDTSKQIRIGSGLDPK

SEQ ID NO: 298581 - protein, 332 aa, Zea mays
  Clone ID: MRT4577_35376C.1.pep
PRVRDTVAIAPFVKDVLDSIEFARGSANSTWGSVRAAMGHPEPFPVKYVAIGNEDCGKKFYRGNYLKFYNAIRQAYPDIQMISNCDGSSTPLDHPADLYDFHVYNDSKTLFNMKSTFDRTSRSGPKAFVSEYAVWRGDAGRGSLLASLAEAAFLTGLEKNSDIVSMASYAPLFVNDNDQTWNPDAIVFNSWQHYGTPSYWMQTLFRESSGAMFHPTTISSSYSGSLAASAITWQDSENSFLRVKVINFGSDAVTLTISTSGLQASINALGSTATVLTSADVMDENSFSNPTKVVPVKSDLSNAAEQMQVTLAPRSFSSFDLALAQSKLVAEM

SEQ ID NO: 298582 - protein, 95 aa, Zea mays
  unsure (1)..(95): unsure at all Xaa locations
  Clone ID: MRT4577_35377C.1.pep
MHALCXAALVTVTICQGYVERQMLMDLQCWQEVQESPIDACRQVLDRQLTGSCISGPFQWCTGLRMQCCXQQLQYMSRECRCADIRSMVRSYEEA

SEQ ID NO: 298583 - protein, 246 aa, Zea mays
  Clone ID: MRT4577_35378C.1.pep
RTWHHGRDPSLSAVDSGTSPRYHPWQVATVFPVLRSSEYFTSPSIDELVEREVADPGYCSRVPNFIIGRAGYGQVRFLGNTDVRGIDLNEIVRFEKHYVVVYEDETCKPPVGHGLNKAAEVSLLLNLKDHPEPSILVEVLRCRARKQGSRFLSFNPVNGKWKFEVDHFSRFGLVDEDEENAVMDEAAVRQPITEVRERDPPSNSYEIELSHSLPAHLGLDPAKVQEMRMVMFSNEEEENTGGWVPF

SEQ ID NO: 298584 - protein, 139 aa, Zea mays
  unsure (1)..(139): unsure at all Xaa locations
  Clone ID: MRT4577_35379C.1.pep
LLTGRRPMEHVRVRSAHAEQQVKLVDWXRPYLSGGSRRLRCIVDQRLAGHYSVKGARAVAQLAVQCTAQQPRDRPRMAAVVEALEKLQGLKDMAVAVGLWPAAAATATGAGHRSAKVVRAEVKGAGAASRRRSASSKLA

SEQ ID NO: 298585 - protein, 79 aa, Zea mays
  Clone ID: MRT4577_3537C.1.pep
SSKSSDKSRSHSIGPVSIPQPHGSFTITRNIPLTGIKWGFFWHPFLMLIIFHFQILCLIFSFSNIRPFSCIKISLSSYI

SEQ ID NO: 298586 - protein, 1040 aa, Zea mays
  Clone ID: MRT4577_35380C.1.pep
MGSLQQPLQPRTVLRFGSLKFMSLDGGYDMILLPPPRDNDNGGRQPARRRRNRRRLPRVVEEQPSRSSRLLPRRRRGRQGNQGQAGGSASSAVEQVDRAGTPTGGAPDIDFALETKTSAVSPRHANPEQADDASALAKSLLDVTLIPETTVQSVPDVTLSPLVDQEVPTDSRPTSFGFSLNPPSDPALAGALVEASPNPLGFRMRSPWDRLTDVSTYGASGSEEDDEPSICWDFSGLGNPSVVRDFMTACDYCLSDCSDGSRSLGDKDCGPSRECFHVDLGGPSEDNHLGMPEDGDLPRPAPRVDIPRELVVVPVQAGGHDPQLEQIRGVQARLDEGAGALEPIRLDVGQAWAGQPPAREIRHLPQGFQHRVADDVRVRPPPASSGVGQNLAAAAMLLRAMPEPSTTEGRRIQGELKNLLEGAAVRRAESSASRRQGYPSEPHAATSRFMREASVYTGRTRNTAPAAPGRLCNEHHHRDRRAHLDERVRRGYHPRRGGRYDSGEDRSPSPEPPGSQAFSRAIRRAPFPTRFRPPTTITKYSGETRPELWLADYRLACQLGGTDDDNLIIRNLPLFLSDTARAWLEHLPPGQISNWDNLVQAFAGNFQGTCRQQPGESLWDYIRRFSKQRTELPNITDSDVIGAFLAGTTCCDLVSKLGRKTPTRASELMDIATKFVSGQEAVEAIFRKDKQPQGRPSKDAPEASTQRGAKKKGKKKSQAKRDAADADLMLKEPCPYHQGPVKHTLEECVMLRRHFHRAGPPAEGGRARDDDKKEDHQAGEFPDVRDCFMIYGGQAANASARHRKQERREVCSVKVAAPVYLDWSNKPITFDQADHLDHVPSPGKYPLVVDPVIGDVRLTKVLMDGGSSLNIIYVETLGLLRVDLSSVRAGAAPFHGIIPGKRVQPLGKLDLPVCFGTPSNFRRETLTFEVVGFRGTYHAVLGRPCNAKFMAVPNYTYLKLKMPGPNGVITVGPTYKHAFECDVEYAEALIVDLESLSKEVPDVKRHAGNFEPVETVKAVPLGPSGDASKQIRIGFGLDPK

SEQ ID NO: 298587 - protein, 316 aa, Zea mays
  Clone ID: MRT4577_35381C.1.pep
MGETISFAPRKAIKSQVLADFVAEWVDTQLLTAPIQPELWTMFFGGSLMKTGAGAGLLFISPLGKHLRYVLHLHFPASNNVAEYEALVNGLRIAIELGVRRLDALCDSQLVIDQVMKNSHCRDPKMEAYCDEVRRLEDKFYGLELNHIARRYNETADELAKIASGQTTVPLDVFSRDLHQPSVKTDDAPEPEKASAQPEAPSAQSEAPSAQPKAPSARPEAPSARPEAPSARPEAPSASEGEALRIEEERSGVTPNRNWQTSYLQYLHRGELHLDQAEARRLARRAKSFVLLGDGKELYHRSPSGILQRCISIAEG

SEQ ID NO: 298588 - protein, 755 aa, Zea mays
  Clone ID: MRT4577_35382C.1.pep
MLLGFIVSERGIEANPEKIAAITNMGPIKDLKGVQRVMGCLVALSRFISRLGERGLPLYRLLRKTERFTWTPEAEEALRNLKAPLTSAPILVPPTAGEALLIYVVATTQVVSAAIVAERREEGHALPVQRPVYFISEVLSETKIRYLQIQKLLYVVILTRRKLRHYFESHPVTVVSSFPLGEIIQCREASGRIAKWAVEIMGETISFAPRKAIKSQVLADFVAEWVDTHLPTALIQPELWTMYFDGSLMKTGAGAGLLFISPLGKHLRYVLRFHFPASNNVAEYEALVNGLCIAIELGVRRLDARGDSQLVIDQVMKNSHCSDPKMEAYCDEVRRLEDKFYGLELIHVARRYNETADKLAKIASRWTTIPPDVFSQDLHQPSVNTDDTPEPEKASALPEVPSAQPEAASAPPEAPSAPEGEALHVEEERNEVTPNRNWQTSYLQYLHRGELPLDRAEARQLARRAKSFVLLDDEKELYHRSPSGILRRCISITEGQELLQEIHSGACGHHAAPRALVGNVFRQGFYWPTAVADATRIVRTCQGCQFYARQTHLLAQALQTIPITWPFAVWGLDLVGPLQKAPRGFTHLLVAIDKFSKWIEVRPLNSIRSEQAVAFFTNIIHCFGVPNSIITDNGTQFTGRKFLDFCEDHHIRVDWAIVAHPMTNGQVERANGMILQGLKPRIYNNLNKFDRRWMKELPSVVWSLRTTPSRATGFTPFFLVYGAEAILPTDLEYGSPRTRAYDARSNQTNREDSLD

SEQ ID NO: 298589 - protein, 777 aa, Zea mays
  Clone ID: MRT4577_35383C.1.pep
GVTLSDLEVTFRCLKAKGVKLNPEKCVFGVPRGMLLGFIVSERGIEANPEKIAAITSMGPIKDLKGVQRVMGCLAALSRFISRLGERGLPLYRLLRKAECFTWTPEAEEALGNLKALLTKAPILVPPAAGEALLVYVAATTQVVSAAIVVERQEEGHALSIQRPVYFVSEVLSETKIRYPQVQKLLYAVILTRRKLRHYFESHPVTVVSSFPLGEIIQCREASGRIAKWAVEIMGEIISFAPRKAIRSQVLADFVAEWVDTQLPTAPIQPELWTMFFDGSLMKTGAGAGLLFISPLGKHLRYVLRLHFPASNNVAEYEALVNGLRIAIELGVRRLDARDDSQLVIDQVMKNSHSRDPKMEAYCDEVRRLEDKFYGLELNHIARRYNETADELAKIASGRTTVPPDVFSRDLHQPSVKIDDPPEPEAPSTQSEVPSVQPEVPSAQPEAPSARPEAPSVQPEVPSASEGEALRIEEEQSGATPDRNWQTPYLQYLQQGELPLDRSEARRVAWRAKSFVLLGDEKELYHRSPLGILQRCISVAEGQELLREIHSGACGHHAAPRALVGNAFRQGFYWPTAVADAARIALQTIPITWPFAVWGLDLVGPLQKAPGGYTHLLVAIDKFSKWIEVRPLNSIRSEQAVAFFTNIIHRFGVPNSIITDNGTQFTGRKFLDFCEDHRIRVDWAAVAHPMSNGQVEHANGMILQGLKPRIYNDLNKFGKRWKKELPSVVWSLRTTPSRTTGFTLFFLVYGAEAVLPTDLEYDSPRTRAYRDQSNQAS

SEQ ID NO: 298590 - protein, 63 aa, Zea mays
  Clone ID: MRT4577_35384C.1.pep
NRACTRTPLTIPLEPFPAIFISHQSPIGQTGVQPDDQKTLHETILLYDYLVYIICLLKPIHYC

SEQ ID NO: 298591 - protein, 886 aa, Zea mays
  Clone ID: MRT4577_35385C.1.pep
MPFGLRNAGATYQRCMNHVFGQHIGRTVEAYVDDIIVKTRKASDLLSDLEVTFRCLKAKGVKLNPEKCVFGVPRGMLLGFIVSERGIEANPEKIAAITRMGPIKDLKGVQRVMGCLAALSRFISRLGERGLPLYRLLRKAECFTWTLEAEEALGNLKALLTNAPILVPPAAGETLLIYVAATTQLRHYFESHPVTVVSSFPLGEIIQCREASGRIAKWAVEIMGEAISFAPQKAIKSQVLADFVAEWVDTQLPTAPIQPELWTMFFDGSLMKTGAGAGLLFISPLGKHLRYVLRLHFPASNNVAEYEALVNGLRIAIELGVRRLNARGDSRLVIDQVMKNSHCRDPKMEAYCDEVRRLEDKFYELELNHIARRYNETADELAKIASGRTTVPPDVFSRDLHQPSIKIDDTPEPEAPSAQPEVPLAQSEASSARPKAPSARSEAPSVQPSAPSAPEGEALRVEEERSGVTPNQNWQTPYLKYLHRGELSLDRAEARRLARRAKSFVLLGDGKELYHRSPSGILQRCISIAEGQELLQEIHSGACGHHATPRAFVGNAFRQGFYWPTAVADATRIVRTCEGCQFYARQTHLPAQALQTIPITWPFAVWGLDLVGPLQKAPGGYTHLLVAIDKFSKWIEVRPLNSIRSEQAVAFFTNIIHRFGVPNSIIIDNGTQFTGRKFLDFCEDHHIRVDWAAVAHPMTNGQVERANGMILQGLKPQIYNDLNKFGKRWMKELPSVVWSLRTTPSRATGFTPFFLVYGAEAILPTDLEYGSPRTRAYADQSNQANREDLLDQLEEARDKALLHSARYQQSLRRYHARGVRSRDLQTGDLVLRLRQDARGRHKLTPPWEGPFVIAKVLKPGTYKLANSQGEVYSNAWNIQQLRRFYP

SEQ ID NO: 298592 - protein, 959 aa, Zea mays
  Clone ID: MRT4577_35386C.1.pep
MGSLQQPLRPGTVLRFGSLEFMSFDGSYDMILLPPPRDNDNGGRQPARRRRIRRHLPRVVEEQHSSSLRPLPRQRRRRRGNQGQAGGRASSAVERIDAPDAPTEGTPGVDLAFKTKASVVPPRHADPEQDDDASALAESLQDVALVPRTTVQPFPDVTTSLLVDQKVLTNSHLTSFRLGLNPPSNLALTGALIEASATPLGFRMRSPWDRLTDVSTYGPSGSEEDDDPSICWDFFGLGNPSAMWDFMTACDYCLSDCSDGSRSLDDEGCGPSRECFHIELGDPSEGNHFGMPEDGDLPRPAPRADIPRELAVVPVPVGGHDPQLEQVREAQARLNEGTGALEPIRRDIGQVWAGQPSAGEIRHLPQGLQHRVANDVRVRPPPASSGVGQNLAAAAMLLRAMPEPSTTEGRRIQGELKNILEGAAARRAESTASRRQGYPSEPHAATSRFMREASVYTGRTRNTAPAAPGHLGNEHHRRDRRAHLDERVRRGYHPRRGGATTAGRIGVPRPNHPISSWDDLVQAFAGNFQGTYVRPGNSWDLRSCRQQPGESLRDYIRRFSKQRTELPNITDSDVIGAFLAGTTCRDLVSKLGRKTPTRASELMDIATKFASGQEAVEAIFRKDKQPQGRPSEEAPEASTPRGAKKKGKKKSQSKRDAADADLVAAEYKNPRKPPGGANLFDKMLKEPCPYHQGPVKHTLEECAMLRRHFHRVGPPAEGGRAHDDDTKEDHQAGEYPEVRDCFMIYGGHATNASARHRKRERREVCSVKVAAPVYLDWSDKPITFDQADHPDHVPSPGKYPLVVDPVIGDVRLTKPLGRLDLPVCFGTPSNFRRETLTFEVVGFRGTYHAVLGRPCYAKFMVVPNYTYLKLKMPGPNGVITVGPTYKHAFECDVECVEYAEALAESEALIADLENLSKEVPDVKRHAGNFEPAETVKAVPLDPSGDASKQIRIGSGLDPK

SEQ ID NO: 298593 - protein, 84 aa, Zea mays
  Clone ID: MRT4577_35387C.1.pep
CLSGACAAFVLRCAVWLVARPCVSCVWACSSSFGGCALPRLRVALLGPVRFCWPWGFAAFLLTPLFLGGPVDRPRSRVIPAGPA

SEQ ID NO: 298594 - protein, 972 aa, Zea mays
  Clone ID: MRT4577_35388C.1.pep
MGSLQQPFQPGTVLRFGSLEFMSLDGSYDMILLPPPRDSDNGGRQPARRRRNRRRLPRVVEEQHSSSPRPLPRRRRRRRGNQGQAGGGTSSAVERVEDASAPIGGTSGIDLASETKTSVVSLQHANPKQTDDASTLAKDLLGVTLVPETTVQSAPDVTSSPPVDQEVPTDSHLTPFGFSLDPPSDFALVDALIEASPNPLGYRMRSPWDRLTVVSTYGPSGSEEDDEPDFCWDFSGLGNPSAMRDFMTACDYCLSDCSDGSRSLGDEDCGPSRECFHVDLGGPDEGNHLGMPENGDLPRPVPRVDILRELVVGIQHRVADDVMVRPPPVSSGVGQNLAAAAILLRAMPEPSTTEGRRIQGELKNLPEDAAVRRAESSASRRQGYPSKHRAATSRFMREASVHTGRTRNTAPAAPGRLGNKHHHRNRRAHLDERVRRGYHPRRGGRYDSGEDRSPSPEPPGLQAFSRAIQRASFLTRFRTPTTITKYSGETRPELWLADYRLACQLGGTDDDNLIIRNLPLFLSDTARAWLEHLPPGQISNWDDLVQAFADNFQGTCRQQSGESLRDYIRRFSKQRTELPNITDSDVIGAFLVDTTCRDLVSKLGRKTPTRASELMDIATKFASGQEAVEAIFRKDKQPQGRPPEDVPEASTQCGAKKKGKKKSQAKRNAADADLVAAAEYKNPRKPPAGANLFDKMLKESCPYHQGPVKHTLEECAMLRRHFHKAGPPAEGGRARDDDKKEDHQAGEFPKVRDCFMIYGGQVANASVRHRKQERREVCSVKVAAPVYLDWSDKPITFDQDDHPDRVLSPGKYPLVVDPVIGNVRLTKVLMDGGGSLNIIYAETLGLLRMDLSSVRAGAAPFHGIIPGKRVQPLGQLDLPVCFGTPSNFRRETLTFEVVGFRGTYHAVLGRPCYAKFMVVPNYTYLKLKMSDPNGVITVGPTYRHVYECDVECVEYAEALAESEALIADLEPL

SEQ ID NO: 298595 - protein, 152 aa, Zea mays
  Clone ID: MRT4577_35389C.1.pep
MTGILRDFLESSGVVVGSTDDILLYTLSEEELFELFQIVSSQLSFIWNEFLKFHRTHKDKVMGYLHDMWDINRKAEWSIWIIHSKIEIPHRYLRSMNDDSPRHLIRISSSRKVHHDPIQNSMSQAELHRKSIAQMKSSMSWLFRNIVLARIF

SEQ ID NO: 298596 - protein, 122 aa, Zea mays
  unsure (1)..(122): unsure at all Xaa locations
  Clone ID: MRT4577_3538C.1.pep
LFPFASVVGVLXGVSALGFPFXXSFCFVRVLACVSPLFXALSVXPVCRPFPFFLAWVAWSPLVCCCVRAVSSLVSWCCRLPLLSWVPCSFSCWCPLLFVPPLVSCLVFPMSPRGSSRVFRAG

SEQ ID NO: 298597 - protein, 94 aa, Zea mays
  Clone ID: MRT4577_35390C.1.pep
PPLGPICPPQRMAYHPPVCLQSSEFAPRGGTPQDQTPIYFFFFFFPIFYIFFTFFFFFFLFFFYLFFFFFFFPYIPPPSISMVHSGHCSHCHPW

SEQ ID NO: 298598 - protein, 56 aa, Zea mays
  Clone ID: MRT4577_35391C.1.pep
AGVKNPIEPTNHGSGTWIAAFHALLFKAKSLGILHPFKSFFTASSYVNFGLPLTSH

SEQ ID NO: 298599 - protein, 129 aa, Zea mays
  Clone ID: MRT4577_35392C.1.pep
MATTVMTTLPQFSGLRPQFSAAPVKNLVAVQPMSRKGKGALGARCDYIGSSTNLIMVASTTLMLFAGRFGLAPSANRKATAGLKLEVGDSGLQTGDPAGFTLADTLACGSVGHIIGVGVVLGLKNIGAL

SEQ ID NO: 298600 - protein, 148 aa, Zea mays
  unsure (1)..(148): unsure at all Xaa locations
  Clone ID: MRT4577_35393C.1.pep
FTLGDILPTIGLSGPTCLVPMIDTAHGIVDXTGSQLNVLKLIDCGHFTLRVDSQYGPWSNEEQETIDAIVRARQLPLXLVLAGYGDEPWEHGXHFEDNIXPVGKYDNFELVNFKDVNGLRIATERMVAKFKLPALMENRTTVQRSSGF

SEQ ID NO: 298601 - protein, 144 aa, Zea mays
  unsure (1)..(144): unsure at all Xaa locations
  Clone ID: MRT4577_35395C.1.pep
MTAVLPNRLLPSLMPATWRGEGYRRLFPVAFLELHLGESNSINARRLRDARITTVDLGVVSSADXSALVQLXGDTAMLLTVKIEEMPTSHEKPDKRSISXEVHLPPLWSQLVRPRLICACAPSASPRSLEDFWMMYIMLNLKEL

SEQ ID NO: 298602 - protein, 122 aa, Zea mays
  Clone ID: MRT4577_35396C.1.pep
NHHPTETSNQPLYFLPHASRYPRKLPSNLLLDNPQYGDCTAGWSRRPRAQVSTPKTVKTKQRDGRVSITQHRVPASRRSSSNTFQGQLNWIAPRLMYMFLRGPSSLNEAYSLEGAASSSTIA

SEQ ID NO: 298603 - protein, 82 aa, Zea mays
  Clone ID: MRT4577_35397C.1.pep
INGSPPPAPLKPGSDNLFPKLAQLKIVVTPQGFSPLGVLAPPVVWYWNFFSLATMLSHLVDRPWVVPRFPVRDYSIGILKLG

SEQ ID NO: 298604 - protein, 192 aa, Zea mays
  unsure (1)..(192): unsure at all Xaa locations
  Clone ID: MRT4577_35398C.1.pep
MPGDHGSKGDISFAGRFTASAIAACFAEICTIPLDTAKVRLQLQKNVVAAAASGDAAPALPKYRGLLGTAATIXXREEGAAALWKGIVPGLHRQCIYGGXKLAPGVPRRYTGAMDAYSKIARQEGVAALWTGLGPNVARNAIINAAELASYDQVKQSILKLPXFKDDVVTHLFAGLGAGFFAVCVGSPVGVV

SEQ ID NO: 298605 - protein, 54 aa, Zea mays
  Clone ID: MRT4577_35399C.1.pep
RWQTTPQRYAEPHALPTSQCHPSLLPEIRGVLETSPIPAAYTGRSRSPNHDILS

SEQ ID NO: 298606 - protein, 53 aa, Zea mays
  Clone ID: MRT4577_3539C.1.pep
FILTKKKTEWPILCLPLKKSPFIEFGTVWFSIPNKISRVNQLVVHFPKTGNHF

SEQ ID NO: 298607 - protein, 96 aa, Zea mays
  Clone ID: MRT4577_353C.1.pep
ILHIGIVRYIKDITVFSPCKHDEHVAQSLLRFSVAYFMCHKMLRLNTDVEASSSLQLVLVTFSKYESLIPKPNQKVAKIGYFQGPLAKTYSPHLVN

SEQ ID NO: 298608 - protein, 188 aa, Zea mays
  Clone ID: MRT4577_35400C.1.pep
MAVDEASSSGGGEEGCGSWTREQEKAFENAVATMGGEEDGDARWEKLAEAVEGKTPEEVRRHYELLVEDVDGIESGRVPLPAYAADGAAEEGGGGGKKGSGGGGTHGDKGSAKSAEQERRKGIAWTEDEHRLFLLGLEKYGKGDWRSISRNFVISRTPTQVASHAQKYFIRLNSMNRERRRSSIHDIT

SEQ ID NO: 298609 - protein, 68 aa, Zea mays
  Clone ID: MRT4577_35401C.1.pep
MRMNKHKKKKKKKRKKKKKKKKKKKKKKKKKKKKKKKKKKKKKKKKKKKKRGGALLKDPSLLPRVCNV

SEQ ID NO: 298610 - protein, 310 aa, Zea mays
  Clone ID: MRT4577_35402C.1.pep
MPGDHGSKGDISFAGRFTASAIAACFAEICTIPLDTAKVRLQLQKNVVAAAASGDAAPALPKYRGLLGTAATIAREEGAAALWKGIVPGLHRQCIYGGLRIGLYEPVKSFYVGKDHVGDVPLSKKIAAGFTTGAIAISIANPTDLVKVRLQAEGKLAPGVPRRYTGAMDAYSKIARQEGVAALWTGLGPNVARNAIINAAELASYDQVKQSILKLPGFKDDVVTHLFAGLGAGFFAVCVGSPVDVVKSRMMGDSAYKSTLDCFVKTLKNDGPLAFYKGFLPNFARLGSWNVIMFLTLEQVQKLFVRKATS

SEQ ID NO: 298611 - protein, 137 aa, Zea mays
  unsure (1)..(137): unsure at all Xaa locations
  Clone ID: MRT4577_35403C.1.pep
ATVFAAGPLFILSGGHDYKKRGMNEPGAVEELACMLTKGSARGKKDSDGALFNLSTHPEGXGRMLEQFAVASIIGSLRNDTHGEEAAGALSLLLNHPIIAHLVGSSETETTSLVGFNTNGTPMGKENALSALTDICR

SEQ ID NO: 298612 - protein, 81 aa, Zea mays
  Clone ID: MRT4577_35404C.1.pep
FSAVSKCKRHAVPPPPSVTDMVIGVTPPPRLTGPGQRRYLFGSDTCKTDSNAPISHILIRIRIRIRILSDTNTKRIVRIRN

SEQ ID NO: 298613 - protein, 49 aa, Zea mays
  Clone ID: MRT4577_35405C.1.pep
LKSNSPCYFLGSFKTLLGLNPKCFFCKIGCHQKFGLGLWDENFCCNVRC

SEQ ID NO: 298614 - protein, 49 aa, Zea mays
  Clone ID: MRT4577_35406C.1.pep
PKKHTLSMDTISPIIPTMCTCTCYNIDVNSTRKIHTHTEALVLLHTKAR

SEQ ID NO: 298615 - protein, 74 aa, Zea mays
  unsure (1)..(74): unsure at all Xaa locations
  Clone ID: MRT4577_35407C.1.pep
QKRGEKRLGVVFPGNQVIFGAPPPPPLKKKKLKRXFFKKKKKKKKKKKKKKKKKKKKKKKKKKKKKKKKKKNPH

SEQ ID NO: 298616 - protein, 82 aa, Zea mays
  unsure (1)..(82): unsure at all Xaa locations
  Clone ID: MRT4577_35408C.1.pep
FSPGAVXALAAPSXVAVSFXVPVSAAXVAAAGALRLLVAVRLSRGPLRXRXAGSSXLCGSXPPPRRGVLCPLPLPAPASRLV

SEQ ID NO: 298617 - protein, 1296 aa, Zea mays
  unsure (1)..(1296): unsure at all Xaa locations
  Clone ID: MRT4577_35409C.1.pep
MPEPSTTEGRRIQGELKDLLENATVRRAESSASRRRGCPLEHRAASSRRIREASVHTGRTGDGTHAALDRLSSEQHCRDRRARLEERVRRGYHPKRGGRYDSEEDQIPSPEPPGTYVRPGNSWDLRSCRQQLGKSLREYIRRFSKQCTELPNITDSDVIGAFLAGSTCRDLRGTKKKTRKKVQAKHNVVDADLVAAAEHRNPRKPPEGANMFDKMLNESCLYHRGLVKHTLEECDMLRRYFNKAGPLAEGGKDQGNNKKGGNKEEEFPEVHNCFMIYDGQVVNASARHRKQERREVCSVKVATPVYLDWSDKPITFDQGDHPDCIPSPGRYPLVVDPVIGNARLSKVLMDGGSSLNIIYAETLGLLGVDLSTIWAGASPFHGIVPGKRVLPLGQLDLPVCFGTPSNFRNKTLTFEVVGFRGTYHAVLGRPCYDKFMAVPNYTYLKLKMSGPNGTITVGSTYRHAYECDVECVEYAEAIADLDCLSKEAPDAKRHADSFEPAEAVKSVSLDPSNNAGKKETVLVDFLRANAEIFAWSPSDMPGIPRDVAEHSLDIRAGARPVKQHLRRFDEEKRRAIGEEVHKLMAAGFIKDVFHPEWLANPMIVKKKGGKWRMCVDYTGLNKACPKVPYPLPRIDQIVDCIAGCETLSFLDAYSGYHQIKMKESDQLATSFITPFGMYCYTTMPFGLRNAGATYQRCMNHVFGEHIGRTVEAYVDDIVVKTRKASDLHSDLEITFRCLRAKGVKLNPKKCVFGVPRGMLLGFIVSARGIEANLEKIVAITNMGPIKDLKGVQRVMGCLAALSRFISRLGEKGLPLYRLLRKAERFTWTPEAEEALGNLKALLTKAPILXEVLSETKIHYPQIQKLLYAVILTRRKLRHYFESHPVTVVSSFPXGEIIQCREASGRIAKWAVELMGETLSFAPRKAIKSEVLADFLAEWVDTQLPTAPIQAELWTMYFDGSLMKSGAGARLLFISSLGKHVRYVIRLHFPASNNVAEYEALVNGLRIAVELGVRRLDARGDSQLVIDQVMKNSHCHDRKMEAYYDEVRRLEDKLYGLELNHVARRYNETADELAKIASGQTTAPPNVFSRDIYQSSVKLDDAPKPEGTSAQPEVPSAAKGEALRVEREQNGVTPNLNWQTPYLEYLLRGELPLDKAEAWRLARRAKSFVLLGDEKELYHRSPSGILQRCISVAQGQELLQEIHSGACGHHAAPRALVGNAFRQGFYWPTAVADATRIVRSCRGCQFYARRMHLTAQALLTISITWLFAVWGLDLVGPLQKAPGGFTHLLDAIDKFFK

SEQ ID NO: 298618 - protein, 62 aa, Zea mays
  Clone ID: MRT4577_3540C.1.pep
QDRTTEILKRNMNGYHKQGPSTVTNSITTQLLCVNVPGKTYGSKHFINSFNRTVLFKEILLM

SEQ ID NO: 298619 - protein, 283 aa, Zea mays
  unsure (1)..(283): unsure at all Xaa locations
  Clone ID: MRT4577_35410C.1.pep
DLWGLDLVSPLQKAPGGFSHLLXAIDKFSKWIEVRPLTNIRSEQAVAFFTNIIHRFGVRNSIITDNGTQFTRKKFLDFCEDHHIRVDWAAVAHPMTNGQVERANGMILQGLKPRIYNDLNKFGKQWMKELPSVVWSLRTTPSRATGFSPFFLVYGAEAILPTDLEYGSLRTKEYDDRSNQTSQEDSLDQLEEARDVALLHSARYQQSLRRYHARGVWPRGFQLGDLVLRLRQDARGRHKLTPPWEGSFIIAKILKPGTYKLASDQGKVYSNAWNIQQLRRFYP

SEQ ID NO: 298620 - protein, 59 aa, Zea mays
  Clone ID: MRT4577_35411C.1.pep
NPVPKNRLLFGRTAEPRTKAPVRVTLRPDPSPVLCERITPHWFGLWKKSGTYTRLYSPL

SEQ ID NO: 298621 - protein, 312 aa, Zea mays
  Clone ID: MRT4577_35412C.1.pep
VAVAHGLTTVRIEKVALYPGNVIAIHMSKPHGFSYKSGQYIYVNCGEVSPFEWHPFTITSAPGDDYLSMHIRCRGDWTASFRALFAQVCRPPAAGQSGLLRADFASSTAAGGGGKLPKLLIDGPYGAPAQDYRKYDVLLLIGLGIGATPLISIVKDVLNNISDNKDEEQPAEFMTRRVYFYWCTREEGSFEWFRGVMNEVAERDARGDVVELHNHCTSVYEEGDARSALLVMLQALHHAKSGVDVVSGTRVRTHFARPNWRDVFKRVACNHQGQRVGVFYCGDQKVTPELRRLSQDFSHKTTTKFVFHKENF

SEQ ID NO: 298622 - protein, 562 aa, Zea mays
  Clone ID: MRT4577_35413C.1.pep
MPEPSTTEGRCIQGELKNLLEDATVRRVESSASRRQGYPPEHCAATSRFMREALVHTGRTRNTAPAAPGRLGNEHHHCDRRAHLDEKGTYVRPGNSWDLRSCRQQPEESLRDYMRRFSKQHTELPNITDSDVIGAFLASTTCRDLVSKLGCKTPTRASELMDIATKFASGQEAVEAIFRKDKQPQGRQLEIVPEASAQRGARKKGKKKSQAKCDAADADLVAAAEHRNPRKPPGGANLFDKMLKESCPYHQGPVKHTLEECVMLRCYFHKAGPPAEGGRAHNNNKKEDHKAEEFPEVHDCFMIYGGHVVNASARHRKQERREVCSVKVAAPVYLDWSDKPITFDQGDHPDRVPSPGKYSLVVDPVIDNIRLTKVLMDGGSNLNIIYAKTLGLLQIDLSSIRAGSAPFHGIIPGKRVQPLGQLDLPICFGTPSNFRKETLTFEVVGFRGTYHAVLGRLCYAKFMVVPNYTYLKLKMSGPNGVITVGSTYRHAYECDMECVEYAEALAESEALIADLESLSKEAPDAKRHIGNFEPAETVKSVPLDPSNDASKQIQIGSKLDPK

SEQ ID NO: 298623 - protein, 66 aa, Zea mays
  Clone ID: MRT4577_35414C.1.pep
GMTCLNPCFIHTYVGSWEVWKHRNSCLFEGTLPIIHALLQTIGDECSLWCMAGASKFSELLARSLV

SEQ ID NO: 298624 - protein, 635 aa, Zea mays
  Clone ID: MRT4577_35415C.1.pep
MQAKLDEEAGQLVQLRQNIEQEWAGRALAGEARHQAQDVQHRITDDARVRLPPASSGVGQNLAAAVILLRAMPEPSTTEGRRIQGELKNLLEDAAVQRAESSASRRQGSPPEHRAATSQFMREALVHTGRTRDATPAAPGRLGNEHHRRDRRARLDEKVHRGYHPRRGGRYDSGEDRSPSPEPPGPQAFSRAIRRAPFPTRFRSPTTITKYSGETRPELWLADYRLACQLGGTDNDNLIICNLPLFLSDAARAWQEHLPPAQISNWDDLVKAFAGNFQGTRRSRPSSERTSSLRDASRKTSLRRPPSVARRRRQKRSQAKRDAADADLIAAAEHRNLRKPPGGANLFDKMLKESCPYHQGPVKHTLEECVMLRCYFHKAGPPVEGGKGQDNDKKEGDKAEEFPKVHGCFMIYGGRVANASARHRKQERQEVCSVKVAAPVYLDWSDKPITFDQGDHPDCVPSLGKYPLVVDPVIGNVRLTKVLMDGGSSLNIIYAETLGLLEIDLSTIRAGAAPFQGIIPGKHVLLLGQLDLPICFGTPSNFRRETLTFEVVGPCYAKFMVVPNYTYLRLKMSGPNGVITVGSTYRHVYECDVECVEYAEALAESEALIADLACLSKEVPDAKRHTGNFEPTRGG

SEQ ID NO: 298625 - protein, 590 aa, Zea mays
  unsure (1)..(590): unsure at all Xaa locations
  Clone ID: MRT4577_35416C.1.pep
MGPIKDLKGVQRVTGCLAALSRFISRLGKRGLPLYRLLRKAECFTWTLEAEEALGNLKALLTNAPILVPPAAGEALLIYIAATTQVVSAAIVVERREEGHALPVQRPVYFISELRHYFESHPVTVVSSFPLGEIIQCREASGRIAKWAVEIMGETISFAPRKAIKSQVLADFVDEWVDTQLSTTLIQPELWTMFFDGSLMKTGAGVGLLFISPLGKHLRYVLRLHFPASNNVAEYEALVNGLRIAIELGLVIDQVMKNSHYRDLKMEAYCDEVRRLEDKFYGLELNHIARRYNETADELAKIASGQTTVPPDVFSRDLHQPSIKTDDTPEPEKASAQPEAPSAQHEAPSAPEAPRALXETPSDKASTGRPWWPTPLELPAPAKGVNSMQGRPACPLRLCRPYPSPGRXAVWGVDLVGPLQKAPGGYTHLLVTIDKFSKWIEIRPLNSIRSEQAVAFFTNIIHRFGVPNSIITDNGTQFTGRKFLDFCEDHHIWVDWAAVAHPMTNGQVECANGMILQGLKPRICNDLNKFGKRWMKELPSVVWSLRTTPSRAMGFTPFFLVYGAEAILPIDLEYGSPRTRAYDDQSNRAN

SEQ ID NO: 298626 - protein, 490 aa, Zea mays
  Clone ID: MRT4577_35417C.1.pep
MGGEGEGEWGSGHKWPRARWGESHARRGRGEGGREQLGGGYAGTTGLTSRARNAEREKKAGAGAREAGLTGWAHGQRESEGAGARGEAAAPTGGAGRAVREGGGVLHLLLISPLGKHLGYVLRLHFPASNNVAEYEALVNGLWIAIELGVRRLDARGDSQLVIDQVMKNSHCRDPKMEAYYDEVRRLEDKFYGLELNHIARRYNETVDELAKIASGRTTKAPGGYTHLLVAIDKFSKWIEVRPLNSIRSEQAVAFFTNIIHRFGVPNSIITDNGTQFTDRKFLDFCEDHHIRVNWAVVAHPMTNGQVERANGMILQGLKPRIYNDLNKFGKRWMKELPSVVWNLRTTSSRATGFTSFFLVYGAEAILPTDLEYGSPRTRAYVDQSNQASREDSLDQLEEARDMALPHSARYQQSLRRYHARGVRSRDLQVGDLVLRLRQDARGRHKLTPPWEGPFVIAKVLKPGTYKLANSQGEVYSNAWNIQQLRHFYP

SEQ ID NO: 298627 - protein, 682 aa, Zea mays
  Clone ID: MRT4577_35418C.1.pep
MPEPSTTEGRRIQGELKNLLEDAAVRRAESSASRRQGCPLEHRATTSRFVREASVHTGRTRDATPAAPGRLGNEHHHRDRRARLYEKVRRGYHPRRGGRYDSGEDRSPSPEPPVPQAFSRAIRRAPFPTRFQAPTTITKYSGETRPKLWLADYRLACQLGGMDDDNLIIRNLPLFLSDAARTWLEHLPPAQISNWDDLVKAFAGNFQGTYVRPRNSWDLRSYRQQPGESLQEYIRRFSKQRTELPNITDSDVIGAFLAGTTCRDLVSKLGRKAPTKASELMDIATKFASGQEAVEAIFRKDKQPQGRQQGDVTEASAQHGTKKKAKKKSQAKRNATDADLVAAAEHRNPQKPPGGVNLFDKMLKESCPYHQGPVKHTLEECVMLRCYFHKAGPPVEGGKGQDNDKKEGDKAEEFPEVHDCFMIYGGQVANASARHRKQERQEVCSVKVATLVYLDWSDKPITFDQGGHPDCVPSPGKYPLVVDPVIGNVRLTKVLMDRGSSLNIIYAETLGLLQIDLSMIRAGVAPFHGIIPGKRVRPLGQLDLPVFFGTPSNFRKETLTFEVVGFRGTYHAVLGRPCYAKFMIVPNYTYLKLKMSGPNRVITVGSTYRHAYECDVECVEYAEALAESKALITDLECLSKEVPDAKRHAGNFKPAEAVKSVPLDPSNDACKQVRIGSELDPK

SEQ ID NO: 298628 - protein, 869 aa, Zea mays
  unsure (1)..(869): unsure at all Xaa locations
  Clone ID: MRT4577_35419C.1.pep
MAEEQHPGLSHHLPRRRRRRRGNHGRAGGGTSLAVERVDDTGAPAGDTSGVDLASETKTSVISPQHANPKRTDDASTLAKDLLGVSLVPEITVQSVPDATSSPSIDQEVPSVFHPVPFRFSFDPPSDPASVDAFIKAYPNLPRYHMWSTWDRLTAVSTYGPPGSEEDDEPDSGWDFSGLGNPSAMRDFMTACDYCLSDYSDGGHSLDDEDCGPSRECFHVDLGGLDEGNHLGMPEDDDPPRPVPRVDILRELAVVPVPAGGQDTQLERIREMQAKLDEEAGQLVQLRQNIGQEWAGRALAREARHLAQDVQHRIANDARARLPPASSGVGQNLAAAAILLRAMPEPSTTXGRRIQGDLKNLLEDTAVRRAESSASRRQGYPPEHRAATSRFMREASVHTGRTRDATPAAPGRLGNEHHHRDRRAHLDXRSCRQQPGESRQDYIRQFSKQRTELPNITDSDVIGAFLAGTTCHDLVSKLGRKTPTRVSELMDIATKFASGQEAVEAIFRKDKQPQGRQQEDVPEASAQRDTKKKGKKKSQAKRDATDADLVAAAEHRNPRKPPGGANLFDKMLKESCPYHQGPVKHTLEECVMLRRYFHKVGPSVEGGKGHDNDKKEGHKAEEFPEVHDCFMIYGGQVANASARHRKQEHREVCSVKVAAPVYLDWSDKPITFDQGDHPDRVLSPGKYPLVDDPVIGNVRLTKVLIDGGSSLNIIYAETLGLLQIDLSTIRAGAAPFHEIIPGKRVQPLGQLNLPVCFGTPSNFRKETLTFEFMAVPNYTYLKLKMPGPNRVITVGSTYRHAYECDVEYAEALAESEALIVDLESLSKEVPDAKHHAGNFEPAEAVKSVPIDPSNDASKQVWIGSELDPK

SEQ ID NO: 298629 - protein, 135 aa, Zea mays
  unsure (1)..(135): unsure at all Xaa locations
  Clone ID: MRT4577_3541C.1.pep
DDDRTLLDWVIGLLTENNCIVWYDEDLAXNYIEGEVESLIQGSLLCTQSNPLEHTKMSXVVRMLERXSLVERCKEWHKVKLVRQEVELSPHQNLXWIIDYTDNVHAEQMPRPMQKLAREQTDTNHRTYVDFCRAQ

SEQ ID NO: 298630 - protein, 60 aa, Zea mays
  Clone ID: MRT4577_35420C.1.pep
KFQVNLEYLARVVFNEDGILYFDSVVGTDSHTTMINSLGVAGWGVGGIEASRAMLGQPMG

SEQ ID NO: 298631 - protein, 106 aa, Zea mays
  unsure (1)..(106): unsure at all Xaa locations
  Clone ID: MRT4577_35421C.1.pep
QTPDAVGCRRLVVAGAPVTVIPSVXHXGXXLXXWWVGSLLFVLCLVCFCYLFCXNIVLLSSSLRHIKPQFSFYFXKTRPPGICVGGAPPFWWGVFFNRGGGGGGKR

SEQ ID NO: 298632 - protein, 419 aa, Zea mays
  Clone ID: MRT4577_35422C.1.pep
MGETISFAPRKAIKSQALADFLAEWVDTQLPTAPIQAELWTMYFDGSLMKTGAGAGLLFVSPLGKHLCYVICLHFPVSNNVAEYEALVNGLRIAVELGVRRLDARGDSQLVIDQVMKNSHCRGRKMEAYCDEVRRLEDKFYGLELNHIARRYNETADELAKIAPGQTTVPPNVFSRDIHQPSVKIDDTPEPEEASAAEGEALRVEGERNGVTPNLNLQAIPLQKAPGGFSHLLVAIDKFSKWIEVRLLTNIRSEQAVAFFTNIIHRFGVPNSIITDNGTQFTGKKFLDFCEDHHIRVDWAAVAHPMMNGQVERANGMILQGLKPRIYNDLNKFGKQWMKELPSVVWSLRTTPSRATGFSPFFLVYGAEVVLPTDLEYDSPRTKAYDDRSNQTSREDSLDQLEEARDVALLHSARYQQSL

SEQ ID NO: 298633 - protein, 74 aa, Zea mays
  unsure (1)..(74): unsure at all Xaa locations
  Clone ID: MRT4577_35423C.1.pep
VRDYETFNLSVPKTCPNVPDELLNPAKSWNGTADLXGEVEKLGTLFIENFKKYEDEATTEVLKAGPHVCCSCKH

SEQ ID NO: 298634 - protein, 294 aa, Zea mays
  Clone ID: MRT4577_35424C.1.pep
MAEYEALVNGLRIAIELGVRRLDTRGDSQLVIDQVMKNSHCRDRKMEAYCDEVRCLEDKFYGLELNHIARRYNKTADELAKIASGRTTVPPDVFSRDIHQPSVKTDDTPEPEEASAQPEKAPGGFSHLLVAIDKFSKWIEVRPLTIRSEQAVAFFTNIIHRFGFPNSIIIDNGTQFTGKKFLDFCEDHHIRVDWAAVAHPMTNGQVERANGMILQGLKPRIYNVLNKFGKRWMKELPSVVWSLRTTPSRATGFSPFFLVYGAEAILPTDLEYGSPRTKAYDDRSNQTSREDSLD

SEQ ID NO: 298635 - protein, 63 aa, Zea mays
  unsure (1)..(63): unsure at all Xaa locations
  Clone ID: MRT4577_35425C.1.pep
RAAVLVLGRNKGRRSNALFCSFLLYMLCVVRDPYNGFIFFQKKKKDXRRAPAHTLHTCTLISI

SEQ ID NO: 298636 - protein, 130 aa, Zea mays
  unsure (1)..(130): unsure at all Xaa locations
  Clone ID: MRT4577_35426C.1.pep
GGLRELPLGPGEQKAGAPPFSPPENELGXVDTKAPPLPVGGALKAXKRVVSPRRPLVFFREPITLGPKGQGSFAGFLGATFEGFPGFPHRXGFVFVAPTNNGPRSKKEFPKGLNRFPPRKKPPKKFFPPA

SEQ ID NO: 298637 - protein, 211 aa, Zea mays
  Clone ID: MRT4577_35427C.1.pep
MDGFRALIAAAATAVCCVVCAIWAFRSPSPPPPKKQQPIPSGCCSCASCGCCANTTFPSANGEMAVGGEMNKAPAPAPATTGASMMEQLVPEITTHALSYLDCTSLCRLSMTNSAMRRAANDDGAWKALYHKDFTAEQDTITPPNGWKAYYAATKAIMNVNAEFYNIIREGSLPAMSHFWLNSDYVKCVHATGELFTGYNAVMNSWGLLFT

SEQ ID NO: 298638 - protein, 69 aa, Zea mays
  Clone ID: MRT4577_35428C.1.pep
ILNCLLTNNYKLLYNTISPIPPSGTRIYTFTVCIHKSQTIHIHAHIRLSELCTRGRGPSLIPLPLDQHH

SEQ ID NO: 298639 - protein, 664 aa, Zea mays
  unsure (1)..(664): unsure at all Xaa locations
  Clone ID: MRT4577_35429C.1.pep
CNVYVLVCPYMRGRNILEGVAILHETIHELHRKRLSGVILKIYFEKAYDKVKWPFLFQTLRMKGFAPKWISWVRSFIMGGSVAVNVNDDVGKFFQTKKGLRQVDPLPPILFNIVADMPAILINRAKEHGQVSGVVPHLIGGLSILQYADDTIIFMENDLEKARNMKLLLGAFEQISGLKINFHKSEVLCFGDAQDSLESYLELFGCKHGDFPLKYLGLPIHFKKLRNSDWKIIEERVEKRLASWKGKHLSIGGRLTLINSVLNSLPLYMMSFFALGSXRKLXFRSRFFWQGDESKKKYRLTRWTILCQPKDQGGLGIHDLNIKNTTLLSKWLFKLLTSDDTWQQLIRNKYLGSKPLVEVDWKTGDSHFLSSLMKVKQDFLCFGTFKIKNGSHVRFWEDTWLGGQGLKDQYPRLYNITRAKFKTIVEVLTNNETIFSWRRTLFGSRLTEWNELXAXIANIQLTQEDDVFHWNLTQSGQFYVKSHYQXINKNEVPNLNKRLWKLKAPLKIKVFLWYLRRGVILTKNNLAKHNWHGNKSCCFCHKPEIIKHLFFEYRFARRVWGVIFLAFGIPPPSSVFNMXNWLEGFEHNLRNIILLGAASTCWALWLRRNDIVFEKKSIYSPLQVIYAISHWLRTWAVLRLLVQVVKDFYFQAYGWRPSHRIDCH

SEQ ID NO: 298640 - protein, 92 aa, Zea mays
  Clone ID: MRT4577_3542C.1.pep
RRLGNPPWGGSPRMHARVFFFFGQLTPRPVAGPYAPPRNGGYGSRIPGGYAGVFSYPVLFSNKMEGLCIRAVLPLDGWLDVQIGTKFFCAPP

SEQ ID NO: 298641 - protein, 54 aa, Zea mays
  Clone ID: MRT4577_35430C.1.pep
GPNTSDLEVLLDQHSPGLDVEFRHYKELIMSKGAQYFALGFAFISAINKNRTLI

SEQ ID NO: 298642 - protein, 1133 aa, Zea mays
  unsure (1)..(1133): unsure at all Xaa locations
  Clone ID: MRT4577_35431C.1.pep
MTGAREPVAMEIPAEEGPAAARAPPRRIRRRLVEGARGGGAPASVEEIEARLREAELRTQQFREWLACKARKKPRSPSWSSQEEGQGQRLGSTRLAAEXKRLSLLAMAQNRLAQLEKLRQAAKNYVGMXGLRIRQASWMHELSLVADRHXNRIRLLHADMQKRAALKERTARSLVQKAKSETTRLEQVRSAISLKRAAAEKKRLRLLEAEKTKAQARLLRIQKAAMTVCSRRESERRKLKEQLDNKLQRAKRQRAEYLKQRGSPRGSTHADYLKHAYALSRKLARYWRIFVKSRKTTFALAQAYDALGINEKSVKNMPFEKLAMSMESPVVLRSTKALLDRLEKRLVISHSVASSSVENVDHLLKRLGSPPRRRAPPSREGKTRAVVKRPAKSSEASIKLPRYSLRVVLCAYMILAHPSAVLSGQGEREKQLIESAANFIKEFELLIKVILDGPGQSSGVTGQRKFRAQLANFDKAWCSYLYSFVVWKVKDARLLEEDLVRAACKLELSMMQTCKLTADRHSQNNLTHDMKAIQKQVIDDQKLLRDKVQHLSGDAGLERMNSALSDTRSKFFEAKENGSPLTAPVANVSTPLSINSSGKAPLSEVPESSRTNVVGTSSVVRSLFSASSSSVSSSPEKQPTENEKMVNEMLHEDASAFAGRSDSASTAEEEFQNKVRETMEKAFWDMVTNSMRGERPDYSQLINLVKEVRDSLHDLAPKEWKEKILENIDLEILSQVLGSGSQDAQYLGQILEYSLDMVRKLSAAAKEDEMKKNHDKLLSELSTNSEVNGDGINSFVIAVIKGLRFILEEIKELKAEVSKARIQMMQQIIKESAGVEYLQKAFADRYGPPETAPASLPLTLQWILTSKNIAEEEWSEHSDCLSVMPAAGQAPALVPVLRSGHGAPVGQPSPSAGDTSGQPECKGEKLDKLIRIGLLQLISSVEGLQLQSTPESFQINLLRLRAVQSQFQQVIVIATSMLVLRQILMSENSRATPLELENAISELVKALADILHSSPDSGTEEIVQAMVNASASVGSPSEEKVQARMQMITRVFLKSLQPGDVVFKKVSRAVYCAFRGIILGGSGPKGQKLADAALRRIGATNVVDRVLKAAEVLIKVATVSEKVHGPWYKALIV

SEQ ID NO: 298643 - protein, 201 aa, Zea mays
  Clone ID: MRT4577_35432C.1.pep
LEPRAHGPGPRPRRPLSGATTNHSSYRNHLPAWPFRSYNRSHHQQSSTTSGIISTGDGNGRRRGRRFEAMAFTMRAVKVPPNSASLEEARHRVFDFFKQACRSIPTVMEIYNLDDVVTPSQLRSTIAKEIRKNQNVTNPKVIDMLLFNATEELNNIVEHAKQRHHVIGQYVIGQEGLVHELGSKDLGNSDFLKKFYTSNYF

SEQ ID NO: 298644 - protein, 50 aa, Zea mays
  Clone ID: MRT4577_35433C.1.pep
HACAHACAHACAHSSKLTFEANELYIPGSNSIASAAHPLVLTAHVLLGHH

SEQ ID NO: 298645 - protein, 99 aa, Zea mays
  Clone ID: MRT4577_35434C.1.pep
PKFFAKAMAPHGRLRASCKTPFTSLLKQKLPPKLLKKKKAKKKASAQNVGNLVGFGGHLSLVLSRQPSHLFFYSKWDGIMKFLWGFEILIYPPRLIGTS

SEQ ID NO: 298646 - protein, 75 aa, Zea mays
  Clone ID: MRT4577_35435C.1.pep
EKPRAFRGPPNQGKAPGPLLTPPRAPWSLLQSPVFPHLLARKPKKKIPIWGSPKCGAFYSKKVRLTLSPTRWILV

SEQ ID NO: 298647 - protein, 114 aa, Zea mays
  unsure (1)..(114): unsure at all Xaa locations
  Clone ID: MRT4577_35436C.1.pep
ARGAXPAXARXPXRPRLAXAFXRLRVRXGPLPVAPVARGGRGGLGRAXGSRRPRRGGGARAPVGPPGGPRRRRLLPSPGXFFRLFSRLRPRARLGGSLGPGRSRXSGVVLXXGG

SEQ ID NO: 298648 - protein, 63 aa, Zea mays
  unsure (1)..(63): unsure at all Xaa locations
  Clone ID: MRT4577_35437C.1.pep
HAFXDACFYAWGXXXAGAHVRFWVHPPXXSHSRPLPLPSLYDSHKPTLFSLLTNHNDLVTLFA

SEQ ID NO: 298649 - protein, 44 aa, Zea mays
  Clone ID: MRT4577_35438C.1.pep
WICAVCCSVWAKRLRLLNNPLRSSAVSFVFELGLDAARVGRGIP

SEQ ID NO: 298650 - protein, 62 aa, Zea mays
  Clone ID: MRT4577_35439C.1.pep
PSIAYTSCCSSLTPLHVPGVHPPLKKDCPICHLARPALSVIRSVMVDSSIQTMAFAVSDVCT

SEQ ID NO: 298651 - protein, 268 aa, Zea mays
  unsure (1)..(268): unsure at all Xaa locations
  Clone ID: MRT4577_3543C.1.pep
RGGAEQYRAAAPPQARVPRWGASLLRARARQVERCQDSTYTTIIFKKIISEVELSSNVVIDELYEEFAQQSFIFRQDXHIYKEISFLSPTYDNIFPKRVSVVARLSCSSNMLEGDTGCSIWPSSLFLSEFVLSYPKIFSTKCCFELGSGVGLVGICLNHVGASKVILTDGDPCTLRNMKENMELNNLCIEQEDSRALKESKNKVECKYLSWEEVSESDLWGYQPDVILGADIIYDPVCVPHLVRVLSMLXRRDGRQXGNNGTSADELY

SEQ ID NO: 298652 - protein, 1011 aa, Zea mays
  unsure (1)..(1011): unsure at all Xaa locations
  Clone ID: MRT4577_35440C.1.pep
MGSLQQPLQPGTVLRFGSLEFMSLDGSYDMVLLPPPCDSDNGGRQPARRRWNRRRLPRVVEEQHSSSPRPLPRRRRRRQGNQGQAGGGTSSAVERVDGAGAPTGGTSGIDLASETKTSAVSPQHANPKQTDDASTLAKDLLGITLVPKTTVQSAPDVTSSPPVDQEVPTDSHLVPFGFGLDPPSDFTSVDALIEAGPNPLGYRMQSPWDRLTAVSTYGPSGSEEDDEPDFSWDFSGLGNPSAMRDFMTACDYCLSDCSDGSRSLGDEDCGPSRECFHVDLGGPGKSNPLGIPENGDPPRPVPRVDILRELAVVPVPAGGPDPQLEQIREMQARLDEGAGTLESFRRDIGQEWAGQHPAGEVRHLPQGIQHRIADDVKVRPPPVSSGVGQNLAAAAILLRAMPEPSTTEGRRIQGELKNLLEDAAVRWAESSASQRQGYPSEHHAATSRFMREASVHTWRTRNTAPTAPDRLGNEHHHRNRRAHLDEKVRRGYHPRRGGRYDSGEDRSPSPEPPGPQAFSRAIRRAPFPTRFRTPTTITKYSGETRPELWLADYRLACHLGGTDDDNLIIRNLPLFLSDTARAWLEHLPXGQISNWDDLVQAFAGNFXGTYVRPXNSWDLRSCRQQLGESLRDYIRRFSKQRTELPNVTDSDVIGAFLASTTCRDLVSKLGRKTPTRASELMDIATKFACGQEAVEAIFRKDKQPQGRLPEDVPEASTQCGTKKKGKKKSQAKRDAADADLVAAAEYKNPRKPPGGANLFDKMLKEPCPYHQGPVKHTLEECAMLRRHFHKAGPPAEGGRACDDDKKEDHKAGEFPEVRDYFMIYGGQVANASARHRKQERREVCSVKVATPVYLDWSDKPITFDRGDHPDRVPSPGKYPLVVDPVIGNVRLTKVLMDGGSSLNIIYTETLRLLRIDLSSFMVVPNYTYLKVKMPGPNGVITVGPTYRHAYECDVECVEYAEALAESEALIADLESLSKEAPDVKRHTGNFEPAETVKSVPLNPSSDASKQI

SEQ ID NO: 298653 - protein, 680 aa, Zea mays
  Clone ID: MRT4577_35441C.1.pep
MPFGLRNAGATYQRCMDHVFGEHIGRTVEAYVDDIVVKTRKASDLLSDLEATFRCLKAKGLKLNPEKCVFGVPRGMLLGFIVSERGIEANPEKIVAITSMGPIKDLKGVQRITGCLAALSRFISRLGERGLPLYRLLRKAECFTWTPEAEEALGNLKALLTNAPILVPPAAGEALLIYITATTQVVSAAIIVERREEGHALPVQRPVYFISKVLSETKIRYPQIQKLLYAVILTRRKLRHYFESHPVTVVSSFPLGEIIQCREASGGIAKWAVEIMGETISFAPRKAIKSQVLADFVAEWVDTQLPTAPIQPELWTMFFDGSLMKTGAGAGLLFISPLGKHLRYVLRLHFPASNNVAKYEALVNGLRIAIELGVRRLDARGDSQLVIDQVMKNSHCRDPKMEAYYDEVRRLEDKFYGLELNHVARRYNETTDELAKIASGRTTVPPDVFSRDLHQPSVKTDDTPEPEKASAQPEAPSARPEAEARRLARHAKSFVLLGDGKELYHRSPSGILQRCISIAEGQELLQEIHSGACGHHAAPRALVGNAFRQGFYWPTAVADATRIVRTCEGCQFYARQTHLPAQALHTIPITLPFVVWGLDLVDPLQKAPGGYTHLLVAIDKFSKWIEVRPLNSIRSEQAVAFFTNVIHRFGVLNSIITDNGTQFTDRKFLDFCEDHHIRVD

SEQ ID NO: 298654 - protein, 57 aa, Zea mays
  Clone ID: MRT4577_35442C.1.pep
SSSVLPFTLHFGLLSCKFKLRLQPWVRRSLTSTLVVIRPRSTLGNANNHLATMIYMH

SEQ ID NO: 298655 - protein, 1054 aa, Zea mays
  Clone ID: MRT4577_35443C.1.pep
MGSLQQPLRPGTVLRFGTLEFMSFDGSYDMILLPPPRDDDNGGRQPARRRRNRRHLPRVVEEQHSGSLRSLPRQRRRRRGHQGQAGGRASLAVERIDAPDAPTEGTPDVDLAFKTKASAVPPRRADPEQEDDASALAESLQDVALVPEMTVQPVPDVTTSLLVDQKASATPLGFRMRSPWDRLTDVSTYGPSGSEEDDDPSICWDFSRLGNPSVVRDFMTACDYCLSDCSDGSRSLGDESCGPSCECFHIELGDPSEGNHLGMPEDGDLPRPAPHADIPRELAVVPAPAGGYDPQLEQVREAQARLNEGTGALEPIRRDVGQAWVGQPLAGEIRHLPQGLQHHVANDTRVRPPPASSGVGQNLAATAMLIRAMAEPSTTEGRRIQGELKNLLEGAAARRAESTASRRQGYPSEPHAATSRFMREASVYTGRTRNTAPAAPGHLGNEHHRRDRRAHLDERVRRGYHPRRGGRYDSGEDRSPSPEPPGPQAFSRAIRRAPFPTRFRPPTTITKYSGETRPELWLADYRLACQLGGTDDDNLIIRNLPLFLSDTARAWLEHLPPGQISNWDDLVQAFAGNFQGTYVRPGNSWDLRSCRQQPGESLWDYIRRFSKQRTELPNITDSDVIGAFLAGTTCRDLVSKLGRKTPTRASELMDIATKFASGQEAVEAIFRKDKQPQGRPSEEAPEASAPRGAKKKGKKKSQLKRDAADADLVAAAEYKNPRKPPGGANLFDKMLKEPCPYHQGPVKHTLEECVMLRRHFHRAGPPAEGGRARDDDKNEDHPAGEFPEVRDCFMIYGGHTANASARHRKQERREVCSVKVAAPVYLDWFDKPITFDQADHPDHVSSPGKYPLVVDPVVGNVRLTKVLMDGGSCLNIIYAETLRLLRVDLSSVRAGAAPFHGIIPGKRVQPLGRLDLPVCFGTPSNFRRETLTFEVVRFRGTYHAVLGRPCYAKFMAVPNYTYLNLKMLGPNGVITVGPTYKHAFECDVECVEYAEALAESEALIADLENLSKEVPDVKRHAGNFEPAETVKAVPLDPGGDTAKQIRIGSGLDPK

SEQ ID NO: 298656 - protein, 91 aa, Zea mays
  Clone ID: MRT4577_35444C.1.pep
NLSTRQFARSPIRQIPSSLTQPPNQTLNRAKFTLDLSPNPPLSLILLLQFHPKLAPSEAIAMAAEAGSRRGAAARRKAKEAAVGAARGFSS

SEQ ID NO: 298657 - protein, 574 aa, Zea mays
  unsure (1)..(574): unsure at all Xaa locations
  Clone ID: MRT4577_35445C.1.pep
YNNIPLVCFQAYQLQEINGLRPRGLTFLGMCVADTTIDASRILYPALARLGMQCIGATTLEEYRKHIEKDPALXERRFHPVKVPEPTVDETIQILRGLRERYELHHKLRYTDDALIAAAQLSYQYISDRFLPDKAIDLIDEARSRVRLSHAQLPDEAKEMDNWLRQITKQKNEAVRGQDFEKAGELRDREMELKAQITAIIDKSKEMIKAETESGDVGPLVTEADIQHIVSSWTGIPVEKVSSDESDRLLKMEETLHTRIIGQDEAVKAISRAIRRARVGLKNPNRPIASFIFSGPTGVGKSELAKALAAYYFGSEEAMIRLDMSEFMERHTVSKLIGSPPGYVGYTEGGQLTEAVRRRPYTVVLFDEIEKAHPDVFNMMLQILEDGRLTDSKGRTVDFKNTLLIMTSNVGSSVIEKGGRKIGFDLDYDEKDTSYNRIKSLVTEELKQYFRPEFLNRLDEMIVFRQLTKLEVKEIADIMLKEVFDRLKAKEINLQVTEKFRDRVVDEGYNPSYGARPLRRAIMRLLEDSLAEKMLAGEVKEGDSAIVDVDSDGKVIVLNGGSGVAEPLEPALST

SEQ ID NO: 298658 - protein, 1067 aa, Zea mays
  Clone ID: MRT4577_35446C.1.pep
MGSLQQPLRPGTVLRFGTLEFMSFDGSYDMTLLPPPRDYDNGGRQPARRRRNRQRLPRVVEEQYLGSLRSLPRQRRRRRSRQGQTGGRASSAVERIDAPDAPTEGTPDVDLAFETEESAVPPRHADLEQEDDAGALAESLQDVALEPGMTAQPVPGVTTSLLVDQKVTTNSHLASFRLGLNPPNDLVLAGALIEASATPLRFCMRSPWDRLTDVSTYGPSGSEEDDDPSIGWDFSGLGNPSAVRDFMTACDYCLSDCSDGSRSLGDESCGPSRECFHIELGDPTEGNHLGMPEDGDLPRPVPRADIPRELAVVPAPAGGYDPQLEQVREAQARLNEGTGALEPIRRDVGQAWVGQPLAGEIRHLPQGLQHRVANDVRIRPPPASSGVGQNLATAAMLIRAMPEPSTTEGQRIQGELKNLLEGAAARRAESTASRRQGYPSEPHAATSRFMREASVYTERTRNTAPAAPGHLGNEHHRRDRRAHLDERVRRGYHPRRGGRYDSGEDRSPSPEPPGPQAFSRAIRRAPFPTRFRPPTTITKYSGETRPELWLVDYRLACQLGGTDDDNLIIRNLPLFLSDTARAWLEHLPPGQISNWDDLVQAFAGNFQGTYVRPGNPWDLRSCRQQPGESLRDYIRRFSKQRTELPNITDSDVIGAFLAGTTCRDLVSKLGRKTPTRASELMDIATKFASGQEAVEAIFRKDKQPQGRPSEEAPEASAPRGAKKKGKKKSQSKRDAADADLVAAAEYKNPRKPPGGANLFDKMLKEPCPYHQGPVKHTLEECVMLRRHFHRAGPPAEGGFPEVRDCFMIYGGHVANTSARHRKQERREVCSVKVAAPVYLDWSDKPITFDRADHPDHVPSPGKYPLVVDPVVGNVRLTRVLMDGGSCLNIIYAETLKLLRVDPSSVRAGAAPFHGIIPGKRVQPLGRLDLPVCFGTPSNFRRETLTFEVVGFRGTYHAVLGRPCYAKFMAVPNYTYLKLKMPGPNGVITVGPTYKHAFECDVECVEYAEALAESEALIADLENLSKEVPDVKRHAGNFEPAETVKAVPLDPSGDTTKQIRIGSGLDPK

SEQ ID NO: 298659 - protein, 52 aa, Zea mays
  Clone ID: MRT4577_35447C.1.pep
KISKTIPIYTTILHPTLPDAYKLTHVITKYSLQIYPSHSYNSNLIIFYTYNQ

SEQ ID NO: 298660 - protein, 1254 aa, Zea mays
  unsure (1)..(1254): unsure at all Xaa locations
  Clone ID: MRT4577_35448C.1.pep
MDITTKFAFGQEAVEAIFWKDKQPQGRQQEDIPEASARRGTKKKSQAKRDAADADLVAAAEHRNPRKPPGGANLFDKMLKESCPYHQGPVKHTLEECVMLRRYFHKAGPPAEGGKGHDNDKKEGHKADEFPEVHDCFMICGGQVANTSARHRKQEHREVCSVKVAALVYLDWSDKPITFDQGDHPDRVPSPGKYPLVVDPVISNVRLTKVLMDGGSSLNIIYAETLGLLQIDLSMIRVGAVPFHGIIPGKRVQPLGQLDLPVSFGTPSNFRKENLTFEVVGFRGTYHAVLRRPCYAKFMVVPNYTYLKLKMSGPNRVITIGSTYRHAYECDVECVEYAEALAESEALIADLESLSKEVPDAKRHAGNFEPAEAVFAWSPSDMPGIPRDVAEHSLDIRAGARPVKQPLRRFDEEKRRAIGEEIHKLMAAGFIKEVFHPXEWLANPVLVXKKGGKWRMCVDYTGLNKACPKVPYPLPHIDQIMDSTAGCETLSFLDAYSGYHQIRMKESDQPATSFITPFGMYCYITMPFGLRNAGTTYQRCMNHVFGEHIGRTVEAYIDDIVVKMRKASDIVSKRGIEANPEKIAAITNMGPIKDLKGVQRVIGCLAALSRFISRLGERGLPLYRLLRKTERFTWTPEAEEALGNLKALLTSAPILVPPTAGEALLIYVVATTQVVSAAIVVERREEGHALLVQRPVYFISEVLSETKIRYPQIQKLLYAVILTRRKLRHYFESHPVTVVSSFPLGEIIQCREASGRIAKWAMEIMGETISFAPRKAIKSQVLADFVAEWVDTQLPAAPIQPELWTMYFDGSLMKTGAGAGLLFISPLGKHLRYVLRLHFPASNNVAEYETLVNGLRIAIEVGVRRLDARGDSQXCHRPSHEELPLPRPEXEAYCDEVRCLEDKRARAQPHRSMTDDTPEPGEASAQPEAPSAAEGEALHVEEERNGVTPNRNWQTPYLXISTEESSPSTEPKLGDWRGVPSCSSCWVTKRSSTTAAPQASSNDAHPSPKVRSYCKKYTRGLAVITQHLEPSLETPSDKXYWPTTVVDATRIVRTCQGCQFYARHTHLPAQALQTIPITWPFAVWGLNLVGPLQKAPGGFTHLLVAIDKFSKWIEVRPLNSIRKFLDFCEDHHIQVDWDAVAHPMTNGQVERANDMILQGLKPRIYNDLNKFGKRWMKELPSVVWSLRTTPSRATGFTPFFLVYGAEAILPTGLEYGSLRTRAYDDRSNQTSREDSLDQLEEARDMALLHSARYQ

SEQ ID NO: 298661 - protein, 65 aa, Zea mays
  Clone ID: MRT4577_35449C.1.pep
SVIHRCSGQSCAKTVSDGVLSNLTCDSDSKVSEFIGRRHSLSLHELPTHTTRGYYLGMFLEGSAH

SEQ ID NO: 298662 - protein, 264 aa, Zea mays
  unsure (1)..(264): unsure at all Xaa locations
  Clone ID: MRT4577_3544C.1.pep
MADAAAQNSTEQLLHLKLAFLAGEPPSCVLALAREAGGGSITPHVQNFLLETCTGSNVERCQDSTYTTIIFKKIISEVELSSNVVVDELYEEFAQRMLSEAKVSFLDKTSHIYKEISFLSPTYDNIFPKRVSVVARLSCSSNMLEGDTGCSIWPSSLFLXSEFVLSYPKIFSTKCCFELGSXGVGLVGICLNHVGASKVILTDGDPCTLRNMKENMELNNLCIEQEDSRALKEARNKVECKYLXPWEKXSESDLWXYQPDVILG

SEQ ID NO: 298663 - protein, 842 aa, Zea mays
  unsure (1)..(842): unsure at all Xaa locations
  Clone ID: MRT4577_35450C.1.pep
MGSLQQPFHPGTVLRFGSLEFMSLDGSYDMILLPPPRDSDNGGRQPARRRRNRRRLPRVVEEQHSSSPRPLPRQRRRRQGNQGQAGGSTSSAVERVDGVGAPTGGTSGIDLASETKTSTVSPQHANPKQTDDASTLAKDLLGVTLVPEKSVQSAPDETSSPPVDQEVPTDSHLTPFGFSLDPPSDFTLVDALVEASPNPLGYRMRSPWDRLTAVSTYGPSGSEEDDEPDFCWDFSGLGKPSAMRDFMNACDYCLSDCSDGSRSLGDEDCDPSRECFHVDLGGPNVGNHLGMPENGDLPRPVPRVDILRELVVVPVPAGGHDPQLEQIREMQDRXAGQPPGGEVHHLPQGIQHRIADDVREASVHTGRTRKTAPAAPGRLGNEHHHRNRRAHLDERXAEGTYVRPGNSWDLRSCRQQPGESLRDYIRRFSKQRTELPNITDSDVIGTFLAGTTCRDLVSKLGRKTPTRASELMDITTKFASSQEAVEAIFRKDKQPQSRPPEDVPEASTQRGAKKKGKKKSQAKRDAADADLVAAAEYKNPRKPPRGAHLFDKMLKEPCXYHQGPVKHTLEEXEFPEVRDCFMIYGGQVANTSARHRKQERREVCSVKVAAPVYLDWSDKPITFDQDDHPDRVPSPGKYPLVVDPVIGDVRLTKVLMDGGSSLNIIYAETLGLLRVDLSSVRAGAAPSHGIIPGKRVQPLGRLDLPVCFGTPSNFRRETLTFEVVGFRGTYHAVLGRPCYAKFMAVPNYTYLKLKMPGPNGVITVGPTYRHAYECEVECVEYAEALAESEALITDLESLSKEAPDVKRHTDNFEPAETVKSVPLDPSNDASKQIRIGSELDPK

SEQ ID NO: 298664 - protein, 915 aa, Zea mays
  unsure (1)..(915): unsure at all Xaa locations
  Clone ID: MRT4577_35451C.1.pep
MPFGLRNAGATYQRCMNHVFGEHIGRTVEAYVDDIVVKTRKASDLLSDLEVTFWCLKAKGVKLNPEKCVFGVPRGMLLGFIVSERGIEANPEKIAAITSMGPIKDLKGVQRVMGCLAALSRFISRLGERGLPLYRLLRKAECFVWTPEAEEALGNLKTLLTKAPVLVPPVDGETLLVYVAATTQVVSAAIVVERQEEGHALPVQRPVYFISEVLSETKIRYPQVQKLLYAVILTRRKLRHYFESHPVTVVSSFPLGEIIQCREASGRIAKWAVEIMGETISFAPRKAIKSQVLADFVAEWVDTQLPTTPIQPELWTMFFDGSLMKTGAGAGLLFISPLGKHLRYVLRLHFPASNNVAEYEALVNGLRIAIELGVRRLDARGDSQLVIDQVMKNSHCRDPKMEAYCDEVRRLEDKFFGLELNHIARRYNETADELAKIASGRTTVPPDVFSRDLHQPSVKLDEAPEPEVPSAQPEVPSVQPEAPSAQPEVPSAPEGGALNVEEGQSGATPDQDWQAPYLQYLRRGELPLDQVEARRVARRAYSFVLLGDEEELYHRSPSGILQRCISIAEGRELLQEVHLGACGHHAAPRALVGNAFRQGFYWPTAVADATRIVRACEGCQFYAKRTHLPAQALQTIPITWPFAVWGLDLVGPLQKAPGGYTHLLVAIDKFSKWIEVRPLNSIRSEQAVAFFTNIIHRFGVPNSIITDNGTQFTGKKFLDFLXDHHIRVDWAAVAHPMSNGQXLKPRIYNDLNKFGRRWMKELPSVVWSLRTTPSRATGFTPFFLVYGAEAILPTDLEYGSPRARAYTEQSNQASREESLDQLEEARDRALLHSARYQQSLRRYHARGVRSRELQVGDLVLQLRQDARGRHKLTPPWEGPFVIAKVLKPGTYKLANNQGEIYGNAWNIKQLRRFYP

SEQ ID NO: 298665 - protein, 99 aa, Zea mays
  Clone ID: MRT4577_35452C.1.pep
IRDEKITRAFDRITDGLGGLAEDEVVRGINLAYRDARGRDAKGTYDSSGRNYNTSVKKRTAITMWNEELTMTDTKTSVAMKLEEFHKDAGIMDDLMGDT

SEQ ID NO: 298666 - protein, 560 aa, Zea mays
  Clone ID: MRT4577_35453C.1.pep
MKTGAGAGLLFISPLGKHLRYVLRLHFPASNNVVEYEALVNGLRIAIELGVRRLDARGDSQLVIDQVMKNSHCHDPKMEAYCDEVRRLEDKFFRLELNHIARRYNETADELAKIASGRTTVPPDVFSRDLHQPSVKIDDAPEPEAPSAQPEAPSAPEGEALNIEEGQSGATPDQDWQAPYLQYLRRGELPLDQAEARRVARRAKSFVLLGDEEELYHRSPSGVLQRCISIAEAPRALVGNAFRHGFYWPTAVADATRIVRTCEGCQFYAKQTHLPAQALQTIPITWPFAKAPGGYTHLLVAIDKFSKWIEVRPLNSIRSEQAVVFFTNIIHRFGVPNSIITDNGTQFTSKKILDFCEDHHIRVDWAAVAHPMTNGQVERANGMILQGLKPRIYNGLNKFGKRWMKELPSVVWSLRTTPSRATGFTPFFLVYGAEAILPTDLEYGSPRARAYNEQSNQASREDSLDQLEEARDKALLHSARYQQSLRRYHARGVRSRDLQVGDLVLRLRQDARGRHKLTPPWEGPFVIAQVLKPGTYKLANNQGEVYGNAWNIKQLRRFYP

SEQ ID NO: 298667 - protein, 70 aa, Zea mays
  unsure (1)..(70): unsure at all Xaa locations
  Clone ID: MRT4577_35454C.1.pep
RPRXXGXXGGRVGGRVGRPYFILDRSSNLRRPGSSICGSDSRLPPVTSLERSPPYLYLSLSNPTTTGRSR

SEQ ID NO: 298668 - protein, 709 aa, Zea mays
  unsure (1)..(709): unsure at all Xaa locations
  Clone ID: MRT4577_35455C.1.pep
WAGQPSAGEVRHLPYGIQHRIADDVRVRPPSTSSGVGQNLAAAAMLIRAIPEPSTTEGRCIQGELKNLLEDAAVRRAESSASRRXGYPSEHRAATSRFMREASVHTGRTRNTAPAAPGRLGNEHHHRNRRAHLDERVHRGYHPRRGGRYDSGEDRSPSPEPPGPQAFSRAIRRAPFPTRFRTPTTITKYSGETRPELWLADYRLACQLGGTDDDNLIIRNLPLFLSDTARAWLEHLPPGQISNWDDLVQAFVGNFQGTYVRPGNSWDLRSCRQLLGESLRDYIRRFSKQRTELPNITDSDVIGAFLAGTTCRDLVSKLGLKTPTRASELMDITTKFASGQEAVEAIFWKDKQPQSRPPEDVPEASTQRGAKKKGKKKSQAKRDAADADLVAAAEYKNPRKPPGGANLFDKMLKEPCPYHQGPVKHTLEECAMLRRHFHKAGPSAEGGRARDDDKKENHKAGEFPKVHDCFMIYGGQVANASARHRKQERREVCLVKVAAPFYLDWSDKPIIFYQNDHLDRVPSPGKYPLVVDPVIGNVRLTKVLMDGGSSLNIIYAETLGLLQIDPTSVRAGAAPFHGIIPGKRTLTFEVVGFRGTYHVVLGRPYYAKFMVVPNYTYLKLKMSGPNGVITVGPTYRHAYECDVECVEYAEALAESEALIADLESLSKEAPDVKRHAGNFEPAETVKSVPLDLINDASKQIRIGSELDPE

SEQ ID NO: 298669 - protein, 976 aa, Zea mays
  Clone ID: MRT4577_35456C.1.pep
MSLDGSYDIILLPPPRDNDNGGRQPARQRRNRRRLSHVMEEQHLGLSRHLPRRRGRRRGNHGQAGGGASSAVERVNGAGAPAGDTSGVDLASEMKTSVVSPQHANPKQTDLLSVSLVPEITVQSVPDATSSPSVDQEVPSVSHPVPFRFSFDPPSDPASVDAFIKAYPNLPGYHMWSTWDRLTAVSTYGPPGSEEDDEPDYGWDFSGLDNPSAMRDFMTACDYCLSDCSDDSHSLGDEDCGPSREYFHVDLEGLDEGNHLGVRTHKLKQIRKMQARLDEGAKQLMKLRPNIGQERAGRAPAGEARHLAQDVQHRITDNARARLPLASSGVGQNLAAAAILLRAMPEPSTTEGRRIQGELKNLLEDAVVRRAESSASQRQGYPPEHHAATSRFMREASVHTRRTRDTVLAAPGRLGNEHHRRDRRAHLDEKVRRGYHPRRGGRYDSEEDRSPSPEPPGLQAFSRAIRRARFPTRFRAPTTITKYSGETRPELWLADYRLACQLGGMDDDNLIIRNLPLFLFDAAQACCRQQPGESLQDYIRRFSKQRTELPNITDSDVIGAFLAGTTCRDLVSKLGRKTPTRASELMDIATKFASGQEAVEAIFWKDKQPQGRQPDDVPEASAQRGAEKKGKKKSQAKRDAADADLVAATEHKNPRKPPGGANLFDKMLKESCPYHQGPIRHTLEECVMLRRYFHKAGPPAKGGRAPDNDKKEAHKAKEFPEVHDCFMIYGGRVANALARYHKQERREVCSVKVAAPVYLDWSDKPITFDHGDHPDRVPSPGKYPLVVDPVIGNVRLTKVLMDGGSSLNIIYADTLGLLQIDLSSIRAGAVPFHGIIPGKRVQPLGQLDLPVCFGTPSNFRKETLTFEVVGPCYAKFMAIPNYTYLKLKMSGPNGVISVGPTYRHAYECDVECVEYAEALAESEALIADLESLPKEVPDAKRHAGNFEPAEAVKSVPLDPSNDTSKQIRIGSELDTK

SEQ ID NO: 298670 - protein, 72 aa, Zea mays
  Clone ID: MRT4577_35457C.1.pep
NPLQSRRSRRGFESPNYTSLKTQIHSRIEGDLKRNELISTFKASLGTTFFRMILIFSRENKLISLKKRRFPN

SEQ ID NO: 298671 - protein, 61 aa, Zea mays
  unsure (1)..(61): unsure at all Xaa locations
  Clone ID: MRT4577_35458C.1.pep
MRVPNAADAATGQGLVPCKVYYYYYYYYYYYYYYYYYYYYYYYXYYYYYLHVYNDYYLTVS

SEQ ID NO: 298672 - protein, 113 aa, Zea mays
  Clone ID: MRT4577_35459C.1.pep
IRFVFFRVKKKKKKKKKKKKKKKKKKKKKKKKKKKKKKQGERKKIFKPKKKKKKKKVPLAGTLLGGNLGNFQKNGGRLTLSLRGQISPIRALLNIKGPAFKNLGAGKTGGFPN

SEQ ID NO: 298673 - protein, 123 aa, Zea mays
  Clone ID: MRT4577_3545C.1.pep
MRDPVREGNSVSQHTVSFHDELIDVHLSHIGTLELSLSLVVTGTVAANRSEAAGPVQGHARAGQGGAQCLGWGRVHAFAGGAQLLSVRGGDLGHPEQAGDLGRSRVGGGSAWARAGPDEGTAA

SEQ ID NO: 298674 - protein, 73 aa, Zea mays
  unsure (1)..(73): unsure at all Xaa locations
  Clone ID: MRT4577_35460C.1.pep
VILADPSHNAIRNDPRINWICXASQKPRELKGLTSAGKKGKGFKVKGNKAKSLRTSRKGNWKRRQMLKLRKYK

SEQ ID NO: 298675 - protein, 32 aa, Zea mays
  unsure (1)..(32): unsure at all Xaa locations
  Clone ID: MRT4577_35461C.1.pep
MLEFFFFFFFXKDLQDRYQNLISIASLIFFKQ

SEQ ID NO: 298676 - protein, 266 aa, Zea mays
  unsure (1)..(266): unsure at all Xaa locations
  Clone ID: MRT4577_35462C.1.pep
MAKQNSSSTPTLPGACHRSRISQGQSRFPNPNQPCARASEMDDVSVKQIAVLYPVGGVGHIGPMTQLAKAFLHHGYDVTMVLIEPPIKSTDSGAGFIERVAASNPSITFHVLPPTPAPDVASSTKHPFLLILELMRQYNDKLESFLRSIPRERLHSLVIDLFCTHAIDVATRLGVPVFKFFASGAGTLAIFTQLPALLAGRLTGLKELGDKPLQFLGVPPMPASHLATSLLESPEDELCRTLXEILERNAGTHGVLVNTFESLEQR

SEQ ID NO: 298677 - protein, 53 aa, Zea mays
  Clone ID: MRT4577_35463C.1.pep
GGFSHFFDHPLKTGRYTKGQKVPSTQKPSVGQKHSKIFQTGQCAPLCGKKREE

SEQ ID NO: 298678 - protein, 31 aa, Zea mays
  Clone ID: MRT4577_35464C.1.pep
SFRLPPERVLDATDALLLRVQIIGLVFLARS

SEQ ID NO: 298679 - protein, 190 aa, Zea mays
  unsure (1)..(190): unsure at all Xaa locations
  Clone ID: MRT4577_35465C.1.pep
MQGQVCHFIIDGGSCNNIISALLVEKLGLQPRRHPHPYHMQWLNNSGTVKVSPMIRLSFSIGDYHGEVDCDIVPMQACHLLLGRPWQFDVDSVHFGRSNKYTFIHNDKKVVLVPLSXEEIHTSDMARKKREESDKRKLSETPNPSKGESSKPSSHIKPHANPKQPRXECLFVSKSDLREVRNTTAPFFVL

SEQ ID NO: 298680 - protein, 122 aa, Zea mays
  unsure (1)..(122): unsure at all Xaa locations
  Clone ID: MRT4577_35466C.1.pep
GGCYFGLFLAGWAGRFVADPRFPPKVLMEELVGVTASVLGDMSCRQNFGLNELDFVFSTLDGGSMLNFELKYLLAPTVAALNAASALPSHMFQPGAXALGSREATLESKGATLAVAGLTDGL

SEQ ID NO: 298681 - protein, 343 aa, Zea mays
  Clone ID: MRT4577_35467C.1.pep
RMVITCQAGAYLHFEEIIDVAKLLGLRSEEEVADVEEAIAREAVVNGDLQLALDICLNLTKKSHGAVWDLCAAIARGPPLDNLDTGTREKLLGFALSHCDDDSVGELLNAWKELHAQGTFEKLMITTATNPPNFLIDGSSITPLPVQSVQDILDLRDDNGHDRRSDLVGIVKDMLSKVCLDFSNGDTHNWESMLEENRKLLCFGALVLPWLLKLFSNEACDGEIMDHLTRRCRFSTKVKAATSIIYWLVINGLAPNDNIIMILAKSIMEPPIDEEFDVLGCSVLLNLMDPFNGVKIIEEELKRRESYQEISSIMSVGMLYSSLNNSKKECSTPEQRRNLFDSN

SEQ ID NO: 298682 - protein, 83 aa, Zea mays
  Clone ID: MRT4577_35468C.1.pep
MAWAATGLPARTTGLCARTSHYRSTSGSVRQPAVAPITWYGGGIPKAWGGGISKTRRVTQPAGVEVEAAAARPPAWKWPDRGR

SEQ ID NO: 298683 - protein, 227 aa, Zea mays
  Clone ID: MRT4577_35469C.1.pep
MSGAADYQEMVASVPPSLKAITLTHVRYSRGDPLGLFLAWVSLVPVFISLGGFVSHFLFRRELQGLCFAAGLLVSQALNELIKHSVAQSRPSYCELLEACDSHGWPSSHSQYTFFFATYLSLLSLRRSRARQVIAAVPWPLAFLTMLSRVYLGYHTVAQVFAGAVVGLVFGAIWYWIVNTMLVNYFPMIEESAIGRWLYIKDTSHIPDVLKFEYDNARAARKKVATD

SEQ ID NO: 298684 - protein, 109 aa, Zea mays
  unsure (1)..(109): unsure at all Xaa locations
  Clone ID: MRT4577_3546C.1.pep
LKKPGVGGXXRFSGVRFPGWAARDGGACCLCTAASAAGQTRKKIFARFSTXPXFFWGAXXQXILYPYTRGGGCALPPGKNNTEEAMRERLPRHELRGAGRPLLYRERGP

SEQ ID NO: 298685 - protein, 243 aa, Zea mays
  unsure (1)..(243): unsure at all Xaa locations
  Clone ID: MRT4577_35470C.1.pep
AKHRNPRKPPEGANXFDKMLKESCPYHQGPVKHTLEECVMLRCHSHRAGPPAEGGRAHNDFKKEDHKAEEFPEVHDCFMIYGGHVANASAWHRKQERREVCSVKVAAPVYLDWSDKPITFDQGDHPDRVPSPGKYPLVVDPVIGNVRLTKVLMDRCSSLNIIXKKTLGLLXIDLSSIRAGVAPFHGIIPGKRVQPLGRLDLSVCFGTPSNFXKETLTFEGVGFWGTYHAVRGXPCYAKFMAIP

SEQ ID NO: 298686 - protein, 244 aa, Zea mays
  Clone ID: MRT4577_35471C.1.pep
MEAALMHQTAATVPARWRCVGDASRAGRGQQLAGVVRLGAARRAASGALPVLRGSRLPGPVRALVSESESEAAAERAADGAVRLFVGLPADAVVSDGRGVSRSRAVSAALRALKLLGVDGVELPVSWAAVQPGSGAWFEWAGYRAVAAMVRDAGLDLRVSLRTDGDALPEWVADAAAADPDVLFTDRSGRRRVGCISFAVDELPVLVGRSPLQAYEAFFRSFAEEFNDLLGSTVTVRQIQDFLV

SEQ ID NO: 298687 - protein, 89 aa, Zea mays
  Clone ID: MRT4577_35472C.1.pep
FKVRGRRFNASLPPVPVLPVTVAAHGLVAAVLLIFKQGRTQQVTICEFAKLPTQLAVVPESVANQWRSLGRVLTPAMRPLPTRLRITLL

SEQ ID NO: 298688 - protein, 562 aa, Zea mays
  unsure (1)..(562): unsure at all Xaa locations
  Clone ID: MRT4577_35473C.1.pep
MLLGFIVSERGIEANLEKIAAITNMGPIKDLKGVQRVMGCLAALSRFISRLGERGLPLYRLLRKTERFTWTPEAEEALGNIKALLTSVPILVPLAAREALLIYVAATTQVVSAAIVVERREEGHALLVQRSVYFISEVLSETKIRYPQIQKLLYAVILTQRKLRHYYESHPVTVVSSFPLGEIIQCREASGRIAKWAVEIMGETISFAPRKAIKSQVLADFVAEWVDTQLPAAPIQPKLWTMYFDGSLMKTGAGAGLLFISPLRKHLRYVLRLHFPASNNVAEYEALVNGLRIAIELGVRRLDARGNSQLVIDQVMKNSHCRDPKMEAPGRQVLRARAQPHRSTTDDTPELGEASAQPEAPSAAEGEALRVEEERNGVTPNRNWQTPYLXISTEESYPSTEPKLGDWRGAPSRSSCWVTKRSSTTAXPQASSNDAYPSPKKAPEGFTHLLVAIDKFSKWIEVRPLNSIRSEQAVAFFTNIIHQFGVPNSIITDNGTQFTSRKFLDFCEDHHIRVDWAVVAHPMTNGQVERANDMILQGLKPRIYNDLNKFGKRWMKELPLVV

SEQ ID NO: 298689 - protein, 436 aa, Zea mays
  unsure (1)..(436): unsure at all Xaa locations
  Clone ID: MRT4577_35474C.1.pep
ISDWDDLVQAFAGNFQGTYVRPGNSWDLRSCRQRSGESLRDYIRRFSKQRTELPNITDSDVIGAFLAGTTCRDLVSKLGRKTPTRASELMDIATKFASGQEAVEAIFRKDKQPQGRPSEDAPEASTQRGAKKKGKKKSQAKRDAADADLVAAXEYKNPRKPPXRAGPPAEGGKARDDDKKEDHQAGDFLEVRDCFMIYGGQAANASARHRKQERREVCSVKVAAPVYLDWSDKPITFDQADHPDHVPSPGKYPLVVDPVIGDVRLTKVLMDGGSSLNIIYAETLGLLRIDLSSVQAGTAPFHGIIPGKRVQPLGQLDLPVCFGTPSNFRRETLMFEVVGFRGTYHALKMPGPNGVITVGPTYKHTFECDVECVEYAEALAESEALIADLESLSKEVPDVKRNAGNFEPAETVKSVPLDPSSDASKQVWIGSGLDPK

SEQ ID NO: 298690 - protein, 447 aa, Zea mays
  Clone ID: MRT4577_35475C.1.pep
LELAHASHHEAEEHRLGAAMAKEQDFLAWEKELEEAQAELNQLNEQIASKRNVESKAHENECKLLGLKSELAAYVENKLNEEAGMVQEQGSDEAKEISRSIKQALASKRKELAEFKGKLENARIEANLVRVVVESLSSELDREKASLATLQQTEGMACITVASLEAELDRTEQEIELVHKKEAETREMMAELPRMLQQAAQEADDAKMAAHLAQEELRKAKEEAERTKASATTADTRLRAVLKEIEASKASKGLAIAAVQAMQESNDAGSAGASPRGVTLPISEYHALSKRVHEAEELASERVAAAFAQIELAKESESRNLERLQEASKEMDEKKSDLQIALERAESANEGKLGAEQELRRWRAEHVQRRKAHEATQHPVSPVRTPPRMLVEQKGSYREENELPTDPKLHKSNGSMDQFVSSEKSRKKKSFFPQMSTLLSRKAQTQT

SEQ ID NO: 298691 - protein, 1066 aa, Zea mays
  unsure (1)..(1066): unsure at all Xaa locations
  Clone ID: MRT4577_35476C.1.pep
MGSLQQPLRPGTVLRFGSLEFMSFDGSYDMILLPPPRDNDNGGRQPARRRRNRRHLPRVVEEQHSSSPRPLPRQRRRRRGNQGQAGGRASSAVERIDVPSALTEGTPGVDLAFETKASAVPPRHTDPEQEDDASALAEGLQDVALIPETTVQPVPDVTTSLLVDQKVLTNSHPTSFRLGLNPPSDLALAGALVEASATPLGFRMRSPWDRLTDVSTYGPSGSEEDDDPSICWDFSGFGNPSAMRDFMTACDYCLSDCSDGSRSLDDEDCGPSRECFHVELGDPSEGNHLGMPEDGDLPRPVPHADIPRELAVVPVPAGGHDPQLEQVRGAQARLDEGAGALETIRRGVGQVWAGQPPAGEIRHLPQGFQHRVANDVRVRPPPASSGVGQNLAAAAMLLRTMPEPSTTEGRRIQGELKNLLEGAAVRRAESSASRRQGYPSEPHAATSRFMREASVYTGRTRNTAPAAPGHLGNEHHRRDRRAHLDERVRRGYQPRRGGRYDSGEDRSPSPEPPGPQAFSRAIRQAPFPTRFRPPTTITKYSGETRPELWLADYRLACQLGGTDDDNLIIRNLPLFLSDTARAWLEHLPPGQISSWDDLVQAFAGNFQGTYVRPGNSWDLRSCRQQPGESLRDYIRRFSKQRTELPNITDSDVIGVFLAGTTCRDLVSKLGRKTPTRASELMDIATKFASGQEAVEAIFRKDKQPQGRPSEEAPEASTPRGAKKKGKKKSQSKRDAADADLVAAAEYXNPRKPPGGXPVKHTLEECVMLRRHFHRAGPPAEGGRARDDDKKEDHQAGEYPEVRDCFMIYGGHAANASARHRKQERREVYSVKVAAPVYLDWSDKPITFDQADPPDHVPSPGKYPLVVDPIVGDVRLTKVLMDGGSCLNIIYAETLRLLRVDLSSVPAGAAPFHGIIPGKRVQPLRRLDLPVCFGTPSNFRRETLTFEVVGFRGTYHAVLGRPCYAKFMAIPNYTYLKLKMLGPNGVITVGPTYKHVFECDVECVEYAEALAESEALIADLENLSKELPDVKRHAGNFEPVETVKAVPLDPSGDASKQIRICSGLDPK

SEQ ID NO: 298692 - protein, 826 aa, Zea mays
  unsure (1)..(826): unsure at all Xaa locations
  Clone ID: MRT4577_35477C.1.pep
MPFGLRNVGATYQRCMNHVFGEHIGRTVEAYVDDIVVKTRKASDLLSDLEVTFRCLKTKGVKLNPEKCVFGVPRGMLLGFIVSERGIEANPEKIAAVTSMGPIKDLKGVQRVMGCLAALSRFISRLGERGLPLYRLLRKAECFAWTPEAEEALENLKALLTKAPVLVPPADGEALLVYVAATTQVVSAAIVVERQEEGHALPVQRPVYFVSEVLSETKIRYPQVQKLLYAVILTRRKLRHYFESHPVTVVSSFPLGEIIQCREASGRIAKWAVEIMGETISFAPRKAIKSQVLVDFLAEWVDTQLPTAPIQPELWTMFFDGSLMKTGAGAGLLFISPLGKHLCYVLRLHFPASNNVAEYEALVNGLRIAIELGVRRLDARGDSQLVIDQVMKNSHCRDPKMEAYCDEVRRLEDKFYGLELNHIARRYNETADELAKIASGRATVPPDVFSRDLHQPSVKIDDASEPEAPSAQPEVPSAPEGEALDVEEGQSGATPDRDWQAPYLRYLRRGELPLDQAEARRVARRAKSFVLLGDEDELYHRSSSGILQRCISIAEGQELLQEIHSGACGHHAAPRALVGNAFRQGFYWPTAVADATRIVRTCEGCQFYAKQTHLPAQALQTIPITWPFVVWGLDLVGPLQKAPGGYTHLLVAIDKFSKWIEXVPNSIITDNGTQXTGKKFLDFCEDHHIRVDWAVVAHPMSNGQVERANGMILQGLKPRIYNGLNKFGKLWMKELPSVVWSLRTTPSRATGFTPFFLVYGAEAILPTDLEYGSSRTRAYTDQSNQASREESLDQLEEARDRALLHSARYQQSLRRYHARGVRPRDL

SEQ ID NO: 298693 - protein, 336 aa, Zea mays
  unsure (1)..(336): unsure at all Xaa locations
  Clone ID: MRT4577_35478C.1.pep
MSVGSRRRPPPPHHHRRAMTPASSVSVPVPAPVPAPPKPLYLRGPVIAGAVALAAFLLLAAAYATRRAGSPPAALLAHPAVSTRFFSFDLVREYPHDPAAFTQGILYAGNDTLFESTGLYGRSSVRKVELQTGKVLVNHQMDGDVFGEGLTLLGDRLFQVTWLKNDGFIYDRHNXAKCTSFTHKMRDGWGLATDGKVLFGSDGTSMLYKLDSKSLEVMKVVTVKYHGNQVPYLNELEYIDGEVWANVWQTDCIARVSPEDGLVVGWIFLHELRRQLWNSGNTNIDVLNGIAWDERRHRLFVTGKLWPKLYEIKLRAVDGPADGSVEKLCPKASFYR

SEQ ID NO: 298694 - protein, 1002 aa, Zea mays
  unsure (1)..(1002): unsure at all Xaa locations
  Clone ID: MRT4577_35479C.1.pep
MGSLQQPLQPGTVLRFGSLEFMSLDGSYDMILLPPPDDSDNGGRQPARRRRNRRRLPRVVEDQHSSSPRPLPCQRRGRRGNQGQAGGSASSAIERVDNADTPTGGAPGIDLALETKASVVSPQHANPEQTDDTSTLAEGLLGVTLVPETTVQSVPDVTSSPLVDQEVPTDSHPTSFGFSLDPPSGFALAGALVEASPNPLGFRMRSPWDRLTDVSTYGPSGSEEDDEPSFCWDFSGLGNPGAMWDFMTACDYCLSDYSDGSRSLGDEDCGPSRECFHVDLGGPSEGNHLGMPEDGDLPRPVPRVDIPRELAVVPVQAGGHDPQLEQIRGVQARLDEGAGALEPIRRDVGQAWAGQPPAGEIRHLPQGFQHRIADDVRXSVYTGRTRNTAPVAPGRLDNEHHHRDRRAHLDERVRRGYHPRRGGRYDSGEDRSPSPEPPGPQAFSRAIRRAAFPTRFRPPXTTVTKYSGETRPELWLADYRLAYQLGGTDDDDLIIRNLPLFLSDTARAWLEHLPPGQISNWDDLVQAFTGNFQGTYVRPGNSWDLRSCRQQPGESLRDYILRFSKQRTELPNITDSDVIGAFLAGTTCRDLVSKLGRKTPTRASELMDIATKFAFGQEAVEAIFRKDKQPQGRPSEDAPEASTQRGAKKKGKKKSQAKRDAADADLVAAAEYKNPRKPPRGANLFDKMLKEPCPYHQGPVKHTLEECVTLRRHFHKAGPPAEGGRARDDDKKEDHQAGEFPEVRDCFMIYGGRAANASARHRKQERREVCSVKVAAPVYLDWSDKPITFDQAEHPDHVPSLGKYPLVVDPVIGDVRLTKVLMDGGSSLNIIYAETLGLLRVDLSSVRAGAAPFHGIIPGKRVQPLGQLDLPVCFGTLPNFQRETLTFEVVGFRGTYHAVLGRPCYAKFMAVPNYTYLKLKMPGPNGVITVSPTYKHAFECDVECVEYVEALIADLESLSKEVPDVKRHAGSFEPAETVKAVPLDPSGDASKQIRIGSGLEPK

SEQ ID NO: 298695 - protein, 71 aa, Zea mays
  Clone ID: MRT4577_3547C.1.pep
IKKPFRAHGPWVWGCEKKRRRKPGHAPLAVCLVYFWGQAGFIYFHGRGFLGPPLNLSQAGMFLMKPPPLFV

SEQ ID NO: 298696 - protein, 1390 aa, Zea mays
  unsure (1)..(1390): unsure at all Xaa locations
  Clone ID: MRT4577_35480C.1.pep
MWSTWDRLTTVSTYGPPGSEEDDEPDSGWDFSGLSNPSAMRDFMAACDYCLSDYSDGSHSLDDEDCGPSHDCFHVDLGGLDEGNHLGMPEDGDPTRPVPRVDILRELAVVQVPAGGQDTQLEQIREMQARLDEEAGQLVQLRQNIGQEWAGRAPAGEARHLAQDVQHWIADEARARLPPASSGLGGTDDDNLIIRNLPLFLSDAAQAWLEHLPPAQISNWDDLVKAFAGNFQGTYVRPGNSWDLRSCRQQPGESLREYIRRFLKQRTELPNITDLDVIGAFLAGTTCRDLVSKLGRMTPTRASELMDIATKFASGQEAVEAIFRKDKQPQGRQQEDVPKASAQRDTKKKGKKKSQAKRDAADTDLVAAAEHRNPWKPPGGANLFDKMLKESCPIIRTGPPAEGGKGHDNDKKEGHKAEEFPEVHDCFMIYGGQVVNALARHRKQERREVCSVKMSGPNGVITVGSTYRHAYECDVECMEYAEALAESEALIADLESLSKEVPDAKRHAGNFEPAEAEAVLVDILRANAEGFAWSPSDMPGIPRDVAKHSLDIRARAQPMKQPLRRFDEEKRRAIGEEIHKLMAAGFVKEVFHPEWLANLVLVKKKGGKWRMCADYTGLNKACPKVPYPLPRIDQIVDSTAGRETLSFLDAYSGYHQIRMKESDQLATSFITPLGMYCYITMPFGLRNAGATYQRCMNHAYVNDIVVKTRKASDLLSDLETTFKCLKAKGVKLNPEKCVFGVPRGMLLGFIVSERGIEANPEKIAAITNMGPIKDLKGVQRVMGCLAALSRFISRLGERGLHLYRLLRKTERFTWTLEAEEALGILKALLTRAGAGLLFVSPLGKHLRYVLRLHFPASNNVAEYEALVNGLRIAIELGVRCLDAHGDSQLVIDQVMKNSHCRDPKMEAYCDEVWRLNDKFYGLELNHIARRYNENVDELAKIASGRTTVPPDVFSRDLHQPSVKTDDTPEPEEASALPEAPSVAEGEALRIEEERNGVMPNRNWQTPYLQYLHQGELPLDRAEAWRLARHAKSFILLGDEKELYRRSPSGILQRCISITEGQELLQEIHSGACGHHVAPRALVGNAFRQCFYWPTAVADATRIVRTCQGCQFYARQTHLPAPALQTIPITWPFAVWGLDLVAHLQKAPGGYTHLLVAIDKFSKWIEXTPKQHQVRTGGGVLHQHHPSLWGXNSIITDNGTQFTGRKFLYFCEDHHIWVDWAAVAHPMXRMGRRWMNELPSVVWSLRTTPSRATGFTPFFLVYGAEAILPTDLEYGSPRTRVYDDQSNQTSREDSLDQLEEAWDLAXLHSARYQQSLRRYHARGVRSRDLQVGDLVLRLRQDARGRHKLTPPXEGPFIIAKILKPGTYKLANSQGEVYNNAWNIRQLHRFYP

SEQ ID NO: 298697 - protein, 70 aa, Zea mays
  Clone ID: MRT4577_35481C.1.pep
YVLQAEEALTEELLLIRTGMTHIVPPLIPRDRMIVSSQMMSLLCRQQDCLLMQRIHTMLHCTHRPMLLYP

SEQ ID NO: 298698 - protein, 52 aa, Zea mays
  Clone ID: MRT4577_35482C.1.pep
PRPGNLGLKNPPKMPPLRFNYKIFLDVCPKTGDIRCFPLIPPEESCLSPPPR

SEQ ID NO: 298699 - protein, 1644 aa, Zea mays
  unsure (1)..(1644): unsure at all Xaa locations
  Clone ID: MRT4577_35483C.1.pep
MAEEQHPGLSRRLPRRRRTRRGNRGQAGGGTSSAVERVNDAGTPAGDMSGIVLAPETTTSVASPQRANPKRTDDASTLAEDLLGVSFVPEITVQFIPDATSSPSIDQKVSSVFHPVPFRFSFDPPSDPASVSAFIKAYPNLPGYHMWSTWDRLTAVSTYGPPSSEEEDEPDSGWDFSGLGNLSAVRDFMTACDYCLSDCSNDGHSLDDECCGPSRECFHIDLGGHDEGNHLGMPEDDDPPGPAPRVDILRELAVVPVLAGGRTQESPGGRRGPTGRELCLLKARVPPEHRAATSRFIREASVHTGRTRDATPVAPGCLGNEHHYRDRRARLDEKGTYVRPGNSWDLRSCRQQPGESLREYIRRFSKQRTELPNITDSDVIGAFLAGTTCRDLVSKLGRKTPTKASELMDIATKFAFGQEAVEAIFRKDKQPQGRQQEDILEASAQRGTKKKAKKKAQAKRDAADADLVAAVEHRNPRKPPGGANLFDKMLKESCPYHQGPVKHTLVECGKGQDNDKKESDKAEEFPEVHDCFMIYGGRVANASARHRKQERREICSVKVAAPVYLDWSDKPITFDQGDHPDCLPSLGKYPLVVDPVIGNTRLTKVLMDGGRSLNIIYAETLGLLEIDLSTIRPGTYHVVLGRPCYTKFMAVPNYTYLKLKMSGPNGVITVGSTYRHAYKCDVECTEYAEALAESEALIADLECLSKEVPDAKRHADNFEPVEAEAVLVDFLRANAKVFAWSLSDMPGISRDVAEHSLDTRAGARPVKEPLRHFDEEKRRAIGEEIHKLMAVGFIKEVFHPEWLANPVLVKKKGGKWMMCVDYTSLNKACPKVPYPLPRIDQIVDSTAGCETLSFLDAYSGCHQIKMKESDQLATSFITPFGMYCYTTMPFGLRNAGATYQRCMNHVFGEHIGRTVEAYVDDIVVKTRKASDLLSDLETTFKCPRAKGVKLNLEKCVIGVPRGMLLGFIVSERGIEANPEKIADVTNMGPIKYLKGVQRVVSAAIVVERREEGHALLVQRSVYFISEVLSETKIRYPQIQKLMYAVILTRRKLRHXQVPSGDCGVIFPPGGXIQCREASGAGAGLLFISPLGKHLRYVLRLHFPASNNVAEYEDLVNGLRIAIELGVRRLDAHDDSQLVIDQVMKNSHCRDQKMEAYCDEVRRLEDKFYGLELNHTTVPPDVFSRDIHQPSVKTDDTPEPEEASAQPEVSSAAEDEALRVEGEWNGVTPNRNWQTLYLQYLHRGELPLDKAEARRLARCAKSIVLLGDEKELYHRNPSGILQRCISITEGQELLQEIHSGACGHHAAPRALVGNAFRQGFYWPTVVADATRIMRSSQGCQFYARQTHLPAQALQTIPITWSFAVWGLDLVGPLQKAPGGYTHLLVAIDKFSKWIEVRPLNSIRSEQVVAFFTNIIHRFGVPNSIITDNGTQFTGKKFLDFCEDHHIRVDWAAVAHPMTNGQVERANGMILQGLKPRIYNDLNKFGKRWMKELPSVVWSLRTTPSRATGFSLFFLVYGAEAILPTDLEYGSPRTKAYDDQSNQTNREDLLDQLEEARDVALLHSARYQQSLRRYHARGVRXRXLQVGDLVLRLRQDARGRHKLTPPWEKSFVIVKVLKPGTYKLANSQGEVYSNAWNIRQLRHFYP

SEQ ID NO: 298700 - protein, 55 aa, Zea mays
  unsure (1)..(55): unsure at all Xaa locations
  Clone ID: MRT4577_35484C.1.pep
RXKTRGESQNLIPGSFKNIGVFLVQESLIHCKLLPKPVTIDQNPLWLRPIPPPPH

SEQ ID NO: 298701 - protein, 507 aa, Zea mays
  Clone ID: MRT4577_35485C.1.pep
MEAYCDEVRRLEDKFFGLELNHIARRYNETVDELAKIASGRTTVPPDVFSRDLHQPSVKTDDTPEPEKPEAPSAPEGEALRVEEERNGVTPNRNWQTLYLQYLHRGELTLDRAKARRLARRAKSFVLLGDGKELYHRSPSGILKRCISIAEGQELLQEIHSGACGHHAAPRALVGNAFRQGFYWPTAVADATRIVRTCQGCQFYAKQTHLPAQALQTIPITWSFAVWGLDLVGPLQKAPGGYTHLLVAIDKFSKWIEVRPLNNIRSEQAVAFFTNIIHRFGVPNSIITDNGTQFTGRKFLDFCEDHHIRVDWAAVAHPMTNGQVERANGMILQGLKPWIYNDLNKFGKRWMKELPSVVWSLRTTPSRATGFTPFFLVYGAEAILPTDLEYGSPRTRAYNDRSNQSNREDSLDQLEEARDMALLHSTRYQQSLQRYHARGVRSRDLQVGDLVLRLRQDARWRLKLTPPWEGPFIIAKILKPGTYKLANSQGEVYINAWNIRQLRRFYP

SEQ ID NO: 298702 - protein, 388 aa, Zea mays
  Clone ID: MRT4577_35486C.1.pep
MGNAFACMPRKEQRGAAAVSRSKRMGSARSARGGPKLTPAEEELLHRQALAMAIHQHLDAGGSMSRRIDAGASLSRRMAPGSTSSRRRGDLPDSVTNAKPAPIVLENLETKKIVLVHGEGFGAWCWYKTISHLEEAGLDPVALDLTGSGIDHTDTNSIATLADYSKPLIDYLDRLPEDEKVILVGHSCGGASVSYALEQYPRKISKAVFLTATMVKDGQRPFDVFSEELRSADVFLQESQFLVYGNGKDKPPTGLMFDKQQIKGLYFNQTPSKDMALAAVSMRPIPLAPIMEKLSLTPENYGSVRRYFIQALDDHMLSPDAQEKLVRENPPDGIFKIKGGDHCPFFSKPQSLNKILLEIAQIQAPAALLKASSPEETAAAMVTGPAKS

SEQ ID NO: 298703 - protein, 827 aa, Zea mays
  unsure (1)..(827): unsure at all Xaa locations
  Clone ID: MRT4577_35487C.1.pep
MPFGLRNAGATYQRCMNHVFGEHIGRTVEAYVDDIVVKTRKASALLSDLEVTFRCLKAKGVKLNPEKCVFGVPRGMLLGFIVSERGIEANPEKIAAITSMGPIKDLKGVQRVMGCLAALSRFISRLGERGLPLYRLLRKAECFAWTPEVEEALGNLKALLTKAPVLVPPADGEALLVYVAATTQVVSAAIVVERQEEGHTLPVQRPVYFISEVLSETKIRYPQVQKLLYAVILTRRKLRHYFESHPXIAKWAVEIMGETISFAPRKAIKSQVLADFVAEWVDTQLPTXPIQPELWTMFFDGSLMKTGAGAGLLFISPLGKHLRYVLRLHFPASNNVAEYKALVNGLRIAIELGVRRLDARGDSQLVIDQVMKNSHCRDPKMEAYCDEVRRLEDKFFGLELNHIARRYNETADELAKIASGRTTVPPDVFSRDLHQPSVKLDDTPEPEVPSAQPEVPSAQPEVPSAQPEVPSAPEGRALNIEEGQSGATPDQDWQAPYLXISVEESYPSTKSRLGGXRDAPSHSSCWATKRSSTTAAPRASSSGASPSPKVXEPLQEKAPGGYTHLLVAIDKFSKWIEVRPLNSIRSEQAVAFFTNIIHRFGVPNSIITDNGTQFTGKKFLDFCEDHHIRVDWAAVAHPMSNGQVERANGMILQGLKPRIYNDLNKFGKRWMKELPSVVWSLRTTPSRATGFTPFFLVYGAEAILPTDLEYGSPRARAYTEQSNQASREESLDQLEEARDRALLHSARYQQSLRRYHARGVRSRELQVGDLVLRLRQDARGRHKLTPPWEGPFVIAKVLKPGTYKLANNQGEVYGXLGTSNSYVASTL

SEQ ID NO: 298704 - protein, 103 aa, Zea mays
  unsure (1)..(103): unsure at all Xaa locations
  Clone ID: MRT4577_35488C.1.pep
MVRSQSAVCVXVLDAELLLAPPPTTXSQGCITCAQVSSGITPCLSFPRGWGTXPSSSCCIGVRNHNRDIPTSGDTSAAXTCLYIAPRGVIRLNAGDVDSIPSK

SEQ ID NO: 298705 - protein, 49 aa, Zea mays
  Clone ID: MRT4577_35489C.1.pep
QEWATALLIVVLNKDHSNTREFGPNQGPYFVNQIFDTPKGKGEKERQRD

SEQ ID NO: 298706 - protein, 158 aa, Zea mays
  Clone ID: MRT4577_3548C.1.pep
MIYLLKKKKKKIGKIKKKKETTPTAVKMVAAKKHVPIVKKHTKRFNRHQSDRFKCVDPSWRKPKGIDNAVRRRFKGRAAMPKIGYGSNKKTRHMMPSGHKAFVVNNVADVDLLLMHNSTFAAEIAHAVSARKRIDIIARAKQLGVKVTNGKARVKTES

SEQ ID NO: 298707 - protein, 316 aa, Zea mays
  unsure (1)..(316): unsure at all Xaa locations
  Clone ID: MRT4577_35490C.1.pep
MAPALSFPIIDMGLLAGEERPAAMELLQDACENWGFFEILNHGISTELMDEVEKLTKEHYKRVREQRFLEFASKTLGDGRDIAQGVKADNLDWESTFFVRHLPEPNIAEIPDLDDEYRRVMKRFAGELEALAERLLDLLCENLGLDRGYLARAFRGPSKGAPTFGTKVSSYPPCPRPDLVSGLRAHTDAGGIILLFQDDRVGGLQLLKDGEWVDVPPXMPHAVVVNLGDQLQVITNGSXSGNRMSIASFYNPGSDAVIFPAPALVKAEEAAAGAYPSFVFEDYMKLYVRHKFEAKEPRFEAFKSMETDSSNRIAIA

SEQ ID NO: 298708 - protein, 263 aa, Zea mays
  unsure (1)..(263): unsure at all Xaa locations
  Clone ID: MRT4577_35491C.1.pep
MAWIWMVLAAGAVLLWAISLGRIFSSAAPSCVPLSPQFMPPLRGDRRTRNVMLVVAHPDDESMFFAPTILFLKSKGHNIHILCMSRGNADGLGDTRKXELYHACETLKIPHEQVEVLDHPKLQDGFHEKWDHELVSELVMEHVQLWVIDMIVTFDSYGVSGHPNHRDVHYGICKFLHANRQGNVEAWELASLNILRKYSGPVDIWLSSLISVSRSKQSIYTLVNSSPPRSYEAMAAHRSQWVWFRRVFVMLSSYTYINMLQKI

SEQ ID NO: 298709 - protein, 326 aa, Zea mays
  Clone ID: MRT4577_35492C.1.pep
MAPALSFPIIDMGLLAGEERPAAMELLQDACENWGFFEILNHGISTELMDEVEKLTKEHYKRVREQRFLEFASKTLGDGRDIAQGVKADNLDWESTFFVRHLPEPNIAEIPDLDDEYRRVMKRFAGELEALAERLLDLLCENLGLDRGYLARAFRGPSKGAPTFGTKVSSYPPCPRPDLVSGLRAHTDAGGIILLFQDDRVGGLQLLKDGEWVDVPPMRHAVVVNLGDQLEVITNGRYKSVMHRVVAQPSGNRMSIASFYNPGSDAVIFPAPALVKAEEAAAGVYPSFVFEDYMKLYVRHKFEAKEPRFEAFKSMETDSSNRIAIA

SEQ ID NO: 298710 - protein, 77 aa, Zea mays
  Clone ID: MRT4577_35493C.1.pep
PSLVANQSFRKIEGNFYLSTKPGSISFRTIIREDQLHQAGPDKIGFFLPSGVQIGLPSGFFPRAKVPMFPFKEIPRN

SEQ ID NO: 298711 - protein, 57 aa, Zea mays
  Clone ID: MRT4577_35494C.1.pep
LRSFPPPPGWEWERLPSSTVAMGRNSFIRPIKKKRKKKKKKKKKTKKKKKKKKKKSL

SEQ ID NO: 298712 - protein, 54 aa, Zea mays
  Clone ID: MRT4577_35495C.1.pep
NYVCLHITSWPIILKYGYKYIKRKDKDDLLRNFYFSKVLIGKVHLIQQCHQKIT

SEQ ID NO: 298713 - protein, 106 aa, Zea mays
  unsure (1)..(106): unsure at all Xaa locations
  Clone ID: MRT4577_35496C.1.pep
GSPKKPLFFFKIILKKSLGGGFXXXWVXXPWCLGPGFSQPGGEPRFYNWPRGAFELKTKGGPPHPHPDGDKPFGFGKTSRGRKGIFGRGGPTVYFFSSPGGCANPP

SEQ ID NO: 298714 - protein, 78 aa, Zea mays
  Clone ID: MRT4577_35497C.1.pep
KKKKKKKKKKKKKNKKKKKKKLKKKAFSSRYTSFLGALFPLFWLTFGDFYHTCGGSPLPFGGPFCPLVGRFLYPLGLG

SEQ ID NO: 298715 - protein, 72 aa, Zea mays
  Clone ID: MRT4577_35498C.1.pep
GSMTPLAPHSWLLNPLVSPPCSIGLFTGNQYPPECFDSIVAMIRCMYAHIRKLVKGSFSQGREIPKPCARLI

SEQ ID NO: 298716 - protein, 163 aa, Zea mays
  Clone ID: MRT4577_35499C.1.pep
MKDSDPGPPVGCGRGTAAGAPGATRENHAQAIRTRPQAQQAKAETAHRGMADDDWRTLHDEGAAGAHKGRPPNPLKGAPAARTTDPANEARKKNRAPEKTAEQPGGKTANSSGTADRRDNDDTRKEPDEQNHPEEKDGARKKEPEATAARPNQPRTTRKERKK

SEQ ID NO: 298717 - protein, 114 aa, Zea mays
  Clone ID: MRT4577_3549C.1.pep
IFFFFFFIYSCKRHGNNFYNNTLTQVGVMHLDTTGTLRYTLSDTMVQQVEIVNSGSVSKRRDIRSSTAHRGKYRVWTCETKRVRDVRHMTICGDSRCRPVFKRTDQIGHWAKHW

SEQ ID NO: 298718 - protein, 475 aa, Zea mays
  unsure (1)..(475): unsure at all Xaa locations
  Clone ID: MRT4577_354C.1.pep
RSPFSHSSLISHHRRRYPLSTTPCTECISIHIDQAAIQAGNARWELYCLEHGIQADGQMPGDKTIGGGDDAFNTFFTETGAGKYVPRAGFADLESTGIDEGRTGTYRQLFHPEXQLIRGNEDAANNFARGHYTLGKDIGYLCPDRIKKIADNCTGLQGFLVFNAGGGRTGSGLASLLLERLSVDYGKKSKLGFTVYPSPQVSTSVVEPYNSVLSTHSLLEHTDVAVLLDNEAIYDICRRSLDVERPTYTNLNRLVSQVISSLTASLRFDGALNVDVNEFQTNLVPYPRIHFMLSSYAPVISAEKAYHEQLSVAEITNSAFEPSSMMAKCDPRHGKYMACCLMYRGDVVPKDVNAAVATIKTKRTIQFVDWCPTGFKCGINYQPPSVVPGGDLAKVQRAVCMISNSTSVVEVFSRIDHKFDLMYAKRAFVHWYVGEGMEEGEFSEAREDLAALEKDYEEVGAEFDEGEDGDEGDEY

SEQ ID NO: 298719 - protein, 73 aa, Zea mays
  Clone ID: MRT4577_35500C.1.pep
TVLQFVSRLHAAYLSRWFVWPSSIKKRCHSGCVLAGGQRNISQGRSSFPRLLGGRRHKEYLRGSVRYIVIVMP

SEQ ID NO: 298720 - protein, 129 aa, Zea mays
  Clone ID: MRT4577_35501C.1.pep
KGSSSTEQDRKESKRAAGKPPSPLPRMCSAPVICLRCRTSCLLLGHGQAHLQALLPSVPQWPRAGRPHALPRHGRVVGCSVLLAAAAALPGVHLVDRDGRRRRSGAAEATHAVRCTRRRRQESVRLSRT

SEQ ID NO: 298721 - protein, 77 aa, Zea mays
  unsure (1)..(77): unsure at all Xaa locations
  Clone ID: MRT4577_35502C.1.pep
CVGVHRYGTLTGKPPLVGGCRDSIHPWILNENLELRSYLSXSDVHSVLRRLLRRVSGSRLGCGPGGSDAIWNHKSFK

SEQ ID NO: 298722 - protein, 90 aa, Zea mays
  unsure (1)..(90): unsure at all Xaa locations
  Clone ID: MRT4577_35503C.1.pep
RIPXFSFLFFFFFFFFFFFFFFFLYFFLRLVLFVLGYVLFSIHLPIFPILTTLNPPSRANPRGEHTTGPSNVPSQAQGAHRPSQTHNHHT

SEQ ID NO: 298723 - protein, 800 aa, Zea mays
  unsure (1)..(800): unsure at all Xaa locations
  Clone ID: MRT4577_35504C.1.pep
MLLGFIVSERGIEANPEKIAAITSMGPIKDLKGVQRVTGCLAALSRFISRLGERGLPLYRLLRKAECFTWTPEAEEALGNLKALVTNAPILVPPTAVEALLIYVAATTQVVSAAIVVERQEEGHTLPVQRPVYFVSEVLSETKIRYPQIQKLLYAVILTRRKLRHYFESHPVTVVSSFPLGEVIQCREASGRIAKWAVEIMGETISFAPRKAIKSQVLADFVAEWVDTQLPTAPIQPELWTMFFDGSLMKTGAGAGLLFISPLGKHLRYVLRLHFPASNNVAEYEALVNGLRIAIELGVRRLDARGDSQLVIDQVMKNSHCRGPMMEAYCDEVRRLEDKFYGLELNHIARRYNETVDELAKIASGRTTVPPDVFSRDLHQPSVKIDDTPEPEASSAQSEAPSAQSEEPSAQPEAPSAPEDEALRIEEERNGVTPNQNWQTPYLQYLHRGELPLDRAEARRLARRAKSFVLLGDRKELYHRSPSGILQRCIPIAEGQELLQEIHSGACGHHAAPRALVGNAFRQGFYWSTAKAPXRATRTCWSPSTNSPSXEVRPLXATGPNRRWRSSPTSSIALGFRTPSSPITAPSXGRKFLDFCEDHHIRVDWAAVAHPMTNGQVERANGMTLQGLKPQIYNDLNKFGKRWMKELPSVVWSLRTTPSRATGFTPFFLVYGAEAILPTDLEYGSPRTRAYADQSNQANREDSLDQLEEARDMALLHSAWYEQSLRRYHARGVRSRDLQVGDLVLRLRQDARGRHKLTPPWEGPFVIAKVLKPGTYKLANSQGKVYSNAWNIQHLRRFYP

SEQ ID NO: 298724 - protein, 506 aa, Zea mays
  Clone ID: MRT4577_35505C.1.pep
MPFGLRNAGATYQRCMNHVFGEHIGRTVEAYVDDIVVKAKGVKLNPEKCVFGVPRGMLLGFIVSERGIEANPEKIVAITSMGPIKDLKGVQRVTGCLAALSRFISRLGERGLPLYRLLRKAECFIWTPEAEEALGNLKTLLTNAPILVVSAAIVVERREEGHALPVQRSVYFISEAIKSQVLADFVAEWVDTQLPTAPIQPELWTMFFDGSLMKTGAGAGLLFISPLGKHLRYVLRLHFPASNNVAEYEALVNGLRIAIELGVRRLDARDDSQLVINQVMKNSHCRDPKMEAYCDEVWRLEDKFYGLELNHIARRYNETADELTKIASGQTTVPPDVFSRDLHQPSVKTDDTPEPEKASAQPKAPSAPKDLVGPLQKAPGGYTHLLVAIDKFSNWIEVRPLNSIRSEQAVAFFTNIIHRFGVPNSIITDNDTQFTGRKFLDFCEDHHIRVDWAAVAHPMTNGPVERANGMILQGLKPRIYNDLNKFGKRWMKELPSVVWSLRTTPS

SEQ ID NO: 298725 - protein, 779 aa, Zea mays
  Clone ID: MRT4577_35506C.1.pep
MPFGLRNAGVTYQRCMNHVFGEHIGRTVEAYVDDIVVKTRKASDLLSDLEVTFRCLKAKGVKLNPEKCVFGVPRGMLLGFIVSERGIEANPEKIAAITSMGPIKDLKGVQRVMRCLAALSRFMSRLGERGLPLYRLLRKAECFTWTPEAEEALGNLKALLTKAPILVPPAAEEALLVYVAATTQVVSAAIVVERQEEGHALPVQRPVYFVSEVLSETKVRYPQVQKLLYAVILTRRKLRHYFESHPVTVVSSFPLGEIIQCREASGRIAKWAVEIMGETISFAPWKAIKSQVLADFVAEWVDTQLPTTPIQPELWTMFFDGSLMKTGAGAGLLFISPLGKHLRYVLRLHFPASNNVAEYEALVNGLRIAIELGVRRLDARGDSQLIIDQVMKNSHCRDPKMEAYCDEVRRLEDKFYGLELNHIARRYNETADELAKIASGRTTVPPDVFSRDLHQPSVKIDNTPEPEAPSAQFEAPSARPEGELPIDRAEARRVARRAKSFVLLGNEKKAPGGYTHLLVAIDKFSKWIEVRPLNNIRSEQAVAFFTNIIHRFRVPNSIITDNGTQFTGRKFLDFCEDHHIRVDWAAVAHPMPNGQVERANGMILQGFKPRIYNDLNKFGKRWMKELPSVVWSLRTTPSRATGFTPFFLVYGAEAVLPTDLEYGSPRTRAYSDQSNQASREDSLDLLEEARDKALLHSARYQQSLRRYHARGVRSRDLQVGDLVLRLRQDARGRHKLTPPWEGPFVIAKVLKPGTYKLANSQGEVYGNAWNIQQLRRFYP

SEQ ID NO: 298726 - protein, 69 aa, Zea mays
  Clone ID: MRT4577_35507C.1.pep
LSTSSLLTPREAKQRWLAVYDDGAATSCPRRNKSVHYATMLTELRVPLFHRSSHQFLKMGIQHLVVQAN

SEQ ID NO: 298727 - protein, 624 aa, Zea mays
  Clone ID: MRT4577_35508C.1.pep
MRDFMTACDYRLSDCSDGSRSFGDEDCGPSRECFHVDLGGPGEGNHLGMPKNGDPPRPAPRVDILRELAVVPVPAGGQDAQLEQIREMQARLDEGAETLEHFRRNIGQEWADQAPAGEACHLPQGIQYRIADDVRAGPPPAYSGVGQNLAAAAIILRAMPKPSTTEGRRIQGELKNLLEDAAVRRAESSASRRQGYPSKHRAATSRFMREASVHTGRTRNTAPAAPGRLGNEHHHRNRRAHLDERGTYVCPGNSWDLRSYRQQPGESLWDYIRRFSKQRTELPNVTDSDVIGAFLAGTTCCDLMLKESCPYHQGPVKHTLEECVLLRRHFHKVGPPAEGGRAHNNDKKEDHKAEEFPEVHNCFMIYGGPVANASARHRKQERREVCSIKVAAPVYLDWSDKPITFDQGNHPDRVPSPGKYPLVVDPVIGNVRLTKVLMDGGSSLNIIYAETLGLLQIDLSSIRTGATPFHGIIPGKRVQPLGQLDLPICFGTPSNFRRETLTFEVVGFRGTYHTVLGRPCYAKFMAVPNYTYLKLKMLGPNGVITVGPTYRHAYECGVECVEYAEALAEFEALIADLESLSKEAPDAKRHADNFEPAETVKSVPLDRSNDASKQIWIGSELDPK

SEQ ID NO: 298728 - protein, 199 aa, Zea mays
  Clone ID: MRT4577_35509C.1.pep
MGSLQQPFQPRTVLRFGSLEFMSLDGSYDMILLPPSRDSDNGGRQPAHRRRNRQRLPHVAEEQHSGLSRRLPRRRRRRRGNQGQAGGGTSSAVERVDGAGAPTGDTSSVDLASETKTSAVSPQHANSKWTDNTSTLAKDLLGVTLVPETAVQSAPDATSSPLVDQEVPTDSHLVPFGFSLDPPSNFASVEAESRLEGGE

SEQ ID NO: 298729 - protein, 65 aa, Zea mays
  Clone ID: MRT4577_3550C.1.pep
TLIRFLVFTPLKVYRGGLQTPQRGRGIFLKEPLAFESVLMEAQPDPWEACIGRPLKNIAAPGVPP

SEQ ID NO: 298730 - protein, 1146 aa, Zea mays
  unsure (1)..(1146): unsure at all Xaa locations
  Clone ID: MRT4577_35510C.1.pep
AWSDKXPITFDQADXPDRVPSSGKYPLIVDLVIEDVRLTKVLMDGGSSLNIIYAETLGLLRVDLSSVRAGAAPFHGIIPGKRVQPLGQLNKKVCFAPPSNLRRETLTFEVVGFRGTYHAVLGRPCYVKFMAVPNYTYLKLKMPGPNGVITVGPTYKHAFECDVECVEYAEALAESEALIADLENLSKEVPDVKRHAGNFEPAETVKAVPLDPSGDTSKQIRIGYHQIRMKESDQLATSFITPFGMYCYVTMPFGLRNAGATYQRCMNDVFGEHIGRTVEAYVDDIVVKTRKASDLLSDLEVTFRCLKAKGVKLNPEKCVFGVPRGMLLGFIVSERGIEANPEKIAAITSMGPIKDLKGVQRVMGCLAALSRFISRLGERGLPLYRLLRKAECFAWTPEAEEALGNLKALLTKAPVLVPPADGEALLVYVAATTQVVSAAIVVERQEEGHALPVQRLVYFISEVLSETKIRYPQVQKLLYAVILTRRKLRHYFESHPVTVVSSFPLGEIIQCREASGRIAKWAVEIMGETISFAPRKAIKSQVLADFVAEWVDTQLPTAPIQPELWTMFFDGSLMKTGAGAGLLFISPLGKHLRYVLRLHFPASDNVAEYEALVNGLRIAIELGVRRLDARGDSQLVIDQVMKNSHCRDPKMEAYCDEVRRLEDKFYGLELNHIARRYNETADELAKIASGRTTVPPDVFSRDLHQPSVRIDDAPEPEAPSAQPEAPSAQPEAPSAQPEVPSAPEGEALDVEEEQSGATPDRDWQAPYLRYLCRGELPPDQDEARRVARRAKSFVLLGDEEELYHRSPSGILQRCISIAEGFYWPTAVADATRIVRTCEGCQFYAKQTHLPAQALQTIPITWPFAVWGLDLVGPLQKAPGGYTHLLVAIDKFSKWIEVRPLNSIRSEQAVAFFTNIIHRFGVPNSIITDNGTQFTGKKFLDFCEDHHIRVDWAAVAHPMSNGQVERANDMILQGLKPRIYNGLNKFGKRWMKELPSVVWSLRMTPSRATGFTLFFLVYGAEAILPTDLEYGSPRTRAYTDQSNQASREESLDQLEEARDKALLHSARYQQSLRRYHARGVRSRDLQVGDLVLRLRQDARGRHKLTPPWEGPFVIAKVLKPGTYKLANNQGEIYGNAWNIKQLRRFYP

SEQ ID NO: 298731 - protein, 79 aa, Zea mays
  Clone ID: MRT4577_35511C.1.pep
PTHKSIFPKRILLLLCFLTQNHAETHPDKTITLQVDSVDTIAIVKDTIHVTDAIHPDQKRVISAGIQIEDGRTLADYNI

SEQ ID NO: 298732 - protein, 84 aa, Zea mays
  Clone ID: MRT4577_35512C.1.pep
ESKIPNDFLRKHTSPHTYWQVPTVQANILVEKSPSMRAAPGRRPGFHELTAMILCVSLEVFGRVMSWLFCSIIRHRHRSLVLHF

SEQ ID NO: 298733 - protein, 865 aa, Zea mays
  unsure (1)..(865): unsure at all Xaa locations
  Clone ID: MRT4577_35513C.1.pep
GGRQPAHRRRNRRHLPRVVEEQRSSSPRPLPRQRRRRRGNQGQAGGRASSAVERIDVPSAPTEGTPGVDLAFKTKAGAVPPRHADPEQEDDAGALAESLQDVALVPETTXAMRDFMTACDYCLSDCSDGSRSLDDEDCGPSRECFHVELGDPSEGNHLGMPEDGDFPRPAPRADIPRELAVVPVPVGGHDPQLEQVRGAQARLDEGTGALETIRRDVGQGYPSEPHAATSRFMREASVYTGRTRNTAPAAPSHLGNEHHRRDRRAHLDERVRRGYHPRRGGRYDSGEDRSPSPEPPGPQAFSRAIRRAPFPTRFRPPTTITKYSGETRPELWLADYRLACQLGGTDDDNLIIRNLPLFLSDTARAWLEHLPPGQISNWDDLVQAFTGNFQGTYMRPGNSWDLRSCRQQPGESLRDYIRRFSKQRTELPNITDSDVIGAFLAGTTCRDLVSKLGRKTPTRASELMDIATKFASGQEAVEAIFQKDKQPQGRPSEEAPEASTPRGAKKKGKKKSQSKRDAADADLVAAAEYKNPRKPPGGANLFDKMLKEPCPYHQGPVKHTLEECVMLRRHFHRAGPPAEGGRAHDDDKKEDHQAGEFPEVRDCFMIYGGHAANTSARHRKQERREVCSVKVAAPVYLDWSDKPITFDQADHPDHVPSPGKYPLVVDPIVGNVRLTKVLMDGGSCLNIIYAETLKLLRVDLSSVRAGAAPFHGIIPGKRVQPLGRLDLPVCFGTPSNFRRETLTFEVVGFRGTYHAVLGRPCYAKFMVVPNYTYLKLKMPGPNGVITVGPTYKHAFECDVECVEYAEALAESEALIADLENLSKEVPDVKRHAGNFEPAETVKAVPLDPCGDTSKQIWIGSGLDPK

SEQ ID NO: 298734 - protein, 1960 aa, Zea mays
  unsure (1)..(1960): unsure at all Xaa locations
  Clone ID: MRT4577_35514C.1.pep
MSLDGSYDMIFLPPPRDSDNGGRQSARRRRNQRRLPHVAEERHSSLSRPLPRRRRRRRGNQGQAGGGISSAVERVDGAGAPAGGTSGIDLASETKTSAVSPQRATSKRTDDASTLAKDLLGVTLVPKTTVQSAPDATSSPPVDQEVPTDSHLVPFGFSLDPPSDFASVDALIEVSPNPLGYCMRSPWDRLTAVSTYGPSGSEENDEPDFCWDFSRLSNPSAMRDFMTACDYCLSDCSDGSRSLGDEDCGPSRECFHVDLGGPGEGNHLGTPENGDPPGPAPRVDILRELAVVPVPAGGHDPQLEQIREMQARLDEGAGTLEPFRRDIGQEWAGQPPAGEAPAILLRAMPEPSTTEGRCIQVELKNLLEDVAVRRAKSSASRRQGYPSEHHAATSRFMREASVHTGRTRNTAPAAPDSLGNRHPHRNRRTHLDERGTYVRPRNSWDLRSCRQQPGESLRDYIRRFSKQRTELPNVTDSDVIGAFLAGTTCRDLVSKLGRKTPTRASELMDITTKFASGQEAVEAIFWKDKQPQGRPPEDVPKASTQRGTKKKGGKKSQAKRDAADADLVADAEYKNPRKPPGGANLFDKMLKEPCPYHQGPVKHTLEECAMLRRHFHKAGPPAEGGRARDDDKKEDHKAGEFLEVRDCFMIYGGLVANASARHRKQERREVCSVKVAAPVYLEWSDKPITFDQGDHPDCVPSPGKYPLVVDPVISNVRLTKVLMDGGSSLNIIYAETLGLLRIDLSSVRAGAAPFHGIIPGKRVQPLGQLDLPVCFGTPFNFRRETLTFEVVGFRGTYHAVMGRPCYAKFMAVPNYTYLKLKMPGPNGVITVGPTYRHVYECDVECVEYAEALAESEALIADLESLSKEAPDVKRHAGNFEPAETEAVLVDFLHANADVFAWSPSDMPGIPRDVAEHSLDIRAGARPVKQPLRRFDEEKRRAIGEEIHKLMAVGFIKEVFHPEWLANPMLVRKKGGKWRMCVDYTGLNKACPKVPYPLPRIDQIMDSTAGCETLSFLNAYSGYHQIRMKESDQLATSFITPFGMYCYVTMPFGLRNAGAIYQRCMNHVFGEHIGRTVEAYVDDIVVNTRKASDLLSDLEVTFRCLKAKGVKLNPEKCVFGVPRGMLLGFIVSERGIEANPEKITAITNMGPIKDLKGVQRVTGCLAALSRFISRLGERGLPLYRLLRKVECFTWTPEAEEALGNLKALLTNTPILVPPAAGEDLLIYVTATTQVRPVYFFSEVLSETKIRYPQIQKLLYAVILTRRKLRHYFESHPVTVVSSFPLGEIIQCREASGRTAKWVVEIMGDTISFAPRKAIKSQVLADFVAEWVDTQLPTVPIQPELWTMFFDGSLMKTGAGAGLLFISPLRKHLRYVLRLHFPASNNVAEYEALVNGLRIAIELGVRHLDARGDSQLVIDQVMKNSHYRDPNMEAYCDEVRRLEDKFYGLELNHIARCYNETADKLAKIASERTTVPPDVFSRDLHQPSVKTDDTPEPEKASAQPEASSARPEAPSALPETSSAQPEATSAPEVEALRVEEERSGVTPNRNWQTPYLXISTEESYPSTEPKLDGWRGAPSCWSCWGMGRSSTTVAPQASSSDAYPSPKARSSYKKYTRGLAVITQHLEPLLETPSDKXYWPTAVADATRFVRTCKGCQFYARQTHLPAQALQTIPITWPFAVWGLDLVGPLQKAPGGYTHLLVAIDKFSKWIEVWPLNSIRSEQAVAFFTNIIHRFGVPNSIITDNGTQFTGRKFLDFCEDHHIQVDWAAVAHPMTNGQVERANGMILQGLKPRIYNDLNKFGKRWMKELPSVVWSLRTTPSRATGFTPFFVVYGAEAILPIDLEYGSPRARAYDDQSNRANREDSLDQLEEARDMALLHSARYQQSLRRYHARGVQSRDLQVGDLVLRLRQDARGRHKLTPPWEGPFVMSKVLKPGTYKLANSQGEVYSXLGTSDSYVASTL

SEQ ID NO: 298735 - protein, 1346 aa, Zea mays
  unsure (1)..(1346): unsure at all Xaa locations
  Clone ID: MRT4577_35515C.1.pep
MQARLDEGAGTLEQFRWNIGQEWADQAPAREACDLPQGIQRRIADDVRARPPPASSGVGQNLAAAAILLRAMPEPSTTEGRRIQGELKNLLEDAAVRRAESSASRRQGYPSEHRAATSRFMRRGRYNSGEDRSPSPEPPGPQAXAGPYDGRHSRPGSEPRLXHKVLGGDEAGTVARXYRLACQLGGTDDDNLIICNLPLFLSDTARAWLEHLPPGQISNWDDXPSLRRQXQGTYPGESLRDYIQRFSKQRTELPNVTDSDVIGAFLTGTTCRDLRGTKKKNKKKSQAKRDATDADLVAAAEYKNPRKPPGGANLFDKMLKESCPYHQGPVKHTLEECVMLWRHFHKAGPPVEGGRAHNNDKKEDHKVEEFTEVHDCFMIYGGQVANASARHRKQEHREVCSVKVAAPVYLDWFDKPITFDQGDHPDRVPSPGKYPLVVDPVIGNVRLTKVLMDGGSSLNIIYAETLGLLQIDLSSIRTGTAPFHGIILGKRVQPLGQLDLPVCFGTPSNFRRXPYPLPHIDQIVDSTAGXYHQIRMKESDQLATSFITPFGMYCYVTMPLGLRNAGATYQRCMNHVFGEHIGRTVEAYVDDILVKTRKASNLLSDLETTFQCLKAKGVKLNPEKCVFGVPRGMLLGFIVSKRGIEANPEKIAAITNMGPIKDLKGVQRVMGCLAALSRFISCLGERGLPLYRLLRKTERFTWTPEAEEALGNLKALLTNAPILVPPAAGEALLIYVAATTQVVSAAIVVERREEGHALPVQRPVYFISEVLSETKIRYPQIQKLLYAFEPHPVTVVSSFPLGEIIQCQEASGRIAKWAVEIMGETISFAPRKAIKSQVLADFVAEWVDTQLPAASIQLELWTMFFDRSLMKTGAGAGLLFISPLGKHLRYVLRLHFPASNNVAKYEALVNGLRIAIELGVRRLDARGDSQLVIDQVMKNSHCRDPKMEAYYDEVRHLEDKFYGLEVNHVARRYNETTDELAKIASARATVPPKVFSRDLHQPSVKTNDTPEPEKASARPEAPSAPEGEALRIEEERNGVTPNRNWQTPYLQYLHRGELPLDRAKARRLARRTKSFVLLGDGKELYHRNPSGILQRCISIAEGRELLQEIHSGACGHHAAPRALALQTIPITWMFVVWGLDLVGPLQKAPGGYMHLLVAIDKFSKWIEVRLLNSIRSEQAVAFFTNIIHRFGVPNSIITDNGTQFTGRKFLDFCEDHHIRVDWAAVAHPMTNGQAERANDMILQGLKPRIYNDLHXVYGAEAILPTNLEYGSPRTRTYDDRRNQTNREDSLDQLEEARDMALLHSARYQQSLRCYHARGVRSRDLQVGDLVLRLRQDTRGRHKLTPP

SEQ ID NO: 298736 - protein, 94 aa, Zea mays
  unsure (1)..(94): unsure at all Xaa locations
  Clone ID: MRT4577_35516C.1.pep
GPLYQKGVCQMFFQNNPNGPTFGTGKLFWGHSLFGDRGNWGFLGTPLNPTLALNPKGFWWGFHKTLGDGPPRIFXSGANQAGXQVQKVGFHKNP

SEQ ID NO: 298737 - protein, 77 aa, Zea mays
  Clone ID: MRT4577_35517C.1.pep
TTGRARAQQVHRDRGDHIGQHQRAGARDTVQPEPQEKANELRLPSKNNCQTERSNNQSQSWPIISISAVSNIKDGEC

SEQ ID NO: 298738 - protein, 653 aa, Zea mays
  unsure (1)..(653): unsure at all Xaa locations
  Clone ID: MRT4577_35518C.1.pep
MKHLRTSEQHILRSWHFEDVDSAPDVEENSAACVAPTVVPLDRVSLTAAKSSLGRYRKLRLARPQGSGSTSTLDDELRLARPQGSDTASASEDGLRLARPRAQTQPRPRKTDSASPDRRGRTQPQPRKTVSASPDPRARAQPRRWTTDSASPDPRARTQPRLRKTTDSALPDPRARTQPRLRKTMDSASPDPRARTQPRLWKTMDSASPDPKAQTQPRLRKTMGSALSDPKAQTQPRPRRNRHLAQTRVRTGHVTRGAIIALPLASSGYGEQDRRPIWLAPMGSLQQPFQPGTMHRFGSLEFMSLDGSYNMILLPPPRDSDNGGRQPARRRRNQRRLPHVAEEQHPGLSRHLPRRRRRRRGNHGQAGGSTSSTVEQVDDADAPAGDTSGFDLASETKTSVVSPQHANPKQMNDASTLAKDLLGIALVPETTVQSAPDATSTPPVDQESWSQSLRGVRTHSSSKSARCRPGSTREQEHLSSSGGTXAGMGRPSSGRRSASSTLGHPAPHCRRRQGKAATGFXQWGRPEPGCSSNTTPRDAGTIDHRRAVYPGRAQESPGGCRGPTGRKLCLPKAGVPLGASRRDFPIYAGSLGPHRAHAQHGACGPGSPRQRAPPPQPSSPPRREGAPRLPPQAWGTLRQRGGSEPLARTTRSV

SEQ ID NO: 298739 - protein, 61 aa, Zea mays
  unsure (1)..(61): unsure at all Xaa locations
  Clone ID: MRT4577_35519C.1.pep
MALTNHGIVDXTNLKLVIVGDGGPGITTFVTRHLTGESEKKYAQSIGVEVHPXDFTTTCGT

SEQ ID NO: 298740 - protein, 85 aa, Zea mays
  unsure (1)..(85): unsure at all Xaa locations
  Clone ID: MRT4577_3551C.1.pep
PPRAPWERRPAHGPPAGPGRPPPRWASSXPRRRRXQRRAGGWRCRHGPAQSGAASWRHRRGRRRAMIVDAMSAAPASVVRWPKRL

SEQ ID NO: 298741 - protein, 127 aa, Zea mays
  unsure (1)..(127): unsure at all Xaa locations
  Clone ID: MRT4577_35520C.1.pep
KGPRGTTPKGNPGGGPTRGGGGNGDPIRGPLEKKPKPPPXFEGGGGGKGQGPPPXKRKNMGTGRPCPPGEAGPPLGFKAPKGKPRVGKGGGKPPHRDXGVPKPLGSPSPLGKPWESPPPPFGRSRQK

SEQ ID NO: 298742 - protein, 152 aa, Zea mays
  unsure (1)..(152): unsure at all Xaa locations
  Clone ID: MRT4577_35521C.1.pep
XVGAWTTTPVTNAGRLASTNQPGRHAAFLGEAQTTSAPNSGSTASTDKELLPQAGPTVGPQGLELIGSAPSARFVCRTNDWFTSPTESRSLNTGIASVGSVEFSNTSRSSLRAPSLFYGCACDGPPSYGRASDVFCSSWRRGGSSTTPTINS

SEQ ID NO: 298743 - protein, 147 aa, Zea mays
  Clone ID: MRT4577_35522C.1.pep
LSGNVIFSRHLGKKSRLDSDFLSCLLALAPHLQGQQGATVGWMTVPAFGEWDVKNGAVPDYSMDFSKIREMRRQNKRELSRASLGGDEDLLQQQQQQQQQQSAKAQPPKSPAAAVADDDDHHRLPLHDDSPTGRKKFLSYFQCCIRA

SEQ ID NO: 298744 - protein, 241 aa, Zea mays
  Clone ID: MRT4577_35523C.1.pep
MSGGGSVSFLEIQPSELAFPFEIMRQSSCSMQLTNKTDHYVAFKVKTTNPKQYCVRPNIGVVLPGSTCNVTVTMQAQKASPPDMQCKDKFLVQSVVAENGVTAQDINAAMFNKEPGKVVDEFKLRVVYVPTTMPNPIPEESELGSSTPSFSQENGIDHSMTPLSVSRSSAETAKEKPSEATSVISKLTEEKMSAVQQNQKLRQELELLRKESSKTGGGFSITFLFVVGLLGIVVGYILKRT

SEQ ID NO: 298745 - protein, 89 aa, Zea mays
  Clone ID: MRT4577_35524C.1.pep
PPLGTSGARTWGRSLMRAQLFMGMLIRVTPRGRQPGKDRLGPHFFQGWLLRLQGCQKNRTSWGHRGLPVTKLLHDPFYVRACKRTILSD

SEQ ID NO: 298746 - protein, 167 aa, Zea mays
  Clone ID: MRT4577_35525C.1.pep
MSGGGSVSFLEIQPSELAFPFEIMRQSSCSMQLTNKTDHYVAFKVKTTNPKQYYVPTTMPNPIPEESELGSSTPSFSQENGIDHSMTPLSVSRSSAETAKEKPSEATSVISKLTEEKMSAVQQNQKLRQELELLRKESSKTGSGFSITFLFVVGLLGIVVGYILKRT

SEQ ID NO: 298747 - protein, 130 aa, Zea mays
  unsure (1)..(130): unsure at all Xaa locations
  Clone ID: MRT4577_35526C.1.pep
FLVRTFYRTFSKRRTGLTSSSSVPRVPQGSMXCGRVGIDQGGARCSISLSMLRARPRGVSMVTATWGAMGGRAGSRGKRPCCREWRRQPSGRGGRHPWEAGADPRHGEGSRGRPMGGSKGQPAGGARTRG

SEQ ID NO: 298748 - protein, 117 aa, Zea mays
  Clone ID: MRT4577_35527C.1.pep
PTLIPFWTEVICPNDLPMVFANPFASIHLSRFLCLIFYIFIIPPLVMGTVHLHVVFASMYSTWLKFLLNSMPVGETSRSKALPNRLSILPSYPCCGEAFKVKQEKTNSSSSGSPFKF

SEQ ID NO: 298749 - protein, 107 aa, Zea mays
  unsure (1)..(107): unsure at all Xaa locations
  Clone ID: MRT4577_35528C.1.pep
ARERAPPARLSRNAGRLXPVPSAPPQQVVRGDVVSPAASVMRGHHNRRSRVPARSDSVSITRSSHTPTPTTTGPLTSPGALRRLRAADPEPGPLHHVERQLDPCGHE

SEQ ID NO: 298750 - protein, 94 aa, Zea mays
  Clone ID: MRT4577_35529C.1.pep
APREHATHPRSLAPADVGSGPASADWPLMAMVHLYRTGGWAGALGLAAPGLVGVRAMLPDACPAPTPPRAPLHGSRVQGDLSAWRLTLSRSEEP

SEQ ID NO: 298751 - protein, 96 aa, Zea mays
  Clone ID: MRT4577_3552C.1.pep
KTVGKIVSIQYQIPGYVPISQDCKPLLVRIFVPNPAKKITIREFRTPPWFLKNFPKKLTKAAQAKFSKKSRFTNSAGRAIFPNRLNKYMPGGPFDP

SEQ ID NO: 298752 - protein, 176 aa, Zea mays
  Clone ID: MRT4577_35530C.1.pep
LSQKKQVDGNVLFTYGAFFYPKTLHSSFSFLFPDARAGPGGRPQGQPTENRTGTRGGPNLPHKGKIYNRGEKTTKPPSGGKKKPPPNQQQTQPPRKKGKPRGAKKERQPKQKKAPYRARLKGGKPTCQGHQKNPQPTEKGALRNRQQKKANNQQEDGQQLDAPKTPPQKREERKQH

SEQ ID NO: 298753 - protein, 445 aa, Zea mays
  Clone ID: MRT4577_35531C.1.pep
MRKLCPNLERDDALDTVLEVPIPEEMFSGGGGSRGSTRFGCTNVKAWMRSHAADRSGAGEPCSMTRGELQLMLGVIGAPLIPLPVYHANQSPCSVLCEQLKADPIESSSAKYIVQQYIAASGGEWALNKVKSMYAMGKVRMTAAELNSSDADGHGGSTGNGHHRGGKKGSKGGGGGGEIGGFVLWQKKPELWCLELVVSGCKISAGSDGKVAWRQTPWHQSHASRGPPRPLRRSLQGLDPQLTASLFADSVCIGERSIDGEDCFVLKVEAEASSLRARNSSSVEIIRHTVWGYFSQRTGLLVQLEDSHLLQIRSSGGAGGSVFWETTMESRLGDYRAVDGVNIAHAGRTAVSLVRFGDCQDGNTRTRMEEEWNIEEVDFNIWGLSMDCFLPPSDLREGKESQDVAVVKADARPPPLRIPAVTVRVGPSQVAAVNMDDSDSLVARS

SEQ ID NO: 298754 - protein, 52 aa, Zea mays
  Clone ID: MRT4577_35532C.1.pep
YFDRCCLLTRLLPSRSHGLWRKRAADTDTEADIDGLFLMTMMRSWSYRSTDS

SEQ ID NO: 298755 - protein, 425 aa, Zea mays
  unsure (1)..(425): unsure at all Xaa locations
  Clone ID: MRT4577_35533C.1.pep
MGFDKEASSSSSRLDAAPLLPQHGGGAGGHLSSQPKTFANVFIAVVGSGVLGLPYTFSRTGWAAGTLLLLAVAALTFHCMMLLVAARRRIADAHPKIASFGDLGHAIYGAPGRHAVDAMLVLSQASFCVGYLIFISNTMAHLYPIAIGAQSPASPLLTAKALFIWAMLPFQLGLNSIRTLTLLAPLSIFADVVDLGAXMGVVLGQDASVWLADRPPVFAFAGPAQLLYGLGVAVYAFEGIGMVLPLEAEAADKRRFGATLALSMAFIAVMYGLFGAMGYLAFGAATRDIITTNLGTGWLSVLVQLGLCINLFFTMPVMMNPVYEVAERLLCGKRYAWWLRWILVVLVGLLAMLVPNFADFLSLVGSSVCVVLGFVLPAVFHLKVFGTEIGWAGLVADVAVIVIGIALAVSGTWTSLVQIFSSSDL

SEQ ID NO: 298756 - protein, 84 aa, Zea mays
  Clone ID: MRT4577_35534C.1.pep
MTAQSRTLQTSGLPDRRAQAQGRAPIFYSLIQAAPTPLLSMSASLAVGFCWTIDAGICASDNDIKAQQLVIHLNLPLRLHFICH

SEQ ID NO: 298757 - protein, 48 aa, Zea mays
  Clone ID: MRT4577_35535C.1.pep
VVHLRHLQNTYCAYLTRRSEERYHHGLHPKLDTEEPGRKEHPDPMSVA

SEQ ID NO: 298758 - protein, 122 aa, Zea mays
  Clone ID: MRT4577_35536C.1.pep
GLPPGPGAPFKLFEGPHIQGGACFLQGKPFLPPMGPDSLPGVTGGHQAQQKRQFRGWNSPALRIPAGAFPPLNKKPPWVSPQSLLFWVEIFVIPAWNQLRGPRVKLFCSGRIMARKKVPIVV

SEQ ID NO: 298759 - protein, 389 aa, Zea mays
  Clone ID: MRT4577_35537C.1.pep
MYFDGSLMKTGEGAGLLFISPLEKHVRYVLRLHFPTSNNVAEYEALVNGLRIAIELGVRRLDARGDSQLVIDQVMKNSNCRDKKMEAYCDEVRRLEDKFHGLELNHVTRRYNETADELAKIASGRTTVPPDVFSKDIYQPSVKLDDALEPDETSAQPEAPSATEAPRTLVGNTFRQGFYWPTAVADTTRIDLVGPLQKAPGGFKHLLVAIDKFSKWIEVRPLTSIRSEQVVAFFTNIIHRFGVPNSIITDNGTQFTGKKFLDFCEDHHIRVDWAAVAHPMTNGQVERANGMILQGLKPKIYNDLNKFGKRWIKELPSVVWSLRMTPSRATGFSPFFLVYGAEAILLTDLEYGSPRTKAYDDQSNQTSREDSLDQLEEARDVALLHSAQY

SEQ ID NO: 298760 - protein, 200 aa, Zea mays
  Clone ID: MRT4577_35538C.1.pep
PPVLADDVWRLERCGREGAFHRKLRRSNVGTVQEFVRMLMVKPDELRAILHEGMTDRMWEATTNHARTCATDDKVYAHSTPHGTIYVDSVFNVVRVDIGGAEWPLHQLNRGQTMVVQQMLQDAYEHRHSLQEAEPFMVHGHAASDVPLLQNAVPALVDTPPLWFPNAAEMDFPVDDVVPVPQANSSFGYQWTGQAFHMPG

SEQ ID NO: 298761 - protein, 1078 aa, Zea mays
  Clone ID: MRT4577_35539C.1.pep
MGRLQQPLQPGTVLRFGSLEFMSLDGSGDMILLPPPCDSDNGGRQPARRWRNRRRLPRVVEEQHSSSPRPLPRRRRGRRGNQGQARGSASSAVERVDGASAPTGGTSGIDLAFETRTSAVSPQRADSEQTDDASTLAKGLLDVTLVPETTVRSVPDVTSSPPVDQVVPTDSHLTPPRFSLDPPSDFALAGALIEASPNPLGFRMRSPWDRLTDISTYGPSGSEEDDVPDFCWDLSGLGNPSAMRDFMTACDYCLSDCSDGSRSLSDEDCGPSRECFHVDLGGPSEGNHLGMPEDGDLPRTVPRVDIPRELAVVPVQAGGHDPQLEQIRGVQARLDEGAGALEPIRRDVGQEWAGQPSAGEMRHLPQGFQHRIADDVRMRLPPASSGVGQNLAAAAMLLRAMPEPSTTEGRRIQGELKNLLEGAAVRRAESSASRRQGYPSEHHAATSRFMREASVHTGRTRNIAPAAPGRLSNEHHHRDRRAHLDERVRRGYHPRRGGRYDSGEDRSPSPEPPGPQAFSRAVRRAPFLTRFRPPTTITKYSGETRPELWLADYPLACQLGGTDDDNLIIRNLPLFLSDTARAWLEHLPPGQISNWDDLIQAFAGNFQGTYVRPGNSWDLRSCRQQPGESLRDYIRRFSKQRTELPNITDLDVIGAFLAGTTCHDLVSKLGCKTPTRASELMDIATKFASGQEAVEAIFRKDKQPQGRPPEDAPEASTQSGAKKKSQAKRDAADADLVAAAEYKNPRKPPGGANLFDKMLKEPCPYHQGPVKHTLEECVMLRRHFHRAGPPAEGGMARDEDKKEDHQAGEFPEVRDCFMIYGGQAANASARHRKQERREVCSVKVAAPVYLDWSDKPITFDQADHPDHVPSPGKYPLVVYPVIGDVRLTKVLMDGGSNLNIIYAETLGLLRVDLSSVRAGAAPFHGIIPGKRVHPLGQLDLPVCFGTPSNFRREILTFEVVGFRGTYHALLGRPCYAKFMAIPNYTYLKLKMPGPNGVITVGPTYKHAFECDVECVEYAEALAESEALIVDLESLSKEVPDVKRHAGNFEPAETVKSVPLDPSSDASKQVRIGAELDPK

SEQ ID NO: 298762 - protein, 104 aa, Zea mays
  Clone ID: MRT4577_3553C.1.pep
MGRSLARVTAACRQLAVPWMLDAPTLGVAGLASVPAARAVMPWHGRQAPAGRYTNRGSGVQHGRQQKPPRQFLLLWRRRGGSRAWQCSTGTAAHPGQVRVGIGL

SEQ ID NO: 298763 - protein, 887 aa, Zea mays
  Clone ID: MRT4577_35540C.1.pep
MPFGLRNAGATYQRCVNHVFCEHIGRTVEAYVDDIVVKTRKASDLLSNLEVTFRCLKAKSVKLNPEKCVFGVPRGMLLGFIVSERGIEANPEKIVAITSMGPIKDLKGVQRVMGCLAALSRFISRLDERGLPLYRLLKKAECFTWTPEAEEALGNLKALLTNVPILVPPVAGEALLIYVATTTQVVSAAIIVERREEGHALPVQRPAYFISEVLSETKIRYPQIQKLLYAVILTRRKLRHYFESHPVLADFVAEWVDTRLPTAPIQPKLWTMFFDESLMKTGAGACLLFISPLRKHLRYVLRLHFPASNNVAEYEALVNGLRIAIELGVRRLVARGDSQLVIDQVMKNSHCRDPKMEAYCDEVRRLEDKFYGLELNHIARRYNETADELAKIASGRITVPPDVFSRDLHQPSVKSDDTHEPEKASAQPEAPSARPEVPSAQPEAPSARPEVPLAPEGEALRVEEERSGVTPNRNWQTPHLQYLHRGELPLDRAEARRLARRAKLFVLLGDGKELYHRGPSGILQRCISIAEGQELLQEIQSGACGHHAAPRALVGNAFRQGFYWPTAVADATRIVRTCEGCQFYARQTHLPAQSLQTIPITWPFAVWGLDLVGPLQKAPGGYTHLLVAIDKFFKWIEVRPLNSIRSEQAVAFFTNIIHRFGVPNSIIIDNGTQFTGRKFLDFCEDHHIRVDWAAVAHPMTNGQVERANGMILQGLKPRIYNDLNKFGKRWMKELPSVVWSLRTTSSRAMGFSPFFLVYGVEAILPTNLEYGSPRTRAYADQSNQANREDSLDQLEEARDMALLHSARYQQSLRRYHARGVRSRDLQVGDLVLRLQQDARGRHKLTPPWEGPFVIAKVLKPRTYKLANSQGEVYSNAWNIQQLRCFYP

SEQ ID NO: 298764 - protein, 94 aa, Zea mays
  Clone ID: MRT4577_35541C.1.pep
IFISIIRRVYNFLRKNNDIFYNEPTRTKPGSSRPTPTYSFTKRGHLQGLTGVQRSDDARQPRGAIKRHAPGPIPAPAKLLLLTTLNKNRPRSHS

SEQ ID NO: 298765 - protein, 100 aa, Zea mays
  Clone ID: MRT4577_35542C.1.pep
QVFEPPPLSVGGDSPGVGPQPSFFKAIGRAEYNSVTAQEALDAFKGVFRLEGIIPALETSPGLASLEKLCPPLADGVRVVVNSTGGGNKDGPPPSKDLGV

SEQ ID NO: 298766 - protein, 124 aa, Zea mays
  Clone ID: MRT4577_35543C.1.pep
SQQGFLSSVIDSEAVGGNAEVEEIEVSDDEDQKDGVGSKRKLTSAVWKGFKRVKVEDKIKAKCNWCAKKLGETKNGTKHLHDHLKTCPYRKSKMTGQSKTFSQSSLRFGCHDTGKVSVEYYTFD

SEQ ID NO: 298767 - protein, 144 aa, Zea mays
  unsure (1)..(144): unsure at all Xaa locations
  Clone ID: MRT4577_35544C.1.pep
ASSYSAYLRGSNLSPFSQFRSARPAPPPVTTHTIERSAFSIHIXQGGIXAGNGXWELYCLEHGIQADGHMTGDKTTGGGDDAFNTFFSETGAGKPAPRAVFVDLEPTVIDDVRTGTYPPLSXHPEQLIRGKHDAANNLRPDVPT

SEQ ID NO: 298768 - protein, 724 aa, Zea mays
  Clone ID: MRT4577_35545C.1.pep
MSFGLRNAGATYQRCMNHVFGEHIGRTVEAYVDDIVVKTRKASDLLSDLEATFRCLKAKGVKLNLEKCVFGVPRGMLLGFIVSERGIEANPEKIAAITNMGPIKDLKGIQRVTGCLAALSHFISRLGDRGLPLYRLLRKAECFTWTPEAEEALGNLKALLTNAPILVPPAAREALLIYVATTTQVVSVAIVVERREEGHVLPVQRPVYFISEVLSETKIHYPQIQKLLYTVILTRRKLRHYFESHPVTVVSSFPLGEIIQCREASGRIAKWAVEIMGETISFAPRKAIKSQVLADFVAEWVDTQLPTAPIQPELWTMFFDGSLMKTRAGAGLLFILPLGKHLRYVLCLHFPASNNVAEYEALVNGLRIAIELGRDPKMEAYCDEVRRLEDKFYGLELNHIARRYNETTDELAKIASGRTTVPPDVFSRDLHQPSVKTDDAPEPEKASAQPEAPSAPEGEALRVEEERSGVTPNRNWQTPYLQYLHRGELPLDRAKARRLARRAKSFVLLGDGKELYHRSPSGILQRSPRALVGNAFRQGFYWPTAVADATRIVRTCQGCQFYARQTHLPAQALQTIPITWSFAVWGLDLVGPLQKAPGGYTHLLVAIDKFSKWIEVRPLNSIRSEQAVAFFTNIIHRFGVPNSIITDNGTQFTGRKFLDFCEDHHIRVDWATVAHPMTNGQVEHANGMILQGLKPRIYNGLNKFGKRWMKELPSVVWSLRTTPS

SEQ ID NO: 298769 - protein, 120 aa, Zea mays
  Clone ID: MRT4577_35546C.1.pep
RPGSYLTSRALAISSLLSPLSSHLLAPLQAHKHKGRRCRDHGGGRRSAIVGLLVHRHWDTGDHSWVLGRACGACQKNCGVRGFVVPLEFVAGNRAYSTIHTFPRLAISPPFLSESEVTRI

SEQ ID NO: 298770 - protein, 830 aa, Zea mays
  unsure (1)..(830): unsure at all Xaa locations
  Clone ID: MRT4577_35547C.1.pep
MPFGLRNAGATYQRCMNHVFGEHIGRTVEAYVDGIVVKTRKASHLLSDLEVTFRCLKAKGVKLNPEKCVFGVPRGMLLGFIVSERGIEANPEKIAAITSMGPIKDLKGIQRVMGCLPLYRLLRKAECFAWTPEAEEALGNLKALLTKAPILVPPAAGEALLVYVAATTQVVSAAIVVERQEEGHALPVQRPVYFVSEVLSETKIRYPQVQKLLYAVILTRRKLRHYFKSHPVTVVSSFPLGEIIQCREASGRIAKWAVEIMGETISFAPRKAIKSQVLADFVAEWVETQLPTAPIQPELWTMFFDGSLMKTGAGAGLLFVSPLGKHLRYALDNGLRITIELGVRLLDARGDSQLVIDQVMKNSHCRDPKMEAYCDEVRRLEDKFYGLELNHIARRYNETADELAKIASGRTTVPPDVFSRDLHQPSVKIDDTPEPEVPLAQPEAPSARPEAPSVQPEIPSAQSEAPSARPEAPSVRPEVPSAPEGETLHVGXERSGVTPDQNWQTSYLXISTEESYPPTEPKLGGWRGAPSRSSCWEMRRSSTTAAPQASSSDASPLPKKAPGGYTHLLVAIDKFSKWIEVRPLNNIRSEQAVAFFTNIIHRFGVPNSIITDNGTQFTGRKFLDFCEDHHIRVDWATVAHPMSNGQVERANGMILQGLKPRIYNDLNKFGKRWMKELPSVVWSLRTTPSRATGFTPFFLVYGAETILPTDLEYGSPRTRAYTDQSNQASREDSLDQLEEARDKALLHSARYQQSLRRYHARGVRSRDLQVGDLVLRLRQDARGRHKLTPPWEGPFVIAKVLKPGTYKLANNQGEVYGXLGTSNSYVASTL

SEQ ID NO: 298771 - protein, 114 aa, Zea mays
  Clone ID: MRT4577_35548C.1.pep
PIKGKYYISLTQIKSSSTGKDCPKLQIAHRRTKINSAMPCMRLFIKIQECPAVATPYSSTSFVTSPIRSTNELNDARRKRASTAAKWTASLLPDRVISLFTLSGCNSLSTANVL

SEQ ID NO: 298772 - protein, 359 aa, Zea mays
  Clone ID: MRT4577_35549C.1.pep
MYFDGSLMKTGAGAGLLFISPLGKHVRYVLRLHFLASNNVAEYEALVNGLCIAVELGVRCLDARGDSELIINQVMKNSHCRDQKMEAYCDEVRRLEDKFYGLELNHVARRYDETADELAKIASGRTTVPPYVFSRDIYQPSVKLDNSPEPDETSAQPKKAPGGFKHLLVAIDKFSKCIEVRPLTSIGSEQAVAFFTNIIHHFGVPNSIITDNGTQFTGKKFLDFCEDHHIRVDWAAVAHPMTNGLVERANGMILQGLKPRIYNDLNKFGKRWIKELPSMVWSLRTTPSRAMGFSPFFLVYGAEAILPTDLEYGSPRTKAYDDQSNQTSREDSLDQLEEARDVALLHLARYQQSLRRYHA

SEQ ID NO: 298773 - protein, 58 aa, Zea mays
  Clone ID: MRT4577_3554C.1.pep
TPVSLSASSISVRYSILIESGPCELQSVTSMAQDPVAIIEISYVCECCYLLLVISCRY

SEQ ID NO: 298774 - protein, 785 aa, Zea mays
  Clone ID: MRT4577_35550C.1.pep
MPFGLRNAGATYQRCMNHVFGEHIGRTVEAYVDDIVVKTRKASDLLSDLETTFKCLRVKGVKLNPEKCVFGVPQGMLLGFIVSERGIEANPEKIAAITNMGPIKDLKGVQRVMGCLAALSRFISRLGEKGLPLYRLLRKTERFTWTPEAEEALGNLKALLTNTPILVPPAAGEALLIYVAAFTQVLRHYFESHPVTVVSSFPLGEIIQCREASGRIAKWAVEIMGETISFAPRKAIKSQVLANFVAEWVDTQLPTTPIQPELWTMYFDGSLMKTGAGTGLLFISPLGKHLCYVLRLHFPASNNVAEYEALLVIDQVMKNSHCRDRKMEAYCDEVRRLEDKFYGLELNHIARWYNETADELAKIAFGQTTVPPDVFSRDIHQPSVKTDDTLEPEEASAQPEVSSAAEGEALRVEGERNGVTPNRNWQAPYLEYLLRGELPLDKAEARRLARRAKSFVLLGDEKELYHRSPSGILQRCISVAEGPQLLQEIQSGACGHHAAPRALVGNAFQQGFYWPTAVVDATMIVRSCHGCQFYARQTHLPAQALQTIPITWSFAVWGLDLVGPLQKAPRGFSHLLVAIDKFSKWFEVRPLVSIRSEQAVAFFTNIIHRFGVPNSIITDNGTQFTGKKFLDFCEDHHIRVDWAAVAHPMMNGQVERANGMILQGLKPRIYNDINKFGKRWMKELPSVVWSMRTTPSRATGFSPFFLVYGAEAILPTDLKYGSPRTKVYGDRSNQTSREDSLDQLEETRDMALLHLARYQQSLRRYHARGVWLCGFQLGDLVLRLR

SEQ ID NO: 298775 - protein, 625 aa, Zea mays
  Clone ID: MRT4577_35551C.1.pep
MGETISFAPRKAIKSQVLADFVAEWVDTQLPTAPIQPELWTMFFDGSLMKTGAGGGLLFISPLGKHLRYVLRLHFPASNNVAEYKALVNRLRIAIELGVRRLDARGDSQLVIDQVMKNSHCRDPKMEAYCDEVRRLEDKFYGLELNHIAQRYNETADELAKIASGRTTVPPDVFSRDLHQPSVRTDDAPEPEKASAQSEAPSAPEGEALHVEEERSGVTPNRNWQTPYLQYLHRGELPLDRAEARRLARRAKSFVLLGDGKELYHRSPSGILQRCISITEGQELLQEIHSGACGHHAAPRALVGNAFRQGFYWPTAVADATRIVRTCQGCQFYARQTHLPAQALQTIPITWSFAKAPGGYTHLLVAIDKFSKWIEVRPLNSIGSEQTVAFFTNIIHRFGVPNSIITDNGTQFTGRKFLDFCEDHHIWVDWAVVAHPMTNGQVERANGMILQGLKPRIYNDLNKFGKRWMRELPSVVWSLRTTPSRATGFTPFFLVYGAEAILPTDLEYGSPRTRAYDDQSNRANREDALDQLEEARDMALLHSTRYQQSLRRYHARGVRSRDLQVGDLVLRLRQDARGRHKLTPPWEGPFVIAKVLKPGTYKLANSQGEVYSNAWNIRQLRRFYP

SEQ ID NO: 298776 - protein, 411 aa, Zea mays
  Clone ID: MRT4577_35552C.1.pep
MYFDGSLMKTGAGAGLLFISPLGKHLRYVIRLHFPASNNEVEYEALVNGLRIAVELGVRCLDARGDSQLVIDQVMKNSHCRDRKMEAYCDAVPRLEDKFYGLELNHIARRYNETADELAKIASGRTTVPPNVFSRDIHQPSVKIDDTPEPEETSVQPEWIKVRPLTSIRSKQAVAFFTNIIHRFGVPNSIITDNGTQFTRKKFLDFCEDHHIRVDWAAVAHPMTNGQVERANGMILHGLKLRIYNDLNKFGKRWMKELPSVVWSLRTTPSRSTGFSPFFLVYGAEAVLPTDLEHGSPRTKAYDDQSNQTSREDSLDQLEEARDVALLHSARYQQSLRRYHARRVRPRGFQVGDLVLRLRQGARGCHKLTPPWEGPFIIANILKPGTYKLADDQGEVYSNAWNIQQLRRFYP

SEQ ID NO: 298777 - protein, 34 aa, Zea mays
  Clone ID: MRT4577_35553C.1.pep
NSVTVTLTVQFWTAVNSYFMWIQAHRISCCYFLL

SEQ ID NO: 298778 - protein, 161 aa, Zea mays
  unsure (1)..(161): unsure at all Xaa locations
  Clone ID: MRT4577_35554C.1.pep
TRHEEKEVAAATATSFTTLRARRXAIIPSSTRNLRSKPRFSSSSSLRASLSNGFLSPYTGGSISSDLCGAKLRAESLNPLNFSSSKPKRGVVTMVIPFSKGSAHEQPPPDLASYLFKNRIVYLGMSLVPSVTELILAEFLYLQYEDEEKPIYLYINSTGTT

SEQ ID NO: 298779 - protein, 100 aa, Zea mays
  Clone ID: MRT4577_35555C.1.pep
SHLTTPNSALPEVTSFYNRPICLARAGLSQSGQGTPECQQGTLAFNAHTLGRNLRLARHWACPRVTSPPHPRSASATCSTTKPVGDHFANSGTCLGKVDH

SEQ ID NO: 298780 - protein, 58 aa, Zea mays
  Clone ID: MRT4577_35556C.1.pep
NESPRFFFPPIFKGGKSPPFSGLKKKKKKKKKKKKKKKKKKKKKKKKKKKLEGEGAGT

SEQ ID NO: 298781 - protein, 112 aa, Zea mays
  Clone ID: MRT4577_35557C.1.pep
TKPLFFFPQKGCLLVPQKTQFFFFSQKLPKFFWSLSRVNSGQKPIFQFGLPWGFFELQTPTPLPFGFPALFLPPFFIPWKPIPGVEKKISLSPRPLKLGLFFFKILTLFFFT

SEQ ID NO: 298782 - protein, 89 aa, Zea mays
  unsure (1)..(89): unsure at all Xaa locations
  Clone ID: MRT4577_35558C.1.pep
LPTTCLHNGLLLDAEXCDTSIALAKDTLDKSMAADNKSSKSVQSEARTSSCMFLEKKHDEVPTTIXERISAWTXYIHQTNGDSXQRLHY

SEQ ID NO: 298783 - protein, 166 aa, Zea mays
  unsure (1)..(166): unsure at all Xaa locations
  Clone ID: MRT4577_35559C.1.pep
LTTNAVLWILDEAVIRKFQRSIMACPPSLGSRDXIMRLLLLTDKVAEGLDFTHLATMTDGYSVSDLNNLCATAAYCPVWELIHIERKNELENLKREKGQTTPYPSMKENEDTIIIRPVNMTDLNEAKNHVVAKLAAECTIMSELRQWNXLYGECGCRKXHHLTYFL

SEQ ID NO: 298784 - protein, 86 aa, Zea mays
  Clone ID: MRT4577_3555C.1.pep
CVHDPNRRNAFASVHCSENRQHALEDQISGGANQPIERRGVKPRQGLRQHHPHADTSSAAMAVACNRSPVVALEKQNCQGIDLEPN

SEQ ID NO: 298785 - protein, 87 aa, Zea mays
  Clone ID: MRT4577_35560C.1.pep
MVPHYLPKMFSIKEQSAAYLHCLGLVEQDGYGRLTGNDALKFFGMSNLCTPELKHVCSIGGPRHRSYLGFYEFMTAIQLVSLAQAGS

SEQ ID NO: 298786 - protein, 133 aa, Zea mays
  unsure (1)..(133): unsure at all Xaa locations
  Clone ID: MRT4577_35561C.1.pep
CQSACQVLGYDVPAGITVIVNAWAIGRDPAPWDEPXKFLPERFEQSTRDFKGADFEFIPFGAGRRICPGMTFGLAHIEIALAALLFHFDWSLPGGLTAEELDMTEAFGIATPRRSDLLVVATPRVPLPQSYRI

SEQ ID NO: 298787 - protein, 76 aa, Zea mays
  Clone ID: MRT4577_35562C.1.pep
VRAVSLRVPVVRRTGELQHSVRVTVQNEADRIGQPRELHQVVRVVVLDLLDGLSVSAQNRRAVPRVRDRQLPASQA

SEQ ID NO: 298788 - protein, 146 aa, Zea mays
  Clone ID: MRT4577_35563C.1.pep
MGKSKKGSGSSPRSGDKRKREPTPPSEDFGDSEYSEEEFSSESEGSPAPVSPPASSDDLDDSQGIAAEVWTYIRAVERSGLEGSDESEYSSDEEDSSDSSKEDSGSDDGDGGDDGGDGDGGGGKGSDGGSKGDHGSGSKGSNKTNG

SEQ ID NO: 298789 - protein, 435 aa, Zea mays
  Clone ID: MRT4577_35564C.1.pep
MLRAAASSCARGAVRRLSSSAVMEASPVAVGSRWQSLLDEGDWSYHREWWGKEDGPGEGVQTVFRRHSECGNGVVSVSAYPASLPASEHWPAMERWLQESNSRLYPESASSDQFKVLGYQWRVMRFNDHTRQSTAKVMTCYRTSGQRSLFLMQQPHVLAVPYVKSMVSAGLTALSCSSYDLPQAASGQNTMKILCIGHGGGSLPLFLASKFRGATIHIVEIDPVVVSASVESMGFPTSPVNKGLSPESMLPSDADDLLWGGIHDRIFLHTADAEDFIGSDGNEYDIVFIDAYDGDDVFPRKLWDVDGAFMKNLEKRVHPVHGTVVVNLHSDSDSGAAEGNADFQSALPMGRHVSQVCRAYMQHFGVAFTAAVPWLCNITLVACRAGGMAGGARRGLSRRDLVLGKLLSKSDTVERALGLPFPCLPYIKNGFTMVH

SEQ ID NO: 298790 - protein, 40 aa, Zea mays
  Clone ID: MRT4577_35565C.1.pep
SGGPCMDPCLPVASRRPAGRSVRRDWGANASRLGREGEGE

SEQ ID NO: 298791 - protein, 225 aa, Zea mays
  unsure (1)..(225): unsure at all Xaa locations
  Clone ID: MRT4577_35566C.1.pep
VGRRSXXPXMVXLELGGRRDAGGXGAGRAXLGAAISSMXXTEAGGXXTVSXGSGXXXPWPRTFVHPXTXVVVGATRXRGGRVXMAAXPTGPGPXATXXGATXXRPXXGPXRPTXXARXPRGXGRALXXRXRGRGXSXXAXXPAXXGRGXRGPQKRRGADAXAXXPFPAXWARXRGXGRRRGXAGXXCRXDGXVRCXXEEGXXSGHGXLAWWKXWGEXRGAAEPRA

SEQ ID NO: 298792 - protein, 1002 aa, Zea mays
  unsure (1)..(1002): unsure at all Xaa locations
  Clone ID: MRT4577_35567C.1.pep
HLLAEIITRHGVPSRLLILSCYDMVLLPPPRDNDNGGRQPARRQRNRRRLPRVVEEQPSSSSRPLPRRRRGRQGNQGQAGGSASSAVERVDSVGXPNGGAPGIDFALETKTSADSPRHADPEQADDASALAKSSLDVTLVPETTVQSVPDVTLSPLVDQEVPTDSHPTSFGFSLNPPSDLALAGALVEASPNPLGFRMRSPWDRLTDVSTYGPSGSEEDDEPSICWDFSGLGNPSAMRDFMTACDYYLSDCSDGSRSLGDEGCGPSRECFHVDLGGPSEGNHLGMPEDGDLPRPAPRVDIPRELTVVPVQAGGHDPQLEQIRGVQARLDEGIGALEPIRRDVGQAWAGQPPAGEIRHLPQGFQHRVADDVRGRPPPASSGVGQNLAAAAMLLRAMPEPSTTKGRRIQGELKNLLEGAAVRRAESSASRRQGYPSEPHAATSRFMREASVYTGRTRNTAPAAPGRLGNEHHHRDRRAHLDERVRRGYHPRRGGRYDSGEDRSPSPEPLGPQAFSRAIRRAPFPTRFRPPTTITKYSGETRPELWLADYRLACQLGGTDDDNLIIRNLPLFLSDTARAWLEHLPPGQISNWDDLVQAFAGNFQGTYVRPGNSWDLRSCRQHPGESLRDYIRRFSKQRTEPPNITDSDVIGAFLAGTTCRDLEAVEAIFRKDKQPQGRPSEDAPEASTQRDAKKKGKKKSQAKRDAADADLVAAAEYKNPRKPPGGANLFDKMLKEPCPYHQGPVHHTLEECVMLRRHFHRAGPPAEGGRARDDDKKEDHQAGEFPEVRDCFMIYGGQAVNASARHRKQERREVCSVKVAAPVYLDWSDKPITFDQADHPDHVPSPGKYPLVVDPVIGDVRLTKVLTDGGSSLNIIYVETLGLLRVDLSSVRAGAAPFHGIIPGKHVQPLGQLDLPVCFGTPSNFRRETLTFEVVGFRGTYHAVLGRPCYAKFMAVPNYTVGTCSRSQGGPTRVNSDVNRVYALDGNSSVNLASHVHCAGVFIGI

SEQ ID NO: 298793 - protein, 72 aa, Zea mays
  Clone ID: MRT4577_35568C.1.pep
LFTYESIRSCHHQTRLRCSEWPMRSQAQRGRRFRDSWPRRRTGMGVGAVRYHASLPLWGRRRPRRRGSNRDI

SEQ ID NO: 298794 - protein, 108 aa, Zea mays
  Clone ID: MRT4577_35569C.1.pep
RFRFITHQWPASLPPFSSEIKLMIHPMAPCLPSRQETIHVATAGLLSLPCFQVPTSGLVSLNSCLRVFKLNPERRGHRFLLHPQEHADPDWIRGPDGRSFGSTHPGPI

SEQ ID NO: 298795 - protein, 62 aa, Zea mays
  Clone ID: MRT4577_3556C.1.pep
GSGFPGWPTPVRKKKKKKKKNLYKKKKKKKKKGKKKKKKEKKKKKKKKKKKKKKKKKRGGPF

SEQ ID NO: 298796 - protein, 304 aa, Zea mays
  Clone ID: MRT4577_35570C.1.pep
MPEDGDLPRPVPRVDIPRELAVVPVQAGGHDPQLEQIRGVQARFDEGAGALEPIRRDIGQAWAGQPPAGEIRHLPQGFQHRVADDVRVRPPPASSCVGQNLAAAAMLLRTMPEPSTTEGRRIQGELKNLLEGAAVRRAESSASRRQGYPSEPHAATSRFMREASVYTGRTRNTAPAAPGRLGNEHHHRDRRAHPDERVRRGYHPRRGGRYDSGEDRSPSLEPPGPQAFSRTIRRAPFPTRFRPPTTITNCRQQPGESLRDYIRRFSKQRTELPNITDSDVIGAFPACTTCRDLVSKLGRKTPTR

SEQ ID NO: 298797 - protein, 61 aa, Zea mays
  Clone ID: MRT4577_35571C.1.pep
MPCSRQYSSQHAFPTVLRIDRPPPHPLLRGRRALERSAGVPTGIGRESKHPGRATRRRRRT

SEQ ID NO: 298798 - protein, 1872 aa, Zea mays
  unsure (1)..(1872): unsure at all Xaa locations
  Clone ID: MRT4577_35572C.1.pep
GDRQPARRWRNRRRLPHMAEEQHPSLSHHLPRXRRRRRGNHGQTGGGTSSAVEQVDDAGAPAGDTSGFDLASETKTSAVSPQHANTKXTNDASTLAKDLLGVALVPETTLRPTXDLASVEAFIKACNNLPGYHMRSPWDRLTAVSIYGPSGSEEDDEPDFCWDFYGLGNPSAMRDFMTACDYYLSDCSDGSRSFGDEDCDPSRECFHVDLGGPGEGNHLGMPEKGDPPRPVPRVDILRELAVVPVPAGGQDAQLEQIREMQARLDEGAGTLEQFRRNIGQEWADQAPAGEARHLPQGIQHRIADDVRARPPPASSGVDQNLAAAAILLRAMPEPSTTEGRPSVHTGHTRNTAPAAPGRLGNEHHHRNRRAHLDESVRRGYHPRRGGRYDNGEDRSPSPEPPGPQAFSRAIRRAPFLTRFRTSTTITKYSGETKPKLWLTDYRLACQLGGTDDDNLIIRNLPLFLSDTARAWLEHLPPGQISNWDDLVQAFAGNFQGTYVRPGNSWDLRSCRQQPGESLRDYIRRFSKQRTELPNITDSDVIGAFLAGTTCCDLVSKLGHKTPTRASELMDIATKFASGQKVVEAIFRKDKQPQGRQPEDVPEASTQRGTRKKGKKKSQAKRDAADADLVAAAEYKNPRKPPGGANLFDKMLKESCPYHQGPIKHTLEECVMLRHHFHKAGPPAEGGRAHNNDKKEDHKVAAPVYLDWSDKPITFDQGDHPDRMPSPGKYPLVVEPVIGNVRLTKVLMDGGSSLNIIYAETLELLQIDLSLIRTGATPFHGIIPGKRVQPLGQLDLPVCFGTPSNFRRETLTFEVVGFRGTYHAVLGRPCYVKFMVVPNYTYLKLKMSGPNRVITVGPTYRHAYECDVECVEYAEALAESEALITDLESLSKEAPDVKHHADNFEQAETEAVLVDFLRVNAEVFAWSPSDMPGIPRDVAEHSLDIRAGAQPVKQPLRRFDEEKRRAIGEEIHKLMAAGFIKEVFHPEWLANPMLVRKKGGKWRMCVDYTGLNKACPKVPYPLPRIDQIMDSTAGCETLSFLDAYSGYHQIKMKESDQLATSFITPFGMYCYVTMPFGLRNAGATYQRCMNHVFGEHIGRTVEAYVDDIVVKTRKASDLLSDLETTFQCLKAKGRGIEANPEKIAAITNMGPIKDLKGVQRVMGCLAALSRFISRLDERGLPLYRLLRKTERFTWTPEAEEALGNLKALLTSVPILVPPAAGEALLIYVAATTQVVSAVIVVERREEGHALPVQRPVYFISEVLSETKTRYPQIQKLLYAVILTRRKLRHYFESHPVTVVSSFPLGEIIQCREPRAIKSQVLADFVAEWVDTQLPAAPIQPELWTMFFNGSLMKTGAGVGLLFISPLGKHLRYVLCLHFPASNNVAEYKALVNGLRIAIELGVRRLDARGDSQLVIDQVMKNSHCHNPKMEAYYDEVRRLEDKFYGLEVNHVARRYNETADELAKIASARTTVPPNVFSQDLHQPSVKTNDTPEPEPEKASARPEAPSATEGEALRIEEERNGVTPNRNWQTPYLXISTEESYPSTEPKLGDWRGAPSHSSCWVTGRSSTTAAPPASSSDAYPSPKARSSYKKYIRGLAVITQRLRHLLETLSDKVSTXDRGGRRHXLSAPAKGVNSTQGRRTYPLRLXQIIPITWLFVVWGXPRRSLAEGTQGLHAPTGHRRQILQVDRGRTCQRHDSARTQATDLRRPQQVRQXWMKELPSVVWSLRTTPSRATGFTPFFLVYGAEAILPTDLEYGSRRTRAYDDRRNQTNREDSLDQLEEARDMALLHSARYQQFLRHYHARGVRSRDLQVGDLVLRLRQDARGRHKLTPPWEGPFIIAKILKPGTYKLANSQGEVYSXLGTSDSYVASTL

SEQ ID NO: 298799 - protein, 199 aa, Zea mays
  unsure (1)..(199): unsure at all Xaa locations
  Clone ID: MRT4577_35573C.1.pep
GLESTLEFMAIDGSXDMILLPPPCDNDNGGRQPARCLGNRRRLPPMAEEQRPGLARHLPRRRRRRRGNHGQAGGGTSLAGERVDDAGAPAGDTGDVDLASEAKTSVVSPQHAKPKRANDANTLAKDLLGVSLVPEITGQSVPDATSSPSVNQEVPSVFHPVPFRFSFDPPSDXASVDAFIKAYPNLSGYHMRSTWDRLT

SEQ ID NO: 298800 - protein, 121 aa, Zea mays
  Clone ID: MRT4577_35574C.1.pep
MNPYFLGFILPFVASLLLTKRKSEKKRGVPVNVGGEPGCAIRNHRFERPVKTRWEGISTLAELFEQSCKQFASTPLFGTRKLIAREMVVAADGRSFEKLHLGNYEWRSYADAFKTVCNFAS

SEQ ID NO: 298801 - protein, 1626 aa, Zea mays
  unsure (1)..(1626): unsure at all Xaa locations
  Clone ID: MRT4577_35575C.1.pep
MTPALVPGTTASVVSPQRQMSGVDLVPGTTASVVSPQRANPKRTDDASTLAEDLLGVSFVPEITVQSVPNATSSPSVDQEVPSVFHPVPFRFSFDPPSDPASMDAFIKAYPNLPGYHMWSTWDRLMAVSTYGPPGSEEDDEPDSGWDFSGLGNPSAMRDFMTACDYCISDRSDDGHSLDNESCGPSRECFHVDLGGLDEGNHLGMPEDDDPPRPAPRIDILRELAMVLVPVGGQDTQLEQIREMQAKLNEEAGQLVQLRQNIWQESAGRALAEEARHQAQDVQHRIADDARARLPPASSGVGQNLAAAAILLRAMPEPSTTEGRRIQGELKNLLEDAAVRRAESSASRRQGYPPEXRAVTSRFMREAXAPGRLGNEHHRRDRRAHLDEKVRQGYHPRRGGCYDSGEDRSPSPEPPGLQAFSRAIRQASFLTRFRAPTTITKYSGETRPELWLADYRLACQLGGTNDDNLIIRNLPLFLSDVARAWLEHLPPAQISNWDDLVKAFAGNFQGTYVRPGNSWDLRSCRQQPGESLRDYIRRFSKQRTELPNITDSDVISVFLAGTTCRDLVSKLGRKTPTRASELMDIATKFASGQEAVEAIFWKDKQPQGRQQEDVPEASAQRDTKKKAKKKSQAKRDAADTDLIAAAEHRNPRKPPGGANLFDKMLKESCPYHHGPVKHTLEECVMLRPYFHKVGPPAEGGKGRDNDKKEGDKVEEFPEVHDCFMIYGGQVANASARHRKQERREVYSVKVATPVYLDWSDKPITFDQGDHLDHVPSPGKYPLVVDPIIGNVRLTKVLMDGGNSLNIIYAETLGLLQIDLSAIRAVLGRPCYTKFMAVPNYTYLKLKMSGPNGVITVRSTYRHAYECDVECVEYAEALTESEALIADLECLSKEVPDAKRHAGNSEPAEAVFAWSPSDMPDIPRDVAKHSLNIRAGARPVKQPLRRFDEEKHKAIGXDPQADGCRXIKEVFHPEWLANPVLVKKKGGKWRMCVDYTGLNKACLKVPYPLPRIDQIVDSTAGCETLSFLDAYSGYHQIRMKESDQLATSFITPFGMYCYITMPFGLRNAGATYQRCMNHVFGEHIGRTVEAYVDDIVVKTRKASDLLFDLETTFKCLKEKGLKLNPEKCVFGVPRGMLLGFIVSEQGIEANPEKITVATNMGPIKDLKGVQRVMGCLVALSRFISCLGERGLPLYRLLRKTEAKEALRNIKALLTSAPILVPPAAGEALLIYVAATTQVVSVAIVVERREEGHALLVQRPVYFISEVLSETKIRYPQIQKLLYAVILTRRKLRHYFESHPVTVASSFPLGEIIQCREASGRIAKWVVEIMGETISFAPRKAIKSQVLADFVAEWVDTQLPTAPIQLGLWTMYFDGSLMKTGAGAGLLFISPLGKHLRYVLRLHFPTSNNVAEYEALVNGLCIAIEIGVRRLDTRGDSQLVMDQVMKNSHCRDPKMEAYCDEVRRLEDKFYGLELNHVARRYNETADELAKIASGRTTVPPDVFSRDLHQPSVKTDDTLEPEEASVQPEEASAQPEAPSAAEGEALRIEEERNGVTPNRNWQTSYLQYLHRGELPLDRAEARRLARRVKSFVLLGDEKELYHRSPSGILQRCISIAEGQELFDSRLEGG

SEQ ID NO: 298802 - protein, 140 aa, Zea mays
  unsure (1)..(140): unsure at all Xaa locations
  Clone ID: MRT4577_35576C.1.pep
RCSPCLCLSPCCSRSSWLLLGSRLXRLGWGVGVXFFLLLPVCXXXLVFAAGGGPALQTSRCPAPXSLLSKKKCGCCSPVLSLWXPSCSARCLSPSLCASGLGLGXPLLSPAALXSSWRSSGASAVXAASLASCRPKXARG

SEQ ID NO: 298803 - protein, 1653 aa, Zea mays
  unsure (1)..(1653): unsure at all Xaa locations
  Clone ID: MRT4577_35577C.1.pep
MAEEQHPGLSRHVPHRRRRGRGNHGQARGGASSAVEQVDDAGAPAGDTSGFDLVSETKTNTVSPQHANPKQTNDTSTLAKDLLGVALVPETTVQSAPDVTSSPPVDQEVPTDSHLVPFGFSFDPPSDLASMEAFIEACMNPPGYHMRSPWDRLTTVSTYGPSGSEEDDEPDFCWDFSGLGNPSAMRDFMTACDYCLSNCSDGSRSFGDEDCGPSRECFHVDLGGPGEGNHLGMPESGDFPRPAPRVDILRELAVVPVPTGGQDAQLEQIREMQARLDEGAGTLEQFQRNIGQEWADQALAGEARHLPQGIQHRVADDVRARPPPASSGVGQNLAAAAILLRAMPEPSTIEGRRIQGELKNLLEDVAVRRAESSASRRQGYPSEHRAATSRFVREASVHTGRTRNTAPVAPGHLGNEHHHRNRRAHLDERVRRGYHPRHGGRYDSGEDRSPSPKPPGPQAFSRAIRRAPFPTRFRTPTTITKYSGETRPELWLADYRLACQLGGMDDDNLIIRNLPLFLFDTARAWLEHLPLGQISNWDDLVQAFVGNFQGTYVCPGNSWDLQSCRQQPGESLRDYIRRFSKQRTELPNVTDSDVIGAFLAGTTCRDLVSKLGRKTPTRVSELMDIATKFASGQEAVEAIFRKDKQPQGRQPAHNNDKKEDHKAEEFPKVHDCFMIYGGQVANASARHRKQERREVCSVKVAAPVYLDWSDKPITFDQGDHPDRVPSLGKYPLVVDPVIGNVRLTKVLMDGGSSINIIYAEILGLLQIDLSSIRTGATPFHGIIPGKRVQPLGQLDLPVCFGTPSNFQRETLTFEVVGFRGTYHAVLGRPCYAKFMVVPNYTYLKLKMSGPNGVITVGPTYRHAYECDVECVEYAEAFAESEALITDLESLSKEAPYAKRHAGNFEPAETEAVLVDFLRANTEVFAWSPSDMPGIPRDVAEHSLDIRAGARPVKQPLRRYNEEKRRAIGEEIHKLMAAGFIKEVFHPEWLANPVLVRKKGGKWRMCVDYTGLNKACPKVPYPLPRIDQIVDSTAGCETLSFLDAYSGYHQIRMKESDQLATSFITPFGMYCYXMPFGLRNAGATYQXCLKAKGVKLNPEKCVFGVPRGMLLGFIVSEWGIEANPEKIAAITNMGPIKDLKGVQRLRHYFKSHPVTVVSSFPLGEIIQCREASGRIAKWAVEIMGETISFAPRKAIKSQVLANFVAEWVDTQLPAAPIQPELWTMFFDGSLMKTGADAGLLFISPLGKHLRYVLRLHFPTSNNVAEYEALVNGLRIAIELGLVIDQVMKNSHCRDPKMEAYCDEVRRLEDKFYGLEVNHVARWYNETEDELAKIASARTTVPSNVFSRDLHQPSVKTNDTPEPEKASAQPEAPSVTEGEALRIEEERNGVTTNRNWQTSYLXISTEESYPSTEPKLGDWRGAPSHSSCWVTGRSSTTTAPPASSSDAYPSPKARSSYKKYTRGLAVITQRLEPLLETLSDKXYWPTAVADATRIVRTCQGCQFYARQTHLPAQALQTIPITWPFAKAPGGYTHLLVAIDEFSKWIEVRPLNSIRSEQAVAFFTNIIHRFGVPNSIITDNSTQFTGRKFLDFCKDHHIRVDWAAVAHPMTNGQVERANGMILQGLKPRIYNDLNKFGKRWMKELPSMVWSLRTTPS

SEQ ID NO: 298804 - protein, 795 aa, Zea mays
  unsure (1)..(795): unsure at all Xaa locations
  Clone ID: MRT4577_35578C.1.pep
MPFGLRNPGATYQRCMNHVFGEHIGRTVEAYVDDIVVKTRKASDLLFDLEVTFRCLKAKGVKLNPEKCVFGVPRGMLLGFIVSERGIEANPEKIAAITSMGPIKDLKGVQRVMGCLAALSRFISRLGERGLPLYRLLRKAECFAWTPEAEEALGNLKALLTKAPVLVPPADGEALLVYVAATTQVVSAAIVVERQEEGHALPVQRPVYFVSEVLSETKIRYPQVQKLLYAVILTRRKLRHYFESHPVTVVSSFPLGEIIQCREASGRIAKWAVEIMGETISFAPRKAIKSQVLADFVAEWVDTQLPTALIQPELWTMFFDGSLMKTGAGAGLLFISPLGKHLRYVLRLHFPASNNVAEYEALVNGLRIAIELGLVIDQVMKNSHCRDPKMEAYCDEVRRLEDKFFGLELNHIARRYNETADELAKIASGRTTVPPDVFSRDLHQPSVKLDDAPEPEVPSAQPEVPSARPEAPSAQPEVPSAPEGEALDVEEEQSEATPDRDWQAPYLXIFAEESYPPTKSRLGGXAPGGYTHLLVAIDKFSKWIEVRPLNSIRSEQAVAFFTNIIHRFGVLNSIITDNGTQFTGKKILDFCEDHHIWVDWAAVAHPMSNGQVERANGMILQGLKPRIYNDLNKFGKRWMKELPSVVWSLRTTPSRATGFTPFFLVYGAEAILPTDLEYGSPRTRAYTDQSNQASREESLDQLEEARDRALLHSARYQQSLRRYHARGVRSRDLQVGDLVLRLRQDARGRHKLTPPWEGPFVIAKVLKPGTYKLAKSQGEIFGXLGTSNSYVASTL

SEQ ID NO: 298805 - protein, 79 aa, Zea mays
  Clone ID: MRT4577_35579C.1.pep
FYFYFGISVGPGASDCQRPDEVAAAGSVVHRAMAAEPTVRGYGPDDAVDVVRGAVSDAICGALSDRAHDDPDLGAVCAP

SEQ ID NO: 298806 - protein, 93 aa, Zea mays
  Clone ID: MRT4577_3557C.1.pep
FISLSGLLLLPWLITILHPFFYNNHVFSKMNNITWEAYNPLSLFIYLCIHNTPRNFYPSLSLPSLIFFTSQHDRSSCNHTLHTIPTIIISVNL

SEQ ID NO: 298807 - protein, 915 aa, Zea mays
  unsure (1)..(915): unsure at all Xaa locations
  Clone ID: MRT4577_35580C.1.pep
GGRQPARRRRNRRRLPRVXRRRGNQGQAGGGTSSAVERVDGSGAPTGVTSGIDLASETKTSTVSPQHANPKQTDDASTLAKDLLGVTLVPETAVQSVPDVTSSPPVDQEVPTDSHLTPFGFSLDPPSDSALVDALVEASPNPLGYRMRSPWDRLTDVSTYGPSGPEENDEPDFGWDFSGLGNPSAMQDFMTACDYCLSDCFDGSRSLGDEDCGPSRECFHVDLGGPNEGNHLGMPENGDLPRPVPRVDILRELVVVPVPAGVHDPQLEQIHGVQARLDEGAGTLELIRRDIGQEWAGQPPAGEPSTTEGRRIQGELKNLLEDTVVRRAESSASRRQGCPSEHRAATSRFMREASVHTGRTRNTAPAAPGRLGNEHHHRDRRAHLDERVRRGYHPRRGGRYDSGEDRSPSPEPPGPQAFSRAIRRAPFPTRFRTPTTIAKYSGETRPELWLADYRLACHLGGTDDDNLIIRNLPLFLSDTARAWLEHLPPGQISNWDDLVQAFAGNFQGTASELMDIATKFASSQEAVEAIFRKDKQPQGRPPEDAPEASTQRDAKKKGKKKSQAKRDAAEADLVAAAEYKNPRKPPGGANLFDKMLKEPCPYHQGPVKHTLEECAMLRHHFHRAGPPAEGGRARDDDKKEDHQAGEFPEVRDCFMIYGGPAANASARHRKQERREVCAVKVAAPVYLDWSDKPITFDQADHPDRVPSPGKYPLVVDPVIGDVRLTKVLMDGGSSLNIIYAETLGLLRVDLSSVWAGAAPFHGIIPGKRVQPLGQLDLPVCFGTPSNFRRETLTFEVVGFRGTYHAVLGRPCYAKFMAIPNYTYLKLKMSGPNRVITVGPTYRHAFECDVECVEYAEALAESEALIADLECLSKEAPDVKRHAGNFEPAETVKSVPLDPSSDASKRVWIGSELDPK

SEQ ID NO: 298808 - protein, 35 aa, Zea mays
  Clone ID: MRT4577_35581C.1.pep
SHFGPGILPFLHVLFMDSCDHTLIRCRSWCCSVLI

SEQ ID NO: 298809 - protein, 48 aa, Zea mays
  Clone ID: MRT4577_35582C.1.pep
SIEICYSSATCRTRAIAFFISCKVFRHATLSALKSVICFSSFPMSFSV

SEQ ID NO: 298810 - protein, 960 aa, Zea mays
  unsure (1)..(960): unsure at all Xaa locations
  Clone ID: MRT4577_35584C.1.pep
MPFGLRNAGVTYQRCMNHVFGEHIGRTVEAYVDDIVVKTRKASDLLSDLEVTFRCLKAKGIKLNPEKCVFGVPRGMLLGFIVSERGIKANPEKIAAITSMGPIKDFKGVQRVMGCLAALSRFISRLSERGLPLYCLLRKAECFTWTPDAEEALGNLKALLTKAPILVPPAAGEALLVYVAATTQVVSAAIVVERQEEGHALPVQRPVYFVSEVLFETKIRYPQVQKLLYAVILTRRKLRHYFESHPVTVVSSFPLGEIIQCRKASGRIAKWAVEIMGETISFAPRKAIKSQVLADFVAEWVDTQLPTAPIQPELWTMFFDGSLMKTGAGAGLLFVSPLGKHLRYVLRLHFLASNNVAEYEALVNGLRIAIELGVRRLDAHGDSQLVIDQVMKNSHCRDPKMEAYCDEVRRLEDKFYGLELNHIARRYNKTADELAKIASGRTTVPPDVFSRDLHQPSVKIDGTPKPEAPSAQPEVPSAQSEAPSARPEAPSVQPEVPSVQPEVPSAQSEAPSARPEAPSVRPKVPSAPKGETLHVGGERSGVTPDQNWQTPYLQYLHRGELPSNRAEARRVARRAKSFVLLGDEKELYHRSPSGILQRFISIAEGQELLREIHSGACSHHAAPRALVGNAFRQGFYWPTAVADATRIVRTCGGCQFYARQTHLPAQALQTIPITWPFAVWGLDLVGPLQKAPGGYTHLLVAIDKFSKWIEVRPLNSIRSEQAVAFFTNIIHRFGVPNSIITDNGTQFTGRKFLDFCEDHHIRVDLAAVAHPMSNGQVERANGMILQGLKPRIYNDLNKFGKRWMKELPSVVWSLRTTPSRATGFTPFFRVYGAEAILPTDLEYGSPRTRAYTDQSNQASREDSLDQLEEARDKALQHSAWYQQSLRRYHARGARSRDLQXGDLVLRLRQDARGKHKLTPPWEGPFVIAKVLKPGTYKLANSQGEVYGNAWNIQQLRRFYP

SEQ ID NO: 298811 - protein, 793 aa, Zea mays
  Clone ID: MRT4577_35586C.1.pep
MGSLQQPIQPGTVLRFGSLEFMSLDGSYDMILLPPLRDSDNGGRQPARWRGNRRHLPHVVEGRHSGLSRPLPCQRRRRQGNQGQAGGNTSSAVERVDGAGAPTGSASSIGLASETKTSAVTPQHTNLKQTNDTSTLAKDLLGVTLIPKTTVQSVPDATSSPPVDQKVPTDSHLAPFGFGLDPPSDSALVDTLIEASLNPPRYRVRSPWDRLTADSTYGPSGSEEDGEPDLCWDFSRLGNPSVVRGLMTTCDYCLSDCSDGGPGEGNHLGMPENGDPPRPVPRVDILRELAVVPIPAGGPDPQLEQIREMQARLDEGAGTLVPIRWDIRQEWAGQPPAGEARHLPQGIQPSAASPTTSGCRQQPRESLWDYIRRFSKQRTELPNVTDLDVIGAFLAGTTCRDLVSKLGRKTPTRASELMDIATKFASGQEAVEAIFWKDKQPQGRPLEDVPKASTQRGTKKKGKKKSQAKRDAADADLVAAAEYRNPRKPPGGANLFDKMLKEPCPYHQGPVKHTLEDCAMLRRHFYKAGPPTEGGKALNDAKKEDHKAGELPEVRDCFMIYGGQVANASARHHKQERREVYSADHPDHVPSLETYPLVVDPIIGNVRLTKVLMDGGSNLNIIYVETLGLLRIDLSSVRMGATPFHGIIPGKRVRPLGQLDLPVCFGTPSNFRRETLTFEVVGFRGTYHAVLGRPCYAKFMAVPNYTYLKLKMPGPNGVITVGPTYRHAYECDVECVEYAEALIADLESLSREAPDVKRHAGNFEPAETVKSVPLDPCNDASKQIRIGSELDPK

SEQ ID NO: 298812 - protein, 603 aa, Zea mays
  unsure (1)..(603): unsure at all Xaa locations
  Clone ID: MRT4577_35587C.1.pep
MGFSVLLSPPPLPLPSATAAADLYLIFGGHDRRRRRPLEHGCRCGRPPETALGGSSGRRGSYDDDGTAPGSLGLDGSSTSSSVRRTGEPRWLISYIVIVKQFCVVTDCCRNFLWSSRKHSGDPFFLSLDYQGSAKPRYQVTSKEEDTQNADREGWQYSTEGLSKSMSKSRYIKVFGVDLSPDNVAVAIVYFVQGVLGLSRLAVSFYLKDNLHLEPAETAVISGFSALPWLVKPLYGFISDSIPLFGYRRRSYLFLSGILGALSWSLMAAVVDDKYSAALSIILGSLAVAISDVVVDSMVVERARGESQSTSGSLQSLCWGSSAFGGVVSAYFSGSLVDTYGFTDHVSHECRFVFGVTALLPLMTSAVAVLVNEERLPXWGKVQSHFQFQIWDSVKQPSILLPTLFIFLWQATPQSDSAMFFFIXPSTPTQAAAATGHSLGDLXLQPATTTPGGKGVSGAVAGGWPATKXHTLKCIFPQVLLVTGLNRKLGISDEWFSIGDSLIITVLGQASFMPVLVLAAKLCPVGAEATLFATLMSISNAGGVAGGLVGAGLTQLLGVSRDNFENLALLIAICNLSSLLPLPLLGLLPDESRNADGAQTKND

SEQ ID NO: 298813 - protein, 435 aa, Zea mays
  Clone ID: MRT4577_35588C.1.pep
FGVDLSPDNVAVAIVYFVQGVLGLSRLAVSFYLKDNLHLEPAETAVISGFSALPWLVKPLYGFISDSIPLFGYRRRSYLFLSGILGALSWSLMAAVVDDKYSAALSIILGSLAVAISDVVVDSMVVERARGESQSTSGSLQSLCWGSSAFGGVVSAYFSGSLVDTYGVRFVFGVTALLPLMTSAVAVLVNEERLPLGKSSVSLSVPSSELIESSKKRIMQIWDSVKQPSILLPTLFIFLWQATPQSDSAMFFFITNKLGFTPEFLGRVTLVTSVASLLGIGVYNLFLKEVPLRKIFLVTTVLGSALGMTQVLLVTGLNRKLGISDEWFSIGDSLIITVLGQASFMPVLVLAAKLCPVGAEATLFATLMSISNAGGVAGGLVGAGLTQLLGVSRDNFENLALLIAICNLSSLLPLPLLGLLPDESRNADGAQTKND

SEQ ID NO: 298814 - protein, 130 aa, Zea mays
  Clone ID: MRT4577_35589C.1.pep
RRKPGATHANETTSKNDTRAQKNPDTKRGGGEAHGGGAPATSATPTQTNGGSGRQPPPPEQQPPTEQPPTPGHQPPTEQRPPADQLPPPGHQPPTDQEPPTEQQAPTPGHHPNKPPRPETKPQPHPSPGQ

SEQ ID NO: 298815 - protein, 102 aa, Zea mays
  Clone ID: MRT4577_3558C.1.pep
FYRREDTPTIAQIFPPPRVQHASTTAPQNPAPLSTPINAYERAGTNTTNQDKTRSPHNETRFTAAKAPVDIMIMRLLLSILEVQPQATSRHCSTDTPSLVLS

SEQ ID NO: 298816 - protein, 58 aa, Zea mays
  Clone ID: MRT4577_35590C.1.pep
SGFSHLTSLKVWEKEDKRSIRKLSRYTIRRARSKRKYLVQCHCCMDSLSDAWVARIGG

SEQ ID NO: 298817 - protein, 115 aa, Zea mays
  unsure (1)..(115): unsure at all Xaa locations
  Clone ID: MRT4577_35591C.1.pep
YXTYQQSPLLIPVPSPTSSRTQVSRDETVDMARTQSAVAVAVVAAVLLLEPASTTSQTAMTCKAAMSYKTTYLNLFCERSKYTLITPSFLSEHPWINASLDHGIINYLMIVCCSS

SEQ ID NO: 298818 - protein, 114 aa, Zea mays
  unsure (1)..(114): unsure at all Xaa locations
  Clone ID: MRT4577_35592C.1.pep
SYTHTVETLSSSQMMEPLEIMRILMRLSTTAMPQEQICSMNDVGPKKLTCLGILYLKTYIENRSVSRYATXTSIWLELAIAMANTSAGIAARCTVSALSEVTFWTCYFLWVYAP

SEQ ID NO: 298819 - protein, 45 aa, Zea mays
  Clone ID: MRT4577_35593C.1.pep
GQHGIHGQDLASLTTEKQERRTPQAIRELRFSSTDATDHIICGSL

SEQ ID NO: 298820 - protein, 62 aa, Zea mays
  unsure (1)..(62): unsure at all Xaa locations
  Clone ID: MRT4577_35594C.1.pep
YRKIVNSTAVYDXETWRSRRFRFVTIVSNEELDYPISALDXQELDRRPLRVNLSSKRPQKGF

SEQ ID NO: 298821 - protein, 41 aa, Zea mays
  unsure (1)..(41): unsure at all Xaa locations
  Clone ID: MRT4577_35595C.1.pep
FXKLKFTTNWLSFLRKKCNLHLISLCSTATAADTRRRLLRG

SEQ ID NO: 298822 - protein, 807 aa, Zea mays
  unsure (1)..(807): unsure at all Xaa locations
  Clone ID: MRT4577_35596C.1.pep
MCTLCAVQRWSRRVATMLPWLVVPLIVIWAATQLLLPAAYRFEVTSPRLACVSVLLLTLFWYEILLPRLSLWRSRRSARLREERRAHALELHKLRKTATRRCRNCSNPYRDQNPGGGKFMCSYCGHVSKRPVLDLNSAGKAPTGWPCAQDCGYWLDLRCSSSNNSSFLGFSWRLLSSFCSTAMRWLLRNIFRFTLSGDGEGLSIDGKRLAKSGENGGKTEESRTNKARRKAEEKRLARLEREMLEEEERKQREEMAKLVEERRKLRDEKAEAEERSKSATPVGEKDARREVEKRRQERKKKEDKGSSKSNSDCEDIDRRLVQEGDRKRDFDRKSDLDRRESYKPRYFDANSHSNKTGESRSRYFGRMTGGFLSSSRGFGSSSFFGRSAQAPAPQVSKVSRPVVPATDQGNTVKRDVPHAATQATGKSATAGETRNAWTNFNRPVSPNVHPYPTGLKKSWHQLFSRSASVSPCPDVTTSAHDMIRXRTKWSSNIQCSYISLSVSASXDYKPSSSQSMQFPGFPPLNGAPPSNPLPHFPAGHMPFYDDAESTLLEEPEQFEDPCYDPDAIALLGPVSESLDNFPSDLDCGFFSSDVAKESHGWPSPIESPLSRSRTVEEKPIKPSHSSVARGSGGPILPVTSSEQGTWQMWSTPLVQESLGLQGPQSQWFQQNTNQFNHSANLFSSGGRARSPLGTGLNDSDPWLQKAPFQQLPPDTSSLFLSHEMPGKLHNDLAFGSPNKSAREHPFGPPGYLLPKEELVLDGAQEGGGGHVLSPSGAHVGLFSPTSPDVQPLWPFSEKREHRTNRLL

SEQ ID NO: 298823 - protein, 91 aa, Zea mays
  Clone ID: MRT4577_35597C.1.pep
SKSAAQSASSQTANEKAAADPVTDGGPSVSDPDAWTDAQVLALVQALKAFPKDASQRWERVAAAVPGKTVVQCKKKVAAMRENFRSKKSGE

SEQ ID NO: 298824 - protein, 69 aa, Zea mays
  Clone ID: MRT4577_35598C.1.pep
RCRILMIRLGPGCGSIIPGPIELNASTLSLNYAPSRRTRKAIPALRTALTPYTPRRYTNKATATLQLLN

SEQ ID NO: 298825 - protein, 55 aa, Zea mays
  Clone ID: MRT4577_35599C.1.pep
STMRARASHAALFLLGAAAIGARAPLMTSLSPLAMAPYGLQDLCRRAYSLTDFWC

SEQ ID NO: 298826 - protein, 358 aa, Zea mays
  Clone ID: MRT4577_3559C.1.pep
MGYQTKPFTESFVGTSDRYLLDQVANIAESYKNKLQQVIEMLHNVKITVTLKITPGAPAKVFIIHEVNSSKASWVVLDRHFRRDFKHLEKHIACKVATFQDHLQVQSLRSIRTNPSNKSTYELEDLQRFAVTMDLSSETVNGDTRKVSIRSSPVSYLASLNKHEIHETSSVAACSMPYFSGMSLTIDDMESLPNEKYEDKMSSQYDSSERPVLCIGCGLKSVLYIKESMKFPFSEIQTATSDFSSENLLGEGGFGHVYKGQLKDGQVIAAKVHKEASSQGYTEFFSEVQVLSFARHRNIVMLLGYCCKESYNILVYEYICNNSLEWHLFDKSASLLEWHKRYAIAIGIAKGLRFLHEE

SEQ ID NO: 298827 - protein, 148 aa, Zea mays
  unsure (1)..(148): unsure at all Xaa locations
  Clone ID: MRT4577_355C.1.pep
SKLDCCKLVKHIKLLPLGKREEYIXKVAPNIASRKKLLDKLVREPIDGNAWHADHMIPGYKGGGECKLENMRTLCVACHYEVTRTQHKELKEIRKKAKEHLKNALNKQKDKPSEATEELDDESLLIAVPGSAYSFAFPGNGSDEKAAE

SEQ ID NO: 298828 - protein, 65 aa, Zea mays
  Clone ID: MRT4577_35601C.1.pep
VALNSTVKCNRYFSAKLVDSSIVGLRRGKPSFPSAHRLSTLLTQGQLHTLGLALSSGSWTHATVD

SEQ ID NO: 298829 - protein, 211 aa, Zea mays
  Clone ID: MRT4577_35602C.1.pep
MYPRVNSDALPALGSLEMGHAAHAVAYPPLPPVEIIPVTVIQQRHGGRAPDPDRSSCEDHVPRTLVVAATLITMLAFLLGSSVPGGYWPQDTPSRDGGKLYRAGDPIMRDLHRPRYWVFRVASWFGVASSMVLTLSLLLRMAATSRHVRWSFAVAYASLLLTFAASQTKTHLSLDIILCLVVLFVSWLITSVREENRACIMKVLCCSSRDN

SEQ ID NO: 298830 - protein, 124 aa, Zea mays
  Clone ID: MRT4577_35603C.1.pep
NELRIIGAKVNWERHLDQNKLLALWLLLNHLYLSWHLRFQLPTCFSDDTCPRAAIEATGMSSAPPVVADARRRTPGVGGSRRRGARQEAHAQPRRPHQQRARIYQWDLLTARRWGSPHASADAW

SEQ ID NO: 298831 - protein, 983 aa, Zea mays
  unsure (1)..(983): unsure at all Xaa locations
  Clone ID: MRT4577_35604C.1.pep
MGSLQQPLWPGTVLRFGSLEFMSLDGSYDMILLPPPCDSNNGGRQPARRRRNRRRLPRVVEEQHSSSPRPLPRRRRRRRGNQGQAGGSASSAVERVDGASAPTGGTSGIDLAFETKTSVVSPQHADSEQTDDASTLAKGLLDVTLVPETTVQSVPDVTSSLPVDKEDRLTDVSTYGPSGSEEDDEPDVCWDFSGLGNPSAMRDFMTACDYCLSDCSDGSRSLGDEDCGPSRECFHIDLGXPSEGNHLGXGGHDPQLEQIRGVQARLDEGAGALEPVRRDVGQEWAGQPPAGEMRHLPQGFQHRIADDARMRPPPASSGVGQNLAAAAMLLRAMPEPSTTEGRRIQGELKNLLEGAAVRRAESSASRRQEYPSEHRATTSRFMREASVHTGRTRNTAPAAPGRLGNEHHHRDRRAHLDERVHRGYHPRRGGRYDSGEDRSPSPEPPGPQAFSRAIRRAPFPTRFRPPTTITKYSGETRSELWLADYRLACQLGGTDDDNLIIRNLPLFLSDIARAWLEHLPPGQISNGDDLVQAFAGNFQGTYVHPRNSWDLRSCRQQPGESLRDYIRRFSKQRTELPNITDSDVIGAFLADTTCRDLVSKLGCKTPTRASKLMDIATKFASGQEAVEAIFRKDKHPQGRPPEDAPEASTQHGAKKKGKKKSQAKRDAADVDLVAAAEYKNPRKPPGGANLFDKMLKESCPYHQGPVKHTLEECAMLRRHFHRAGPPAEGGRARDDDKKGDHQAGEFLEVAAPVYLDWSDKPITFDQADHPDHVPSPGKYPLIVDPVIGDVRLTKVLMDGGSSLNIIYVETLGLLRVDLSSVRAGAAPFHGIIPGKRIQPLRQLDLPVCFGMPSNFRRETLTFEVVGFRGTYHAVLGRPCYAKFMVVPNYTYLKLKMPGPNRVITVGPTYKHAFECDVECVEYAEALAESEALIADLESLSKEVPDVKRHTGNFEPAETVKSVPLDPSSDASKQIRIGSELDPK

SEQ ID NO: 298832 - protein, 1878 aa, Zea mays
  unsure (1)..(1878): unsure at all Xaa locations
  Clone ID: MRT4577_35605C.1.pep
MDSASPDPRARTQPRLRKTTNSASPDSRARTRARHRKTTNSASPDPRARTQPWPRTTVSASPDPGLGLDLDLGRQTQPQPRRSLRLARPRARADHVTGGAIITLPLARSGYGGQDRRPIWLAPLPVKLQMGSLQQPFQPGTILRFGSLEFMSLDGGYDMILLPPPRDSDNGGRQPARRRRNQRRLPHVAEEQHSGLSRRLPRRRRRRRGNHGQAGGGTSSAVERVDGAGAPMGDASGDDLASETKTSAVSPQHANSEQTNDAGTLAKDLLDVAVVPETTAQSAPSATSSPPVDQEXLDPPSDFASLEAFIEASPNPXGYRMRSPWDRLTTASTYGPSGSEEDDEPDLCWDFSRLGNPSAMRNFMTACDYCLSDCSDGSRNFCDEDCGPSRECFHVDLGGPGEGNHLGIPKNGDTPRPAPRVDILRELVVVPVPXGGQDAQLEQICEMQARLDEGAGTLEQFRQNIGQEWADQAPAGEARHLPQGIQHRIADDVRARPPPASSGVGQNLVAAALLLRAMPEPSTTEGRRIQGELKNLLENVAVRRAESSASRRQGYPXSEHRAATSRFMREASVHTGRTRNTAPAAPGRLGNEHHHRNRRTHLDERAFSRAIRRAPFPTRFRIPTTITKYTGETRPELWLADYRLACQLGGTDDDNLIIRNLPLFLSDTARAWLEHLPPGQISNWDDLVQAFAGNFQGTYVRPGKSWDLRSCRQQPGESLRDYIRQLSKQRTELPNITDSDVIGAFLAGTTCRDLVSKLGRKTPTRASELMDIATKFASGQEAGRQPEDVPEASTQRGTKKKGKKKSQAKRDAADADLVAATEYKNPRKPPGGANLFDKMLKEPCPYHQEPVKHTLEECVMLRRHFHKVGPPAEGGRAHNNDKKEDHKTEEFPEVHDCFMIYGGPVANASARHRKQERREVCSVKVAAPVYLDWSDKPITFDQGDHPDRVPSPGKYPLVVDPVIGNVRLTKVVGFRGTYHSALGRPCYAKFMAVPNYTYLKLKMSGPNGVITVGPTYRHAYECDVECVEYAEALAESEALIADLESLSKEAPDVKRHAGNFEPAETQPLRRFDEEKRRAIGEEIHKLMAAGFIKEVFHPEWFANPVLVRKKEGKWRMCVDYTGLNKACPKVPYPLPRINQIVDSTARCETLSFLDAYSGYHQIRMKESNQLATSFITPFGMYCYVTMPFGLRNAGATYQRCMNHVFGEHIGRTVEAYVDDIVVKTRKASDLLSDLETTFRCLKAKGVKLNPEKCVFGLPEACSWEAAVRGDSDAAEVATLLRVSSGDCGVILPLGEIIQCREASGRIAKWTVEIMGETISFAPRKAIKFHVLADFVAEWVDTQLPLMKTGAGAGLLFISPLGKHLRYVLRLHFPASNNVAEYEALVNGLRIAIELGVRRLDARGDSQLVIDEVMKNSHCCDPKMEAYCDEVRRLEDKFYGLELNHIARRYNETADELAKIASGRTTVPPDVFSRDLHQPSVKTDDTPEPEKASALPEAPSAQPEAPSAPEGEALRVEEERNGVPPNRDWQTPYLQYLHQGELPLDRVEARRLARRAKSFVLLGDGKELYHRSPSGILQRCISIAEGQELLQEIHSGACGHHAAPRALVGNAFRQGFYWSTAVADATRIVRTSQGCQFYARQTHLPAQALQTIPITWSFAVWGLDLVGPLQKAPGGYTHLLVAIDKFSKWIEVRPLNSIRSEQAVAFFTNIIHRFGVPNSIITDNGTQFTSRKFLDFCEDHHIRVDWAAVAHPMTNGQVECANGMILQGLKPQIYNDLNKFGRRWMKELPSVVWSLRTTPSRATGFTPFFLVYGAEAILPTDLEYGSPRARAYDDQSNQTNREDSLDQLEEARDTALLHSTRYQQSLRRYHARGVRSRDL

SEQ ID NO: 298833 - protein, 1038 aa, Zea mays
  unsure (1)..(1038): unsure at all Xaa locations
  Clone ID: MRT4577_35606C.1.pep
MGSLQQPLRPGTVLRFGSLEFMSFDGSYDMILLPPPRDNDNGGRQPARRRRIRRHLPRVVEEQHSSSLRPLPRQRRRRRGNQGQAGGRASSAVERIDAPDAPTEGTPGVDLAFKTKASVVPPRHADPEQDDDASALAESLQDVALVPRTTVQPFPDVTTSLLVDQKVLTNSHLTSFRLGLNPPSNLALTGALIEASATPLGFRMRSPWDRLTDVSTYGPSGSEEDDDPSICWDFFGLGNPSAMWDFMTACDYCLSDCSDGSRSLDDEGCGPSRECFHIELGDPSEGNHFGMPEDGDLPRPAPRADIPRELAVVPVPVGGHDPQLEQVREAQARLNEGTGALEPIRRDIGQVWAGQPSAGEIRHLPQGLQHRVANDVRVRPPPASSGVGQNLAAAAMLLRAMPEPSTTEGRRIQGELKNILEGAAARRAESTASRRQGYPSEPHAATSRFMREASVYTGRTRNTAPAAPGHLGNEHHRRDRRAHLDERXVRRGYHPRRGGXYDSGEDRSPSPEPPGPQAFSRAIRRAPFPTRFRPPTTITKYSGETRPELWLADYRLACQLGGTDDDNLIIRNLPLFLSDTARAWLEHLPPGQISSWDDLVQAFAGNFQGTYVRPGNSWDLRSCRQQPGESLRDYIRRFSKQRTELPNITDSDVIGAFLAGTTCRDLVSKLGRKTPTRASELMDIATKFASGQEAVEAIFRKDKQPQGRPSEEAPEASTPRGAKKKGKKKSQSKRDAADADLVAAEYKNPRKPPGGANLFDKMLKEPCPYHQGPVKHTLEECAMLRRHFHRVGPPAEGGRAHDDDTKEDHQAGEYPEVRDCFMIYGGHATNASARHRKRERREVCSVKVAAPVYLDWSDKPITFDQADHPDHVPSPGKYPLVVDPVIGDVRLTKPLGRLDLPVCFGTPSNFRRETLTFEVVGFRGTYHAVLGRPCYAKFMVVPNYTYLKLKMPGPNGVITVGPTYKHAFECDVECVEYAEALAESEALIADLENLSKEVPDVKRHAGNFEPAETVKAVPLDPSGDASKQIRIGSGLDPK

SEQ ID NO: 298834 - protein, 612 aa, Zea mays
  Clone ID: MRT4577_35607C.1.pep
MLLGFLVSEWCIEANPEKIADITSMGPIKDLKGVQRVTGCLAALSRFISRLGERGLPLYRLLRKAECLTWTPEAEEALGNLKALLTNAPILVPPAAGEALLIYVAATTQVVSAAIVVERREEGHTLPVQRPVYFISELRHYFESHSVTVVSSFPLGEITQCREASGRIAKWAVEIMGETISFAPRKAVKSQVLADFVAEWVDTQLPTAPIQPELWTMFFNGSLMKTGAGTGLLFISPLGKHLRYVLRLHFPASNNVAEYEALVNGLRIAIELGIRCLDARGDSQLVIDQVMKNTHCRDPKMEAYCDEVRRLEDKFYGLELNHIARRYNETADELAKIASGRTTVPPDVFSRDLHQPSIKTDDTPEPEKASAQPEAPSAQSEVPSAQSEVPSAQSEAPSARPEAPSARPKDHHIRVDWAAVAHPMTDGQVERANGMILQGLKPRIYNDLNKFGKRWMKELPSVVWSLRTTPSRATGFTPFFLVYGAEAILPTDLEYGSPRTRAYADQSNRANREDSLDQLEEARDMALLHSVRYQQSLRRYHARGVWSRDLQVGDLVLRLRQDARGRHKLMPPWEGPFVIAKVLKPGTYKLANSEGEVYSNAWNIQQLRRFYP

SEQ ID NO: 298835 - protein, 492 aa, Zea mays
  Clone ID: MRT4577_35608C.1.pep
MGCLAALSRFISRLGERGLPLYRLLRKAESFTWTPEAEEALGNLKALLTNAPILVPPAAGEALLIYVAATTQVVSAAIVVERREEGHALPVQRPVYFISEVLSETKIRYPQVQKLLYTVILTRRKLRHYFESHPVTVVSSFPLGEIIQCREASGRIAKWAMEIMGEAISFAPRKAIKSQVLADFVAEWVDTQLPTAPIQPELWTMFFDRSLMKTGAGAGLLFISPLGKHLRYVLRLHFPASNNVAEYEALVNGLRIAIELGVRRLDARGDSQLVIDQVMKNSHCRDPKMEAYCDEVRRLEDKFYGLELNHIARRYNETADELAKIASGRTTVPPDVFSRDLHQPSVKTDDTPEPEAPSAQHEVPSAQSEAPSARPEVPSVPEGETLHVEEERSGVTPSQNWQTPYLKYLHRGELPLDRAEARRLARRAKSFVLLGDGKELYHRIPSGILQRCISIAEGQELLREIHSGACGHHAAPRALVGNAFRQGFYWPT

SEQ ID NO: 298836 - protein, 906 aa, Zea mays
  Clone ID: MRT4577_35609C.1.pep
MAEEQHPGLSRHLPHRRRRRRGNHGQAGGGTSSAVEQVDDAGAPAGDTSGFDLASETKTSSVSPQHANPKQTNDASTLAKDLLGVALIPETTVQSAPDATSSPPVDQEVPTDSHLVPFGFSFDPPSDLASVEAFIEACTNPPGYHMRSPWDRLTAVSTYGPSGFEEDDEPDFCWDFSGLGNPSAMRDFMTACNYCLSDCSDGSHNFDDEDCGPSRECFHVDLGGPGEGNHLGMPENGDPPRPAPRVDILRGLAVVPVPTWDQDAQLEQIREMQARLDEGAGTLEQFRRNFGARLQPASSGVGQNLAAAAILLRAMPEPSTTEGRRIQGELKNLLEDAAVRRAESSAPRRQGYPSEHRAVTSRFVREASVHTGRTRNTAPAAPGRLGNEHHRRDRRAHLDERVRQGYHPRRGGRYDSGEVRSPSPEPPGPQAYSRAIRRASFPTQFRTLTTITKYSGETRPELWLADYRLACQLGGTDDDNLIIRNLPLFLSDTARAWLEHLPLGQISNWDDLVQAFAGNFQGTYRTELPNITDSDVIGAFLAGTTCRDLVSKLGRKTPTRASELMDIATKFASGQEAVEAIFRKDKQPQGRQPEDVPEASAQRGTKKKNKKKSQECVMLRRHFHKAGPPAEGGRAHNNDKKEDHKAEEFPEVHDCFMIYGGQVANASARHHKQERREVCSVKVAAPVYLDWSDKPITFDQGDHPDRVPSPGKYPLVVDPVIGNVRLTKVLMDGGSSINIIYAETLGFLQIDLSSIREGATPFHGIIPRKRVQPLGQLDLPVCFGTPSNFRRETLTLEVVGPCYTKFMAVPNYTYLKLKMPGPNGVITVGPTYRHAYECDVECVEYAEALAESEALIADLESLSKEAPDAKRHAGNFEPAEMVKSIPLDPSNDASKQIRIGSELDPK

SEQ ID NO: 298837 - protein, 88 aa, Zea mays
  Clone ID: MRT4577_3560C.1.pep
MVKNTIGLFSHRKLSVSVGYATAAFVLAVLEGSTQPGVWFPEEPEGVAIESRKVLLERASQGTTIFVMNKPSWMIETDPKEVGLGIYV

SEQ ID NO: 298838 - protein, 851 aa, Zea mays
  Clone ID: MRT4577_35610C.1.pep
MPFGLRNAGATYQRCMNHVFGEHIGRTVEAYVDDIIVKTRKASDLLSDLEVTFRCLKVKGVKLNPEKCVFGVPRGMLLGFIVSERGIEANPEKIAAITSMGPIKDLKGVQRVMGCLAALSRFISRLGERGLPLYRLLRKAECFTWTPEAEEALGNLKALLTNAPILEPPAAGEALLFYVAATTQVVSAAIVVERREEGHALPVQRPVYFISEVLSETKIRYPQVQKLLYAVILTRRKLRHYFESHPVTVVSSFPLGEIIQCREASSRIAKWAVEIMGETISFAPRKAIKSQHLRYVLCLHFPASNNVAEYEALVNGLRIAIELGVRCLDARGDSQLVIDQVMKNSHCRDPKMEAYCDEVRCLEDKFDGLELNHIARRYNETADELAKIASGRTTVPPDVFSRDLHQPSIKIDDTPEAPSAQPEVPLAQSETPSARLEASSVQPEVPSAPEDETLRVEEERSGVTPNQNRQTLYLKYLHRGELPLDRAEARRLARRAKSFVLLGDGKELYHRSPSGILQRCISITEGQELLREIHSGACGHHAAPRALVGNAFRQGFYWPTAVADATRIVRTCEGCQFYARQTHLPAQALQTIPITWPFAVWGLDLVGPLQKAPRGYTHLLVAIDKFSKWIEVRPLNSIRSEQAVAFFTNIIHRFGVPNSIITDNGTQFTGRKFLDFCEDHHIWVDWAAVAHPMTNGQVERANGMILQRLKPRIYNDLNKFGKRWMKELLSVVWSLRTTPSRATGFTPFFLVYGAEAILPTDLEYGSPRTRAYADQSNQANREDSLDQLEEARDKALLHSARYQQSLRRYHARGVRSRDLQVGDLVLRLRQTLEGGTSSRLPGKGRSSSPKF

SEQ ID NO: 298839 - protein, 92 aa, Zea mays
  unsure (1)..(92): unsure at all Xaa locations
  Clone ID: MRT4577_35611C.1.pep
ALLDMSTDDLFQLFPARAYTRFRKHLKREPIALINKLRQAQNDPPPGQKPEPVKTHLPNMIIVPEKNGSICGVYNSHTHHHVXIKPDMIRHY

SEQ ID NO: 298840 - protein, 140 aa, Zea mays
  Clone ID: MRT4577_35612C.1.pep
ASAIPHLLRSHRQVPASRTLGAEAAASRWGKGPPGPRVRLLLPGTLLGYKRCQANQYQNTGGVQNEGGNTQEDVSWYLGKRVGYIYKGKNKRSGTHYRCIWGKGGRPHGNYRVVRAKFKSNLPPEYMGRKGRGVMYPTTL

SEQ ID NO: 298841 - protein, 691 aa, Zea mays
  Clone ID: MRT4577_35613C.1.pep
MKLNPEKCVFGVPRGMLLGFIVSERGIEANPEKIAAITNMGPIKDLKGVQRVMGCLAALSRFISRLGERGPPLYRFLRKTERFTWTPEAEEALGNLKELLTSAPILVPPAAGEALLIYVAATTQVVSAAIVVERREEGHALPIQRPVYFISEVLSETKIRYPQIQKLLYAVILTRRKLRHYFESHPVTVVSSFPLGEIIQCREASSRIAKWAVEIMGETISFAPRKAIKSQVLADFVAEWVDTQLLAAPIQPELWTMFFDGSLMKTGAGAGLLFISPLGKHLRYVLRLHFPASNNVAEYEALVNGLRIAIEIGVRRLDARGDSQLVIDQVMKNSHCRDPRMEAYCDEVRSLEDKFFGLELNHIARRYNKTTDELAKIASGRTTVPPDVFSRDLHQPSVKTDDTPEPEKVSALPEAPSAQPEALRVKEERNGVTPNRNWQTPYLQYLHQGELPLDRAEARRLARHAKSFVLLGDGKELYHRSPSSILQRCISIAKGQELLQEIHSGACGHHAAPRVLVGNAFRQGFYWPTAVADATRIVRTCQGCQFYAKQTHLPAQALQTIPITWLFAVWGLDLVGPLQKAPGGYTHLLVAIDKFSKWIEVRPLNSIRSGHAVAFFTNIIHRFGVPNSIITDNGTQFTGRKFLDFCEDHHIRVDWAVIAHPMTNGQVERANGMILQGLKPRIYNDLNKFGR

SEQ ID NO: 298842 - protein, 616 aa, Zea mays
  unsure (1)..(616): unsure at all Xaa locations
  Clone ID: MRT4577_35614C.1.pep
MGRWWPAALLGCAVAAVAVLAAAVVECAVTYDKKAVLIDGQRRILFSGSIHYPRSTPDMWEGLIQKAKDGGLDVIQTYVFWNGHEPTPGNYYFEERYDLVRFIKTVQKAGLFVHLRIGPYICGEWNFGGFPVCLEFVPGISFRTDNEPFKTAMQGFTEKIVGMMKSENLFASQGGPIILSQIENEYGPEGKEFGAAGQAYINWAAKMAVGLDTGVPWVMCKEEDAPDPVINACNGFYCDAFSPNKPYKPTMWTEAWSGWFTEFGGTIRQRPVEDLAFAVARFVQKGGSFINYYMYHGGTNFGRTAGGPFITTSYDYDAPIDEYGLIREPKHSHLKELHRAVKLCEQALVSVDPTISTLGTMQEAHVFRSPSGCAAFLANYNSNSHAKVVFNNEQYSLPPWSISILPDCKNVVFNSATVGVQTSQMQMWGDGATSMMWERYDEEVDSLAAAPLLTTTGLLEQLNVTRDSSDYLWYITSVDISPSENFLQGGGKPPSLSVQSAGHALHVFVNGQLQGSSYGTREDRRIKYNGNVNLRAGTNKIALLSVACGLPXNVGVHYETWNTGVGGPVVLHGLDEGSRDLTWXTWSYHVGLKGEQMNLNSIEGSGSLEWMHWSLI

SEQ ID NO: 298843 - protein, 114 aa, Zea mays
  unsure (1)..(114): unsure at all Xaa locations
  Clone ID: MRT4577_35615C.1.pep
FFFSRHTASRDGVLSRDEGACXPSXLCPLPTHLLSPSSLLPRPTRRLPRLLRARSSASSFLALGNVLFCAVHIHPLPSLFCASTCPFVTDQGRACLPSYCQYHILHYPCCFLLS

SEQ ID NO: 298844 - protein, 844 aa, Zea mays
  unsure (1)..(844): unsure at all Xaa locations
  Clone ID: MRT4577_35616C.1.pep
MRRWWPAALLGCAVAVSVLVAAVECAVTYDKKAVLIDGQRRILFSGSIHYPRSTPDMWEGLIQKAKDGGLDVIQTYVFWNGHEPTPGNYYFEERYDLVRFIKTVQKAGLFVHLRIGPYICGEWNFGGFPVWLKYVPXPGISFRTDNEPFKTAMQGFTEKIVGMMKSENLFASQGGPIILSQIENEYGPEGREFGAAGQAYINWAAKMAVGLGTGVPWVMCKEEDAPDPVINACNGFYCDAFSPNKPYKPTMWTEAWSGWFTEFGGTIRQRPVEDLAFAVARFVQKGGSFINYYMYHGGTNFGRTAGGPFITTSYDYDAPIDEYGLVREPKHSHLKELHRAVKLCEQALVSVDPAITTLGTMQEARVFQSPSGCAAFLANYNSNSYAKVVFNNEQYSLPPWSISILPDCKNVVFNSATVGVQTSQMQMWGDGASSMTWERYDEEVDSLAAAPLLTTTGLLEQLNVTRDSSDYLWYITSVDISSSENFLQGGGKPLSLSVQSAGHALHVFVNGQLQGSAYGTREDRRIKYNGNANLRAGTNKIALLSVACGLPNVGVHYETWNTGVGGPVVLHGLDEGSRDLTWQTWSYQVGLKGEQMNLNSIEGSSSVEWMQGSLIAQNQQPLAWYRAYFETPSGDEPLALDMGSMGKGQIWINGQSIGRYWIAYADGDCKECSYTGTFRAPKCQSGCGQPTQRWYHVPKSWLQPTRNLLVVFEELGGDSSKIALVKRSVSSVCADVSEDHPNIKNWQIESYGEREYHRAKVHLRCARGQSISAIKFASFGTPTGTCGDFQQGDCHSANSHTVLEKKCIGLQRCVVAISPESFGGDPCPSVTKRVAVQAVCSPVA

SEQ ID NO: 298845 - protein, 1056 aa, Zea mays
  unsure (1)..(1056): unsure at all Xaa locations
  Clone ID: MRT4577_35617C.1.pep
MGSLQQPLRPGTVLRFGTLEFMSFDGSYDMTLLPPPRDYDNGGRQPARRRRNRRRLPRVVEEQHSGSLRSLPRQRRRRRGRQGQTGGHASPAVERIDAPDAPTEGTSDVDLAFETEASAVPPRHADPEQEDDAGALAKSLQDVALEPEMTAQPVPDVTTSLLVDQKVTTNSHLASFRLGLNPPNNLVLAGALIEASATPLRFCMRSPWDRLTDVSTYGPSGSEEDDDPSIGWDFSGHGNPSAMRDFMTACDYCLSDRSDGSRSLGDESCGPSRECFHIELGDPTEGNHLGMPEDGVLPRPVPRADIPRELAVVPAPAGGYDPQLEQVREAQARLNEGTGALEPIRRDAGQAWVGQPLAGEIRHLPQGLQHRVANDVRIRPPPASSGVGQNLATAAMLIRAMPEPSTTEGRRIQGELKNLLEGAAARRAESTASRRQGYPSEPHAATSRFMREASVYTGRTRNTAPAAPGHLGNEHHRRDRRAXRGYHPRRXFSRAIRRAPFPTRFRPPTTITKYSGETRPELWLADYRLACQLGGTDDDNLVIRNLPLFLSDTARAWLEHLPPGQISNWDDLVQAFAGNFQGTYVRPGNSWDLRSCRQQPGESLRDYIRRFSKQRTELPNITDSDVIGVFLAGTTCRDLVSKLGRKTPTRASELMDIATKFASGQEAVEAIFRKDKQPQGRPSEEAPEASAPRGAKKKGKKKSQSKRDAADADLVAAAEYKNPRKPPGGANLFDKMLKEPCPYHQGPVKHTLEECVMLRRHFHRAGPPAEGGRAHDDDKNEEHPAGGFPEVRDCFMIYGGHAANTSARHRKQERREVCSAKVAAPVYLDWSDKPITFDRADHPDHVPSPGKYPLVVDPVVGDVRLTKVLMDGGSCLNIIYAETLKLLRVDPSSVRAGAAPFHGIIPGKRVQPLGRLDLPVCFGTPSNFRRETLTFEVVGFRGTYHAVLGRPCYAKFMAVPNYTYLKLKMPGPNGVITVGPTYKHAFECDVECVEYAEALAESEALIADLENLSKEVPDVKRHAGNFEPVETVKAVPLDPSGNTTKQIRIGSGPDPK

SEQ ID NO: 298846 - protein, 103 aa, Zea mays
  Clone ID: MRT4577_35618C.1.pep
YTIFQTPFSPFWEHNRIPNDKDFWKALSFNWWWCGPFALGSYFLPLWHESPNTESLEPSKCFLPLWSLINELRLYHSRSPFAWCSSFLPLIAELLEAKAKDEL

SEQ ID NO: 298847 - protein, 562 aa, Zea mays
  unsure (1)..(562): unsure at all Xaa locations
  Clone ID: MRT4577_35619C.1.pep
MREASVHTGRTRDATPAAPDRLGNEHHRRDRRARLDEKVRRGYHARRGGRYDSEEDRSPSPESPGLQAFNRAIRRAPFLTWFRAPTTIAKYSGETRPELWLADYRLACQLGGTDDDNLIIRNLPLFLSDAVRAWLEHLPPAQISNWDDLVKAFAGNFQGTYVRPGNSWDLRSFRQQPGESLREYIXAFLAGTTCRNLASKLGRKTPTKASKLMDVATXFASGQEAVEAIFRKDKQPQGRQQEDVSEASAQRGMKKKAKKKSQAKRDAADIDLVATAEHRNPRKPPGGANLFDKMLKDSCPYHQGPVKHTLEECVMLWRYFHKAGPLAEGGKGQDNDKKEGDKAEEFPEVHGCFMIYGGQVANASARHRKQERREVCSVKVVAPVYLDWSDKPITFDQGDHPDCVPSPXKYPLVVDPVIGNARLTKVLMDGGSSVSIIYAKTLGLLEIDLSTIRAGAVPFHRIIPRNQVLPLGQLDLPVCFGTPSNLCRETRTFEVVGFRGTYHAVLGRPCYAKFMAVPNYTYLKLKMSGPNGVITVGSTYRHAYECDVECGGQISPGSTGRI

SEQ ID NO: 298848 - protein, 55 aa, Zea mays
  unsure (1)..(55): unsure at all Xaa locations
  Clone ID: MRT4577_3561C.1.pep
RKKNSLRGXSHRDLGGSCPTICLIFEVTFLSSVLCRWEKICDVMIKGTSEKKKGG

SEQ ID NO: 298849 - protein, 87 aa, Zea mays
  Clone ID: MRT4577_35620C.1.pep
PYLLLREPPLPLPPPRRPASASPRQKRGRRLVEHRDAELLLLLLWLWHRHRRRHEELLLLVIWPVHVVDGSIDRWILAIATRSGVCS

SEQ ID NO: 298850 - protein, 52 aa, Zea mays
  Clone ID: MRT4577_35621C.1.pep
HPLIRSRAQRAVQSSLYAYASSIGCIRRSSAPAAATALNRQTKVLGDEHQEQ

SEQ ID NO: 298851 - protein, 120 aa, Zea mays
  Clone ID: MRT4577_35622C.1.pep
SLESNSYLSFWGGSRRHLFKWSKNGECGVSNTGARRESRVMEHRSKAVRTRGIKRRYPEPPARRKQRKKKAKKQIINRCMDIQWYTARKVEEEHPYKHLRMTKLAWPQALKFIRIIVHLD

SEQ ID NO: 298852 - protein, 83 aa, Zea mays
  unsure (1)..(83): unsure at all Xaa locations
  Clone ID: MRT4577_35624C.1.pep
MVEPHTEAPPKWAPWKKRFYPAXVSKGFNLVGALQFLFMGPRPGVAIPVPPLVLARVPVSPVPGLPHLGMVAEAVLQSVQHIF

SEQ ID NO: 298853 - protein, 74 aa, Zea mays
  unsure (1)..(74): unsure at all Xaa locations
  Clone ID: MRT4577_35625C.1.pep
VMDANWILXKLGKDAIGKRIEVHLTSDGKWHQGMVSNVMGGTLCIQLDNGRSENVELGKQAIRLIASRSKGRKR

SEQ ID NO: 298854 - protein, 50 aa, Zea mays
  Clone ID: MRT4577_35626C.1.pep
PTTHKERNYPEKKKDLTLALSEAPTASHFRATQFFGSPPTSLATAASAKT

SEQ ID NO: 298855 - protein, 214 aa, Zea mays
  Clone ID: MRT4577_35627C.1.pep
MDYRPSDSSGTDDDLPQFPHKSIRGSGRVSGNGRAVVPAGSYARAPTDMVAQVQQLEQEAYRSVLRAFKAQSDAITWEKEGLMTELRKELRVSDKAHRELLNRVNNDNIICSIREWRSTGGLQASLSNNPQLIHDSVPSPTTSGRKRQKTSQSVPALPAPPPAMHSQQLATPTQPSSSTARKAVPPGHKGKKMKPGQKVPGGSAAKPIPSSAGP

SEQ ID NO: 298856 - protein, 452 aa, Zea mays
  unsure (1)..(452): unsure at all Xaa locations
  Clone ID: MRT4577_35628C.1.pep
MDYGPSDSSGTDDDLPQLPHRSIRGSGRVSGNGRTIVPAGSYARAPTDMEAQIQQLEQEAYCSVLRAFKAQSDAITWEKEGLMTELRKELRVSDKAHRELLNKVNNDNIICSIREWRSTGGLQASMSNNPQPIHDPVPSPTTSGRKRQKTSQSVPALPAPPAMHSQQLATPTQPSSSTARKAVPPVPKGKKMKPGQKVPGGSAAKPIPSSAGPSGRGPHMNRNFPGGSAPEAQAQNVDPLVGRKVMSRWPEDNSFYEAVISDYNAETGLYVLVYDINTANETWEWVDLKEMGPEDIRWKEDDSGIDPVVYLRSRGAPSSGVRKPTGRGGPMXVLERGRGLPKNMSRKDFPPPQNGVGKRSSDDIDILHTESLIKEVEKVFSVSNPDPQEVEKAKKALKEQEQSLIDAIARLAEASDGESDGLNRGRRNLYAGNQHQANYVDDMPVGDQADAM

SEQ ID NO: 298857 - protein, 177 aa, Zea mays
  unsure (1)..(177): unsure at all Xaa locations
  Clone ID: MRT4577_35629C.1.pep
MGRYELVRSDDTPAIAVDLEAGTAAPRDDYPKRRGSAPSPAPAPTRQRLVSLDVFRGITVLLMIIVDDAGSFIPAMNHSPWDGVTVADFVMPFFLFIVGVALALAYKRVPDKLDATKKAVLRALKLFCLGLVLQGGFFXHGVRSLTFXGVDLQEIRLMGILQRIAIAYLLTALCEFC

SEQ ID NO: 298858 - protein, 37 aa, Zea mays
  Clone ID: MRT4577_3562C.1.pep
VFLFTRNTDTSRYIALKLGRMSEMGREKRVTPEFDEY

SEQ ID NO: 298859 - protein, 65 aa, Zea mays
  unsure (1)..(65): unsure at all Xaa locations
  Clone ID: MRT4577_35630C.1.pep
RGRVGGRVGGRVVGHXXAXREIQLHFVDCVYQYEAVFPLGFLLLLAAAFFGYYACSGPTPSVRDE

SEQ ID NO: 298860 - protein, 124 aa, Zea mays
  Clone ID: MRT4577_35631C.1.pep
SRRRSGRGDNAPPDIRPIAAAARDEFLIPTQLSPSPQFTMVHKVLFWSGLGVAARLWQLGIEMRPLFNKKSLWVYPIYAGAGGSFGYWLTGVEQRQFRLLADRRDALLEKRQRRKEREEATGTS

SEQ ID NO: 298861 - protein, 42 aa, Zea mays
  Clone ID: MRT4577_35632C.1.pep
DVLRALGQNPSNAEVLRVLGKPKPEEMNSKTLDFEMFLPILK

SEQ ID NO: 298862 - protein, 49 aa, Zea mays
  Clone ID: MRT4577_35633C.1.pep
GSDIPDLDPPVARAHGRTLFYCSCCAASTRASNVEVGWAGILIPSLVDH

SEQ ID NO: 298863 - protein, 152 aa, Zea mays
  unsure (1)..(152): unsure at all Xaa locations
  Clone ID: MRT4577_35634C.1.pep
LWEHQYKSVTPALPWQQRLEXTIGLERCLNYLHTGVKYTMIHRDVYTTKFLMAYNSGGYRYTIFSWYMTSPKAMNQTHVXTMVKGIYWYLHPEYFKRAPLTEKYYVYSYEMMLLEVLCALPALNSSLPRDQVILPDHALSCHRTGTLDDIIH

SEQ ID NO: 298864 - protein, 38 aa, Zea mays
  Clone ID: MRT4577_35635C.1.pep
MEKLLSFSLALALPPSGSLVELWMSFLQEAAQSGQVAT

SEQ ID NO: 298865 - protein, 64 aa, Zea mays
  Clone ID: MRT4577_35636C.1.pep
NHKLFTGPPQSNSPLGVLLAPSTKKTKTSGLESKMGATRLNPKELPGSKTTLCPPSRGPLPIYS

SEQ ID NO: 298866 - protein, 143 aa, Zea mays
  Clone ID: MRT4577_35637C.1.pep
RRATGGKQKAWRKKRKYELGRQPANTKLSSNKTVRRVRVRGGNVKWRALRLDTGNYSWGSEAVTRKTRILDVVYNASNNELVRTQTLVKSAIVQVDAAPFKQWYLTHYGVDIGRKKKTPAAKKDNAEFYMKKLQRKKGKSAVA

SEQ ID NO: 298867 - protein, 216 aa, Zea mays
  unsure (1)..(216): unsure at all Xaa locations
  Clone ID: MRT4577_35638C.1.pep
MGISRDSMHKRRATGGKQKACRKKRKYELGRQPCYTKLSSNKTERRVRVRGGNVKWRALLLDTGNYSWGSEADTRKTRILHVVYNASHNELVRTQTLVKSAIEQADAAPFXQRYLTHYGVDIGMKKKTPAAKKDXAEGQEVDAAAEETKKSNHVTRKLDKRKEGRTLDPHIEEQFGSGRMLACISSRPGQXGRADGYSXEGKELEFYMKKLLRKKG

SEQ ID NO: 298868 - protein, 51 aa, Zea mays
  Clone ID: MRT4577_35639C.1.pep
SNSRDPLPRAARPEHSVCTSLPHPLRAKTVCLRVPTEAKRTRGSEAHPQRQ

SEQ ID NO: 298869 - protein, 95 aa, Zea mays
  unsure (1)..(95): unsure at all Xaa locations
  Clone ID: MRT4577_3563C.1.pep
QNYPPVQEHQQKEPRAPDSTAYTQLVYLDDVEQSGSECGTTVCTPEDSALRCLXEGSSRRSGGQLPSLQEETTRRTADAPSEPAASPHQRRSAHE

SEQ ID NO: 298870 - protein, 221 aa, Zea mays
  Clone ID: MRT4577_35640C.1.pep
MGISRDSMHKRRATGGKQKAWRKKRKYELGRQPANTKLSSNKTVRRVRVRGGNVKWRALRLDTGNYSWGSEAVTRKTRILDVVYNASNNELVRTQTLVKSAIVQVDAAPFKQWYLTHYGVDIGRKKKAPAAKKEAAEGQEGEAAAEEAKKSNHVKRKLEKRQEGRELDAHIEEQFGSGRLLACISSRPGQCGRADGYILEGKELEFYMKKLQRKKGKGAAA

SEQ ID NO: 298871 - protein, 76 aa, Zea mays
  unsure (1)..(76): unsure at all Xaa locations
  Clone ID: MRT4577_35641C.1.pep
PKKVYSSGHTFRCKTIHENALSYRALRLDTGSYSWGSQAVTRMTRILDVVDNASNTEPVRXQSLVKSAIVQVESAP

SEQ ID NO: 298872 - protein, 168 aa, Zea mays
  unsure (1)..(168): unsure at all Xaa locations
  Clone ID: MRT4577_35642C.1.pep
MSSYQYQGEEPSISHYLHVVYNASNNELVRTQTLVXKSAIVQVDAAPFKQWYLTHYGVDIGRKKKTPAAKKDNAELLFDIISIQGQEVEAAAEETKKSNHVTRKLEKRKEGRTLDPHIEEQFGSGRLLACISSRPGQCGRADGYILEGKELEFYMKKLQRKKGKSAVA

SEQ ID NO: 298873 - protein, 71 aa, Zea mays
  unsure (1)..(71): unsure at all Xaa locations
  Clone ID: MRT4577_35643C.1.pep
GXQRCKPESTSSERIQRCGNEREARAGLKRCQPQREGKARVQSPGCARGGRGRIHTWLSEEAWDGLKRRKN

SEQ ID NO: 298874 - protein, 61 aa, Zea mays
  unsure (1)..(61): unsure at all Xaa locations
  Clone ID: MRT4577_35644C.1.pep
ISKTARQNTTSHSLXXLKGPGGASYPSRGAWSVIDKPRSTSPPLAQPIYRHLQQTLMKATK

SEQ ID NO: 298875 - protein, 157 aa, Zea mays
  Clone ID: MRT4577_35645C.1.pep
HSASYLSHNEAQSILRTNAHRGLPETSANPITCFFHVLFYAEALTFYILFSLFVKSFLIIFVITELLLSFDFWVMNNVTGTILVGLRWSTEINYDVNSACNFECLDEDSLSRMSKKDSWLFCWTLYLTAAACIVLAIFSLLPLEADYILVVEGCLSL

SEQ ID NO: 298876 - protein, 244 aa, Zea mays
  unsure (1)..(244): unsure at all Xaa locations
  Clone ID: MRT4577_35646C.1.pep
MLPWAATASSSSAAAAAAAALLHASPLPASHRAALPRYRPSPSLPPPLSVAFRSPARALPRGGDAFWEEPDDGSGGDYEDDGKQATGQRSSPFPPPFPLSRLVATRQQERQEQDLRREIELLLTPEEEAILDQNETADVTKISSPKWHPLHTYALALQIPLMDKLLDNGVDIDLVDKDGFTPLHKVIIGKKEAVISHLLRKGANPHVTDRDGATPLHYAGQVGALQTXKLLIKYRVDVNVVDVD

SEQ ID NO: 298877 - protein, 87 aa, Zea mays
  Clone ID: MRT4577_35647C.1.pep
PIFFFFFFLKNQIECTFPVERSKGESRPGGAFKGGGEPHSRPWLRNPISGPSGKKLSPYNFPQQTSRPPKMQPLGRPRSELTQIGGA

SEQ ID NO: 298878 - protein, 44 aa, Zea mays
  Clone ID: MRT4577_35648C.1.pep
IRLEAPYNTNYCIFICSIIETLIREAGLDKRILSQINLMNVSHT

SEQ ID NO: 298879 - protein, 162 aa, Zea mays
  Clone ID: MRT4577_35649C.1.pep
GRGKNFQKKKKKKKKNKKKKKKKKKKKKKKKKKKKKKKKKKKKNFPFSGGPDTPPPGLKKILFRLFPPREKPPFFLVGKKKGGPGKGIGGWGPKKGNARGFQGGVEFSRGRDRWVPQGFFLPQGGGAGPPCYTSKLSSKTPPLRPWILWETHGGIKKKPDWG

SEQ ID NO: 298880 - protein, 159 aa, Zea mays
  Clone ID: MRT4577_3564C.1.pep
NFPEDARLYPASTAGAAAPLAAAASTSPPVYSGGVQGSSDYLRYHQMLLQASTGSQGTLLPFYGGGMSNPYGGGAAMTGSYGGAGGGNTSGSLGSYYSFPASSVSVATVPSSTSSASGYYYSSPHDSQHSEASAAADWNWESALAWPDSSQYPPPPHTQ

SEQ ID NO: 298881 - protein, 80 aa, Zea mays
  Clone ID: MRT4577_35650C.1.pep
EKILIVLRSIATLLSCIICTYAWDPYFIADGFCCSQPFVYLTIIYIDSAYYPMILLSTLEWIIKSSLNGYPINLFFNLFF

SEQ ID NO: 298882 - protein, 51 aa, Zea mays
  Clone ID: MRT4577_35651C.1.pep
SYTCAFLETCATHGHRRLVNELKEVDGFTSALMTGSAFYTCNFKGIGLEVC

SEQ ID NO: 298883 - protein, 158 aa, Zea mays
  unsure (1)..(158): unsure at all Xaa locations
  Clone ID: MRT4577_35652C.1.pep
LTWAKDIEASGSEAGEFSTKDYTEPASGPLIDAEEIIQWTLYRADIAEFIATLLFLYITVSTVIGXYKHQTDASESGRDGAGGGDGILGIVWDFXGMIFILDYCNDGISGGXSYPVVTFGLXMDRKVPLXRAMLYIIAQCLGXYCGVGLCKGYPERST

SEQ ID NO: 298884 - protein, 158 aa, Zea mays
  Clone ID: MRT4577_35653C.1.pep
GFLPLKGPPPPEAFLGAFAEIWDNVFFPPPGLLDELCQPGGPRVLLFRPGTGGGGQAPRAQKDRPPPPPFAPGVGRFLGSKGTSLYAWVFFSFAPPGWQCTGGRALLKRQIFSPPGSVLSCSLSAAWKRPENVVFPFSFFGLPSSPVLPVTLIGRVLL

SEQ ID NO: 298885 - protein, 44 aa, Zea mays
  Clone ID: MRT4577_35654C.1.pep
ASLLTIMLSTKILLPTTIFQTVKIPIKCIYPIISANRTSKTGLT

SEQ ID NO: 298886 - protein, 137 aa, Zea mays
  unsure (1)..(137): unsure at all Xaa locations
  Clone ID: MRT4577_35655C.1.pep
LLMLLGLSGRAATATIFPQCSQAPIGCLVPPYLXSPVMSSGCENPILHPYMIQHAVGSGILPLSPLVLQQSSALLQPCPXLGLXARNIRAQRXIVLANLAAYSQQQQLPLVHLLAQNIAAHQLQQLVLEDLGAYSQQ

SEQ ID NO: 298887 - protein, 38 aa, Zea mays
  unsure (1)..(38): unsure at all Xaa locations
  Clone ID: MRT4577_35657C.1.pep
FKEQGAXRIIFNIFVPPNLLGNNNGGDYHNGMKNMWIL

SEQ ID NO: 298888 - protein, 74 aa, Zea mays
  Clone ID: MRT4577_35658C.1.pep
FYHQQQFLHHLIPISHSATPWRILPYTYNYLNIFRTRFKLHLHTYYIIYYINFYHLLRNYLLHTFLLTYNIIYY

SEQ ID NO: 298889 - protein, 255 aa, Zea mays
  unsure (1)..(255): unsure at all Xaa locations
  Clone ID: MRT4577_35659C.1.pep
MAMVTAKLSSPAAARLXLRRARPPRLARXVRASGGSYADELVSTAKTVASPGRGILAIDESSATCGKRLASIGLDNTEVNRQAYRLLLLTTAGLGEYISGAILFEETLYQSTTDGKTFVDVLKDQNIMPGIKVDKGLVPLPGSNNESWCQGLDGLASRCAEYYKQGARFAKWRTVVSIPCGPTALAVKEAAWGLARYAAIAQDNGLVPIVEPEILLDGDHGIERTLXVAEKVWSEVVFYLGRNXCSVEGILLKPA

SEQ ID NO: 298890 - protein, 49 aa, Zea mays
  Clone ID: MRT4577_3565C.1.pep
LYKTQLISPIPKNEQPLFANPKKILTPPLFKNWFHPHPWGHKKQKRPTP

SEQ ID NO: 298891 - protein, 40 aa, Zea mays
  Clone ID: MRT4577_35660C.1.pep
DGSDIPCKELAGLALKPSREKALGWLLQMSRNNPCFVIIS

SEQ ID NO: 298892 - protein, 40 aa, Zea mays
  Clone ID: MRT4577_35661C.1.pep
QCHLKNNIDISPSLSPYLKTYPLTFHETYIAVKIVECLLH

SEQ ID NO: 298893 - protein, 115 aa, Zea mays
  unsure (1)..(115): unsure at all Xaa locations
  Clone ID: MRT4577_35662C.1.pep
PVLGXXPASTQRVAPHAVSSPANPISAXAAAAVSKAGERARGCRXWPXXAAXSRTRAXXVRAXLLPQERGLHXPLNQPNXXAPTKNRRTTXRRQRVNRXAVPTRGNXPHXSSKPR

SEQ ID NO: 298894 - protein, 82 aa, Zea mays
  Clone ID: MRT4577_35663C.1.pep
YPFHPILLFVVTPNLYVYIQIKDNESRHMKLIHQVLYAFLKNPKRILIWDRGSTFLYNFDQTSNYLTPQKVIIVFFVWRENL

SEQ ID NO: 298895 - protein, 102 aa, Zea mays
  Clone ID: MRT4577_35664C.1.pep
TGILRLNMRSVIKRIFRLMNWKNLSFINIFLVLVSPLAVTFSRARLLEKCHRHGLCLSSQATRRHPCWFSQLGIPLCPEVEKQVGGFDCLVLWWCIVLWCLS

SEQ ID NO: 298896 - protein, 587 aa, Zea mays
  Clone ID: MRT4577_35665C.1.pep
MGSVAMDADYGAPRELSPLQKARALYRPETPPCLQGPTVSVEYGDAAIAADVAGAHVISHAFPHTYGQPLVHFLTKTANVHDATIVTEHPVVRIGVVFSGRQSPGGHNVIWGLYDVVKAHNSNSKIIGFLGGTDGLFAQKTIEITDEALPSYKNQGGYDMLGRTRDQIRTTEQVKATIGTCQALKLDALVIIGGVTSNTDAAQLAETFAQLKCPTKVVGVPVTLNGDLKNQFVETTVGFDTICKVNSQLISNACIDALSAEKYYYFIRMMGRKASHVALECALQSHPNMVILGEEVSVSKLTIFDITKQICDAVQARAEKDKYHGVVLIPEGLVESIPELYALLQEIHGLHNKGVSVENISSHLSPWASALFEFLPPFIRKQLLLHPGSDDSAQLSQIEIEKLLAQLVETEMDKRLVLGHVCYHIVAAGLNGYMATVTNLKSPVNKWKCGAAPITSMMTVKRWSRGAATSQIGKPAVHMASVDLKGKAYELLRQNSSSFMMEDIYRNPGPLQFEGSGADTKPISLCVEDQDYMGRIKKLQEYLEKVKSIVKPGCSQDVLKAAVSAMASVTEMLTIMSSLSFSGQATI

SEQ ID NO: 298897 - protein, 233 aa, Zea mays
  unsure (1)..(233): unsure at all Xaa locations
  Clone ID: MRT4577_35666C.1.pep
MGSGATGDPVEDPTGYKSLAGALQYLTFTRPDISYAVQQICLHMHDPXEPHLAALKRLLRYLRGTVDYGLLLHRSTSSELVVYTDADWAGCPDTRRSTSGYAVFLGGNLVSWSSKRQPVVSRSSAEAEYRAVANGVAEAAWLRQLLAELHSPLSRSTVVYNDNVSAVYLSTNPVQHQRTKHVEIDHFVRDYVAAGAVRVLHVPTTSQFADIFTKGLPSSTFAEFRSSLNISSG

SEQ ID NO: 298898 - protein, 111 aa, Zea mays
  unsure (1)..(111): unsure at all Xaa locations
  Clone ID: MRT4577_35667C.1.pep
NEQEQGRGAGQQGTRHGEQERRRAEXRGELEXGGSYEERGARELRGPGEXEQGGSSRHGWSSARDAREAEVELGAAGEESKEGTGHGEGETRRGWAGRTAPDGREGEVQEP

SEQ ID NO: 298899 - protein, 177 aa, Zea mays
  unsure (1)..(177): unsure at all Xaa locations
  Clone ID: MRT4577_35668C.1.pep
HACVYRAPNYTVDLFFLFSHIGKCNSLFIRGHLRQPKYFIILMLLALSVXRGNATXLFLNTAKALISAILVAIHGHQLTRICXENPVFQPFMIQQALLTGNXLITPLXFQQLANLSLVQLLEQTIRAXQVHQLKLPKISQLXLANLSPYSEQQQFLSFNQLCILNPAAYLQQQQLLP

SEQ ID NO: 298900 - protein, 154 aa, Zea mays
  Clone ID: MRT4577_35669C.1.pep
VVYTDANWAGCPDTRRSTSGYAVFLGGNLVSWSSKRQPVVSRSSAEAEYRAVANSVAEAAWLRQLLAELHSPLSKSTLVYCDNVSAVYLSTNPLQHQRTKHVEIDLHFVRDYVTAGAVRVLHVLTTSQFADIFTKGLPSSTFAEFRSSLNISSG

SEQ ID NO: 298901 - protein, 240 aa, Zea mays
  unsure (1)..(240): unsure at all Xaa locations
  Clone ID: MRT4577_3566C.1.pep
MTLDCRQSHTASWNALLAALLRNGLIREARELFDDMPERDTVSWSTMISGYVQTGRSDMALKLFYSMLNTSIEPNEVTLASALPAIAGSGTLDQGKWIHDYIMNRPVQLTDNLSSGLIDMYAKCGSIADAVQFFNHVNDKFSSVSPWNAMICSLAIHGYAHMSLDLFSQLQRTSIKPNSITFIGVLSACCHAGTVTKGKYYFESMTRXYGIQPTIKHYGCMXDLLGRAGYLEELNSFVHD

SEQ ID NO: 298902 - protein, 56 aa, Zea mays
  Clone ID: MRT4577_35670C.1.pep
HASVFVTCRQIAGPRVHRQTRPPSDFLPAPHSLDPFLAPGDCSKYANQFTCQEGGG

SEQ ID NO: 298903 - protein, 420 aa, Zea mays
  Clone ID: MRT4577_35671C.1.pep
PTTVRTVLSLALARSWPGHQLDFKNAFLHGALTETVYCCQPVGFVDSSRPDMVCRLNRSLYGLKQAPRAWHSRLATFLVTLGFVEAKSDMSLFVHHHGTETAYLLLYVDDIVLTASSQSLLRRLVDALQREFPVKDLGVLHHFLGVTVEARPSGLLLHQRQYTLDLLERAKMIACKPCSTPVDTQAKLSEAQGDPVEDPTGYRSLAGALQYLTYTRPDISYAVQQICLHMHDPREPHLAALKRLLRYLRGTVDYELLLHRSTSSELVVYTDADWAGCPDTRRSTSGYAVFLGGNLVSWSSKRQPVVSRSSAEAEYRAVANGVAEAAWLRQLLAELHSPLSRSTLVYCDNVSAVYLSTNPVQHQRTKHVEINLHFVRDYVAAGAVRVLHVPTTSQFADIFTKGLPSSTFAEFRSSLNISSG

SEQ ID NO: 298904 - protein, 117 aa, Zea mays
  Clone ID: MRT4577_35672C.1.pep
PTRAAVALEARRTHPGPQGMAVFRHLAAGPTCHHHHHGVAAATASFRLHRLPLPFAPFAPLRPVPLLPGYATQHDIGRPRQSRAHGSLSLTNLKGLFADKRYYVLHTRKPRLKTSDH

SEQ ID NO: 298905 - protein, 76 aa, Zea mays
  Clone ID: MRT4577_35673C.1.pep
SFSMYIYVQMSSALLLCVCTYRACPFTEHILDLDFCYSLKLHSPWPLHVERSFSITYGASACILSSSHSLLSLSKG

SEQ ID NO: 298906 - protein, 60 aa, Zea mays
  Clone ID: MRT4577_35674C.1.pep
KGRSSAIQLKKVHLQEVGHPHTQLSTPPKLANQGSSENGKKKIQNFIYSIYKKNISLLWT

SEQ ID NO: 298907 - protein, 253 aa, Zea mays
  unsure (1)..(253): unsure at all Xaa locations
  Clone ID: MRT4577_35675C.1.pep
MANRSKQLVTTALPLAAAAAASLAVVLLLCSTGSSEDDGYLGRVGAPWGRTLTVLPFSPADLLPLLPRGVAMAALRALRGVSDIFPVFVGAASAGGSGSVPGSGGTVRWKGACFYENEAWLVFHNETGSKYGGGTLHIKTSKAHSWTCIDLYVFATPYRVTWDYYFLGREHTLDIKEWESDAEYEYVKRNGVSIFLMPSGTIGTLRALWDVFPLFTNTAWGENANLAFLEKHMGATFEXRPKPWVSELNPDDI

SEQ ID NO: 298908 - protein, 558 aa, Zea mays
  Clone ID: MRT4577_35676C.1.pep
MANRSKQVVTTALPLAAAAASLAVVLLLCSTGSSEDDGYLGRVGAPWGRTLTVLPFSPADLLPLLPRGVAMAALRALRGVSDIFPVFVGAASAGGSGSVPGSGGTVRWKGACFYENEAWLVFHNESGSKYGGGTLHIKTSKAHSWTCIDLYVFATPYRVTWDYYFLGREHTLDIKEWESEAEYEYVKRNGVSIFLMPSGTIGTLRALWDVFPLFTNTAWGENANLAFLEKHMGATFEERPKPWVSELNPDDIHSGDFLVLSKIRGRWGGFETLEKWVTGAYAGHTAVCLRDSDGKLWVGESGNENEQGEDVIAILPWEEWWEFEVTKDDSNPQIALLPLHPDLRAKFNETAAWIYAKSMEGKPYGYHNMIFSWIDTISDNYPPPLDAHVVASVMTVWSKLQPEYAANMWKEALNKRLGTKGLDLSEIIVESEKRGITFDKLLSVPENDSWVYEDGQSASCVAFVLMMYKEAGLFDPITSSIEVTEFTIKDAYILNFFEDNSTRLPEWCNKDDDVKLPFCQIKGKYRMELPGYNTMKPYAHMNERCPSLPPDYNRTKGC

SEQ ID NO: 298909 - protein, 113 aa, Zea mays
  Clone ID: MRT4577_35677C.1.pep
CMCLLREMEDHSVHPKSKSNHGSLSGNGYEMKNPGHEVCDRDSSSESDRSHPEASAVSESSLDEHTSTQSDNDEDHGKDNQDTLKPVLSLGKGRSAFLAPKIDYNPSFPYIPY

SEQ ID NO: 298910 - protein, 42 aa, Zea mays
  unsure (1)..(42): unsure at all Xaa locations
  Clone ID: MRT4577_35678C.1.pep
YARLXYCTAXISFQMTKHSIXSKGXTXLKDLLERXLXRGETW

SEQ ID NO: 298911 - protein, 72 aa, Zea mays
  Clone ID: MRT4577_35679C.1.pep
GPVRSHLNTCGLDEIRRNGSRALWSDHHHLQGRTKRRQAEPVHVLVGSVVRLLFLALIFVAILVFVGLCCLH

SEQ ID NO: 298912 - protein, 100 aa, Zea mays
  Clone ID: MRT4577_3567C.1.pep
RNTFIGNLGDTVVEEELRSLFSVQPGFKQMKVLRQDRNTVCFIEFEDVNAATSVHQTLQGAVIPSSGRGGMRIQFSKNPFGRRKDSAAGLASVLNGAPAN

SEQ ID NO: 298913 - protein, 334 aa, Zea mays
  Clone ID: MRT4577_35680C.1.pep
MPVLLREMEDHSVHPMSKSNHGSLSGNGYEMKHSGHKVCDRDSSSESDRSHQEASAASESSPDEHTSTQSDNDEDHGKDNQDTLKPVLSLGKEGSAFLAPKLHYSPSFACIPYTADAYYGAVGVLTGYPPHAIVHPQQNDTTNTPGMLPVEPAEEPIYVNAKQYHAILRRRQTRAKLEAQNKMVKGRKPYLHESRHRHAMKRARGSGGRFLNTKQLQEQNQQYQASSGSLCSKIIGNSIISQSGPTCTPSSGTAGASTASQDRSCLPSVGFRPTTNFSDQGRGGLKLAVIGMQQRVSTMRSGHDTIPRRTACGNSSLALETLNMQSTCSLRSSE

SEQ ID NO: 298914 - protein, 191 aa, Zea mays
  Clone ID: MRT4577_35681C.1.pep
MPVILREMEDHSVHPMSKSNHASLSGNGYEMKHSGHKVCDRDSSSESDRSHQEASAASESSPNEHTSTQSDNDEDHGKDNQDTMKPVLSLGKEGSAFLAPKLHYSPSFACIPYTADAYYSGVGVLTGYGPHAIVCSLLIFQFLSSWPHSVHPQQNETTNTPGMLPVEPAEEQIYFNAKQYHAILKRRLTLA

SEQ ID NO: 298915 - protein, 80 aa, Zea mays
  Clone ID: MRT4577_35682C.1.pep
PWSYIGQALACACHPSHRHRPRVVPCHGRSPSIVSTSSFEFLYPMLRRDGCLYVCTEVRYRKRGRTRGLTTVRTIRRTRE

SEQ ID NO: 298916 - protein, 104 aa, Zea mays
  unsure (1)..(104): unsure at all Xaa locations
  Clone ID: MRT4577_35683C.1.pep
GLIKEWKVWDIVRRGAFALFGIFFVGEKNRELIKSVDWEVGKDAKIFVVCWTVCTVXLKQNFLFGKQYGYMIFAKMLVLNGKRNVCHLEGGLYTWFKEVKPDGV

SEQ ID NO: 298917 - protein, 105 aa, Zea mays
  unsure (1)..(105): unsure at all Xaa locations
  Clone ID: MRT4577_35684C.1.pep
AAPTLHKLFSKPTPTPSRXIFIPRRSTPKPTPSTFTPSLKPTTPKPTSXTYTYSHKSSTPKPTHPTYTPNPKPPATKPTTLKPTPSTYTPSSNPSTLKPTYTTYT

SEQ ID NO: 298918 - protein, 44 aa, Zea mays
  Clone ID: MRT4577_35685C.1.pep
FADVPFTAFVDYIYVRVFEDRMDLLRAVIVGASGTPYQDGLFFF

SEQ ID NO: 298919 - protein, 49 aa, Zea mays
  Clone ID: MRT4577_35686C.1.pep
NGVYYQQLKRTQGKGSQESSKICFITTHSIEYMEMDYMNFLNFVFLPTL

SEQ ID NO: 298920 - protein, 73 aa, Zea mays
  Clone ID: MRT4577_35687C.1.pep
CSWVTTASNCILNYYLCLRMFGAGLFSENEKYTASRNNAGDNDYQGGRDDREDSLSIYTGGGGLEDPTCLPDH

SEQ ID NO: 298921 - protein, 60 aa, Zea mays
  Clone ID: MRT4577_35688C.1.pep
KDFSFTPHPQANIYPPMPLICLNQFIPLEKTYSLSCEFPMLLLNTFTLYYMTLLKGLRIF

SEQ ID NO: 298922 - protein, 106 aa, Zea mays
  Clone ID: MRT4577_35689C.1.pep
GRVVPMAPRVSKPCQAIRITIITPPIEATHVGPVKFGPPHGKKIRALSLKPGKGVVTPSSRETPGPPRLFFGVEFQGVTTLLVNGIDSGYQDLKNNRSCVLEPLRF

SEQ ID NO: 298923 - protein, 110 aa, Zea mays
  Clone ID: MRT4577_3568C.1.pep
GVRLDRANWDGSLGETENSERGAEGGPGVPMGGGGNGGKIQGNNRSREKKSQARKVKRGSDPKRKGINTRGAKERANLQKGKPEKRPQSRKKTGRGKRRKESCTPGGGDV

SEQ ID NO: 298924 - protein, 96 aa, Zea mays
  unsure (1)..(96): unsure at all Xaa locations
  Clone ID: MRT4577_35690C.1.pep
FFFFWRGTYNYGGRHHKTTXNGRPPNILTHRYSNKNTNYPGSKSQQQIKLSSGPTPTLGMTFQKNYTFFNKTCFKNPFIQKKRAIFYRPKKNAFFF

SEQ ID NO: 298925 - protein, 165 aa, Zea mays
  unsure (1)..(165): unsure at all Xaa locations
  Clone ID: MRT4577_35691C.1.pep
MSGETSNVAVPVSVLHKRLRKEQRAAQKNAKAIVKDINSIEXRMLIFTLTLPSAEEYDAQYNALEQVMRQVHLKGRLYGSSYAKLVFEVLFLGLNAMLPAIRTIFQIMLLMLILNGVFLRVFMATINILLNILPYVASCFPYLYTVLEIVYKMSYGKLYRQMIPL

SEQ ID NO: 298926 - protein, 52 aa, Zea mays
  Clone ID: MRT4577_35692C.1.pep
KRGHLRVERPASPPWAVPPADDTRSPLPNPNHENLQQGRKKEPKLPRHCFFS

SEQ ID NO: 298927 - protein, 73 aa, Zea mays
  Clone ID: MRT4577_35693C.1.pep
IFINIIKRAVARDLELAYAWSRPPPLLFPLPHLCVRSLCLFSRQPRGAMASGLDLVLSFCYMLIDFFPIVALF

SEQ ID NO: 298928 - protein, 83 aa, Zea mays
  Clone ID: MRT4577_35694C.1.pep
LRPPFFFFWGFFFTFGAFKQNYRTSKSRTTKCQYHSTKKTKKNFNILLKKETYHYKLPNSLSKDNFNLDKAPKWPVLHKQLQT

SEQ ID NO: 298929 - protein, 66 aa, Zea mays
  Clone ID: MRT4577_35695C.1.pep
MDNPKGTKFPGLPKGRNALVKVALLRGAGLYPVLNKFYNVEGRHRAIVFNRLEGIKDKVFPEGTYL

SEQ ID NO: 298930 - protein, 116 aa, Zea mays
  Clone ID: MRT4577_35696C.1.pep
IFVFWTATDSAPRGRRQLLCRALLMYHVLVGPRLTSPFAHVEQEGLPMASNEQCLALLQHGSYALLLRIMWPKRHAVAHTMVILNTSARVKLLRILCMNHAALFPCYHTTKARPFR

SEQ ID NO: 298931 - protein, 82 aa, Zea mays
  Clone ID: MRT4577_35697C.1.pep
ERSNLRCGRQLARRCQTECMCHLSRVMHITPWWCSHRQQKETPDLLLFSSVRTFAVFAPKRPQAFFLCWHSAASTPFGRRRS

SEQ ID NO: 298932 - protein, 62 aa, Zea mays
  Clone ID: MRT4577_35698C.1.pep
GGGGGPASAILGSDAKLTRRPPTNSKVTCLVPCSRVNFFFFFHLLFQFMWGGGRYNVDSCIV

SEQ ID NO: 298933 - protein, 39 aa, Zea mays
  Clone ID: MRT4577_35699C.1.pep
YPLTLGITFKTTWHLNAKNWIKPIKDVLVHFPHRLLLPL

SEQ ID NO: 298934 - protein, 168 aa, Zea mays
  Clone ID: MRT4577_3569C.1.pep
APSLRRRAHPPPRSGTPKELEFSVPTPRRTRHHRLLVGPRNASGACSPWILRPAPLRLRPCPAPTDVALVYDDLIFRYFFSSLHQRPESDPRLPAAPARILPGRSSATSVGSMAATSTSSGAHESKSAAPCGLRHVPGSPSCPTLLTSRARRGCLGLEGAGGANAVRP

SEQ ID NO: 298935 - protein, 457 aa, Zea mays
  unsure (1)..(457): unsure at all Xaa locations
  Clone ID: MRT4577_356C.1.pep
RGHHGGECISDPHPGQAGXIQVGNACWELYCLEHGIQADGQMPGDKTIGGGDDAFNTFFSETGAGKHVPRAVFVDLEPTVIDEVRTGTYRQLFHPEQLISGKEDAANNFARGHYTIGKEIVDLCLDRIRKLADNCTGLQGFLVFNAVGGGTGSGLGSLLLERLSVDYGKKSKLGFTVYPSPQVSTSVVEPYNSVLSTHSLLEHTDVAILLDNEAIYDICRRSLDIERPTYTNLNRLVSQVISSLTASLRFDGALNVDVNEFQTNLVPYPRIHFMLSSYAPVISAEKAYHEQLSVAEITNSAFEPSSMMAKCDPRHGKYMACCLMYRGDVVPKDVNAAVATIKTKRTIQFVDWCPTGFKCGINYQPPSVVPGGDLAKVQRAVCMISNSTSVVEVFSRIDHKFDLMYAKRAFVHWYVGEGMEEGEFSEAREDLAALEKDYEEVGAEFDEGEDGDEGDEY

SEQ ID NO: 298936 - protein, 99 aa, Zea mays
  Clone ID: MRT4577_35700C.1.pep
FTKRNSLRAVLSQFANTWEWDGHHWQARCVQCANRLCSQVDDIGSKFCPYAIIYHGPCNSPTAVSLLTPYTPIIAQPDPQWLIIAPAGPSVTLPKWNTI

SEQ ID NO: 298937 - protein, 45 aa, Zea mays
  Clone ID: MRT4577_35701C.1.pep
LLNGRPNIFFFGERMLTLDYSEFYLLQGPMPKVLYILTRYTNCRF

SEQ ID NO: 298938 - protein, 79 aa, Zea mays
  Clone ID: MRT4577_35702C.1.pep
HILKSPNDAIDGRLNGCFQPTIPAKMKSQRGEGLCGYAMGFCGYMNAVSHLMHHHLHNFNDVVEVEREMRSCAISIMFW

SEQ ID NO: 298939 - protein, 95 aa, Zea mays
  unsure (1)..(95): unsure at all Xaa locations
  Clone ID: MRT4577_35703C.1.pep
GSGPGPPGPSLWAVPFPGVPVPFGRLPLPALFLWPWGCSPLLPCAVLGSAGRGRFSVLRVFVGRRGRPGRRXXXGALGGGAAGPFYVPFPGLAGR

SEQ ID NO: 298940 - protein, 119 aa, Zea mays
  Clone ID: MRT4577_35704C.1.pep
CLPLCRSWRSCPCGGRLAGGCCCARCAWCWRSACWPARGPCCPSRSQFCDAVGVPAPRSVVRGLPLSAGAGFGSAERGDGLGSLGLLGFGAACFLSLWVGYALRLLKEALGVWLPGPTG

SEQ ID NO: 298941 - protein, 104 aa, Zea mays
  Clone ID: MRT4577_35705C.1.pep
QFSFQKPYQRNFGNFNTPFSSSPFNKHNQIFPFFPKLNIFQNHYFTIAYTIYFNCPPTPHFPNPIPTTNYSPQPFYIKQIPHFYNYSFYILTYKPSQRNNYNSS

SEQ ID NO: 298942 - protein, 73 aa, Zea mays
  Clone ID: MRT4577_35706C.1.pep
NSARGRGEGPRKQDSRGGEKERRVGDNTRRRIETGKAKAPPPRTRHCAAPPPSSLRFLLCSCVIRCLNPKCMW

SEQ ID NO: 298943 - protein, 41 aa, Zea mays
  Clone ID: MRT4577_35707C.1.pep
TKCQFTERGGRFLGSEIFPGVSQLNNFFFLCPFIKFSGALL

SEQ ID NO: 298944 - protein, 46 aa, Zea mays
  Clone ID: MRT4577_35708C.1.pep
IDLYKGCSCTKATRVSDIVRYLGDQPNILKSQEMHCISNLCIRCHE

SEQ ID NO: 298945 - protein, 70 aa, Zea mays
  Clone ID: MRT4577_35709C.1.pep
QVLKSQNNNFVLKPLQPFLPKTSPEPPPGPVRPKKKTQSFLLPVLDPQHGRLSTLYLHTHTKKRSPTQTL

SEQ ID NO: 298946 - protein, 103 aa, Zea mays
  Clone ID: MRT4577_3570C.1.pep
SGEDRAKVVDGSTDHGSRPFGQTVARVSVQESLPRSEGSKRSGRPPPAAQHAGRVLYRAAPHAKSPRAGIGAMSTSDRRNQIPAGPGVRGKDRETFGAALVPN

SEQ ID NO: 298947 - protein, 63 aa, Zea mays
  Clone ID: MRT4577_35710C.1.pep
KSASKYSIQAVTISMYMLINSSKNPQNYQIDQNTVLCFHTLYSEKPADNLQCHKVSSFTIQKG

SEQ ID NO: 298948 - protein, 187 aa, Zea mays
  unsure (1)..(187): unsure at all Xaa locations
  Clone ID: MRT4577_35711C.1.pep
MSIDEGYGPTWDSDDEYDNFIRKMNPPSIIIDNDSLADATIVKVGSANEYGILLEVIQVLMDLNLVISKAYITSDGGXWFMDVFNVTDKEGLKLKDKAAIAEIEGYIRKSLGADSRYMPAKRRXXGVAASTDHNVIELTGXDRPGLLSEVSAVLASLKCNVVSAGIWTHNTXVAAVMRVTDEDTMLA

SEQ ID NO: 298949 - protein, 111 aa, Zea mays
  Clone ID: MRT4577_35712C.1.pep
KKNAAGSDKPVVLMCTDPTKSSLNPNLYRPTFAGFVDTDISNGKISLRSLIDRSVVESFGAGGKTCILSRVYPSLAIGKDARLYVFNNGRAHVKVSRLTAWEMKKPVMNGA

SEQ ID NO: 298950 - protein, 45 aa, Zea mays
  Clone ID: MRT4577_35713C.1.pep
DAHFLFSYTYYTHTPTKSFSHSLYLNFNLLHSPAILLPPFPTIHP

SEQ ID NO: 298951 - protein, 593 aa, Zea mays
  Clone ID: MRT4577_35714C.1.pep
MRALVVVSFASACLLLLLQLAGASHVVYNYKDLEAEAAAATDQVPPSIVNPLLRTGYHFQPPKNWINDPNAPMYYKGWYHFFYQYNPKGAVWGNIVWAHSVSRDLINWVALEPALRPSIPGDRYGCWSGSATVLPDGGGPVIMYTGVDHPDINYQVQNVAYPKNVSDPLLREWVKPSHNPVIVPEGGINATQFRDPTTAWRGPGPEQWRLLVGSAAGSSPRGVAYVYRSRDFRRWRRVRRPLHSAPTGMWECPDFYPVSKGGAPRAGLETSVPPGPRVKHVLKNSLDLRRYDYYTVGTYHPRAERYVPDDPAGDEHRLRYDYGNFYASKTFYDPAKRRRILWGWANESDTAADDVAKGWAGIQAIPRTVWLDPSGKQLLQWPIEEVEALRAKSVTLKNRVIKAGHHVEVTGIQTAQADVEVSFEVSPAALAGAETLDPALAYDAEKLCGVKRADVRGGVGPFGLWVLASANRKERTAVFFRVFKPAAGSDKPVVLMCTDPTKSSLNPNLYRPTFAGFVDTDISNGKISLRSLIDRSVVESFGAGGKTCILSRVYPSLAIGKDARLYVFNNGRAHVKVSRLTAWEMKKPVMNGA

SEQ ID NO: 298952 - protein, 277 aa, Zea mays
  unsure (1)..(277): unsure at all Xaa locations
  Clone ID: MRT4577_35715C.1.pep
MASESDRAESTARALRQFHSPVRAITAVAMASPKTAKKHHARLNNPFPRAVPTAAIRDGDAALRLSFASTSKLAHAHDFPVGTRFRLRWDPSRGGEVSLSRVPPSSGGGAMWETVPGVAFLSVASVATEADECRGSFALRDGGARLVPDRQHVDKIRAFYRCDAEAGGSEPDLLRAAAFRPSDATRFPVLVVTGLVSAAKKAGASPSCTCCGLRLRAAGRRARSAAAARPVLSARYWILLEEKXDTQVRFSVKIGDYQWTCSHADPAKSPPATATTT

SEQ ID NO: 298953 - protein, 47 aa, Zea mays
  Clone ID: MRT4577_35716C.1.pep
KKKKKKKKKNKKKKKKKKKGGGKKGRGGASLKGSKITVPSFGLDSFY

SEQ ID NO: 298954 - protein, 40 aa, Zea mays
  Clone ID: MRT4577_35717C.1.pep
RRSNTGPTLIIKGIPCSTLFHDCGAGTHTYVLLLPRTAQA

SEQ ID NO: 298955 - protein, 114 aa, Zea mays
  unsure (1)..(114): unsure at all Xaa locations
  Clone ID: MRT4577_35718C.1.pep
PSAVIGAAHCCLDHQPWRGGSRTQDTPKLFNRWTLDDVQVNDISVNDYLAGNATKHAMYLPNTAGRCCKKRXRKAQCPIAERLTNCMMMHGSDNGWKVMAETDIKHTVEIIHLL

SEQ ID NO: 298956 - protein, 43 aa, Zea mays
  Clone ID: MRT4577_35719C.1.pep
TMTDKLTKRGHYQGRDAGITLVAKSKIGPRMAPIVAQGIRDYI

SEQ ID NO: 298957 - protein, 53 aa, Zea mays
  Clone ID: MRT4577_3571C.1.pep
RAILIINIYPPGKNMPYGKKKNTISYTNTTRNPKIITLGGTDKINKLPYIRKK

SEQ ID NO: 298958 - protein, 117 aa, Zea mays
  Clone ID: MRT4577_35720C.1.pep
WVPRGRPGFATDGSTPELRLDDGGDDEDGVDDDVARRSKRLWQLTPVFTTEWAQWLDDQKKLAGVPSDSPVYLSLRMDGRVRGSGVGYPPWQAFVAQLPPVKGMWSGLLDGMDGRVL

SEQ ID NO: 298959 - protein, 57 aa, Zea mays
  Clone ID: MRT4577_35721C.1.pep
SLCLPVVLSRYERRVATVESVIRDDVACALSQSTALLSSHIDVVREVWVTYIGVGGR

SEQ ID NO: 298960 - protein, 57 aa, Zea mays
  unsure (1)..(57): unsure at all Xaa locations
  Clone ID: MRT4577_35722C.1.pep
IPGQTLMLSYRSVAXGGWVXGAGSGALXTGVGFLLGPRVHSWGGGWLGAXXLLALCA

SEQ ID NO: 298961 - protein, 54 aa, Zea mays
  Clone ID: MRT4577_35723C.1.pep
NNQTKPTGEGIFTVSITTTPQTIEKFQNKTLTTNSYKARSTLRIIDKQKTLLTI

SEQ ID NO: 298962 - protein, 76 aa, Zea mays
  Clone ID: MRT4577_35724C.1.pep
FIPKPFIISSTGSGHKYGPPKQILEILSLVGGDGSKLLRPKILYVRAFSFVVRAKGGLGSPIGFKAVGWTYRCVGA

SEQ ID NO: 298963 - protein, 80 aa, Zea mays
  Clone ID: MRT4577_35725C.1.pep
PASRRAYSTPDKPPPPGQHLPAHQASRRPLMPQLRGCRMRAPQYAISTTWTCCYRNILRWGDPHNCSERDVTRDHLERGP

SEQ ID NO: 298964 - protein, 49 aa, Zea mays
  Clone ID: MRT4577_35726C.1.pep
IYRVDFLAFSENPQCAGWVPGSERCGRISFITPRWDSAMGIQKVRTYVW

SEQ ID NO: 298965 - protein, 67 aa, Zea mays
  Clone ID: MRT4577_35727C.1.pep
MVFSCLLWHLIRAENSLRAVKFFTHISVFTHASCFLLDPNNFDGLITASTKVNIFQTFKYWVLYDIF

SEQ ID NO: 298966 - protein, 53 aa, Zea mays
  Clone ID: MRT4577_35728C.1.pep
NTFNTHIINYTKTIYPYLKCNNFPTILTLYTTSNTYSQINTNIITDTLSTLTY

SEQ ID NO: 298967 - protein, 59 aa, Zea mays
  Clone ID: MRT4577_35729C.1.pep
YTGVIVSLAFLYGWDDGCDSDLVGQIIPPFFRRWILQIEKRMRLQMFEDTFPCVLESSL

SEQ ID NO: 298968 - protein, 59 aa, Zea mays
  Clone ID: MRT4577_3572C.1.pep
TKLQVFKLPTTQAVKFTLATSYAKLKLNLIMETPDYNTLWTDYSRTTFGPFNNFANTER

SEQ ID NO: 298969 - protein, 78 aa, Zea mays
  Clone ID: MRT4577_35730C.1.pep
MADADSADQRGGRGGRGFGRGRGRGGFGGDRAAGEGCRGGRGGRGGRGGNRSRGDKDDRGEWVPVTKLGRLVKAGFIK

SEQ ID NO: 298970 - protein, 127 aa, Zea mays
  unsure (1)..(127): unsure at all Xaa locations
  Clone ID: MRT4577_35731C.1.pep
GTGSQAGRPHCHXXASXXAGPPRAKGRRRKGGAPHLEAXGTPHSAGRXRREMGAGXLPENAGQPLSSGPMRWGSPPLALAARPSEGXAQLGPLSGALVRAGTPPPXLDGXSQGWWAHAPGPRTTRXX

SEQ ID NO: 298971 - protein, 79 aa, Zea mays
  Clone ID: MRT4577_35732C.1.pep
SVSLRSCLISSRNLICSINKSSALSCPRWKVAIEQLQSVHDEEETDSRHGHVRQRRRSEAEPVYPASGRRLVGLVSSPH

SEQ ID NO: 298972 - protein, 159 aa, Zea mays
  Clone ID: MRT4577_35733C.1.pep
MGTREVYEEKLRSGAHLHRDPTINPGLGSARCPRCLSLLNPATSSGGRDWAITSVLHDATAVTGSGAGAMLSAVHGFNTGIPFVQKHVKGPKWLHLLVGVPPLVLFSGASALFGAYALPTFAQLTVTSYYAASSASHYAISQITRQIEKAHLSGAEEKS

SEQ ID NO: 298973 - protein, 74 aa, Zea mays
  Clone ID: MRT4577_35734C.1.pep
VVAHVVQEHHQFILVDVDHRRDDHATCLQAVHADGSTRSDTVSLVPRVHAVSVGTRVIVSASVSRGTRTVTAGI

SEQ ID NO: 298974 - protein, 66 aa, Zea mays
  unsure (1)..(66): unsure at all Xaa locations
  Clone ID: MRT4577_35735C.1.pep
PEXTGRLKPPILYQLKQIVIVILHRQDWGNCSRMSRRILIRSMQPTMNEESAMILVAATRRVTQQK

SEQ ID NO: 298975 - protein, 173 aa, Zea mays
  unsure (1)..(173): unsure at all Xaa locations
  Clone ID: MRT4577_35736C.1.pep
MSSDGRLRRALAAFGGDVWDLVDAALAAAARDSPGDLRARRDGIVQRLYAGAARCRNCDADATPAPAQPRKANDAVAAAASPAAAASAFPASPEQEVDADGLDDVDDAADAGMESKILAIRDFLEDPDQSEDDIVSLLQNLADMDITYKALQDTDIGRHVNXLRKHPSSEVRQ

SEQ ID NO: 298976 - protein, 46 aa, Zea mays
  Clone ID: MRT4577_35737C.1.pep
SSRNRSSSLASVCPPASFVGSVDPFLPNKACVTRCAAPADITARRP

SEQ ID NO: 298977 - protein, 63 aa, Zea mays
  Clone ID: MRT4577_35738C.1.pep
VFYKKKGSSSNFNQRFVEFQRDLQDSIPTLGLCSSKMGQPPRVPKKKGWFKQNTDFCFRDQQG

SEQ ID NO: 298978 - protein, 62 aa, Zea mays
  Clone ID: MRT4577_35739C.1.pep
CCFNLMHGLPTVAWSGTLPMVGWLGTQSQIRFALFSYCVVLEGPFIHGAINHGMLACMHSTS

SEQ ID NO: 298979 - protein, 95 aa, Zea mays
  unsure (1)..(95): unsure at all Xaa locations
  Clone ID: MRT4577_3573C.1.pep
SIPVPPPPAQFSPGSNNNPPTPPNXKKKXSPPPPPFFSLPPPPKKKKKKKKIFCGGEKKKKKKYWGGAPPPKHQKKKKKGGGGRPPPPPPPXXFI

SEQ ID NO: 298980 - protein, 85 aa, Zea mays
  Clone ID: MRT4577_35740C.1.pep
NRGKPFFFGLAPPFPGKTEWPPKYGKMVFYTIRAPLSNANKLTLKQFGFFLASSQLNPGEPFSEKPTNGIHIKSPRSFFFTGKST

SEQ ID NO: 298981 - protein, 75 aa, Zea mays
  Clone ID: MRT4577_35741C.1.pep
GPSPIHKINFLTWGFPSVGFQTRSMASFIEHICWVQQGTGGCVKNNLAPYYIYIYLGGRSNNMPGYSFHPYWENA

SEQ ID NO: 298982 - protein, 50 aa, Zea mays
  Clone ID: MRT4577_35742C.1.pep
YFSIEASSIKMLLITTFFGYKKKHPLVPCDDLRYVYDHFYYLNIIDKLTP

SEQ ID NO: 298983 - protein, 163 aa, Zea mays
  Clone ID: MRT4577_35743C.1.pep
WDPRGRPGKACVARPHDATHAGGARASSRAAAPKATKRSKNSKRRRVAPAPDPAAPGTDASTADVASTAPSAATVTASEKPSATEHAAAAVATEKPPAALPVSVGAFADTSPAPDAGSGGVRELLPHPSRFEWPSGCDLGPPYWGWGTSVFADTDPALFLNLP

SEQ ID NO: 298984 - protein, 244 aa, Zea mays
  Clone ID: MRT4577_35744C.1.pep
MQEEPGRRPVPPFAGVDLRRPKGYPVAVAKEEERPAPGGDPCPRCGSRDTKFCYYNNYNTSQPRHLCKSCRRYWTKGGSLRNVPVGGGTRKSSSSSSSSSSSATTTSTSPGAAPKATKRSKNSKRRRVAPAPDPAAPGTDASTADVASTAPSAATVTASEKPSATEHAAAAVATEKPPAALPVSVGAFADTSPAPDAGSGGVRELLPHPSRFEWPSGCDLGPPYWGWGTSVFADTDPALFLNLP

SEQ ID NO: 298985 - protein, 182 aa, Zea mays
  Clone ID: MRT4577_35745C.1.pep
MGCAASAADGAELRRRGWARAGEPGHSEASTSGLLAPPHQQEGQEAESSSGGRRRGCKVAPEPKELEEGTAALPSMPGSPSFRYYCQKKTAAVDRIVADAIDADDTVRIRATARQLSNRSEITANKAQDSNEVSQPKGGTKWLRFSGLSIVAAAWHKHNLFSRQRSKPSPPPAATSDASSQP

SEQ ID NO: 298986 - protein, 116 aa, Zea mays
  unsure (1)..(116): unsure at all Xaa locations
  Clone ID: MRT4577_35746C.1.pep
KVFVLNNHPPRMVVHWENRFYKAHKAHPFLGNPKSESEIYPHFVAIPKRFNIPPVRVSKKREVPPPIKKILXAPGPALLKKIVPPQEQGLPIIPKGGAFKKIPPKGKGRPLYFFKI

SEQ ID NO: 298987 - protein, 77 aa, Zea mays
  Clone ID: MRT4577_35747C.1.pep
TISFSAPTHVGVFGTGPIFRKLDANVILRVGIFGAGPIFRELDANVILRVGGFGTGPIFRKLDANIILAEKKKKKSG

SEQ ID NO: 298988 - protein, 135 aa, Zea mays
  Clone ID: MRT4577_35748C.1.pep
MVIALVECLALSAASASAMQMPCPCAGLQGLYGAGAGLTTMMGARGLDPYAEHLRQAECTPVAEVPYYADGRQPDTMFHPLLLQCLHQNMMMMDVHAGTQQLKMIIHLELAADAINILYDPALMQQLQQLLAAHG

SEQ ID NO: 298989 - protein, 86 aa, Zea mays
  Clone ID: MRT4577_35749C.1.pep
SISITLWSSPPITSSYSRVDSFSASRDKLAYLMRCIMHMYEHKKNNTRYYASTQKRNKTLNGEVLQTLTIHILLLTTIMLLLSDWI

SEQ ID NO: 298990 - protein, 214 aa, Zea mays
  unsure (1)..(214): unsure at all Xaa locations
  Clone ID: MRT4577_35750C.1.pep
FDGHSVTVSTSTTVDATMVGNRAWFAGLFSGSGKRRQVSAEKIVFDLTPLQEQRLQSLKERLNVPYDETRTDHQXGCGFVSLENLLFFARTYPASFKRLMLKQQGMRTTWEYPFAVAGVDISYMLIQLLELNSVRPKSLPGINFIKVLTEHEDAFDVLYCIAFEMMDAQWLAMRASYMQFKEVLEATRQQLERELSLEDLNGIHDLPACNLLYK

SEQ ID NO: 298991 - protein, 225 aa, Zea mays
  Clone ID: MRT4577_35751C.1.pep
GHSVTVSTSTTVDATMVGNRAWFAGLFSGSGKRRQVSAEKIVFDLTPLQEQRLQSLKERLNVPYDETRTDHQESLRALWNASFPDTELTSLVSEQWKDMGWQGVNPATDFRGCGFVSLENLLFFARTYPASFKRLMLKQQGMRTTWEYPFAVAGVNISYMLIQLLELNSGIIYIYIYIYIYIYNTLCGRAWHLIRIHMSHCKYSIRFCLLSQDVESLDLITTVGR

SEQ ID NO: 298992 - protein, 159 aa, Zea mays
  unsure (1)..(159): unsure at all Xaa locations
  Clone ID: MRT4577_35752C.1.pep
WGPSSSWSSALSFRSVCFRLFSSSGVSRRSCSGALWSRFPLCVRRLGFFRVCGSSGGPSAASVAVCVXSGAFPRPPSALLRWASGSSLASGVGGFLFGALLLPVXWCXVPSCLGLGARGRRXGPAPLPAVLSCGXGGWWVLWRPGGRRSAXGXRXVWVS

SEQ ID NO: 298993 - protein, 239 aa, Zea mays
  unsure (1)..(239): unsure at all Xaa locations
  Clone ID: MRT4577_35753C.1.pep
MVGNRAWFGGLFSGSGKRRQVSAEKIVLDLTPVQEQRLQSLKERLNVPYDETRTDHQDSLRALWNASFPDTELTSLVSEQWKDMGWQGVNPATDFRGCGFVSLENLLFFARTYPASFKRLMLKQQGMRTTWEYPFAVAGVNISYMLIQLLELNSVRPKSLPGINFIKVLTEHEDAFDVLYCIAFEMMDAQWLAMRASYMQFKDXVQKVLEATRQQLERELSLEDLNSIHDLPACNLLYK

SEQ ID NO: 298994 - protein, 40 aa, Zea mays
  Clone ID: MRT4577_35754C.1.pep
HISCTRARISAYLSISFTALLPESNTEPGPQDLLQKYLLN

SEQ ID NO: 298995 - protein, 157 aa, Zea mays
  unsure (1)..(157): unsure at all Xaa locations
  Clone ID: MRT4577_35755C.1.pep
HLPXTSPRXDALGGSDVQSRRPSQEXPRKFSXHFLRRTALPVKREGSSSPLCELLRKSPXDDVAERRXASESEHRRPFYARPTFLAKRGARPRSLQGTPPNGRVTMMKVASESRRXXARLSAAEEKVRSRRKARPGGATGVEERRRLTTHPPATAND

SEQ ID NO: 298996 - protein, 124 aa, Zea mays
  Clone ID: MRT4577_35756C.1.pep
SWLSAYWTGFKSPEQISRVRNTGVKPEILKRVGQAITTLPENSLPDYAMQKESTLHLVLRVRGGMQIFVKTLTGKTITLEVESSDTIDNVKAKIQDKEGIPPDQQSLIFAGKQVEDGRTVADYN

SEQ ID NO: 298997 - protein, 156 aa, Zea mays
  Clone ID: MRT4577_35757C.1.pep
HASADAWAGAHTSASFTASFGPATDEDGGLDGAAPGSYCVWRPGPSASASPSPPPPRKSGSTGSMARWRRISDLVVGRSHSDGRDKFLFLAAAPRRGPKDKEPAATAPPAVAAHQMAAYLARGVPPRRTFLPYREELVGFFANVNGISRSHHRPPF

SEQ ID NO: 298998 - protein, 73 aa, Zea mays
  Clone ID: MRT4577_35758C.1.pep
PGAAHGSAQGSAHGSAHGSGFFWANSHSKLGGIVMCHCDEQGLLCGLIKVDKRPINARLFHHYCPPAGLLLSH

SEQ ID NO: 298999 - protein, 51 aa, Zea mays
  Clone ID: MRT4577_35759C.1.pep
STWGCFRDSCCHGFGGRGDSVMCCSCRLLLLRILLLGAASSVRSGGLVPVG

SEQ ID NO: 299000 - protein, 61 aa, Zea mays
  Clone ID: MRT4577_3575C.1.pep
MAWCCIPGSRGGRMALLLGGHGWSRETRAHGAGRASLVAVAAVKKKRQGRKKVAAGKNGGV

SEQ ID NO: 299001 - protein, 83 aa, Zea mays
  Clone ID: MRT4577_35760C.1.pep
YGCELDTSMKIIRRQSMWKRLRHYYPGLVYQWQVLLHSQTSAKLNNFRKIRCEDKNLDRTCHHGASCPCTTKLHLVVFYRRAG

SEQ ID NO: 299002 - protein, 94 aa, Zea mays
  unsure (1)..(94): unsure at all Xaa locations
  Clone ID: MRT4577_35761C.1.pep
VIRRMESSVVSTGEYTIHKYSVCRVVTHRVASLHTNIXIALGTQARRGYTGIYVSRHPLVLLSQXRHEWCSHEIGSKVLILKPRGTTLFIRDYS

SEQ ID NO: 299003 - protein, 48 aa, Zea mays
  Clone ID: MRT4577_35762C.1.pep
SFYIFFLLFSSRGAHISHHRRFQTVLYDHSSTAIKLSLSTRIKGTAYP

SEQ ID NO: 299004 - protein, 40 aa, Zea mays
  Clone ID: MRT4577_35763C.1.pep
NQHKMICLRCSARLHPRARSCRMKKCGHSSQLMDTMKIMN

SEQ ID NO: 299005 - protein, 64 aa, Zea mays
  Clone ID: MRT4577_35764C.1.pep
AIKIFWTINFNMTLIHTHLLFISLASYVVYGYGIEYINIQLQCTSCKCDINLTLAKHLDPTHNA

SEQ ID NO: 299006 - protein, 83 aa, Zea mays
  Clone ID: MRT4577_35765C.1.pep
LFFFCIFHFSIVHNFPFFYRVDFFFLYCAHYWEHHLCPQNDKTVHSSPNCELSLRAPRRRRDPRRHAWCAYRLVSYPYGHQEV

SEQ ID NO: 299007 - protein, 63 aa, Zea mays
  Clone ID: MRT4577_35766C.1.pep
EIYGPHKCLRINLCSLPPAPFYAILPHTRSRPGVPFPAPNVRNYWNQSPKYKDVSSLLITEAL

SEQ ID NO: 299008 - protein, 162 aa, Zea mays
  unsure (1)..(162): unsure at all Xaa locations
  Clone ID: MRT4577_35767C.1.pep
XXXXXXXXXXXXXXXXXXXXXXXXXXXXXXXXXXXXXXXXXXXXXXXXXXXXXXXXXXXXXXXXXXXXXXXXXXXXXXXTPPPPGARPPPPGAASPKKRAPPRQGFRGRTISSFPHPEQKMILAPLIPSDFWTPKLVLIIVDKCSYSILYFVVVNNIAVVWV

SEQ ID NO: 299009 - protein, 89 aa, Zea mays
  Clone ID: MRT4577_35768C.1.pep
GTRRVLFWGQNRGKLTTPWDQIFFQNPFPAERGGPFFKFQPGKKLSYWPDKFFYLNGKKIVGNINILQNPPSVIFTKHQFIKGKKLETW

SEQ ID NO: 299010 - protein, 118 aa, Zea mays
  unsure (1)..(118): unsure at all Xaa locations
  Clone ID: MRT4577_35769C.1.pep
ATVVSRCLVHRICFMKLAPSLKLPPALAXHCLHQVPEWSQISINCLYTGFNKLSSGYKSCRYFSIRTASTNSLAVVSCDTFLKLHMSSNGNTDFHVEGLTSAEKPLLQTHFLVAISFQ

SEQ ID NO: 299011 - protein, 254 aa, Zea mays
  unsure (1)..(254): unsure at all Xaa locations
  Clone ID: MRT4577_3576C.1.pep
HWYPRGRPRRSPPADRFLGLFSSPSHSLPASSPSAGDELVEGDFLFPAPPSSSDPPPDASKNPGRVQGGHLGLLAALHESDRKVRGRGGAAAVAASTATATAGTSGTLLRRKATIAAAAAAASASSVTPSVSPTSASRAIPVAPRPRDPELPAAAPYHQSAPVLVPVPPPWSRGRKWDKVAAGPGEGDDDDEELFHGDAAMLPPHEMVARASAGGGYGEPGKPSSMXEGVGRTLKGRDLHRVRDAVLRQTGFLD

SEQ ID NO: 299012 - protein, 93 aa, Zea mays
  Clone ID: MRT4577_35770C.1.pep
KKGYNPPSSLGGLSPLLKNKSTRPPSKLFVKNFSRSNAIPHILKIMVQFSSTLFKKLGFFLPTDYFFQKKLLKPLFFLPLLNFSGFPPPSCFL

SEQ ID NO: 299013 - protein, 35 aa, Zea mays
  Clone ID: MRT4577_35771C.1.pep
KKIFFKRRGEIAKFKNWSTLLYRPLIIYPTPPPGR

SEQ ID NO: 299014 - protein, 45 aa, Zea mays
  unsure (1)..(45): unsure at all Xaa locations
  Clone ID: MRT4577_35772C.1.pep
LMFKNFSCAPQVIFGYELGMYXAVGPLMXNMGSMKNFLNLLSCSL

SEQ ID NO: 299015 - protein, 95 aa, Zea mays
  Clone ID: MRT4577_35773C.1.pep
KTRENKGEFGLNPMGEKPKNLVEAGGNDPPKVNRGPLQKPAPGGGKGLTTQPIVVEKPKKAPTPIFSTAPKGSFPREKTLLVKNNFSRHGTGPLK

SEQ ID NO: 299016 - protein, 55 aa, Zea mays
  Clone ID: MRT4577_35774C.1.pep
LITKPLITKPVVFITNKLHTNPSPHLYTKTSNHHHPSQLTFYPLNPKPKLTSPHY

SEQ ID NO: 299017 - protein, 71 aa, Zea mays
  unsure (1)..(71): unsure at all Xaa locations
  Clone ID: MRT4577_35775C.1.pep
KGGYAQSRESKIWVWKSQKNLFFKGAFFKQSGGQNEGKXERFSLIQAKGGQYTDSFTRYAGGFNYRVGRKC

SEQ ID NO: 299018 - protein, 69 aa, Zea mays
  Clone ID: MRT4577_35776C.1.pep
GPFIGGAGGVTEVPYKGGGSHLTRFISLLFLITITGIGLTRAARTRIRRGFPWCAKAGADADAHFFFHP

SEQ ID NO: 299019 - protein, 142 aa, Zea mays
  Clone ID: MRT4577_35777C.1.pep
MAAEGKRKGVPALGWWLMLVGSLRLASVWFGFFDIWALRVAVFSQTEMTDVHGRTFGVWTLLTCTLCFLCALNLENRPLYLATFLSFIYALGHFLTEYLIYHTMAAANLSTVGFFAGTSIIWMLLQWNSHGNPRGSYAGKQS

SEQ ID NO: 299020 - protein, 58 aa, Zea mays
  Clone ID: MRT4577_35778C.1.pep
RLYADQSPTGELVELLFHAAPGPRGLPAIPIVSQIPAWRHHGHSYVLHDIVIRSELYT

SEQ ID NO: 299021 - protein, 57 aa, Zea mays
  unsure (1)..(57): unsure at all Xaa locations
  Clone ID: MRT4577_35779C.1.pep
SFIYALXHFLTEYLIYHTMPAANLSTVGFFAGTSIIWMLLQWNSHGNPRGSYAGKQS

SEQ ID NO: 299022 - protein, 67 aa, Zea mays
  unsure (1)..(67): unsure at all Xaa locations
  Clone ID: MRT4577_3577C.1.pep
KACIPVILPYMCLLRNPLAIASPVCRALHCIRLMSCVDLNPLCVVSFLEMFXXVFIFQCCSISVIFL

SEQ ID NO: 299023 - protein, 72 aa, Zea mays
  unsure (1)..(72): unsure at all Xaa locations
  Clone ID: MRT4577_35780C.1.pep
IRAPDAMRRLCRALALNTVSLGNXKSSIKLTLGSGLTTQGGDPGWIPDHLNEGHPPRFFWLIAGISFVNLKV

SEQ ID NO: 299024 - protein, 105 aa, Zea mays
  unsure (1)..(105): unsure at all Xaa locations
  Clone ID: MRT4577_35781C.1.pep
PEYDSNTNGLHLLDKLYLGGPYDMLGLARDLCXASILTGLDNKNGRVLMVIMLRKESEALHELQSPRENHVKAAHDALHNILLTLICEHRHQTLSVELLTARDRA

SEQ ID NO: 299025 - protein, 131 aa, Zea mays
  Clone ID: MRT4577_35782C.1.pep
SVPRVVVYQYAPNGSLDKYLFAGGGAGGGSAEEDSSAVQQQQQPLLDLHTRYRIALGVARAIAYLHEECLEWVLHCDIKPENILLEDDFCPKVSDFGLSKLTSKKEKVTMSRIRGTRGYMAPEWVIHREPI

SEQ ID NO: 299026 - protein, 44 aa, Zea mays
  Clone ID: MRT4577_35783C.1.pep
QLRANSKCVSSVPVAYLWPPTFFFFAYVSSFVSFTICKNNILVH

SEQ ID NO: 299027 - protein, 100 aa, Zea mays
  Clone ID: MRT4577_35784C.1.pep
VEKLHFPQTKPISPNFKVKTIRLPALDHTLTETDLSSERRVKQSEIDVQTSTKEMNKEIKKTEVSTQCDNKQSVAEKYFQLPKTEKRVTVQMPKDYAAKS

SEQ ID NO: 299028 - protein, 73 aa, Zea mays
  unsure (1)..(73): unsure at all Xaa locations
  Clone ID: MRT4577_35785C.1.pep
MVVAVAHPGLWIKPQYIHHAIYNMVQSIIQEEQQQQPCELCGSQQATXKCGGXFDSSTIPTINVRLVPLILPK

SEQ ID NO: 299029 - protein, 240 aa, Zea mays
  Clone ID: MRT4577_35786C.1.pep
AQTEEISINDDEWNDGLLATIREKVHMEADRKAMSNQVIYCLDGARIGIQYETFFAGEPCEIFHCVLESKSFLEKMIMIEHTLPFFLPVRELESDLLSSNSIKFIDHLEEILQAYIDRREQVRLIKELYGNQIGELFHSLPYNMIEFVLEDFECKVTISIRYSDLLQTLPSQARVLAWPLRSAKKISTRSSSASAAQPVPFHLSYAEEALKTLCLPEAYADIVLELPHALKRILSSRDSD

SEQ ID NO: 299030 - protein, 300 aa, Zea mays
  unsure (1)..(300): unsure at all Xaa locations
  Clone ID: MRT4577_35787C.1.pep
RARLSNILKRHEDLKERLSRDSDKLIFERLQKEFEAARAAQTEEISINDDEWNDGLLATIREKXVHMEADRKAMSNQVNVPADLSFQSRTTYRIRNKVIYCLDGARIGIQYETFFAGEPCEIFHCVLESKSFLEKMIMIEHTLPFFLPVRELESDLLSSNSIKFIDHLEEILQAYIDRREQVRLIKELYGNQIGELFHSLPYNMIEFVLEDFECKVTISIRYSDLLQTLPSQARVLAWPLRSAKKISTRSSSASAAQPVPFHLSYAEEALKTLCLPEAYADIVLELPHALKRILSSRDSD

SEQ ID NO: 299031 - protein, 94 aa, Zea mays
  unsure (1)..(94): unsure at all Xaa locations
  Clone ID: MRT4577_35788C.1.pep
MPIRNIAIGRPDEATRPDALKAVLAEFISTLIFVVAGSGSGMAFNKLTENGATTPSGLVAGAVAHAFGLLNTVSDGANICGGHXDPAATFGAFI

SEQ ID NO: 299032 - protein, 45 aa, Zea mays
  Clone ID: MRT4577_35789C.1.pep
QKCRDYEEHTVDLALTITRPREASRIIALEAELYYCAQPGRQTHA

SEQ ID NO: 299033 - protein, 121 aa, Zea mays
  Clone ID: MRT4577_3578C.1.pep
KSKGKFSGILHKGFKPDKRRCTRRRPRATMRSTLDRQSRLSIAQLPPPRDARVVILARQPPSFPRPVPLAMPTPRALRRHPTGAHQLRLPQRHRSPWQPAVRSHPRRARPPRPLSTFDVSH

SEQ ID NO: 299034 - protein, 173 aa, Zea mays
  Clone ID: MRT4577_35790C.1.pep
CYKFDMKLGKSPRPAHVALLGRLGQQILAAAAALASLLPEQGRGASRTLCKDGGGREMLPLAPPLPTPLPLRRPRQVAWRRRPRARMAVASPRWRRPCAWLARSGGGGGCALSVLVARWLGRVWPVWNLAWRRTCSCQRRGRCGRAAGGGSWDGGLGGSRRRGFGSRGRGFPG

SEQ ID NO: 299035 - protein, 129 aa, Zea mays
  unsure (1)..(129): unsure at all Xaa locations
  Clone ID: MRT4577_35791C.1.pep
GGPPPWRAPPPSGKPPRNFGGGPKKGRTFFPPNGFEXTPGPRVKPLNPPGAPSXIFLPFPGPPQRXFSSPPQPGPVFFPPGTEPPPNXPGRGSFSPPRGXPPLKGGPIGPCLGWPPPVNGVLYPPPPFF

SEQ ID NO: 299036 - protein, 192 aa, Zea mays
  Clone ID: MRT4577_35792C.1.pep
YIGKKRPRLNTTRKKANTRPNGGERNTQAQPQTKGNGGANRHNEKKSKQEKTGRPRGTPRTQGARTQPRARGRTHSNGPRGKPRAPPGARAKPPKPEKPAGPQTKRPGSAPPLNGRAPRQPGRNGRPHKTAERREGEKKGGSITLTKKPKAKKGEKTARTNPRNGKGQTPPGTKAHYGTRGAGGHTGEKATI

SEQ ID NO: 299037 - protein, 56 aa, Zea mays
  Clone ID: MRT4577_35793C.1.pep
PHKVEHLTSVNTENLHLDPDSVKIKSHVRPTRKNQLKGDKSATWHNKRAINEKAKS

SEQ ID NO: 299038 - protein, 63 aa, Zea mays
  Clone ID: MRT4577_35794C.1.pep
HIFASYYKFCLLFPHFLLYSNFPFITQYSSHQFTSIRFLTPYLFNLYNYTTNHLLLIYFTTYH

SEQ ID NO: 299039 - protein, 123 aa, Zea mays
  Clone ID: MRT4577_35795C.1.pep
SFRCPCHMTVARAPARSQWFAVDWRNLSVDLSIWGVNLKWRAAFVLTNQSCSIMDQLLLGAGKRQRTHGTSGHGLPAGYNLARDFIPGGKEETGENGPSRARSGGHQLWLVACEVGGLGAFTP

SEQ ID NO: 299040 - protein, 98 aa, Zea mays
  Clone ID: MRT4577_35796C.1.pep
MAGRRPAPVAILLLLAAAFAPISSAVRPVSDSHRSTSGEGGALSPNKPSNHHNTTYYPLNTIHILFLKNYNTLSPNASKFFPHNLPPPFFIIKHLFHA

SEQ ID NO: 299041 - protein, 63 aa, Zea mays
  unsure (1)..(63): unsure at all Xaa locations
  Clone ID: MRT4577_35797C.1.pep
KYQHGPNLQSFGYIKNHKIIARLLVLQIFVQGGGGYXHIDSGILQIYNDIIEIVQRYILCSKL

SEQ ID NO: 299042 - protein, 111 aa, Zea mays
  Clone ID: MRT4577_35798C.1.pep
LCSCVITPLPQCRPLKMLVSGYARWSVLPATLHILPSMSPHNSGSCTLINKVLHSCSRESISFLVSYPTLHRCTPALMDGVRSASVVPARDWSSGVKPAIRVVFSRGIGPC

SEQ ID NO: 299043 - protein, 124 aa, Zea mays
  Clone ID: MRT4577_35799C.1.pep
RPTTPTDRSSLARNSGMETIIGQDAGDPPGRDRLSAWESPPSRARVEPPSPREGDKEYYYCAYDSDIASGYGVGVTVPPPRRCSAVHVHQTLIVLGSCGQTEGCSPLRTYPGPRCTRGIPHARG

SEQ ID NO: 299044 - protein, 47 aa, Zea mays
  unsure (1)..(47): unsure at all Xaa locations
  Clone ID: MRT4577_3579C.1.pep
TKSLTGDKKRSPGEEFNKVLVTVNQRKLLDPLLECLKKXNGEPIPLW

SEQ ID NO: 299045 - protein, 453 aa, Zea mays
  unsure (1)..(453): unsure at all Xaa locations
  Clone ID: MRT4577_357C.1.pep
MRECISIHIGQVGIQVENACCKLYCLEHDIHADGHMSGDNTIVGGDDAFNTFFRDTAAGKHVARAVFVDLEPTVIDDVRTGTYRQLFHPERLISXKEDAVNNCARGHYTIGKXEIVDLCLDRIKKLADNCTGLQGFLVFTAXCSAGTGYXLGSLLLXRLSVDYSXKSKLXFTVYPSPQVSTSVVEPYNSVLSTHSLLEHTDVAILLDNEAIYDICRRSLDIERPTYTNLNRLVSQVISSLTASLRFDGALNVDVNEFQTNLVPYPRIHFMLSSYAPVISAEKAYHEQLSVAEITNSAFEPSSMMAKCDPRHGKYMACCLMYRGDVVPKDVNAAVATIKTKRTIQFVDWCPTGFKCGINYQPPSVVPGGDLAKVQRAVCMISNSTSVVEVFSRIDHKFDLMYAKRAFVHWYVGEGMEEGEFSEAREDLAALEKDYEEVGAEFDEGEDGDEGDEY

SEQ ID NO: 299046 - protein, 47 aa, Zea mays
  Clone ID: MRT4577_35800C.1.pep
LFYVPFQAGADPAGMKLTTNPLHLDYRYVPKKGKENKNVTAWLSPQP

SEQ ID NO: 299047 - protein, 175 aa, Zea mays
  unsure (1)..(175): unsure at all Xaa locations
  Clone ID: MRT4577_35801C.1.pep
RAARIQHIRLPEHAATLFELIRCXSHSPLYDGVQVAREGSHXMYLKNXHPTACXLTMEPAALREMPDLLQIQSVNLMLXKRNXHMRALKWXEHFCEKNTPRTDTGTLSHTPATPLTLMQPPHVYHVLLERXITTQCPDSDSATDEHGLWLLCGKLCTPSMKPCCRTGRCHNHALQ

SEQ ID NO: 299048 - protein, 76 aa, Zea mays
  unsure (1)..(76): unsure at all Xaa locations
  Clone ID: MRT4577_35802C.1.pep
LVLPVALLLLLCVGSFGWVCXLSWSPPGRVVLRXWVPGVVLVCGLLFVACGXLSSAXPCGGSSRXCXGXCFFXPPP

SEQ ID NO: 299049 - protein, 112 aa, Zea mays
  unsure (1)..(112): unsure at all Xaa locations
  Clone ID: MRT4577_35803C.1.pep
AFQGTVKLLFQPAEESGCGAKRMIEDGALEGVEAIFAVHVSHQHPTSVVGSRTGALLAGCGFFKAVIRGGGGGGDRASDPVVLAAXSPVLSLQGIXSREADPLDSQVVFVAV

SEQ ID NO: 299050 - protein, 82 aa, Zea mays
  Clone ID: MRT4577_35804C.1.pep
MLLLLLLQVKPVLNRVKFTLVGLAVSLTLCILLYANTEKPREPLENPSGGRAVPGVYSDAAARSFEPDAFCGEPDLGDQAEL

SEQ ID NO: 299051 - protein, 89 aa, Zea mays
  unsure (1)..(89): unsure at all Xaa locations
  Clone ID: MRT4577_35805C.1.pep
PKKRDPPLFLGDTRKSLLYTSGCAGGPHIWGTVSPFSKRCCPPYSIFLWRPPPPSYVCGVSPGFKKKSSPGKSGXRFVFCCVCXPQVPP

SEQ ID NO: 299052 - protein, 104 aa, Zea mays
  Clone ID: MRT4577_35806C.1.pep
SHHSTVLFLVFAYGKGAGNFKKKGGPRNGHDCTFLPALLKADFLLLFLAYFPRVGTRLTVLNNLAHIAMSVDANDTTILLCLFLYCKCDAQILGGSDSEYTVRS

SEQ ID NO: 299053 - protein, 98 aa, Zea mays
  Clone ID: MRT4577_35807C.1.pep
ALRTAVGSGRRWGGLSSLYSNPAVAVLNRRGHLASALAIPARAVSLNRCCQVSACKNVGAVQQLSRSADLIILQCRKLVVRAPVSRPRTMFWKVSGLG

SEQ ID NO: 299054 - protein, 229 aa, Zea mays
  Clone ID: MRT4577_35808C.1.pep
IFHRDVKSSNILLDAALRPKLADFGLSRAVDRLEAARSHVSTAPQGTPGYVDPEYHQNFHLSDKSDVYSFGVVLLELVTAMKVVDFDRPPAEVNLASLALDRIGKGQVAEIVDPALLGAGEDWVMGSVRHVSELAFRCLAFQKDVRPSMREVAAELQRIRSAAPDGADPEEPAGSRLRPVSMMDIQIDVSLGGPDTAAKKAASPVSVQEVWVSDRSSPSTNGSMPRFAA

SEQ ID NO: 299055 - protein, 66 aa, Zea mays
  Clone ID: MRT4577_35809C.1.pep
LGHLLGRRPQPNADDGHAVIQRACRGIDTSTTVHRSGDLVATNRGAYGHPDRNAALDQDVGGVSHA

SEQ ID NO: 299056 - protein, 75 aa, Zea mays
  Clone ID: MRT4577_3580C.1.pep
SLRHNFRLSLIAWCKAVFFYYRRAPWQFNKHFPLRLMRVYVVKSPLHMPCYPSFGVLTRPQVWTHMAPQKTCFVL

SEQ ID NO: 299057 - protein, 261 aa, Zea mays
  unsure (1)..(261): unsure at all Xaa locations
  Clone ID: MRT4577_35810C.1.pep
MAGAVVGRLGRHPTSLLLLTLPRHAAAHHRLHSPSSSQGQYSKMGDPSERNGHGALTRVLFCGPYWPASTNYTREYLQDYPFIQVDEVGLEQVPDVIHSYHICVVKNKRIDSDIIAKATQMKIIMQYGVGLEGVDVNAATEHKIKVARIPGSTTGNAVSCAEMAIYLTLGILRKQKEMDTAVNRKDLGVPVGDTLFGKTILILGFGAIGIEVAKRLXPLGVKILATKRNWSSDTCHPDVXAVDKKGGRRIDWXFVGEANIV

SEQ ID NO: 299058 - protein, 434 aa, Zea mays
  unsure (1)..(434): unsure at all Xaa locations
  Clone ID: MRT4577_35811C.1.pep
MGDPSERNGHGALTRVLFCGPYWPASTNYTREYLQDYPFIQVDEVGLEQVPDVIHSYHICVVKNKRIDSDIIAKATQMKIIMQYGVGLEGVDVNAATEHKIKVARIPGSTTGNAVSCAEMAIYLTLGILRKQKEMDTAVNRKDLGVPVGDTLFGKTILILGFGAIGIEVAKRLRPFGVKILATKRNWSSDTLPSYVDELVDKKGGPEDMYEFAGEANIVIACMTLTSETVXLLLVYLVINIPSRWPLLDLDXRDHLLQIGIVDHKFVSSMKKXMLVSVILVSMLSDLWAHFADSILLVLVLCINNREGMIHESWYQLRTFLLENIFWRIMLLGXLNCFXLXGSYLVNIARGRLLDYKAVFDHLESGHLAGLGIDVAWMEPFDPEDPVLKFPNVILTPHVAGVTEYSYRTMAKSVGDTALQLHLGEAFTEVEFVN

SEQ ID NO: 299059 - protein, 56 aa, Zea mays
  unsure (1)..(56): unsure at all Xaa locations
  Clone ID: MRT4577_35812C.1.pep
HFKISIAIPGHECASTSIXNTWRCYRTAQQNYASLLQSTQCSESNRKTPKLSSLTT

SEQ ID NO: 299060 - protein, 44 aa, Zea mays
  Clone ID: MRT4577_35813C.1.pep
LLFQLCTISNHIPWNLPQLLMPFTTMNPWIQYSMKQHPVANLLT

SEQ ID NO: 299061 - protein, 130 aa, Zea mays
  unsure (1)..(130): unsure at all Xaa locations
  Clone ID: MRT4577_35814C.1.pep
SQLISQASFDGDIDGASLVTNSNVIEDDDFQGKPTNSGTSKELSDDDGDLEENTDPANAKKMRRMVSNRESARRSRKRKQAHLTDLESQVNVXENASLLKRLADMTQKYKDASVDNKNLTVDVETMRRKV

SEQ ID NO: 299062 - protein, 50 aa, Zea mays
  Clone ID: MRT4577_35815C.1.pep
PATHIEQDTVVLSSTTARLQQRLLLDELAIYYRMLQVLPCNQLAYKNSAR

SEQ ID NO: 299063 - protein, 47 aa, Zea mays
  Clone ID: MRT4577_35816C.1.pep
TCDPAPGVATYSCYVSVRFLIVTVVCVVIQINVVSSLSPTVFDYWVY

SEQ ID NO: 299064 - protein, 62 aa, Zea mays
  Clone ID: MRT4577_35817C.1.pep
GIRMSWNITPNAVGNDPNQRYEMEEPNLSHDRNQRYQVEEPILYSCIYTLLCFICVNRIDTR

SEQ ID NO: 299065 - protein, 200 aa, Zea mays
  Clone ID: MRT4577_35818C.1.pep
MAGGGAGDDDVVVVSCGGRGGGDPGAYAAVLKRKLDLYCAGGAKSMEAKSQEHSLGYPNSQASDASQLISQASFDGDIDGASLVTNSNVIEDDDFQGKPTNSGTSKELSDDDGDLEENTDPANAKKMRRMVSNRESARRSRKRKQAHLTDLESQVSRLTSENASLLKRLADMTQKYKDASVDNKNLTVDVETMRRKVRSS

SEQ ID NO: 299066 - protein, 312 aa, Zea mays
  Clone ID: MRT4577_35819C.1.pep
MAGGGAGDDDVVVVSCGGRGGGDPGAYAAVLKRKLDLYCAAVAKSMEAKSQEHSLGYPNSQASDASQLISQASFDGDIDGASLVTNSNVIEDDDFQGKPTNSGTSKELSDDDGDLEENTDPANAKKMRRMVSNRESARRSRKRKQAHLTDLESQVSRLTSENASLLKRLADMTQKYKDASVDNKNLTVDVETMRRKVNIAEEAVRRLTGITLMLPTAFEKPASSAPLSSCPSDAASASASASAAIEDSVKHFLQAPLENSGIIPNAAVFQTKPASLHRVASLENLQKRIVGDAMYSGTASTTFSDPEALADR

SEQ ID NO: 299067 - protein, 75 aa, Zea mays
  Clone ID: MRT4577_3581C.1.pep
KDGKPGGKPGGKKGQKSGERRGEKRAQKGAPGGPGKREKGEGTEGPGPKRGAESGPPRGAPKGEKPGGKAVNGGK

SEQ ID NO: 299068 - protein, 209 aa, Zea mays
  unsure (1)..(209): unsure at all Xaa locations
  Clone ID: MRT4577_35820C.1.pep
MLVWPGLRLLPTPILPLPEYEVLERERLSSKNGGWRRRRRRRGGGELRRQRRRRPRRIRRGAQEEARPVLRRRRQIHGDIDGASLVTNSNVIEDDDFQGKPTNSGTSKELSDDDGDLEENTDPANAKKMRXNFGVVIRMVSNRESARRSRKRKQAHLTDLESQVSRLTSENASLLKRLADMTQKYKDASVDNKNLTVDVETMRRKVRSS

SEQ ID NO: 299069 - protein, 201 aa, Zea mays
  Clone ID: MRT4577_35821C.1.pep
MARRGLMEQDLTKLDVTKLHPLSPEVISRQATINIGTIGHVAHGKSTVVKAISGVQTVRFKNELERNITIKLGYANAKIYKCEDDRCPRPMCYKAYGSGKEDTPACDVPGFENTRMKLLRHVSFVDCPGHDILMATMLNGAAIMDGALLLIAANESCPQPQTSEHLAAVEIMRLQHLIILQNKIDLIQENAAMNQHESIQK

SEQ ID NO: 299070 - protein, 275 aa, Zea mays
  unsure (1)..(275): unsure at all Xaa locations
  Clone ID: MRT4577_35822C.1.pep
MNDEWQLKRKKSNQQHLIAVMSPCAHAEQQEPNAPPLHNDHHRHQTYVELYHHGLHHVKSSALLCAVGLGIPGAIHRRGGAATVSDLVSGTGVHPAKRAQLRRLMRMLACFGIFGAAGGDSGDGESETVYTLTPVSSVLVGDKDKEASASASGASPSPDMSALLRLLARPSTSVSTFFDMEEWFRDGGTTTLFETALGVAPWSLTKSDAAYNRAMNEACVADTSLSMDMMLKDTSGXPAVVFGGXRLTSLVXDXXXXHGAAAICIANXFPHISCT

SEQ ID NO: 299071 - protein, 62 aa, Zea mays
  Clone ID: MRT4577_35823C.1.pep
DKGITLILYRHKLVPYKTSNTLITAACFGFNPTATEVSIEICFYRLQLQQSKHLKPASRIIY

SEQ ID NO: 299072 - protein, 185 aa, Zea mays
  Clone ID: MRT4577_35824C.1.pep
MFWPVISRRLHQLAGLKVNFQRLSRRLKLCPLTLMSFNRRVNGHESFAAGHRGPRNGDKKDHKWDTDRADPYRLTRREDNRRVARDMEKPQEQPRLEPETWRKPVEPPKLEPAGPRFGKAATALELAQAFSTSMSDTAPQSRLTSAPSPRVPPSPGASRDQSGFSRLTDSRTLHSGPSQRKINGY

SEQ ID NO: 299073 - protein, 186 aa, Zea mays
  Clone ID: MRT4577_35825C.1.pep
ADAESRVAERPRLNLKPRSYVTGQSDEIAVKERPSLFGGARPREQVLKERGVDVLASDLEKTSPVGRPKGEFAKVEQKVEAMSINPSVERHESFAAGHRGPRNGDKKDHKWNTDRADAYRLTRREDNRRVARDMEKPQEQPRPEPETWRKPVEPTKLEVATPRFGKAATALELAHAFSTSMSDTAP

SEQ ID NO: 299074 - protein, 196 aa, Zea mays
  Clone ID: MRT4577_35826C.1.pep
MSKKKAVTTMTLKDFHGGSIPSELPLPSAPGVTPRPADRTVASASPGAAAVARPRVPVASPTAAAAAAAMPSFLTNPSRIGRHFDEDERTPFEPAAPRRPAPSPTSYAPAPVVAPTRSGSGNAWGPRKEASPASSPVGPAPASAGGQIWSATRIAQASAVEKVISGRWHTSKPSSPPAPVTVPASGVDYRGPRRRL

SEQ ID NO: 299075 - protein, 253 aa, Zea mays
  Clone ID: MRT4577_35827C.1.pep
MKAEVNHDLHQNARAAKTGVLGADAESKVAERPRLNLKPRSYATGQSDEMAVKERPSLFGGARPREQVLKERGVDVLASDLERISPVGRSKGEFAKVEQKVEALSINPSLERADGFSAGHRGPRSVDKKDYRRDTEKADAYRPSRREDNRRVARDMEKPQEQPRPEPETWRKPVEPPKPEVATPRFGKAATALELAQAFSTSMSDTAPQNRLTSVPSPRVPLSPGARDQSGFSRLTDSRTLRSSPSQRKINGY

SEQ ID NO: 299076 - protein, 95 aa, Zea mays
  Clone ID: MRT4577_35828C.1.pep
VLDDDDLCVANVSSHNCSDACRVSGGEERNQRREEDDDEETAAAEAEAGNGSQLMVVPEDGYEWKKYGQKFIKNIQKIRYFLPSIHFHVVSATLT

SEQ ID NO: 299077 - protein, 80 aa, Zea mays
  Clone ID: MRT4577_35829C.1.pep
MGLFCKKKNRLLGPPIFFFFINRGANNCARGLSRLFCKKHPFNFFYNLFFLANPPQYFFFNNLGGLRPLLNNSLLVISTS

SEQ ID NO: 299078 - protein, 45 aa, Zea mays
  Clone ID: MRT4577_3582C.1.pep
VKILQSWPDAVSVPVMLSRSPLFDQMDKAGDVSDRIEFPTCMSNW

SEQ ID NO: 299079 - protein, 384 aa, Zea mays
  Clone ID: MRT4577_35830C.1.pep
MSKKKAVTTMTLKDFHGGSIPSELPLPSAPGVTPRPADRTVASASPVAAAVARPRVPVASPAAAAAAAAMPSFLTNPSRIGRHFDEDERTPFEPTTPRRPAPSPTSFAPAPVVAPTRSGPGNAWGPKKEASSAPSPVGHAPASAGDQIWSATRIAQASAVEKVISGRWHPPKPTSPPAPVSVPVLETPVAPPEIERPRSVGVRELDSGVERGAAPVRPASHEGRIGEGRAGEVPERPKLKLLPRSKPIEAPEQPPTYVEEKQVHQVQVTAGLMKAEVDHDVHQNAMTTETGVLGADAESKVAERPRLNLKPRSYVTGQSDEIAVKERPSLFGGARPREQVLKERGVDVLASDLEKTSPVGTLLYVVMHHVNIDRCISIVAGHKL

SEQ ID NO: 299080 - protein, 140 aa, Zea mays
  Clone ID: MRT4577_35831C.1.pep
DDVAGGDERTDAVTQDYGDRMIAVSFLCASEPGASLHLAELVPPRLLPHHPGAPPPQVSREHSTMCYACLECALDDLIPMNQWHDPVKQGVHTRSSSSSTPTRRCSTSVDLHDACSCSTKSYGSYHFVLFLLAHQLLCSS

SEQ ID NO: 299081 - protein, 135 aa, Zea mays
  unsure (1)..(135): unsure at all Xaa locations
  Clone ID: MRT4577_35833C.1.pep
CIEDIVRTLEKDERDSLDHIRWLPESRPQPYAWAHLLLPTESTLYALSYTLLTHIPCYVHXVKACNAPITKTQLLDDECPDXLIKGLXILSVSSHITLEPLCYECKKRNLLPLITQFLEHTLSEDCQDIHIHNAL

SEQ ID NO: 299082 - protein, 73 aa, Zea mays
  unsure (1)..(73): unsure at all Xaa locations
  Clone ID: MRT4577_35834C.1.pep
GAATGTHDSYVTGDPAIALKYMDGAFIACDTGACYGXTLIYRRVQRITSVTXYRAIGSRRTFSAYQKKLRYLD

SEQ ID NO: 299083 - protein, 47 aa, Zea mays
  Clone ID: MRT4577_35835C.1.pep
PRPDILLRQFYDNLVTTNPRIHGTLLEGIVKSHRYESVLTCWIYPHH

SEQ ID NO: 299084 - protein, 101 aa, Zea mays
  Clone ID: MRT4577_35836C.1.pep
QWTIRRRNIAMEVALSKMRWEQRLLLRPHKDCDLSSGNRRNAKPGPVNHHRLSRPIKKASAFAHCSSFPHPPPEPARSLDYISYLIHFLLWDNTLVNMSYT

SEQ ID NO: 299085 - protein, 63 aa, Zea mays
  Clone ID: MRT4577_35837C.1.pep
KGRIGNQGWEVVPPQVFFARRRRLVGGRKGAYSMWVGKGGRFKGGDFREVGNLVFKMKGFFKE

SEQ ID NO: 299086 - protein, 117 aa, Zea mays
  Clone ID: MRT4577_35838C.1.pep
MYFYRTTFWFYRERICVYSRALFLWPLNKKKKKKKKKKKKKKKKKKKKKKKKKKKKKKKKKKKKKKKKKKKGAPPPRGVPPRGPPPRGPPPWGEKNSPGGWPPPLEKPPQNWAPFFP

SEQ ID NO: 299087 - protein, 98 aa, Zea mays
  unsure (1)..(98): unsure at all Xaa locations
  Clone ID: MRT4577_35839C.1.pep
SLAANPGDAXVPILEGMHGREDEPATAGARRDVILLAARALSXXVDEHPPPSXXGRAKKKKNSASVLDCSPSSTWTSLSSLXKPLXRPPPSTHXPAPP

SEQ ID NO: 299088 - protein, 33 aa, Zea mays
  Clone ID: MRT4577_3583C.1.pep
TKFGFSMQIESRLSRRVGKFGLLDPCGRTRNFG

SEQ ID NO: 299089 - protein, 121 aa, Zea mays
  Clone ID: MRT4577_35840C.1.pep
MQLDLNVTEVPPPVEMEASDSGSSVLNASEAASAGGAPAPAEGSSSTPVVLEFSILIWSDSDAADANEDEEATPSPAKKSHHGPRSRSSQYCGVTFYRRNDSTLSCSVVTCLLGGDLGGAR

SEQ ID NO: 299090 - protein, 49 aa, Zea mays
  Clone ID: MRT4577_35841C.1.pep
KPSFKEHLRAEMSQYYYLVANIGPSQPELLPSHHRTSQLLPSREPTCQA

SEQ ID NO: 299091 - protein, 88 aa, Zea mays
  Clone ID: MRT4577_35842C.1.pep
ICDLFMNIIASLNRVNEQADFPEGSQSPVLGLDDGTYNETTHTSACKEHFWSTYASYMWNPNPPSPSDVRSLGFRLGFWREHMVPIPI

SEQ ID NO: 299092 - protein, 65 aa, Zea mays
  Clone ID: MRT4577_35843C.1.pep
LHIQKCVVLDSCCSLNIAPSEQWLTSHPPRLFHDSYGDMMLSSSSLSACVSQQVRYPLLSYSLGG

SEQ ID NO: 299093 - protein, 70 aa, Zea mays
  Clone ID: MRT4577_35844C.1.pep
GRRRPCNHLPIHIRVLTVTILIHLTSGAGALCLVRTPWRAHMPQSRRCEHGSTSPSARNLQQARRLVARP

SEQ ID NO: 299094 - protein, 95 aa, Zea mays
  unsure (1)..(95): unsure at all Xaa locations
  Clone ID: MRT4577_35845C.1.pep
MGPGGLRMGPPXAPPSRGFVEKNFAKGGGFFDAPVNLALKIKGAPPGGPKLKGFVAPLPFESPPVGIAKLPPEVGEFAKQFPPIGFGKKPLKSKN

SEQ ID NO: 299095 - protein, 42 aa, Zea mays
  unsure (1)..(42): unsure at all Xaa locations
  Clone ID: MRT4577_35846C.1.pep
SAFSRTSRYISRSGHDCDWSWSGAKLSSSSSRYPSLLHXKRL

SEQ ID NO: 299096 - protein, 112 aa, Zea mays
  unsure (1)..(112): unsure at all Xaa locations
  Clone ID: MRT4577_35847C.1.pep
GYLEAGRAGVGCTGYRSPQVKRHTPLYFDFPDLQHDAGCVIFKLLADFPASADDIXELENSNSRNPPXGVXLAWTNIITSHYYADTYEMINIGRLSTCIVYVRSTYMPTIRW

SEQ ID NO: 299097 - protein, 115 aa, Zea mays
  unsure (1)..(115): unsure at all Xaa locations
  Clone ID: MRT4577_35848C.1.pep
LTSPGEAHYQLPNSNGYQELALLALLAXLYVSATNAFIIPQXSRAPSAVIPQCAPPVSXKGFEHRAVHAFMQQQAPAVCVFQQPSAXLRHQDMPLLTIQAITTHQQQQLLPSLLH

SEQ ID NO: 299098 - protein, 123 aa, Zea mays
  unsure (1)..(123): unsure at all Xaa locations
  Clone ID: MRT4577_35849C.1.pep
EGAQAQAAPRXAGPLPPGPLPFSRSPRRXGPGARAPPQNQGGGPGGGGRRLRRLSLPRAPREKKGPPGGPGGRRRKKAPLFRLIVPPXVCGPPPCVSRGCESDFERPPFCARVRLFALVFCPN

SEQ ID NO: 299099 - protein, 186 aa, Zea mays
  Clone ID: MRT4577_3584C.1.pep
VHPLSAQLNSPFPPGTHVFIIKTVYCVHCAAQKTIRSGLSAGLTRAVLWILSGGGSTPSTEGFMYRLNMTLVKMVRMPSPSVENATCVGENSGSSSADDPRPVIIVARSRYGSGGGGGVGGRILGSTSPSSSASNSSSRFRVSSGVSRRAASSPSTHARTGQDRPKTHLLLRRRSERAGGLAPART

SEQ ID NO: 299100 - protein, 256 aa, Zea mays
  unsure (1)..(256): unsure at all Xaa locations
  Clone ID: MRT4577_35850C.1.pep
QPTRPRDHGHAGPQLEGRRALLPRAAAEAPPAGDLGAPPRRGXIGRRRQPARWPKLAVSASGKKSRSGRDGDDPKSKPSSSGKGDASTPIGDDDADAVSQNHGELKSSDTMYVPSNLSYWRDVRASFVIPKSEQAVDVNTLPQTSFDGPVHCLPRKWAHSISAPESGCVLVATEELDGNGTFERTVILLLKLGSRDAYDGPFGVILNRPLYTKMKHVNPSFRDQATPFGDCSLFFGXPVDMSIFLMRTNEGRPIKG

SEQ ID NO: 299101 - protein, 200 aa, Zea mays
  Clone ID: MRT4577_35851C.1.pep
MEAPQSWPWSDLQPELLGLILKRLPVLADRVRLRAVCQPWRSNSLEQHLPLPFPWLTLPDGTFLNIPGGEIHRMPACFQGSIDNWLFLTHNDDVCSLMNPFSNTTLELPKLAREWKRVIGPCSRFEPVFYKLAVPSALDSSPNSLVAALITDNSNCSTLCISQPPIATDSLRGDRYPLTSLSDIAFFDGKLYTFGRIWQA

SEQ ID NO: 299102 - protein, 52 aa, Zea mays
  Clone ID: MRT4577_35852C.1.pep
GRRAYLHLHALSGLLHRVDWLNFTCPQFTRLVLEPPLVSWPYIPYAPSVFLP

SEQ ID NO: 299103 - protein, 257 aa, Zea mays
  unsure (1)..(257): unsure at all Xaa locations
  Clone ID: MRT4577_35853C.1.pep
MFFSVFPKALKGKKKLHKEKHKSRSERPHRQSNITELDKGKKRPAQSSKSDLPNKRSKKEGSQVPSRKKDTGGRMAKKNGPCQDKSICTGQNSSLCKDNREKHSHATFQKKCHAEPLNNGPSGSGWNRTAGGHSQFEGRHITPASHVEANHGNFVSVQHPCVERLQRPTQSREVALAHPXAAAIHTYCPXAAMGLRHQNGATAGVHAPAYFKGFPLSQQRAGFPSASMPQTGYHPHPEELFVASHFRYPRGSAGFRR

SEQ ID NO: 299104 - protein, 82 aa, Zea mays
  unsure (1)..(82): unsure at all Xaa locations
  Clone ID: MRT4577_35854C.1.pep
CVITPWRPITQHTEYLCCSLVQRRRGTWRIHRCALWRAAMVELDESLVDLAAAVFGEEVAAPVLDGPLVRGHGXAVLAGGGA

SEQ ID NO: 299105 - protein, 77 aa, Zea mays
  Clone ID: MRT4577_35855C.1.pep
MAGTWVKMEQKGAGPGARSSHAITLLGGTAYSFGGELTPRVPVDSTMYAFDLNTQTWSALDATGDVPPPRVGVTMAA

SEQ ID NO: 299106 - protein, 85 aa, Zea mays
  Clone ID: MRT4577_35856C.1.pep
LRCGSSFFFDTREALVQNETTFWLFCTLGKTQILLAHESWQRNGINENRPKTACLATNATRLSYRRKPALPLGYLKCGATNNSSG

SEQ ID NO: 299107 - protein, 58 aa, Zea mays
  Clone ID: MRT4577_35857C.1.pep
HINYITWVHLPVQCDFRLKTTNLTSPANACNHLAKQDLFFPYLNNSRLPTVGLEGLDK

SEQ ID NO: 299108 - protein, 63 aa, Zea mays
  unsure (1)..(63): unsure at all Xaa locations
  Clone ID: MRT4577_35858C.1.pep
SGRGLTKIFSLSSFLALSTCVANTSILNAXRQASIAFLFPPYPSSIIASVCENPALQPYRLQQ

SEQ ID NO: 299109 - protein, 42 aa, Zea mays
  Clone ID: MRT4577_35859C.1.pep
AFTRPAHATRAVPSLSLLPSSRLQGKAYKHMEPSSVTRNCTS

SEQ ID NO: 299110 - protein, 59 aa, Zea mays
  unsure (1)..(59): unsure at all Xaa locations
  Clone ID: MRT4577_3585C.1.pep
RLVGISSGASASAAVRLAKRPENPERLFGFXFPTSGNPYLXSGLFQSIKKEPESLLFNP

SEQ ID NO: 299111 - protein, 71 aa, Zea mays
  Clone ID: MRT4577_35860C.1.pep
HASSHRSCTHLLDLVSNVTFYLIEGALGIVGRGFIRPVAPVHHVSEIQRDCTISSLSCQSTSTDTALHTTH

SEQ ID NO: 299112 - protein, 330 aa, Zea mays
  Clone ID: MRT4577_35861C.1.pep
RRHRWPGRRRRPGPGRAPRGAAGPRRPGGGSTRRPLARAADATRKRSLEAGELLVARKHGAASVAGRRREMEDAVSVRESFAAEGNADGGGRRDFYGVFDGHGCSHVAEACRDRMHDLLAEELAAADGSGSGSAATWTAAMERSFARMDAEAMSAGGSAACRCDPHKCDHVGSTAVVAVVEERRVVVANCGDSRALLCRGGGAPPLPLSSDHKPDRPDELERIEAAARVLGVLAMSRAVGDGYLKPYVSSVPEVTVTDRSDGDECLILGSDGLWDVVSNEAACEVARACLRRGRAKWCAEAAALLTKLALARRSSDNVSVVVIDLRRRNH

SEQ ID NO: 299113 - protein, 257 aa, Zea mays
  unsure (1)..(257): unsure at all Xaa locations
  Clone ID: MRT4577_35862C.1.pep
PAALTISLSSWRRPAPTARGRVPSSPGRRRGGPGVRPRGRAGRQPLDGVPLARRGPATPSAVRCTSTGTRPPARRHGCPTMVPRRGWQRERAAPTRARARPSSPGRWACRSGSGAQALVCAAAARARRASSSTLARAQPFRSRGRRRTSAGRSGRRRSRRPTSPRRPSARSCVPSRRSRSPQSRSRRRQRAPRRAGRXRKPSLVRTSGRRGRVAWRAPLARCLGVALAAPARAPVATASVHGVSSSSWRHDASEAIF

SEQ ID NO: 299114 - protein, 209 aa, Zea mays
  Clone ID: MRT4577_35863C.1.pep
MSMAQVCCDSAVAATAAPVVGAEAEARARARAERRSRAGESGAWKHAVAAGTADATRKRSLGAGELLVARKHGAASVAGRRREMEDAVSVRDAFCAEGTADGGRRDFYGVFDGHGCSHVAEACRDRMHELVAEELAATAADSSVSAAAAWTVAMERSFARMDAEVTSPGGRAAAARSSTCRCDAHMCACARGIGTVAPGSTCWRTRVAP

SEQ ID NO: 299115 - protein, 109 aa, Zea mays
  Clone ID: MRT4577_35864C.1.pep
FPGLFGLNSFFKIWVGVLNRMEKFVKVKVPGKRNDRLQEGVPDLLKKIFFFIKKKGILLKRSPIGGANLWELKWVSPKNILNSLVPDVFSNPGVEQQNSPGWPKGARPF

SEQ ID NO: 299116 - protein, 63 aa, Zea mays
  Clone ID: MRT4577_35865C.1.pep
DFAKPSQDLKFSPPVSNAFPLTKQKNFEKNLQKNLQKQNMWCKRGPKKKKKKKKKKYSALLHC

SEQ ID NO: 299117 - protein, 130 aa, Zea mays
  Clone ID: MRT4577_35866C.1.pep
GTTKHGFFFFPPSQERNGTDKTKKLPGATRKRHKSRGTRRAFYNSRPQTRAKSGVHFLNLKRGAPLKNMGKTGWSCPLREKTLFFLGTFWGGIENGVQGGGNSIPPPKEKPPLKKTFFWAPRAPGGMGPP

SEQ ID NO: 299118 - protein, 61 aa, Zea mays
  Clone ID: MRT4577_35867C.1.pep
QILADRYAEIGDHGNFGIIHGFGRFGALWVYGQELGSRRILFRAVNGRNWSEQTLSRFHLS

SEQ ID NO: 299119 - protein, 107 aa, Zea mays
  unsure (1)..(107): unsure at all Xaa locations
  Clone ID: MRT4577_35868C.1.pep
YISRIICLEKKKREKKKKKKKKKKKKKKKKKKKKKKKKKKKKKKKRGKKKKYKKIKKXRKGRKKKKNIWGGGALLWDKLFLRGGGGNTVWFARCMLARMPRLLKRLS

SEQ ID NO: 299120 - protein, 144 aa, Zea mays
  unsure (1)..(144): unsure at all Xaa locations
  Clone ID: MRT4577_35869C.1.pep
GRPKKTACFYWKKNNRVCYKPTPRGGGGGGFIPPLNMNIPTKPPTCLGTLPPPPTKRVLTGWAGLMGPLHFTGTLQMLQPQTQKGATRPGLPPAFNPKRSNLLQTDYCWAGSPRGXGKFPRGGPKTWGTHPSFSGGLPNCTRGT

SEQ ID NO: 299121 - protein, 112 aa, Zea mays
  Clone ID: MRT4577_3586C.1.pep
RSRPGRDPLLLPLQISDLAALMATDIGHPPPRGADRNRRPEAKMSLLASTSMETHPLLRISQCRPRSSTYHGCATLTELLRALSLSARIAAMPPELDMNAVQAVRIPGVLRI

SEQ ID NO: 299122 - protein, 74 aa, Zea mays
  Clone ID: MRT4577_35870C.1.pep
MDKLIYRVNKDARKIEFLVGRRSSLGLFTTSLEDPMAIAQHHDAVSGIAKQHTTDDYSKCLALGASKNESINGI

SEQ ID NO: 299123 - protein, 174 aa, Zea mays
  unsure (1)..(174): unsure at all Xaa locations
  Clone ID: MRT4577_35871C.1.pep
LVEAFVICAKLRELVNQDVAVXYNDVNKSDDREKIVVIENTGDLINTHNSFCRPRWICAHTYKARNGHLYRYIHDAHGAFAQTAFYEACALTAAEAMSCGLDTLATLHGGPPEIIEHDLWGCHIDPDHPXQAANKRADXIXRGARDPHHCLTICGARLQRGYKMYTWEICSERL

SEQ ID NO: 299124 - protein, 35 aa, Zea mays
  unsure (1)..(35): unsure at all Xaa locations
  Clone ID: MRT4577_35872C.1.pep
NNIYIFIYYFFFFFXWIKAMKKFRGCLNALELIVS

SEQ ID NO: 299125 - protein, 78 aa, Zea mays
  Clone ID: MRT4577_35873C.1.pep
HPFFLEPTPLFFGWGPVSPRVQNSLNCKVKAPLVLPHSGELSQTTPGWVSFFYKRLKPFTRGSGPMLPPKKKTGIFSP

SEQ ID NO: 299126 - protein, 114 aa, Zea mays
  Clone ID: MRT4577_35874C.1.pep
DVKGGYELVLYLLQGGSRQSVSQHSNPEPRHNVIECQAILQLEQVLWVQKVVLCKNFKDLVRVLSMERAGAGAGAGEGGNARGHGGSGAPGAGTGGEVRPNGSRGEERLHQPSR

SEQ ID NO: 299127 - protein, 84 aa, Zea mays
  Clone ID: MRT4577_35875C.1.pep
VWFGHHLERGVVLQYAALSVTARPGHDVGGECLGEFEGRLKFIGFPAGKPHTDLSTGAFQFAPPPSQRPHPKAARCLEEGREEI

SEQ ID NO: 299128 - protein, 60 aa, Zea mays
  Clone ID: MRT4577_35876C.1.pep
NSTDIQPDNKNRHDAYSTRSKITSGILRASRCRIAPYYSQLCAHYLQTPGGPKTLLHTTY

SEQ ID NO: 299129 - protein, 68 aa, Zea mays
  Clone ID: MRT4577_35877C.1.pep
INLSVAIHAEALQQTLKEKARLLQEQTWFATKSHDYSHNDDVSSAEKAAGKQDLLSIDHKANAKDVQD

SEQ ID NO: 299130 - protein, 43 aa, Zea mays
  Clone ID: MRT4577_35878C.1.pep
SHRLINGTANQGAGNFKRNLDQLIGGRVPFLGWNLFLLKMGFA

SEQ ID NO: 299131 - protein, 159 aa, Zea mays
  unsure (1)..(159): unsure at all Xaa locations
  Clone ID: MRT4577_35879C.1.pep
ASGXXXSXXXXKXXPRLAXAPVQPNSLSPPWMTRQSPXSXTXKXQSWTHPTXSRXNPPTPTPPSLTRXTHLXAQARPTQGNKLLKTXTXXCTLGSLKPSRXPTXPKXXPQSCXXSHQVETXLXHXGIRWLASAPTQPNXWXXGAXXGMXPXNXXRXNQL

SEQ ID NO: 299132 - protein, 122 aa, Zea mays
  unsure (1)..(122): unsure at all Xaa locations
  Clone ID: MRT4577_3587C.1.pep
QHNSVPTTVVYLLWLPMLGGLSACAATATILPQCSQAPIAYILPQYLLPAVSSECENPILEPYKIQHAIGAGMLPLSPLYLQHSXSPIXQHLPFTHLSAQNIXXQQLQQLVLANLAGYYHNN

SEQ ID NO: 299133 - protein, 35 aa, Zea mays
  Clone ID: MRT4577_35880C.1.pep
TYHETTLVQLNMKKCIISMLHRQKKVHLCKVLNFS

SEQ ID NO: 299134 - protein, 239 aa, Zea mays
  Clone ID: MRT4577_35881C.1.pep
MARQLVAALAALVAVCALTAAAGVQAQPPRKLPPNSHMISPGKFGQRSQQLSCKDTNGRKAGCMGKCDKRCPNQCIVLCPSCKTYCMCDFYAGVSCGDPRFTGGDGNNFYFHGKKDQDFCIVSDADLHINAHFIGKRNPSMSRDFTWIQALGIRFAHHRLFMGAQKTTSWNGDVDHLEMSFDDAAIEIPIEAGARWQSAAVPGLTVTRTAATNGVRVHLRGVFDIMGNVVPITEGDSRI

SEQ ID NO: 299135 - protein, 116 aa, Zea mays
  Clone ID: MRT4577_35882C.1.pep
MALRVLLKKSYSQLAGSFSEGGVASLSNALSGGLHPRLAIPNNNGLHGFTARYLNTSPCPRELVTRSCSRTGVNSVNINHIMKSASVRPATGAGRTFSSKTTTSDEPSIESQIKAN

SEQ ID NO: 299136 - protein, 100 aa, Zea mays
  unsure (1)..(100): unsure at all Xaa locations
  Clone ID: MRT4577_35883C.1.pep
GCLVRFLALLLGFVRPVAPLVVPRXVLLLLLRVVALRVCVRAVLFVVAVRVSGPRLRXRGVAGASVCLXARGPPLAXVRVXRSRGSSLGXXCFRXRAAXS

SEQ ID NO: 299137 - protein, 134 aa, Zea mays
  Clone ID: MRT4577_35884C.1.pep
WACPVSSALPVLAVDRRVRTRARRQISRPRRPPTRPAPFLEPRQCHALAPRLISHNFTLSRALPTPPAATGDPRPRSRPCRPPETTPYLLELRPKVRQLSPCPIFPIALCAQLISTSPVLGHGGPPCSRGDRLI

SEQ ID NO: 299138 - protein, 50 aa, Zea mays
  Clone ID: MRT4577_35885C.1.pep
CLLLHFRPSPTQWPTQAYRLRDAWQQLREPRQDLRALAGDQHGCGSEPAA

SEQ ID NO: 299139 - protein, 64 aa, Zea mays
  Clone ID: MRT4577_35886C.1.pep
PPPTVTLSQAAHFSKFYPLPASQDDPPPRLMTPPPKPSAFSPTSFAQLRVKSGQSSAPPPDNIV

SEQ ID NO: 299140 - protein, 118 aa, Zea mays
  Clone ID: MRT4577_35887C.1.pep
SRPAGRNFPNAKTRPPNNYPSNVRTRTQPMAKDGNDRVPPPLMEFDKETDHLGMPCDNDGPQYNPHPCAQLTRDRQHHLDLPLVPPQAPLHPTSTTLSSHPAKLTGEHEDYHESSEIL

SEQ ID NO: 299141 - protein, 139 aa, Zea mays
  Clone ID: MRT4577_35888C.1.pep
PAGSGRAQRSAHPHSAIAWPHAFSGRPCSPRPSLVTARRAPCPVRPEQTANHGIGPQHLGVGRPSSSSSARPCARSSPMANLPSTPCLLELAQAATLPNCTVPALFLQPCIHQSSSLAITHGCLSLAPFLQQAPSLLAP

SEQ ID NO: 299142 - protein, 81 aa, Zea mays
  Clone ID: MRT4577_35889C.1.pep
CNPFVQKKKKKKKKKKKKKKKKKKKKKKKKKKKKKKKKKKKKKKKKKKGGALFKGPNFPPRASEKNLFFLGPQNLIPWPVF

SEQ ID NO: 299143 - protein, 445 aa, Zea mays
  Clone ID: MRT4577_3588C.1.pep
KTLVNEAPWLLTVGASTTDRRFLASVKLGDNVQIDGESLNDPNTTMGDLVPLVRDVSDGLCVNGNVLKAQNVSGKIIICEAGGDVSTAKAKMLKGIGVVGMIVVTPELFGPVIIPRPHAIPTVQVSNAAGQKIKAYIHKARGPTATFVFKGAAFNTPRSPMVAPFSSRGPNRRSRGILKPDIIGPGVNIIAGVPSIEDVDLLRNAEVPRFDIKSGTSMAAPHLSGIAALIKHAHPTWSPAVIKSALMTTAEPNDNLRKPIQDVNGRPANLVAIGAGHVNPKKAMDPGLVYNMTAMGYVPYLCGLNYTDDKVSTIIYPEPPVSCAKLSRLEQDDLNYPSITVILNQPPFTAKANRSVTNVGAASSTYTVEVNVPASVTVEVNPPKLTFKALEEVLNYSVTIKSANGQALTGPVEGELKWLSGKYVVRSPILVTNEAGPSPAETRKP

SEQ ID NO: 299144 - protein, 85 aa, Zea mays
  Clone ID: MRT4577_35890C.1.pep
MTEDQGASRDGVCCRKGAKERQPWVMARELDWCMYGWRKRAGTVQFGKVAAWVSSSRQGVAGEFVMGEKRAQGPPKEDEAGATDA

SEQ ID NO: 299145 - protein, 93 aa, Zea mays
  Clone ID: MRT4577_35891C.1.pep
MGRTPTKGMTEDQGASRDGACCRKGAKERQPWVMARELDWCMHGWRKRAGTVQFGEVAAWASSSRQGVEGEFAMGEERAQGRAEEDEAGAADT

SEQ ID NO: 299146 - protein, 89 aa, Zea mays
  Clone ID: MRT4577_35892C.1.pep
GEGGMKSFPPFLPVNTYDPFSPPPCVFWALFPIPLLRPPNCVFPGPSLNPEIFVGAFKREISPPPKKNFKFHWGFLTPFRGQAPFVSPP

SEQ ID NO: 299147 - protein, 57 aa, Zea mays
  Clone ID: MRT4577_35893C.1.pep
PNIFFNSPSPSQRGGKDQSLGGPKPLNASQIGLRGQLFFYGFSVPNARVPLILKLLP

SEQ ID NO: 299148 - protein, 61 aa, Zea mays
  Clone ID: MRT4577_35894C.1.pep
NASRALTRAYPRKVGKVQPMPSVPGRREGPSVQPGPGGESGSGQNWVGGNKGNPASGWDWN

SEQ ID NO: 299149 - protein, 51 aa, Zea mays
  Clone ID: MRT4577_35895C.1.pep
DGTSSRAGVLSISCADTEEVLRRGHTPSVPIFSASHRTGEPAEAISSDDAR

SEQ ID NO: 299150 - protein, 147 aa, Zea mays
  unsure (1)..(147): unsure at all Xaa locations
  Clone ID: MRT4577_35896C.1.pep
MPPIRPLLSCYAADLASTGMAPMXAWCDXEYCFIEMEKPRXQGPNEEEMIDXYVQSLEXVAXREKDVMNEIYNVSCERYIGLGCXIDEXTSDKLXGVRGDLVEIRDSYVDAXNSDYXADIFLNDEIVQRSPQRRERTHQCLLAAQCR

SEQ ID NO: 299151 - protein, 70 aa, Zea mays
  Clone ID: MRT4577_35897C.1.pep
MQHNIPFMVLPHFASRPVFLNCRNGKNAGFPHLTHLLPNPLFARCGTCNGALTVAASEVLRSVTAKGATP

SEQ ID NO: 299152 - protein, 171 aa, Zea mays
  unsure (1)..(171): unsure at all Xaa locations
  Clone ID: MRT4577_35898C.1.pep
MDDRTYKGGIKAYWKRRGYYRMDGDAARRRQPLPTVELGSGVAQAQAQAQPPAGDGSGRRRRCRGWRVRRGQLGRRLLRALSPRRWLMRLRDAYVSAMLRLASSPAVGYGAGXLLRHGDPRRGGGGGLRAXAQLKEYDEKALVEIYRSILARGGPLAGAPAAATLRLPTAV

SEQ ID NO: 299153 - protein, 127 aa, Zea mays
  Clone ID: MRT4577_35899C.1.pep
MALKAEKKPTGGKAPAKSIEKKAKSGDAKKRKASRKETYSSYIYKVLKQVHPDTGISNKAMSILNSFVNDIFERIAGEASKLAAYNKRSTISSREIQTAVRLILPGELAKHAVSEGTKAVTKYTSSK

SEQ ID NO: 299154 - protein, 96 aa, Zea mays
  Clone ID: MRT4577_3589C.1.pep
GMDSFVWLVGFRTPVFFLLSLRCFWIYRRPLFFLLVGRKLSLPFVLCPALSSFFVVVVAWSGLLVVGLISPFLGPSILCAYWFLLWSGPKVIFAPG

SEQ ID NO: 299155 - protein, 512 aa, Zea mays
  unsure (1)..(512): unsure at all Xaa locations
  Clone ID: MRT4577_358C.1.pep
MQKKKKKKKKRPVLCKKKKKKKIEHRRDRRLRTRLPPRLKPFPLLPIPSVGRRSIPYDDTMRECISIHIGQAGIQVGNACWELYCLEHGIQADGQMPGDKTIGGGDDAFNTFFSETGAGKHVPRAVFVDLEPTVIDEVRTGTYRQLFHPEQLISGKEDAAXNNFARGHYTIGKEIVDLCLDRIRKLADNCTGLQGFLVFNAVGGGTGSGLGSLLLERLSVDYGKKSKLGFTVYPSPQVSTSVVEPYNSVLSTHSLLEHTDVAILLDNEAIYDICRRSLDIERPTYTNLNRLVSQVISSLTASLRFDGALNVDVNEFQTNLVPYPRIHFMLSSYAPVISAEKAYHEQLSVAEITNSAFEPSSMMAKCDPRHGKYMACCLMYRGDVVPKDVNAAVATIKTKRTIQFVDWCPTGFKCGINYQPPSVVPGGDLAKVQRAVCMISNSTSVVEVFSRIDHKFDLMYAKRAFVHWYVGEGMEEGEFSEAREDLAALEKDYEEVGAEFDEGEDGDEGDEY

SEQ ID NO: 299156 - protein, 133 aa, Zea mays
  Clone ID: MRT4577_35900C.1.pep
ARRRPRCNFLRSSRIRVHPTPAASTMPPKFDPNEIKVVYLRCTGGEVGATSALAPKIGPLGLSPKKVGDDIAKATGDWKGLRITVKLTIQNRQAQIEVVPSASALIIKALKEPPRGRKKQKNIKHRGNITFDE

SEQ ID NO: 299157 - protein, 104 aa, Zea mays
  unsure (1)..(104): unsure at all Xaa locations
  Clone ID: MRT4577_35901C.1.pep
NGRSMRRLLLWSPITLTTSRGLSLLEDTLYQKTKYLKAFADVIIEXGGLPGLKAGSGIIQFVWTTKVTTSKCHTHLGKRCIEYYQAPTPYADWQVCLTIGSNKP

SEQ ID NO: 299158 - protein, 63 aa, Zea mays
  unsure (1)..(63): unsure at all Xaa locations
  Clone ID: MRT4577_35902C.1.pep
RWRGQWMGMPSLTQHTPLYFSRQDSYERRSAHIARLHTSTKVVNAFILVPRALLGXHCTIYCQ

SEQ ID NO: 299159 - protein, 307 aa, Zea mays
  unsure (1)..(307): unsure at all Xaa locations
  Clone ID: MRT4577_35903C.1.pep
MASVAEMQPLAPAGYRRAPEMKEKVEASVVDLEAGTGETLYPGISRGESALRWGFVRKVYGILAAQLLLTTAVSALTVLHPTLNATLSDSPGLALVLAVLPFILMIPLYHYQHKHPHNSVFLGLFTLCLSFSIGVACANTQGKIVLEALVLTAGVVVSLTAYAFWASKKGKEFGYLGPILSSALTILVLTSFLQVMPTTSSERNALCISANDALLPDEQSTACTINFYLVLCGIXLQVFFPLXPVSVGLFGGLGALVFSGFILYDTENLIKRHTYDEYIWASVGLYLDILNLFLSILNMLRSMQSDN

SEQ ID NO: 299160 - protein, 46 aa, Zea mays
  Clone ID: MRT4577_35904C.1.pep
TYRSQKLHTTMQLLRSETKTIPNFYIKLHYYEYLRKNSYILNSNLL

SEQ ID NO: 299161 - protein, 50 aa, Zea mays
  Clone ID: MRT4577_35905C.1.pep
EEAPSPSYGTLAISIYRGCWGLVLKCYELRTRQHKMLNVNALRPLKHYLP

SEQ ID NO: 299162 - protein, 106 aa, Zea mays
  Clone ID: MRT4577_35906C.1.pep
ASKNQTTFLFFIFTLCRSATFYHLTHPFRLFLELPRLQLYSNTLEPNRNHLNTIFKMKFTIVATIISMAAVAIAAPIASEQVAARQNHGMCVKSDANGEITQIPNC

SEQ ID NO: 299163 - protein, 69 aa, Zea mays
  Clone ID: MRT4577_35907C.1.pep
SNFHSILGSRASSRCWSHSCYASMLFTIQCKRQGSPLGSPSPKHRCRSCVPSSSTSSYIGLNMSVRTLV

SEQ ID NO: 299164 - protein, 64 aa, Zea mays
  Clone ID: MRT4577_35908C.1.pep
VVHGTIHQSASLFILNLKPSDTKGDKYQQPMLHRFLNSIHLSFSGFFEVTDSTLRLLSLVPPHI

SEQ ID NO: 299165 - protein, 109 aa, Zea mays
  unsure (1)..(109): unsure at all Xaa locations
  Clone ID: MRT4577_35909C.1.pep
VVGVDALDLDVGVDFVSAMLVDAVLVRRSAPSASALYGITRAEPSGEATPLHASLLAGDSCGLLMGSLVLARFYVLSVPDLRTVEAALLSVGWRGGSGGGXXGEAGRRR

SEQ ID NO: 299166 - protein, 148 aa, Zea mays
  Clone ID: MRT4577_3590C.1.pep
PPPPPGFCSWVCPLPRGPPGGGLRRPPELRPGGPSWRAMPSGPLPIGAIELGVPPCGPAGGSYFFLRFFKVYGGPCVCFESVSQLGPMACFGFKIIIMVNGGFVSSPGLLGGFWQPFFFFFWVPPLNGLPLCPFVLGPPPFFFFSPPP

SEQ ID NO: 299167 - protein, 204 aa, Zea mays
  unsure (1)..(204): unsure at all Xaa locations
  Clone ID: MRT4577_35910C.1.pep
WRHRHQIIXGIARGLQYLHEDSQLKVVHRDLNPSNILLDANMDPKISGFGLARIVGRDQQTQAVVSQGVVGTYGYMAPEYALRGNYSVKSDAFSFGVTVLEIISGRKNSAIYNGGKPDDLLDTVWQHWEAGTVVETVDPCMDGGFPEGDVLRCIHVALLCVQGDPAARPAMSSVVMMLGGDTITLQAPSKPMIFEYYQESPENE

SEQ ID NO: 299168 - protein, 84 aa, Zea mays
  Clone ID: MRT4577_35911C.1.pep
QKTPNQLGGGKTKKGLMVPTLWYKKPPKKRTFINFFKRRKPLFLNQNRIWLVNTTQMPCSTKKNLSKIWPGVFKYPPSINPKFF

SEQ ID NO: 299169 - protein, 61 aa, Zea mays
  Clone ID: MRT4577_35912C.1.pep
RLGFFFFIGFFIFFFFFFFFFFFFKPTLINPFPPQISPFFHYFNKNLLKPVITPKIKTPLF

SEQ ID NO: 299170 - protein, 110 aa, Zea mays
  unsure (1)..(110): unsure at all Xaa locations
  Clone ID: MRT4577_35913C.1.pep
MDKIQSDCPYTACFLLXMNDAHPTKRTASVLKYFTXLPSHDDDGQHLPISALCNTSLSHPNDPYFINLRILECMASLIWNGXQNTRSLAHDQNIHMPYHAAHIIGSYTMT

SEQ ID NO: 299171 - protein, 151 aa, Zea mays
  Clone ID: MRT4577_35914C.1.pep
IPGSRRKQVCPCVHQALTEGTIRGTSWGARGPPLFFCVIYRCTHIAGIRSATFWHATCISGRSCNWYFSEFMPRCGGGSMGRASSLPYGGALVKKGLWMPILSKSGPSSGHVMGAMAAGPSVAAAGGSLAGASVSALATSCFLWSMCSPEM

SEQ ID NO: 299172 - protein, 128 aa, Zea mays
  Clone ID: MRT4577_35915C.1.pep
FIPALSLLDMVNPVAYVRQQQLFSYSPLAVHNAPTYSQQQLMQQIVPALTQIIVANLIAYLQQLLPFNQLVVSNCAVYVQQRQQLLDPLAVANPLVDNFLQQRQLLPYNQFSLMNPAMQQPIVGGAIF

SEQ ID NO: 299173 - protein, 122 aa, Zea mays
  Clone ID: MRT4577_35916C.1.pep
SIKKLGSLRKKRNLGPRDKGGGGKSPKRHRQQNPEKKGTQKREAENNKKKLHAKKTPTKQGPKGSGRKPQGPRKGLIGQRKGLTKNRGAGKQGSGTKTGREKNQKTDAGADPGADPWADPWG

SEQ ID NO: 299174 - protein, 64 aa, Zea mays
  Clone ID: MRT4577_35917C.1.pep
IMLIIPTNHCRNETWFTEHNLKIRYRNLLQTTNCSDLKLDPVEEKNGTKEMYSLSTGLSLGSSC

SEQ ID NO: 299175 - protein, 71 aa, Zea mays
  Clone ID: MRT4577_35918C.1.pep
VSESLMHVSMSDIPVLHSVEVAHLYPQVVLPICHGVDRTPYTSTEEERQGSTTRPFQSSASLRTHASADAW

SEQ ID NO: 299176 - protein, 90 aa, Zea mays
  Clone ID: MRT4577_35919C.1.pep
SFFYIVYYCTGIFPPLSVITISTHGIVKHLGGDFTFATGGNGKLYLPDKLSWLQTIKLRPNSAWNSIFAPLLLMNQREILERVIHGLAPF

SEQ ID NO: 299177 - protein, 143 aa, Zea mays
  Clone ID: MRT4577_3591C.1.pep
LTFPPSWATTRSAWSPTRQPPFPARSWQLAVAPLLPVLPVLDAQLAMDARSSLESAVQVLVASLTDDSPARRTSLILRQPRRRLGHRIAVVHQQDAGAVYVSLPRGFALRYRRVFGKNLQAGSHRRSREISNRLDAGDADGRT

SEQ ID NO: 299178 - protein, 90 aa, Zea mays
  Clone ID: MRT4577_35920C.1.pep
NQVAVHLVPFLSMVRSPVHRLSGISAIGNKVVEIPKYPSGRGNQSLNGKNLNMGFHFKHLSFERSAKSIPPPNCLQGFITSSPFLDQPHI

SEQ ID NO: 299179 - protein, 115 aa, Zea mays
  Clone ID: MRT4577_35921C.1.pep
QRPLAGRPPEDQPSRHKAHTNPARRRRPPFAHWLCPSCPRRRSALVSIVSAPGAAVHTCAKEMTTDYIAGSLVRNVQPLCIPAGHIDYLERRHAQATPTQTDTGEGEGEKHRHYV

SEQ ID NO: 299180 - protein, 157 aa, Zea mays
  Clone ID: MRT4577_35922C.1.pep
VHVVECERLTDGRFFLTCVGRDRFRVVETVRTKPYAVARVQVFRDRDHSHHHHHRDLMQQVERHLGNVAALADKLGQKPPPLPYRQGDRRLHTAASLSFLVARLFVDDRREQQALLRMDDAAQRLAREGEYLERRSKYLAALAAIKDAFQHFSCNEK

SEQ ID NO: 299181 - protein, 308 aa, Zea mays
  Clone ID: MRT4577_35923C.1.pep
MALKTPHLPSNFARRPSSHHSFSQWHSPPHHPKLPPRPDPQTRVAIATKPPPPPHVVRKRSTTSTLMRCRDGLGLHGFTDDEAVHQTPEPEDHQTTELPVVTHPSVVFPGATLQLHAFEFRSRIMAHTLLQQGLSFGVVCRGGVADVGCVVHVVECERLTDGRFFLTCVGRDRFRVVETVRTKPYAVARVQVFRDRDHSHHHHHHDLMQQVERHLGNVAALADKLGQKPPPPLPYRQGDRRLHTAASLSFLVARLFVDDRREQQALLRMDDAAQRLAREGEYLERRSKYLAALAAIKDAFQHSSCNEK

SEQ ID NO: 299182 - protein, 128 aa, Zea mays
  unsure (1)..(128): unsure at all Xaa locations
  Clone ID: MRT4577_35924C.1.pep
PNFFXXXXFFFCFFLGVFWRKTQTTQVQFYFVPNKGATVLKILAGFFNLFQFPGVLDMVNSPQPKTFPWGGLVRTTPPLWRAPPQCLFNPRTPFSGMGPFLEQRGNKISPVLVWRREQGVHPTKGPFF

SEQ ID NO: 299183 - protein, 66 aa, Zea mays
  Clone ID: MRT4577_35925C.1.pep
LKVEYNRYRSRCFYEPCSAKEHIQSVIPYAFGMEPRSVYQSMKRFYAGHTCIRLDHQYFSNDTRVL

SEQ ID NO: 299184 - protein, 265 aa, Zea mays
  Clone ID: MRT4577_35926C.1.pep
GQVLRFLRAFLIPQSRQQLLHAVLPSSLPSPSHGSGSFLLALLRAPGTGVFYGARSLLCYPCSFLWGAPISSARRPFPCRAARLRAPLRRAPCAVVSIPRYSSSLLPCAQLLAPSCLLPLGAASRGASSSLLAPPRSFLCSPLAAVPAPWSLLAVRRCSMAELVLRASLGPARISSSAARSVAMAAEHPQLVCSSPLSPSAPLRLVSSPCAAVSQRATFCSVPFAAPLHLSRCSCSDSVLRAAAFHLSARSRTARRTFPRRPSSV

SEQ ID NO: 299185 - protein, 34 aa, Zea mays
  Clone ID: MRT4577_35927C.1.pep
GQKFFNLKIGFWLKGVEPPQKGPSPLKGASPETY

SEQ ID NO: 299186 - protein, 178 aa, Zea mays
  unsure (1)..(178): unsure at all Xaa locations
  Clone ID: MRT4577_35928C.1.pep
VHASRRAGVGPETGVLVVGAAPIGVVSLLAARXFGAPRVVVVNVKEHRLPVARSLGANAAVRVSPRAKALANXVKRIGAAMGWDIEVSLDCAGLTKPMSRALKPTGPAGKLCLVGXGPHQITLALTAAAGPEVERGGVFGXQDPWPCDHFCQGKWTQALITPVRLSQRDVEEASRSAP

SEQ ID NO: 299187 - protein, 179 aa, Zea mays
  unsure (1)..(179): unsure at all Xaa locations
  Clone ID: MRT4577_35929C.1.pep
HLCPKFAHNCYNPGKEGGSDGGACDHQGAVHQPPLSPMITAGSQYIFXDGNAMSTCYQVXKATDTNRXSATPATVVITYLCTDSTCQLEPVHLDLSGTPFGGMWTSGQADMIRNSGRLQVQNTRVTCNWNGLDIAFRVDTCSNANYLGMTIXYESGDGDLRALQLKHSGXATCASMQRS

SEQ ID NO: 299188 - protein, 113 aa, Zea mays
  Clone ID: MRT4577_3592C.1.pep
RISKCLIQSQCILTTTKKLSQLIYLTVLLINQKTGVASIQAIRNFTRTAVTSCFKIFTEHPTIAKGEQARQGHRYCSDVLLMHHDDAMSETTTRLTQDQAHASSWGVIGERGD

SEQ ID NO: 299189 - protein, 187 aa, Zea mays
  unsure (1)..(187): unsure at all Xaa locations
  Clone ID: MRT4577_35930C.1.pep
SPPLPILQKSRHGRPPWCSPQPRSLHGRLQLPGAPAPPCSSLVLRAPSSAALLLPSPWRACSLDGARIPPSRPSPSRPARPAATSSASAPPLLLWWRRSDLPGASPYSLSAHGVAQPNRACSLPVLAMVVASKLLPAARAAVPLCSPRRVELPPRVLFLFARDARXXACXXXXATMCHAXSNGGKCR

SEQ ID NO: 299190 - protein, 270 aa, Zea mays
  Clone ID: MRT4577_35931C.1.pep
FRGRVQFLLSGMKPWWVAKFTPFFRQLTRYDVIDVDNDQEVHCFPRIVVGATFHKDMGVDPRRSPGHVSVVDFKRALRRAFGLPREAASRGGATGRGKPRLLIISRRGSRRFLNEREMARAAAGAGFEVRVAEPDQHTDTAAFAALVNSADVMVGVHGAGLTNMVFLPRGAVLVQVVPFGGLEWLTGVTFKDPAADMEVSYMGYDVTLEESSLIDQYPRNHQVLTDPYAVHKQGWDALKAAYLDKQNIRMDLDRFRATLREAMSRLPPAP

SEQ ID NO: 299191 - protein, 49 aa, Zea mays
  Clone ID: MRT4577_35932C.1.pep
LAFIFIICNQLRLWNDYLLSYDQVEVFYLPLACKEPGLLSVSLWAFFLK

SEQ ID NO: 299192 - protein, 141 aa, Zea mays
  Clone ID: MRT4577_35933C.1.pep
LSYWFGSRRQALAKLGPATYRHRRSAKMLLRAKPLGAKLLLRAKLLPATRTSAPPTPSWVYDGNVHPRPTGGPKTRSPQSSKSLRALSSFFCQEKMRLLTLVLSRGASYPPVDFGFILPGQDKLDFVLRRMISCEKSSLSF

SEQ ID NO: 299193 - protein, 50 aa, Zea mays
  Clone ID: MRT4577_35934C.1.pep
QHKAVEKQYIPLPICMLNFHKEINELLLKDPHIIEIRPLWGRGGESYFKG

SEQ ID NO: 299194 - protein, 62 aa, Zea mays
  Clone ID: MRT4577_35935C.1.pep
VMRCLEEESNGEQAHFVPCACLRILPLCANWPYSMNHTAILKTLSETRMQHVINEKHRLALQ

SEQ ID NO: 299195 - protein, 63 aa, Zea mays
  Clone ID: MRT4577_35936C.1.pep
SFTKPVGVSPTSPHWGGPLLDSPFGTVQTSSFIPQVLCSPIYQSGHLPYTIFNIKKPPIKKIY

SEQ ID NO: 299196 - protein, 81 aa, Zea mays
  unsure (1)..(81): unsure at all Xaa locations
  Clone ID: MRT4577_35937C.1.pep
TRPDTIFGATYLVVAPEHVLLSSLTSEEQRAHVEEYRELSARKSELERTELQKEKTGVFSGSYAKNPATGXIXPIWVADYV

SEQ ID NO: 299197 - protein, 226 aa, Zea mays
  Clone ID: MRT4577_35938C.1.pep
MAPSANGRLQRFLTPDGPKAGMDMDGHARDGEFLLYSVNCVVLRTHCSSFCIKCSDEALRRLAQNTKAAQKIRLRKKVSTRSSPVLWCLHPVARDKPHEAIAGSQLELELQRARQQTYIFGALDFVGALFERTGCTRPGTGLNGSMGDSTLGYTCPIDPNQALPSALVVCPMAWQVQVQAAPLTARWPVCVVSGVAAFEIDYSHWMDEQKRHTAELTSTLLGSRFK

SEQ ID NO: 299198 - protein, 234 aa, Zea mays
  unsure (1)..(234): unsure at all Xaa locations
  Clone ID: MRT4577_35939C.1.pep
SFLHDAENQVIYRDFKASNILLDSEFNAKLSDFGLAKAGPTGDRTHVSTQVMGTRGYAAPEYVATGRLSVKADVYSFGVVLLELLTGRRALDKSKPLTEQNLVEWARPYLSDKRRLYRIMDSKLGGQYPKKGAHAVAGIALQCIRNEGKMRPAMSEVVEKLEQLQDPRYNVAAPPQVNTASSSSXSGSVVPRSPRKAQPSPRRLSGSASPLPAPATGSPLPGSSRSSSRTAQVH

SEQ ID NO: 299199 - protein, 59 aa, Zea mays
  Clone ID: MRT4577_3593C.1.pep
LSLIQEFFRWRGMGVQNTCVGIFTCPCIIGSTFFPHSRRLHLLFLVFTSPGLLTWNAPH

SEQ ID NO: 299200 - protein, 106 aa, Zea mays
  Clone ID: MRT4577_35940C.1.pep
RVRGCRYQTGCKAFALVNSTSHVQLCRYIKSEQIAESDQFHQHVLSLLRLKRVPFPSIIFIFQYCSLLATHQNLLQPYQPLVAFFLRCPYIALAAHKSVSSVTHGI

SEQ ID NO: 299201 - protein, 108 aa, Zea mays
  unsure (1)..(108): unsure at all Xaa locations
  Clone ID: MRT4577_35941C.1.pep
LFITAIVDTDTANHGDASHILTQLLPLNDSTRYVASGSTTAYNLLPFNRRAALNXSDAYXNNNNHSCRIVAAYPQXCLPFNQIAIMNSAAYLQKQQLLPFRQLADVSP

SEQ ID NO: 299202 - protein, 261 aa, Zea mays
  Clone ID: MRT4577_35942C.1.pep
MAMDAAVAVKSGGGGAGSTGVTAAASQSPQAATNGGERRSRFQRICVYCGSAKGRKPSYQDAAVELGKELVERGIDLVYGGGSIGLMGLVSHAVHDGGRHVIGVIPRSLMPREVTGEPVGEVRAVSGMHERKAEMARFADAFIALPGGYGTLEELLEVITWAQLGIHKKPVGLLNVDGFYDPLLSFIDMAVNEGFIKEDARRIVISAPTAKELVLKLEEYVPEYEVGLVWEDQMPPSAVAVAAAAHGFAPELVEPGITSSS

SEQ ID NO: 299203 - protein, 98 aa, Zea mays
  Clone ID: MRT4577_35943C.1.pep
AGRRLRFPSWKTASLCAPLYLGLFVPWAPPAFPFFLPHRVIGGVSGGAPFSPGRLSARVVPLHWCRWRVRFDGWPRSVISPQGVCGRWVFPPPCLFFL

SEQ ID NO: 299204 - protein, 87 aa, Zea mays
  Clone ID: MRT4577_35944C.1.pep
GHLICFANILSAVFLRKTTALKVWRTRFWAKVTPHNSYPSFSSLHNANTTCSRDEAYLIKLLRLVPGQIQKLGCQILRDRGPHDWGS

SEQ ID NO: 299205 - protein, 179 aa, Zea mays
  Clone ID: MRT4577_35945C.1.pep
MAMATSSAYPPPPPFYRLYKDFEQDPSSAPEPPPPIEGSYQLFGATYTTDVVLPSLEDQGVRQLYPKGPDIDFKKELRTLNRELQLHILELADILVERPSQYARRVEDISLIFKNLHHLLNSLRPHQARATLIHLLESQIQRRKQAIEDIKQRREEAQRLLGESLVIIEGSQQQVMTPM

SEQ ID NO: 299206 - protein, 40 aa, Zea mays
  Clone ID: MRT4577_35946C.1.pep
RNEIKFGITMVFTVIVFKNVVHWTLFCGPYSMFHYVSWLC

SEQ ID NO: 299207 - protein, 176 aa, Zea mays
  Clone ID: MRT4577_35947C.1.pep
QPLPISLVVTPQLLCPLLWCPTNFPAPLASCSHGVRPCSTPPRPASRPVPCPVHGRVLLGSLPSARISVMPSSLSPLCISLSGGTHLPAACNPSRLQSPAPCSLPTCRTVPSSLARASSSASTAPCVAHRAAARPLPNSWSRPRLAATAAPTAVPGLLPCARSASSPSSSLRAEVT

SEQ ID NO: 299208 - protein, 105 aa, Zea mays
  Clone ID: MRT4577_35948C.1.pep
RHKPLFFWGAGQQIYILAFTNSGELDRMVQPRLIPITGLPNPKDTGIFFFFLGSINRGRILHEAQKGNLNFWKMTLNAPIHPGAILGTKKKNWCSGRGDARIGTH

SEQ ID NO: 299209 - protein, 117 aa, Zea mays
  unsure (1)..(117): unsure at all Xaa locations
  Clone ID: MRT4577_35949C.1.pep
LFFWLPPKFNFTGAGFNNVGDWEKPXGVPQFNRFEKNPLFPSWVNTKKAPPDPLSKNLPTLNGKWNPPFTGPLTPGGGGVPPRGTVTFASPLAPVLFVFFLSFLATFPGFPRKFLIG

SEQ ID NO: 299210 - protein, 86 aa, Zea mays
  Clone ID: MRT4577_3594C.1.pep
SWQWGDQHEVCIVELGGASDSGCFSRPRKRSDPAPAALGIAIGWSGGRQELGVPSADLIRPAGPALSFPLSRARSCSTGSAAVRPP

SEQ ID NO: 299211 - protein, 56 aa, Zea mays
  unsure (1)..(56): unsure at all Xaa locations
  Clone ID: MRT4577_35950C.1.pep
AVLRIRHKFALMFSKCSFVRWXVCKCMQDGXFSQARDALAAFEKDYKEVGVEGANP

SEQ ID NO: 299212 - protein, 53 aa, Zea mays
  Clone ID: MRT4577_35951C.1.pep
YVEGSPCRSRSKSSAWNAFFFSAAHQIVRDSMRKSECVTVGCHKWSCLSSGLK

SEQ ID NO: 299213 - protein, 70 aa, Zea mays
  Clone ID: MRT4577_35952C.1.pep
QESARQNQSNGPSVNKSKGSSGRQRGNDPAFDSNAPGTRRAGPEPEEAEHLPEPARQEDKPKRQPPADQA

SEQ ID NO: 299214 - protein, 93 aa, Zea mays
  Clone ID: MRT4577_35953C.1.pep
KTPWRSRGMPDKDLEGDDDKGPERDSCRIGLSCQAFKMDQIKADMNNGVLRVTDLNSKDEEHHDVFEIKIDYGVCIGWGLLGVLFAIHICPYP

SEQ ID NO: 299215 - protein, 166 aa, Zea mays
  unsure (1)..(166): unsure at all Xaa locations
  Clone ID: MRT4577_35954C.1.pep
PQPPHPXPPKXSPNQPPSQPPPXXTPTAXPPARTPHAPQTHPSEPHPPPPGTPPRTPPHPPPPPNHPQPPTPQAXXPPPRPPPPPRPNSPGXPPXXXTHXPXXAXPPIPXPGPKPDQPTAPSTNPXQXPQNPPPPTNSXGKPAAPAQARPXQPXPRTXXPQSXGQT

SEQ ID NO: 299216 - protein, 84 aa, Zea mays
  Clone ID: MRT4577_35955C.1.pep
SIFPTFRRMMDTGSMLGPAAVHRYLWHPVLFALLYLIVVVPFMGHLVSTLMFVVQWGEKAETLIKAPPKKIKGGRRLRGSSNQE

SEQ ID NO: 299217 - protein, 137 aa, Zea mays
  unsure (1)..(137): unsure at all Xaa locations
  Clone ID: MRT4577_35956C.1.pep
MASSTATLRSPGRIRSWARWRTTAAGPVSTTSCRSSGDGPAGPPEGSDVTAAVFNLATSIIGAGIMALPATMKVLGVAAGLVSILVMGVLSEITVELLVRFSAHCRALSXGEVVHRAMGRPASIVXQMCVIINNAGV

SEQ ID NO: 299218 - protein, 73 aa, Zea mays
  Clone ID: MRT4577_35957C.1.pep
ASYICCVFFFDHFSFSFFFFLIFCYDLFFFFSNNINPGGKKKTTGAPIKWGGLLPLHLGIDSNQWHPSDFFLR

SEQ ID NO: 299219 - protein, 95 aa, Zea mays
  Clone ID: MRT4577_35958C.1.pep
TQARTGKLAFGSPWLRWNGAGLVCPATRRGAQLVLEEAGYDYKIGPMNFGTGQHKGQSHHRRNPCWSPSNSGGWGCSPLEANHCASVRWQGQPCP

SEQ ID NO: 299220 - protein, 199 aa, Zea mays
  Clone ID: MRT4577_35959C.1.pep
MPSAATPAISKAGITTSATGERHIPSSVRPDGSIRKEIRVRPGYRPPEDVELYKNRTAEGFRNRGKSGVPGAETITKEDETNKMSPAANKNAKRREARKKAAASASDSKEEPKPGSTENKDKDEANPEPGKVFDPEAEKEKEAKKLAKKLRQARELKDKKEKGDKLLPEQFEKVIKINELIRQLDTLFDPQGERKKSET

SEQ ID NO: 299221 - protein, 193 aa, Zea mays
  unsure (1)..(193): unsure at all Xaa locations
  Clone ID: MRT4577_3595C.1.pep
TIRRGWAELSEPQTLLTWRXQTAILSPXNCSXGLXCSYPTLNPQVEPYSVHRKMLLAQSKTAELLHLPYWHHYTRLRLRGGPTGIINIRNIXVDKQNEASDXNLPMXWLIEPMAXNLTPHAALTTDKXRPPLFMDKRNETLRSSYYMITFNYCTLLRSXQLMVSTNYXPVLKLTYMPLEXYRPDGKPIGPPMG

SEQ ID NO: 299222 - protein, 91 aa, Zea mays
  unsure (1)..(91): unsure at all Xaa locations
  Clone ID: MRT4577_35960C.1.pep
GPEGGGNGVGDYRMHMRRWGPNKCFHRRARXXELLIGGHRQIERRGSEGVCDPGERFCVASRGRETGCAYGRPPPPLSKARPAEREGRKNK

SEQ ID NO: 299223 - protein, 70 aa, Zea mays
  Clone ID: MRT4577_35961C.1.pep
FCFRLRLLCGLVSGYLFLPGARSGLAYAQVGSALGSFSHDTQCDRNRPKKRQKKKKKKNKKKKKKKKSLS

SEQ ID NO: 299224 - protein, 246 aa, Zea mays
  unsure (1)..(246): unsure at all Xaa locations
  Clone ID: MRT4577_35962C.1.pep
MAPSPSPPPPASGAQYAHQFLNTALSQRGPSALPYAEDVKWLIRNHLVALADAFPSLHPKAALFTHNDGRAAHLLQADGTVPIHHAGATYNLPAVIWLPETYPRSPPLVFLSPTRDMLIKPHHPLVDRSGLVANAPYLRSWVFPSSNLLDLVRSLSHLFGLDPPLFTRSVAAPSPTPPPAHPAPPPAAASPAMRPEAVYAPVPRPYRFPXSPQLAARQPPTEDPAEVFKRNAISKLVDTAYADAAA

SEQ ID NO: 299225 - protein, 97 aa, Zea mays
  Clone ID: MRT4577_35963C.1.pep
SRPAGDVTISPCSPSSLRPPLTIPSPDSARPRRGHKEAISRCFTSLRKDTGTPDKVMRASALLVLEPWLTQELHSKGDCEICFKTNQLMVYRRDTIT

SEQ ID NO: 299226 - protein, 38 aa, Zea mays
  Clone ID: MRT4577_35965C.1.pep
TGSGLQSSWDLGRFAALCHHSSWTPFTPVTKALLPDPT

SEQ ID NO: 299227 - protein, 66 aa, Zea mays
  Clone ID: MRT4577_35966C.1.pep
GETRGYSTFVCHAAHRLNQRVLSRRTHHDHQDFKPPPKGPSRPAEEDVRLNKSPFKREPVNAMDGK

SEQ ID NO: 299228 - protein, 108 aa, Zea mays
  Clone ID: MRT4577_35967C.1.pep
LGTSRPAGTGRRAPPPREESHSTALKAWHHGPSQHRVLRRHRFQLFLSSLLSCPPRALILDARSPPRGVSLRHLIHGVHHRRWLPVVIYPGVLLHVSFEPQAEEHRPD

SEQ ID NO: 299229 - protein, 127 aa, Zea mays
  Clone ID: MRT4577_35968C.1.pep
CALRFRLCMFVWNCARGSIFHGSGLCAVWRRARIRLPLGTPGRLLCPVLYSPALLCQPGGLWGPFWFSPAVVFRAAPLFVPARVFAFFLPAAFSPPPLYWCVAWLCPFSCLGFEGFRCWGFGFKTQK

SEQ ID NO: 299230 - protein, 86 aa, Zea mays
  unsure (1)..(86): unsure at all Xaa locations
  Clone ID: MRT4577_35969C.1.pep
FLPLWLLVVAGFSSSFPLRARLSPLGLGVPLWVGVFFVLCVLPLLYAGRPLRVAFPFPCSRSLFWGLSCFVRPLPQTXXGRPGXSG

SEQ ID NO: 299231 - protein, 110 aa, Zea mays
  unsure (1)..(110): unsure at all Xaa locations
  Clone ID: MRT4577_3596C.1.pep
MRVLLGALALLAFAASATFTHTSGGWGCQPPAAVHLPAAVHLPPSVHLPPSVHFPPAVHLAAAVQLAPXVHVPPPVHLPPAPCHYPTXRPGLXPYSQAHPCPCQQAHSSP

SEQ ID NO: 299232 - protein, 124 aa, Zea mays
  Clone ID: MRT4577_35970C.1.pep
MSRNNGKASKLELLRMGLSRARGGPSATARPGGGDSGSNGRATTSPRRVSSSSSSTASPPSSCVSSEGSPDAAAAAPAPMVLAGCPRCMMYVMLSREDPRCPRCHNAVLLDFSEGDQRRPRQRR

SEQ ID NO: 299233 - protein, 129 aa, Zea mays
  Clone ID: MRT4577_35971C.1.pep
MSRNNGKASKLELLRMGLSRARGGPSATARPGGGDSGSNGRATTSPRRVSSSSSSTASPPSSCVSSEGSPDATAAAPGGGAPAPMVLAGCPRCMMYVMLSREDPRCPRCHNAVLLDFSEGDQRRPRQRR

SEQ ID NO: 299234 - protein, 49 aa, Zea mays
  Clone ID: MRT4577_35972C.1.pep
RDACFTRVTSGLPVGPRRQPTACARGGGTNRPRSEKALVSWVELIWWPD

SEQ ID NO: 299235 - protein, 50 aa, Zea mays
  Clone ID: MRT4577_35973C.1.pep
MTKRTKKAGIVGKYGTRYGASLRKQIKKMEVSQHSKYFCEFCGKLAAKII

SEQ ID NO: 299236 - protein, 221 aa, Zea mays
  Clone ID: MRT4577_35974C.1.pep
MDGLAAPSPSHSGATSGGGASHRKRKLPPPSLSDATADEDDDTTAPSSPATSLSSPSRPSSPSSSHSDEDDDDSLTTFTAARLDAAPASSSGRPPKPDSSSASAVTAAAPKPDAASAAAGDGKEDSKGLFTDNIQTSGAYSAREEGLKREEDTGKLKFLCYSNDGVDEHMIWLVGLKNIFARQLPNMPKEYIVRLVMDRTHKSMMVIRNNNGVGGITYRPY

SEQ ID NO: 299237 - protein, 183 aa, Zea mays
  Clone ID: MRT4577_35975C.1.pep
DLEPAGPFSTLPSRLRAPEPIKVASTWMLPARRRYLIDSRGRMLVLARVPPRRSACGEGRMRVGSFRNSGKIRGYATRQTARTRRTIQIAMTLDPTYLRRSLCGVLYVLRHGTWPESSPFHFFACTASPAGELASLHRELAAAFPTLPAHRASLRLHASSRGNILLVAAIRRSTRPSATTAIY

SEQ ID NO: 299238 - protein, 94 aa, Zea mays
  Clone ID: MRT4577_35976C.1.pep
SCCSREFGATFPKLDSTAHSSLGKAQPARRVSSAGLTPVRGRSSGSRWAAAEGWAILSASRGDPGSSKLLRFPSSGRGTSSALEHSAGTSPGLG

SEQ ID NO: 299239 - protein, 95 aa, Zea mays
  unsure (1)..(95): unsure at all Xaa locations
  Clone ID: MRT4577_35977C.1.pep
SSTPAPEGSSQLDFISRAKAXXAFALATRRPWRELWDPRALFVPRGFSDGYRRARANLAHXGRQYALVVLLVDFASXVWRAGSMLECLACFAGWL

SEQ ID NO: 299240 - protein, 39 aa, Zea mays
  Clone ID: MRT4577_35978C.1.pep
IQPLFFPQKKKKKKKKKKKKKKKKKKKKKKKKKKKKKKK

SEQ ID NO: 299241 - protein, 145 aa, Zea mays
  Clone ID: MRT4577_35979C.1.pep
DTLAGVAIKYGVEVADVKRANGLTIDLQMFAHKTLRVPLHGRHAPPSPPSSSPSHAAREWTKNAASLDPLLNLKPPRSTVSPSMSLLLQGCHGLTPAPKGDLNLTDECAQGHHRKAGSLSSTFVPRRSRQGLALRPKSGGRADTN

SEQ ID NO: 299242 - protein, 60 aa, Zea mays
  Clone ID: MRT4577_3597C.1.pep
AMYGGGGDKRHCKINYRREDIYWKLQPVLVSGMSRKRKRCPFMYKFVFGNPELPNFKDQS

SEQ ID NO: 299243 - protein, 312 aa, Zea mays
  unsure (1)..(312): unsure at all Xaa locations
  Clone ID: MRT4577_35980C.1.pep
DTLAGVAIKYGVEVADVKRANGLTIDLQMFAHKTLRVPLHGRHAPFFPACWCPSHAAIYGLKYNKIEVLKISPDIRLLFNAXHHKILDGAXHVSDVRPFTTWFCFREWTKNAASLDPLLKLKPPRSTVSPSMSLLLQGCHGLTPAPKGDLNLTXNALKVYYRGAMAXAGSKGGLNLAPLDDPPPGHHRKAGSLSSTLLPRRAGQGLALRPKSGGRADTNGIQQDLLAAWVPSYGDGLRAVKRSSSAPEFQDSDSVSLASAWLKSKWNLKPDYAFTLALFDGISKPLLDSIPKPLLDNIPNSIVAWRNKAARD

SEQ ID NO: 299244 - protein, 75 aa, Zea mays
  Clone ID: MRT4577_35981C.1.pep
THWATATTNAKVRDHAGHLTGPFGRAYMREEMRLACLCACMWRCRRIVKSQVNTHRIPRSCCWACCQGDAAGQTT

SEQ ID NO: 299245 - protein, 34 aa, Zea mays
  unsure (1)..(34): unsure at all Xaa locations
  Clone ID: MRT4577_35982C.1.pep
HPXKTCYHKRLXGTSLTLTTPLLPLPLLGKVVIH

SEQ ID NO: 299246 - protein, 36 aa, Zea mays
  Clone ID: MRT4577_35983C.1.pep
ISRTSMMMSEWNMRQDCITFALPESYIYVGNLIDEF

SEQ ID NO: 299247 - protein, 68 aa, Zea mays
  Clone ID: MRT4577_35984C.1.pep
STQKVQESFYMDKRLTCCKTQSVAQFKDVRDYILSECPIELSTLLSEVKQEPFNLSDHYEWVTCDINF

SEQ ID NO: 299248 - protein, 71 aa, Zea mays
  Clone ID: MRT4577_35985C.1.pep
GLLHAIGRSVPVPERPVDIVVTGICLALPFFFVLQHIPILSGGGLSSLPALIFFPGGGAASMSIALALFFR

SEQ ID NO: 299249 - protein, 56 aa, Zea mays
  unsure (1)..(56): unsure at all Xaa locations
  Clone ID: MRT4577_35986C.1.pep
PTXPEADAATGSTRTRTQRGEPPTTEDFRSQQADVAVTLGAPNYNGRHPCSDTTDN

SEQ ID NO: 299250 - protein, 89 aa, Zea mays
  Clone ID: MRT4577_35987C.1.pep
MTTSPRVWLLAMALALACVLLVRSADAAAEASPTPGGSTYGCNPATDKSCKPEGVGVVLPGGGIDLDGDGDEDELPQFQPHLMILGHGH

SEQ ID NO: 299251 - protein, 104 aa, Zea mays
  Clone ID: MRT4577_35988C.1.pep
IRKKNFCPNKREKSYLFMLQTKGKKRAVRTPTTSLQQTVSVRGTGARGSAVIGEALKPAVTGGRPKAPGGARGPPPPGTRSFSEPAEGSPVSPNAFPGGLTPRP

SEQ ID NO: 299252 - protein, 96 aa, Zea mays
  Clone ID: MRT4577_35989C.1.pep
IKNLQGAHGFTLFSLYKNCTQKKLGKKGFKEEKGKKGKKPRRKNPFKLWQGFATKKKKKKNGQSLISGYAFGSNFKQDELEIIWITDPFARRRGLY

SEQ ID NO: 299253 - protein, 156 aa, Zea mays
  Clone ID: MRT4577_3598C.1.pep
RLTPATKFSVPLPHFFLVNPTSSYSSEKNPKMANHLAHLIACLVPPINSATGTYTATEYSLASQVTRTINTSTTASSSQRRRHEAAEQRGEQGHVAVGEVPGVQGRRRVAEHAPGARIHATEPGRVPRLELRGPGAAAVAAAGCDGPGAAAAHASA

SEQ ID NO: 299254 - protein, 62 aa, Zea mays
  unsure (1)..(62): unsure at all Xaa locations
  Clone ID: MRT4577_35990C.1.pep
PNEGREEGTPRKRNGRALRIGPPPRLRCAAVLSVLVRARAVWCGDGGQTARGXVTPGPAGLE

SEQ ID NO: 299255 - protein, 123 aa, Zea mays
  Clone ID: MRT4577_35991C.1.pep
MALFGSKEKDRRRRPRTEETPPSSSSLTVAMDGDAFDLNSQAPETDGFPGLQLYGNILSDSDGLFDGRASGSVLPSYRPPRATQEFICVICVWEKPHKSLPHKIRIRKDLNETNDYKIAFIVN

SEQ ID NO: 299256 - protein, 38 aa, Zea mays
  Clone ID: MRT4577_35992C.1.pep
EKFWVLQRGHTGLVNRSNPRQRMVEGQQNGLMLRRHQS

SEQ ID NO: 299257 - protein, 59 aa, Zea mays
  Clone ID: MRT4577_35993C.1.pep
KFRFTRMNNTTCNEKLYAVVMRPSASEMQTVCGVTQVAIVYLTTMMVSFICTQGGYNRS

SEQ ID NO: 299258 - protein, 74 aa, Zea mays
  Clone ID: MRT4577_35994C.1.pep
HASGATAPYSCIPTVNSLLGWRINNGAFISNCKRMRHSEIQLLTNRRRLLHRNASCYLLMCNFKQFTPCLILLN

SEQ ID NO: 299259 - protein, 78 aa, Zea mays
  Clone ID: MRT4577_35995C.1.pep
ASAQARDISATSTSRSTRETCTKSRTLAMRGSTPSSLATHKKGPDYLLDHTHMTHPETITNHTSLTYTVLTTRSMALV

SEQ ID NO: 299260 - protein, 56 aa, Zea mays
  Clone ID: MRT4577_35996C.1.pep
YWPNCGGKKFLGKCGSEARYRVRSGVRASAIGRLKRGEISVWLAQNKALRPIYATA

SEQ ID NO: 299261 - protein, 51 aa, Zea mays
  Clone ID: MRT4577_35997C.1.pep
SICSKLKLGLSWWVRARSVLCGSFGGCASAVLSLGAGPASLRLSCWGGGGG

SEQ ID NO: 299262 - protein, 69 aa, Zea mays
  Clone ID: MRT4577_35998C.1.pep
MATAEAGPPTRSAISHEALRADDASSSPSASPLVNVSGPVLHSQPLMKMPMQSHQHAQGSTLRFVSRLR

SEQ ID NO: 299263 - protein, 55 aa, Zea mays
  unsure (1)..(55): unsure at all Xaa locations
  Clone ID: MRT4577_35999C.1.pep
LLPLTSTTTTPAVPTAGXYRLIDSPRSNXFNSGIDRTSVVTQMTSCSXLTPYIHR

SEQ ID NO: 299264 - protein, 43 aa, Zea mays
  Clone ID: MRT4577_3599C.1.pep
ECNKDFCIIFKKGMIYFMIDVLMHMLEKYLVNVQYLRKNKKDV

SEQ ID NO: 299265 - protein, 62 aa, Zea mays
  Clone ID: MRT4577_359C.1.pep
MCNLDKYLPCRSKWFINLVRHPRNYERDWSIRNGLASLARCRREGDSTERERPGSGPAGRVG

SEQ ID NO: 299266 - protein, 185 aa, Zea mays
  Clone ID: MRT4577_35C.1.pep
PAGPGPLALAQTHTGKESERWVGFDRRQGRGRAWVGGHQQNSKFDFCLLAHKMEGLTTNTLRRCCSLPCTASSLAPHRLPSTYPLSFSLSLWFCIIFFPAFFSQYKSYTNLAVFAPVLINTAGPCNRVYNNSIVMTAVKHPHHLIQLSGFSQPCKSAPPFVRVWCWLLRLRCPELLPAEAEQERN

SEQ ID NO: 299267 - protein, 187 aa, Zea mays
  unsure (1)..(187): unsure at all Xaa locations
  Clone ID: MRT4577_36000C.1.pep
MASAPRPSRRRRRVSCGRSVSPGTPRPGPRPCYRRXCTDDDPVRRRHASSCGXAPARPRSRRRRRRPPPSPSRGGIPRAGTRRPGSWTSPGSSPAGTRAQEPPAXRRLPGRGQHKRARPRRRRLGSRRSSGARGERAPDVRXRRSPRPCPLGGSSAPRRRLLRAAPARSGGTRAPSPPXPRGPRHCA

SEQ ID NO: 299268 - protein, 139 aa, Zea mays
  Clone ID: MRT4577_36001C.1.pep
RATTGWCGCYNPCWASCNLQGVVTTSTGRRDGGAHEMLQPLRQELQPPPDFAGTSDSGELQGDHGGECCNHDQVCWNRLGDLLEPAPKSASTGIRSFCTSDFLLPPQFCFAGTNIQKCFHQNLFFLYQRLFATTTILFC

SEQ ID NO: 299269 - protein, 42 aa, Zea mays
  Clone ID: MRT4577_36002C.1.pep
LAGFRHILFEILTKFSKLSNFHLPFNVSPFFLQSTFRGLFSF

SEQ ID NO: 299270 - protein, 159 aa, Zea mays
  unsure (1)..(159): unsure at all Xaa locations
  Clone ID: MRT4577_36003C.1.pep
MARTTRSAATERAYLHFAPTSPLAGTGEDFDESDIWGAFAPSAAAPAAEAPPPRAARPFVLAAAAGKATKPAAPAHGSLPVKIPDWSKILGDEYRXRGIPPRXDWEVDDADDDGSVDALVPPHELACRRRAASLSVNGVVGRTLKVRDAVWKRTTGFQD

SEQ ID NO: 299271 - protein, 162 aa, Zea mays
  unsure (1)..(162): unsure at all Xaa locations
  Clone ID: MRT4577_36004C.1.pep
HWDPRGRPGLDRDRSTPITYIDXMNSSPVLADNNVKYHEPEYWKFRILTNNXFPHATVHIYAISKDLATYISINAPILHKYANXEHAPIGSSIIXGLEVNHIHERNMCXELHHICEWKGHIAHDCVASFDWSCSGICKSVDRIMRCTCSAAENGIQHLRSVS

SEQ ID NO: 299272 - protein, 51 aa, Zea mays
  Clone ID: MRT4577_36005C.1.pep
SQASFGMNLRHWGRKTMIINLLPCTMCDQTNGCNPLTNTPKMHLYILSSLQ

SEQ ID NO: 299273 - protein, 270 aa, Zea mays
  Clone ID: MRT4577_36006C.1.pep
MRVSCFFVSVAVIFAQQASAAPILGLTTLPLIEGHSGVTSSLSNTLQPVPLVGTLTDNVLKGTSEGDLISTTELTGSDLVNDDIHLGEIIHPLDKRAEGLPLVGSLPGLGMLGGSSGSSGVSSMPGLSTLSSMPGLSTLSSMPGLSTLTSMPGLNQLSSLGGIQGKNPLGGLTSALPLGGFVKRNYGLGSLPLIGSLPVIGSVTSMPGLSSLPLISSSSSDSSTSSDTSTQLTSSDTSTTQSSSDTSTSGLGPVSSILNPFVSGFGSSFA

SEQ ID NO: 299274 - protein, 61 aa, Zea mays
  Clone ID: MRT4577_36007C.1.pep
MVRVATYFAMTFGAFLFWQSMDRVHVWIALHQDEKKERMERELEIKRMQAELLAQAKENES

SEQ ID NO: 299275 - protein, 82 aa, Zea mays
  Clone ID: MRT4577_36008C.1.pep
HLPASNKLVSSQLSWFLHCEWMTDCGAMLMGFHMRYSETPKLLMDLLFLLNHLRKALLLGCSSSRTPPTPTPTLTLTTLVIL

SEQ ID NO: 299276 - protein, 126 aa, Zea mays
  Clone ID: MRT4577_36009C.1.pep
GFPKKSSRGDGEEHLLDPLFLFNSTCPSFSRSLLRRGRSWGRKQWRMAAIGGGGVQPRGRKRGWRPRGGGEGKKRGGHLGFLWEKETTPQMTSIFASNGPQPFTSSTHQRLTFGQHFFWDITLYPP

SEQ ID NO: 299277 - protein, 67 aa, Zea mays
  Clone ID: MRT4577_3600C.1.pep
VFIVLTVILNTHQLRGVKNKRGLNNNKGAICSGHTRKVSSLRHHPWYLRRPRICSPKGRILPSQQKT

SEQ ID NO: 299278 - protein, 134 aa, Zea mays
  Clone ID: MRT4577_36010C.1.pep
LCGGGAQSRRRLSLPPSHGTALHSLPSPLLSPLVEAVRAAKQRRGQGMVTTCIRDTVRAQLGDQGSHTFLSEGYHPFLSNLQACYLTYPIHSKAPLHQTAVTNSYRVLVDNLDVQMIVLAFWLDVPLLCCPVNL

SEQ ID NO: 299279 - protein, 75 aa, Zea mays
  unsure (1)..(75): unsure at all Xaa locations
  Clone ID: MRT4577_36011C.1.pep
GFPKKSSRGDGEEHLLDPLFLFNSTCPSFSRSLLRRGRSWGRKQWRMAAIGGGGVQPRGRKRGWRPRGGVKFXRQ

SEQ ID NO: 299280 - protein, 77 aa, Zea mays
  Clone ID: MRT4577_36012C.1.pep
GASPSYTEFLKALEAGKIKKVPAPAIAIEYWQLPTYSPLKNVVVLVRPHKGPPRDVNPFGWGKHFQGMPPKEPPAPI

SEQ ID NO: 299281 - protein, 38 aa, Zea mays
  Clone ID: MRT4577_36013C.1.pep
LEEPIRPFTRRNSPVNRPAHFCQANSNSHSKTNITGVS

SEQ ID NO: 299282 - protein, 144 aa, Zea mays
  unsure (1)..(144): unsure at all Xaa locations
  Clone ID: MRT4577_36014C.1.pep
AVALGPYLPQLVVWVNSLLTPFSFSFVTYGSKLLFCGLLNLVRHPLAAPLSSMFKHKVIVNCHGHLIALRMSLAASLSHNLSHSLFQTSLCXQCSLXCKRLYIHAPQEMTMIYVTADLYVVCSLHFGFFLDLSGGLQTVYKRFW

SEQ ID NO: 299283 - protein, 110 aa, Zea mays
  Clone ID: MRT4577_36015C.1.pep
AGRAGLFLPLGWTPPPPMAAILHCFLPQDLPLRSKDREKEGHVELKGKRGSRRCSSPSLLAEFLGETLGACCSSREVGSSSTSTFTLIITLLRRSHDLIRNFLSKNVVSN

SEQ ID NO: 299284 - protein, 115 aa, Zea mays
  unsure (1)..(115): unsure at all Xaa locations
  Clone ID: MRT4577_36016C.1.pep
FKKKKKKKKAVRASAETMATEKLGIKVERNPPESRLSELGVRQWPKWGXCEKSKFPGTWAAKETCYLLQGKVKVYPEGHGEEFVEIAAGDLVVFPXGMSCTWDVAEAVDKHYNFE

SEQ ID NO: 299285 - protein, 171 aa, Zea mays
  unsure (1)..(171): unsure at all Xaa locations
  Clone ID: MRT4577_36017C.1.pep
MDSSCRPIRVDKAGEGTPLLPPLATNCRLFFRVNGVSFSSSSSSTATAQTASSLRSAAGGAHPLGSMSARPVAVISSAVGAKVLASSSXARHSPEASSFPFLLISRRLGLTGSAGTPRASXAGFETSKVASTSGSGTTINVPSGAVSDESSASRSSMSFMSASLGFRGTSK

SEQ ID NO: 299286 - protein, 94 aa, Zea mays
  Clone ID: MRT4577_36018C.1.pep
LRLGSVIMRVKVYVLLLPTPLDEQQAPSSKKKKCTRHDLECSHLGFPQENMQEEMGKNTSLILSSSSIQRAPPLLDPCCVGGDLGGGSNGGWLP

SEQ ID NO: 299287 - protein, 110 aa, Zea mays
  unsure (1)..(110): unsure at all Xaa locations
  Clone ID: MRT4577_36019C.1.pep
MGSEPEPGRXLRPYLQRGDDLQKHEPLLPYYCRLYPMEMGLRIPLKERTRSTNSILMSLMNHLEKHKKLLTLGPDYNLHSEAFALKVSGRADKQERAARAGIYTAXTFYA

SEQ ID NO: 299288 - protein, 399 aa, Zea mays
  unsure (1)..(399): unsure at all Xaa locations
  Clone ID: MRT4577_3601C.1.pep
MAGATVTVEEVRKAQRATGPATVLAIGTATPANCVYQADYPDYYFRITKSEHLTDLKEKFKRMCDKSMIRKRYMHLTEEFLAENPSMCAYMAPSLDARQDVVVVEVPKLGKAAAQKAIKEWGQPKSRITHLVFCTTSGVDMPGADYQLTKALGLRPSVNRLMMYQQGCFAGGTVLRVAKDLAENKVLVVCXRXSEITAVTFRGPSESHLDSLVGQALFGDVEEGAYQDLDPDDRVERPLFQLVSAAQTILPDSEGAIDGHLREVGLTFHLLKDVPGLISKNIGRALDDAFKPLGISDWNSIFWXXXXXXXXXLDQVEAKVGLDKARMRATRHVLSEYGNMSSACVLFILDEMRKRSAEDGQATTGEGLDWGVLFGFGPGLTVETVVLHSVPITTGAATA

SEQ ID NO: 299289 - protein, 89 aa, Zea mays
  unsure (1)..(89): unsure at all Xaa locations
  Clone ID: MRT4577_36020C.1.pep
RSLDSGYKCEPKARDDRNACGPRKKSLTRSVEAELQISEWRICRYLLNVWYTQRVCNGASVYLADVLXYLADEVLVLICDSDIDDMMTR

SEQ ID NO: 299290 - protein, 80 aa, Zea mays
  Clone ID: MRT4577_36021C.1.pep
RGREDQGDVLPHLFLKISWGNPRWQHSRSCLVHFFFFDEGACCSSRGVGSSSTSTFILIIMLPRRSHDLIRNFLSKDVCF

SEQ ID NO: 299291 - protein, 105 aa, Zea mays
  Clone ID: MRT4577_36022C.1.pep
VDRRQKRMIKYHESAARSRARKQAYTIELENKVARLEEENKRLIELKVLKPLEPLEPPPAEQNKKQPPPQPKRKQPQPPPPPPPPIQQLPPKHRHDLRRTNSATF

SEQ ID NO: 299292 - protein, 391 aa, Zea mays
  Clone ID: MRT4577_36023C.1.pep
MEKGASEASPPCARCGKPAQLQCPKCVELKLPRENAAFCTQDCFRAAWSSHKSVHPKPGAPASQQSPEGWKYCLRKGRERALQLPRFDWTGPLRPHPISKMRVVPDEIEKPDWALDGIPKIEPDSDLQKRVEIKTPELIERMRVTCRIAREVLDAAARVIKPGITTDEIDRVVHEETIARGGYPSPLNYYFFPKSCCTSVNEVICHGIPDARKLEDGDIVNVDVTVYYKGVHGDLNETYFVGNVDEASKHLVRCTYECLEKAIAIVKPGVRFREVGEVINRHVSMSGLSVVKSYCGHGIGELFHCAPNIPHYSRNKAVGIMKAGQTFTIEPMVNAGVWNDRLWPDDWTAVTADGKRSAQFEHTLLVTETGCEVLTARLPSSPDVFPWLKKP

SEQ ID NO: 299293 - protein, 98 aa, Zea mays
  Clone ID: MRT4577_36024C.1.pep
LFLAATPPFRHPWPPLPLPLAATLHCFLLPLDLPPRSTDREEEEQDGLKRKRGSRRCSTPISCRFSWGNPRCLLLIQGSGKEQHIHLYSHNNAAQAQS

SEQ ID NO: 299294 - protein, 60 aa, Zea mays
  Clone ID: MRT4577_36025C.1.pep
ARVCELEEEIEKQKLIISDSAEGKREAIRQLCFSLDHYRHGYQQLRQLLQDHRRPVVMAT

SEQ ID NO: 299295 - protein, 164 aa, Zea mays
  unsure (1)..(164): unsure at all Xaa locations
  Clone ID: MRT4577_36026C.1.pep
CEEARASXRETQESGRRXRRGTRXQGFSXKALVGKGVERRKAASAFGPPLHGTPRAAGGPQAGRGPLSMRLSACLARAPRAKKEVRARLKPGAEDEGHPVFSGKAVKAQGRVSEVTQTPKATPFPFPIRNAGPGGDEAPTGCLKATGKNGPGKAVLPRPRPEGR

SEQ ID NO: 299296 - protein, 164 aa, Zea mays
  Clone ID: MRT4577_36027C.1.pep
MSFHDDKELGHDFENDDDIRRLREKEGIPELEEELEKSPAYPDYLKRRLGQEKPPDLKDVEKSPMNGGEDDLALSEDDFDNPTSESLVRMFKNRNDTPVAHIATDHSSTSLPKDNLVSETIDSQPERPKDDRAVDSQTERLKDVTPDDPQTEKPKDHAGVDSPT

SEQ ID NO: 299297 - protein, 50 aa, Zea mays
  Clone ID: MRT4577_36028C.1.pep
GKKTHYWRIFQSTQLKHICITYFYKRLHESYATTNQLIVSRVLHKSSLTL

SEQ ID NO: 299298 - protein, 51 aa, Zea mays
  Clone ID: MRT4577_36029C.1.pep
ISTVKRTVTRFISRRPILRHRMHSSYDSSSHQPSFSSIIYQSSTTMSYSYA

SEQ ID NO: 299299 - protein, 401 aa, Zea mays
  Clone ID: MRT4577_3602C.1.pep
MAGATVTVDEVRKGQRASGPATVLAIGTATPANCVYQADYPDYYFRITKSDHLTDLKEKFKRMCDKSMIRKRYMHLTEEFLSENPSMCAYMAPSLDARQDVVVTEVPKLGKAAAQKAIKEWGQPKSRITHLVFCTTSGVDMPGADYQLTKALGLRPSVNRLMMYQQGCFAGGTVLRVAKDLAENNRGARVLVVCSEITAVTFRGPSESHLDSLVGQALFGDGAAAVVVGADPDGRVERPLFQLVSAAQTILPDSEGAIDGHLREVGLTFHLLKDVPGLISKNIERALEDAFKPLGISDWNSIFWVAHPGGPAILDQVEARVGLDKARMRATRHVLSEYGNMSSACVLFILDEMRKRSAEDGQATTGEGLDWGVLFGFGPGLTVETVVLHSVPITTGAPTAA

SEQ ID NO: 299300 - protein, 105 aa, Zea mays
  Clone ID: MRT4577_36030C.1.pep
EDFNRNDVDGASAPVAETTSTSEVLAAPAVPATGLAPAEEAEAEAEVADKKSKKRKSRGDGDDEGDEDKAERKRMKKEEKAAKKAAKAEKKDKKKSKDDSDSDSD

SEQ ID NO: 299301 - protein, 83 aa, Zea mays
  Clone ID: MRT4577_36031C.1.pep
CVVLCLSCLSTYGSLCARVGRPLLRPHRAPQVRRQASELLQSVVSSGVFWILLVIPVMQFFLARRLPPCRGVAPILTVRAQPV

SEQ ID NO: 299302 - protein, 75 aa, Zea mays
  Clone ID: MRT4577_36032C.1.pep
AICPTCSYSQFVAVIVHRILKTWHHRPNLLLCMPSHTPLIVSFCNPCHCTLSLYLVFTIHEPLAVLNNHHLRHLY

SEQ ID NO: 299303 - protein, 44 aa, Zea mays
  Clone ID: MRT4577_36033C.1.pep
RTRQIMHINLSYTEGKKNNGQLIMRTRILSNSRLHDYLLGHNNH

SEQ ID NO: 299304 - protein, 82 aa, Zea mays
  Clone ID: MRT4577_36034C.1.pep
FGTKYRIPSKRGFSILKKGTQRILNPRKWGSGSKRKTLRKNNLNTQEAGLRIIPRCFAPLLPCATKHQIVGLHHGLLGRRSL

SEQ ID NO: 299305 - protein, 58 aa, Zea mays
  Clone ID: MRT4577_36035C.1.pep
LYDGSHITHSKNLSVSVCSLSLWWGYHTHDLDVYTQTKLIKAPMLCIHDTMIPFNFSQ

SEQ ID NO: 299306 - protein, 64 aa, Zea mays
  Clone ID: MRT4577_36036C.1.pep
CIYTIDPHIVSDCRYYMFTYANMVTFIGLNGHSSSLLSMADKVPGAETQDIYEKSCSQIDLMMP

SEQ ID NO: 299307 - protein, 127 aa, Zea mays
  Clone ID: MRT4577_36037C.1.pep
MADGGGEEGNASAHKGSARRRGPVQAGLDADDLLTLMHGSDPVKVELNRLENEVRDKDRELGEAHAEIKALRLSERAREKAVEELTAELEKVDEKLKLTESLLESKNLELKKTNDEKKAAMAAQFAA

SEQ ID NO: 299308 - protein, 50 aa, Zea mays
  Clone ID: MRT4577_36038C.1.pep
TRPAPRITDVTQEKAELAIKAFVGPQVQQVRTVDERKAPPIPVLTRYKKE

SEQ ID NO: 299309 - protein, 48 aa, Zea mays
  Clone ID: MRT4577_36039C.1.pep
WTLYPTSFALSTSFQTSAKLAFQLPPPQPNVSVATSMYIITINFCLFT

SEQ ID NO: 299310 - protein, 74 aa, Zea mays
  unsure (1)..(74): unsure at all Xaa locations
  Clone ID: MRT4577_3603C.1.pep
WGGWGVVFFFFFFFFFFFFFFFFFFFFWARFQITKFYSGGTKFKDLTHISPAGGGGLAVXETGSFCYLLGLNPI

SEQ ID NO: 299311 - protein, 86 aa, Zea mays
  unsure (1)..(86): unsure at all Xaa locations
  Clone ID: MRT4577_36040C.1.pep
VICVSTNYYVYVINSGKKKTKRDTERDFFVXXPRLWGGGLFKKQRYLFFAPRGVIFPPXRDVFATLKTQDGGASCLCGGVLIIDRS

SEQ ID NO: 299312 - protein, 252 aa, Zea mays
  Clone ID: MRT4577_36041C.1.pep
MPAAQHIERDQDLAMSSDELLQAQLELYHHGLAFVKSLALKAATDLRIPDAIHRRGGAATLSELASDTGIHPTKRSNLRRVMRVLTTTGVFSIVQGKGSNDHAGDGAAYYKLTRVSRLLVERSPHNLSPMVGTIVNTLCWTSLLKMPEWFTQGQEGESAQSHSLVQLANGCTFWDTTKVDGGLFNDGMAADSRIAMKVLLKEHGGAFGEVKSSLVDIGGNHGATASAVARAFPHLKCSVLDLPHVVAAAPAS

SEQ ID NO: 299313 - protein, 97 aa, Zea mays
  Clone ID: MRT4577_36042C.1.pep
GAQWLREGSPPFGILTHPGTTEKLKRKTKIASSSFFSGSPYLKKSTTHWGAAPERETPRPGRRPCPGRANRRVGVLPGKPLKNLSGTKGFWGGNLGG

SEQ ID NO: 299314 - protein, 105 aa, Zea mays
  Clone ID: MRT4577_36043C.1.pep
GYGSSITSRTDTSVPEYHKLSPWQPPASAAVEEAMPPVPVLKAMEQIKRSSSCCKEPPISMKAMEQIKRSSSCCKEPPISMLSRQFVAAKYKGMFSFLSQNQLAS

SEQ ID NO: 299315 - protein, 104 aa, Zea mays
  Clone ID: MRT4577_36044C.1.pep
MDNQRFSTKIKDGSGSSYPIKQKWISNPSKECPKCNHVIDNNDIRYGALAMNIPFKGYIKVWSAAKSVVHSGPICLKFKKMKASATLIHRNFQVSMDDIALMIR

SEQ ID NO: 299316 - protein, 261 aa, Zea mays
  Clone ID: MRT4577_36045C.1.pep
MAAAAAASQSDVPHRQPGQRRPMCAVCTKPLRLCLCGRLRSSPVDNAVGVTVLQHAMEAHHPLNSARVARLGLRNLAVAQVTDVNHRARFILTTLDACGGAAAASGPAGGPVAARFGNHDRSDGPEEIELQDGGGLAFPRDGICGAKSDGKHSATCDFDESGLSACGYLGAEDLSFGGSCEMLDLGDVNGGIFCNLAGEDGFLSCCHNDGGRVRFIKKTNSDGQPAGLERPSSAANQIENFVDDSTIGEKHHGSEGGSHIR

SEQ ID NO: 299317 - protein, 52 aa, Zea mays
  Clone ID: MRT4577_36046C.1.pep
ATDDSYAFRFRVHPIHVQHVDSCSAPPICAKRHCVVSLERLFVLVRVGGRVG

SEQ ID NO: 299318 - protein, 138 aa, Zea mays
  unsure (1)..(138): unsure at all Xaa locations
  Clone ID: MRT4577_36047C.1.pep
FQVRGGDPGVPFAGIFDQADCCWACSQPPSPRWELGGAPLLRVPPRGGGPKSPPVVSSGPPPVDAPPPDPPPQVGQLCPPXPMPLSXGAPQGPGPEGAPGIMPGARPXAVIPPKGKIFFXAGPPRPDPPGPGTPFCSA

SEQ ID NO: 299319 - protein, 45 aa, Zea mays
  Clone ID: MRT4577_36048C.1.pep
KTVKMWMAIMYVPLRRIPGKFSPSADFSQYQHRPPLQRASTEAPL

SEQ ID NO: 299320 - protein, 426 aa, Zea mays
  Clone ID: MRT4577_36049C.1.pep
MERDFLGAIDRAWKCGEAAKEESRSEPDSPAATRWQFAARSGVAPAFMSFRTEATGEGSEAFSVSELRPAGDAFDGIKKQSSMLSIYQQQRQFGHNSSQATAQQQYPAAAHRQRSQVADYGAAAPHRLPGGGGGGCRLVQPVSVRHPVPFHQANLMVRSSVSQSFHNQQQPFTMSNNGFGGSTAGVYGARNPRNQASTQLTIFYNGSVNVFDNVPVDKAKELMMLASRASVPGATPSSEPDSPPVPAPAPAKVNVAEVFPGARQIAVQKPEPCVPHLSSAATASPVRIVVPQAVAPSRSTSHCATEACGSKPAAAPTSQTVSSSRQLAAASAAAAVTPRAVPQARKASLARFLEKRKERVASVEPYLTSNSKSPLESSDAVGSASAPTKSSSTDVAPASSHNGGGAELVRHGGYPRSISFSTNLQI

SEQ ID NO: 299321 - protein, 108 aa, Zea mays
  unsure (1)..(108): unsure at all Xaa locations
  Clone ID: MRT4577_3604C.1.pep
NTRFDNVIRKFAKISVPKLVWLQKDSNVVAVAMEYLVMLLPYCCIEQMCYYYRCCFQIYEFRVRNIYTYLKHRLLMLHASNKIFPFVGSSPHXTSKSSTSAHFGWLEQ

SEQ ID NO: 299322 - protein, 120 aa, Zea mays
  unsure (1)..(120): unsure at all Xaa locations
  Clone ID: MRT4577_36050C.1.pep
HASGSTYHGIIMNYPDQIDGIGALDQDCRTSHIDVKPAELVTKIDLRSVKELEKEPKFLRSCDAGMVKIVHTKPMMVETXSQYTPLVQFSCHDMMHTVTGGFIKSVEKNDATGSKVTKAA

SEQ ID NO: 299323 - protein, 147 aa, Zea mays
  Clone ID: MRT4577_36051C.1.pep
ASVDGTSLPKEPKTELADGDVPDFGPVPVEGVAKKSESSKKDKKKANVASISLPREPKPEMADSDDPDFWVPPVGSRWDDDDGKDRWESLPGKANLAKNEGGTDDGDGDDNDTADKDDAESMELASRTKRMSIEAAGPRKKKPKKEQ

SEQ ID NO: 299324 - protein, 144 aa, Zea mays
  unsure (1)..(144): unsure at all Xaa locations
  Clone ID: MRT4577_36052C.1.pep
GWQAGKHRGWLTVTEDHPPLIEDDCADNGTPVANVNSNILYSVIQHXCDKHXMHSPPASASKEASTYDGGAGXATASSAXEDLKNWDADFVKVDQATLFDLILAANYLNIKGLLDLTCQTGADMIKGKTPEEIRKTFNIKNDFT

SEQ ID NO: 299325 - protein, 249 aa, Zea mays
  Clone ID: MRT4577_36053C.1.pep
PAGNVAEKYLISIPEHVEMRQALGVILDWNTAYCLVHRATDLVRKGQRVFIHSISGAVGYATMTLCLLEGAEVYGTASERNHASLRELGVTPFTYADKNWKDEMKQRGGAHVVYDPIGFEHYNDSWDILIRNEPSRLVGFGGNMNIIQGDDAKPRSQFSSQVKLLAKNGCLVTRRSTSFYYIDRDRSTYMEDLHSVMSMLVAGKFQVPVKKTWDLENVREAHETWGKFPGVGVLFCPRRPQRLSKGDDD

SEQ ID NO: 299326 - protein, 70 aa, Zea mays
  Clone ID: MRT4577_36054C.1.pep
KKPPGNGGRNSILGGTENTSTLGFPHRPFNSKGAPNLFEMGGPPPQKELRPLPPYQNLGTLHAGPCLALE

SEQ ID NO: 299327 - protein, 152 aa, Zea mays
  unsure (1)..(152): unsure at all Xaa locations
  Clone ID: MRT4577_36055C.1.pep
LRLSSSLFCSSSSPSTSSSSSSSTMKSSFSNSSXPSSSSSSSSSRSSISSLFLREGRGSSSSASNSSSSSSERTVRPIVLEGFQPGGCASPAEVPKASAPSVGRRRRRPSRRHQTTTREERKNTVCRRGLECRTKGGPYEWDESVISVRYCR

SEQ ID NO: 299328 - protein, 140 aa, Zea mays
  unsure (1)..(140): unsure at all Xaa locations
  Clone ID: MRT4577_36056C.1.pep
QRGGKRAPQHAAAKSHXAAXPGXRSXXXGPNXERXXRHHXPXXXPQSSKRRXEPEGGARXARXGSQXGXQRGSPXEXPQRDXXPXDHTXGAAXXAXQXEXXXKEXGKGESNXEHXGHKQAERKXDGSXADXGAKANQKDK

SEQ ID NO: 299329 - protein, 65 aa, Zea mays
  Clone ID: MRT4577_36057C.1.pep
CHIYVYPYQCLCLSDKDGIGSRRFASLVPQPRLTSRGNDLLNFEITSAHAWTCHGSRHQARECQE

SEQ ID NO: 299330 - protein, 119 aa, Zea mays
  Clone ID: MRT4577_36058C.1.pep
AYKERAILTSCTLNVHIRASILESTNDLACECVCSKDHRSLSIESVSASARSFRVVHRRSLRSGSTQPTTTSAFSTAHRTAPPPPPVSSSPEPIAGGPSTAASRGPGRDCVRTRGRTRG

SEQ ID NO: 299331 - protein, 140 aa, Zea mays
  unsure (1)..(140): unsure at all Xaa locations
  Clone ID: MRT4577_36059C.1.pep
XAFFFFFSMSNQREQYRITIHLFIGTGRSPCKITLMPLTFINNSMIILRGPIWFFIFKSVSFSAAIPKLFYTQLRLCANLRVLCASSYRGSDPSLKIPVSVLYSRNIVKSCFRGPSEAEGPQQGTTCLGLELPGTNLLFR

SEQ ID NO: 299332 - protein, 197 aa, Zea mays
  unsure (1)..(197): unsure at all Xaa locations
  Clone ID: MRT4577_3605C.1.pep
MLREEDGASGASRCGTWGVCAGWAVAEPFRSRLNRLVSAGVGRGSGSSVSLSRSARTGRLHPARTKSSSLSSSSSSAVPVEEGAPDATWGCAWSRRWSAASSPSPSSSSKHRVNDGGSGAANSXPAHSGGLSPGCGXSSTTSSSSSIPNENDGASGAPYPRGCSRRSLLAGGSSSSQSNPSENEGAEKSIPPARRVC

SEQ ID NO: 299333 - protein, 50 aa, Zea mays
  Clone ID: MRT4577_36060C.1.pep
DNIGPNYLLALNSYLYPLTCLQKLHIVTVVYKLNIVEKQSCIFLYVCIYI

SEQ ID NO: 299334 - protein, 58 aa, Zea mays
  unsure (1)..(58): unsure at all Xaa locations
  Clone ID: MRT4577_36061C.1.pep
NRMTNPFSXPFNNSPMTNSPSSPSTPYSLSLPLLIHSHYPPSSPFYLPANFFTLSLPF

SEQ ID NO: 299335 - protein, 164 aa, Zea mays
  Clone ID: MRT4577_36062C.1.pep
QCVSSSGCERNWSAFALVHTKQRSRLLYDKLHKLVSVRYNLKIRAEEDQEKERDIDKEIDPSALLMDTTMFDETNPIMEWLNEDVEDPIVDGADAASAVFEQIRRLNSSRKASYVGSKGNNKKRKRNDDDENEFLETESEDDEEENEYVDNDIEDDDGVSEDDE

SEQ ID NO: 299336 - protein, 177 aa, Zea mays
  unsure (1)..(177): unsure at all Xaa locations
  Clone ID: MRT4577_36063C.1.pep
QNSSSEGNSGSAAEVGCVGEVVXHERFADDRFFLICKGQQRFRVARVVRTKPYLVAAVXTWLEDRPPAEHPAHGADAEALATDVEALMRDVIRIANRLNGKPEKEVGDLRRGLFPTPFSFYVGNTFEGAPREQQALLELEDTAARLRRERDTLRNTLNYLTAASAVKDAFPSSPSSG

SEQ ID NO: 299337 - protein, 60 aa, Zea mays
  Clone ID: MRT4577_36064C.1.pep
FQMALVIFFSTKGFLRGPKGRYLFRALLTRINCSMPQNGPCVVPLSRGSGQGAKRFLVPP

SEQ ID NO: 299338 - protein, 106 aa, Zea mays
  Clone ID: MRT4577_36065C.1.pep
LICLSQLINSYVASNLPIYRVKWRLRHLHRIFHVLVSSITVGISCSAVAWIILLLTLVMWSQLCVNVVATYLHGSFRGVLLPTSGLRAMHVYRMIECMGETESATP

SEQ ID NO: 299339 - protein, 64 aa, Zea mays
  Clone ID: MRT4577_36066C.1.pep
PKRSLVQNLRSEHYATGWDLGGRGRFLETVHWELLLLEKPSIFLVHKDQIQVILDAEFDVNICG

SEQ ID NO: 299340 - protein, 71 aa, Zea mays
  Clone ID: MRT4577_36067C.1.pep
QRRPPFISTNVFGAAPPPPYTNEHKGVHNHEHIQKQDRPKNPPFGKVRNNCSLIRDSYRPSYIEKVTPQSH

SEQ ID NO: 299341 - protein, 116 aa, Zea mays
  unsure (1)..(116): unsure at all Xaa locations
  Clone ID: MRT4577_36068C.1.pep
FERKEQXTAGGSLGRGGNAHTRKRKEGGAQHARSPGERERKGELASENPLTRGRNRADQTPSPPAVGGRRGRGGGGGGDGTGGSARQAQARQPGGPVRRQDEQHHPHQGRQARNTY

SEQ ID NO: 299342 - protein, 151 aa, Zea mays
  unsure (1)..(151): unsure at all Xaa locations
  Clone ID: MRT4577_36069C.1.pep
NCAKPHWSVSRDSXMNYRPATGXQERACRKKRKSQLGRHSTTTKSSSFNTSMMVLVRLSLVKXRFFSLDTTHYLWIIKPVILPTRILLVLYNAXNNDLVRTQTLWNSAIVLDDAAPFKQWHLTHYGVDIRRKEDTPAGQKDNAYGQEVDAP

SEQ ID NO: 299343 - protein, 103 aa, Zea mays
  Clone ID: MRT4577_3606C.1.pep
IGYLEPAGVDCGAHCCLWWPWDATAQLTTPSLYWNWVGEEQEALGFALWEYWGMICLSSLAGMMGHHVISHQIKSRATAEIKRTAGGWNYPSLSSVYTVVTKM

SEQ ID NO: 299344 - protein, 41 aa, Zea mays
  Clone ID: MRT4577_36070C.1.pep
KSKFSPYTIYPLIHTFITTLSTKICNRYTRTYTDIANKSVL

SEQ ID NO: 299345 - protein, 90 aa, Zea mays
  Clone ID: MRT4577_36071C.1.pep
GSTNTPATIQQIPTKTSTQNQPSNRGQKIHGYKPTKKKGIKKRRHQFLQHSIKNKDMYYPPPKKKKRGRKPPTAWGVKGRTPPGFYFGPR

SEQ ID NO: 299346 - protein, 47 aa, Zea mays
  Clone ID: MRT4577_36072C.1.pep
LIISLCCMVVFTMAYIMLCRKTSQQEHVYEAARAHAREANDSGEPMR

SEQ ID NO: 299347 - protein, 47 aa, Zea mays
  Clone ID: MRT4577_36073C.1.pep
EEDYHKTGPIPEPEFTYHPGVKIGLNIIRDGLQGERYNYRKIKETLD

SEQ ID NO: 299348 - protein, 41 aa, Zea mays
  Clone ID: MRT4577_36074C.1.pep
PDLPYHIISARTSGTSTHLRLRSTLDHARRPPSDPRETFSP

SEQ ID NO: 299349 - protein, 67 aa, Zea mays
  Clone ID: MRT4577_36075C.1.pep
HASGEKGLLGSRIKISCAVCLPLSGREGGRIFSWQHKGVECEELSPHQNQQLVHLSSTFLLNSGVLL

SEQ ID NO: 299350 - protein, 132 aa, Zea mays
  unsure (1)..(132): unsure at all Xaa locations
  Clone ID: MRT4577_36076C.1.pep
NPRSGGKNSEPVRXQQVRFFRTLPGFRAYMAIKFRLPLEILRLLNIVLCGALSRRHDELSRKYRYVMHIAELYAPYSLFKGCFDDSNTERLRAAMANRSSGYDLGFDPMCVDWDDYFYRVHIPGVVKYLCGY

SEQ ID NO: 299351 - protein, 136 aa, Zea mays
  Clone ID: MRT4577_36077C.1.pep
IHVSISSSMVSSELSSAFTYKMQQKLMLLTLKLSPKDIPTGLSIDENRHEDRHLETTCANIFLDSSMGEALGEVLAKNGNKELRNYLNVPMNFLNEYCDISHWMECSPEDIMDKTTVFSTACSSTRSKNRVTTTAP

SEQ ID NO: 299352 - protein, 69 aa, Zea mays
  Clone ID: MRT4577_36078C.1.pep
KGHVFKNKRILMEHIHKLKADKARKKLLADQAEARRSKTKEARKRREERLQAKKEEIIKTLSKEEETKK

SEQ ID NO: 299353 - protein, 67 aa, Zea mays
  unsure (1)..(67): unsure at all Xaa locations
  Clone ID: MRT4577_36079C.1.pep
PERRRRRADQRPLTFAPTTGNPWAPTGTPLAVAGPRPLPRRSFLIPGPWYNGETFGRVWSDPVFRXR

SEQ ID NO: 299354 - protein, 276 aa, Zea mays
  unsure (1)..(276): unsure at all Xaa locations
  Clone ID: MRT4577_3607C.1.pep
MSSEDTAATTFVDRVQNFVAENKKAVLIATAAAVIAAGGVAYYASTSSSSRPPSXQMLKRELRERREXKKSKSSKKKSVKDDDGPILEEIAPKTTTEDLPLTTEAIAAMPEEERSKEAASLKERGNAAYKERKFAQAAVYYTRAIQVSPKPEPVYYSNRAACYVNMSPAQNDKVIEDCDEALKLDNKYIKALNRRATALEALDRLDDALRDYTAATILDKFSNQQTAAAVERVLXXLATKRAAEILAEREPRLPSYTFISAYFAAFRPRGHPLSLK

SEQ ID NO: 299355 - protein, 80 aa, Zea mays
  Clone ID: MRT4577_36080C.1.pep
QSKGLSPGGFLGFFSPPPKKIQKGAPRLKKFASFLRIINPFLLRVNCMNGKATLQRPLKRGNFFPTFRNFPKKKKRVFFF

SEQ ID NO: 299356 - protein, 88 aa, Zea mays
  Clone ID: MRT4577_36081C.1.pep
MFCLRNYWSPAFASVKEGPVRHHIKFNCVVVCGARGPRPRYPRVWKTRKKIGTISKSQKLVECVRILNVSLLKFNCVCVLLCITLTSC

SEQ ID NO: 299357 - protein, 73 aa, Zea mays
  Clone ID: MRT4577_36082C.1.pep
ANVIAEGLGELNFVSGPSELYCNTSQVKGSPVFQLTGCLPRFKRAGGLPKDYQQGTSLVKVYALRCPIPSWVC

SEQ ID NO: 299358 - protein, 252 aa, Zea mays
  unsure (1)..(252): unsure at all Xaa locations
  Clone ID: MRT4577_36083C.1.pep
AVCGARGPRPRYPRVWKTXIKGLSNVKEEVYGALDSFVAWELEFPLIVVKKALKKLEDEKEWKRIIQVIKWMFNKGQGKTMGSYYTLLNALIEDGRIEEAEELFRMVFSRYMEGLPRTFFMRIISFYYSAGEHDKMFEIFADMEELGVRPDGSIIRMLGDVFQKIEMMDKYEKLKKKYPPPKWEYRHIKGKRVRIRVYPDSNPEVAAKGDPDTGELEEVESTHLNNELDEAASSGLDRSVLDDATCGDLEYM

SEQ ID NO: 299359 - protein, 115 aa, Zea mays
  Clone ID: MRT4577_36084C.1.pep
MFCLRNYWSPAFASVKEGPVRHHIKFNCVVVCGARGPRPRYPRVWKTRKKIGTISKSQKLVECIKGLSNVKEEVYGALDSFVAWELEFPLIVVKKALKKLEDEKEWKRIIQVIKW

SEQ ID NO: 299360 - protein, 296 aa, Zea mays
  Clone ID: MRT4577_36085C.1.pep
MFCLRGYWSPSLAPVREGPVRHHIKFNSVVVCGARGPRPRYPRVWKTRKKIGTISKSQKLVECIKGLSNVKEEVYGALDSFVAWELEFPLIVVKKALKKLEDEKEWKRIIQVIKWMFNKGQGKTMGSYYTLLNALIEDGRIEEAEELFGMVFSRYMEGLPRTFFMRIISFYYSAGEHDKMFEIFADMEELGVRPDGSIIRMLGDVFQKIEMMDKYEKLKKKYPPPKWEYRYIKGKRIRIRVYPDSKTEEAAKGDPDNDELGEVESIQLDNELEEEASSGLDRSVLDDAACGDLEYI

SEQ ID NO: 299361 - protein, 71 aa, Zea mays
  Clone ID: MRT4577_36086C.1.pep
LQIRGATILFCCITGLNAWKEPFQGFPPKTRQGFSTRASRGPGKTGANTLLNLKTPFWPWAPHHRAGLGPK

SEQ ID NO: 299362 - protein, 80 aa, Zea mays
  Clone ID: MRT4577_36087C.1.pep
TSTSHNLQVQNTTAPMAAYTSTGRSSMIQTHTNVTLVIRPHFRIIQKDEPRLYLLVQVARIEECDRMKPEYRIPVLEATD

SEQ ID NO: 299363 - protein, 296 aa, Zea mays
  unsure (1)..(296): unsure at all Xaa locations
  Clone ID: MRT4577_36088C.1.pep
MFCLRGYWSPSLAPVREGPVRHHIKFNSVVVCGARGPRPRYPRVWKTRKKIGTISKSQKLVECIKGLSNVKEEVYGALDSFVAWELEFPLIVVKKALKKLEDEKEWKRIIQVIKWMFNKGQGKTMGSYYTLLNALIEDGRIEEAEELFGMVFSRYMEGLPRTFFMRMISFYYSAGEHDKMFEIFADMEELGVRPDGSIIRMLGDVFQKIEMMDKYEKKKKKXRPPKWDYRHIKGKRIRIRVYPDSNPEETAKGDHDNDELEELESPPLNNELDEAASSGLDRSVLDDAASGDLEYM

SEQ ID NO: 299364 - protein, 92 aa, Zea mays
  unsure (1)..(92): unsure at all Xaa locations
  Clone ID: MRT4577_36089C.1.pep
MPLLVLRVPLASTNNTSTCSGAAPPVAVAPAAEHSDGLLFDGLALGHGDDVDDKAEADGDDAATVKLEWLKSQIIGAEAEFASPXFGTRRIT

SEQ ID NO: 299365 - protein, 77 aa, Zea mays
  Clone ID: MRT4577_3608C.1.pep
CSVGVNGFSLFAGGLYRKIPNRRTQAAQDFNIEEVFYCFGSKLVFTGFVTKMPLPPWSLRFSSLACEPKTVGPAWGG

SEQ ID NO: 299366 - protein, 82 aa, Zea mays
  unsure (1)..(82): unsure at all Xaa locations
  Clone ID: MRT4577_36090C.1.pep
VRVALAHMLRCGVIMDVVTPEHARLAEEAGXCAVMALDRFPAYIRAQGGVARMSDPGLIRDIKRAVTILVMANARIGHFVEA

SEQ ID NO: 299367 - protein, 40 aa, Zea mays
  Clone ID: MRT4577_36091C.1.pep
NTLVRAALFFIFILESRNVLYYLWEDTIIIQRTSLLNSHP

SEQ ID NO: 299368 - protein, 95 aa, Zea mays
  Clone ID: MRT4577_36092C.1.pep
VLHLRRSPLPKGYLFLLVPCRNRRETRGPSSLVRARINRRVPFRRRLTDPPRSLRYIIRRENRRRTSRQDVRPGTQLRRGSRRILSSRGRTLRRS

SEQ ID NO: 299369 - protein, 47 aa, Zea mays
  Clone ID: MRT4577_36093C.1.pep
LVVVLLDQESPHNIPVATSTGVLREVYPKFFTWGLKTMIPNLWGLAT

SEQ ID NO: 299370 - protein, 200 aa, Zea mays
  Clone ID: MRT4577_36094C.1.pep
FVVALLTHRTLKIAAIFEQSSESSSASGADSSENANGSPEWRSFDMHSVIAATEDLFDFILSRKGWRVRVFLVQDIVNASDVFLQEATFPYVYAKVGKLGDLNPERSKMIRRLVNTVQSFRQAINLAPDAWSAMLIRTLLKPESQKFVLDVFLALANHSSYKIPETFWLFMSRFLNYLGKKKKKKKKKKKKKNSREGRGT

SEQ ID NO: 299371 - protein, 716 aa, Zea mays
  Clone ID: MRT4577_36095C.1.pep
MNHLYDVMYEFSFSLPPDYALVIRALGSLEGTAKALDPEFKVIESAYPFVIGRLLADPSPDMRKILRELLICDDGSIRWNRLERLIAAISEQSSESSSASGADSSENANGSPEWRSFDMHSVIAATENPNPPGRVGSLSLYSAKPYAALLSLPVSPSRAGGGADEIPAMAGPTSRLLILARRADRRRCLPFLVPRALQAAPPTFSPALPLPPCLPASTPVMSYSSAFTSVHGERPSSEYAKIRKESLETQFGRILGSSSRRHFADRGFGPFLALYRAATISFHVVKLTIWHLLLNDMHKRAEKFRETLIRLGPFYIKLGQALSTRPDILPSAYCQELAKLQDQIPPFPTRIALRTIESQLGSRISDLFADISPEPIAAASLGQVYKAHLRSGELVAVKVQRPGMAPLLTLDALLFHMIGGQMKRFAKARKDLLVAVNEIVRHMFDEIDYILEGKNAERFATLYSHGSSGVNSEASTSIKVPKVYWNYTCKTILTLEWIDGIKLTDAERISKANLNRKRMIDEGLYCSLRQLLEEGFFHADPHPGNLVATEGGSLAYFDFGMMGDIPRHYRVGLIQMLVHYVNRDSLGLANDFHSLGFVPEGTDLLAVADALRFSFGDVRRQSNDFQGVMNHLYDVMYEFSFSLPPDYALVIRALGSLEGTAKALDPEFKVIESAYPFVIGRLLADPSPDMRKILRELLICDDGSIRWNRLERLVHA

SEQ ID NO: 299372 - protein, 76 aa, Zea mays
  Clone ID: MRT4577_36096C.1.pep
IQIQISRRPRVGDPASSARWQWVWSRERLTRLWRFSYLPLKQRRRYSTRSPVFIIPYTRRRSWNSSAVTPASLATT

SEQ ID NO: 299373 - protein, 72 aa, Zea mays
  Clone ID: MRT4577_36097C.1.pep
KHKQGKCFNQVKRQFVGLRITREHLSAQVRQFLSLCMRIFKLKRGAAIVHNSLYWERGILNSENSLATSSYA

SEQ ID NO: 299374 - protein, 86 aa, Zea mays
  Clone ID: MRT4577_36098C.1.pep
KKTGLKRPQKRRGPFKKFKRAKIYWVFKKKFRPFSRGKKFGGFSPPLMGKKKTPKWPLFLKNFPKNGGALIPFLFFSPPPKKQVGF

SEQ ID NO: 299375 - protein, 74 aa, Zea mays
  Clone ID: MRT4577_36099C.1.pep
SPSIREMFPRVGGRFLVLFRGKAFLHWSPGGGMDKMGFPQVESTMTVLVFGSPRSRVAPAIGGEFGAGGGVPPG

SEQ ID NO: 299376 - protein, 49 aa, Zea mays
  Clone ID: MRT4577_3609C.1.pep
QQIHVISGGGSHSCKCNTFLNQMRNNEPENKTLTMSPEEMQQNNRVSCS

SEQ ID NO: 299377 - protein, 91 aa, Zea mays
  Clone ID: MRT4577_36100C.1.pep
ADAWAHTHATVAVIRPGISSGARVPGSTAASASPLPASIQWPLALASGPLHTGRRPCISLYDELETCSIRLPAAAIRSTFPGHSYAVLVPY

SEQ ID NO: 299378 - protein, 45 aa, Zea mays
  Clone ID: MRT4577_36101C.1.pep
LMKLRKSIVCWFIDSGVTLTLAPKMKALQIAEKARDAVLRRKSDH

SEQ ID NO: 299379 - protein, 66 aa, Zea mays
  Clone ID: MRT4577_36102C.1.pep
HCSLFVMTTGIQPLWLRLTHLQCLGPNVAVAQRIMPNAPTHQTIQKQIYECSNRSNLVHLLCAKML

SEQ ID NO: 299380 - protein, 394 aa, Zea mays
  Clone ID: MRT4577_36103C.1.pep
MAMVPCGDDTDWCHVLDNFNLLLCSSSCSPNAMANRAEDCLPISAAPPGPGHHQSCCKNEVVLEASCDGAFAAADCLSSALTNLQREDDSFYLPMYSAPPAVGDEYFSDLLAPDADGIDEALLMPFSDIDLQVFDSDDEHRPPVDQMVNMIPPAVLHHPSTAGTQNGGAVHAHQKAMAVIDDSCFRRGASGVEMAVVRHHGEPRQGSSSVAPVPPPSLPGTRARRSDGRSARAGKTTKLDYIGFDELRKYFCMPITRAAREMNVGLTVLKKRCRELGVARWPHRKMKSLKSLMANVQEMGNVMSSVAVQQELAALETYCTLMEDNPWIELTDRTKKLRQACFKERYKRRRAAEVNVMDMDRIYCFGQHHHQQLLPPTTSSSDDRHGQCSRSFGY

SEQ ID NO: 299381 - protein, 92 aa, Zea mays
  Clone ID: MRT4577_36104C.1.pep
MATKILSLLALLALFASATNAFIISQSSLGPRSIISQVLPPVTSKAFEHPTGQAYRLQQAIAGSVLQQPIGQLQQQFLVHLTIQNHCTQQQQ

SEQ ID NO: 299382 - protein, 59 aa, Zea mays
  Clone ID: MRT4577_36105C.1.pep
RQLTNLLPALNVPKMYLIPKLPLFLWIYKELEKLSNPYKEQQGTSNLEFLPRLTTFYRT

SEQ ID NO: 299383 - protein, 108 aa, Zea mays
  unsure (1)..(108): unsure at all Xaa locations
  Clone ID: MRT4577_36106C.1.pep
SNVFEDWQALKAAGDNRLXGNINXSHDIVYPNDPLSKINVDDXPEAFFXREIKLPRDMADINNELFIYGFKPMTNSAKRRASAHINGLKPKAISNNNLREITKRTKLT

SEQ ID NO: 299384 - protein, 164 aa, Zea mays
  unsure (1)..(164): unsure at all Xaa locations
  Clone ID: MRT4577_36107C.1.pep
MLPPXLISFMSQIKKFMNTLXQYQTTAIMNLQETDXTERLFYKLIIDNVAELLPFVYTTTIGEACQKYGSIFGRPQGLYVSLKDKGKVLEVLRNXPHRNIQVICVTDXGMGIRVGKLSLYSALGGFDPSVLSVHIXLNNEKLXNDEFYIGLWQKRVTGEEYDEL

SEQ ID NO: 299385 - protein, 199 aa, Zea mays
  Clone ID: MRT4577_36108C.1.pep
MGYVLSAVGRVLEQPTAWGAAWEMALLAGPLWAAALLGLLLGWAWRPRWAAGLVVARLRAPLGTAVQQREGDTDAVQRNRGTVALGRSSETATATASEEVGAVGMADLVNLWRLVEGADGGPAWTKMMEKSLPTMTYRAWRRDAQTGPSQYQSSSIFENASPEEVRDFFGDDEFRMSNRWDDMLIYHMTLEECRTTGTM

SEQ ID NO: 299386 - protein, 350 aa, Zea mays
  Clone ID: MRT4577_36109C.1.pep
MAAGLGARPSATFEAGRFRPLAAPLRPVRSGKFVVPKRCFTVSSRLAWVEDELMEIKKSQEQSSVKSKKRPPLRRGKVSPQLPVPGHIPRPSYVGSKGLPELCKGQLHDAQGIAGMRAACKLAARVLDFAGTLVKPSITTNEIDEAVHNMIIEAGAYPSPLGYHGFPKSICTSVNECVCHGVPDSTQLQNGDIINIDVNVFLNGYHGGTSRTFACGQVDDSIKHFLNAAEECLEKGISICRDGVNYRKIGKKISKLAYFYGYYVVERFVGHGIGTMYHSEPLILHHANENSGRMVEGQTFTIEPILTMEKTECVTWEDGWTTVTADGSWAAQFEHTILVTRDGAEILTKV

SEQ ID NO: 299387 - protein, 45 aa, Zea mays
  Clone ID: MRT4577_3610C.1.pep
MGTPGEGLGRCSHALIRGVPESLASAESAAAGLHALDTGIAQREH

SEQ ID NO: 299388 - protein, 105 aa, Zea mays
  unsure (1)..(105): unsure at all Xaa locations
  Clone ID: MRT4577_36110C.1.pep
LVWYVPQQGYHGGTSRTFACGQVDDSIKHFLNAAEECLEKGISICRDGVNYRKIGMKISKLAYFYGYYVVERFVGHGIGTMYHSEPLILHHANENSXRMVEGQTF

SEQ ID NO: 299389 - protein, 118 aa, Zea mays
  Clone ID: MRT4577_36111C.1.pep
RPGSDIVPFPSLHSPNVCSHAVIFRYHDDGFRDASYPPPLRVCDRPKQTHPDRFRYMSRALRRPRALPCLPITPATHFSAYRDQTECIRHGRLASTMSYVPTPDYPKRSCHNRAQYPF

SEQ ID NO: 299390 - protein, 101 aa, Zea mays
  unsure (1)..(101): unsure at all Xaa locations
  Clone ID: MRT4577_36112C.1.pep
RSQEQSSVKSKKRPPLRRGKVSPQLPVPGHIPRPSYVGAKGLPELCKGQLHDAQGITGMRAACNFAAPCLDFAGTLVKPSITXNEFDAAVHNMIIXAGAYP

SEQ ID NO: 299391 - protein, 63 aa, Zea mays
  Clone ID: MRT4577_36113C.1.pep
FLSAHSVPPGVGVNPKPPVGCLGYFRVAPWACPRWWYFFLAPPLPCVWWETWFLFWPVKNFKG

SEQ ID NO: 299392 - protein, 144 aa, Zea mays
  unsure (1)..(144): unsure at all Xaa locations
  Clone ID: MRT4577_36114C.1.pep
PSRPQPHPQPHPCPCQQPHPSPCQLEGTCRVGSTPILGQCVEFLRHQCSPXTATPNCWLNGRPCRSNVCRNLSQLSPQHRYQAIFGLVLQSILQQQRXSGQVSWLLAAHIAQQLTAICGLHHSTLCAYSCVGGVLHCRNYVLLY

SEQ ID NO: 299393 - protein, 54 aa, Zea mays
  Clone ID: MRT4577_36115C.1.pep
RIYSSRRQKYVQSQIINMFMKVTRDVGNNFLVIIVKCCIYMAKIIFFIGHNARD

SEQ ID NO: 299394 - protein, 46 aa, Zea mays
  Clone ID: MRT4577_36116C.1.pep
STTGDEVIHGGGHTWHIFHPLPKTGSLLMFWVNNRSSHHPLHRNRY

SEQ ID NO: 299395 - protein, 54 aa, Zea mays
  Clone ID: MRT4577_36117C.1.pep
EPFYHSWGAIWRKDSYKGCNVPLIVRLTTKGGTKSVYDNCIPAYWKANTAYTVK

SEQ ID NO: 299396 - protein, 99 aa, Zea mays
  unsure (1)..(99): unsure at all Xaa locations
  Clone ID: MRT4577_36118C.1.pep
NXEELLILLASALSRVLRPCACHVXDSPSIWDNLLXGSLRDGVVRGLLLIIIRKHEVVRNLSVANEHVHRLNRESGCALLYTQLETHCHSEELARFIDV

SEQ ID NO: 299397 - protein, 377 aa, Zea mays
  Clone ID: MRT4577_36119C.1.pep
MARRSAPLLRRLVSASSPPALQSLTDHVGVLARRTVTYMPRPGDGAPRAVTLIPGDGIGPLVTGAVRQVMEAMHAPVYFETYDVHGDMPTVPPAIIESIRRNKVCIKGGLATPVGGGVSSLNMQLRKELDLYASLVHCSNLPGLPTRHEGVDIVVIRENTEGEYSGLEHEVVPGVVESLKVITKFCSERIAKYAFEYAYLNNRKKVTAVHKANIMKLADGLFLESCREVASKYPGIQYNEMIVDNCSMQLVSKPEQFDVMVTPNLYGNLVANTAAGIVGGTGIMPGGNVGQDYAIFEQGASAGNVGNENLVEQKKANPVALLLSSAMMLRHLQFPSFADRLETAVKRVVAEGTYRTKDLGGSSTTQEVTDAVVANLD

SEQ ID NO: 299398 - protein, 129 aa, Zea mays
  Clone ID: MRT4577_3611C.1.pep
MKKTSSPLLIVLFLTAAAMAAEPEKQAAPAAQETAVHIVYVDRPEDADPEEFHIRTLTPVLGSEQKARDAVLYHYKNAASGFSAKLTPQQVKDLKEQPGVLQVVPSQTYQLHGPGSGTHQGTTHTLGLM

SEQ ID NO: 299399 - protein, 163 aa, Zea mays
  unsure (1)..(163): unsure at all Xaa locations
  Clone ID: MRT4577_36120C.1.pep
RFRPCLWLSPSXASVGWPLPCCSGLGALAXVLFPPLCRLGLCSARRXPSGSXVPVAPSARWRPLAXXCSSXSXRSWXPARCCCCCCSLXRPPPLXRXSRPLPPPPXPSSSSSSSSPAWPXRACLRRRRLLVVRGXCXRRRRRWCXAAAPPSPXWLACEKAGXA

SEQ ID NO: 299400 - protein, 57 aa, Zea mays
  Clone ID: MRT4577_36121C.1.pep
PNNCAHVLWCYAIVAQEMIQVRESSISWFQLRACAPFIMSHRWTTKPEIHSTLPGIE

SEQ ID NO: 299401 - protein, 302 aa, Zea mays
  Clone ID: MRT4577_36123C.1.pep
FSRHVIRSVIYGEQPRNRLDLYIPKDNSKSSPVVAFVTGGAWIIGYKAWGALLGRRLAERGIIVACIDYRNFPQGTISDMVSDASEAISFICNNVVSFGGDPNKIYLMGQSAGAHIAACALLEQAIKESKGENTYWNVAQIKAYFGLSGGYNIQNLVDHFHERGLYRSIFLSIMEGEESLPHYSPEIVAKKLSAETISLLPQIVLLHGTADYSIPSSASETFADVLKQAGGKVELQLYKGKTHTDVFLQDPLRGGRDKLVEDVLSVIHVDDASARERDASAPTPERLVYEWQIKLARQISPF

SEQ ID NO: 299402 - protein, 46 aa, Zea mays
  Clone ID: MRT4577_36124C.1.pep
CNGRKESQRLYFTLLHIRRLRPVLYLYLLIFPMLFTSCEAVPVCGN

SEQ ID NO: 299403 - protein, 700 aa, Zea mays
  unsure (1)..(700): unsure at all Xaa locations
  Clone ID: MRT4577_36125C.1.pep
WGSRIRPSTAAAKNGPLDYLRLRVSSPRAHSRFLFIRCHNLCGALTHRRRRLEPRAVIVTATPETEMDTAEEAGQEVVSAVGEDSIPEAAACSREERKEEEEEEVEVSFDELGLDEQLKRALRKKGILKATPIQREAIPLILEGKDVVAKAKTGSGKTFAYLLPLLHELLKLSSEGRIRKPAPNAFILVPTRDLCHQVYNEALSLLELCTCKLRVVQVTASMSDKDITVALSGPPNILVSTPACVATCISKGIIRGPAVKESLSMMILDEADLLLSYRCEVDLKALIPHIPRSCQSILMSATSSSDVDKLTKLLLHNPFVLTLSEVGQAKDDVIPKNVQQFWISCDAKDKILHILALLKFELIQKKVLIFVNSIDMAFRLRLILEKFGIRSAVLNAELPQNSRLHIIEAFNARLFDYLIATDDTKTKEKQTNEENKKEATLSRKRKKQTNKENQKEQKVSRKHLQQTLDAEFGVVRGIDFKNVFTVVNFDMPLDATGYVHRIGRTGRANKTGASISLVSPKEDSTFKEIEHMLQDVEKKDMDCISPFPLLTKDAVESLRYRAQDVARSVTTRDVQEARRQDIKNEILNSEKLKSHFEENPTDLDLLKHDKLLCNKEIPAYLRDVPDYLIDPKTKEASNAVKLSRAAMXSTSPKGGKGRGLREDQXKSRDPLKTFSAEGKRGRRRKEREGEPDRRKKSKKA

SEQ ID NO: 299404 - protein, 124 aa, Zea mays
  Clone ID: MRT4577_36126C.1.pep
MAEKKQRPGGSRKDEVVTREYTINLHKRLHGCTFKKKAPNAIKEIRKFAQKAMGTTDIRIDVKLNKHIWSSGIRSVPRRVRVRIARKRNDEEDAKEELYSLVTVAEIPPEGLKGLGTKVVEDDE

SEQ ID NO: 299405 - protein, 104 aa, Zea mays
  unsure (1)..(104): unsure at all Xaa locations
  Clone ID: MRT4577_36127C.1.pep
LLALPSLTQTPTFMTVIDTLSTHSPDEQYLGERPYXAWTAHPPAFAAAREFPDKVPPPQEEIERGNAYTGPPNRFGAGVFPYKLMGPTLGPGITFRGVPKRVTI

SEQ ID NO: 299406 - protein, 123 aa, Zea mays
  unsure (1)..(123): unsure at all Xaa locations
  Clone ID: MRT4577_36128C.1.pep
GPFFFLPFSSGVLVSFRPVLLCPLLRLPCFPXFCPSVCFLGCCRLRVPLLLCXXGRVFPFPSGCPFCAFLLVVCSSWPLXPLASXFVLACPXALXXXXXARXLWLCLGLLFSPVVFSVFSDSP

SEQ ID NO: 299407 - protein, 39 aa, Zea mays
  Clone ID: MRT4577_36129C.1.pep
TQPLQYKPINPPYQSFKPNLFHARLIPNHTTSITVNNQT

SEQ ID NO: 299408 - protein, 61 aa, Zea mays
  Clone ID: MRT4577_3612C.1.pep
HALYWRESGFVPHIRLQSIPRLGKSLLRGIAHRFKELDRRKCSGNIIVDGERDQGQRVSQD

SEQ ID NO: 299409 - protein, 178 aa, Zea mays
  Clone ID: MRT4577_36130C.1.pep
MGLAMGRLLGWKKEAQIALLGLGGAGKTAILHKLKLGHAITTGPTIGFNSETLEYNGISFRVWDVGGQGELRPLLRHYLYGVQGVVFVVDSSDREWILRAKDLLNIILDEDQFRNRDLALLVFANKQDRPNVMSAAEIADEFGLPSRLCNRRWHIQSSSAISGEGLHEGMAWLCTNIR

SEQ ID NO: 299410 - protein, 41 aa, Zea mays
  Clone ID: MRT4577_36131C.1.pep
ATRIHLPLYPPRHRLIRLHIRSTPDPDLRRRLQYPFTLRRL

SEQ ID NO: 299411 - protein, 111 aa, Zea mays
  Clone ID: MRT4577_36132C.1.pep
GGEKPKKRVKLFFWKKFFFFLLQLVTPGVVHNDIVPHGGGGKIFIKFLPVNDSTSFFARGFFTAQFFFRGGNPPAKSRGLGSFFECPTSPKVVCFFGPPKPPKNGLFYLSF

SEQ ID NO: 299412 - protein, 52 aa, Zea mays
  unsure (1)..(52): unsure at all Xaa locations
  Clone ID: MRT4577_36133C.1.pep
PFXSPPNNKXPXQKXPTTYILQXTSPKPHFLTSPILTHPPTKNXXSSHLTPL

SEQ ID NO: 299413 - protein, 170 aa, Zea mays
  Clone ID: MRT4577_36134C.1.pep
MAPKAEKKPAEKKPAAEEKAEKTTAGKKPKSEKRLPASKSSGKEGGEKKGKKKAKKSVETYKIYIFKVLKQVHPDIGISSKAMSIMNSFINDIFEKLAGEAAKLARYNKKPTITSREIQTSVRLVLPGELAKHAVSPSYKGSSSCPLPLPLPAYVCAVKIVMFSSGEQGQ

SEQ ID NO: 299414 - protein, 148 aa, Zea mays
  Clone ID: MRT4577_36135C.1.pep
MAPKAEKKPAEKKPAAEEKAEKTTAGKKPKSEKRLPASKSSGKEGGEKKGKKKAKKSVETYKIYIFKVLKQVHPDIGISSKAMSIMNSFINDIFEKLAGEAAKLARYNKKPTITSREIQTSVRLVLPGELAKHAVSEGTKAVTKFTSN

SEQ ID NO: 299415 - protein, 93 aa, Zea mays
  Clone ID: MRT4577_36136C.1.pep
RACACCSACFRLDDEAAAAADDDDGDGPASAGALVPWPPAGPSGPGSMASSSPIPACSWYLLFKCSGVGEIRERCYRLPGIGNQATTDDGGRR

SEQ ID NO: 299416 - protein, 148 aa, Zea mays; identical to SEQ ID NO: 299414
  Clone ID: MRT4577_36137C.1.pep

SEQ ID NO: 299417 - protein, 148 aa, Zea mays; identical to SEQ ID NO: 299414
  Clone ID: MRT4577_36138C.1.pep

SEQ ID NO: 299418 - protein, 53 aa, Zea mays
  Clone ID: MRT4577_36139C.1.pep
KKLSEKIFPSFKIKNFENYSFEIKNKKRLHCENCHKLFKIILKIPKKDFTKCP

SEQ ID NO: 299419 - protein, 74 aa, Zea mays
  Clone ID: MRT4577_3613C.1.pep
MSDIEEVVEEYEEEEQEEAAVEEQEEAAEEDAEAEAETEETRAEEDEEEEEAKEAEDGPMEESKPKPRSFMPNL

SEQ ID NO: 299420 - protein, 145 aa, Zea mays
  Clone ID: MRT4577_36140C.1.pep
CAMSQTCVTFVLSVDGGASCPSSQNSAFKKSRCVKEGLQLQAPRQADANRPRHRTQKGRRTLFRNRKRVVGCGVPARGHGRSRRRRADGVGGGGTTPGTVMPFIFCPIPFRANDATRSFRRYMMLGAAAEGDKNGYEWLFVSHSP

SEQ ID NO: 299421 - protein, 157 aa, Zea mays
  Clone ID: MRT4577_36141C.1.pep
MAPKAEKKPAEKKPAAEEKAEKTTAGKKPKSEKRLPASKSSGKEGGEKKGKKKAKKSVETYKIYIFKVLKQVHPDIDCCLSLKKIGISSKAMSIMNSFINDIFEKLAGEAAKLARYNKKPTITSREIQTSVRLVLPGELAKHAVSEGTKAVTKFTSN

SEQ ID NO: 299422 - protein, 137 aa, Zea mays; identical to SEQ ID NO: 280480
  Clone ID: MRT4577_36142C.1.pep

SEQ ID NO: 299423 - protein, 138 aa, Zea mays
  Clone ID: MRT4577_36143C.1.pep
MTPSLLPPRLNLPHVEVLPNGLTIIAEQMPVEAISFQLWLRVGSRWEGDEINGTAHFLEHMVFKGTPRLAMGEFERAIESRGAGTNAATSQDYTQFYFTSAPQDFEHLAPLQLDVVLNPTIADGPFERERLVVLEEIR

SEQ ID NO: 299424 - protein, 63 aa, Zea mays
  Clone ID: MRT4577_36144C.1.pep
KIDINNPPPMESQGQLGLIGLNRRPCKKLLRAVLLPLWFANTSLLKCAPKILTWALIPNFACV

SEQ ID NO: 299425 - protein, 98 aa, Zea mays
  Clone ID: MRT4577_36145C.1.pep
AARASAVASVAPLASSESSNAIFESIISFTNASQDMAAASVMVSSMMVPKVALHVVLPLDHRPFKDRSKGHSLERSPNVIRSDSFRKHFSSSQSGYRT

SEQ ID NO: 299426 - protein, 100 aa, Zea mays
  Clone ID: MRT4577_36146C.1.pep
RRRRRRCLRRSRTRACPTSRPSSRSSATAASSRSSTSAPSCLHRRPSPPRGGRWPRTSTTGSRRGATSPASTSAGHHRGAPAGRRLEGAPVLAVRPHEPS

SEQ ID NO: 299427 - protein, 32 aa, Zea mays
  Clone ID: MRT4577_36147C.1.pep
KKKKKKKKKKKKKKKKKKKKKKRKKKLKKKKK

SEQ ID NO: 299428 - protein, 54 aa, Zea mays
  Clone ID: MRT4577_36148C.1.pep
IGPVRPQSRETATPITGASKNDSYHDLQALYFGAASKTESFCPCAPMNSLAPNR

SEQ ID NO: 299429 - protein, 41 aa, Zea mays
  Clone ID: MRT4577_36149C.1.pep
MSVPNQQVVDYTSFKLVIVGDGGTGKTTFVKRHLTGESEKK

SEQ ID NO: 299430 - protein, 324 aa, Zea mays
  Clone ID: MRT4577_3614C.1.pep
MAQQQPVRRILKVAPPGKGDGESFPTVQAAVDAVPLGNRARVVIRLAPGVYREPVYVAKTKNFITVAGASPEATVVSWDNTATRIRHSQSSRVIGTGTFGCGTFIIEGEDFIAENITFENSAPQGSGQAVAVRVTADRCAFYNCRFLGWQDTLYLHYGKQYLRDCYIEGHCDFIFGNSVALMEHCHIHCKAAGYITAHSRKSTSESTGYVFLRCTITGHGEAGYMFLGRPWGPFGRVVFAYTFMDRCIKPSGWHNWDKSENERTACFYEYRCSGPGALPSNRVTWCRQLLDVEAEQFLAHTFIDPDVDRPWLLQMMAIRIPASA

SEQ ID NO: 299431 - protein, 282 aa, Zea mays
  unsure (1)..(282): unsure at all Xaa locations
  Clone ID: MRT4577_36150C.1.pep
GIILKFIGGVKQINLFILIYTPSLTSHPKPAQRKRKKKGEKRGHQKKKKKPPKKKQTXQKKKPPPPPRGKGKNPRSKKKKPPQKKKRRDPLNTKKKNPGKKPPKRGGPPPKEKKNPPKSLPRDTKKKLGGTKKPPTREKKKKPHPREKKKKTPPGEQXPPPPRGGNKNQTSRGGGKTQKPKGDYLETWGKPPPQRGGGPSEKQKREKKKKKPAGKKKNRVKRSKKFRXPPPRRKKKGEGRPQKHREKKEKKKARPKRKKTRKQKKGGKSPQPKTRGGAKVKH

SEQ ID NO: 299432 - protein, 107 aa, Zea mays
  Clone ID: MRT4577_36151C.1.pep
RRGRRFLVSFLRSRSFGRCRRRLSLSLLIYCLNPGMAALRSLTRSRGLPVSLRCKASWRSDKLYPLKLLNRDIPARNSVASSPAVGRPGSTAWLLTDRLTSSKSYAH

SEQ ID NO: 299433 - protein, 63 aa, Zea mays
  Clone ID: MRT4577_36152C.1.pep
PWDGQGLPDHRGLQHATPADLTIKHVGNAASTRARLVIAPALLALLPVEHHSHNDALIYKCHI

SEQ ID NO: 299434 - protein, 77 aa, Zea mays
  Clone ID: MRT4577_36153C.1.pep
EYYTRLMPSFCADLTFCLHHSGVYFVLLVEPTVCSSIVGWDRCLISSSLVGRGKDYGSKGTDVMVVNGRIEVRPHAW

SEQ ID NO: 299435 - protein, 146 aa, Zea mays
  unsure (1)..(146): unsure at all Xaa locations
  Clone ID: MRT4577_36154C.1.pep
RVFCPFXFCFGACRLGXRCSRLLXGPSFSPSLLLCRLXXRPVLFSPGVVAPGCPFXPXRFPAXFXXFCXVFFVXLRLRGVFXCLXVCGSLSVXXXGXVSVVFRVAEQAARXLLALXGRXYSVXPFVAVFSPVXXFRRASPRLPSLG

SEQ ID NO: 299436 - protein, 45 aa, Zea mays
  Clone ID: MRT4577_36155C.1.pep
MMTTIYLGENFTGQFINKTPSPYGTHQDNENKSFFFTAPINKILP

SEQ ID NO: 299437 - protein, 59 aa, Zea mays
  Clone ID: MRT4577_36156C.1.pep
QTPEHISIISKAADIRVLQQPNWNFNFYFRRKENNVLTVGLVTRSSPTYAVALQFLQSS

SEQ ID NO: 299438 - protein, 97 aa, Zea mays
  unsure (1)..(97): unsure at all Xaa locations
  Clone ID: MRT4577_36157C.1.pep
XXTEPGQDDEPHSPGRRAWTRYFARQLGDTSSGYQNTRXTLLTLXTDLTLNKXGGLQPXLPFDGWRDTAHLESGXRRXQQAXPAXWYWKKPXPGRCG

SEQ ID NO: 299439 - protein, 49 aa, Zea mays
  unsure (1)..(49): unsure at all Xaa locations
  Clone ID: MRT4577_36158C.1.pep
SLAPEGGRPIDSPLLKAQADVWRLSLSYLTPLSLSCAEELXVPTGVYRR

SEQ ID NO: 299440 - protein, 115 aa, Zea mays
  Clone ID: MRT4577_36159C.1.pep
MGGTTSDGEVRPSRTHVVLLDAFSCGCGKPRQYHFPCSHYVAAARHRNFAFESMIPSEFSVESLVRTWSPRFEPFLDESQWPTYTGPIYIADPAHRWDKCGTRKRSRCNMVMRTL

SEQ ID NO: 299441 - protein, 77 aa, Zea mays
  Clone ID: MRT4577_3615C.1.pep
CSLAVGSGICLMVVFMRQIGRSGSMILVGCMHPSDLSQTRQLCLRALGIGVDAALFYGSISPPQVTVVIGLMTVVRT

SEQ ID NO: 299442 - protein, 105 aa, Zea mays
  unsure (1)..(105): unsure at all Xaa locations
  Clone ID: MRT4577_36160C.1.pep
THSLFYHTXXXILVDFKTVYDIXXXSLXIYXPTYTNLNXLVSQVISSFTSSLRFNNALNVDVNDFQTNLVPYPRIHFILSSYPPIISAEKAYHEQLSVSEITNSS

SEQ ID NO: 299443 - protein, 413 aa, Zea mays
  unsure (1)..(413): unsure at all Xaa locations
  Clone ID: MRT4577_36161C.1.pep
LRRRFACLLSFHSRSHGHLAVFTLGLCFFLLPTATPLSPPLPPPASDSQPPRSGLLPSSHQPKTLAATPTXMASPARPAATSVSGAFGLPPDARCSYDQPRRREGLQDERMVQTFVAAYAQPPPQQDGFYPKEAVMAAVEECMRKQADALLHSLDGIGGRLSQLELYCYKLERSIGELRSDVMDYHSESTTNFRCIDKNLGQVHKSLQVLQDRQDLAETPKELSKLQIAHEAPSHQKGEATGFPMLAPRDNDHSTHAPNHEVALLRLHQVNGMQSPAVQVQTSGGFVLQHLVPVSLSTQHDQQQLNQAPVYYVQSQDHAKSTESKAMEPLVQGVQPLVHNPEVMAQVELPQKPSQATELYPQPQNHRLQMPTQQVDSHTWHPQQPMVQQHQYIIQQVSRHMAQQQSSAPHSQR

SEQ ID NO: 299444 - protein, 65 aa, Zea mays
  unsure (1)..(65): unsure at all Xaa locations
  Clone ID: MRT4577_36162C.1.pep
HGHWGTSXSSLVQLXXPVNALXDSMSSAAVKVALIFLKASLSDFNPFPXXAHQRWLCALRETXAF

SEQ ID NO: 299445 - protein, 85 aa, Zea mays
  Clone ID: MRT4577_36163C.1.pep
TCNCKMLRRLGRIVMHLEESSSYCLLRQVEWEHHAVRGRHSRHTPSSETPSENLAHEQRQDADRRAVRPSSDAPRTSAATDAATT

SEQ ID NO: 299446 - protein, 188 aa, Zea mays
  Clone ID: MRT4577_36164C.1.pep
SAKSSISGLVWSRPFKVNPVQGLGVTLAGSAFNDAMPSTLSPTVLNVDWRCEIVRTSPYQVHIFIPVEGYDPIEFTLTKKCGYRQEKESDPMKGWAKFGIVSCVFIVLSSILCCGGFIYKTRTLHLYGLDALPGIGILSALLDAVGRPRGYLPAVNPNENHASHASWEHVVGTTQVHNVINHRACGPM

SEQ ID NO: 299447 - protein, 142 aa, Zea mays
  unsure (1)..(142): unsure at all Xaa locations
  Clone ID: MRT4577_36166C.1.pep
PTRXEKKKKKKKKRGKEKKKKKKKKKKKKKKKGRAPPKEPKPTNPASQRKSPXKGPPKXXQPPXGERRXNRKNPGXTQPXPXKKQPPXXSXRKTKKARTXRPXKQGRSRKGKGNPPRTGPKSPAGAGETPSGTAKPASPQAP

SEQ ID NO: 299448 - protein, 48 aa, Zea mays
  Clone ID: MRT4577_36167C.1.pep
TKHLFLFFISACCSKSLLYTTASELYYQVTRIHGSIQSYNGNRICPFL

SEQ ID NO: 299449 - protein, 63 aa, Zea mays
  unsure (1)..(63): unsure at all Xaa locations
  Clone ID: MRT4577_36168C.1.pep
RSFAIRLLTCNGGGMDLAVYSLIWGGRGPGVTCARCWGGGSDTGTWTLQLQTTXQHEGVRRTR

SEQ ID NO: 299450 - protein, 91 aa, Zea mays
  unsure (1)..(91): unsure at all Xaa locations
  Clone ID: MRT4577_36169C.1.pep
CSNRIQKFSKAYVGEEWTYITELCGVGKYAADAYASFCAGRANXVVPKDHKLVDYWNYVCFELPSIQKSQDAGVTELGNLVAKVHEVAVSC

SEQ ID NO: 299451 - protein, 271 aa, Zea mays
  unsure (1)..(271): unsure at all Xaa locations
  Clone ID: MRT4577_3616C.1.pep
IKRTAHASLTHPIHAHQPPFSAATRRSGKSPEIRVRCDGGMDALPDGVVQHILSQLSNARDVAACAAVARCWRDCMPFLPSLYFPRGAFESVGVGPASAVAAADDVIGRMVDAAARLEELVVYCPFSASLLPHWLAARAATLRVLELRVESAADDKSGHLDSIGVATSLEELRLWALRMTRAPAWGQMERLRVLEVVGAVLEDAAVNGAVAACPNLTDLALLGCECARXAVISLAHLERCRLDFVGSGNTSLRFAAPRVSSLEVRASHDLS

SEQ ID NO: 299452 - protein, 382 aa, Zea mays
  Clone ID: MRT4577_36170C.1.pep
MENKVMTEGATVRKKHRRQKVKQEQSGQTPFLNDVYSKAGEEAAAGGVMGSQCVKRIDRSKNSKVLKKQQTLPQGFFPPIANPDFIDQDPNYCSPFGAFFAQFAYKPERRQDGNGSPLPSTTGRTARLPPRGHPSSGSSLLTAKEVSKAARTTTLNTKQACPASASISSSQEGVRVKGKKKPEEKTTMEKKPRKPPILLSPAEKRSDKYRRLPLDQLVPPPRSPHKLLQEKYASDPWKVIVICMLLNLTQGKQVRKKVKGFFKRYPDAQTAYTADPEKMAEYLAPLGLQRVKTNRIQKFSKAYVGEEWTYITELCGVGKYAADAYAIFCAGRANEVVPKDHKLVDYWNYVCFELPSIQKSQEAGVTELGNLVAKVQEVAVSC

SEQ ID NO: 299453 - protein, 110 aa, Zea mays
  Clone ID: MRT4577_36171C.1.pep
MSMSKTGQAAEKDEQQQSRGIALMQGICAVVYRKADNTPCPIKQGLYLGSVGAAFNKDALKSLNITHILIVAKSLDPVFPAEFNYKKIEDEAISSGGNVLVHCFAGRSRR

SEQ ID NO: 299454 - protein, 76 aa, Zea mays
  Clone ID: MRT4577_36172C.1.pep
ERPPGQVEIRKYISKKKKKKKKKKKKKKKKKKKKKKKKKKKKKKKKKKKKKKFLPTLGTPFGGKFSTFFLPPWGPF

SEQ ID NO: 299455 - protein, 63 aa, Zea mays
  Clone ID: MRT4577_36173C.1.pep
MFSVTIVVAYLMKKHQMSLESALSLVRSKRPQVAPNGGFISQLEKFQKSLQVEQEWRMQPVQH

SEQ ID NO: 299456 - protein, 142 aa, Zea mays
  unsure (1)..(142): unsure at all Xaa locations
  Clone ID: MRT4577_36174C.1.pep
MGGLTRTHRTNASFIRSLGKFKEKRGSGXHMTHRAXDKRCFNQRHDSKVXSRPQXHELVVXFTNKDITAQMISAXVSGXDQALASAYLNELPRYGLVAGLTNYADGYCTGLLVARRVLKIRELDEDYXGSADATGDDLCVRA

SEQ ID NO: 299457 - protein, 148 aa, Zea mays
  Clone ID: MRT4577_36175C.1.pep
MSMSKTGQAAEKDEQQQSRGIALMQGICAVVYRKADNTPCPIKQGLYLGSVGAAFNKDALKSLNITHILIVAKSLDPVFPAEFNYKKIEVLDIPDTDLLKHSDECFGFIDEAISSGGNVLVHCFAGRSRSGAGMENATCAALIIILVL

SEQ ID NO: 299458 - protein, 128 aa, Zea mays
  Clone ID: MRT4577_36176C.1.pep
MSMSKTGQAAEKDEQQQSRGIALMQGICAVVYRKADNTPCPIKQGLYLGSVGAAFNKDALKSLNITHILIVAKSLDPVFPAEFNYKKIEDEAISSGGNVLVHCFAGRSRSGAGMENATCAALIIILVL

SEQ ID NO: 299459 - protein, 67 aa, Zea mays
  Clone ID: MRT4577_36177C.1.pep
PPPFELLEENRRHPQSRRKKNIPRCQLVLAATTLQLNLSKKATWGTASLGWTAKPAPAPVILTHDRH

SEQ ID NO: 299460 - protein, 190 aa, Zea mays
  Clone ID: MRT4577_36178C.1.pep
MSMPKTGQAAEKDEQQQSRGIALMQGICAVVYRKADNTPCPIKQGLYLGSVGAAFNKDALKSLNITHILIVAKSLDPVFPAEFNYKKIEVLDIPDTDLLKHSDECFGFIDEAISSGGNVLVHCFAGRSRSVTIVVAYLMKKHQMSLESALSLVRSKRPQVAPNGGFISQLEKFQKSLQVEQEWRMQPVQH

SEQ ID NO: 299461 - protein, 137 aa, Zea mays
  Clone ID: MRT4577_36179C.1.pep
SPPSLGPWGGPPPPRAPFFEPPGLFFPGSFVLPPPPVQFSSVQLSCGGARSPFPSRGSGPVISPVLPVWNPCFSVVPPWPFCKVSLLLPFGVLVGDLGYCKAHGPVSRGKHLFPPLEGCALGLCKKIGAGSCMFFPP

SEQ ID NO: 299462 - protein, 79 aa, Zea mays
  Clone ID: MRT4577_3617C.1.pep
APGKGPAGERGSERPGRLSWVTARAMPRQWRWQAAGQGTWIPGDPPGPFFFVACLCVFYFCFLFFFFFFFFFFFFFFFF

SEQ ID NO: 299463 - protein, 171 aa, Zea mays
  unsure (1)..(171): unsure at all Xaa locations
  Clone ID: MRT4577_36180C.1.pep
MSMSKTGQAAEKDEQQQSRGIALMQGICAVVYRKADNTPCPIKQGLYLGSVGAAFNKDALKSLNITHILIVAKSLDPVFPAEFNYKKIEDEAISSGGNVLVHCFAGRSRSVTIVVAYLMKKHQMSLESALSLVRSKRPQVAPXNAGFISQLEKFQKSLQVEQEWRMQPVQH

SEQ ID NO: 299464 - protein, 180 aa, Zea mays
  unsure (1)..(180): unsure at all Xaa locations
  Clone ID: MRT4577_36181C.1.pep
MSMPETGQAAEKDEQQQSRGIALMQGICAVVYRKADNTPCPIKQGLYLGSVGAAFNKDALKSLNITHILIVAKSLDPVFPAEFNYKKIEVLDIPDTDLLKHSDECFGFIDEAISSGGNVLVHCFAGRSRXKHQMSLESALSLVRSKRPQVAPNGGFISQLEKFQKSLQVEQERRMPPVQH

SEQ ID NO: 299465 - protein, 99 aa, Zea mays
  Clone ID: MRT4577_36182C.1.pep
HAFVHAFGHASVHASGKYQKSTELLIRKLPFQRLVREIAQDFKTDLRFQSSAVAALQEAGEAYLVGLFEDTNLCAIHAKRVTIMPKDIQLARRIRGQRA

SEQ ID NO: 299466 - protein, 79 aa, Zea mays
  unsure (1)..(79): unsure at all Xaa locations
  Clone ID: MRT4577_36183C.1.pep
SFLSRTTDLHFHIAPGVGAVSCNTADSKATSAVTLRIRKFMTNRLLARMQYVLEVIXHTGRANVFKAELKDRLAKAYDV

SEQ ID NO: 299467 - protein, 85 aa, Zea mays
  Clone ID: MRT4577_36184C.1.pep
RAPESGEFNQPAGLVFQPALLERGFPPPAPKGFGSSIYKWGPKSLGLSPHPAVEEGDEAEDHPGVEKKDPAAKEGWDPSFPKANL

SEQ ID NO: 299468 - protein, 51 aa, Zea mays
  Clone ID: MRT4577_36185C.1.pep
CKKYLRYLHPGIVSQHGVAKILLTHLTLARPGGPHPSRGRCLQQGFQPPEG

SEQ ID NO: 299469 - protein, 77 aa, Zea mays
  Clone ID: MRT4577_36186C.1.pep
IPIGIFEMKHIVFLGGGANKQKSGGWTNSHYPTGVWVPKGAKKTIKRGTLGKKKKEGFPEHKFQFRSRKIDHPPRLT

SEQ ID NO: 299470 - protein, 66 aa, Zea mays
  Clone ID: MRT4577_36187C.1.pep
DIGEIIEPKFFFYKIYYFHIPLVPGRHSKCIFQLSRTPKFFYDRELWQKLFVFSLKNHKFFGYPWK

SEQ ID NO: 299471 - protein, 77 aa, Zea mays
  unsure (1)..(77): unsure at all Xaa locations
  Clone ID: MRT4577_36188C.1.pep
LMEPFXHFLLKVTTFXLSLERLDITQETHRHTDDLDAITTYLGIXSYRDRTQQLHQQWLLSXFNGKRPLFWLITLPK

SEQ ID NO: 299472 - protein, 171 aa, Zea mays
  unsure (1)..(171): unsure at all Xaa locations
  Clone ID: MRT4577_36189C.1.pep
SVSDYGLYIQRCVVCLSLLCSHYLTMSSLVVMFFRFVTSGEIQXRAEFFEPFISGLTNSTVVQFCKASVEPMGEESDHVHIIALSDALGVPIRVMYLDRSSCDAGNISVNHHDFSPEANSSDGAAAAEKPYITLLYRPGHYDILYPKXSCPVKHCWFFPHGQFEKSLSRTL

SEQ ID NO: 299473 - protein, 576 aa, Zea mays
  Clone ID: MRT4577_3618C.1.pep
PTRASSRPISHDFCEPLGDHTVDSDSHHDMPYSQSNLPRSQSAIFQNDCTSDPEGSVDSEILGCRSVDGLCSLTDEKFDYLRGGEMYHCKSNLDVYCAPSPNMHRASNIDDHGSVGCSDVAAEGQRSTGSTEEFFVRDGILVGHEYWDGKYICGDHSLGPVALFCADYYHSGNDVDLSEATGQERELSNRDSTLHQSLVVEVPESVSISDTNDISGEPEHSRTDIDEDPSELTPRTYNIKRIEDWINQIDINDIALDGQGENSVSALAKSREPMAGVPAVRPDAKSPLGMEIAYTYISKLTPASSSAQLANLGLVAIPRLSAFSGLRVLNLSGNSIVRVTAGALPKGLHMLSLSKNNISTIEGLRELTRLRLLDISYNRISRIGHGLASCSSLKELYLAGNKISEVDGLHRLLKLKILDLRHNKISTSKGLGQLAANYNSLEAINLAGNPAQKNVGDEHLKKYLLGLLPNLAVYNKQPIRATGSKDVSDRHTRKISSSHHSDRGGRPDRRSSRLVGAPSAHKPQSSRHGRSGYVSSSALKYTRARNTHKTSLGSRPLEHASAIDLAKQTQTEGRTQ

SEQ ID NO: 299474 - protein, 111 aa, Zea mays
  Clone ID: MRT4577_36190C.1.pep
PVNPFLIQTTFFYIISRDFNYTPLKTRPSASAGGGGAFFFCCTRPSLPPPIRPKRTQKIHPQSTKLACILINYSRPLTKLFKKAIPDFYSTNKKQQVFLSPPVNSQNSWAC

SEQ ID NO: 299475 - protein, 58 aa, Zea mays
  Clone ID: MRT4577_36191C.1.pep
QLTAHSSFFHSHSPTKQTLSYQLALNYLNNMGILLVMSKQIVFMSMKMILYLMMGNGT

SEQ ID NO: 299476 - protein, 95 aa, Zea mays
  Clone ID: MRT4577_36192C.1.pep
NLLYQRLYRPLANKPTCGRTLKDKALQDHGEKTTMPQPTKNGPPNKKQEYIGTHQLLHMQKRDRKLSQSSCLPNFNQLAHMQLLPKDPSGRQMQI

SEQ ID NO: 299477 - protein, 60 aa, Zea mays
  Clone ID: MRT4577_36193C.1.pep
VYPSSGTYYIMVDHTHVRVLQRRIVVRVLRSVNSVFALYRPAVFFLYPEEGKEIGEVHLQ

SEQ ID NO: 299478 - protein, 26 aa, Zea mays
  Clone ID: MRT4577_36194C.1.pep
KLLANYKNNGVYMHKPSVIRKFSNIH

SEQ ID NO: 299479 - protein, 56 aa, Zea mays
  Clone ID: MRT4577_36195C.1.pep
LQKYNGQQYANLTKLLNNCGSGSILKKLRLGHHIKDTCQPNKVPNFKEFTRANILA

SEQ ID NO: 299480 - protein, 714 aa, Zea mays
  unsure (1)..(714): unsure at all Xaa locations
  Clone ID: MRT4577_36196C.1.pep
MPFGLRNAGATYQRCMNHVFGEHIGRTVEAYVDDIVVKTRRAFDLLSDLEVTFRCLKAKGVKLNPEKCVFGVPRGMLLGFIVSERGIEANPEKIVAITSMGPIKDLKGVQRVMGCLAALSRFISRLGERGLPLYRLLRKAKCFTWTPEAEEALGNLKALLTNAPILVPPAAREALLIYVAATTQVVSAAIVVERQEEGHALPIQRPVYFISEVLSETKIRYPQVQKLLYAVILTRRKLRHYFESHPVTVVSSFPLGEIIQCQEASGRIAKWAVEIMGETILFAPRKAIKSQVLADFVAEWVDTQLPIAPIQPELWTMFFDGSLMKTGAGAGLLFISPLGKHLHYVLRLHFPASNNVAEYEDLVNGLQIAIELGVRRLDTRGDSQLVIDQVMKNSHCRDPKMEAYCDEVRRLEDKFYGLELNHIARCYNETADELAKIASGRTTKAPEGYTHLLXHRQILQVDRGPTPKQHQVRAGGGVLHQHHPPFRGPELHHHRQRHPVHRQKVPGXFCEDHHIRVEWAAVAHPMTNGQVERANGMILQGLKPRIYNDLNKFGKRWMKELPSVVWSLRTTPSRATGFTPFFLVYGAEAILPTDLEYGSPRTRAYADQSNQANREDSLDQLEEARDKALLHSARYQQSLRRYHAQGVRSRDLQTGDLVLRLQQDARGRHKLTPPWEGSFVIAKVLKPGTYKLANSQGEVYSNAWNIQQLRRFYP

SEQ ID NO: 299481 - protein, 97 aa, Zea mays
  unsure (1)..(97): unsure at all Xaa locations
  Clone ID: MRT4577_36197C.1.pep
MDSTITCTGTKAKNEANKRTVGRTGKKSRXKSVKAGVQVPVQRIGRYMKNDLYTQRYANGVRTYVAVYLEYVVDYVVDLVVDAARDNKKDSMITRLM

SEQ ID NO: 299482 - protein, 1082 aa, Zea mays
  Clone ID: MRT4577_36198C.1.pep
MGSLQQPLRPGTVLRFGSLEFMSFDGSYDMILLPPPRDNDNGGRQPACRRRNRRRLPRVVEEQHPSSPRPLPRQRRRRRGNQGQAGGCASSAVERVDIPSTPTGGASGVDLAFETKASAVSPRHANPEQVDDASALVESLQDVALVPGTAVQSVPDVTMSLLADRKVPTDSHPTSFRLSLNPPSDLGLAGALVEARSNPLGFRMRSPWDRLTDVSTYGPSGSEEDDDPNICWDFSGFGNPSAMRDFMTACDYCLSDCSDGSRSLDDENCGPSRECFHVELGDPSEGNHLGMPEDSDLPRPVPRADIPRELAVVPVPAGGHDPQLEQVRGAQARLDEGAGALEPIRRDVGQVWASQPPAGEICHLPQGFQHRVANNVRVRPPPASSGAGQNLAAAAMLLRAMPEPSTTEGRRIQGELKNLLEGAAVRRAESSASRRQGYPSEPHVATSRFMREASVYTGRTRNTAPAAPGHLGNKHHHRDRRAHLDERVCRGYHPRRGGRYDSGEDRSPSPEPSGPQAFSRAIRRAPFPTRFRPPTTITKYSGETRPELWLADYRLACQLGGTDDDNLIIRNLPLFLSDTARAWLEHLPSGQISNWDDLVQAFAGNFQGTYVRPGNSWDLRSCRQQPGESLRDYIRRFSKQRTELPNITDSDVIGAFLAGTTCRDLVSKLGRKTPTRASELMDIATKFASGQEAVEAIFRKDKQPQGRPSEDAPEASTPRGAKRKGKKKSQAKRDAADTDLVAAAEYKNPQKPPGGANLFDKMLKEPCPYHQGPVKHTLEECVMLRRHFHRVGPPAEGGRARDDDKKEDHQAGEFPEVRDCFMIYGGHAANASARHRKQERREVCSVKVAAPVYLDWSDKPITFDQADHPDHMPSPGKYPLIVDPIVGDVRLTKVLMDGGSCLNIIYAETLGLLRVDLSSVRAGAALFHGIIPGKRVQPLGRLDLPVCFGTPSNFRRETLTFEVVGFRGTYHAVLGRPCYAKFMAVPNYTYLKLKMPGPNGVITVGPTYKHAFECDVECVEYAEALAESEALIADLESLSKEVPDVKRHAGNFEPVEMVKAVPLDPSGDTSKQIRIGSGHDPK

SEQ ID NO: 299483 - protein, 184 aa, Zea mays
  unsure (1)..(184): unsure at all Xaa locations
  Clone ID: MRT4577_36199C.1.pep
MSTDDAARPALPADWDAPKAERLRLAHVAVRCFWSEQMXYQRLPRVVRTEVLYSQIHRHSPTYRDVCSNGTCHVEEVREDYHPNAXCPYDVLLDVFWDKXNPTTLDIQGSHLHTEYRSXIYYYTTYHDTSEEGDTGCKXKEWYDAIVTEVLAACWFYPAGEYRQEYLVKGGHSAKKGCSDPIRC

SEQ ID NO: 299484 - protein, 249 aa, Zea mays
  unsure (1)..(249): unsure at all Xaa locations
  Clone ID: MRT4577_3619C.1.pep
DPWRRAGXILAMGLLAAVLSPALSTRSFISMPADVSSPVTLANGLSYGYHANSCPQLQDIVWPIVESAVLGEVAIAAGLLRIFFHDCFPQGCDASVLLTGPNSERDLPPNQTLQPRAMQLIEDVRVKVHAACGATVSCADIIALATRDAVFVAGESEMFYFYDLPLGRFDSLEPANSSAVFDLPQSTADANTLINAFKSRNLEPIDLVALSGAHTVGKAQCSSFNNRFSRDADFXRRLAANCSSDPNRL

SEQ ID NO: 299485 - protein, 106 aa, Zea mays
  Clone ID: MRT4577_361C.1.pep
EDNKEDQPEKPKRKSKDTTSTELPDDTRTLTKKNLVASEAAIKKSGVVYLSRIPPFMKPAKLRSLLEPYGTINRIFLAPEDPASHARRVRAGGNKKRSYTEGWVEF

SEQ ID NO: 299486 - protein, 750 aa, Zea mays
  Clone ID: MRT4577_36200C.1.pep
MPFGLMNAGATYQRCMNHVFGEHIGRTVEAYVDDIIVKTRKASDLLSDLEVTFRCLKAKGVKLNPEKFVFEVPRGMLLGGLPLYRLLRKAECFTWTPEAEEALGNLKALLTNAPILVPPAAGEALLIYVAATTQVVSAAIVVERREEGHALPVQRPVYINEVLSETKARYPQVQKLLYAVILTRRKLRHYFESHPVTVVSSFPLGEIIQCREASGRVAKWAVEIMGKTILFAPRKAIKSQVLADFVAEWVDTQLPTAPIQPELWTMFFDGSLMKTGAGAGLLFISPLGKHLRYVLRLHFPASNNVAEYEALVNGLRIAIELGVQRLDARGDSRLVIDQVMKNSHCRDPKMEAYYDEVRRLEDKFYGLELNHIARRYNETADELAKIALGRTTVPPDVFSRDLHQPSVKTDDTPEPEKASAEPEAPSAQSEVPLARPEAPSAQSKVPSARSEAPSAQPEAPSAQPEAPSVRPEVPSAPEGEALRIEEERSGVTPNRNRHTPYLQYLHRGELPLDRAEARRLARRAKSFVLLGDGKELYHHSPSGILRRCISIAEGQELLQEIHSGACGHHAAPRALFGNAFQQGFYWMTAVADATRIVRTCEGCQFYARQTHLPAQALQTIPITWPFAVWGLDLVGPLQKAPGGYTHLLVAIDKFSKWIEVRPLNSIRSEQAVAFFTNIIHRFGVPNSIITNNGTQFTGRKFLDFCEDHHIRVDWAAVAHPMTNGQVERANGMILQGLKPRIYNDLNKFGK

SEQ ID NO: 299487 - protein, 129 aa, Zea mays
  Clone ID: MRT4577_36201C.1.pep
SARAANRTRAPAPPAAGPSAALPAAPSPSWVTPPPPPPGTSTAATLIPTGAATSSSPSSDHTYRQRQRHRHGAGVRGSRRGRTNPPGSTMARASPRWAAPVDSIGGQRRALGLVSVREKRGESVEADAW

SEQ ID NO: 299488 - protein, 606 aa, Zea mays
  unsure (1)..(606): unsure at all Xaa locations
  Clone ID: MRT4577_36202C.1.pep
LKAKGVKLNPEKCVFGVPRGMLLGFIVSERGIEANPEKIAAITSMGPIKDLKGVQRVMGCLVALSRFISRLGERGLPQYRLLRKTECFAWTPEAEEALENLKALLTKAPVLVPPADGEALLVYVAATTQVVSTAIVVERQEEGHALPVQRPVYFVSEVLSETKIRYPQVQKLLYAVILTRRKLRHYFESHPVTVVSSFPLREIIQCREASGRIAKWAVEIMGETISFAPRKAIKSQVLADFVAEWVDTQLPTVPIQPELWTMFFDGSLMKTGAGAGLLFISPLGKHLRYVLRLHFPASNNVAEYEALVNGLRIAIELGVRRLDARGDSQLVIDQVMKNSHCHDPKMEAYCDEVRRLEDKFFGLELNHIARRYNETADELAKIASGRTTVPPDVFSRDLHQPSVKVDDAPEPEAPSAQPEAPSARPEVPSAQPEVPSAPEAEALNVEEELSGAMPDRNWQAPYLRYLRRGELPLDQAEARRVAXRAKSFVLLGDEEELYHRSPSGILQRCISIAEGQKLLQEIHSGACGHHAAPRALVGNAFRQGFYWPTAVADATRIVRTCEGCQFYAXQTHLPAQALQTIPITWPFAVWGLDLVGPLSMATSRCV

SEQ ID NO: 299489 - protein, 77 aa, Zea mays
  Clone ID: MRT4577_36203C.1.pep
FFFKRTLAPTCWSEIEEPGMTGKLQTFPALSKPRVPQDRLITKPRVRERNRDREQPSCFRCFLPHSGPLSGERKKKK

SEQ ID NO: 299490 - protein, 1434 aa, Zea mays
  unsure (1)..(1434): unsure at all Xaa locations
  Clone ID: MRT4577_36204C.1.pep
MGDTSGVDLASEMKTSVVSPQHANPKQTDDASTLAKDMLGISLAPETMVQSVPDATSSPSVDQEQPGESLRDYIRRFSKQRTELPNITDSDVIGVFLVGTTCRDLVSKLGRKTPTRVSELMDIATKFASGQEAVEAIFWKDKQPQGRQPEDVPEASAQRGTKKKGKKKSQSKRDAADADLVAAAEHRNPRKPPGGANLFDKMLKESCPYHQGPVKHTLEECVMLWRYFHKAGPPAEGGRAHNNDKKEDHKAEEFPEVHDCFMIYGGQVANASARHHKQERREVCSVKVAAPVYLYWSDKPITFDQGDHPDRVPSPGKYPLVVDPIIGNVSLTKVLMDGGSSLNIIYAETLGLLQIDLSTIWVGAAPFHGIIPGKRVQPLGQLDLPVCFGTLSNFRKETLTFEVVGFRGTYHAVLGRPCYAKFMVVPNYTYLKLKMSGPNGCVEYAEAFNESEALIADLENLSKEVPDAKRHAGNFEPAETVFAWSPSDMPGIPRDVAEHSLDIRAGARPVKQPLRRFDEEKRRAIGEEIHKLMAAGFIKEVFHPEWLANPVLVRNKGGKRRMCVDYTGLNKACPKVPYPLPRIDQIVDSTAGCETLSFLDAYSRYHQIRMKESDQLATSFITPFGMYCYITMPFGLRNAGATYQRCMNHVFGEHIGRTVEAYVDDIVVKTRKASDLLSDLETTFKCLKAKGVKLNPEKCVFGVPRGMLLGFIVSERGIEANPEKIAAITNMGPIKDLKGVQRVMGCLAALSRFISRLGERGLPLYRLLRKAERFTWTPEAEEALGNLKALLTSAPILVPPAAGEALLIYVAATTQVVSVAIVVERREEGHALPIQRSVYFISEVLFETKIRYPQIQKLLYAVILARRKLRHYFESHPVTVVSSFPLGEIIQCREASGRIAKWVVEIMGETISFAPRKAIKSQVLADFVAKWVDTQLPAAPIQLELWTMFFDGSLMKTGAGAGLLFISPLGKHLCYVLRLHFPASNNVAEYEALLVIDQVMKNSHCRDPKMEAYCDEVRRLEDKFYGLELNHIARRYNETADELAKIASGRTTVPPDVFSRDLHQPSVKTDDTPKPEKVSALPEAPSAQPEAPSAAEGEALRVEEERNGVTPNRNWQTPYLXISTEESYPSTEPKLGDWRGAPSRSSCWRLEPLLETPSDRVSTGQPRWPTPLGLYTPAKGVNSTQSRPTXRSGFANNTHHLVVFCVGSGPRXPLQKAPGGYTHLLVAINKFSKWIEVRPLNSIRSEQAVAFFTNIIHRFGVPNSIITNNGTQYTGRKFLDFCEDHHIRVDWDVVAHPMTNGQVERANDMILQGLKPQIYNDLNKFGKRWMKELPSVVWSLRTTPSRATGFTSFFLVYEAEAILPTDLEYGSPRTRAYDDQSNRTNREDSLDQLEEARDMALLHSARYQQSLRRYHARGVRSRDLLVGDLVLRLR

SEQ ID NO: 299491 - protein, 646 aa, Zea mays
  Clone ID: MRT4577_36205C.1.pep
MLLGFIVSERGIEANPEKIVAITSMGPIKDLKGIQRVTGCLAALSRFISRLGERGLPLYRLLRKAECFTWTPEAEEALGDLKALLTNAPILVPPAAGEALLIYVAATTQVVSAAIVVERREEGHALPVQRPVYFISEVLSETKIRYPQIQKLLYAVILTRRKLRHYFESHPVTVVSSFPLGEIIQCREASGRIAKWAVEIMGETISFAPWKAIKSQVLADFVAEWVDTQLPTAPIQPELWTMFFDGSLMKTGAGAGPLFISPLGKHLRYVLRLHFLASNNVAEYEALVNGLRIAIELGVRRLDARGDSQLVIDQVMKNSHCRDPKMEAYCDETDDTPEPEEASAQPEAPSAQPEAPSARPEAPSARPEAPSAPEGEALRVEEERSGATPNRNWQTPYLQYLHRGELPLDRAEARRLARRAKSFVLLGDGKELYHRSPSGILQRCISITEGQELLQEIHSGACGHHASPRALVGNAFRQDFYWPTAVADATRIVCTCQGCQFYARQTHLPAQALQTIPITWPFAVWGLDLVSPLQKAPGGYTHLLVAIDKFSKWIEVRPLNSIRSEQAVAFFPNIIHRFGVPNSIITDNGTQFTGRKFLDFCEDHHIRVDWAAVAHPMTNGQVERANGMILQGLKPRIYDDLNKFGK

SEQ ID NO: 299492 - protein, 949 aa, Zea mays
  Clone ID: MRT4577_36206C.1.pep
MSAVSPQHANSKQANDTSMLARDLLGVTLLPETTVQSTLDVTSSPPVDQEVPTDSNLVPFGFSLDPPSDFASVDALIEASPNPPGYRMRSPWDRLTAVSTYGPSGSEEDDEPDFCWDFSGLGNPSAMRDFMTACNYCLSDYSDGSRSLGDEDCGPSHECFHVDLGGPGEGNHLGIPENGDPPRPAPRVDILWELVVVPVPAGGHDPQLEQIREMQARLNEGAGTLEPFRRDIGQEWAGQPPAGEARHLPQGIQHRIADDVRARLPPASSGVGQNLAAAAILLRAMPEPSTTEGRCIQGELKNLLEDAAVRLPESSASRRQGYPSEHRAATSRFMREASVHTGRTRNTAPAAPGRLGNEHHHHNRRTHLDEKVRRGYHPRRGGRYDSGEDRSPSPEPPGPQAFSRAIRQAPFPTRFRTPTTITKYSGETRPELWLVDYRLACHLGGTNDDNLIIRNLPLFLSDTARVWLEHLPPGQIFNWDDLVQAFAGNFQGTYMRPGNSWDFRSCRQQPGESLRDYIRRFSKQRIELPNVTDSDVIGAFLAGTTCRDLVSKLGRKTPTRASELMDIATKFSSGQEAKGKKKSQAKRDAADADLVAAAEYKNPRKPPGGANLFDKMLKEPCPYHQGPVKHTLEECAILRRHFHKAGPPAEGGRARDDDKKEDHMAGEFPEVHDCFMIYGGQVANASARHRKQERREVCSIKVAAPVYLDWSDKPITFDQGDHLDRVPSPGKYPLVVDPVIGNVRLTKVLMDGGSSLNIIYAETLGLLWIDLSSVRAGAVPFHGIIPGKLVQPLGQLDLPVCFGTPSNFRRETLTFEVVGFRGTYNAVLRRPCYAKFMAVPNYTYLKLKMPGPNGVITIGPTYRHAYECDVECVEYAEALIADLESLSKEAPDVKRHAGNFEPAETVKSVPLNPSNDASKLIRISSVGSMLRRRRSYRKKWSSAEAVCIR

SEQ ID NO: 299493 - protein, 1460 aa, Zea mays
  unsure (1)..(1460): unsure at all Xaa locations
  Clone ID: MRT4577_36207C.1.pep
MWSTWDRLTVVSTYRPPGSEEDDEPDSGWDFSGLDNPSAMRDFMTACDYCLFDCSNGGHNLDDEDCDPSRECFHVDLGGLDEGNHLGMPEDGDPPRPAPRVDILRELAVVPVPTGGQDAQLEQIREMQARLDEEAGQLVQLRQNIGQEWAGRAPAREARHLPQDVQHRIADDARASLPPASSGVGQNLAAAAILLRAIPEPSTTEGRRIQGELKNLLEDAAVRRGKSSASRRQGYPLEHSAATSRFMRDASVHTGRTRDATPAAPGRLGNEHHRRDRRAHLDEKMRRGYHPRRGGRYDSREDRSPSPKPPSPQAFSRAIRRASFPTRFRTPPTITKYSGETRPELWLADYRLACQLGGTDDDNLIIRNLPLFLSDAARAWLEHLPPAQISNWDDLVKAFTENFQGTYVRPGNSWDLRSCRQQPGESLRDYIRRFSKQRTELPNITDSDVIGAFLAGTTCCDLVSKLGRKTPTRASELMDIATKFASGQEAIEAIFRKDKQPQGRQQEDVPEAFAQRDTKKKGKKKSQAKHDIADADLVTAAEHRNPRKPPGGANLFDKMLKESCPYHQGPVKHTLEECVMLRRYFHKAGPPAEGGKGHDNDKKEGHKAEEFPEVHDCFMIYGGQVANASARHHKQERREVCSVKVAAPVYLDWSDKPITFDQGDHPDRVPSPGKYPLVVDPIIGNVRLTKVVMDGGSSLNIIYAKTLGLLQIDLSTIRAGAAPFHGIIPGKRVQPLRQLDLPVCFGTPSNFRKETLTFEVVGFRGTYHAVIGRPCYAKFMVVPNYTYLKLKMPGPNGVITVGSTYRHAYECDVECVEYAEALAESEALIANLESLSKEVPDAKRHTGNFEPTEVVKDVAEHSLDIRAGARPVKQPLRRFDEEKRRAIGEEIHKLMAAGFIKEVFHPEWLANPVLVKKKGGKWRMCVDYTGLNKACLKVPYPLPRIDQIVDSTAGCETLSFLDAYSGYHQIRMKESDQLATSFITPFGMYCYITMPFGLRNAGTTYQRCMNHVFGEHIGQTVEAYVDDIVVKTRKASDLLTDLETTFKCLKAKGIKLNPEKCVFGVPRGMLLGFIVSERGIKANPEKITAITNMGPIKDLKGVQRVMGCLAALSRFIPRRGERGLPLYRLLRKTERFTWTPEAEEALGNLKALLTSAPPSCAAIVVETREEGHALPVQRSIYFISEVLSETKIRYPQIQKLLYAVILTRRKLRHYFESHPVTVVSSFPLGEIIQCREASGAGAGLLFISPLGKHLRYVLRLHFPASNNVAEYEALVNGLCIAIELGVRRLDARGDSQLVIDQVMKNSHCRDPKMEAYCDEVRRLKDKFYGLELNHVARRYNETADELAKIASGRTTVPPDVFSRDLHQPSVKTDDTPEPEEASAQPEAPSPQPEAPSAAKGEALRVEEERNGVTPSRNWQTPYLXISTEESYPSTEPKLGDWRDAPSRSSCYSSTYLFYEM

SEQ ID NO: 299494 - protein, 29 aa, Zea mays
  Clone ID: MRT4577_36208C.1.pep
SVPMGHCHSFYEASRLLSLIALFSQGRSQ

SEQ ID NO: 299495 - protein, 481 aa, Zea mays
  unsure (1)..(481): unsure at all Xaa locations
  Clone ID: MRT4577_36209C.1.pep
MAAEGAGGRGRAMRYPPLSALVVSAIAAFSAVIVLAVVHSAYDDAMSRTRTLLGHNLEPTPWHPFPHDKGRPPARAALRCAPSIACLPPLSPSSSSSPPQGNKKKKQKQCPAYFAAIHRDLAPWRGQGRGVTRALLDEARRRASMRVTITGGGRRLHVDLYYACVQSRALFTVWSLLQLMRRYPGRVPDVDLMFDCMDRPAINRTEHGDGALPPPPLFRYCTTRDHFDIPFPDWSFWGWPETNIEPWNHEFKNIRAGARATRWADRVPTAYWKGNPDVASPLREALLGCNDTALWRAEIMRQNWDDEARSGYQHSRLSAQCTHRYKIYAEGFAWSVSLKYILSCGSMALLIEPRYQDFFSRGLEPRVNYWPXVAALGMCESIRDAVDWGNANPDEAERVGRRGQRLVQDLRMHAVYDYMLHLLTEYARLLIDQDHGLSPPPHAQEACEASLLCLADDKQRRFLHASKADPAPGDPCVLPPP

SEQ ID NO: 299496 - protein, 57 aa, Zea mays
  Clone ID: MRT4577_3620C.1.pep
STAKGNGWGNHCYVCCKSTPIVCIYMKNLIRWGLFVPPSTVKKQTCLELPVKISGYI

SEQ ID NO: 299497 - protein, 996 aa, Zea mays
  Clone ID: MRT4577_36210C.1.pep
MGSLQQPLQPGTVLRFGSLEFMSLDGSYDMILLPPLDDSDNGGRQPARRRRNRRCLPRVVEEQHSSSPRPLPRQRRRRRGNQGQAGGSASSTVERVDSPSAPTGGASGIDLAFETKTSTVSPRHANSEQTDDAGTLAKGLQDVTLVPETTAQSVPDVTSSPPVDQEVPTDSHLTSFGFSLDPPSGFALAGALVEASPNPLGFHMRSPWDRLTDVSTYGPSGSEEDDEPSFCWDFSRLGNPSAMRDFMTACDYCLSDCSDGSRSLGDKGCSPSRECFHVDLGGPSEGNHLGMPEDGDLPRPVPRVDIPRELAVVPVQAGGHGPQLEQIRGVQARLDDGAGALEPIRRDVGQAWAGQPPAGEIRHLPKGFQHRIADDVRVRPPPSSSGVGQNMAAAAMLLRAMPEPSTTEGRRIQGELKNLLEGVARVRRGYHPRCGGRYDSGEDRSPSPEPPGPQAFSRAIRRAPFPTQFRPPTTITKYSGETRPELWLADYRLDCQMGGTDDDNFIIRNLPLFLSDTAHAWLEHLPPGQISNWDDLVQAFGGNFQGTYVRPGNSWDLRSCRQQPGESLRDYIRRFSKQRTELPNITDSDVIGAFLAGTTCRDLVSKLGRKTPTRASELMDIATKFASGQEAVEAIFRKDKQPQGRPSEDAPEATTQRGAKKKGKKKSQAKRDAADADLVAVAEYKNPRKPPGGANLFDKMLKEPVGPPAEGGRTRDDEKKEDPQAGEFPEVRDCFMIYGGQAANASARHRKQERREVCSVKVAAPVYLDWSDKPITFDQDDHPDHVPSPGKYPLVVNPIIGDVRLTKVLMDGGSSLNIIYAETLGLLRVDLSSVRAGAVPFHGIIPGKRVQPLGRLDLPVCFGTPSNFRRETLTFEVVGFRGTYHAVLGRPCYAKFMAVPNYTYLKLKMPGPNGVITVGPTYKHAFECDMECVEYAEALAESEALIADLESLSKEVPDVRRHAGNFEPAETVKAVPLNPSSDASKQIRIGSELDPK

SEQ ID NO: 299498 - protein, 774 aa, Zea mays
  unsure (1)..(774): unsure at all Xaa locations
  Clone ID: MRT4577_36211C.1.pep
MPFGLRNAGATYQRCMNHVFGEHIGRTVEAYVDDIVVKTRKASDLLSDLEVTFRCLKAKGVKLNPEKCVFGVPRGMLLGFIVSERGIEANPEKIAAITSMGPIKDLKGVQRVMGCLAALSRFISRLGERGLPLYRLLRKAECFVWTPEAEEALGNLKALLTKAPVLVPPADGETLLVYVAATTQVVSAAIVVERQEEGHTLPVRRPVYFISEVLSETKIRYPQVQKLLYAVILTRRKLRHYFESHPVTVVSSFPLGEIIQCREASGRIAKWAVEIMGETISFAPRKAIKSQVLADFVAEWVDTQLPTTPIQPELWTMFFDGSLMKTGAGAGLLFISPLGKHLRYVLRLHFPASNNVAEYEALVNGLRIAIELGVRRLDARGDSQLVIDQVMKNSHCHDPKMEAYCDEVRRLEDKFFGLELNHIARCYNETADELAKIASGRTTVPPDVFSRDLHQPSVKLDDAPEPEVPSAQPEVPSAQPEVPSAPEGGALNVEEGQSGATPDQDWQAPYLXISVEESYPSTKSRLGGXRDAPSHSSCWATKRSSTIAAPRASSSDASPSPKXRELLQKKAPGGYTHLLVAIDKFSKWIEVERANGMILQGLKPRIYNDLNKFGRRWMKELPSVVWSLRTTPSRATGFTPFFLVYGAEAILPTDLEYGSPRARAYTEQSNQASREESLDQLEEARDRALLHSARYQQSLRRYHARGVRSRELQVGDLVLRLRQDARGRHKLTPPWEGPFVIAKVLKPGTYKLASNQGEIYGXLGTSNSYVASTL

SEQ ID NO: 299499 - protein, 114 aa, Zea mays
  unsure (1)..(114): unsure at all Xaa locations
  Clone ID: MRT4577_36212C.1.pep
YLHDYPRPAWVHMDVSSGSVLLAGDGPRAKLRGFGAARAXRAPPPASTANXAEEALFTMTSRIAGTRGYIAPDYLEHGVVSPKADVYSLGVVLLELVTGRDAEELVGDSVGDPF

SEQ ID NO: 299500 - protein, 65 aa, Zea mays
  Clone ID: MRT4577_36213C.1.pep
NLTYGIDYFFEKKKKKKKKKKKKKKKKKKKKKKKKKKKKGRKKKRYFHLPCNHNPNRYPVGKPIF

SEQ ID NO: 299501 - protein, 114 aa, Zea mays
  unsure (1)..(114): unsure at all Xaa locations
  Clone ID: MRT4577_36214C.1.pep
RLETHQAKRTINTLSTLATKILALLALFALLESATHAFIISQSSLALRAIISQILSPDTLMGFEHIDAQAYRLXLALAASVLQQPIVQLRQQYLGHIYLQTISTQQQQQFLSSL

SEQ ID NO: 299502 - protein, 116 aa, Zea mays
  Clone ID: MRT4577_36215C.1.pep
FYYPSFLFAFLSLTFGLRFFSKSLRVWKKSFLLILFPCFAAKNYFFFVGFLFLLWNFLVEKVKFFSYFFGVIVLFMLARFAWFFLKLFFSFYPECCFRLFPKLFLNHIWFLVFLLS

SEQ ID NO: 299503 - protein, 136 aa, Zea mays
  Clone ID: MRT4577_36216C.1.pep
MAAAAPHAYSSLVPVSAARPLSGSTVSFGASCHKWRKVPAWRLHCVAEDEAEEVKDFGVNMALSMLKFYKREISPLLPSSCRYVPTCSEYSMQAYKRYGVVKGSILTAWRLCRCNPLGGYGYDPPKWFGEEDVPLQ

SEQ ID NO: 299504 - protein, 94 aa, Zea mays
  unsure (1)..(94): unsure at all Xaa locations
  Clone ID: MRT4577_36217C.1.pep
TLAAMANLVAPNLSPAASARXTNPLVQPSRIQQATAAGIIRLXPQTIQHCMNALLQHAPVMHLLAQSIMAQQLQQLVLANLADYSEXQQLLSFN

SEQ ID NO: 299505 - protein, 150 aa, Zea mays
  unsure (1)..(150): unsure at all Xaa locations
  Clone ID: MRT4577_36218C.1.pep
FPFPPWSYPPPXSPPPPARPXSSPSSMPPPSXAPPVLHTSSFNRTLPDGGYPHCSPSVPPPCVHRAPSKPLASVXRPHPEAPLQIPDPPLSAPPLGGTGKVYRPVPPPPKQMLKKKKHLFPFPCYVKRVPLGEMHNNRFPPQTKKTKKKK

SEQ ID NO: 299506 - protein, 79 aa, Zea mays
  Clone ID: MRT4577_36219C.1.pep
KKNEYGGRGKYTIRLAPYPVIHRLLMGPNTFLKTQPGGDPAPVHFIKNYHPYRHKVLTPDIFLQMDSLRESIKGHITPP

SEQ ID NO: 299507 - protein, 106 aa, Zea mays
  Clone ID: MRT4577_3621C.1.pep
TRSPQPNESVNRVSEQGPVRGPLLQAACPGVLCIWLIRLAGWVSGLESGPFALSYFSHLAPPFGPPGFPVCVLGWFVVGNCFRTAISPPPPFCPFFPQVGSPGGVP

SEQ ID NO: 299508 - protein, 79 aa, Zea mays
  unsure (1)..(79): unsure at all Xaa locations
  Clone ID: MRT4577_36220C.1.pep
KGLADXLHDLGEPVADRTLVLNLLRGLSPRYGHLKAPIKSTMPFPTFHVVQNELLFKELTMTNEAPMPXLALYSTTLSA

SEQ ID NO: 299509 - protein, 68 aa, Zea mays
  Clone ID: MRT4577_36221C.1.pep
GKPSPFYFRQGEGCALCITVFHLVTGELIPLGTGNRIYLKKPNLDCWQFHKQNLGTFNHPTGNKQWID

SEQ ID NO: 299510 - protein, 104 aa, Zea mays
  Clone ID: MRT4577_36222C.1.pep
YFLTADDCLAHLELAFKFDALTDDVHGVVGQTYRSDYVSHFDVRASMPTMGGDATFTTSSLFAADCSVARYGVSRGNDGAAVLSELAGVTCASGMDGKGVVCKK

SEQ ID NO: 299511 - protein, 347 aa, Zea mays
  unsure (1)..(347): unsure at all Xaa locations
  Clone ID: MRT4577_36223C.1.pep
MSTHAPRDIQARLWCSSPIARERVLSNGGGRNPQSLVDVDGDHGSATATQEIGAPKRAKWIHERKLFLIQLLKDHDVPGFRTQNAWCKEAWNNIVRRLNEKFGTSYTIGQVKQKEQDLKKDYRSVKELVEQSGFGWNGERMMVEAPDSVWASFAARKNNESALHWRDKSFPYYDDLSKLYDGENFMCFYELXSNCLQIHPSHMCFPKYDSAXVVMLKEELVKVHEKEVPPSSTQITSELPDSRRGKKKKNKSASPPDGFHERYLKLKKEEIDRFAAIEEKKLEDPYSINKCITVLEDLDGLQVGDLLMASDIFKIKDNREVFLSFKNDALRLAWITREIGKIADHQN

SEQ ID NO: 299512 - protein, 67 aa, Zea mays
  Clone ID: MRT4577_36224C.1.pep
SFLSPIFRPGLLLLLFNWPCRGNFKVCPQKKKKKKKKKKKKKKKKKKKKKKKKKKKKKKKKKKKKKK

SEQ ID NO: 299513 - protein, 60 aa, Zea mays
  Clone ID: MRT4577_36225C.1.pep
SARAFTKTGMFPASSRPVREEILGSPPVTLPQDVTNADWSYSAPALTRHIHWQIAIEPCA

SEQ ID NO: 299514 - protein, 88 aa, Zea mays
  Clone ID: MRT4577_36226C.1.pep
GLPDGVGFLSSPGRVCVPGFPGGVTLGGAFLKKSPPPPPPGGGLFFFLNPKKKKKKKKKKKKKKKKKKKKKKKKKKKKKKKKKKKKQN

SEQ ID NO: 299515 - protein, 68 aa, Zea mays
  Clone ID: MRT4577_36227C.1.pep
VVVTLCIMQFLSWNVALGLIINECMYHVVSYHCSSVSIPQRLNFLYSFTPYHSAISFMLPCLNFLLLV

SEQ ID NO: 299516 - protein, 606 aa, Zea mays
  Clone ID: MRT4577_36228C.1.pep
MGCLAALSRFISRLGERGLPLYRLLRKTEHFTWTPEAEEALGNLKALLTSAPIQVPPAAGEALLIYVAATTQVVSAAIVVERREEGHALLVQRPVYFIGEVLSETKICYPQIQKLLYTVILTRRKLRHYFESHPMTVVSSFPLGEIIQCREASGRIAKWAVEIMGETISFAPRKAIKSQVLADFVAEWVDTQLPAAPIQPELWTMFFDGSLMKTGAGAGLLFISPLGKHLHYVLRLHFPASNNVAEFEALVNGLRIAIELGVRRLDARGDSQLVIDQVMKNSHCRGPKMEAYCDEVRRLEDKFYGLELYHVARRYNELAKIASGRTTVTPDVFSRDLHQPSVKTDDTPEPGKASALPEAPSTQPEAPSAPEGESLRVEEERNGVTPNQNWQTPYLQYLHQGELPLDRAEARRLARRAKSFVLMGDGKELYHHSPSGILQRCISIAEGQELLQEIHSGACGHHAAPRALVGNAFRQGFYGPTAVADATRIVRTCQGCQFYARQTHLPAQALQTIPITWPFAVWGLDLIGPMQKAPGGFTHLLVTIDKFSKWIEVRPLNSIRSEQAVAFFTNIIHRFGVPNSIITDNDTQFTGRKFLDFCEDHHIRVD

SEQ ID NO: 299517 - protein, 1023 aa, Zea mays
  unsure (1)..(1023): unsure at all Xaa locations
  Clone ID: MRT4577_36229C.1.pep
MGSLQQPLRPGTVLRFGSLEFMSFDGSYDMKLLPPPRDNDNGGRQPSRRRRNRRRLPRVVEEQHSSSPRPLPRQRRRRRGNQGQAGGRASSAVERVNVPSAPTGGASGVDLAFETKASAVSPRHAKPEQVDDASALAKSLQDVALVPEATVQSVLDVTSSPLDDQKVPTDSHPTSFGLSLNPPSDLALAGALVEASSNPLGFRLWSPWDRLTDVLTYGPSGSEEDDDPNICRDFSGFGNPSAMRDFMTACDYCLSDYSDGSRSLDDEDCGPSRECFHVDLGGPSEGNHLGMPEDGDLPRPVPRADIPRELAVVPVSAGGHDPQLEQVRGAQARLDEGAGALEPIRRDIGQAWAGQPPAGEIRHLPQGLQHRVAYDVRVRPPPASSGVGQNLAAAAMLLHAMPEPSTTEGRRIQGELKNLLEGAAVRRAESTASRRQGYPSEPHAATSRFMREASIYTGRTRNTAPAAPGHLGNEHRHRDRRAHLDERAFSRAIRRAPFPTRFRPPTTITKYSGETRPELWLADYHLACQLGGTDDDNLIIRNLPLFLSDTARAWLEHLPPGQISNWDDLVQAFAGNFQGTYVRPGNSWDLRSCRQQPGESLRDYIRRFSKQRTELPNITDSDVIGAFLAGTTCRDLVSKLGRKTPTRASELMDIATKFASGQEAVEAIFRKDKQPQGRPSKDAPEASTPRGAKKKGKKKSQAKRDTADADLVAAAEYKNPRKPPEGANLFDKMLKEPCPYHQGPVKHTLEECVMLRRHFHRAGPPAEGGRARDDDKKEDHQAGEFPEVRDCFMIYGGHAANASARHRKEERREVCSVKVAAPVYLDWSDKPITFDQADHPDHVPSPGKYPLVVDPVVGDVRLTKVLMDGGSSLNIIYAETLGLLRVDLSSVRAGAAPFTGIIPGKRVQXTYHAVLGRPCYAKFMXVPNYTYLKLKMPGPNGVITVGPTYKHAFECDVECVEYAEALAESEALITDLESLSKEVPDVKRHAGNFEPVETVKAVPLDPSGDASKQIRIGSGLDPK

SEQ ID NO: 299518 - protein, 315 aa, Zea mays
  unsure (1)..(315): unsure at all Xaa locations
  Clone ID: MRT4577_3622C.1.pep
MIATHLSPGLKQYRFPSPLHSTSHNHHLPVHLPLPRRHRNFAKPAAAVPDLLASVESVASAASVLAAIVLVHESGHFLAAASRGIHVSQFSIGFGPALARFRLGPVEYALRAIPLGGYVGFPDDDPESGFAPDDPDLLRNRPVPDRLLVVSAGVAANLAFAFLIVYAQALTVGVPVQAQLPGVLVPEVLPGXLTGTVFDGLRQTLLNFSQSADKVSGPVAIIAVGAEVARSSADGLFQFAAVINLNLAAITLLPLPALDGGTSALILLEAARGGRKIPREVEQGIMSSGILVVLMVGMFLIVRDTLNLDFIKEIL

SEQ ID NO: 299519 - protein, 102 aa, Zea mays
  Clone ID: MRT4577_36230C.1.pep
PMTKHKRAGQGNPIFSIFGPPVKKVGEQVTIRASRFSFYLPKEQDQTFTFKRDPGPQALHGTTGDTKLSNCLDLGPTFWVFKRQSGFLRDHMTPPPSQRRGF

SEQ ID NO: 299520 - protein, 904 aa, Zea mays
  Clone ID: MRT4577_36231C.1.pep
YHQIRMKESDQLVTSFITPFGMYCYVTMPFGLRNAGATYQRCMNHVFGEHIGRTVEAYVDDIVVKTRKASDLLSDLETTFRCLKAKGVKLNPEKCVFGVPRGMLLGFIVSERGIEANPEKIAAITNMGPIRDLKGVQRVMGCLAALSRFISRLGERGLPLYRLLRKIERFTWTPEAEEALGNLKALLTSAPILVVSIAIVVERREEGHALPVQRPVYFISEVLSETKIRYPQVQKLLYAVILTRWKLRHYFESHPMTVVSSFPLGEIIQCREASGRIAKWTVEIMGETISFAPRKAIKSQVLADFVAEWVDTQLPVAPIQPELWTMFFDGSLMKTGAGAGLLLISPLGKHLRYVLRLHFPASNNVAEYEALVNGLRIAVELGVRRLDARGDSQLVIDQVMKNSHFRDPKMEAYCDEVRRLEGKFYGLELNHIARRYNETADELAKIASGRTTVPPNVFSRDLHQPSVKTDDTPEPEKASAQTEAPSAPEGEALRVGGERNGVPPNRDWQTPYLQYLHRGELPLDRAEARRLARRAKSFVLLGDGKELYHRSPSGILQRCISIAESQELLQEIHSGACGFYWLTAVADATRIVRTCQGCQFYARQTHLPAQALQTIPITWPFAVWGLDLVGPLQKAPRGYTHLLVAIDKFSKWIEVRPLNSIRSEQAVAFFTNIIHRFGVPNSIITDNGTQFTGRKFLDFCEDHHIRVDWAAVAHPMTNGQVERANGMILQGLKPRIYNDLHKFGRRWMKELPSVVWSLRTTPSRATGFTPFFLVYGAEAVLPTDLEYGSPRTRAYDDQRNQTNREDSLDQLEEARDMALLHSTRYQQSLRRYHARGVRSRDLQVGDLVLRLRQDARGRHKLTPPWEGPFVIAKVLKPRTYKLANSQGEVYSNAWNIRQLRRFYP

SEQ ID NO: 299521 - protein, 656 aa, Zea mays
  Clone ID: MRT4577_36232C.1.pep
MPEPSTTEGRRIQGELKNLLEDAAVRRAESSASRRQGYPSEHRAATSRFMREASVHTGRTRNTAPAAPGLLGNEHHHRNRRTHLDEKVRRGYHPRRGERYDNGEDRSPSPEPPGPQAFSRAIRRAPFPTRFRTPTTITKYSGETRTKLWLADYRLACHLGGTDEDNLIIRNLPLFLSDTARAWLEHLPLGQISNWDDLQPGESLRDYIRRFSKQRTELPNVTDADVIGAFLAGTTCHDLVSKLDRKTPTRASELMDIATKFASGQEAVEAIFRKDKQPQGRQPEDVPEASTQRGTKKKGKKKSQAKRDAADANLVAAAEYKNPRKPPGGANLFDKMLKEPCPYHQGPVKHTLEECAMLRRHFHKAGPPVEGGRARDDDKKEDHKAGEFHEVHDCFMIYGGQVASASAQHCKQERREVCSVKVAAPVYLDWSNKPITFDQGDHPDRVPSPGKYPLVVDPVIGNVRLTKVLMDGGSSLNIIYAETLGLLRIDLSSVRAGAAPFHGIIPGKCVQPLGQLDLPVCFGTPSNFCRETLTFEVVGFRGTYHAVLGRPFYAKFMAVPNYTYLKLKMPGPNEVITVGPTYRHAYECDVECVEYVEALAESKALIADLESLSKEAPEVKRHAGNFEPAETVKSVPLDPSNDTSKQIRIGSELDPK

SEQ ID NO: 299522 - protein, 62 aa, Zea mays
  Clone ID: MRT4577_36233C.1.pep
RLLLILRVKILVVYIDSLKLKVYYDHAYIIGKNVHDNVCSLTPLSIHVRCTCVIMQHTRRKA

SEQ ID NO: 299523 - protein, 232 aa, Zea mays
  Clone ID: MRT4577_36234C.1.pep
MSGVVLAPETTTGVASQQRANPKRTDDAGTLARDLSDISLAPEITTHSIPDATLPPSINQEPGESLREYIRRFSKQCTELPNITDSDVIGAFLAGTTCRDLVSKLGRKTPTKASELMDMATKFASGQEAVEAIFRKDKQPQGRQKEDAPEASVQRGTKKKTRKKAQAKRDAIDADLVAAAEHRHPRKPPGGVNMFDKMLKESCPYHRGPVKHTLEECDVTPGFRGTKTRART

SEQ ID NO: 299524 - protein, 499 aa, Zea mays
  Clone ID: MRT4577_36235C.1.pep
GPPGLETPTLIIRNLPLFLSDTARAWLEHLPPGQISNWDDLVQAFAGNFQGTYVRPGNSWDLRSCRQQSGESLRDYIRRFSKQRTELPNITDSDVIGAFLAGTTCRDLKAVEAIFRKDKQPQGRPSEEAPEASTQRGAKKKGKKKSQSKRDAADADLVTAAEYKNPRKPPGGADLFDKMLKESCPYHQGPVKHTLEECVMLRRHFHRAGPPAEGGRAHDDDKKEDHQAGEYPEVRDCFMIYGGHVANASARHRKQERREVCLVKVAAPVYLDWSDKPITFDQANHPDHVPSPGKYPLVVDPIVGDVRLTKVLMDGSSCLNIIYAETLRLLRVDLSSVRAGAAPFHGIIPGKRVQPLGRLDLPVCFGTPSNFRRETFTFEVVGFRGTYHVVLGRPCYAKFMDVPNYTYLKLKMSGPNGVITVGPTYKHAFECDVECVEYAEALAESEALIADLENLSKEVPDVKRHAGNFEPAETVKAVTLDPSGDTSKQIRIGSGLDPK

SEQ ID NO: 299525 - protein, 83 aa, Zea mays
  Clone ID: MRT4577_36236C.1.pep
RPRVRKSPNQIQAQEGAKPQRGRHQAPAAITYWGSLPHQPTNLLWLALFLLRAVTGASTRGGHSLSLLRLRRIRGTPSRGFYF

SEQ ID NO: 299526 - protein, 469 aa, Zea mays
  Clone ID: MRT4577_36237C.1.pep
MGPIKDLKGVQRVMGCLAALSRFISRLGERGLPLYRLLRKTKRFTWTPEAEEALGNLKALLTSVPILVPPTTGEALLIYVAATTQVVSAAIVVERREEGLALPVQRPVYFISEVLSETKIHYPQIQKLLYAVILTRRKLRHYFESHPVTVVSSFPLGEIIQCREASGAGAGLLFISPLGKHLRYVLRLHFSASNNVIEYEALVNGLRIAIELGVRRLDARGDLQLVIDQVMKNSHCHDPKMEAYCDEVRRLEDKFYGLELNHVDRRYNETADELAKIASGRTTVPPDIFSRDLHQPSVKTDDTPEPEKASTLLEAPSAQPEAPSAQPEAASAPPEAPSAPPEAPSALEGEALRVEEEQNGKAPGGFTHLLVAIDKFSKWIEVRPLNSIRSEQAVAFFTNIIHRFGVPNSIITDNGTQFTGRKFLDFCEDHHIWVDWAAVAHPMSHPGFGAPRPGHEHNHQVCWDQVSHI

SEQ ID NO: 299527 - protein, 112 aa, Zea mays
  Clone ID: MRT4577_36238C.1.pep
DLPGNDHRGILLVYGSVGIPLKAKGETEAVSASSRVPPETGSTFVRQRGGAHQRLPHRAHVLVLSSGLAPWATLSGLFGISSSRARRRDRAESRAASSGAIGKPEADILVGP

SEQ ID NO: 299528 - protein, 1460 aa, Zea mays
  unsure (1)..(1460): unsure at all Xaa locations
  Clone ID: MRT4577_36239C.1.pep
MREASVRTVRTRDGMPATPDRLGDEHHRHDRRARLEEKVRRGYHPRRGGRYDSEEDQSPSPELPGPRVFSWAIRRAPFSARFRAPTTITKYSGETRPELWLVDYRLACQLGGTDDDNLIIRNLPHFLSDAARAWLEHPPPAQISDWDDLVKAFAGNFQGTYVLPGNSWDLRSCRQQTGESLREYIRWFSKQRTELPNITDSDVIGAFLAGTTCRDLVSKLGRKTPTKASELMDIATKFASGQEAVEAIFRKDKQPQGRQKEDAPEASVQRGSKKKAKKKKAQAMRNTINADLVAAAEHRNPRKPPAGVNTFDKMLKESCPYHRGPVKHTLEECDMLQCYFIKAGPSAEGGKDQGNNKKGGDKDEEFPEVRDCFMIYGGQVANASARHRKQERREVCSVKVAAPVYLDWSDKPITFDQGDHPDYVPSPGRYPLVVDPVIGNARLTKVLMGGGSSLNIIYVEILGLLGIDLSMIRAGAAPFHGIVPGKRVLPLGQLDLPVCFGTPSNFRRETLTFEVVGFRGTYHAVLGRPCYAKFMVVPNYTYLKLKMPAPNGIITVGSTYHHAYECDVECVEYAEAIAESEALIADLECLSKEAPDAKRHVGNFEPAEAVKTVALDPSNDACKQKRRAIGEEVHKLMAAGFIKEVSHPEWLANPVLVKKKGVKWRMCVDYTGLNKACPKVPYPLPRIDQIVDSTAGCGTLSFLDAYSGYHQIKMKESDQLATSFITPFSMYCYITMPFGLRNAGATYQRCMNHVFGEHIGRTVEAYVDDIVVKTRKASNLLSDLEVTFGCLRAKGVKLNPEKCVFGVPRGMLLRFIVSERGIEANSEKIAAITNMGPIKDLKGVQRVMGCLAALSRFISRLGEKGLPLYRLLRKAERFTWTPEAEEALGNLKALLTNAPILVPPAAGEALLIYVAATTQVVSAAIVVERREEGHALLVQRPVYFINDVLSETKIRYPQIQKILYAVILTRRKLRHYFESHPVTVVSSFPLGEIIQCREASGXIKSQVLADFLAEWVDTQLPTAPIQPELWTMYFDGSLMKTGAGAGLLFISPXGKHVRYVLDLHFPASNNVAEYEALVNGLCIAIELGVRRLDARGDSQLVIDQVMKNSHCRDKKMEAYCDEVRRLEDKLHVLELNHVARRYNETADELAKIASRQTAVPPDVFSKDIYQPSVKLDDETSAKPEVPSAXPRVSTGRPQWPTPLGLYAPAEGVNSTXQTHLPAQTLQTIPITWSFAVWGLDLVGPLQKAPGGFKHLLVAIDKFSKWIEVRPLTSIRSKQAVAFFTNIIHRFGVPNSIITDNGTQFTGKKFLDFCEDHHIRVDWAAVAHPMTNGQVERANGMILQGLKPRIYNDLNKFGKWWIKELPSVVWSLWTTPNRATGFSSFFLVYGAEAILPTDLEYGSPRTKAYDDQSNQTNREDSLDQLEEARDVALLHSARYQQSLRCYHGRRVRPRGFQVGDL

SEQ ID NO: 299529 - protein, 32 aa, Zea mays
  Clone ID: MRT4577_3623C.1.pep
GGVFYIILVFLLFLGYTLWFEGPIIESILYVI

SEQ ID NO: 299530 - protein, 1629 aa, Zea mays
  unsure (1)..(1629): unsure at all Xaa locations
  Clone ID: MRT4577_36240C.1.pep
MGSLQQPLQPGTVLRFRNLEFMSLDGSYDMVLLPPQRDSNHDGRQLARRRRTRRRLPPVAEEQHPGLFRHLPRRRRRRRGNRGQAGGGTSSAVERVGDAGTLAGDVSGVVLAPETTTDVVSPQYANPKRTDEASTLAKDLLAVSLVPEIMVQSVPDATSSPSIDQEVPSVFHPVPFRFSFDPPSDPTSVSAFVKAYPNLPGYHMWSTWDQLTAVSTYGPPGSEKEDGPDSGWDFSGLRDPSAMRDLMTACDYCISDCSDDGHSLDDEGCGPSRECFHVDLGGHDEGNHLGMPEDDDPPGPAPRVDILRELAVVPVPAGGQDTQLEQIREMQAKLDEEAGQLVQLRQNIEREWAGRALAGEARHQAQDIQRRIVDDARARMPPASSGVGQNLAAAAILLRAMPEPSTTEGRGIQGELKNLLEDAAGMYVRLGNSWDLRSCHKQPGESLREYIRRFSKQRTELPNITDSDVIGVFLAGTTCRDLEPTKGPGGANLFDKMLKESCPYHQGPVKHTLEECVMLRRYFHKAGPPTGDGKGQDNNKKEGDKEEEFPEVHGCFMIYGGQVANASARHRKHERREVCSVKVAAPVYLDWSDKPITFDQGDHLDCVPSLGRYPLIVDPVIDNARLTKVLMDGGSSHNIIYAEILGLLGIDLSTIRXRETLTFEVVGFRRTYHAMLGRPCYAKFMAVPNCTYLKIKMPGXPNGVITIGSTYRHVYECDVECVEYAEALAESEALIADLECLSKEVPDAKRYTSNFEPAEAFKSVPLDPSNDAFSAWSPSDMPGIPRDVAEHSLDIRVGARPVNQPLRRFDEEKRRAIGEEIHKLMVAGFIKEVFHPEWLANPVLVKKKGEKWRMCVDYTGLNKACPKVPYPLPCIDQIVDSTAGCETLSFLDAYSGYHQIKMKESDQLATSFITPFGMYCYTTMPFGLRNAGATYQRCMNHVFGEHIGRTVEAYVDDIVVKTRKASDLETTFKCLRAKGVKLNPEKCVFGVPRGMLLGFIVSERGIEANPEKIAAITNMGPIKDLKGVQRVMGCLAALSRFISRLGEKGLPLYRLLRKAERFTWTPEAEEALGNLKALHTNAPILVVSAAIVVERREEGHALLVQRPVYFISEVLSETKICYPQIQKLLYAVILMRRKLRHYFESHPVTVVSSFPLGEIIQCREASGRITKWAVELMGETISFAPRKAIKSLVLADFVAEWVDTQLPTAPIQPELWTMYFDGSLMKTGAGACLLFISPLGKHLRYVLRLHFPASNNMVEYEALVNGLHIVTELGVRRLDARGDSQLVIDQVMKNSHCRDRKMEAYCDEVRRVEDKFYGLELNHIARRYNETANELAKIASGRTTVPXDVFSRDIHQPSVKINDTPEPEEASAQPEEASAQPKVSSAAEGEALRIEGERNGVTPDPNWQAPYLXISSKESYPSTRPKLGDWRGAPSRSSYWVMKRSSTMQPXASSNDVYPSPKDRSYCKKYTRGLAVTMQHLGPSSGTLSDKXGLDLVGPLQKAPGGFSHLLVAIDKFSKWIEVRPLTSIRDXKPRIYNDLNKFGKRWMKELPSVVWSLRTTPSRATGFSPFFLVYGAEAILPTDLEYGSLRTKAYDDRSNQTSREDSLDQLEEARDVALLHSARYQQSL

SEQ ID NO: 299531 - protein, 42 aa, Zea mays
  Clone ID: MRT4577_36241C.1.pep
MDTQKDVQPPKQQPMIYICGECHTENEIKSRDPIRCRECGYR

SEQ ID NO: 299532 - protein, 657 aa, Zea mays
  unsure (1)..(657): unsure at all Xaa locations
  Clone ID: MRT4577_36242C.1.pep
MGSLQQPLQPGTVLRFGSLEFMSLDGSYDMILIPSPGDSDNGGRQPARPRRNRRRLPRVVEEQPLSSPSPLPRRRRGRRGNQGQAGGSASSAVERVDSASTPTGGAPGIDLTLETKTSAVSPQRTDSGQTDDASTLAKGLLDVTLVPETTVQSVPDVTSSPPVDQXSGFALAGALVEASPNPXGFRMRSPWDRLTDVSTYGPSGSEEDDEPSFCWDFSGLGNPSAMRDFMAACDYCLSDCSDDSRSLGDEDCGPSRECFHVDLGGPSEGNHLGMSSYAPGRLGNEHHHRDRRAHLDERVRRGYHPRRGGRYDSGEDRSPSPEPPGPQAFSRAIRRAPFPTRFRPPTTITKYSRETRPELWLADYRLACQLGGTDDDNLIIRNLPLFLSDTARAWLEHLPPGQISNWDDLVQAFTGNFQGTYMRPGNSWDLRSCRQQPGESLRDYIRRFSKQRTELPNITDSDVIGAFLTGTTCRDLVSKLGRKTPTRVSELMDIATKFASGQEAVEAIFRKDKQPQGRPSEDAPEASTQRGAKKKGKKKSQAKRDAADADLVAAAEYKNPRKPPGGANLFDKKLKMPGPNGVITVGPTYKHAFECDVECVEYAEALIADLESLSKEVPDVKRHAGNFEPAETAKFVPLDPSSDASKQVWIGSELDPK

SEQ ID NO: 299533 - protein, 118 aa, Zea mays
  Clone ID: MRT4577_36243C.1.pep
NPPRHDTSSRTSRASVIDGVNSSVFRLKLAAVLRHGSAGASPVNRVQLDAPEGCRTALHDLAAVFSVIRHDGGRPRPKLFKWYDLRDHLQHGLLPQRHDGQHWRQLCARPYRRVLDLP

SEQ ID NO: 299534 - protein, 29 aa, Zea mays
  Clone ID: MRT4577_36244C.1.pep
MGGGGGDDAPGTPRSPTVYDWVVISSLDL

SEQ ID NO: 299535 - protein, 109 aa, Zea mays
  Clone ID: MRT4577_36245C.1.pep
PQGENSNKTPQKAHHHPINLPQIMVMPPGTPLGQGEQHLCLTNLDSITKNTNPPPTTATTPSTHSVPACVNPRAQNTFPDPTHNASTHPDIHSFSAPVERPPLRKTFAR

SEQ ID NO: 299536 - protein, 98 aa, Zea mays
  unsure (1)..(98): unsure at all Xaa locations
  Clone ID: MRT4577_36246C.1.pep
MGLLNQLWDDTVAGPRPDSGLGKLRKYASFSPSSSSSAAVAAAAAAGSAPPPGAVTRSLTMLRRPAAXPSSRRPAASPAXAVVPVARKRRSGFALRRR

SEQ ID NO: 299537 - protein, 97 aa, Zea mays
  Clone ID: MRT4577_36247C.1.pep
EKKPEGASTVKKNKPRPFCFSSRGRATFVLGGFSVEWPDPYFRPPGCAFSIFFWVVVRPPGLLGVLPLVSHRGLLGQNLMLGLRKKDKPPEILNFPP

SEQ ID NO: 299538 - protein, 60 aa, Zea mays
  Clone ID: MRT4577_36248C.1.pep
CWIRICWTMNNDLRERLCAPMDQHLMNILRKETMIAIVVLTGLHIDIKEGLVPVYIHVNT

SEQ ID NO: 299539 - protein, 81 aa, Zea mays
  Clone ID: MRT4577_36249C.1.pep
KRLVTLHFMAPLQLSSLAVLMVVEGFLVQFSSWLGRACSWPWASEVQRTDHHPAAVGREKNGTRGSDDDVRSNPSKIRTRG

SEQ ID NO: 299540 - protein, 44 aa, Zea mays
  Clone ID: MRT4577_3624C.1.pep
QLFPSSSRFLHLSTFKPSCTILYFRSTIKHINSYKHRFLNFSSS

SEQ ID NO: 299541 - protein, 65 aa, Zea mays
  Clone ID: MRT4577_36250C.1.pep
PTFTHLRKIRGHQKNRCAITQPINYCGKHLQLEGCNICSVHVAFPERRFLSWKWSSKPFTGYPIA

SEQ ID NO: 299542 - protein, 124 aa, Zea mays
  unsure (1)..(124): unsure at all Xaa locations
  Clone ID: MRT4577_36251C.1.pep
MGLLNQLWDDTVAGPRPDSGLGKLRKYASFSPSSSSSXGGGGGGGGGLRAASGRRDAELDHAAAAGGAVRRHVAPQRVQLRAVVPVARKRRSGFALRRSCSDDAQGRGLDEEAARESQDGRRRR

SEQ ID NO: 299543 - protein, 108 aa, Zea mays
  Clone ID: MRT4577_36252C.1.pep
MGLLDQLWDDTVAGPRPDSGLGKLRKYASFSPSSSAAPGSAPPPGAVTHSVTMLRRPAALSVVTSPRSESSSAPSSPSPASGAPDSPFGAGDGLSPPCLFFFPSSCCL

SEQ ID NO: 299544 - protein, 86 aa, Zea mays
  unsure (1)..(86): unsure at all Xaa locations
  Clone ID: MRT4577_36253C.1.pep
MENDKGEIVDLYVPRKCSATNRIIKANDHASVQISIGNVDENGRYTGENGVYALSGFVRARXEADDSLNRLAQRDGYLKNVWSAQR

SEQ ID NO: 299545 - protein, 74 aa, Zea mays
  Clone ID: MRT4577_36254C.1.pep
PKLGFVSSPHRATKSLTYLYSPQYLTLGSYKHNKNLATSKPLLPKRPRNRTTKPSQLALPTRRWEPTALPHSHH

SEQ ID NO: 299546 - protein, 73 aa, Zea mays
  Clone ID: MRT4577_36255C.1.pep
CSRSYEKGRETKPLIDSSAEVRLGLFQRSLRVQSPSWKQECVGPLKPHYPGYTGSKLQAAALSKDKLVGITSC

SEQ ID NO: 299547 - protein, 70 aa, Zea mays
  unsure (1)..(70): unsure at all Xaa locations
  Clone ID: MRT4577_36256C.1.pep
KELLVLEDNDEXLEEMYSQREQAEATWAFTVLGFIWKLLFGVVGLIVSIALVAHIVIYXLIDPSLTSFLE

SEQ ID NO: 299548 - protein, 82 aa, Zea mays
  Clone ID: MRT4577_36257C.1.pep
VRTPRRARFRTPGPFPRGGAGPELTHAVAQEPSQVQLWARGRSTALVHLDPDDYLRRALEVREGHDVQGLLEDAWIAALRYR

SEQ ID NO: 299549 - protein, 62 aa, Zea mays
  Clone ID: MRT4577_36258C.1.pep
PATLPPMIHIFQVIVLLFCRPSTRTKIFLENHIVDSEISLIATINLVCALSLYMCFWRKLIG

SEQ ID NO: 299550 - protein, 132 aa, Zea mays
  Clone ID: MRT4577_36259C.1.pep
AGQERVVDNLEGTLRTRATLLIGGNDSRWPDLGQLHATDIAHTELSQEVDVGEINDVEARDLHGHGDGGGMVLVSGRGEREGPGVRGGGGGAGPAMCSEMRSKAAVAVGRAGFLVRADLDLGRGRCLDLVAC

SEQ ID NO: 299551 - protein, 225 aa, Zea mays
  Clone ID: MRT4577_3625C.1.pep
RGRQKPLLHSTRRKAARQGGKQWIAGLSYHEGSKFPRRSRQFVWRGCVGISQTSSQLALQVRYLDAHIRWKDFIPPDHIPSDGKSYDADFSALRNAVVCDKKIIDNKIRYALKFRNQKHLPVRVTKNILESEGDQDENSKLWFSENHVPLYMLREFELHAGDNSLPTPGISDSNCFTNLYPRRVKAYAGDVFSYLFHKGEVYPCTSCKKDAIYRDIVKCNTLQGN

SEQ ID NO: 299552 - protein, 58 aa, Zea mays
  Clone ID: MRT4577_36260C.1.pep
KTKRGGLDKIIEGGGHNKAGHMVSLLGGGAHTKKQTVRQKRPRGPGGDTTPPSAIIII

SEQ ID NO: 299553 - protein, 49 aa, Zea mays
  Clone ID: MRT4577_36261C.1.pep
VRDGPPVSRPCLVHSVYPSLQIARHFTVFSLPLRGLASQQCLGCHFDYS

SEQ ID NO: 299554 - protein, 98 aa, Zea mays
  Clone ID: MRT4577_36262C.1.pep
MPLCLFWLLSSYPMVSLTFKACCCRLGRNLSLKAASPPFRCAICQVDQEPFQDLMADNGGGYCSSQYAPWGGPCLCLDCRKKKDAMEGKRCSRSTACR

SEQ ID NO: 299555 - protein, 203 aa, Zea mays
  unsure (1)..(203): unsure at all Xaa locations
  Clone ID: MRT4577_36263C.1.pep
NSRPRRQQVKLSNTGGRLIIASDGIWDALSNEAAAKACRGLPAELAAKLVVKQALKTSGLKDDTTCVVVDIIPSDHLTSPQLSPKKNQNKLKSXFRRRSHSSVRKLGGKSASIGSVEELFEEGSAMLEERLGRNLSLKAASPPFRCAICQVDQEPFQDLMADNGGGYCSSQYAPWGGPCLCLDCRKKKDAMEGKRCSRSTACR

SEQ ID NO: 299556 - protein, 795 aa, Zea mays
  unsure (1)..(795): unsure at all Xaa locations
  Clone ID: MRT4577_36264C.1.pep
MSFGLRNAGATYQRCMNHVFGEHIGRTVEAYVDDIIVKTRKAYDLLSDLEVTFRCLKAKGVKLNPEKCVFGVPRGMLLGFIVSERGIEANPEKIVAITSMGPIKDLKGVQRVMGCLAALSRFISCLGERGLPLYRLLRKAECFTWTPEAEEALGNLKALLTNAPILVPPAAGEALMIYVAATTQVVSAAIVVERREEGHALPVQRPVYFISEVLSETKIRYPQSQKLLYAVILTWRKLRHYFESHPVTMVSSFPLGEIIQCREASGRIAKWAVEIMGETISFAPQKAIKSQVLADFVAEWVDTQLPTAPIQPELWTMFFDGSLMKTGAGAGLLFISPLGKHLRYVLCLHFPASNNVAEYEALVNGLRIAIELGVRRLDARGDSQLVIDQVMKNSHCRDPKMEAYCDEVRRLEDKFYRLELNHIARRYNETADELAKIASRRTTVPPDVFSRDLHQPSVKTDDTPEPEKASAQPEAPSAQSEVPSSQSEESYPSTEPKLGGWRXAPSRSSCXETGRSSTTAAPRASSSDAFPSPKXPLQKAPGGYTHLLVTIDKFSKWIEVRPLNSIRSEQAVAFFTNIIHRFGVPNSIITDNDTQFTGRKFLDFCEDHHIRVECANDMILQGLKARIYNDLNKFGKRWMKELPSVVWSLRTTLSRATGFTPFFLVYGAEAILPTDLEYGSPRTRAYADQSNQANREDSLDQLEEARDMALLHPAQYQQSLRRYHARGVRSRDLQVGDLVLRLRQDARGRHKLTPPWEGPFVIAEVLKPGTYKLANSQGEVYSXLGTSNSYVASTL

SEQ ID NO: 299557 - protein, 804 aa, Zea mays
  unsure (1)..(804): unsure at all Xaa locations
  Clone ID: MRT4577_36265C.1.pep
AGAGLLFISPLXGKHLRYVLRLHFPASNNVAEYEALVNGLHIAIELGVRRLDARGDLQLVIDQVMKNSHYRDRKMEAYCDEVRRLEDKFYGMELNHIARRYNETADELAKIASGRTTVPPDVFSRDIHQPSVKIDDTPEPEEASAQPEAPYLEYLLRGELPLDKAEARRLARRTKSFVLLGDEKELYHRSPSGILQRCISVAEGQELLQEIHSGACGHHAAPRALVGNAFRQGFYWPTAVADATRIVRSCQGCQFYARQTHLPAQALQTIPITWSFAVWGLDLVGPLQKAPGGFSHLLVAIDKFSKWIEVRPLISIRSEQAVAFFTNIIHRFGVPNSIITDNGTQFTGKKFLDFCEDHLIRVDWAAVAHPMKNGQVERANGMILQGLKPRIYNDLNKFGKRRMKELSSVVWSLRTTPNRATGFSPFFLVYGAKAILPTDLEYGSPRTKATSFALFDCFDSGILKTTRVHVQTSTEGAAAPSASFPPSAESGPASDGDTGGRISTSKEDASTALGPSQPGSPQGPGPSRHLGWPLRSLSQLSLEDLSPAHGLGSITLRCSGLDSHNEQTPTLRVPLQTELRFHSRGYEQPPHQRACGTTNSRWLAGDHCTSSDNDLRLGRQDSSSDGPRANATAGRPSFTSPHGDENQPLKPKSRRPVAQAPTSARRHRAGVRTRQSKNTNAAHAAYGVLDDPLVRTAQQSPVRWTDGHARIKWQEVASEAATEPAEPGRGRSPACFSPPSNWWSSSWMTIGEGMQPGCMMKILGAERWLKGANPREVVLLQQQQDKGNTGAPHPGARKVEGRDA

SEQ ID NO: 299558 - protein, 1039 aa, Zea mays
  Clone ID: MRT4577_36266C.1.pep
MGSLQQPLQPGTVLRFGSLEFMSFDGTYDMILLPPPCDNGNGGRQPASRRRNRRRLPRVVEEQHSSSSRLLPRRRKGRQGNQGQAGGSASSAVERVDSAGTPTRGAPGIDFAPEMKTSAVSPRHANPEQVDDASALAKSLQDVALVPETTVQSVPDVTSSPLVDQEVPTDSHPTSFGFSLNPPSDLALSDALVEASPNPLGFRMQSPWDRFTDVSTYGPSGSEEDDDPNICWDFSGLGNPSAMRDFMTACDFCLSDCSDGSRSLDDEDCGPSRECFHVDLGGPSEGNHLGMPEDGDLPRPVPRVDIPWELAVVPVQAGGHDPQLEQNSGVQARLDEGAGALEPIRRDVGQAWAGQPPAGEIRHLPQGFQHRVADDARVRPPPASSGVGQNLAAAAMLLRAMPEPSTTEGRRIQGELKNLLEGAAVQQAESSASRRQGYPSEPHAATSRFMREASVYTERTLNTAPAALGRLGNEHHHRDRRAHLDERVHRGYHPRRGGRYDSGEDRSPSPEPPGPQAFSRAIRRAPFPTRFRPPTTITKYSGETRPELWLADYRLACQLGGTDDDNLIIRNLPLFLSDTARAWLEHLPPGQISSWDDLVQAFAGNFQGTYVRPGNSWDLRSCRQQPGESLRDYIRRFSKQHTELPNITDSDVIGAFLAGTTCRDLVSKLGRKTPTRASELMDIATKFASGQEAVEAIFRKDKQPQGRPSEDAPEASTQRGAKKKGKKKSQAKRDAADADLVIAAEYKNPRKPPGGANLFDKMLKEPCPYHQGPVKHTLEGCVMLRRHFHRARPPTEGGRARDDDNKEDHQAGEFPEVRDCFMIYGGQAANASARHRKQERREVCSVKVAAPVYLDWSDKPITFDQADHPDHVPSPGKYPLVVDPVIGDVRLTKVLMDGGSSLNIIYAETLGLLETLTFEVVGFRGTYHAVLGRPCYAKFMAVPNYTYLKLKMPGPNGVITVDPTYKHAFECDVECVEYAEALAESEALIADLESLSKEVPDVKRHAGNFEPVETVKAVPLDPSGDASKQIRIGSGLDPK

SEQ ID NO: 299559 - protein, 440 aa, Zea mays
  Clone ID: MRT4577_36267C.1.pep
MEEEKQVMEGAATAARRRLVIGVGFWVQGFRLFPWLGVNFFLKDGMGVAASSLQILQASANLPMVAKPLIGLLSDAVPIRGHRRLPYVAIGALLQAISWLAIALWQDISLQVLTIFLLLSNFGASICEVANDAIVAESGKKAASSSGSGQLQSFAWMFGSSAGALGNLLGGIALSYFSPKVMFLFFAILLLLQFFTTVAIPEGSLKLPKVATSTNLSALTSIRKQVKELSCALSMPEMFWSIIWFTASYAAIPFLLGTMFFYQTEVLRLDSSVIGLSKVFGQVALLAWSMSYNKYFKTMSARKLLSVLQFVTALVMLSDVLFVQGVYRKVGIPDSIYTIVFSGLLEGLMFFKVLPFSVHVAKLCPAGCEGSVMAFVMSALALATIVSGYLGVALAAFMGVSGDDFSALPACLLIEAACTMLPLCCSSLIKERREKEKKQE

SEQ ID NO: 299560 - protein, 80 aa, Zea mays
  Clone ID: MRT4577_36268C.1.pep
RSGPCDGNPASSTLPTSAIGAPVIAGRLVTVVSPSIVGDGRATGPARGILVGHVDIRCSYCRSPSMISHHGVPCDHMAGD

SEQ ID NO: 299561 - protein, 102 aa, Zea mays
  Clone ID: MRT4577_36269C.1.pep
KKKKKKEKKKKKKKKKKILPLNTKPLWGSFKQIYVTLGGFPPRLGGPLRPFWGPISLYSGWFFTPLGRGNPFLTPIKLLLAHIHFAKGGGIPKGARSYPFSP

SEQ ID NO: 299562 - protein, 84 aa, Zea mays
  unsure (1)..(84): unsure at all Xaa locations
  Clone ID: MRT4577_3626C.1.pep
MVGGLRDLILARLFLVFWPKVQTPIRKIPLKKKVFSTVFSFLIFLACSQFQFFGFNSPPGPDPFYXMRVILASNRGTVMELGLT

SEQ ID NO: 299563 - protein, 90 aa, Zea mays
  Clone ID: MRT4577_36270C.1.pep
WGGAGSFVLLSPARRKCFPGFSLLSGEYRPYFGCGRLGVTPVALGVREDLLQPLRSRRMSVWRELRCVEQHCRYTDHHTLIMVSPRMLGT

SEQ ID NO: 299564 - protein, 1063 aa, Zea mays
  Clone ID: MRT4577_36271C.1.pep
MGSLQQPLRPGTVLRFGALEFMSFDGSYDMILLPPPCDHDNGGRQPARRRRNRRRLPRVVEKQHSGSLRSLPRQRRRRRGRQGQTGGRASPAVERIDAPDAPTEGTPDIDLAFKTEASAVPPRHDDPEQEDDAGALAESLQDVALEPEMTVQPVPDVTTSLLVDQKVTTNSHLASFRLGLNPPNDLVLAGALIEASATPLRFYMRSPWDRLTDVSTYGPSGSEEDDDPSIGWDFSGLGNPSAVRDFMAACDYCLSDCSDASRSLGDESCGPSRECFHVELGNPTEGNHLGMPEDGDLPRPVPRADIPRELAVVPAPAGGYDPQLEQVREAQARLNEGTGALEPIRRDVGQAWVGQPLAGEIRHLPQGLQHRVANDVRIRPPPASSGVGQNLATAAMLIRAMPEPSTTEGRRIQGELKNLLEGAAARRAESTASRRQGYPSEPHAATSRFMREASVYTGRTRNTAPAAPGHLGNEHHRRDRRAHLDERVRRGYHPRRGGRYDSGEDRSPSPEPPGPQAFSRAIRRAPFPTRFRPPTTIVKYSGETRPELWLADYRLACQLGGTDDDNLIIRNLPLFLSDTARAWLEHLPPGQISNWDDLDLRSCRQQPGESLRDYIRRFSKQRTELPNITDSDVIGAFLAGTTCRDLVSKLGRKTPTRASELMDIATKFASGQEAVEAIFRKDKQPQGRPSEEAPEASAPRGAKKKGKKKSQSKRDAADADLVAAAEYKNPRKPPGGANLFDKMLKEPCPYHQGPVKHTLEECVMLRRHFHRAGPPAEGGRARNDDKNEDHQAGEFPEVRDCFMIYGGHAANASARHRKQERREVCSLKVAAPVYLDWSDKPITFDRADHPDHVPSPGKYPLVVDPVVGNVRLTKVLMDGGSCLNIIYAETLKLLRVDPSTVRAGAAPFHGIIPGKRVQPLGRLDLPVCFGTPSNFRRETLTFEVVGFRGTYHAVLGRPCYAKFMAVPNYTYLKLKMPGPNGVITIGPTYKHAFECDVECVEYAEALAESEALIADLENLSKEVPDVKRHAGNFEPAETVKAVPLDPSGDTTKQIRIGSGLDPK

SEQ ID NO: 299565 - protein, 152 aa, Zea mays
  unsure (1)..(152): unsure at all Xaa locations
  Clone ID: MRT4577_36272C.1.pep
MEEEKQVMEGAATAARRRLVIGVGFWVQGFRLFPWLGVNFFLKDGMGVAASSLQILQASANLPMVAKPLIGLLSDAVPIRGHRRLPYVAIGALLQAISWLAIALWQDISLQVLTIFLLLSNFGASICEVANDAIVAESGKKAXSSSGSGQLQ

SEQ ID NO: 299566 - protein, 662 aa, Zea mays
  unsure (1)..(662): unsure at all Xaa locations
  Clone ID: MRT4577_36273C.1.pep
MGCLAALSRFISRLGERGLPLYRLLRKVECFAWTPEAEEALGNRKALLTNAPILVPPAAGEALLIYVAATTQVVSAAIVVERREEGHALPVQRPVYFISEVLSETKIRYPQIQKLLYAAIKSQVLADFVAEWVDTQLPTAPIQPELWTMFFDGSLMKTGAGVGLLFISPLGKHLRYVLRLHFPASNNVAEYEALLIIDQVMKNSHSSDPKMEAYCDEVRRLEDKFYGLELNHVARRYNETADELAKIASGRTTIPPDVFSRDLHQPSVKTDDTPEPEKASAQPEAPEGEALRVEGEQSEVTPNQNWQTPYPQISTEESYPSTKXKLGGWRXVPSRSSCWEMGRSSTTAAPRASSSDAFPSPKARSSYKRYTRGLXTITQHLEPLLGTPSDKKAPGGYTYLLVAIDKFSKWIEVRPLNNIRSEQAVAFFTNIIHRFGVPNFIITDNGTQFTGRKFLDFCEDHHIRVDWAAVAHPMTNGQVERANGMILQGLKPRIYNDLNKFGKRWMKELPLVVWSLRTTPSRATGFTPFFLVYGAEAILPTDLEYGSPRTRAYADQSNRANREDSLDQLEEARDMALLHSARYQQSLRRYHARGVRSRDLQVGNLVLRLRQDARGRHKLTPPWEGPFVIAKVLKPGTYKLANSQGEVYSXLGTSNSYVASTL

SEQ ID NO: 299567 - protein, 182 aa, Zea mays
  Clone ID: MRT4577_36274C.1.pep
MYFDGSLMKIGAGAGLLFVSPLGKHLRYVIRLHFLASNNVAEYEAFVNGLRITVELGVRRLDARGDLQLVIDQVMKNSHYRDRKMEAYCDEVRHLEDKFYGLELNHIARRYNEIADELAKIASGQTTVPPDVFSRDIHQPSVKIDDTPEPEEASAQPEIPSAAEGEALRVEGERNGITPNPN

SEQ ID NO: 299568 - protein, 1014 aa, Zea mays
  Clone ID: MRT4577_36275C.1.pep
MGSLQQPLQPGTVLRFESLEFMSLDGSYDMILLPPPCDNNSGGRQPARRWRNRRRLPRVVEEQSSSSPRPLPRRRGRRRGNQGQEEDSASSAVERVDGPSTPTGGTPGVDLAFETKASAVSPRRVNPEQADDASTLAKSLLDVTLVPETTAQSVPDVTLSPPVDQKVPIDSHPASFGFSLNPSSDFALAGALVEASPNPLGFRMWSPWDRLTDVSTYGPSGSEEDDEPNICWDFSGLGNPSAMRDFMTACDYSLSDCSGGSRSLGDEDRGPSRECFHVDLGGPPEGNHLGMPEDGDLPRPVPRVDIPRELAVVPVQAGGHDPQLEQIRGVQARLDEGAGALEPIRRDVGQAWAGQPPAGEIRHLPQGFQHRITDDVRVRPPPASSGVGQNLAAAAMLLRAMPEPSTTEGRRIQGELKNLLEGAAVRRAESSASRRQGYPSEPHAATSRFMREASVYTGRTRNTAPAAPGRLGNEHHHRDLRAHLDERVRRGYHPRRGGRYDSGEDRSPSPEPPGPQAFSRAIRRALFPTRFRPPATITKSSGETRPELWLAEYRLACQLGGTDDDNLIIRNLPLFLSDSARACCRQQPGESLRDYIRRFSKQRTELPNITDSDVISAFLAGTTCRDLVSKLGRKTPTRASELMDIATKFASGQEAVEAIFRKDKQPQGRPSEDTPEASTQRSAKKKGANLFDKMLKEPCPYHQGPVRHTLEECVMLRCHFHRVGPPAEGGKARDDDKKEDHQAGEFPEVRNCFMIYGGQAANASARHRKQERRGVCSVKVAAPVYLDWSDKPITFDRDDHPDHVPSSGKYPLVVDPVIGNVRLTKVLMDGGSSLNIIYAETLGLLRVNLSSVRAGAAPFHGIIPGKPVQPLGQLDLPICFGTPSNFRRETLTFEVVGFRGTYHAVLGRPCYAKFMAVPNYTYLMLKMPGPNGVITVGPTYKHAFECDVECVEYAEALAESEALIADLESLSKEVPDVKRHAGNFEPAETVKSVPLDPSGDTSKQIWIGSGLDPK

SEQ ID NO: 299569 - protein, 119 aa, Zea mays
  unsure (1)..(119): unsure at all Xaa locations
  Clone ID: MRT4577_36276C.1.pep
AETDVGVQYEWELWRKNLADRMPFLPYVHCWDXQQQPXSSIRLSRPTGPDNDRLLRYKGKEGYGDYLPGGKPGGTKRAEPRGIVYGRPKTHQGSPGCNVLRNERPAPEERADXKVGGLT

SEQ ID NO: 299570 - protein, 999 aa, Zea mays
  Clone ID: MRT4577_36277C.1.pep
MGSLQQPLRPGTVLRFGTLEFMSFDGSYDMTLLPPPRDYDNGGRQPARRRRNRRRLPRVVEEQHSGSLCSLPRQRRRRRGRQGQTGGHASPAVERIDAPDAPTEGTPDVDLAFETEASVVPPRHADPEQEDDAGALAESLQDVALEPEMTAQPVPDVTTSLHVDQKVTTNSHLASFRLGLNPPNDLVLAGALIEASATPLRFCMRSPWDRLTDVSTYGPSGSEEDDDPSIGWDFSGHGNPSAMRDFMTACDYCLSDRSDGSRSLGDESCGSSRECFHIELGDPTEGNHLGMPEDGDLPRPVPRADIPRELAVVPAPAGGYDPQLEQVREAQARLNEGTGALEPIRRDAGQAWVGQPLAGEIRHLPQGLQHRVANDVRIRPPPASSGVGQNLATAAMLIRAMPEPVRQGYHPRRGGRYDSGEDRSPSPEPPGPQAFSRAIRRAPFPTRFRPPTTITKYSGETRPELWLADYRLACQLGGTDDDNLVIRNLPLFLSDTARAWLEHLPPGQISNWDDLVQAFAGNFQGTYVRPGNSWDLRSCRQQPGESLRDYIRRFSKQRTELPNITDSDVIGAFLAGTTCRDLVSKLGRKTPTRASELMDIATKFASGQEAVEAIFRKDKQPQGRPSEEAPEASAPRGAKKKGKKKSQSKRDAADADLVAAAEYKNPRKPPGGANLFDKMLKEPCPYHQGPVKHTLEECVMLRRHFHRAGPPAEGGRAHDDDKDKEHPAEGFPEVRDCFMIYGGHAANTSARHRKQERREVCSVKVAAPVYLDWSDKPITFDRADHPDHVPSPGKYPLVVDPVVGDVRLTKVLMDGGSCLNIIYAETLKLLRVDPSSVRAGAAPFHGIIPGKRVQPLGRLDLPVCFGTPSNFRRETLTFEVVGFRGTYHAVLGRPCYAKFMAVPNYTYLKLKMPGPNGVITVGPTYKHAFECDVECVEYAEALAESEALIADLENLSKEVPDVKRHAGNFEPAETVKAVPLDPSGDTTKQIRIGSGLDPK

SEQ ID NO: 299571 - protein, 856 aa, Zea mays
  unsure (1)..(856): unsure at all Xaa locations
  Clone ID: MRT4577_36278C.1.pep
MGSLQQPLQPGTVLRFGSLEFMSLDGSYDMILLPPPCDSGNGGRQPARRRRNRRRLPRVVEEPHSSSPRPLPHRRRRMWGNQGQAGDSPSSTVEQVDGAGAPTGGASGIDLAFETKTSAVSPQHASSEQADDASTLAKGLLGVTLVPETTVRSVPDVTSSPPVDQEVPTDSHLTPFGFSLDPPSGFASADALVEASPNPLGYRMRSPWDRLTNVSTYGPSWSEEDDEPDFCWDFSGLGNPSAMRDFMTACDYCLSDRSDGSRSLGDEDCGPSRECFHVDLGGPSEGNHLGXFSRAIRRVPFPTRFRPPTTITKYSGETRPELWLADYXLACQLGGTDDDNLIIRNLPLFLSVTARAWLEHLPPGQISNWDDLVQAFAGNFQGTYVRPGNSWDLRSCRQQPGESLRDYIRRFSKQRTELPNITDSDVIGAFLAGTTCRDLVSKLGRKTPTRASELIDIATKFASGQEAVEAIFRKDKQPQGRPPEDAPKASTQRGAKKKGKKKSQAKRDATDADLVAAAEYKNPRKPPGGANLFDKMLKEPCPYHQGPVKHTLEECAMLWRHFHRVGPPAKGGRGHDDDKKEDHQAGEFPEVRDSFMIYGGQAANASARHRKQEHREVCSVKVAEPVYLDWSDKPITFDQADHPDHVPTPGKYPLVVDPVIGDVRLTKVLMDGGNSLNIIYAETLGLLRVDLSSVRAGAAPFHGIIPGKRVQPLGQLDLPVCFGTLSNFRRETLTFEVVGFRGTYHAVLGRPCYAKFMAVPNYTYLKLKMPGPNGVITVGLTYKHAFECDVECVEYAEALAESEALIADLESLYKEVPDVKRHAGNFEPAETVKSVPLDPSRDASKQIRIGSELDPK

SEQ ID NO: 299572 - protein, 152 aa, Zea mays
  Clone ID: MRT4577_36279C.1.pep
AFRVDLKLGLSFFQGWQPPLKNAISPWLNLVAKTHFLGVLEGHGEKFVPNSCAKYLHGQALKSKAYSTGDLGTVAHKAFLRRDEMIQGQKGCQELSALEDKLNKLMGIIKGWIGSPRGRVPINHQNDGPSKEGPNSDFAGPTCGSPACVALI

SEQ ID NO: 299573 - protein, 46 aa, Zea mays
  Clone ID: MRT4577_3627C.1.pep
LLVTPLNEHPGVHPCSYLLALISITIQITEAVPGKRYTEELRPDSS

SEQ ID NO: 299574 - protein, 239 aa, Zea mays
  Clone ID: MRT4577_36280C.1.pep
MSGVVLAPETTTGVASQQRANPKRTDDASTLARDLSDISLAPEITTHSIPDATSPPSINQEVPSVFHPVPFRFSFDPPSDPTSVSAFARAYPDLLGYHIWSTWDRLTAVSTSGPAGSEEEDDPDFSWNFSGLRDPGAMRDFLSACDHCLSGYSDDGHSLDDEDYDSTRECFHIDQGDHDEDDHLGMPGNDDAHVPASRVEIPRELAVARVRAGGQGTQLEQLHEMHTKLDEETGRLVQL

SEQ ID NO: 299575 - protein, 76 aa, Zea mays
  Clone ID: MRT4577_36281C.1.pep
TLRLFRLFFPEGPHLLRNDFFNHPGGNPPVPNFLLPPFKPLQGPPFFGPRKQGLLNPRLPPLNPLKKGLFPILCYP

SEQ ID NO: 299576 - protein, 133 aa, Zea mays
  unsure (1)..(133): unsure at all Xaa locations
  Clone ID: MRT4577_36282C.1.pep
IXMGYEDEXXEXEIEEGVEEEXEKNEDXXDEVIGGEGEDKEXEKKKXECKIXKXMKKXEXXXXXXXXXLXIXMNGXXMVEXEGEXXXFEIXMKEXRXXKIXXXXRXXLIDGXYEEWGVEEXIVEEFWKXXVGG

SEQ ID NO: 299577 - protein, 123 aa, Zea mays
  unsure (1)..(123): unsure at all Xaa locations
  Clone ID: MRT4577_36283C.1.pep
FPDAVVSAPTPQAFLAVTNPASEAYPGAEGRSEAPNGTPCFHIWLGRMSDSERCSLPERRTGGELLDRXGGMRNDYVSDDDVPLQGNLDYLRKNYALVSSYELGGSLMRTSYSLLILLGVVRA

SEQ ID NO: 299578 - protein, 40 aa, Zea mays
  Clone ID: MRT4577_36284C.1.pep
ASSILTLVREERLIHTVGHRVWLNSQWLKATVCGNISEGI

SEQ ID NO: 299579 - protein, 131 aa, Zea mays
  unsure (1)..(131): unsure at all Xaa locations
  Clone ID: MRT4577_36285C.1.pep
PQDSLSAERDRIXTXAPXLVXXDERETPTIAAEGKPPXKQQGSXTPTKXXXENXDTTEATTRAXKNKAQSRATRQKKKGTEHQQAKPQKKQPGSPTREAPKKKQRSAHSPQRRETRPSQRRKGNGQRAGRG

SEQ ID NO: 299580 - protein, 151 aa, Zea mays
  Clone ID: MRT4577_36286C.1.pep
EKERIIGDKKVNVSIQVGAQVVYFKSPETKVALTDPTHLVLKKNAVIGILEPNAVKAIRLLTAGVLIKVVEVKAKTPEGLLLPETAKKNPSIGPVEPVGPGPLDKAGKRLALSVSPGSPVLYSKYPASKFKGPAGTNYIVLRGWDLMPVFS

SEQ ID NO: 299581 - protein, 91 aa, Zea mays
  Clone ID: MRT4577_36287C.1.pep
MASHGLKTKAGEPMVFGASSSQKSMNAAHFSGNKDILIGGCGPPLTSGAPMAHLFVNTAEWEHFRERHNPHAYMMEHEEMDNTLMHGPGDR

SEQ ID NO: 299582 - protein, 78 aa, Zea mays
  Clone ID: MRT4577_36288C.1.pep
MDDDDNEKADTSAKKSKKKKTKTETDGDAMDVDKPSNVADGEAELGTEKKKKKKKHKLEEAQENGAAHANGAEETQTP

SEQ ID NO: 299583 - protein, 179 aa, Zea mays
  unsure (1)..(179): unsure at all Xaa locations
  Clone ID: MRT4577_36289C.1.pep
SATRRRPGSMAXTQALASSRKVSANGSAAANVKTVCDSLASSSAKKGEGGNPAAANTARSRAASARSATGAGAGAAAAASATSTAAENGSASSAATEVKQWYPAKNADAAARMTPAAGAAPWHARDSPPALLMAQRSLSASLPRSSSSSSAAETERSAMQQCALALADGWMDGWVGGEE

SEQ ID NO: 299584 - protein, 123 aa, Zea mays
  Clone ID: MRT4577_3628C.1.pep
DGYGDEFPFRIKCSISTLCPSTRLICSPVSSSLFSQVCVQVKPSFFSKFVACQASSSPSNYRKLMAHILYKNHLSPSGWWYPFHGPVGCSQGPVVSRPFLDGFSSVWHFFGPLHIVTRFLSTN

SEQ ID NO: 299585 - protein, 280 aa, Zea mays
  Clone ID: MRT4577_36290C.1.pep
RLEDPRFRLGFLHSGTAKSVTCTYSPALNKMFCQLAKTCPVQLWVDSTPPPGTRVRAMAIYKQSQHMTEVVRRCPHHERCSDSDGLAPPQHLIRVEGNLRVEYLDDRNTFRHSVVVPYEPPEVGSDCTTIHYNYMCNSSCMGGMNRRPILTIITLEDSSGNLLGRNSFEVRVCACPGRDRRTEEENLRKKGEPHHELPPGSTKRALPNNTSSSPQPKKKPLDGEYFTLQIRGRERFEMFRELNEALELKDAQAGKEPGGSRAHSSHLKSKKGQSRVPSSN

SEQ ID NO: 299586 - protein, 71 aa, Zea mays
  Clone ID: MRT4577_36291C.1.pep
RHFLYPVITRSISILPSNIQVGMCRALEISTYPSYECSPLTIISLFHLRSRRICPLYMQRSTTPSLRRSAR

SEQ ID NO: 299587 - protein, 41 aa, Zea mays
  Clone ID: MRT4577_36292C.1.pep
SSYKVTSNKFIKTVPQSIVFITFTNFDNQLIEVVCQPPPFV

SEQ ID NO: 299588 - protein, 158 aa, Zea mays
  unsure (1)..(158): unsure at all Xaa locations
  Clone ID: MRT4577_36293C.1.pep
GXCGSGHDXLMTPCRRQEXWQLSPTGLDXXAIEDAERRGVRYLSXAWDAXALTAXPVSVEMATDGSKGGEXXSPGXXGAXXTAXEXXAARXXGXXTHLXRPPLQXFXXPVRQPAXRPXPARCRPAXGVPERETGRXXEARXGGRPXPAGMGKRRRXAX

SEQ ID NO: 299589 - protein, 55 aa, Zea mays
  Clone ID: MRT4577_36294C.1.pep
MTMPVKLTPASLSLKAVCCRFSSGGHALRLGSSLPPSPQDADATEHVVVYDALCG

SEQ ID NO: 299590 - protein, 492 aa, Zea mays
  unsure (1)..(492): unsure at all Xaa locations
  Clone ID: MRT4577_36295C.1.pep
MSADYDYIEHNHRDAGGEIYSLREELMVAQDRIHELEAECRSTKKQLDHLAKNIAEEKASLKSKEHDKFHHILHXIEXELNRERKQRQRAEMMNSKLLNDLSEMKFAAKRYLQDYEKERKARVLMEEVCDELAKEITEDKAEVEXAMRSESMKIRDELEEEKKMLPIAEVWXREERVQMKLADAKLALENKYSQLSKLQNELEDFLQFQSGCNMEKGTVREAERLKEAICSSRINGIKEFSYKAPPSSEDIFAVFEELKQREDTAEKVIMQCNGNRPKGRGSRAHTASPETDTFLENQPNRYCNEPRTRNEAAEDDSGWETVSQVEENGSCNSPGGSEPSVNGFCGENDASVSGTDWDENCDNDQAHSEISEVCSTAAGRSRNKRSFAGLWRSSNTVDQKKMGSNTLNGRSSNARMSNATESADLKNSEVCDSPHITGQWRPDLLNPDIVRAIKGCIDWPRGVQKQSLRSKVLEARIDGSKVQLRQALKQKI

SEQ ID NO: 299591 - protein, 184 aa, Zea mays
  unsure (1)..(184): unsure at all Xaa locations
  Clone ID: MRT4577_36296C.1.pep
GVSEGRKKSPNSFYRIRLLPLPALFLRTIPITCTFAVWGLDLVGPLQKAPGGYTHLLLAIDKFSKCIEVRPLNSITSEQAVAFFTNIIHHFGVPNSIITDNVTQFTARKFLDFCEDHHIRVDWAAVVHPMTNAQVERVTGMILQXLKPRIYNELNKFGKRWMKELLSVVCTLTTTPSRAPAFTP

SEQ ID NO: 299592 - protein, 1323 aa, Zea mays
  Clone ID: MRT4577_36297C.1.pep
MQAKLDEEAGQLVQLRQNIEQEWAGRALAGEARHQAQDVQRRITDDARARLPPASSGVGQNLGAATILLRAMPEPSTTEGRRGTDDDNHIIRNLPQFLSDAARAWLEHLPPAQISNWDDLVKAFAGNFQGTYVRPGNSWDLRSCRQQPGESLRDYIRRFSKQRSELPNITDSDVIGAFLAGTTCRDLMSKLGRKTPTRASELIDIATKFASGQAASGTPAGRRPEASAQHSTKKKGKKKSQAKRDAADVDLVATAEHRNPWKPPGGANLFDKMLKESCPYHQGPVKHTLEECVMLRRYFHKAGPPAEGGKGHDKDKKEGNKAEEFPEERREVCSVKVAAPVYLDSSDKPITFDQDDHPDRVPSPGKYPLVVDPVIGNVRLTKVLMDGGSSLNIIYAETLGLLQIDLSTIRAGRPCYAKFMAVPNYTYLKLKMSGPNGVITVGSTYRHAYECDVECVEYAKALAESEALIADLECLSKEVPDARRHADNFEPVEAVKSIPLDPSNDACKQPLRRFDEEKRRAIGEEIHKLMATGFIKEVFHPEWLANPVLVIKKGGKWRMCVDYTGLNKACPKVPYPLPRIDQIVDSTAGCESLSFLDAYLGYHQIKMKESDQLATSFITPFGMYCYITMPFGLRNAGATYQRCMNHVFGEHIGRTVEAYVDDIVVKTRKASDLLSDLETTFKCLRAKGVKLNPKKRSPLDLRSRNHSGGQRRDRSRETRRRACSARPEAGLLHQRSAIRDQDPLPANSKATVRSNSDAVKVATLLRVSSSDCGVILPLGEIIQCREASGRVAKWAVEIMGETISFAPRKAIKSQVLVDFVAEWVDTQLPTAPIQPELWTMYFDGSLMKTGAGAGLLFISPLGKHLRYVLRLHFPASNNVAEYEALVNRLRIAIKLGVRCLDARGDSQLVIDQVMKNSHCHDRKMEAYCDEVRRLEDKFYRLELNHVARRYNETTDELAKIASGRTTVPLDVFSRDIHQPSIKTDDTPEPEEASAQPKAPSAAEGEALRVEGERNGGCQFYARQTHLPAQALQTIPITWSFAVWGLDLVGPLQKAPGGFSHLLVAIDKFSKWIEVWPITSIRSEQAVDLFTNIIHRFGVSNSIITDNGTQFTGKKFLDFCEDHHIRVDWASVAHPMTNGQVERANSMILQGLKPRIYNDLNKFGKRWMKELPSVVWSLRTTPSWATGFSPFFLVYGAEAILPIDLEYGSPRTRAYDDQSNQTSREDSLDQLEEARDVALLHSARYQQSLRRYHARGVRPRDLPVEDLVLRLQQDARGCHKLTPPWEGPFIIAKILKPGTYKLANNQGAVYSNAWNIRQLRRFYP

SEQ ID NO: 299593 - protein, 122 aa, Zea mays
  unsure (1)..(122): unsure at all Xaa locations
  Clone ID: MRT4577_36298C.1.pep
KGPRKQLTTKRARKXARATDGVKKSLRFRHGTVASREIRKYQKSTXMLIRKLPFQSFVLEIPQEFKTGLRFQSSPVTTMQESAKAYMVGLFKNTNLCAIHAKRVSIMPKDIQIVHRIRGERA

SEQ ID NO: 299594 - protein, 266 aa, Zea mays
  unsure (1)..(266): unsure at all Xaa locations
  Clone ID: MRT4577_36299C.1.pep
GKGRDDDKKEGDKEEEFPEXNASARHRKQERREXPVYLDWSDKPITFDRDDHPDCVPSPGRYPLVVDPVIGNARLTKVLMDGGSSLNIIYAETLGLLEIDLSTIRASAAPFHGIVPGKRVLPLEQLDLPVCFGTPSNFRRETLTFEVVEFRGTYHAVLGRQCYAKFMAVPNYTYLKLKMPGPNGVITVGSTYRHAYECDVECVEYAEALAESEALIADLECLSKEVPDVKRHAGNFEPAEAVKSVALDPSNDACKQVRIGSELDPK

SEQ ID NO: 299595 - protein, 57 aa, Zea mays
  Clone ID: MRT4577_3629C.1.pep
KGVKLKKNGVRVGLKKTEPPRVFKKSFPPPINKGRGTFFPSGIFPHQGGGAQTQLQN

SEQ ID NO: 299596 - protein, 142 aa, Zea mays
  unsure (1)..(142): unsure at all Xaa locations
  Clone ID: MRT4577_36300C.1.pep
MAGTFREGAGPGDAHAPPPTPTPPLSQFLALDALPSWGSDPKQPHWRHPELRRALASDDQADELRRIRASVQDSAGKAKEKVRSLHEAIQKLDKYKNIVTRKRQRATEASAAPDKLGPAGAXXXGALRMGAQNNSAVLSERK

SEQ ID NO: 299597 - protein, 879 aa, Zea mays
  Clone ID: MRT4577_36301C.1.pep
MPFGLRNAGAMYQRCMNHVFGEHIGRTVEAYVDDIVVKTRKASDLLSDLEVTFRCLKAKGVKLNPEKCVFGVPRGMLLGFIVSERGIEANPEKIAAITSMGPIKDLKGVQRVMGCLAALSRFISRLGERGLPLHRLLRKAESFTWTPEAEEALGDLKALLTKAPILVPPADGEALLVYVAATTQVVSAAIVVERQEEGHASPVQRPVYFVSEVLSETKIRYPQVQKLLYAVILTRRKLRHYFESHPVTMVSSFPLGEIIQCREASGRIAKWAVEIMGETISFAPRKAIKSQVLADFVAEWVDTQLPTAPIQPELWTMFFDGSLMKTGAGAGLLFVSPLGKHLRYVLRLHFPASNNVAEYEALINGLRIAIELGVRRLDARGDSQLVIDQVMKNSHCRDPKMEAYCDEVRRLEDKFYGLELNHIAWRYNETADELAKIASGRTTVPPDVFSWDLHQPSVKINDKPEPEAPSVQPEAPSVQPEASSGSVRGELPLDQAEARRVARRAKSFVLLGDEKELYHHSPSGILQRCISIAEGQELLQEIHSGACGHHAAPRALVGNAFRQGFYWPTAVADATRIVRTCEGCQFYAKQTHLPAQALQTIPITWPFAVWGLDLVGPLQKAPGGYTHLLVAVDKFSKWIEAVAFFTNIIHRFGVPNSIITDNGTQFTGKKFLDFCEDHHIRVDWAAVAHPTSNGQVERANGMILQGLKPRIYNGLNKFGKRWMKELPSVVWSLRTTPSRATSFTPFFLVYGAEAVLPTDLEYGSPRTRAYNDQSNQASREDSLDQLEEARDKALLHSARYQQSLWRYHARGVRPRDLQVGDLVLRLRQDARGRHKLTPPWEGPFVIAKVLKPGTYKLANSQGEVYGNAWNIQQLRRFYP

SEQ ID NO: 299598 - protein, 1029 aa, Zea mays
  unsure (1)..(1029): unsure at all Xaa locations
  Clone ID: MRT4577_36302C.1.pep
GGRRPVRRRRNRRHLPRVVEEQHSSLPRPLPRQRRRRRGNQGQAGGRASSAVERIDVPSAPTGGASGVDLAFETKASAVPPRHANPEQVDDASALAESLQDVALVPETTVQSVPDVAMSLLVDQKXLNPPSDLALAGALVEASATPLGFRMRSPWDRLTDVSTYGPSGSEEDDDPDIYWDFSGFGNPSAMRDFMTACDYCLSDYSNGSRSLDDEDCGPSRECFHVELGDPSEGNHLGMPEDDDLPRPVPRADIPRELAVVPVPAGGHDPQLEQVRGAQARLDEGAGALEPIRRDVGQVWAGQPPAGEIRHLPQGLQHRVANDARVRPPPASSGVGQNLAAAAMLLRAMPEPSTTEGRRIQGELKNLLEGAAVRRAESSASRRQGYPSEPHAATSRFMREASVYIGRTRNTAPAAPGHLGNEHHRRDRRAHLDERVRRGYHPRRGGRYDSGEDKSPSPEPPGPQAFSRAIRRAPFPTRFRPPTTITKYSGETRPELWLADYRLACQLGGTNDDNLIIRNLPLFLSDTARAWLEHLPPGQISNWDDLVQAFAGNFQGTYVRPGNSWDLRSCRQQPGESLRDYIRRFSKQRTELPNITDSDVIGAFLAGTTCRDLVSKLGRKTPTRASELMDIATKFASGQEAIEAIFRKDKQPQGRPSEDAPEASTLCGAKKKGKKKSQAKRDAADADLVAAAEYKNPRKPPGGANLFDKMLREPCPYHQGPVKHTLEECVMLRRHFHRAEPPAEGGRARDDDKKEDHQAGEFPEVRDCFMIYGGHVANASARHRKQERREVCSVKVAAPVYLDWSDKPITFDQADHPDHVPSPGKYPLVVDPIVGDVRLTKVLMDGGSCLNIIYAETLRLLRVDLSSVRAGAAPFHGIIPGKRVQPLRRLDLPVCFRTPSNFRRETLTFEVVGFRGTYHAVLGRPCYAKFMAVPNYTYLKLKMSGPNGVITVGPTYKHAFECDVECMEYAEALTESEALIADLESLSKEVPDVKRHAGNFEPAETVKAVPLDPGGDTSKQIRIGSGLDPK

SEQ ID NO: 299599 - protein, 1055 aa, Zea mays
  Clone ID: MRT4577_36303C.1.pep
MSLDGSYDMILLPPPRDNNNGDRRPARQRRNRRHLPRVVEERHSSSPRPLPRQRRRRRGNQGQTGGRASSAIERIDVPSAPTGGASGIDLAFETKASAVPPRHADLEQVDDASELAEGLQDVALVPRTTAQSVPDVTMSLLVDQKVLTDSHPTLFRPGLNPPSDLALAGALVEAGATPLGFRVRSPWDRLTDVSTYGPSGSEEDDDPSICWDFSGFGNPSAMRDFMTACDYCLSDCSDGSRSLDDKDCGPSRECFHVELGDPSEGNHLGMPEDGDLPRPAPRADIPRELAVVPVPAGGHDPQLEQVRGAQARFDEGAGALESTRRDVEQVWVGQPPAGEIRHLPQGLQHRVANDVRVRPPPASSGVGQNLAAATMLIRAMPEPSTTEDRRIQGELKNLLEGAAARRAESSASRRQGYPSEPHAATSRFMREASVYTGRTRNTAPAAPGYLGNEHHRRDRRAHLDERVRRGYHPRHGGRYDSGEDRSPSPEPPGPQAFSRAIRRAPFPTRFRPPATITKYSGETRPELWLADYRLACQLGGTDDDNLIIRNLPLFLSDTARAWLEHLPPGQISNWDDLVQAFAGNFQGTYVRPGNSWDLRSCQQQPGESLRDYIQRFSKQRTELPNITDSDVIGAFLAGTTCRDLVSKLGRKTPTRASELMDIATKFASGQEAVEAIFRKDKQPQGRPSEEIPEASTPHGAKKKGRKKSQAKRDAADADLIAAFEYKNPRKPPGGANLFDKMLKEPCPYHQGPVKHTLEECVMLRRHFHRAGPPTDGGRARDDDKKEDHQAGEFPEVRDCFMIYGGHAANASARHRKQERREVCSVKVAAPVYLDWSDKPITFDQADHPDHVPSPGKYPLVVDPIVGNVRLTKVLIDGGSCLNIIYAETLRLLRVDLSSVRAGAAPFHGIIPGKRVQPLGRLDLPVCFGTPSNFRRETLTFEVVWFRGTYHAILGRPCYAKFMAVPNYTYLKLKMSGPNGVITVGPTYKHAFECDVECVEYAEALIADLENLSKEVPDVKRHAGNFEPAETVKAVPLDHSGDTSKQIRIGSGLDPK

SEQ ID NO: 299600 - protein, 1036 aa, Zea mays
  Clone ID: MRT4577_36304C.1.pep
MVLRFESLEFMSLDGIYDMILLPPPHDSDNGGRQPARRRRNRRRLPHVVEEQHSGLSHPLARRRRRKRGNQGQAGGGTSLAVERVDGAGAPTGGTSGIDLASETKTSVVSPQHANPKQTDDASTLAKDLLGITLVPETTVQSAPDMTSSPPVDQEVPTDSHLVPFGFGLDPPSDFASVDALIEAGPNPLGYRMRSPWDRLTAVSTYGPSGSEEDDEPDFSWDFSGLGNPSAMRDFMTACDYCLSDCSDGSRSLGDEDRGPSRECFHVDLGGPGEGNPLGIQENGDPPRPVPRVDILRELAVVPVPAGGPNPQLEQIREMQARLDEGAGTLEPFHRDIGQEWAGQHPAGEVRHLPQGIQHRIADDVRVRPPPVSSGVGQNLAPAAILLRAMLEPSTTEGRRIQGELKNLLEDAAVRRAESSASRRQGYPSEHRAATSRFMREASVHTWRTRNTAPAAPGRLGNEHHHRNRRAHLDEKVRRGYHPRRGGRYDSGEDWSPLPEPPGPQAFSRAIRRAPFPTRFRTPTTITKYSGETRPELWLVDYQLACHLGGTDDDNLIIRILPLFLSDTARAWLEHLPPGQISNWDDLVQAFAGNFQGTYVRPGNSWDLRSCRQQPEESLWDYIRRFSKQRTELPNVTDSDVIGAFLAGTTCRDLEAVEAIFRKDKQPQGRLPEDVPEASTQCGTKKKGKKKSQAKRDAADADLVAAVEYKNPRKPPGGANLFDKMLKEPCPYHQGPVKHTLEECAMLRRHFHKAGPPAEGGRARDDDKKEDHKVGEFPKVRDCFMIYGGQVANASARHRKQERREVCSIKVATPVYLDWSDKPITFDRGDHPDRVPSPGKYPLVVDPVIGNVRLTKVLMDGGSSLNIIYTETLRLLRIDMSSVQAGAAPFHEIIPGKRVQPLGQLDLPVCFGTPSNFRRETLTFEVVGFRGTYHAMLGRPCYAKFMAVPNYTYLKLKMPGPNGVITVGPTYRHAYECDVECVDYAEALAESEALIADLESLSKEAPDVKRHAGNFEPAETVKSVPLNPSSDASKQI

SEQ ID NO: 299601 - protein, 2029 aa, Zea mays
  unsure (1)..(2029): unsure at all Xaa locations
  Clone ID: MRT4577_36305C.1.pep
MGSLQQPLQPGTMLPLGVSSWXSLDDNYEMVLLPPPHGNDNGRRQPPRRWWNRRRFPRVAGEHHPGLARHRPPRRRRRRGNHGQAGGETSSAVERVDDEHGQRGXTSGVDRGSTEPCELGATPQPKSAIXTCASGPLPKGXLVLGXTPAVPEPLGHSMDPVPRAPILCPLGWRRPPLAPAPRDALGDAHPNLPGYICGQPGXLTVVSTYGPSXPRKMTSPTLVGXSWLGNPSAMRDFMTACDYFLSDYYDGGHSLGDKDCGPSRECFHVEPMAPXRGNHLGMPKGCAPPKRPPRANLLREPGVVPGPVGRGAQLGQIPEMXATRDAEAGQPAQLWQNVGRERAGRASAGEARHLPQDVQHRIADDARARLPSASSGVGQNLAAAAILLRAMSEPSTTEGRRIQGELRNLLEDVAHRAATSRFMWEASVHTGRTRYATPAAPGRLGNEHHRRDRRAHLDEKVRRGYHPRHGGRYDSGEDQSPSPEPPGPQAFSRAIRRASFPTRFQTLTTITKYSGETRPELWLADYRLACQLGGTDDDNLIIRNLPLFLSDAARAWLEHLPPVQTSNWDDLVKAFAGNFQGTYVRPENSWDLRSYRQLPGESLRDYIRQFSKQRTELPNITDSNVIGAFLAGTTCRDLESKLGRKTPTRASELMDIATKFASGQEAVEAIFRKDKQPQGRPQEDVPEVSTQRGTKKKGKKKSQAKRDTADADLVAAAEHRNPRKPPGGANLFHKMLKESCPYHQGPIKHTLEECVMLRCYFHKVGPPAEGGRAHDNDKEGHKAEEFPEVHDCFMIYGGQVANASARHRKQERREVCSVKVAAPVYLDWSDKPITFDQGDHPDHVSSPGKYLLVVDPIIGNIRLTKIDLPTIRAGAAPFHGIIPRKRVQPLGQLDLPVCFGTPSNFRKETLTFEVVGFRGTYHAVLGRPCYAKFMVVPNYTYLKLKMSGPNGVITVGSTYRHAYECDMECVEYAEALAKSEALIADLESLSKEVPDAKRHAGNFEPAEAVFAWSPSNMPGIPRVVAEHSLDIRAGARPVKQPLRRFDKEKRRAIGEEIHKLMAAGFIKEVFHPEWLANPVLVKKKGGKWRMCVDYTGLNKACLKVPYPLPRIDQIVDSTARCETLSFLDAYSGYHQIRMKGSDQLTTSFITPFGMYCYITMTFGLRDAGATYQRCMNHMFGQHIGRTVEAYVDDIVVKTRKASDLLSDLETTFKCLKAKGVKLNPEKCVFGVPRGMLLGFIVSERGIEANPEKIAAITNMGPIKDLKGVQRVMGCLAALSRFISRLGERGLPLYRLLRKTERFTWTPEAEEALENIKALLTSAPILVPPAVGEALLIYVAATTQVVSAAIVVERREEGHALLVQRPVYFINEVLSETKIRYPQIQKLLYAVILTRRKLRHYFESHSVTVVSSFPLGEIIQCREASSRIAKWAMEIMGETISFAPRKAIKSQVLADFVAEWVDTQLPAAPIQPELWTIFFDGSLMKTGAGAGLLFISPLGKHLRYMLRLHFPTSNNVAEYEALVNGLRIAIKLGLVIDQVMKNSHCRDPKMEAYCDEVRHLDDKFYGLELNHVARWYNETADELAKIASGRTTXPPDVFSRDLHQPSVKTDDTPEPEKASALPEVPSAQPEAPSAAEGEALRVEEERNGVLPNRNWQTPYLXTSTEESYPPIEPKLGDWRGAPSHSSCWVTRRSSTTAAPQASSSDAYPSPKGFYWPTAMADATRIVRTCQGCQFYARQTHLPAQALQTIPITWSFVVSGLDLVGPLQKAPGGYTHLLVAIDKFSKWIEVRPLNSIRSEQAVAFFTNIIHRFGVPNSIITDNGTQFTGRKFLGFCDDHHIRVDWAAVAHPMTNGQXWMKELHSVVXSLRMTPSRAMGFTPFFLVYGAKAILPTDLEYGSPRTRAYDDQSNQTSREDSLDQLEEARDMALLHSARYQQSLRCYHARGVRSXDLQVGDLVLRLRQDARGRHKLTPPWEGPFIIAKILKPETYKLANSQGEVYSXLGTYDSYVASTLKMFSSRSYTSFSLHTQI

SEQ ID NO: 299602 - protein, 270 aa, Zea mays
  unsure (1)..(270): unsure at all Xaa locations
  Clone ID: MRT4577_36306C.1.pep
MTSVARHDKWEGGDARISEHGTHGGLREMAVGGTSASWSGIRPGRDEGSCASRASREXAPSGTESSGQRARARRPGNPGRGEPKTSRAXGKASAAGXRAAPGSSSRXEERGWARCRXSQSGAAAGACTRTANGAGERELRERNPSRAXPVGRGSRGRRGWGEAGRRCLRWRAKRRAHERAQQGARSSRESGRAAMKKSRPGVAKELGTRVNSEEERGGTASSVAGEKKSLKQGERRAGGQAMGQCRASGGTERSDRRSWMVGERAPATGR

SEQ ID NO: 299603 - protein, 153 aa, Zea mays
  unsure (1)..(153): unsure at all Xaa locations
  Clone ID: MRT4577_36307C.1.pep
WVTLRGLGPGPSLFLYSRKYCPKPYLPPSTANPRLXFDMTAGRAPAGRIVMELYANDVPKTAPNLRALRTGERGVAQFGKPFQYKXSTFHRVTLAFMCQGGDFTGGNETACEYIYGEKFPDEKLLRKPTALGVLSMSNAGPNTNGSXQCFICT

SEQ ID NO: 299604 - protein, 1072 aa, Zea mays
  unsure (1)..(1072): unsure at all Xaa locations
  Clone ID: MRT4577_36308C.1.pep
MGSLQQPLRPGTVLRFGTLEFVSFDGSYDMILLPPPRDDDNGGRQPARRRRNRRHLPRVVEEQRSSSLRSLPRQRRRRRGHQDQAGGRASLTVERIDAPDAPTEGTQDVDLAFKTKASAVPPRHTDPEQEDDAGTLAESLQDVALVPETTVQPVPDVTTSLLVDQKVPTNSHLASFRLGLNPPNDLALAGALIEASATPLGFRMRSPWDRLTDVSTYGPSGSEEDDDPSICWDFSGLGNPSAMRDFMTACDYYLSDCSDGSRSLGNESCGPGRECFHIELGDPSEGNHLGVPEDGDLPRPVPRADIPRELAVVPAPAGSYDPQLEQVREAQARLNEGTGALEPIRRDVGQVWAGQPLAGEIRHLPQGLQHRVANDVRVRPPPASSGVGQDLAAAAMLLRTMPEPSTTEGRRIQGELKNLLEGAAARRAESTASRRQGYPSEPHAATSRFMREASVYTGRTRNTAPAALGHLGNEHHRHNRRAHLDERVRRGYHPRRGGRYDSGEDRSPSPEPPGPQAFSRAIRRAPFPTRFRPPTTITKYSGETRPELWLADYRLACQLGGTDDDNLIIRNXPLFLSDTARAWLEHLPPGQISNWDDLVQAFAGNFQGTYXCQQQPGESLRDYIRRFSKQRTELPNITDSDVIGAFLAGTTCRDLVSKLGRKTPTRASELMDIATKFASGQEAVEAIFRKDKQPQGRPSEEAPEASAPRGAKKKGKKKLQSKRDTADADLVAAAEHKNPRKPPGGANLFDKMLKEPCPYHQGPVKHTLEECIMLRRHFHRAGPPAEGGRARDDDNNEDHQAGEFPEVRDCFMIYGGHAANASARHRKQERREVCSVKVAAPVYLDWSDKPITFDQADHPDHVPSPGKYPLVVDPVVGNVRLTKVLMDGGSCLNIIYAETLKLLRVDLSSVRAGAAPFHGIIPGKRVQPLGRLDLPVCFGTPSNFRRETLTFEVVGFRGTYHAVLGRPCYAKFMAVPNYTYLKLKMSGPNGVITVGPTYKHAFECDVECVEYAEALAESEALIADLENLSKEVPDVKRHAGNFEPAETVKAVPLDPSGDTTKQIRIGSGLDPK

SEQ ID NO: 299605 - protein, 109 aa, Zea mays
  Clone ID: MRT4577_36309C.1.pep
LTEHIGKAICFQGTSRSLSVLVGNHIISCIKWKWNINYRRWQFVFYGSSERTFYDVSKVMFSLCIMKATCIIFKTRRKYCDPFFSVYVRANRITIFPSPHMLELTGSQE

SEQ ID NO: 299606 - protein, 56 aa, Zea mays
  unsure (1)..(56): unsure at all Xaa locations
  Clone ID: MRT4577_3630C.1.pep
SAHSPIPSICGVGXLEETXLVLHGRTQIIFAYRKLMKLLPIRHLSLTRVDMVVNGY

SEQ ID NO: 299607 - protein, 936 aa, Zea mays
  unsure (1)..(936): unsure at all Xaa locations
  Clone ID: MRT4577_36310C.1.pep
GGRQPARRRRNQRRLPHVAEEQHSGLSRPLPRRRRRRRGNQGQAGGGTSSAVERVDGVGAPTGGTSGIDLASEAKTSAVSPQHANSKQTDDASTLAKDLLGVTLVPETTVXSAPDATSSPPVDQEXLDPPSDFASVDVLIEASPNPLGYRMRSPWDRLMAVSTYGPSGSEEDDEPNFCWDFSGLGNPSAMRDFMTACDYCLSDCSDGSRSLGDEDCGPSRECFHVDLGGPGEGNHLGILENDDPPRPAPRVDILRELAVVPIPMGGHDPQLEQIREMQARLDERAGTLEPFRRDIGQEWAGQPPAGEACHLPQGTQHRIADDARARPPPASSGVGQNLAAAAILLCAMPEPSTTEGRRIQGELKNLLEDAAAFSRAIRRAXSRPGFEPRLLSQSTRGRRXGTVARGLPAXPATWVERTMTTSSSATSPCSSLTPLEPGXHLPPGQISNWDDLVQAFAGNFQGTYVHPGNSWDLRSCRQQSGESLRDYIRRFSKQRTELPNVTDLDVIGAFLAGTTCRDLVSKLGRKTPTRASELMDITTKFASGQEAVEAIFRKDKQPQGRPPEDVPEASTQRGTKKKGKKKSQAKRDAADADLVAAAEYKNPRKPPGGANLFDKMLKEPCPYHQGPVKHTLKECAMLRCHFHKVGPPAEGGRARDDDKKEDHKAGEFPEVHDYFMIYGGQVANASARHRKQERREVCLVKVAAPVYLDWSDKPITFDQGDHPDRVPSPGKYPLVVDPVIGNVRLTKVLMDRGSSLNIIYAETLGLLRIDLSSVRGGAAPFHVIIPGKRVQPLGQLDLPVCFGTPSNLRRETLTFEVVGFRGTYHAVLGRPCYAKFMVVPNYTYLKLKMSGPNGVITVGPTYRHAYECDVECVEYAEALAESEALIADLESLSKEALDVKRHAGNFEPAETVKSVPLDPSDDASKQIRIGSELDPK

SEQ ID NO: 299608 - protein, 230 aa, Zea mays
  unsure (1)..(230): unsure at all Xaa locations
  Clone ID: MRT4577_36311C.1.pep
YRXKEPVKTSTSNSGSRKSGSKLRKDAKPDRRNEDYSSPSSLRPPSNTNNTEDDFDDFDPRGYHGKTTAKSNEVDLFSPNLMDDFIDASAATPATDNAAEPQVDLFADADFQSATASTDTAANTDVKVNVDLFAEKASFPAAFPPQAGFIPPPSAGTSSEVNTSVSKKAAPEPFDPFGAIPLNNFDGPDPFGGFSSNAGSSTAAAPTHGSTGNISTSNQNLHAATDFAGL

SEQ ID NO: 299609 - protein, 81 aa, Zea mays
  Clone ID: MRT4577_36312C.1.pep
AATCRLLGIIILFIPPSTKASSCGFLLVIIYILVPSPTIASSARFPRVVIFILVFSSSIAPDGWLLLVAVFFLVPSTSIST

SEQ ID NO: 299610 - protein, 93 aa, Zea mays
  Clone ID: MRT4577_36313C.1.pep
LSIYEWFLFFLQAFQFCIFVVNRTPIFTKKTPMGACWPRGTIHLAKIITQSFLVEGKLATHPRGKTWLIKNNTLGKGQPANCETRAKKPPSFP

SEQ ID NO: 299611 - protein, 142 aa, Zea mays
  unsure (1)..(142): unsure at all Xaa locations
  Clone ID: MRT4577_36314C.1.pep
MADDDYNEXDMGYEDEPPEPEIEEGAEEELENNEDAPDDVIGGEGEDKEQEKTKRERKTTKYMTKYERARILGTRALQISMNAPVMVELEGETDPLEIAMKELRARKIPFTIRRYLPDGSYEDWGVDELIVEDSWKRQVGGD

SEQ ID NO: 299612 - protein, 45 aa, Zea mays
  Clone ID: MRT4577_36315C.1.pep
KRSIRTWGRFDYFPISNSPTHVIYYYYFLYYIILYFICHKLIFKT

SEQ ID NO: 299613 - protein, 142 aa, Zea mays
  Clone ID: MRT4577_36317C.1.pep
MADDDYNEIDMGYEDEPPEPEIEEGAEEELENNEDAPDDVIGGEGEDKEQEKTKRERKTTKYMTKYERARILGTRALQISMNAPVMVELEGETDPLEIAMKELRARKIPFTIRRYLPDGSYEDWGVDELIVEDSWKRQVGGD

SEQ ID NO: 299614 - protein, 142 aa, Zea mays
  Clone ID: MRT4577_36318C.1.pep
MADDDYNEIDMGYEDEPPEPEIEEGAEEEPENNEDAPDDVIGGEGEDKEQEKTKRERKTTKYMTKYERARILGTRALQISMNAPVMVELEGETDPLEIAMKELRARKIPFTIRRYLPDGSYEDWGVDELIVEDSWKRQVGGD

SEQ ID NO: 299615 - protein, 142 aa, Zea mays; identical to SEQ ID NO: 299613
  Clone ID: MRT4577_36319C.1.pep

SEQ ID NO: 299616 - protein, 116 aa, Zea mays
  Clone ID: MRT4577_3631C.1.pep
PNDRQRALSYRPPGHGRTRLVSNAKRPGMHCFSASPSSAGPGASPDVVMEHDQDAAHTRLRRRSLSIPPGTNAVTRARPSHDQSRGEARAHAYHVCGDRYIEATAIVMRALFTSQC

SEQ ID NO: 299617 - protein, 394 aa, Zea mays
  unsure (1)..(394): unsure at all Xaa locations
  Clone ID: MRT4577_36320C.1.pep
MSSLEEPLGLGDLPKLSINRLGRFVSLGARRPPADDDDHSTGKYSSSSCNNGSPQMAFHHGSNSSYPWHPQCRQAADPSRDAVELRDLPRKVMWELPRFVKIVEVGPRDGLQNEKGNVPASVKIQLIHKLVGAGLSVVEATSFVSPKWVPQLADAEEVLKGIKQEPGVRXPVLTPNLRGFEAAIAAGAKEIAVFASASESFSRSNINCTIEESLARYRGVTAAAKKHGLSIRGYVSCVIACPVGGATDPAKVAYVAKELYTMGCSEISLGDTTGVGTPGSVVAMLQAVMSFVPVDKIAVHFHDTYGQALANILVSLQMGINIVDSSVSGLGGCPYAKGATGNVATEDVVYMLHGLGIETNVDLNKLMEAGDYISKHLGRPLGSKTATALRKLTA

SEQ ID NO: 299618 - protein, 245 aa, Zea mays
  unsure (1)..(245): unsure at all Xaa locations
  Clone ID: MRT4577_36321C.1.pep
MAMKGPGLFTDIGKKAKDLLTRDYTYDQKLSVSTVSSSGVAVTSTAVKKGGLYSLDVASAYKYKNNLVDVKVDTESNISTTLTVLDVLPSTKLVTSIKFPDYYAGKVEVQYFHDHATFAAAVGMKPSPVVDFSLVVGPKGLAFGGEAGFDTSSGKFTKYTGGFSVTKPDFHASAILADKGDTIKVSGVYHLDEKQKASAVAEFTRKLSTNENTLXTLGGLYTVDPQTAVKARLNNTGKLAALLQH

SEQ ID NO: 299619 - protein, 66 aa, Zea mays
  Clone ID: MRT4577_36322C.1.pep
TTRTRCPRLGYWTPFAPPPTSTAPGPLATAGRHGIASPCSSLALAASIPADPPPEQAECSAAIDKP

SEQ ID NO: 299620 - protein, 96 aa, Zea mays
  Clone ID: MRT4577_36323C.1.pep
VIKAFKPTERCLLLKFVTSCSRAPLLGFKYLQPSFTIHKVPCDVTLWASIGGQDVDRLPSASTCYNTLKLPTYKRSSTLRSKLLYAISSNTGFELS

SEQ ID NO: 299621 - protein, 113 aa, Zea mays
  Clone ID: MRT4577_36324C.1.pep
HGAHLWAGGLVLSFPRFVVGALPGVVFVEVPGVLIVFIPGSPRKGPGLGQHHVPPPGLSTMARPLGKRDLSNKVLSWRGPSPASIRSVGTRMVISTEGPLTSPCYKFHKKSDL

SEQ ID NO: 299622 - protein, 97 aa, Zea mays
  Clone ID: MRT4577_36325C.1.pep
MAKSTAMFVAALALVVVMATTSTGGGRAAAACDPKPLVVCDPAFMDGAKPAAACCSTLRAQEACLCVYAKDPKFAKYINNPNTAKTFTSCGIAIPKC

SEQ ID NO: 299623 - protein, 109 aa, Zea mays
  Clone ID: MRT4577_36326C.1.pep
MVHADASTFSSGVTKEEAYKQVLMQAEGLFYEQRNWVCNLSNTAALLWHAYKSLPSPSSEVNWAGFYTLDPLSVPPPNSSSSSTTTPTPTQPPQPEPSQAPQQPSAPPQ

SEQ ID NO: 299624 - protein, 51 aa, Zea mays
  Clone ID: MRT4577_36327C.1.pep
RLDMTRTVERQPGKELGRKERLPFLFGGPATGQRTRPWPQKWQPSLSSSSF

SEQ ID NO: 299625 - protein, 85 aa, Zea mays
  Clone ID: MRT4577_36328C.1.pep
AGRVADRPVQLHVPEQDVASLLLPHANLCHATAPRHVARPRKVLALCAPPHSTLRSLSPAMLSPCLCSQALSPCRAHLRARLRPP

SEQ ID NO: 299626 - protein, 730 aa, Zea mays
  Clone ID: MRT4577_36329C.1.pep
MGPIKDLKGVQRVMGCLAALSRFISRLGERGLPLYRLLRKAECFTWTPEAEEALGNLKALLTKAPILVPPAAGEALLVYVTATTQVVSAAIVVERQEEGHALPVQRPVYFVSEVLSETKIRYPQVQKLLYAVILTRRKLRHYFESHPVTVVSSFPLGEIIQCREASGRIAKWAVEIMGETISFAPRKAIKSHVLADFVAEWVDTQLPTAPIQPELWTMFFDGSLMKTGAGAGLLFISPLGKHLRYVLRLHFPASNNVAEYEALVNGLRIAIELGVRRLDARGDSQLVIDQVMKNSHCRDPKMEAYCDEVRRLEDKFYGLELNHIARRYNETADELAKIASGRTTVPQDVFSRDLHQPSVKIDDTPEPEATSAQSEVPSAQSEVPSAQPEAPSAQPEATSVQPEGFYWPTAVADATRIVRTCEGCQFYAKQTHLPAQALQTIPITWPFAVWGLDLVGPLQKAPGGYTHLLVAIDKFSKWIEVRPLNNIRSEQAVAFFTNIIHRFGVPNSIITDNGTQFTGRKFLDFCEDHHIRVDWAAVAHPMSNGQVERANGMILQGLKPRIYNDLNKFGKRWMKELPSVVWSLRTTPSRATGFTPFFLVYGAEAVLPTDLEYGSPRTRAYTDQSNQASREDSLDQLEEARDKALLHSARYQQSLRRYHARGVRSRDLQVGDLVLRLRQDARGRHKLMPPWEGPFVIAKVLKPGTYKLANSQGEVYGNAWNIQQLRRFYP

SEQ ID NO: 299627 - protein, 177 aa, Zea mays
  Clone ID: MRT4577_3632C.1.pep
MALVSTATVASSSYHCDPHLFPGARRSWREPRWSRGGAGARLAVLQRAGGGGLAVLERAGAGAGSAVLERAGGAAAAAARREELVPSGNARNSYEVESLIDRLSNLPPRGSIARCLETARHRLTLQDFAAVYREFSRRGDWQRSLRLFKYMQRQSWCRPDEHIHAIGFCLLGRQGPG

SEQ ID NO: 299628 - protein, 1558 aa, Zea mays
  unsure (1)..(1558): unsure at all Xaa locations
  Clone ID: MRT4577_36330C.1.pep
MGSLQQPFQPGTMLCFGSLEFMSLDGSYDMILLPPPRDSDNGGRQPTRQRRNQRRLPHVAEEQHPGLSRHLPRRRRRRRGNRGQAGGGTSSVVERVDSAGAPAGDTSGVDLASETKTSAVSPQHANSTRADDASTLAKDLLGVTLIPETTVQSAPDVTSSPPVDQEVPTNSHLVPFGFSLEPPSDPASVEAFIEACTNPPGYHMRSPWDRLTAVSTYEPSCSEEDDEPDFGWDFSGLGNPSAMRDFMTACDYCLSDCSDGSRSVGDKDCGPSHECFHVDLVGPDEGNHLGIPENGDPPRPAPRVDILRELAVGELKNLLEDVAVRWAESSASRRQGYPSEHCAATSRFMREASVHTGRTRNTAPAAPGRLGNEDHHRNHRAHLDERVRRGYHPRRGGRYDSGEDRSPSPKPPGPQAFSRAIRRAPFPTRFRTPTTLTKYSGETRPELWLADYRLACQLGGTDDDNLIICNLPLFLSDTARAWLEHLPPRQISNWDDLLGESLRDYIQRFSKQRTELPNVTDSDVIGAFLAGTTCRDLVSKLGRKTPTRASELMDITTKFASGQEAVEAIFRKDKQPQGRQPEDVPEASTQRGTKKKGKKKSQAKHDAADADLVAAAEYKNPRKPPGGTNLFDKMLKEPCPYHQGPVKHTLEECTMLRRHFHKAGPPAEGGRARNDDKKEDHKAEEFPEVRDCFMIYGGLVANASARHRKQERREGDHPDRVPSPGKYSLVVDPVIGNVRLTKVLMDGGSSLNIIYAETLGLLQIDLSXRRETLTFEVVGFRGTYHAVXGRPCYAKFMAVPNYTYLKLKMSGPNGVITVGPTXGHAWHTEXDVVEHSLDIRAGARLVKQPLRRFDEEKRRAIGEEIHKLMAVGFIKEVFHPEWLANPVLVRKKGGKWRMCVDYTGLNKACPKVPYPLPRIDQIVDSTAGGETLSFLDAYSGYHQIRMKESDQLATSFITPFGMNAGATYQRCMNHVFGEHIGRTVEAYVDDIVVKTRKDSDLLSNLETTLRCLKAKGVKLNPEKCVFGVPRGMLLGFIVSERGIEANPEKIAAITNMGPIKDLKGVQRVMGCLAALSRFISRLGERGLPLYRLLRKTECFTWTSKAEEALGNLKALLTNVPILVPPAARETLLIYVAATTQVVTAAIVVERRKEGHALPVQRPVYFISEVLSETKIRYPQIQKLMYVMILMRRKLRHYFESHPVTVVSSFPWGRSSXCREASDRIAKXTGAGLLFISPLGKHLRYVLRLHFPASNNVVEYEALVNGLCIAIELGVRRLDARGDSQLVIDQVMKNSHCRDPKMEAYCDEVRRLEDKFYGLELNHIARRYNETADELAKIASGRTTVPPDVFSRDLHQPSVKTDDTPEPEKASALPEAPSARPEAPSVRPEASSAPEGEALRVEEERNGVPPNRDWQTSYLQYLHRGELPLDQAEARRLARRAKSFVLLGDGKGLYHRSSSGILQRCISIAEGQELLQKKAPGGYTHLLDAIDKFSKWIEVRPINVIRSEQAVAFFTNIIHRFGVPNSIITDNGTQFTXQSSWTSARITTSGWTGPPWLTP

SEQ ID NO: 299629 - protein, 102 aa, Zea mays
  Clone ID: MRT4577_36331C.1.pep
RPERAPKLFVLENVSCFLQNLYQIGNIGNSSFDAFVTEQGGFQSGDHRTTSVRFESQHGFVCVDLRVRDGSLVTCFVTDPSDEPDRSGRNNSVKSHDAQNLP

SEQ ID NO: 299630 - protein, 633 aa, Zea mays
  unsure (1)..(633): unsure at all Xaa locations
  Clone ID: MRT4577_36332C.1.pep
MPFGLRNVGATYQRCMNHVFGEHIDRTVEAYVDDIVVKTRKASDLLSDLEVTFRCLKAKGVKLNPEKCVFGVPRGMLLGFIVSERGIEANPEKIAAITSMGPIKDLKGVQRVMGCLAALSRFISRLGERGLPLYRLLRKAECFAWTPEAEEALGNLKALLTNAPILVPPAAGEALLIYVAATTQVVSAVTVVERREEGHALPVERPVYFISEVLSETKIRYPQIQKLLYAVILTRRKLRHYFESHPVTVVSSFPLGEIIQSREASGRIAKWAVEIMGETISFAPRKAIKSQVLADFVAEWVDTQLPTAPIQPELWTMFFDGSLMKTGAGAGLLFILPLGKHLRYVLRLHFPASNDVAEYEALINGLQIAIELGLVIDKIMKNSHCRDPKMEAYCDEVRRQGDKFYGLELNRIARRYNETADELAKIASGRTTVPPDIFSRDLHQPSVKTDDTPKPEKASAQPEAPSAQSEVPSTQSEVPSAWPEVPSAPEGXSTGRRRWPTPLELSAPAKGVSSTQGRPTCPLRFCRPYPSPGRLLCGVWTXVGPLQKAPGGYTHLLVAIDKFSKWIEVRPLNSIRSEHAVAFFTNIIHRFGVSNSIITDNGTQFTGRKFLDFCEDHHIRVDWATVAHPMTNG

SEQ ID NO: 299631 - protein, 62 aa, Zea mays
  Clone ID: MRT4577_36333C.1.pep
VRMFRLFIRTGTNGYYYVVGIYWCFRIRVLKEEGYVFAKNKRFLSVIILSLMKLVVGFIAVS

SEQ ID NO: 299632 - protein, 603 aa, Zea mays
  Clone ID: MRT4577_36334C.1.pep
MRDFMTACDYYLSGCSDDGHNLDDEGCGPSHECFHVDLGGCDEGNHLDIPEDDDPPGPASRVDILWELAVVPVPAGGQDTQLEQIREMQAKLDEEAGQLVQLQQNIEQERAGQALAGEISNWDDLVKAFAGNFQGTYVRPGNSWDLRSCRQQPKESLREYIRWFLKQRTELPNITDSDVIGAFLAGTTCLDLVSKLGRKTPTKASELMDIATKFASGQEAVQAIFRKDKQPQGRQKEDVPEASAQRGTKKKAKKKSQAKRDAADADLVAAAEHRNPQKPPGGANLFDKMLKESCPYHQGPVKHTLEECIMLQRYFHKAGSPAGDGKGQDNNKKQGDKAEEFPEVHRCFMIYGGQVANASSRHRKQERREVCSVKVAAPVYLDWSDKPITFDQDDHPDCVPSLGRYPLVVDPVIGNARLTKVLMDGGSSLNIIYAETLGLLGIDLSTIRTGAAPFHAIVPGKRVLPLGQLDLPVCFRTPSNFRKETLTFEVVGFWGTYHAVLGRPCYAKFMVVSNYTYLKLKMPGPNGVITIGSTYRHAYECDVECVEYAEALIADLECLSKEAPDAKRHVGNFKPAEAVKTVALDPSNDACKQVRIGSELDPK

SEQ ID NO: 299633 - protein, 51 aa, Zea mays
  Clone ID: MRT4577_36335C.1.pep
GRVGCWQCLSGRLSIVIFVKTSVLLRLNFCYFCIEHRVLAICGYEFCYYPC

SEQ ID NO: 299634 - protein, 846 aa, Zea mays
  Clone ID: MRT4577_36336C.1.pep
MPFGLRNAGATYQRCMNHVFGEHIGRTVEAYVDDIVVKTRKASDLLSDLEATFRCLKAKGVKLNPEKCVFGVPRGMLLGFIVSERGIEANPKKIAAITNMGPIKDLKGIQRVTGCLAALSRFISRLGERGLPLYRLLRKAECFTWTPEAEEALGNLKVLLTNAPILVPLAAGEALLIYVAATTQVVSAAIVVERREEGHALPVQRPVYFIREVLSETKIRYPQIQKLLYAVILTRRKLRHYFESHPLPTAPIQPELWTMFFDGSLMKTGAGAGLLFISPLGKHLLYVLRLHFPASNNVAEYEALVNGLRIAIELGVRHLDTRGDSQLVIDQVMKNSHCRDPKMEAYCDEVRRLEDKFYGLDLNHIARRYNETADELAKIASGQTTVPPDVFSRDLHQPSVKIDDAPEPEAPSAPEGEALRVEEERSGVTPNRNWQTPYMQYLHQGELLLDRAEARRLARCAKSFVLLGDGKELYHRSPLGILQRCISIAEGQELLQEIHSGACGHHAAPRALVGNVFRQGFYWPTAVADATRIVRTCQGCQFYARQTHLPAQALQTIPITWSFAVWGLDLVDPLQKAPGGYTHLLVAIDKFSEWIEVRPLNSIRSEQAVAFFTNIIHRFGVPNSIITDNGTQFTGRKFLDFCEDHHIRVDWAAVAHPMTNGQVERANDMILQVLKPRIYNDLNKFGKRWMKELPSVVWSLRTTPSRATGFTLFFLVNGAEAILPIDLEYGSPRMRAYDDQSNRANREDSLDQPEEARDMALLHSTRYQQSLRRYHARGVRSRDLQVGDLVLRLRQDARGRHKLTPPWEGPFVIAKVLKPGTYKLANSQGEVYSNAWNIRQLHRFYP

SEQ ID NO: 299635 - protein, 81 aa, Zea mays
  Clone ID: MRT4577_36337C.1.pep
APAPFTPALRPLYHSTIQSVHPHRNSTLRNSEHPIIILLVIRPYVIDSKPRNVAIAIARHEKIAQTMWPFMHTRDTPHMRK

SEQ ID NO: 299636 - protein, 290 aa, Zea mays
  unsure (1)..(290): unsure at all Xaa locations
  Clone ID: MRT4577_36338C.1.pep
WRQNRRRLPHVAEEQHPGLSRHLPRRRRRRRGRHGQAGGXTSSAVERVDGAGAPTVDTSGVDLASETKTSVVSPRHANPKQTDDASTLAKDMLGVSLVSEITVQSVPDATSSPSVDQEVPSISHPMPFTFSCDPPSDLASVDAFIKACPNPPGYHMRSTWDRLTAVSTYGPLGSGEDDEPDSGWDFSRLDNPSVMRDFVTACDYCLSDCSDSSHSLGDEDCGPSRECFHVDLGGLDEGNHLGMPEDGDTPRPAPRVDILRELAMVPVPAGGQDAQLKQIREMQARLDEEA

SEQ ID NO: 299637 - protein, 553 aa, Zea mays
  Clone ID: MRT4577_36339C.1.pep
MGETISFAPRKAIKSQVLADFVAEWVDTQLPTAPIQPELWTMFFDGSLMKTGDGAGLLFISPLGKHLRYVLRLHFPASNNVAEYEALVNGLRIAIELGVRRLDARGDSQLVIDQVMKNSHCRDPKMEAYCDEVRRLEDKFYGLELNHIARRYNETADELAKIASGRTTVPPDTPYLQYLHQGELPSDQAEARRLARRAKSFVLLGDKKELYHRSPSGILQRCISIAEGQELLREIHSGVCGHHAAPRALVGNAFRQGFYWPTAVADATKIVRTCEGCQFYARQTHLPAQALQTIPITWPFAMWGLDLVGPLQKAPGGYTHLLVAIDKFSKWIEVRPLNSIRSEQAVAFFTDIIHRFGVPNSIITDNSTQFTGRKFLDFCEDHHIRVDWAAVAHPMSNGQVERANGMILQGLKPRIYNDLNKFGKRWMKELPSVVWSLRTTPSRATGFTPFFLVYGAEAVLPADLEYGSPRTRAYADQSNQASREDSLDQLEEARDKALLHSARYQQSLRRYHARGSGPETSRWATWCFGCGKTPEGGTSSRPPRRGRSSSPKF

SEQ ID NO: 299638 - protein, 63 aa, Zea mays
  Clone ID: MRT4577_3633C.1.pep
HDRLTTSFAQHRFWPAMPGPDTIWMPVFAHACCRGNPKQNFYLGGGLGFALGFHFLWEKKGHH

SEQ ID NO: 299639 - protein, 406 aa, Zea mays
  Clone ID: MRT4577_36340C.1.pep
MEPIKDLKGVQRVMGCLAALSRFISCLGERGLPLYRLLRKTERFTWTPEAEEALGNLKALLTSAPILVPPAAGEALLIYVAATTQVVSAAIVVERREDGHALPVQRPVYFISEVLSETKIRYPQIQKLLYAVIPTRRKLRHYFESHPVTVVSSFPLGEIIQCREASGAGMGLLFISPLGKHLRYVLRLHFPASNNVAEYEALVNGLRIAIELGVRRLDARGDSQLVIDQVMKNSHCRDPKMEAYCDEVRRLEDKFYGLELNHIARRYNETADELAKIASGRTTVPPDVFSRDLHQPSVKNDDTPEPEKVSALPEAPSAHPEAPSAPEGEALRVKEERNGVTPNRNWQTPYLQYLHRGELPLDRAEARRLAQRGKSFVLLGDGNELYHHSPSGILQRCISVTPLVLL

SEQ ID NO: 299640 - protein, 146 aa, Zea mays
  unsure (1)..(146): unsure at all Xaa locations
  Clone ID: MRT4577_36341C.1.pep
GWGRRRGGHRLAHVHHETSCRCCNGPPRRKYKPACRPRMKGHGRGAGADGGIRLADTAGRALQTADLAHHFHTHAVYTVRIDDTGGSMRLSQGAAFSARPSAACLRGCLLSPAHTGPGTSGXLVFLIASSIRTLEFTWSIGGFLRE

SEQ ID NO: 299641 - protein, 451 aa, Zea mays
  unsure (1)..(451): unsure at all Xaa locations
  Clone ID: MRT4577_36342C.1.pep
MGCLAALSRFISHLGERGLPLYRLLRKTERFTWTSEAEEALGNLKALLTSAPILVPPAAGEALLIYVAATTQVVSAAIVVERREEGHALPVQRPVYFISEVLSETKIRYPQIQKLLYAVILTRRKLRHYFESHPIIQCREASGRIAKWAVEIMGETISFAPRKAIKSQVLADFVAEWVDTQLPAAPIQPEVWTMFFDGSLMKTGAGAGLLFISPLGKHLRYVMRLHFPASNNVAEYEALVNGLRIAIELGVQRLDARGDSQLVIDQVMKNSHCRDPKMEAYCDEVRRLEDKFYGLEVNHIARRYNETADELAKIALGRTTXPPDVFSRDLHQPSVKTDDTPEPEKVSALPEVPSAQPETXPRPPRKAPGGYTHLLDAIDKFSKWIEVRPLNNIRSEQAVAFFTNIIHRFGVPNSIITDNGTQFTGRKFLDFCEDHHIRVDWAAVAHPMTTG

SEQ ID NO: 299642 - protein, 56 aa, Zea mays
  Clone ID: MRT4577_36343C.1.pep
PLQTGRESTEDIYLNTWINFTYAKRPSWKVVSCTGTLMGNHIFNKNAWGLLTRLYH

SEQ ID NO: 299643 - protein, 218 aa, Zea mays
  unsure (1)..(218): unsure at all Xaa locations
  Clone ID: MRT4577_36344C.1.pep
CYHYAGARYVKGNGGWIARAPGESLGRARLGSAPRALVGXNAFRQGFYWPTAVADATRIVRTCQGCQFYARQTHRPAQALQTIPITWSFAVWGLDLVGPLQKAPGGFTHLLVAIDTFSKWIKVRPLNSIRSEQAVAFFTNIIHRFGVPNSIITDNGTQFTGRKFLDFCEDHHIRVDWAAVAHPMTNGQVERANGMLLQGLKPRIYNDLNKFGKRWMKE

SEQ ID NO: 299644 - protein, 75 aa, Zea mays
  Clone ID: MRT4577_36345C.1.pep
QFLDQISTLDKPSALAKLHATHGVVTGAVRRAEPAEPTLISLLRLHILSGEDLGILYSVDIGLGCGDRRQDGSHL

SEQ ID NO: 299645 - protein, 63 aa, Zea mays
  Clone ID: MRT4577_36346C.1.pep
LEPYAGACTCFLTFSTQGPAAKEGKMYTARKRSRRRRALSPRVRGLRCPAFLSETGTRSSRAT

SEQ ID NO: 299646 - protein, 141 aa, Zea mays
  unsure (1)..(141): unsure at all Xaa locations
  Clone ID: MRT4577_36347C.1.pep
GKRKQNGAGKKEGAGGKHKPQTKPEKTPPPRPTKKKPPPKKKKXPRPNKKPNPNKKKTRPPNXNLSPPPNTKKGPTPKKGESTLNAEKAPPPEKDSPPPPKKRAPPPXGPNKKNAAPPKLKPHPPLYQCKPKTRGSRMKKK

SEQ ID NO: 299647 - protein, 125 aa, Zea mays
  Clone ID: MRT4577_36348C.1.pep
TILQIYQLVTARKAQAHTVGPRKAQAWHGPPGRVAAGLGAWPPGHSSRAANGDSPARHRRPYSWGRWAVGSGHSGGPRTASARGWKGGRLGTAGSGGRLGLPSMARRTAEGWAQRAAAVFVRARR

SEQ ID NO: 299648 - protein, 100 aa, Zea mays
  unsure (1)..(100): unsure at all Xaa locations
  Clone ID: MRT4577_36349C.1.pep
SKGLFSECIQHWLQKKLHVRCLYKRFFVEKFLQYSFVLFSVAGFFFLKFKLKRYKATWCCSQFFNRVLYNCLELNFFFGFXXILEKIKKSQMTLVYSGKK

SEQ ID NO: 299649 - protein, 78 aa, Zea mays
  Clone ID: MRT4577_3634C.1.pep
QFLSHETATCRSWVYYNKTRAQICRKSLKQLHATKGSLSSLLAEVRDQIEIFCDAQAVAKNRLVEMHMHLDSTNDSKL

SEQ ID NO: 299650 - protein, 125 aa, Zea mays
  unsure (1)..(125): unsure at all Xaa locations
  Clone ID: MRT4577_36350C.1.pep
FWVRGVKGHPFLPFFLFGFKAPLGPISSVPFFRVFAYFFGRLATRFFLLGRGPLVQPHFCFLVFSLGPSGFSFFVFGFFFVWVFSLIPFFLRKGFFFFSPPVLNXPSPPEVGRIAGSGPLFPGPP

SEQ ID NO: 299651 - protein, 92 aa, Zea mays
  Clone ID: MRT4577_36351C.1.pep
RIGKYNCLGLQDIYSKIRGMTVTCFVAIYSYFRQCSIFLYISRVVLQVNWLYAKYYTVQLCRAIPKFLSVLRHCCWALWKRRNRLIFYGGIA

SEQ ID NO: 299652 - protein, 163 aa, Zea mays
  unsure (1)..(163): unsure at all Xaa locations
  Clone ID: MRT4577_36352C.1.pep
TAKQGIPATTXPMXQAGREGGRNSKQHRNQGGSGGGQNEGGKETGTGRSMTGKQFQILSITHGRHRHAHTHSPLSLSLSLSPLLSMVCSAVEQRQQLKANSCRIFLELAQQPPSEARGRPQQSWPPAGEERTDTRGKSRRRWVGAGRRRREEEQCQSEASCRI

SEQ ID NO: 299653 - protein, 77 aa, Zea mays
  unsure (1)..(77): unsure at all Xaa locations
  Clone ID: MRT4577_36353C.1.pep
ACPVXFFLFFFIXXSFFFFFFFFFFFFFFFLICTPNSHIHQICSHKNKPCKHTELRHKLNAHSKYQNNSSTPLFDLD

SEQ ID NO: 299654 - protein, 132 aa, Zea mays
  unsure (1)..(132): unsure at all Xaa locations
  Clone ID: MRT4577_36354C.1.pep
MEIAMVCTRVNLLILILSLCSPYKFIQSPMDFGPLNLLPTTIAASSDFGRILFHSPSAVLKPQSPRDISLLLSFLSASSLGKVTVAXQGAGHSIHGQAQAXLDGIVXVEMRSLPCEIELHQRGRKRCFPMLM

SEQ ID NO: 299655 - protein, 541 aa, Zea mays
  unsure (1)..(541): unsure at all Xaa locations
  Clone ID: MRT4577_36355C.1.pep
MEAALTQQAAATATPTRWRCVGDASLASHGQGQQRAGAVRLGAARRAVSGAVRASSSRHLGPVRALVSEEAAAGERAAEGEGKDAAVRLFVGLPADAVVSDGRGVGRPRAVSAALRALKLLGVDGAELPVSWAVAQPGPGGWFEWAGYRAVAAMVRDAGLDLRVSLRTHGDALPGCGRRGWPTRXGXADPDVLFTDRSGHRRMGCLSFAVDELPVLVGKSPLQAYEAFFRSFAEGFDDLFGSSMADVTVSLGPNGELQYPSYPPGNQGSRGFDGVGEFQCYDKYMLARLKRHAESSGQPLWGLSGPHDGPRYDDESPESSAFFRELGGSWKSAYGEFFLSWYTGELLAHGDRVLAAASSAFRGKPVELSAKVPLLRGPGTGPSPADATAGFHGGYGPVAEMFARHGCAVIAAGVEARPDATAEERLAQVKAACTEHGVHLAAESAPLAVARGSDGDGPTRVVWLSAGRTRPCQFTYQRMGAEFFSPGHWPLFVQFVRALECPEEAHEDDLPASADGGERLTVPSAAAAAPKDQATREVQTV

SEQ ID NO: 299656 - protein, 919 aa, Zea mays
  Clone ID: MRT4577_36356C.1.pep
MPFGLRNAGATYQRCMNHVFGQHIGRTVEAYIDDIVVKTRKASDLLSDLEVTFRCLKAKGVKLNPEKCVFGVPRGMLLGFIVSERGIEANPEKIAAITSMGPIKDLKGVQRVMGCLAALSRFISRLGERGLPLYRLLRKAECFTWTREAEEALGNLKALLTNAPILVPLAAGEALLIYVVATTQVVSAAIVVERREEGHTLPVQRPVYFISEVLSETKTRYPQVQKLLYAVILTRRKLRHYFESHPVTVVSSFPLGEIIQCREASGRIAKWAVEIMGETISFAPRKAIKSQVLADFVAEWVDTQLPTASIQLELWTMFFDGSLMKTGAGVGLLFISPLRKHLRYVLRLHFPASNNVAEYEALVNGLRIAIELGVRRLDARGDSQLIIDQRLEDKFYGLEINHIARRYNETADELAKIASGRTTVPPDVFSRDLHRPSVKIDDTPEPKAPSAQPEVPSAQSEAPSPRPEAPSARPEAPSVQPEVPSAPEGEALRVEEERNGVTPNRNWQTPYLQYLHRGELPLDRAEARRLARRAKSFVLLGDGKELYHRSLSGILQRCISITEGQELLREIHSGACGHHAAPRALVGNAFRQGFYWPTAVADAIRIVRTCEGCQFYARQTHLPAQALQTIPITWPFAVWGLDLVGPLQKAPGGYTHLLVAINKFSKWIEVRPLNSIRSEQAVVFFTNIIHRFGVPNSIITDNGTQFTGRKFLDFCEDHHIWVDWAAVAHPMTNGQVERANGIILQGLKPRIYNDLNKFGKRWMKEFPSVVWSLRTTPSRATGFTPFFLVYGAEAILPTDLEYGSPRTRAYADQSNQANQEDSLDQLEEARDMALLHSARYQQSLRRYHAQGVRSRDLQVGDLLLRLRQDARGRHKLTPPWEGPFIIAKVLKPGTYKLANSQGEVYSNAWNIQQLRRFYP

SEQ ID NO: 299657 - protein, 63 aa, Zea mays
  Clone ID: MRT4577_36357C.1.pep
PPPFTTSPPTVCVTPTVSQLYIVISPLPHKSFTLCNLPISTDRPISKDHTEERIMCSLIFLPP

SEQ ID NO: 299658 - protein, 1232 aa, Zea mays
  unsure (1)..(1232): unsure at all Xaa locations
  Clone ID: MRT4577_36358C.1.pep
MDSADSIADKAIGRMQEIADKIFSLARETIFPGRGLTSFDATKLRVALEDIDCMLDQDSLVLQENLDIVNNVNNPGDSSYKPSTLSSPPPADDDLTPDWDFVEHFENFWGLEYDSDQMPSFSDNEMDKSGKVIAKWDSRATKIYTGICVEEVNARNRPQQFLNAEGYANLIRKFKERTGRTYTRDQMKNRWDSLKRTFTQWKTLNERATGLGRDPHTGSISAPDEWWAKQNEPPLENEDELKVMFGPIVCTNETTLVPGVEDANSSSDDHVEANLGGGENSTPDPCLNATGKRKVRHDSSNPKKKNDMREEYMKGLVEAFESRSMTTNKSITSCRGEADNGQVQPQAQQEAPPRPTLGLGLRRRSPPRPTLGLGPHLGLGRWSPPRPTPELGLNLDLGRNHVLARPRPRPQEESSPRLTLGSDRPRHGGYIITLPVASSGYGGTRPASHPGSPRRRRRGNRVQAGGSISSTVERVDDAGTPAGNMSGVVLAPETTMSVVSPQHANPKRTDDASTLVEDLLGVSLVPEITVQSVPDATSPPSIDQEVSSVFHPVPFRFSFDPPSDPASVSAFVKAYPNLLGYHMWSSWDRLTAVSTYGPPGSDEEDEPDSGWDFSGLGNPSAMRDFMTACDYCLSDCSDDGHSLDDEGCGPSRECFHIDLRGHDEDNHLGTPEDDDPPRSIAQLLPXLMWEASVHTGRTRDATPAAPGRLGNEHHRRDHRARLDEKVRRGYHPRRGGRYDSEEDRSPSPEPPXLGGTDDDNLIIRNLPLFLSDASRAWLEHLPPAQISNWDDLVKAFAGNFQGTYVRPGNSWDLRSCHQQPGESLREYIRWFSKQRTELPNITDLDVIGAFLAGTTCRNLEDVPEAYAQRGAKKKAKMKSQAKRDVADVDLVAVAEHRNPWKPPGGANLFDKMLKESCPYHQGPVKHTLEECVMLRRYFHKAEPPVEGGKGQDNDKKEGDKAKEFPEVHSCFMIYGGQVANASARHRKQERQEVCSVKVAALVYLDWSDKPITFDQGDRPDCVSSPGKYPLIVDPVIGNIRLTKVLMDGSSSLNIIYAETLGLLEIDLSMIRASAAPFHGIIPRKRVLPLGQLDLPVCFGTPSNFRKETLTFEVVGFRGTYHTVLGRPCYAKFMVVPNYTYLKLKMRGPNGVITVGSTYRHAYECDVECMEYAEALAESEALIADLECLPKEVLDAKRHAGNFEPAEAVKSVPLDPSNDACKQVRIGSELDPK

SEQ ID NO: 299659 - protein, 552 aa, Zea mays
  unsure (1)..(552): unsure at all Xaa locations
  Clone ID: MRT4577_36359C.1.pep
MPFGLRNAGATYQRCMNHVFGEHIGRTVEAYVDDIVVKTRKASDLLFDLEVTFRCLKAKGVKLNPEKCVFGVPRGMLLGFIVSERGIEANPEKIVAITNMGPIKDLKGVQRVTGCLAALSRFISRLGERGLPLYRLLRKAECFTWTPEAEEALGNLKALLTNAPILVPPAAGEDLLIYVAATTQVVSAAIVVERQEEGHALPVQRPVYFISEVLSETKIRYPQIQKLLYAVILTRRKLRHYFESHPVTVVSSFPLGEIIQYREASGRIAKWAVEIMGETISFAPRKAIKSQVLADFVAKWVDTQLPTVPIQPELWTMFFDGSLMKTGAGSGLLFISPLGKHLRYVLRLHSPVSNNVAEYGALVNGLRIAIELGVRRLDARGDSQLVIDQVMKNSHCRDPKMEAYCDEVRRLEDKFYGLELNHIARRYNETADELAKIASGRTTVPPDVFSRDLHQPSVKTDDMPEPEKASAQPEASSARPEAPXSARDTLGSVEATSALEDEALRVEEERSGVTPNRNWQTPYLQYLHRGELPLDRAESRRLAWRVKSFVLL

SEQ ID NO: 299660 - protein, 79 aa, Zea mays
  Clone ID: MRT4577_3635C.1.pep
PPPVLVSGARPPKEKCSPLVPGAGPPLFFPTGPLIFKGFPPWGHIFFVEFKRVVTRIFCKFWPLLFLNVERVCPPQFFF

SEQ ID NO: 299661 - protein, 60 aa, Zea mays
  Clone ID: MRT4577_36360C.1.pep
MIIRTREKQAGGFYRPTCTQTWKALKAKQQIRTHHLCSRQMSLRTKVLTPKSRHYLPALA

SEQ ID NO: 299662 - protein, 76 aa, Zea mays
  unsure (1)..(76): unsure at all Xaa locations
  Clone ID: MRT4577_36361C.1.pep
MSCNCGSSCGCSXSCKCGRRDPDLEETSTVAQATDVLDVAPEMKAAPEFVEDEAVVGEDRHCCSCGGNCXCDHCNC

SEQ ID NO: 299663 - protein, 598 aa, Zea mays
  unsure (1)..(598): unsure at all Xaa locations
  Clone ID: MRT4577_36362C.1.pep
MPEPSTTEGRRIQGELKNLLEDAAVRRAESSASRRQGYPSEHRAATSRFVREASVYTGRTRNTASAAPGRLGNEHHHRDRRAHLDERXVERTMTTSSSATSPCSSPTPLEPGXHLPSGQISNWDDLVQAFVGNFQGTCRQQPGESLRDYIRRFLKQRTELPNITDSDVIGAFLAGTTCRDLVSKLGRKTPTRASELMDIATKFASGQEAVEAIFRKDKQPQGRQPEDVPEASAQHGTKKKNKKKSQARRDATDADLVAAAEYKNPRKPPGGANPFDKMLKEPCPYHQGPVKHTLEECVMLRCHFHKAGPPAEGGRAHNNDKKEDHKAEEFPEVHDCFMIYGGQVANASARHRKQERREVCSVKVAAPVYLDWSDNPITFDQGDHPDRVPSPGKYPLVVDPVIGNVRLTKVLMDRGSNLNIIYAETLGLLQIDLSSIRAGVAPFHGIIPGKRVQPLGQLDLPVCFGTPSNFRRETLTFEVVEFRGTYHAVLGRPCYAKFMDVPNYTYLKLKMPDPNGVITVGPTYRHAYECDVKCMEYVEALAESEALIVDYESLSKEAQDAKRHAGNFEPAETVKTVPLDPSNDASKQIRIGSELDPK

SEQ ID NO: 299664 - protein, 69 aa, Zea mays
  unsure (1)..(69): unsure at all Xaa locations
  Clone ID: MRT4577_36363C.1.pep
MASATFLEVLLAIFLPPVGVFLRYGCGVXHLTAARSYAGSIAGEFWIDLLLTVLGYIPGIIYAVYVLVA

SEQ ID NO: 299665 - protein, 874 aa, Zea mays
  unsure (1)..(874): unsure at all Xaa locations
  Clone ID: MRT4577_36364C.1.pep
MGSLQQPFQPGTVLHFGSLEFMSLDGSYDMVLLPPPRDSDNGGRQPAHRRRNRRRLPRVVEEQHSSSPRPLPRRRRRRRGNQGQAGGGTTSAVERVDGAGAPTGDTSGIDLTSETKTSAVSPQHANPKPMDDTSTLAKDLLGVTLVPETTVQSAPDVTSSPPVDQEXLDPPSDFALVDALVEASPNPLGXRMRSPWDRLTNVSTYGPLGSEEDGEPDFCWDFSGLGNPSAMRDFMTACDYCLSDCSDGSRSLGDEDCGPSHECFHVDLGGPNEGNHLGMPENGDLPRPVPRVDILRELAVVPVPAGGHDPQLEQIRKMQARLDEGAGTLELIRRDIGQEWAGQPPGGEVRHLPQGGTDDDNLIIRNLPLFLSDTARAWLEHLPPGQISNWDNLVQAFAGNFQGTHMRPGNSWDLRSCRQQPGESLRDYIRRFSKQRTELPNITDSDVIGAFLTGTTCRDLVSKLGRKTPTRASELMDIATKFASGQEAVEAIFWKDKQPQSSPPEDVPEASTQRGAKKKGKKKSQAKRDAADADLVAAAEYKNPRKPPGGANLFDKMLKESCPYHQGPVKHTLEECAMLRRHFHKAGTPAEGGRARDDDKNEDHQAGEFPEVHDFFMIYGGQVANASARHRKQERREVCSVKVAAPVYLDWSDKPITFDQADHVPSLGKYPLVVDPVIGDVRLTKVLKDGGSSLNIIYAETLRLLRVDLSSVRAGAAPFHGIIPGKRVQPLGQLDLPVCFGTPSNFRRETLTFEVVGFRGTYHAVLGRPCYAKFMAVPNYTYLKLKMPGPNGDITVGPTYRHAYECDVECVEYAEALTESEALIADLKSLSKEVPDVKRHTGNFEPAETVKSVPLDPSSDASKQIRIGSELDPK

SEQ ID NO: 299666 - protein, 932 aa, Zea mays
  Clone ID: MRT4577_36365C.1.pep
MSLDGGYDMILLPPPRDNGGRQPARRRRNQRRLPHVAEEQHSGLSRHLPRRRRRRRGNEGQVGGGTSSAVERVDDADAPTGDTSGVDLASETKTSVVSPQHANSKRTDNASTLARDLLGVTLVPETTVQSAPDATSSPPVDQEVPTDSHLVPFGFSFDPPSDLASVEAFIEACTNPPGYHMRSPWDRLTAVSTYGPSGSEGDDEPDFCWDFSGLGNPSAMRDFMTACDYCLFDCSDGSRSFGDEDCGPSRECFHVDLGSFGEGNHLGIPENGDPPRPMPHVDILRELVVVPVPAGGQDAQLEQIHEMQARLDEEAGTLKPFRRNIGQEWADQAPAGEARHLPQGIQHRIANDVRARPPPASSGVGQNLAAASILLRAMPEPSTSEGRRIQGELKNLLEDATVRRAESSSSRRQGYPSEHHAVTSRFMREASVHTGRTRNMAPAAPGRLGNEHHHRNRRAHLNEKISNWDDLVQAFAGNFQGTYIRHGNSWDLRSCHQQPGESLRDYIRRFSKQRTELPNVTDSDVIGAFLAGTTCRDLVSKLGRKTPTRASELMDIATKFASGQEAVEAIFRKDKQPQGRQPEDVPEASTQRGTKKKGKKKSQAKRDAADADLVTAAEYKNPRKPPGGANLFDKMLKEPCPYHQGPVKHTLEECVMLRRHFHKAGPPAKGGRAHNNDKKEDHKAVEFPEVHDCFMIYGVPMANASARHRKQERREVCSVKVAAPVYLDWSDKPITFDQGDHPDRVPSPGKYPLVVDPVIGNVRLTKVLMDGGSSLNIIYAETLGLLRIDLSSVRVGVTPFHGIIPEKRVQPLGQLDLPVCFGTPSNFRRETLTFEVVGFRGTYHAVLGRPCYAKFMAVPNYTYLKLKMSGPNGCVEYAEALIADLESLSKEAPDVKRHAGNFEPAETVKSVPLNPSNDACKQIRIGSELDPK

SEQ ID NO: 299667 - protein, 409 aa, Zea mays
  unsure (1)..(409): unsure at all Xaa locations
  Clone ID: MRT4577_36366C.1.pep
KAYRESWDVLRPSAFSSRTSAKGACLCTASGRITFPPEXFSRDLHQPSVKIDDAPKPEAPSAQPEAPSAQSEAPSARSEAPSVRPEVPSAPEGETLHIEGEQCGVTPDQNWQTPYLXISTEESYPSTEPKLDGWRGAPSRSSCWEKGRSSTTAALQASSSDASPPPKKAPGGYTHLLVAIDKFSKWIEVRPLNSIRSEQAVAFFTNIIHRFGVPNSIITDNGTQFTGRKFLDFCEDLHIRVDWAAVAHPMTNGQVERANDMILQGLKPRIYNDLNKFGKRWMKELPSVVWSLRTTPSQATGFTPFFLVYGVEAILPTNLEYGSLRTRAYADQSNQANREDSLDQLEEARDKALLHSARYQQSMRRYHARGVRSRDLQVGDLVLRLRQDARGRHKLMPXWEGPFVIAKVL

SEQ ID NO: 299668 - protein, 93 aa, Zea mays
  unsure (1)..(93): unsure at all Xaa locations
  Clone ID: MRT4577_36367C.1.pep
LASRSSMSASTLPMMTXPIDRVAEQIHEEPWKMAYQTGFRILVAYGGAPITNHLRELERCLEIFVITTYLFYNLITRPRVLIYLFMSLSPDAT

SEQ ID NO: 299669 - protein, 60 aa, Zea mays
  Clone ID: MRT4577_36368C.1.pep
LKLESTAQYTKLTPVGYGQTKEGKPCTTVMAGKAHENRVSPNINKLCISIIVLAMQISYI

SEQ ID NO: 299670 - protein, 910 aa, Zea mays
  Clone ID: MRT4577_36369C.1.pep
MPFGLRNAGATYQRCMNHVFGEHIGRTVEAYVDDIVVKTRKASDLLSDLEVTFRCLKAKGVKLNPEKCVFGVPRGMLLGFIVSERGIEANPEKIAAVTSMGPIKDLKGVQRVMGCLAALSRFISRLGERGLPLYRLLRKTECFTWTPKAEEALGNLKALLTKAPILVPPTAGEALLFYVAATTQVVSAAIVVERQEEGHALPVQRPVYFVSEVLSETKIRYPQVQKLLYAVILTRRKLRHYFESHPVTVVSSFPLGEIIQCREASGRIAKWAVEIMGETISFAPRKAIKSQVLADFVAEWVDTQLPTAPIQPELWTMFFDGSLMKTGAGAGLLFISPLGKHLLYVLRLHFPASNNVAEYEALVNGLRIAIELGVRCLDARGDSQLVIDQVMKNSHCRDPKMEAYCDEVRRLEDKFYGLELNHIARRYNETADELAKIASGRTTVPPDVFSQDLHQPSVKIDDTPEPEAPSVQSEVPSTQPEVPSAQPEAPSARPEAPSVQPEVPSAPEGEALRVEEERSGAVPDRDWQTPYLRYLHQGELPLDRAEARRVARRAKSFVLLGEEKELYHRSPSGILERCISVAEGFYWPTAVADATRIVRTCEGCQFYAKQTHLPAQALQTIPITWPFAVWGLDLVGPLQKAPGGYTHLLVAIDKFSKWIKVRPLNNIRSEQAVAFFTNIIHRFGVPNSIITDNGTQFTGRKFLDFCEDHHIRVDWAAVAHPMSNGQVERANGMILQGLKPRIYNNLNKFGKRWMKELPSVVWSLRTTPSRATGFTPFFLVYGAEAVLPTDLEYGSPRTRAYSDQSNQASREDSLDQLEEARDKALLHSAWYQQSLRRYHARGVRSRDLQVGDLVLQLRQDARGRHKLMPPWEGPFVIAKVLKPGTYKLANSQGEVYGNAWNIQQLRRFYP

SEQ ID NO: 299671 - protein, 94 aa, Zea mays
  Clone ID: MRT4577_3636C.1.pep
NNNRQGPNTDSKPLTAYGGGERPHNPLDFLPEQGLILDTLGDLLTLKKLITDLVHDLFKHLLILNNLRYTDLLHTLTDVPYHERQLGVNEVELP

SEQ ID NO: 299672 - protein, 56 aa, Zea mays
  Clone ID: MRT4577_36370C.1.pep
PLTTRTDSTCNLLGFSDEDRVVSYRWLLSFAGHRKGILSFRVVHRLDPHHRGCSQW

SEQ ID NO: 299673 - protein, 1833 aa, Zea mays
  unsure (1)..(1833): unsure at all Xaa locations
  Clone ID: MRT4577_36371C.1.pep
MAEEQHPGLSRHLPRRRRRRRGNHGQEGGDTSLAVERVNDAGAPAGDTSGVDLVPETKTSVVSPQHPNPKRTDDASTLAKDLLGVSLVPEITVQSAPDATSSPSVDQEVPSVFHPMPFRFGFDPPSDPASVDAFIKAYPNLLGYHMWSTWDRLTVVSTYGPPGSEEDDEPDSGWDFSGLGNPSAMRDFMTACDYCLSDYSDGGHSLDDEDYGPSRECFHVDLGGLDEGNHLAMPEDDDPLRSAPRVDILRELAVVSVPAGGQDAQLEQIREIQAKLDEEAGQLVQLRQNIRQEWVGRALAGEARHLAQDVQHRIADDARARLPPASSGVGQNLATAAILLRAMPEPSTTEGRRIQGEHKNLLEDAAVRRTKSSASRRQVYPPEHRAATSRFIREASVHTGRMRDAMPAAPGRLGNEHHRRDRRAHLDEKVRRGYHPXRGGRYDSEADRSPSPEPPGPQAFSRPIRRAPFSTRFQAPTTITKYSGETRPELWLTDYRLACQLGGTDDDNLIIRNLXPLFLSDAARAWLEHLPPAQISNWDDLRTELPNITDSDVIGAFLAGTTCRDLVSKLGRKTPTRASELMDIATKFASGQEAVEAIFRKDRPPQGRQQENVPEASAQHGTKKKGKKRSQAKHDATDADLVAAAEHRNPRKPPGGANLFDKMLKESCPYHQGPVKHTLEECVMLWRYFHKAGPSAEGGKGHDNDKKEGNKAEEFPEVQDCFMIYGGQVANASARHRKQERREVCSVKVAAPVYLDWSDKPITFDQGDHPDRVPSPGKYPLVVDPIISNVRLTKVLMDGGSNLNIIYAETLGLLQIDLSTIRAGAAPFHRIIPGKRVQPLGQLDLPVCFGTPSNFQKETLTFEVVEFQGTYHAVLGRPCYAKFMAIPNYTYLKLKMPGPNGVITVGSTYRHAHECDVECVEYAEALAESEALIADLESLSKEVPDAKRHAGNFEPAEAVFAWSPSDMPGIPRYVAEHSLDIRAGARPVKKPPRRFDEEKRRAIGEEIHKLMAAGFIKEVFHPEWLANHVLVKKKGGKWRMCVDYTGLNKACPKVPYPLPCIDQIVDSTAGCETLSFLDAYSGYHQIRMKESDQLTTSFITPFGMYCYITMPFGLRNAGATYQRCMNHVFGEHIGRTVEAYVDDIVVKTRKASNLLTDLETTFKCLRAKGVKLNPEKCVFGVPRGMLLGFIISERGIEANSEKIAAITNMRPIKDLKGVQRVMGCLAALSRFISHLGERGLPLYRLLRKTERFTWTPEAEEALGNLKALLTSAPILVPPVAGEALLIYLRHYFESHPVTVVSSFPLGEIMGETISFAPRKAIKSQVLADFVAEWVDTQLPAAPIQPELWTMYFDESLMKTGAGAGLLFISPLGKHLRYVLRLHFPTSNNVAEYEALVNGLHIAIELGFRRLNAHGDSQLVIDQVMKNYHCRDPKMEAYYDEVRRLEDKFYGLELNHIARRYNETADELAKIASRQTTTPYLXISTEASYPSTEPKLDDWCGAPSRSSCWVTKRSSTTAAPQASLSDAYPSPKVRSYCKEYTRGLAVITXHLEPSLETPSDKXYWPTMVADATRIVRACQGCQFYARQTHLPAQALQTIPITWPFAVWGLDLVGPLQKAPGGFTHLLFAIDKFSKWIEVRPLNSIRSEQAVTFFTNIIYRFGVLNSIITDNGTQFTGRKFLDFCEDHHIRVDWAVVAHPMTNGQVERANDMILQGLEPRIYNKLNKFGKRWMKELPSVVWSLRTTPNRATGFTPFFLVYGAKAIFPIDLEYGSLRTRAYDDRSNQTSREDSLDQLEEARDMALLHSTRYQQSLRHYHARGVRSRDLQVGDLVLRL

SEQ ID NO: 299674 - protein, 415 aa, Zea mays
  Clone ID: MRT4577_36372C.1.pep
MRGGGAVRLNPNGRSANKQPPLTSRPCQAAVANLAVRYAALPPYIPEAFAQRGARKKGKKKSQAKRDVADADLVTAAELRNPRKPPGGANLSDKMLKEPCPYHQGPVKHTLEECVMLRRHFHRTGPPAEGGRAHNNDKKEDHKAEEFPEVHDCFMIYGGQVANALARHCKQERREVCSVKVAAPVYLDCSDKPITFDQGDHPNRVPSPGKYPLVVDPVISNIRLTKVLMDGGNILNIIYVETLGLLQIDLSSIWASATPFHGIIPGKRVQPLGKLDLPVCFRTPSNFRKETLTFEVVEFRGTYHAVLGRPCYAKFMAVPNYTYLKLKMSGPNGVICVGSTYRHAYECDVECVEYAEALVESEALIADLESLSKEAPDAKRRADNFEPAKTVKFVPLDPSNDASKQIRIGSELDPK

SEQ ID NO: 299675 - protein, 119 aa, Zea mays
  Clone ID: MRT4577_36373C.1.pep
KNPAGHFSRPGNLPPKNKGGIPPLGARPIFFKNRPVPKWGALGGPGQKNPGKVGGPQRGKTYLIHRGRGPADCQKPHLGGPKIPPLRNYKNPFVGEGRFLGKESLPNHLGGRVLGGHKF

SEQ ID NO: 299676 - protein, 486 aa, Zea mays
  Clone ID: MRT4577_36374C.1.pep
YQFFLYQLIRALKYIHTANVYHRDLKPKNILANSNCKLKICDFGLARVAFNDTPTTIFWTDYVATRWYRAPELCGSFFSKYTPAIDIWSIGCIFAEVLTGKPLFPGKNVVHQLDLMTDLLGTPSMDTTSRVRNEKARRYLSSMRKKETISFSQKFPNADPLALDLLQRLLAFDPKDRPTAEQALAHPYFKGLAKVEREPSCQPITKMEFEFERRRVTKEDIRELIFREILEYHPQLLKDYINGTERTTFLYPSAVDQFRKQFAHLEENSGNGPVIPMERKHTSLPRSTIVHSSPIPVKEQPRIGPCRERPSSDESYRNPRETEQYSGNLPRTSQAPQRVPTARPGRVVGPVMPYQNGDTKDPYDTRRLAMSSGYPPQQIPQTFGYYQTHGKPACCEPSQAERYTLHQQAAYACANRTAASDVALDMRAPPFQHLSAGQRSDSCDRLTAETNLYTRSTNGIAATAAGVAATTHRKVGVVPFGMSNMY

SEQ ID NO: 299677 - protein, 50 aa, Zea mays
  Clone ID: MRT4577_36375C.1.pep
GLVLVWPKTYSHDRVRGASSGGNLFILCYDVIRMHCLYEELLALMFIHHM

SEQ ID NO: 299678 - protein, 254 aa, Zea mays
  Clone ID: MRT4577_36376C.1.pep
MAEQHKEESGVTVLDKISDKLHGRGGGSSSSSDSDDERSSATAAVKAKIYRIFGREKPVHSVLGGGKPADLFLWRNKRISGGVLAGATAFWLLFEVMDYHLLTLLCHCLILTLAILFLWSNATTFINKSPPNIPEVKIPDDLAVNVARSLRYEINRGFATLREIGQGHDLKKFLIVIAGLWILSVLGSCCNFLTLSYIVFMVLYTVPVLYEKHEDKVDAFGEKAMVELKRYYAIFDEKCLSKIPKGPLKDKKQH

SEQ ID NO: 299679 - protein, 91 aa, Zea mays
  Clone ID: MRT4577_36377C.1.pep
TSLHQATKFAQFRCRTAFQSVIVFHCCCLLLPNMFEEFSYHVPRLPDLVFQLVIIKCSVGDHIFHAYHVQPVIMCFSCQSSVTCLNSLVAE

SEQ ID NO: 299680 - protein, 52 aa, Zea mays
  Clone ID: MRT4577_36378C.1.pep
AIGNVMQHYKVTTDGLCLFTPSSVKGNEKGPFLTKKVKILAGIFLHNSPGNT

SEQ ID NO: 299681 - protein, 43 aa, Zea mays
  Clone ID: MRT4577_36379C.1.pep
CAFSRSSSAIIGSESSCCDSSVVARYASLSLPTEYQFQYSVNT

SEQ ID NO: 299682 - protein, 59 aa, Zea mays
  Clone ID: MRT4577_3637C.1.pep
GRIPELLNLDDDSSGHASSPHADNGTVDLRMEQWRRGRSGGGQPESERRNRTRAYTQAP

SEQ ID NO: 299683 - protein, 89 aa, Zea mays
  Clone ID: MRT4577_36380C.1.pep
HPMSFVICFARSPRIIPPDLVFHASGTGNHVKAFKVYVPSKSRRGLRSQFQSGNGVITVACKEGYPLIRLQLGKHVFLSAGGFPPASRS

SEQ ID NO: 299684 - protein, 61 aa, Zea mays
  Clone ID: MRT4577_36381C.1.pep
GFSRALLALDDGINGALPIWSMPYGYWLVPFMSILSHHIVHSRYQGYIQRSSYSTPDCLLC

SEQ ID NO: 299685 - protein, 50 aa, Zea mays
  unsure (1)..(50): unsure at all Xaa locations
  Clone ID: MRT4577_36382C.1.pep
GRFFFFFFGEHMLSIRKAFPTFQSTFKESKAIMTSHNQVYEGXIRIMKGR

SEQ ID NO: 299686 - protein, 53 aa, Zea mays
  Clone ID: MRT4577_36383C.1.pep
GRGVGWTPPYRATRAVFPSTLKHGMWRWTRTPARSFSTTSFGPSPAPTTATPR

SEQ ID NO: 299687 - protein, 265 aa, Zea mays
  unsure (1)..(265): unsure at all Xaa locations
  Clone ID: MRT4577_36384C.1.pep
VITSKYSVYNFAHMLKCSMPDTLNLSIVRVLLALTALPKPLSXVVSVMKEQDSGQTVIELMGSLTESLVIAAMRLLIALSPQMGHTIAEKLCKAPGQPGRLVKSIGLHGRIMERHAMSATLLAKLPYQHIALNLALINQGAMVTVLAKIEEMQRGETRASRHAKAYMEGLVGVLVRLTTTLYDPDVLLAAMDHNLTSVLTDLVRSAGSDEVQRLAAIGLENLSSQSPNLSQPPTEERRPKKKNILRRLREAHAGRVHDNRRPPAH

SEQ ID NO: 299688 - protein, 139 aa, Zea mays
  unsure (1)..(139): unsure at all Xaa locations
  Clone ID: MRT4577_36385C.1.pep
MKFNIANPSTGCQKKLEIDDDHKLRAFYDRRISQEVCGDALTDDVKAYVFKILXGCDKHGFPMNQGCLTSARVRLLIHTGTPXFRGYGSSNVEQPEQXLAGCIASQDLSVXINLMIVKNAENDLSALTDSENIRMRGPN

SEQ ID NO: 299689 - protein, 94 aa, Zea mays
  Clone ID: MRT4577_36386C.1.pep
RKLGIRLEERSNQFVRTHGAGTPQGGFLAASGDCIPAPLGHDFKVARSLELILPHKKAGLQEEAHIQDGGGPIHHEGDHCLHGLLRSDNVLPTM

SEQ ID NO: 299690 - protein, 89 aa, Zea mays
  Clone ID: MRT4577_36387C.1.pep
NSACRLNKGGGPLPKKFNPPPQVFFGNREGKKKRPLPIYFFLPPKGVFWNWGGKKKEIGAKNQTGKHLVPHQTRAVKNPGKKLGPWFFF

SEQ ID NO: 299691 - protein, 44 aa, Zea mays
  Clone ID: MRT4577_36388C.1.pep
MGNASQPYNVTVKNIETMDNQVLDNECMRGYLKFTQRMSRVLNS

SEQ ID NO: 299692 - protein, 960 aa, Zea mays
  unsure (1)..(960): unsure at all Xaa locations
  Clone ID: MRT4577_36389C.1.pep
MGSLQQPLRPGTVLRFGSLEFMSFDGSYDMILLPPPRDNDHGGRQPARRRRNRRHLPRVAEEQHSSSLRPLPRQRRRRRGNQGQAGGRASSAVERIDVPDAPTGGTPGVDLAFETKASAVPPRHADPEQEDDASALAESLQDVALVPGTTVQPVPDVTTSLLVDQKVLTNSHLTSFRLGLNPPSDLSLAGALIEASATPLGFRMRSPWDRLTDVSTYGPSGSEEDDDPSICWDFSGLGNPSAMRNFMTACDYCLSDCSDGSRSLDDEDCGPSRECFHIELGDPSEGNHLGMPEDGDLPRPVPRADIPRELAVVPVPAGGHDPQLEQVREAQARLNEGTGVLEPIRRDVGQAGIXSEPQAATSRFMREASXHRAHAQXRLRPRATSATSTIDATVGPTSTKGXPRLPPQAWGALRQRGGSESLARTTRSADYXAWPANWVERTMTTSSSETSPCSSPTLLAPGXHLPPGQISSWDDLVQAFAGNFQGTYVRPGNSWDLRSCRQQPGESLRDYIRRFSKQRTELPNITDSDVIGAFLAGTTCRDLMSKLGRKTPTRVSELMDIATKFASGQEAVEAIFRKDKQPQGRPSEEAPEASTPRGAKKKGKKKSQSKRDAADADLVAAAEYKNPRKPPGGANLFDKMLKEPCPYHQGPVKHTLEECVMLRRHFHRARPPAEGGRAHDDDKKEDHQAGEYPEVRDCFMIYGGHAANASARHRKQERREVCSAKVAAPVYLNWSDKPITFDRADHPDHVPSPGKYPLVVDPVVGNVRLTKVLMDGGSCLNIIYAETLKLLRVDLSSVRAGAAPFLGIIPGKRVQPLGRLDLPVCFGTPSNFRRETLTFEVVGFRGTYHAVLGRPCYAKFMAVPNYTYLKLKMPGPNAVITVGPTYKHAFECDVECVEYAEALAESEALIADLENLSKEVPDVKRHAGNFEPAETVKAIPLDPSGDTSKQIWIGSGLDPK

SEQ ID NO: 299693 - protein, 238 aa, Zea mays
  Clone ID: MRT4577_3638C.1.pep
LEYGLSVLLLPYSVHSDSEVSFVEKREALQQLVDASLDNNSSIWAKYFNQILKVVLEVLDDSDSSMRELALSLITEMLNNQKDAIEDSMEIVFEKLLHVTKDAVAKISNEANQCLNVLLAKYNPFTCLAITVPLLVSDDEKMLVVCINCLTKLVGRLSQEELIDKLPTFLPALFDAFNNQSPDVRKTVVFCLVDIYIMLGKAFAPYLEGLSSTQLRLVTIYANRISQARSGKPIDSNQ

SEQ ID NO: 299694 - protein, 776 aa, Zea mays
  Clone ID: MRT4577_36390C.1.pep
MGPIKDLKGVQRVMGCLVALSRFISRFGKRGLPLYRLLRKTECFTWTSEAEETLGNLKALLTNAPVLVPPAAGEALLIYVAATTQVVSAAIVVERRAEGHALPVQRPVYFISEVLSETKIRYPQIQKLLYAVILTRRKLRHYFESHPVTVVSSFPLGEIIQCREASGRIAKWAVEIMGETISFAPRKAIKSQVLADFVAEWVDTQLPTAPIQPELWTMFFDGSLMKTGVDAGLLFISPLGKHLRYVLRLHFPTSNNVAEYEALVNGLRIAIELGVRRLDARGDSQLVIDQVMKNSHCRDPKMEAYCDEVRRLEDKFYGLELNHIARRYNETADELAKIASRRTTVPPDVFSRDLHQPSVKTDDTPEPEKASALPEAPSAQPEAPSARPEAPSVRPEASSAPEGEALRVEEERNGVSPNRDWQTPYLHYLHRGELPLDQAEARRLARRAKSFVLLGDGKELYHRSSSGILQRCISITEGQELLQEIHSGACGHHAAPRALVGNASRQGFYWPTAKAPGGYTHLLVAIIKFSKWIEVRPLNSIRSEQAVAFFTNIIHRFGVPNSIITDNGTQFTTRKFLDICEDHHIRVDWAAVAHHMTNGQVERANDMILQGLKPSIYNDLHKFGRRWMKELPSVVWSLRTTPSRATGFTPFFLVYGAEAILPTDLEYGSPRTRAYDDRSNQTDREDSLDQLEEARDMALLHSARYQQSLRRYHARGVRSRDLQVGDLVLRLRQDARGRHKLTPPQEGPFIIAKVLKPGTYKLANSQGEVYSNARNI

SEQ ID NO: 299695 - protein, 437 aa, Zea mays
  unsure (1)..(437): unsure at all Xaa locations
  Clone ID: MRT4577_36391C.1.pep
MYFDGSLMKTGAGAGLLFISPLGEHVRYVLRLHFPASNNVAEYEALVNGLRIAVELGVRRLDARGDSQLVIDQVMKNSHCHDRKMEAYCDEVRHLEDKFYGLELNHVARRYNETADKXKIASGRTTVPSNVFSKDIYQPSVQIDDTSEPEEASAQPXVADATRVVRSCWGCQFYARQTHLPAQALQTIPITWPFAVWGLDLVGPLQKAPGGFTHLLVAIDKFSKWIEVRPLTSIRSEQAVAFFTNIIHRFGVPNSIITDNGTQFTGKKFLDSCEDHHIRVDWAVVAHPMTNGQVERANGMILQGLKLRIYNDLNKFGKRWMKELHSVVWSLRTTLSRATGFTPFFLVYGAEAILPTNLEYGSPRTKAYDDRGNRTSREDSLDQLEEARDVALLHSARYQQSLRRYHARRVRPQGFQVGDLVLRLRQDARGRHKLAPP

SEQ ID NO: 299696 - protein, 70 aa, Zea mays
  Clone ID: MRT4577_36392C.1.pep
KIFFLRVSWLLRSVPFFLHSSESVPSYFPRHKPRISMRLPKKPHTQKRPNNLHPQTPKTPVCFCLFLWCK

SEQ ID NO: 299697 - protein, 567 aa, Zea mays
  unsure (1)..(567): unsure at all Xaa locations
  Clone ID: MRT4577_36393C.1.pep
MGCLAALSRFISRLGERGLPLYRLLRKAECFTWTPEAEEALGNLKALLTNAPILVPPAAGEALLIYIAATTQVVSAAVVVERREEGHALPIQRPVYFISEVLSETKTCYPQIQKLLYTMILTRRKLRHYFESHPVTVVSSFPLGEIIQCREASGRIARWVVEIMGETISFTPRKAIKSQVLVDFVAEWVDTQLPAAPIQPELWTMFSDGSLMKTGAGAGLLFISPLGKHLRYVLRLHFPASNNVAEYEALVNGLRIAIELGVRRLDARGDSQLVIDQVMKNSHCRDPKMEAYCDEVPRLEDKFYGLELNHVARRYNETADELVKIASGRTTVPPDVFSRDLHQPSVKTDDTPEPEKASAQPEAPSAPEGEALRVEEERSGVTPNRNWQTPYLQYLHRGELPLDRVEARRLXRRAKSFVLLGDGKELYHRNPSGILQRCISITEGQELLQEIHSGACGHHTAPRALVGNAFRQGXVAFFTNIIXSLRGPELHHHRQRHPVHRQKAPGXFCEDHHIRVDWAAVAHPMTNGQVERANGMILQGLKPRICNGLNKFGKRWMKELPSVVWSL

SEQ ID NO: 299698 - protein, 976 aa, Zea mays
  Clone ID: MRT4577_36394C.1.pep
MGSLQQPLRPGTVLRFGSLEFMSFDGSYDMILLPPPRDNDNGGRQPARRRRNRRRLPRVVEEQHSSSPRPLPRQRRRRRGKQGQAGGRASSAVERVDVPSAPTGSASGVDLAFETKASAVSPRHANPEQVDDASALAESLQDVALVPETAVQSVPDVTMSLLVDRKVPTDSHPTSFGLSFNPPSDLALAGALVEASSNPLGFRIRSPWDRLTDVSTYGPSGPEEDDDPNICWDFSGFGNPSAMRDFMTACDYCLSDCSDGSRSLDDEDCGPSRECFHVDLGDPSEGNHLGMPEDAAMLLRAMPEPSTTEGRRIQGELKNLLEGAVVRRAESSASRRQGYPSEPHAATSRFMREASVYTGRTRNTAPAAPGHLGNEHHHRDRRAHLDERVRRGYHPRRGGRYDSGEDRSPSPEPPGPQAFSRAIRRAPFPTRFRPPATITKYSGETIPELWLADYRLACQLGGTDDDNLIIRNLPLFLSDTARAWLEHLPPGQISNWDDLVQAFAGNFQGTYVRPGNSWDLRSCRQQPGESLRDYIRRFSKQRTELPNITDSDVIGAFLAGTTCRDLVSKLGRKTPTRASELMDIATKFASGQEAVEAIFWKDKQPQGRPSKDAPEASTPRGAKKKGKKKSQAKRDAAAEYKNPRKPPGGANLFDKMLKEPCPYHQGPVKHTLEECVMLRRHFHRAGPPAEGGRARDDDKKEDHQAGEFPEVRYCFMIYGGHAANASARHRKQERREVCSVKVAAPVYLDWSDKPITFDQADHPDHVPSLGRYPLVVDPVVGDVRLTKVLMDGDSCLNIIYAETLRLLRVDLSSVRAGAAPFHGIIPGKRVQPLGRLDLPVCFGTPSNFRRETLTFEVVGFRGTYHAVLGRPCYAKFMAVPNYTYLKLKMSGPNGVITVGPTYKHAFECDVECVEYAEALTESEALIADLESLSNEVADVKRHAGNFEPVETVKAVPLDPSGDTSKQIRIGSGLDPK

SEQ ID NO: 299699 - protein, 215 aa, Zea mays
  unsure (1)..(215): unsure at all Xaa locations
  Clone ID: MRT4577_36395C.1.pep
KESCPYHQGPVKHTLTECVMFLPYFHKAGPPSKSGRAPDNDKREARKAEEFPQVHHCFMIYGGRVXNASARHRKQERWXVCSVKVXAPVYLDWSGKPITFDRDDHPDRVPSPGKYPLVVDLVIGNVRLTKVLMDEGSSLNIIYADTLGLLRIDLSSIRAGAAPFHGIIPGKRVHPLGQLDLPVCFGTPSNFPKETLTFEVVGFRGTYHVVRGDHP

SEQ ID NO: 299700 - protein, 220 aa, Zea mays
  unsure (1)..(220): unsure at all Xaa locations
  Clone ID: MRT4577_36396C.1.pep
MTTRPDGSAATPADKQLVAASNGNGNPLAVRKAPSKDRHSKVDGRGRRIRMPIICAARVFQLTRELGHKSDGQTIEWLLRQAEPSIIAATGTGTTPASFSTSSPSSLRSSSSSTAGVHPHAAPAQGFWALPARADFGQLWSFAAAPEMMVAAAAAAAPGMAGEASAARVGNYLPVAQGNLNLLASFSGGXSHSGRRTGRGGDRPLRVVNSQSLCVWLNPG

SEQ ID NO: 299701 - protein, 324 aa, Zea mays
  Clone ID: MRT4577_36397C.1.pep
MGSLRPGTVLRFGSLEFMSFDGSYDMILLPPPRDNDNGGRQPARRRRNRRHLPRVVEEQHSSSPRPLPRQRRRRRGIQGQAGGRASSAVERIDIPSAPTGGASGVDLAFETKAGAVPPRRANPEQVDDASALAESLQDVALVPETTVQPIPDVTMSLLVDQKVPTDSHPTSFRLSLNPPSDLALAGALVEASATPLGFRTRSPWDRLTDVSTYGPSGSEEDDDPSICWDFSGFGNPSAMRDFMTACGYCLSDCSDGSRSLGDEDCGPSRECFHVELGDPSKGNHLGMPEDSDLPRPVPRADIPRELAVVPVPAGVRAPRGGVNR

SEQ ID NO: 299702 - protein, 466 aa, Zea mays
  unsure (1)..(466): unsure at all Xaa locations
  Clone ID: MRT4577_36398C.1.pep
MYFDGSLMKIGAGVGLLFISPLGKHLRYVLRLHFPASNNVAEYEALVNGLCIAIELGVRCLDARVDSQLVIDQVMKNSHCRDRKMEAYCDKVWRLEDKFYGLELNHIARRYNETADELAKIASGRTMVPPDDFSRDIHQPFVKTNDTPEPEXLVAEVSTLGSVXAPSAQPEAPSARPEVPLAPEGEALRVEEERSGVTPNRNWQTSYLQYLHRGELPLDRAEARWLARRAKSFVLLGDGKELYHRSPLGILQRCISIAEGQELLQEIHSGACGHHAAPRALVGNAFRQGFYWPTAVADATRIVRTCQGCQFYARQTHLPAQALQTIPITWSFAVWGLDLVGPLQKAPGGYTHLLVAIDKFSKWIEVRPLNSIRSEQTVVFFTNIIHRFGVPNSIITDNSTQFTGKKFLDFCEDHCIRVDWAAMAHPMTNGQVERANGMILQGLKPRIYNDLNKFGRRWMKELPSVV

SEQ ID NO: 299703 - protein, 800 aa, Zea mays
  unsure (1)..(800): unsure at all Xaa locations
  Clone ID: MRT4577_36399C.1.pep
AQAGGGASLAVERVDDAGAPSGDTSGVDLASETKTSVVSPQHANPXRTDDASTLAKDLLGVSLVPEITVQSVPDATSSPSVDQEVLSVFHPVPFRFSFDPPSDPASVDAFIKAYPNLSGYHMWSTWDRLMAVSTYGPPGSEEDDEPDSGWDFSGLGNPSAMRDFMTACDYCLSNYSDGGHSLDDEDCGPSRECFHVDLGGLDEGNHLGMPEDGDPPRPAPRVDILRDLVVVPVPAGGQDTQLEQIREMQARLDEEAGQLVQLRQNIGQESELWLADYRLAYQLGGTDDDNLIIRNLPLFLSDAARAWLEHLPPAQISNWDDLVKAFAGNFQGTYVRPGNSWDLRSCRQRPGESMWDYIRRFSKQRTELPNITDSNVIGAFLAGTTCRDLVSKLSRKTPTRATELMDIATKFASGQEVVEAIFRKDKQPQGRQQEDVPEAFAQRSAKKKGKKKSQAKRDAANVDLVAAAEHRNPRKPPGGANLFDKMLKESCPYHQGPVKHTLEECIMLRCYFHKAGPPAEGGKGHDNDKKEGHKTEEFPEVHDCFMIYGGQVANASARHHKQERREVCSVKVVAPVYLDWSDKPITFDQGDHPDRVPSPGKYPLVVDPVIDNVRLTKVLMDGGSSLNIIYAETLGLLQIDLSTIRAGAAPFHGIIPGKHVQPLGQLDLPVCFGTPSNFRKETLTFEVVGFRGTYHAVLGRPCYAKFMVVPNYTYLKLKMSGPNGVITVGSTYRHAYECDMECVEYAEALIADLEGLSKEVPDAKRHAGNFEPAEAVKSVPLDPSNDASKQVRIGSELDPK

SEQ ID NO: 299704 - protein, 127 aa, Zea mays
  unsure (1)..(127): unsure at all Xaa locations
  Clone ID: MRT4577_3639C.1.pep
DAWVVPLLVSDDEKILVVCINCLTKXCNVNGNSNDSHSNNXLVGRLSQEELIDKLPTFLPALFDAFNNQSPDVRKTVVFCLVDMYIMLGKAFAPYLEGLSSTQLRLVTIYANRISQARSGKPIDSNQ

SEQ ID NO: 299705 - protein, 33 aa, Zea mays
  Clone ID: MRT4577_363C.1.pep
AYSSPGGAIKETDTSSHNLAVERPAQQRIQSPS

SEQ ID NO: 299706 - protein, 57 aa, Zea mays
  unsure (1)..(57): unsure at all Xaa locations
  Clone ID: MRT4577_36400C.1.pep
TSRGLLLSLIFTFLSFLCCIYSKGPPLSNLHLPQSSLQHLNLXPLSSRLQCLQHLHR

SEQ ID NO: 299707 - protein, 145 aa, Zea mays
  Clone ID: MRT4577_36401C.1.pep
EGMFGKELVARNISVTGAQSRGGRAAAAAGGYGGARQSSSRRCRGAFMGPRACRVPSSAVVVSSPRLVVWLRYGGGNRGAVCVTWRGGCRNSSAGPGDSSYPVRSRGVCPGPGCFSSFVWCGGGAPLWLALKIKMCQKTKIKGGR

SEQ ID NO: 299708 - protein, 479 aa, Zea mays
  unsure (1)..(479): unsure at all Xaa locations
  Clone ID: MRT4577_36402C.1.pep
MSFAPRKAIKSQVLADFVVEWVDTQLPTAPIQPELWTMFFDGSLMKTGAGTGLLFVSPLGKHLRYVLRLYFPASNNVAEYEALVNGLHIAIELGVRRLDAHGDSQLVIDQVMKNSHCRDPKMEAYCDEVRHLEDKFYGLKLNHIARRYNNTADELAKIASGRTTVPPSVFSRDLHRPSVKIDDTPEPEAPSAQSEAPSAQSEAPSAQPEAPSARPKAPSARPEVPSAPEGEALRVEEERSEVTPDRNWQTSYLQYLHRGELPLDQAEARRLARRAKSFVLLGDGKELYHRSPSGILQRCISIAXRIVRTCEGCQFYGRQTHLPAQALQXTIPITWPFVVWGLDLVGPLQKAPRGYTHLLVAIDKFSKWIEVQPLNSIRSEQAVAFFTNIIHRFGVPNSIITGNGTQFTDGKFMDFCEDHHIRVDWAAVAHPMTNGQVERANGMILQGLKPRIYNDLNKFGKRWMKELPSVVWSLRTTPS

SEQ ID NO: 299709 - protein, 35 aa, Zea mays
  Clone ID: MRT4577_36403C.1.pep
CRVCNACECVIASPRARFVRCRCCSIGEIIYHAWT

SEQ ID NO: 299710 - protein, 295 aa, Zea mays
  unsure (1)..(295): unsure at all Xaa locations
  Clone ID: MRT4577_36404C.1.pep
MLPGPHRPSRRANPHCASGGAASRPPCSLPPLWFGPGGVFKVALFADLHYGEDAWTDWGSAQDAASDRVMAAVLDVENPDLVVYLGDLVTANNLPVPNASLYWDRAVSXPSXGRGVLWATVFGNHDDMAFEWPPECFSPNGVPPLRWPPGPGSGCGFRGTPQMDLMATEIGANRLLSYSSSGPWELWPDVSNYVLQVLSRGRRARGDGHDHDPALLMYFLDSDGGSYTEVVSSAQVRWFHTQSQFLNPDGRILELIFWHIPSTAYAKVAPKANSEIRKPCVSSINGFHFVLLSRI

SEQ ID NO: 299711 - protein, 83 aa, Zea mays
  Clone ID: MRT4577_36405C.1.pep
PPDFFFFFFFFFFFFFFFFFFFFLIPKEVLAKKIGGAHYCFLITQARAFERDNTRGPANTFVFFQKNNDFPLIENWSACLFSP

SEQ ID NO: 299712 - protein, 65 aa, Zea mays
  Clone ID: MRT4577_36406C.1.pep
TQSWLEGRIRSPLMRAFYMASSHHGSTTAPKNLPVNYSLPVNDTARYRLHFYYLQGQDKYYHVHT

SEQ ID NO: 299713 - protein, 94 aa, Zea mays
  Clone ID: MRT4577_36407C.1.pep
MAPAAKKQKKKWSKGKVKDKAQHAVVLDKTTSEKLYKDVQSYRLVTIATLVDRMKINGSLARQCLADLEEKGIIKPVVTHSKMKIYTRAVGGTD

SEQ ID NO: 299714 - protein, 127 aa, Zea mays
  Clone ID: MRT4577_36408C.1.pep
LGLFKGQGAWYIPKHCRKMLHLRIRQRLKLQGKNQHWGHHFPTHALTKINGTPFADCVTPTQAVRITIFRQHKNPSLYIHNGGRTEFFFGGPWAGPFPKQAYHYLHQNFVRTQIITLLLTVSNINLH

SEQ ID NO: 299715 - protein, 99 aa, Zea mays
  unsure (1)..(99): unsure at all Xaa locations
  Clone ID: MRT4577_36409C.1.pep
GPLPASWRGGRPHLTGRAGRRRPRAFTPRSSYXLLDLSWNRLTGGVPRSLASGGGVGHLDLSHNRLCGTMPGGPAFDRLGAXSFVCNRCLCGGPLGKCT

SEQ ID NO: 299716 - protein, 64 aa, Zea mays
  Clone ID: MRT4577_3640C.1.pep
KPLYKNKCGWTRGYFLSLKQPPLAVDVAIAIVGSYCTLALGSVGKTLPPKKCVMNAIHMVGFAW

SEQ ID NO: 299717 - protein, 219 aa, Zea mays
  Clone ID: MRT4577_36410C.1.pep
IISLPFPNRLGAVILTRLSGLNPSLSTMCASISPKSNNQYSARTSVPIFPTRDEHRSTHFAEQGAAGAHGQRTRGNDDSGERTRGAARCPWTRPSAERAVCPGRCKGGEELDAGCGDEGSTAYDKVNDAQWISRSLQGFMTGPTTGRRTLVVARLGQCRQRAETPGACGQASWEREEDDLGAWPREIGKRELDAQNRTSSKQKHCARPEEEEHTENISC

SEQ ID NO: 299718 - protein, 192 aa, Zea mays
  unsure (1)..(192): unsure at all Xaa locations
  Clone ID: MRT4577_36411C.1.pep
SRTAGPILLHPSERSPPGSCPPRPSLSCCSHADLHSLLYRLPCPPSLCRARCFTAKLVNAIGLQMGRXSAPNVRIVGHPDRSISDDRVTDMHKRXLMNLLLLEGISLPTVXGMDGPYRAFXFDPADSYNAARVTYANDNVHNDITEEVRLNTNEPNDRTIAQGIKADPTYLVEEQDKTLATYVINDESTHLS

SEQ ID NO: 299719 - protein, 240 aa, Zea mays
  Clone ID: MRT4577_36412C.1.pep
LAMDLNSLNPLQSTWIEMKPNKPSSCALGFAQNLNRLDASSQLLLKRLQARTAPSSAGAHLPRHSVCPAPLPWPPPPAASSSAAQFPGARVPAPFHTARLQTEEQSAPGACSRPAAQVWPWWSARWLSGHVETCGGEQGVLPLISCSAPSLLLFLSLGFVSGLCSNFVCASSPWSSSTSHGARPQARSCARAQPKIPVCAPWCPYVAACACSPAISSSLKARAKLSYWPRAAPFFSCSRA

SEQ ID NO: 299720 - protein, 164 aa, Zea mays
  unsure (1)..(164): unsure at all Xaa locations
  Clone ID: MRT4577_36413C.1.pep
MLQLVELQKKIDKAAEEMRHIXRXEQGHKTQQRDLRQEGPNHDDXCATELQAVPWPPSHKPSQLPMYDGHSDLKQFLMSYEATISSYGGNTTVIEKSFVMAAYVRRFLRLRSQAPTVPNEIVIEAMIKGLRPGPIAQYFARKPPXTLEKLLQTMDEYIRADNDF

SEQ ID NO: 299721 - protein, 123 aa, Zea mays
  Clone ID: MRT4577_36414C.1.pep
SAMSVPTPLALADALVAQIISSGLLKEVVRNAVSQPSVARALTANWTHSGPTDPRLGLAVDSALKSALKCTSSDFAGPLRAAYDNLAAKIANNFTVVGQGLTPSPTCHRCNRILSGTTSCLST

SEQ ID NO: 299722 - protein, 39 aa, Zea mays
  Clone ID: MRT4577_36415C.1.pep
DSGEHTISEFTTHDLKDKKEAVEQAENGRDPHAHDIADD

SEQ ID NO: 299723 - protein, 346 aa, Zea mays
  unsure (1)..(346): unsure at all Xaa locations
  Clone ID: MRT4577_36416C.1.pep
THSLPVTPVGTTDKAASPPNQLDTLPTTTNEGVEAKIRRSLSVPGNRKNRSLRRADSLGVIRVIPTTPRPVPVEATTSSDVIEETIDVPEDGGEDIPEEEAVCRICFVELNEGGETLKMECSCKGELALAHQDCAVKWFSIKGNKICDVCKQEVQNLPVMLLRIXSNCKQAGSKXLSREQLNNTGXRFWQDIPILVMVSMLAYFCFLEQLLVTDLQSRALAISLPFSCVLGLLSSMIASTMVSKSYLWAYASFQFAIVILFAHIFYNVLKVNPVLAVLLSSFTGFGIAISTNSLLVEYLRWRARRNQRLAQQAANAAQHQESGNDGGNDNDDAQQGHDPNSGNNAV

SEQ ID NO: 299724 - protein, 507 aa, Zea mays
  unsure (1)..(507): unsure at all Xaa locations
  Clone ID: MRT4577_36417C.1.pep
MESAEGPSPYSGDRAAPVQDGNGQTTPGHNSRRPNLSLQIPARTLDTNIPSSTRVTISCSPSSTRVGLPPRPNSTRTKSSIKNMNPQHSFRARSSAQEGDRVVLLNPGTSSEGQQDNPSTARSFSFRKVINSLSAKRTHSLPVTPVGTTDKAASPPNQLDTLPTTTNEGVEAKIRRSLSVPGNRKNRSLRRADSLGVIRVIPTTPRPVPVEATTSSDVIEETIDVPEDGGEDIPEEEAVCRICFVELNEGGETLKMECSCKGELALAHQDCAVKWFSIKGNKICDVCKQEVQNLPVMLLRIPTXLQTGGXNAAQQRAAQQYRFWQDIPILVMVSMLAYFCFLEQLLVTDLQSRALAISLPFSCVLGLLSSMIASTMVSKSYLWAYASFQFAIVILFAHIFYNVVRNSTWVTSIADKCLCGTDCCLVITFXKVNPRLEVLLSSFTGFGIAISTNSLLVEYLRWRARRNQRLAQQAANAAQHQESGNDGGNDNDDAQQGHDPNSGNNAV

SEQ ID NO: 299725 - protein, 142 aa, Zea mays
  Clone ID: MRT4577_36418C.1.pep
MGRVRTKTVKKTSRQVIEKYYSRMTLDFHTNKKVLEEVSILPSKRLRNKVAGFTTHLMRRIQRGPVRGISLKLQEEERERRMDFVPEKSALEVEEIRVDKETMEMLAALGMADLPGVERQAEVSSVPAYGRPQYGGPRRDRV

SEQ ID NO: 299726 - protein, 92 aa, Zea mays
  Clone ID: MRT4577_36419C.1.pep
LHICMALHRLLKRKGGFYELNDYFPLASPATKIRRLDAELPSILEEDEPFPNEERALVLYKPFVHSPSSFFLTLDSDLMKGIRNNQYLWSKQ

SEQ ID NO: 299727 - protein, 536 aa, Zea mays
  Clone ID: MRT4577_3641C.1.pep
MEAGTWAAAAVAAVALYVAWFWRMSRGLSGPRVWPLLGSLPGLVQHAEDMHEWIAANLRRAGGTYQTCIFALPGVARRGGLVTVTCDPRNLEHVLKARFDNYPKGPFWHAVFRDLLGDGIFNSDGDTWVAQRKTAALEFTTRTLRTAMSRWVSRSIHARLLPILADARVVDLQDLLLRLTFDNICGLAFGKDPETLARGLPDNAFASAFDRATEATLNRFIFPECVWRCKKWLGLGMETTLARSVRHVDRYLSAVIKARKLELSAATRKDLLSATPHDDLLSRFMRKGTYSDESLQHVALNFILAGRDTSSVALSWFFWLVSTHPAVERNIVRELCAVLAGSRGVEDPALWLAAPLDFEELDRLVYLKAALSETLRLYPSVPEDSKHVVADDVLPDGTFVPAGSSVTYSIYSAGRMKTVWGEDCLQFRPERWLSDDGTRFQPHDSYRFVAFNAGPRICLGKDLAYLQMKNIAGSVLLRHRLTVAPGHRVEQKMSLTLFMKHGLRMEVRPRDLSVVIDELRGAGEYDAAARATAASA

SEQ ID NO: 299728 - protein, 73 aa, Zea mays
  Clone ID: MRT4577_36420C.1.pep
DVITVSKKEQSVDSCIRRWCNTSLVKAAGSLSPGHGFKPWLYTKNSHCYSSSALRLQLGCAPPSGIGGPLQSE

SEQ ID NO: 299729 - protein, 205 aa, Zea mays
  Clone ID: MRT4577_36421C.1.pep
MLSRGAGFDSLAHHCEKKKKKKKKKKKKPCPCSSRRRRRRRRRHHHYPSAQPPEKRREPAPATMGRVRTKTVKKTSRQVIEKYYSRMTLDFHTNKKVLEEVSILPSKRLRNKVAGFTTHLMRRIQRGPVRGISLKLQEEERERRMDFVPEKSALEVEEIRVDKETMEMLAALGMADLPGVERQAEVSSVPAYGRPQYGGPRRDRV

SEQ ID NO: 299730 - protein, 142 aa, Zea mays; identical to SEQ ID NO: 299725
  Clone ID: MRT4577_36422C.1.pep

SEQ ID NO: 299731 - protein, 142 aa, Zea mays
  Clone ID: MRT4577_36423C.1.pep
MGRVRTKTVKKTSRQVIEKYYSRMTLDFHTNKKVLEEVSILPSKRLRNKVAGFTTHLMRRIQRGPVRGISLKLQEEERERRMDFVPEKSALEVEEIRVDKETMEMLAALGMADLPGVERQAEVSNVPAYGRPQYGGPRRDRV

SEQ ID NO: 299732 - protein, 103 aa, Zea mays
  Clone ID: MRT4577_36424C.1.pep
MAARNLTAGAGATVRGAAPGEYVVSLSPGLVASSSASANDAAVAAALRRAVARMWLWDGRGAAPARVTEAMVDYLAAVAGDDEATATVSAAEDAHGCGTFSAR

SEQ ID NO: 299733 - protein, 204 aa, Zea mays
  Clone ID: MRT4577_36425C.1.pep
MGAYKYVSELWRRKQSDVMRFVQRVRCWEYRQQPAIVRLTRPTRPDKARRLGFKAKQGYVVYRVRVRRGGRKRPVPKGIVYGKPKHQGITQLKFQRNKRSVAEERAGRKLGGLRVLNSYWVNEDSTYKYFEIILVDVAHTAIRNDPRINWLCNPVHKHRELRGLTSAGKKFRGLRGKGHTHHKNRPSRRATWKRNQTLSLRRYR

SEQ ID NO: 299734 - protein, 491 aa, Zea mays
  unsure (1)..(491): unsure at all Xaa locations
  Clone ID: MRT4577_36426C.1.pep
LRLRGTRPASHPGSPRYDMVLLPPQRGSDNDGRQPARRRRTRRRLPPMSEEQHPGLSRHLPRRRRRKRGNRGQAGGGTSSAVERVDDAGTPVGDMSGVDLAPETTTSVVSPQHANPKRTDDASTLAEXLLGVSLVLEITVQSVLDATSSPSIDREVPSVFHPVPFRFSFDPPSDPASVSTFIKAYPNLPGYHMWSTWDRLTAVSTYGPPGSEEDDEPDSGWDFSRLGNPSAMRDFMTACDYCLSDCSDDGHSLDDEGCGPSRECFHINLGGHDEGNHLAAILLRAMPEPSTTEGRRIQGELKNLLEDAAVRRAESSASRRQGYPPEHRAATSRFMREASVHTGRTRDVTPVAPGRLGNEHRRHDRRARLDEKVHRGYHPRRGGRYDSGEDRSPSPEPPGPQAFSRAIRRAPFSTRLRAPTTITKYSGETRPELWLADYRLASQLGGTDDDNLIIRNLPLFLSDAARAWLEHLPPAQISNWDDLVKAFAGNF

SEQ ID NO: 299735 - protein, 917 aa, Zea mays
  unsure (1)..(917): unsure at all Xaa locations
  Clone ID: MRT4577_36427C.1.pep
MGSLQQPLQPGTVLHFGSLEFMSLDGSYDMILLPPPRDDDNGGWQPAHRRRNRRRLPRMVGVQHSRSPRPLPRRRRRRRGNQGQAGDNASSAVERADDPGTPTGGAPGVDLAFETKASAVSPRHANPEQADDASALAESLLDVTLAPETTVQSVPDVTSSPLVDQKVPTNSHPTSFGFSLNPPSDLALVDVLVKASPNPLGFRMRSPWDRLTDVSTYGPSGSKEDDGPSICWGFSRLGNPSAMRDFMAACDYCLSDCSDGSRSLGDEDYGPSRECFHVNLGGPSEGNHLGMPEDGDLPRPVPRVDIPRELAVVPVQAGGHDPQLEQIRGAQARFDEGAGALEPIRRDVGQAWAGQPXAGEIRHLPQGFQHRVADDARVRPPPASSGVGQNLAAAAMLLRAMPEPSTTEGRRIQGELKNLLEGAAVXRAESSASRRQGDPSEPHAATSRFLREASVYTGRTRNTAPAAPGRLGNEHHHRDHRAHLNERVHRGYHPRRGGRYDSGEDXVPRPNRPRTELPNITDLDVIGAFLAGTTCRDLVSKLGRKTPTRASELMDIATKFASGQEAVEAIFRKDKQPQGRPSEDAPEASTQRGAKKKGKKKSQAKRDAADVDLVAAAEYKNPRKPPGGAHLFDKMLKEPCPYHQGPVKHTLEECVMLRRHFHRAGPPVEGGRARDDDKKEDHQEGEFPEVRDCFMIYGEQAANALARHRKQERREVCSVKVAAPVYLDWSDKPITFDQADHPDHVPSPGKYPLVVDPVIGDVRLTKVLMDGGSSLNIIYAETLGLLRVDLSSVRAGAAPFHGIIPGKRVQPLGQLDLPVCFGTPSNFRRETLTFEVVGFQGTYHAVLGRPCYVKFMAVPNYTYLKLKMPGPNGVIIVSPTYKHAFECDVEYAEALAESEALIADLESLRAPRGGVNR

SEQ ID NO: 299736 - protein, 932 aa, Zea mays
  unsure (1)..(932): unsure at all Xaa locations
  Clone ID: MRT4577_36428C.1.pep
QPARRRRNRRRLPRVVEEQHSSSARPLPRRRRRRRGNQGQAGGGPSSAVEQVDXSVLDVTSSPPIDQEVPTGSHLTPIGFSLNPPSDFALADALVEASPNPLGFRMQSPWDRLTDVSTYGPSGSEEDDEPDFCWDFSRLGNPSAMRDFMTACEYCLSDCSDGSRSLGDEDRGPSRECFHVDLGGPSEGNHLGMPENGDLPRPVPRVDILRELAVVPVPVGGHDPQLEQTRGVQARLDEGAGALEPIRRDVGQEWAGQPPSGEVRHLPQGIQHRIADDVRMRPPPSSSGVGQNLAAAAMLLRAMPEPSTTEGRRIQGELKNLLEGAAVRWAESSASRRQGYPSEHRAATSRFMREASVHTGRTRNTTPAAPGRLGNEHHHRDRRAHLDERVRRGYHPRRGGRYDSGEDRSPSPEPSGPQAFSRATRRALFPTRFRPPTTITKYSGETRPELWLADYRLACKQGGTDDDNLIIRNLPLFLSDTARAWLEHLPPGQISNWDDLVQAFAGNFQGTYVRPGNSWDLRSCRQQPGESLRDYIRRFSKQRTELPNITDSDVIGAFLAGTTCRDLVSKLGRKTPTRASELMDIATKFASGQEAYKNPRKPPGGANLFDKMLKEPCPYHQGPVKHTLEECAMLRRHFHRAGPPAEGGKARDDDKKEDHQAGEFPEVRDCFMIYGGQAANASARHRKQERREVCSVKVAAPVYLDWSDKPITFDQADHPDHVPSPGKYPLVVDPVIGDVRLTKVLMDGGSSLNIIYAETLGLLRVDLSSVRAGAAPFHGIIPGKRVQPLGQLDLPVCFGTPSNFRRETLTFEVVGFRGTYHAVLGRPCYTKFMAVPNYTYLKLKMSGPNGVITVGPTYKHAFECDVECVEYVEALAESEALIADLESLSKEVPDVKHHAGNFKPAETVKFVPLDPSSDASKQIRIDSELDPK

SEQ ID NO: 299737 - protein, 75 aa, Zea mays
  Clone ID: MRT4577_36429C.1.pep
MYVNITSCSLQKKKKKKKKKKKKKKKKKKKKKKKKKKAKKKKKKKKKKKKKKKRGGFVLKNKTLQTGGNKVKFLF

SEQ ID NO: 299738 - protein, 56 aa, Zea mays
  Clone ID: MRT4577_3642C.1.pep
YFSIIFSILLFCFQMFSSFSIFTTPCSGFSSPPPSFFFFFFFFGYLHETLDCSFDT

SEQ ID NO: 299739 - protein, 492 aa, Zea mays
  Clone ID: MRT4577_36431C.1.pep
MLPGFIVSERGIEANPEKIAAITNMGPIKDLKGVQRVMGCLAALSRFISRLGERGLPLYHLLRKTERFTWTPEAKEALGNLKELLTSAPTLVPPAAGEALLIYVAATTQRPVYFISEVLSETKIHYPQIQKLLYAVILTRRKLRHYFESHPVTVVSSFPLGEIIQCREASGRIAKWAVEIMGETISFAPQKAIKSQVLADFMAEWVDTQLPAAPIQPELWTMFFYGSLMKTGAGAGLLFISPLGKHLRYVLRLHFPASKNVAEYEALVNGMRIAIKLGVRRLDARGDSQLVIDQVTKNSHCRDPKMEAYCDEVRRLEDKFYGLELNHIARRYNETADELAKIASGRTTVPPDVFSRDLHQPSVKTDDTPEPEKASAQPEAPSAPEGEALRVEEEWNGVTPNRNWQTPYLQYLHRGELPLDRAEARRLARRAKSFVLKAPGGYTHLLVAIDKFSKWIKVRPLNNIRSEQAVAFFTNFIHRFGVRNSIITDNGT

SEQ ID NO: 299740 - protein, 87 aa, Zea mays
  Clone ID: MRT4577_36432C.1.pep
SFEQALGLSLNGIIEIGCSKDIKVQGIIGPCTFLEKKGAMCFDTVVGQGNTSSWKMCGLDRNTSFTVFVDVSPSELIEPARKPKCPF

SEQ ID NO: 299741 - protein, 483 aa, Zea mays
  Clone ID: MRT4577_36433C.1.pep
MAHRTVRKRCKPISLSTPTVPDRLGDEQHRRDHRARLEERVRRGYHPRRGGRYDSEEDQSPSPEPPGPRVFSRAIRRAPFPARFRAPTTITKYSGETRPEFWLADYRRACQLGGTNDDNLIIRNLPLFLSDAARAWLEHLPPTQISGWDNLVKAFAGNFQGESLQEYIRRFSKQRTELPNITDLDVIGAFLAGTTWRDLVSKLGRKTPTKASELMDIATKFASGQEAIEAIFRKDKQPRGRQKEDAPEASVQRVPKKKAKKKAQAKRDAIDADLVAAALHRNPRKPSGGVNTFDKMLEESCPYHRGPVKHTLEECDMLRCYFIKAGPSVEGGKDQGNNKKRATRKRSSRRTPSNFRKETLTFEVVGFRGTYHAVLGRPCYAKFMVVPNYTYLKLKMSGPNGTITVGSTYHHAYERDVECMEYAEAITESEALIADLDCLSKEAPDVKRHAGNFEPAEADKSVSLNPSNDACKHVRVGSELDPK

SEQ ID NO: 299742 - protein, 137 aa, Zea mays
  Clone ID: MRT4577_36434C.1.pep
ARRKRSWWKFWSNKPKSSPEFEKPRMPPVRVIGVIRGSEKPSIFVPANEPNSGQWFYVDVPMIARACGLPENTVYIEDINEDVSPTNPYPVPKDVNTLIRHSVMPDDHLKYTFTWYTLSAAVTYMASKRIKAKKVRL

SEQ ID NO: 299743 - protein, 961 aa, Zea mays
  Clone ID: MRT4577_36435C.1.pep
MGSLQQPFQPGTVLRFGSLEFMSLDGSYDMILLPPPRDSDNGGRQPARRRRNRRRLPHVVEEQHSSSPRPLPRRWRRRRGNRGQAGGGTSSAIERVDGAGAPSGGTSGIDLASETKTSAVSPQHANPKQTNDTSTLAKDLLGVTLIPETTVQSVPDMTSSTPVDQEVPTDSHLTPFGSSLNPPSDFALVDALIEASPNPLGYRMRSPWDRLMDVSTYGPSGSEEDDEPDLCWDFSGLGNPSAMRDFMTACDYCLSDCSDGSRSLSDEDCGPSRECFHVDLGGPDEGNHLGMPENNDLPRPVPRVDILRELAVVPVPAGGHDPQLEQIREMQARLDEGAGTLEPIRRDIGQEWAGQPPAGEVRHLPQGIQHRIVDEVRVRPPPTSSGVDQNLAAAAMLLRAMPEPSTTEGRRIQGGLKNLLEDAAVRRAESYASRRQGHPSEHRTATSRFMQEASVHTGRTRNTAPAAPGRLGNEHHHRNRRAHLDERISNWDDLVQAFTGNFQGTYVRPRNSWDIRSYRQQPGESLRDYIWRFSKQRTELPNITDSDVIGAFLAGTTCRDLVSKLGRKTPTRATELMDIATKFTSGQEAVEAIFRKDKQPQSRPPEDVPEASTQRGAKKKGKKKSQAKRDAADADLVAAAEYKNPRKPPGGANLFDKMLKESCPYHQGPVKHTLEECTMLRRHFHKAGPPAEGGRARDNDKKEDHQVGEFPEVRDCFMIYDGQVANASAWHRKQERREVCSVKVAAPVYLDWSDKPITFDQADHQDRVPSPGKYPLVVDPVIGDVRLTKVLMDGGSSLNIIYAETLGLLRVDLSSVRAGAAPFHGIIPGKRVQPLGQLDLPVCFGTPSNFRMETLTFEVVGFRGTYHAVLGRPCYTKFMVVPNYTYLKLKMPGPNGCVEYAEALAESEALIANLESLSKEVLDVKRHAGNFEPAETVKSVPLDPSNDASKQIWIGSELDPK

SEQ ID NO: 299744 - protein, 687 aa, Zea mays
  Clone ID: MRT4577_36436C.1.pep
QKQALQKRKSQIASVVEDAVEAADLRDYSSRTRDSLSCWNPDSIGFNLIENVLCHICQKERSGAILVFMTGWDDINALKEQLQANPLLGNPSAVLLLACHGSMASSEQKLIFDKPEPGVRKIVLATNLAETSITINDVVFVVDCGKAKETSYDALNNTPCLLPTWISKASARQRRGRAGRVQPGECYHLYPRCVYDAFADYQLPELLRTPLQSLCLQIKSLRLGSISEFLSRALQSPESLSVQNAIEYLKVIGAFDQNEELTVLGKHLSMLPVEPKLGKMLIFGAIFNCLDPILTIVSGLSVRDPFLTPFDKKDLAESAKLQFSCRDYSDHLALVRAYDGWREAERDRAGYDYCWKNFLSVQTLKAIDSLRRQFLFLLKDTGLVDENMTMCNKWSRDENLVRAVICAGLYPGVSSVLNKEKSISLKTMEDGQVMLYSSSVNGKETKIPFPWLVFNEKVKVNSVFLRDSTAISDSILLLFGGCIKQGGLDGHLKMLGGYLEFFMNRDLASTYVSLKRELENLIHCKLQNPRMDIQTSEELLSAIRLLVTEDPCSGRFVYGRQEPRSKKAKTMLSPSSLSEAGGNGGDNAKNQLQTYLTRAGHSNPTYKTKQIKSYLFRSTVEFNGMQFVGQPCANKKLAEKDAASEALNWLTGDGGAITDSRGAQDADPMSLLMQPPRRRRHSHRRRN

SEQ ID NO: 299745 - protein, 1106 aa, Zea mays
  unsure (1)..(1106): unsure at all Xaa locations
  Clone ID: MRT4577_36437C.1.pep
MPTVGAPGRGLLRVDEQLPVKLQMGSLQQPFQPGMVLRFGSLEFMSLDGGYDMILLPPPRDSDNGDRQLARRRRNRRRLPHVAEEQHSGLSRRLPRRRRRRRGNQGQGGGSTSSAVERVDGADAPTGDTSGIDLASETKTSVVSPQHANSKRMDDASTLAKDLLGVTLVPETTVQSAPDVTSSPPVDQEVPTDSHPVPFGFSLDPPSDFASVDAFIEASRNPPGYGMRSPWDRTTAVSTYGPSGSEEDDEPDFCWDFSGLGNPSAMWDFMTACDYCLSDCSDGSRSFGDEDCGPSRECFHVDLGGPGEGNHLGISENGDPPRPAPRVDILRELAVVPVPAGGQDAQLEQIREMQARLDEGAGTLEPFHWDIGQEWAGQPPAGEACHLPQGIQHRITDDVRARPPPASSGVNQNLAAVAILLRAMPEPSTTEGRHIQGEIKNLLEDATVRRAESSASRRQGYPSEHRAATSRFMREASVHTGRTRNTALAAPGRLGNEHHHRNRRAHLDEKVRRGYHPRRGGRYDSGEDRSPSPEPPGPQAFSRAIRRALFPTRFRTPTTITKYSGETRPELWLADYRLACHLGGTNDDNLIICNLPLFLSNTARAWLEHLPPGQISNWDDLVQAFAGNFQGTYVRPGNSWDLRSCRQQPGESLQDYIRRFSKQRTELPNVTDSDVIGAFLVGTTCRDLVSKLGRKTPTRASELMDIATKFASGQEAVEAIFRKDKQPQGRQPEDVPEASTQCGTKKKGKKKSQAKRDAADADLVFAAEYKNPRKPPGGTNLFDKMLKEPCPYHQGPVKHTLEECAMLRRHFHKVGPPAEGGRAHDDDKKEDRKAGEFLEVHDCFMIYGGQVANASARHRKQEHREVCSVKVAAPVYLDWSDKPITFDQXDHPDRVPSSGKYPLVVDPVIGNVRLTKVLMDGGSSLNIIYAETLGLLRIDLSSVRAGTAPFHGIIPGKRVQAFGQLDLPVCFGTPSNFRRETLTFEXVVGFRGTYHAVXGRPCYAKFMXRPNYTYXKLKMSGPNGVITVGPTYRHAYECDMECVEYTEALAESEALIADLESLSKEAPDVKRHAGNFEPAETVKSVPLDPSNDASKQIRIGSELDPK

SEQ ID NO: 299746 - protein, 378 aa, Zea mays
  Clone ID: MRT4577_36438C.1.pep
MGETISFAPRKAIKSQVLADFVAEWVDTQLPTALIQPELWTMFFDGSLMKTGAGAGLLFISPLGKHLRYVLRLHFPASNNVAKYEALVNGLRIAIELGVRRLDARGDSQLVIDQVMKNSHYRDPKMEAYCDEVRRLEDKFYGLELNHVARRYNETADELAKIASGRTRVPPDVFSRDLHQPSVNTDDTPEPEKASAQPEAPSAQSEAPSTRPEAPSARPKAPSAWPEAPLARPEVPLASEVGPLQKAPGGYTHLLVAIDKFSKWIEVRPVNSIRSEQAVAFFTSIIHLFRVPNSIITDNGTQFTGRKFQDFCEDHHIRVDWAAVAHPMTNGQVERANDMILQGLKPRIYNDLNKFGKRWMKELLSVVWSLRTTPSVTS

SEQ ID NO: 299747 - protein, 1038 aa, Zea mays
  Clone ID: MRT4577_36439C.1.pep
MGSLQQPLQPETVLRFGSLEFMSLDGSYDMILLPPPCDNDNGGRQPARRRRNRQPLPRVVEEQHSSSPRPLPRRRRRRRGNHGQAGGGTSSAVEQVDGAGAPTGGASGIDLAFGTKTSAVSPQHANSEQTDDASTLTKGLLGVTLVPETTVQSVPDVTSSPPVDQEVPTDSRLMPLGFSLDPLSDFALAGALVETSPNPLGFRMRSPWDRLTDVSTYGPSGSEEDDVPDFCWDFSGLGNPSAMQDFLTACDYCLFDCSDGSRSLGDEDCGPSRECFHVDLVGPSEGNHLGMPENGDLPRPVPRVDILRELAVVPVQAGGHDPQLEQIRGVPARLDEGAGALEPIRRDIGQEWAGQPPAGEMRHLPQGFQHRIANDARMRPPPASSGVGQNLAAAAMLLRAMPEPSTTEGRRIQGELKNLLEDTAARRAESSASRRQGYPSEQRAATSRFMREASVHTGRTRNTAPAAPGRLGNEHHHRDRRAHLDERVRRGYHPRRGGRYDSEEDRSPSPEPPGPQAFSRAIQRASFPTRFRPPTTITKYSGETRPELWLADYRLACQLGGTDDDNLIIRNLPLFLSNTARAWLEHLPPGPISNWDDLPRESLRDYIRRFSKQRTELPNITDSDVIGAFLAGTTCRDLVSKLGRKTPTRASELMDIATKFASGQEAVEAIFRKDKQPQGRPPEDAPEASTQHGAKKKGKKKSQAKRDAADADLVAAAEYKNPRKPPGGANLFDKMFKESCPYHQGPVKHTLEECVMLRRHFHRAGPPAEGGRARDDDKKEDHQAGEFPEVRDCFMIYGGQAANASAAAPVYLDWSDKPITFDQADHPDHVPSPRKYPLVVDPVISNIRLTKVLMDGGSSLNIIYAETLGLLRVNLSSVRAGVAPFHRIIPGKRVQPLGQLDLPVCFGTPSNFQRETLTFEVVGFRGTYHAGRPCYAKFMAVPNYTYLKLKMSGPNGVITVGPTYRHAFECDAECVEYAEALAKSEALIADLESLSKEVPDVKRHAGNFEPAETVKSVPLDPSGDTSKQVRIGSELDPK

SEQ ID NO: 299748 - protein, 141 aa, Zea mays
  Clone ID: MRT4577_3643C.1.pep
MKHPTSKKISFWNIALMERQCTLSQIKHLVASRALHVQMIKLVFQETRKLSTLKVSNGASSSLVTKDNLTTSVAYPFTLIKPSWQEGDVTLQDINRRIRPPPKKAPEILGTSAFSGKPVINKTRIRTEGGKGSITILRTKG

SEQ ID NO: 299749 - protein, 357 aa, Zea mays
  Clone ID: MRT4577_36440C.1.pep
MTSMALSSLRKQGNVSRTPGRTVSYASTGLKHFSDGHMGSFQQPLQPGTVLRFRSLEFMSHDGSYDMVLLPSQHDNNDGRRLARRRRTRRRLPPVAEEEHPGLPRHPPRRRRGRRGNRGQAGGGTSSAVGPERVDDAGTPAGDMSGVVLAPETTTGVASQQCANPKRTDDASTLTKDLLGVSLVPKITVHSVPDATSPPSINQEVPSVFHPVPFRFSSDPPIDPASVSAFARAYPELPGYHMWSTWDRLTAVSTSGPAGSEEANDPDFGWDFSGLRDPSAMRDFMSACDYCLSGCSDDGHSLGDEGYHPSRECFHIDQGDHDEDNHLGMPEDDNAPVPASRVEIPRELAVVPVPAGG

SEQ ID NO: 299750 - protein, 124 aa, Zea mays
  Clone ID: MRT4577_36441C.1.pep
MTKTRGTDMTKKKGKHVSEMDFKTHQHTEFFDKLIELTPARFYLPDETERKWYPGLSKAQKARAKKKTNDNLKKAKRDKLDPEKSALTTLDLLKEKIEKERLASQKQKLKKKHADLREQKLEQE

SEQ ID NO: 299751 - protein, 132 aa, Zea mays
  unsure (1)..(132): unsure at all Xaa locations
  Clone ID: MRT4577_36442C.1.pep
NTTRHAHNVDLDRLNKMLPSIYFKLYNMKGDIAMWHNSFDSCYDKLXSLSPRPPSATTASTPTPSXYVPMRSCVTAPSPKYRKLDLNATPNLPQMLIVTPDLIILAPVSIAYTFKHDDARIKLKVNHYKTLM

SEQ ID NO: 299752 - protein, 36 aa, Zea mays
  Clone ID: MRT4577_36443C.1.pep
PVEVLTKFAVKRMNYILTLLYQQHTLFCPEKKKLLD

SEQ ID NO: 299753 - protein, 123 aa, Zea mays
  unsure (1)..(123): unsure at all Xaa locations
  Clone ID: MRT4577_36444C.1.pep
RHPSACSDDLKFQPFLLHRVLGLFILRIRQRIAAHQCSQLLDVLPDPSCAGILIVVSCSRPLILSALYVAQFFAALESHLCAVLPPLFLSRCRTIIIAIFVPLLVLCLIFENPPRGRXRGRTQ

SEQ ID NO: 299754 - protein, 112 aa, Zea mays
  unsure (1)..(112): unsure at all Xaa locations
  Clone ID: MRT4577_36445C.1.pep
GLASPPPPVRVRVRRGTPGFGFEGERIEMAATDVEYRCFGCGLVCSTDHHSLHIAFTAYCEDLXSKIILCRETQCNGSLTILTLYTRXLCKTRKEKKNKRELDVQDISLLTA

SEQ ID NO: 299755 - protein, 120 aa, Zea mays
  unsure (1)..(120): unsure at all Xaa locations
  Clone ID: MRT4577_36446C.1.pep
MAGDSTPSPASGPVQVRCAGCRTILAVGLGVTEFICPKCRMAQCLPPQLMAKXPPRPRRLCPKPPGSLLCLLRRPRWVTPSAQGVDPTKIQLPCAGCQAVLNVPHGLARYXCPQCGVDLP

SEQ ID NO: 299756 - protein, 65 aa, Zea mays
  Clone ID: MRT4577_36447C.1.pep
NTFYLGRNMWLSRLLYNITSKICNHKQEELFFIMSFERVSSVHMVDVNCLNLIVFEFNQETTWNQ

SEQ ID NO: 299757 - protein, 51 aa, Zea mays
  Clone ID: MRT4577_36448C.1.pep
LLLFFYLNPTSFPWLYFYYPANAQTIPFPISLIYIHIPLSPTVVIRKTPIP

SEQ ID NO: 299758 - protein, 200 aa, Zea mays
  unsure (1)..(200): unsure at all Xaa locations
  Clone ID: MRT4577_36449C.1.pep
MTTKIFSLLKLLALSASATTXAIFLQCSQAPIASLLPPYLSSVMASVCENPILHLYRIQQAIAAGILTLSPLFLQXPSALLQQLSLVHLLAQSIRAQKLHQLALENLTANSQXQKFIPFNQLATLNSVAYLQQXQLPFSQLVVVSLLPSYIXQQLLPFYPHDVANTTTLLQLQQLPPFNQLALTNPTAFYLQPIIDGALC

SEQ ID NO: 299759 - protein, 49 aa, Zea mays
  Clone ID: MRT4577_3644C.1.pep
LTSFDRTFLIESWLRMVSIIMTMKVDVLLLPTPPDEHQAHSSEKKTSSR

SEQ ID NO: 299760 - protein, 114 aa, Zea mays
  Clone ID: MRT4577_36450C.1.pep
PQLEEKNGPLFFFLPVPGNFLFGPPPPPRCFPPPRFFLHGVLDQFVAPHPGLPPRGFFPRFVFLFRRPPPPPGQRRFLFLSFPKWPGPPGALVRVFFAPPVLFAVGLFFFGLVN

SEQ ID NO: 299761 - protein, 62 aa, Zea mays
  Clone ID: MRT4577_36451C.1.pep
NPLPNSECASFKAQTERYISVFHHAPKADCIAENHMVSNNIVLLVLLVFMCVLIMFLQFCLR

SEQ ID NO: 299762 - protein, 240 aa, Zea mays
  Clone ID: MRT4577_36452C.1.pep
MVGAIEKNIPKLLKHDKLFSAKRAEGYVYSLWSLLPSCCNYPCDTSSNFRVLQDILCDTLQNHPALHGIVCSSIQVLIKQNKKALSVSREEDILAEDEISKSERRAKERYTQNLAEENLKAIRAFSSKLLEVLCSIFLMSSNDAIGLLQPAISEIASISDKNVVGKFFLDAIRKLLDATKAVNAEPVDDSSMEIESYSNKNIMKRALLLDFAASLMPALASKSINVLFSYVKPAIKDSDS

SEQ ID NO: 299763 - protein, 731 aa, Zea mays
  Clone ID: MRT4577_36453C.1.pep
MPFGLRNAGATYQRCMNHVFGEHIGRTVEAYVDDIVVKTRKASDLLSDLEVTFRCLKAKGVKLNPEKCVFGVPRGMLLGFIVSERGIEANPEKIAAITSMGPIKDLKGVQRVMGCLAALSRFISRLGERGLPLYRLLRKAECFAWTPEAEEALGNLKALLTKAPVLVPPADGEALLVYVAATTQVVSAAIVVERQEEGHALPVQRPVYFVSEVLRKLRHYFESHPVTVVSSFPLGEIIQCREASGRIAKWAVEIMGETISFAPRKAIKSQVLADFVAEWVDTQLPTAPIQPELWTMFFDGSLMKTGAGAGLLFISPLGKHLRYVLRLHFPASNNVAEYEALVNGLRIAIELGVRRLDARGDSQLVIDQVMKNSHCRDQKMEAYCDEVRCLEDKFFGLELNHIARRYNETADELAKIASGRTTVPPDVFSRDLHQPSIKIDDTPEPEAPSAQPELPSAPEGEALDVEEGQSGATPDRDWQAPYLQYLRRGELPLDQAEARRVARRAKSFVLLGDEEELYHRSPSGVLQRCISIAEGQKLLQEIHSGACGHHAAPRALVGNAFRQGFYWPTAVADATRIVRTCEGCQFYARQTRLPAQALQTIPITWPFAVWGLDLVGPLQKAPGGYTHLLVAIDKFSKWIEVRPLNSIGSEQAVAFFTNIIHRFGVPNSIITDNDTQFTGKKFLDFCEDHHIRVDRATVAHPMSNGQVERANGMILQGLKPRIYNDLNKFGK

SEQ ID NO: 299764 - protein, 118 aa, Zea mays
  Clone ID: MRT4577_36454C.1.pep
SNGASVLAVRQALGTGCSYGPDRGTFEIRERKDCVGGADEYYYRKPRDHEQEKPAVGGRYYGEGSQQPYEQQGAGGYGEGEEYCSGAAGRLGGERRGYYLQTIILLLLASAPPLILTL

SEQ ID NO: 299765 - protein, 72 aa, Zea mays
  Clone ID: MRT4577_36455C.1.pep
PPSPPAEIQTSVRLVLTGELGKHAVSEGTKACTNFTSSYACTLDLASSSGADVHTELKLDVAGFSVRAALFL

SEQ ID NO: 299766 - protein, 1044 aa, Zea mays
  Clone ID: MRT4577_36456C.1.pep
MGSLQQPLQPGTVLRFGSLEFMSLDGSYDMMLLPPPRDNDNGGRQPARRRRNRRRLPRVVEEQPSSSSRFLPRRRRGRQGDQGQAGGSASLAVERADSTGTPTRGAPGIDFVPETKTSAISPRHANPKQADDAISLAESLLDVTLVPEMTVQSVPDVTSSPLVDQKVPTDSPPTSFGFSLNPPSDLALADALVEASPNPLGFRMRSPWDRLTDVSTYGPSGSEEDDDPSICWDFSGLGNPSAMRDFMTACDYCLSNCSDGSRSLDDEDCGPSRECFHVELGGPSEGNHLGMPEDGDLPRPVPRVDTPRELAVVPVQAGAHDPQLEQIRGVQARLDEGARALESIRRDVGQAWAGQPPAGEIRHLTQGFQHRVADDVRFKPPPASSGVGQNLAAAAMLLRAMPEPSTTEGRRIQGELKNLLEGAAVRRAESSTSRRQGYPSEPHAATSRFMWEASVYTGRTRNTAPAAEGRLGNEHHHLDRQAHLDERVRRGYHPRRGGRYDSGEDRSPSPEPPDPQAFSRAIRRAPFPTRFRPPTTITKYSGETRPELWLADYRLACQLGGTDDDNLIIRNLPLFLSDTARACCRQQPGESLWDYIRRFSKQRTELPNITDSDVISAFLASTTCRDLVSKLGRKTPTRASELMDIATKFASGLEAVEAIFRKDKQPQGRPSEDAPEASTQRGAKKKGKKKSQAKRDAADADLVATAEYNNPRKPPGGANLFDKMLKEPCPYHQGPVKHTLEKCVMLRRHFHRAGPPAEGGRARDDDKKEDHQAGEFPKVRDCFMIYGGQAANASARHRKQERRVVCSVKVAAPVYLDWSDKPITFDQADHPDHVPSPGKYPLVVDPVIGDVRLTKVLMDGGSSLNIIYAETLKLLRVDLSSVRAGAAPFHGIIPGKRVRPLGRLDLPVCFGTPSNFRRETLTSEVVGFRGTYHAVLGRPCYAKFMVVPNYTYLKLKMPGPNGVITVGPTYKHAFECDVECVEYAEALAESEALIADLESLSKEVPDVKRHAGNFEPVETVKAVPLDPSGDAFKQIRIGSGLDPK

SEQ ID NO: 299767 - protein, 101 aa, Zea mays
  unsure (1)..(101): unsure at all Xaa locations
  Clone ID: MRT4577_36457C.1.pep
DGAAGAAVVLRAGTPVRRLVWXMWVXVVFQNTEEELQSWHLDGYDFWVVGWVGLGLLSSWLLLSLSNTIAHGLLSPSTEYAIGMRHICRTIWWTLRQYTPF

SEQ ID NO: 299768 - protein, 696 aa, Zea mays
  Clone ID: MRT4577_36458C.1.pep
MAEEQHPGLPRHPPRHRKRRQGNHGHAGGGASSAVERVDDAGTPVGDVSGVVLAPETTTDVVSPQRTNPRRTDDASTLAKDLLGVSLVLEMTVQSVPDATSSPSIDQEVLSVFHPVPLRFSFNPPSDPASVSAFVKAYPNLPGYHMWSSWDRLMAVSTYGPPGSEEEDEPDSGWDFFGLCDPSAMRDLMTACDYCLSGCSDDGHSLDDEGCGPCRECFHVDLGGHDEDNHLGPQAFSWAIRRAPFPARFRAPTTITKYSGETRPELWLADYRLACQLGGTDDDNLIIRNLPLFLSDAALAWLEHLPPAQISNWDDLVRAFAGNFQGTYRTELSNITDSDVIGAFLAGTTCRDLVSKLGSKTPTKASELMDIATKFASSQETAGPPAGDGKGRDDNKKEGDKEEEFPEVHDCFMIYGVRVANASARHRKQERREVCSVKVARREVCSVKVAAPVYLDWSDKPITFDQGDHPNCMSSPGRYPLVVDPVIGNARLTKVLMDGGSSLNIIYAETLGLLEIDLSTIRAGVAPFHGIVPGKRVLPLGQLDLPVCFGTPSNFRRETLMFEVVGFRGTYHAVLGRPCYDKFMVVPNYTYLKLKMPGPNGVITVGSTYRHTYECDVECVEYAEALAESEALIADLECLSKEVPDAKRHAGNFEPAEVVKSVALDPSNDADKKGLDRLQARPQIGSSARRLPPRKR

SEQ ID NO: 299769 - protein, 1078 aa, Zea mays
  unsure (1)..(1078): unsure at all Xaa locations
  Clone ID: MRT4577_36459C.1.pep
MPEPSTTEGQRIQGELKNNLEDAAVRRAESSASRRQGYPSEHRAATSRFVRKASVHTGRTCNTAPVAPGRLGNEHHHRDRRAHLDERVRRGYHPRRGGRYDSGEDRSPSPEPPSLQAFSRAIRRAPFPTRFRTPTTITKYSGETRPELWLMDYRLACQLGGTDDDNLIIRNLPLFLFDIARAWLEHLPPRQISNWDDLVQAFAGNFQGTYVRPGNSWDLRSCRQQPGESLRDYIRRFSKQRTELPNITDSDVIGAFLAGTTCRDLVSKLGRKTPTRASELMDIATKFASGQEAVEAIFQKDKQPQGRQPEDVPEASAQRGTKKKNKKKSQAKRDATDTDLVAATEYXNPRKPPGXANLFDKMLKESCPYHQGPVKHTLEEXAAPVYLDWSDKPITFDQGDHPDHVPSPGKYPLVVDPIIGNVRLTKVLMDGGSSLNIIYAETLGLLQIDLSSIRAGAMPFHGIIPGKRVQPLGHLDLPVCFGTPSNFRRETLTFEVVGFRGTYHAVLGRPCYAKFMAVPNYTYLKLKMPGPNRVITIGPTYRHAYECDVECVEYVEALAESEALIADMESLPKEVPDAKRHAGNFEPAEAVKSVPLDPSNDTSKQVPYPLPHIDQIMDSTAGCETLSFLDAYSGYHQIRMKESDQLATSFITPFGMYCYVTMPFGLRNAGATYQRCMNHVFGEHIGRTVEAYVDDIVVKTRKASDHLSDLETTFKCLKAKGVKLNPEKCVFGVPRGMLLGFIVSERSIEANPEKIAAITNMGPIKDLKGVQRVMGCLAALSRFISRLGERGLPLYRLLRKTECFTWTPEAEEALGNLKALLTNAPILVPPAAGEALLIYVAATTQLTMFFDGSLMKTGAGAGLLFISPLGKHLCYVLCLHFPVSNNVAEYEALVNGLRIAIELGVRRLDARGDSQLVIDQVMKNSHCRDPKMEAYCDEVRRLEDKFYGLEVNHIARRIVRTCQGCQFYARQTHLLIAIDKFSKWIEARPLNSIRSEQAVAFFTNIIHRFGVPNSIMTDNGTQFTDRKFLDFCEDHHIRVDWAAVAHPMTNGQVERANDMILQGLKPRIYNDLHKFGRR

SEQ ID NO: 299770 - protein, 90 aa, Zea mays
  unsure (1)..(90): unsure at all Xaa locations
  Clone ID: MRT4577_3645C.1.pep
VLVPAATPPYRGATSTRGTVLGSPRAXAXLFSASSHRAVPAPTVVALAAAKEGIMGRNASIRGRQRTQGSYNAKVITPEGEVEFPRRNRT

SEQ ID NO: 299771 - protein, 123 aa, Zea mays
  unsure (1)..(123): unsure at all Xaa locations
  Clone ID: MRT4577_36460C.1.pep
VKKHPYSLVMSEFYHTTPKDKRPSVFGMTASPVNLKGVTSQEDCAIKIRNLESKLDCIVCTIKDRKELEKHVPMPLEVIVHYDKAATLLSFHEQIKQMEAADEEAAFSSSKRTKWQFXMGARD

SEQ ID NO: 299772 - protein, 675 aa, Zea mays
  Clone ID: MRT4577_36461C.1.pep
MPFGLRNAGATYQRCMNHVFGEHIGRTVEAYVDDIIVKTRKASDLLSDLEVTFRCLKAKGVKLNPEKCVFGVPRGMLLGFIVSERGIEANLEKIAAITSMGPIKDLKGVQRVMGCLAALSRFISRLGERGMPLYRLLRKAECFTWTPEAEEALENLKALLTNAPILVPPAAGEALLIYVAATTQVVSAAIVVERQEEGHALPIQRPVYFVSEVLSETKIRYPQVQKLLYAVILTRRKLRHYFESHPVTVVSSFPLGEIIQCREASGAGAGLLFISPLRKHLRYVLRLHFPASNNVAEYEALVNGLRIAIELGVRRLDARGDSQLVIDQVMKNSHCRDPKMEAYCDEVRRREDKFYGLELNHIARRYNETADELAKIASGRTTVPPDVFSRDLHQPSIKIDDTPEPEAPSAQPEVLSAQSEASSAWPEAPSARPEAPAAPEGEALRVEEERSGVTPNQNWQTPYLQYLHRGELPLDRAEARRLVRRAKSFVLLGDGKELYHRSPSGILQRCISIVEGQELLREIHSGACGHHAAPRALVGNAFRQGFYWPTAVADATRIVRTCEGCQFYARQTHLPAQALQTIPITWPFAVWGLDLVGPLQKAPGGYTHLLVAIDKFSKWIEVRPLNSIRSEQAVAFFTNIIHRFRVPNSIIIDSGTQFTGRKFLDFCEDHHIRVD

SEQ ID NO: 299773 - protein, 70 aa, Zea mays
  Clone ID: MRT4577_36462C.1.pep
LGFVRVWLGPDYLVGNMHVFSGADGARASHDDVTENQNHIHHRDHEDAVHRALAAVNVRPEWPQALPHAK

SEQ ID NO: 299774 - protein, 741 aa, Zea mays
  Clone ID: MRT4577_36463C.1.pep
LTSRWLFPKRHSISRLGERGLPLYRLLRKAECFTWTPEAEEALGNLKALLTNAPILVPPAAGEALLIYVAATTQVVSAAIVVERREEGHTLPVQRPVYFISEVLSETKIRYPQVQKLLYAVILTRRKLRHYFESHPVTVVSSFPLGEIIQCREASGRIVKWAVEIMGETISFAPRKAIKSQVLADFVAEWVDTQLPTAPIQPKLWTMFFDGSLMKTGAGAGLLFISPLGKHLRYVLLLHFPVSNNVAEYEALVNGLQIAIELGVRCLDARGDSQLVIDQVMKNSHCCNPKMEAYCDEIDDTPEPEAPSAQSEAPSAQSEAPSARSEAPSAWPEAPSVQPEVPSAPEGEALRVEEERSGVTPNRNWQTPYLQYLHRGELPLDRAEARRLARCAKSFVLLGDGKELYHRSPSGILQRCISIAEGQELLQEIHSGACGHHTAPRALVENAFRQGFYWPTAVADATRIVRTCEGCQFYARQTHLPAQALQTIPITWPFAVWGLDLVGPLQKAPRGYTHLLVAIDKFSKWIEFIGRKFLDFCEDHHIRVDWAAVAHPMTNGQVERANDMILQGLKPRIYNGLNKFGKRWMKELPSVVWSLRTTPSRATGFTPFFLVYGAEAILPTDLEYGSPRTRAYADQSNQASREDSLDQLEEARDTALLHSARYQQSLRRYHARGVRSRDLQVGDLVLRLRQDARGRHKLTPPWEGPFVIAKVLKPGTYKLANSQGEVYSNAWNINQLRRFYP

SEQ ID NO: 299775 - protein, 781 aa, Zea mays
  Clone ID: MRT4577_36464C.1.pep
MGCLAALSRFISRLGERGLPLYRLLRKAECFAWTPEAEEALGNLKALLTNAPVLVPPADGEALLVYVAATTQRPVYFVSEVLSETKIRYPQVQKLLYAVILTRRKLRHYFESHPVTMVSSFPLGEIIQCREASGRIAKWAVEIMGETISFAPRKSIKSQVLADFVAEWVDTQLPTAPIQPELWTMFFDGSLMKTGASAGLLFISPLGKHLRYVLRLHFPVSNNVAEYEALVNGLRIAIELGVRRLDARGDSQLVIDQVMKNSHCRDPKMEAYCDEVRRLEDKFYGLELNHIARRYNETADELAKIASGRTTVPPDVFSWDLHQPSVKIDGSPEPEAPSVQPEVPSAQPEASSARPEAPSVQPEVPSASEGEALRIEEERSGAMPDRNWQTPYLQYLHQGELPLDRAKARRVARRAKSFVLLGDEKELYHRNPSGILQRCISIAEGQGLLQEIHSGACGHHAAPRALVGNAFRQGFYWPTAVADATRIVRTCEGCQFYAKQTHLPAQALQTIPITWPFAVWGLDLVGPLQKAPGGYTHLLVAIDKFSKWVEVRPLNSIRSEQAVTFFTNIIHRFGVPNSIITDNGTQFTGRKFLDFCEDHHIRVDWAAVAHPMSNGQVERANGMILQGLKPRIYNDLNKFGKRWMKELPSVVWSLRTTPSRATGFTPFFLVYGVEAVLPTDLEYGSPRTRAYSDQSNQASREDSLDQLEEARDKALLHSARYQQSLRRYHARGVRPRDLQVGDLVLRLRQDARGRHKLTPPWEGPFVIDKVLKPRTYKLANS

SEQ ID NO: 299776 - protein, 702 aa, Zea mays
  unsure (1)..(702): unsure at all Xaa locations
  Clone ID: MRT4577_36465C.1.pep
MLLGFIVSKRGIEANPEKIAAITNVGPIKDLKGVQRVMGCLVALFRFISRLGERGLPLYRLLRKAECFTWTPEVEEALGNLKALLTNAPILVPPTAGEALLIYVAATTQVVSAAIVVERREEGHALPVQRPVYFISELPAAPMQPELWTMFFDGSLMKTGASAGLLFISPLGKHLRYVLRLHFPASNNVAEYEALVNGLRIAIELGVRRLDARGDSHLVIDQVMKNSHYRDPKMEAYCDEVRRLEDKFYGLELNHVARRYNETADELAKIASGRTTVPPYVFSRDLHQPSVKTDDTPEPEKASAQPEAPSAQPEAPSAQPEAPSAPEGETLRIEEERSGVTPNRNWQTPYLXISTEESXPSTEPKLGDWRGAPGRSSCWGTRRSSTTAAPQASSCDAYPSPKARSSYKKYTRGLAVITPRLEPLLETPSDKKAPGGFTHLLVAIDKFSKWIEVRPINSIRSEQAVAFFTNIIHRFGVPNSIITDNDTQFTGRKFLDFCEDHHIWVDWAAVAHPMTNGQVERANGMILQGLKPRIYNNLNKFGKRWMKELPSVVWSLRTTPSRATGFTPFFLAYGAEAILPTDLEYGSPRARAYDDQSNRTNREDSLDHLEEARDMALLHSARYQQSLRRYHARGVRSRDLQVGDLVLWLRQDARGRHKLTPPWEGPFVIAKVLKPGTYKLANSQGEVYSXLGTSDSYVASTL

SEQ ID NO: 299777 - protein, 83 aa, Zea mays
  unsure (1)..(83): unsure at all Xaa locations
  Clone ID: MRT4577_36466C.1.pep
RXGXAAXXXXXPPXSFALLCSLVWGVXXAGXXAPLLLRCVXCLFXAXXXXAPXSLVPLLRCVPXXVRPSPPCPRPXSWRLXXR

SEQ ID NO: 299778 - protein, 488 aa, Zea mays
  Clone ID: MRT4577_36467C.1.pep
FGSSNMLLNQMRSEDGDPEKLLRHSFYQFQADRSLPDLEKQIKELESERNSMVIEEAESLKDYYDLLQQHRSLKKDVHDIVLSPKHVLPFLQPGRLVRIEYSTDEPANFSIDENVTWGIIINFEKVKSHGEDKRPEDSDYTVDVLTRCSVTKDNSGKKTMKVVPLKARGEPVVVSLSLSQIDGLSSIRMYIPKDLIPVEVRENTLRKVEEVLLRFAKDGVPLLDPEEDMKVQSKSFRKATRRIEALESLFEKHDIRNSPHIQQKLKVFHAKQELSAKIKSIKKTMRSSTVLAFKDELKARKRVLRRLGYVTSDDVVEVKGKVACEISSADELTLTELMFSGALKDATVEQVVALLSCFVWQEKLQDAPKPREELDLLFYQLQETARRVANLQLECKIQIDVESFVNSFRPDIMEAVYSWARGSKFYQIMEMTQVFEGSLIRAIRRLEEVLQQLILASKSIGETELEAKLEEAVNKIKRDIVFAASLYL

SEQ ID NO: 299779 - protein, 205 aa, Zea mays
  unsure (1)..(205): unsure at all Xaa locations
  Clone ID: MRT4577_36468C.1.pep
MAPAIAQQQPQVQPIGVGGRKVVDEVSGWLRVLDDGSVDRTWTGPLEALPLMEPVAPYAQPRDGHTLHDLPGEPNLRVYLPEANVEAGDGARLPVVLHLHGGGFCISHPSWLMYHHFYARLACAVPAVVVAVELPLAPERRLPAHIDAGVAALRRLRSVAXRVRVRVRGRRPXDRPAAALLRQAADVSRVFLLRDSSGGNLVLLV

SEQ ID NO: 299780 - protein, 216 aa, Zea mays
  unsure (1)..(216): unsure at all Xaa locations
  Clone ID: MRT4577_36469C.1.pep
DGYSSRHHHHLTVLRRRLQRRPHYPQCIAHYSQKHRWSLPLPSSSRRCSRSVSVVERWCTRFPDDNDAVRCTPQQHRWQREQPQPQVLAAVGRKVVDEVSGWLRVLEDGSVDRTWTGPREALPLMEPVAPSXFAVXDGHTLHDLPGEPNLRVYLPEANVEAGGARLPVILQLHGGGFCISHPSWLMYHHFYARLACAVPAVVVAVELPFAPERXLP

SEQ ID NO: 299781 - protein, 187 aa, Zea mays
  unsure (1)..(187): unsure at all Xaa locations
  Clone ID: MRT4577_3646C.1.pep
MRTPETIGSALARFGTSRSLFAGAHLHSHLLKSGLLAGFSNHLLTLYSRCRLPSAARAVFDEIPDPCHVSWSSLVTAYSNNGMPRDALLAFRAMRGRGVPCNEFALPVVLKCAPDVRFGAQVHALAVATRLVHDVFVANALVAMYGGFGMVDEARRMFDEYVXVGGERNAVSXDTMISGYVKNDQSG

SEQ ID NO: 299782 - protein, 301 aa, Zea mays
  unsure (1)..(301): unsure at all Xaa locations
  Clone ID: MRT4577_36470C.1.pep
MYFDGSLIKLGAGAGLLFISPLGKHLCYELRLHFPASNNVAEYEALVKGLHIAIELGVRRLDARGDSQLVIDQVIKNPHCRDPKMEAYCDEVRRLEDKFYGLELNHIARRYNETADELAKIASGQTTVPPDVFSRDLHQPSVKTDDTPEPGEASAQPETPSAAEVPRALVGNAFRQGFYWPTAVADATRIXHPGASRTCXAIDKFSKWIEVRPLNSIRSEQAVAFFXHYPSLWGPELHHHRQRHPVHXKKFLDFCEDHHIRVDWAAVAHPMTNGQVEXANDMILQGLKPRIYNDLNKFDRR

SEQ ID NO: 299783 - protein, 674 aa, Zea mays
  Clone ID: MRT4577_36471C.1.pep
MGCLAALSRFISRLGERGLPLYRLLRKAECFTWTPEAEEALWNLKALLTNAPILVPPAAGEALLIYVAATTQVVSATIVVERREEGHALPVQRPVHFISEVLSETKIRYPQIQKLLYAVILTRRKLRHYFESHPVTVVSSFPLGEIIQCREASGRIAKWAVEIMGETISFAPRKAIKSQVLADFVAEWVDTQLPTVPIQPELWTMFFDGSLMKTGAGTGLLFISPLGKHLRYVLRLHFPASNNVAEYEALVNGLRIAIELGVRPLDARGDSQLIIDQVMKNSHCRDPKMEAYCDEVRRLEDKFYGLELNHIAWRYNETVDELAKIASGRTTVPPDVFSRDLHQPSVKIDDTPELEAPLAQPEPEVPSAPEGEALRVEEERSGVTPNRNWQTPYLRYLHRGELPLDQAEAWRLARRVRSFVLLGDGNELYHRSPSGILQRCIPITEGQELLREIHSGACGHHAAPRALVGNAFRQGFYWPTVVADATRIVRTCEGCQFYARQTHLPAQALQTIPITWPFAVWGLDLVGPLQKAPGGYTHLLVAIDKFSKWVPNSIITDNGTQFTGRKFLDFCEDHHIRVDWAAVAHPMTNGQVERANGMILQGLKPRIYNNLNKFGKRWMKELPSMVWSLRTTPSRATGFTPFFLVYGAEAILPTDLEYGSPRTRAYADQSNQAS

SEQ ID NO: 299784 - protein, 155 aa, Zea mays
  unsure (1)..(155): unsure at all Xaa locations
  Clone ID: MRT4577_36472C.1.pep
MASLTGSALSFARPVKAISIKSVSFSGLRKDNVAFRLQPVPQRFAVCCPAKKETVDRVCDIVKKQLALPEGTEVCGSSKFQDLGADSLDTGXHLGSVLWFSTQVCKLSVMPVEIVMGLEEAFKITVEESSAQSIATVEDAANLIDELVAGAAKSC

SEQ ID NO: 299785 - protein, 134 aa, Zea mays
  Clone ID: MRT4577_36473C.1.pep
MASLTGSALSFARPVKAISIKSVSFSGLRKDNVAFRLQPVPQRFAVCCPAKKETVDRVCDIVKKQLALPEGTEVCGSSKFQDLGADSLDTVEIVMGLEEAFKITVEESSAQSIATVEDAANLIDELVAGAAKSC

SEQ ID NO: 299786 - protein, 45 aa, Zea mays
  Clone ID: MRT4577_36474C.1.pep
ELGIIVRPVRPRLGIVGEECSIVQVQQLGQSYKCNTFQPWSWRIC

SEQ ID NO: 299787 - protein, 137 aa, Zea mays
  unsure (1)..(137): unsure at all Xaa locations
  Clone ID: MRT4577_36475C.1.pep
RSGTFTNSYYRGANGIIIVYGVTDQESINNXVKQWLSYIYRYQTDNVNKLLDGNKSDLTGKKAGAPXTGKATGDEMPMRFMETRAKYAINGQQPLIAIGECIKDRLDSQPDDAHARPAPAQIXRIQPRDQNTSCCSC

SEQ ID NO: 299788 - protein, 62 aa, Zea mays
  Clone ID: MRT4577_36476C.1.pep
MFACIVKIPIIGDLTGSNKNAHLKGNVVLVRKTVLGLDVTSIAVWGGGEPGEEERKMWLVKY

SEQ ID NO: 299789 - protein, 72 aa, Zea mays
  Clone ID: MRT4577_36477C.1.pep
HHTKKWRISHDYAVTDTTKGQAPALQYSQKMPTHAPNDDGNPIFNNRRGGKTSAGLAQTCKLKNVTIHKHGQ

SEQ ID NO: 299790 - protein, 51 aa, Zea mays
  Clone ID: MRT4577_36478C.1.pep
TNMRKRWLCHRLTIISFNTLHLFNSYICLIVHIMPSSNRLQHLRTGCSRFS

SEQ ID NO: 299791 - protein, 80 aa, Zea mays
  Clone ID: MRT4577_36479C.1.pep
RDRARRSRRDLPSVARPSRRGGPGVDPGERAGAQQPWRNSSAWSRGPDQGISERGLGYGPAVMPRRRTDPRPVAFPSCTL

SEQ ID NO: 299792 - protein, 55 aa, Zea mays
  Clone ID: MRT4577_3647C.1.pep
TFGSVYVLVSSRKGVVGTVSYGARHPHGSEEPSLTEYRSYREVKAKPFRNQTHYS

SEQ ID NO: 299793 - protein, 48 aa, Zea mays
  Clone ID: MRT4577_36480C.1.pep
LRVPDAIAYFFDDLGKHMGFWQLNNRLGIFATTSLQGDYVKKFACHEN

SEQ ID NO: 299794 - protein, 84 aa, Zea mays
  Clone ID: MRT4577_36481C.1.pep
PRDLGSMRYTRQKAPPQALDPMVSMSGRGSSAALKEVRNQRSNLVSRPDPSQAATPAGWEELWVAMGWSWRFFPTPGRLWTRRT

SEQ ID NO: 299795 - protein, 82 aa, Zea mays
  Clone ID: MRT4577_36482C.1.pep
IMILALVPRFAALASAFIRPDRTTGLICVVVSLLESFCGTYLCSACAASTCTMCGTFLVISCYAFVHLVSCYGRFTCFGPPR

SEQ ID NO: 299796 - protein, 275 aa, Zea mays
  unsure (1)..(275): unsure at all Xaa locations
  Clone ID: MRT4577_36483C.1.pep
GYLEAGRELSGPVPTNGNTVRCDSVIGNPLLQSCHVYTLAVPSAAQQGRGLNSNDSNDTTPSNSQNEGANNSFNAIEIASITSATAIVSILLALIALFIYTRKCAPRMSARSSGRREVTLFQDIGVPITYETVVRATGSFNASNCIGSGGFGATYKAEIAPGVLVAIKRLSVGRFQGAQQFDAEIKTLGRLRHPNLVTLVGYHLGESEMFLIYNYLSGGNLERFIQERSKRPVDWKMLHKIALDVAKALAYLHDTCVPRILQRDVXPSNISLDTT

SEQ ID NO: 299797 - protein, 63 aa, Zea mays
  Clone ID: MRT4577_36484C.1.pep
CVHHQYTGSVVCPSSPPCLDYRFERVKYAMVLWVFTVPLCVCTRQQQQVGQRGQTDPCRTRGR

SEQ ID NO: 299798 - protein, 51 aa, Zea mays
  unsure (1)..(51): unsure at all Xaa locations
  Clone ID: MRT4577_36485C.1.pep
LYFFPPISTPSPNFKTSSPPXTHYPNTYYTLYTHPLYTLPPPTIHLLYNSL

SEQ ID NO: 299799 - protein, 205 aa, Zea mays
  Clone ID: MRT4577_36486C.1.pep
CPFERTYHKDRGSRAPSISTISGSFSPLVCTSLQSPRDIIGILEGTDRTNYYIDDGEGKSLLSQDLSPTGAKGRDFPRVSTRASSPRGSWCLSGRTGLTRTAHPQHVRCVATTASCHAPPLSPPIHRRVSVRQLPPSRARGEPRGSGGSGLLPSHQGQSGRAARLPSPCRNSTFSGKGASGESDREGGADAWVDPGIPDRNRRRT

SEQ ID NO: 299800 - protein, 46 aa, Zea mays
  unsure (1)..(46): unsure at all Xaa locations
  Clone ID: MRT4577_36487C.1.pep
YVHALTMHIQLTLLKKRRRRYIXIXDHNTVTTSTLCNFSMTAPTRP

SEQ ID NO: 299801 - protein, 662 aa, Zea mays
  unsure (1)..(662): unsure at all Xaa locations
  Clone ID: MRT4577_36488C.1.pep
MLLGFIVSERGIEANPEKIAAITNMGPIKDLKGVQRVMGCLAALSRFISRLGERGLPLYRLLRKTERFTWTPEAEEAPGNLKALLTNAPILVPPAAGEALLIYVAATTQVVSAAIVVERREEGHALLVQRPVYFISEVLSETKIRYPQIQKLLYXGAGVGLLFISPLGKHLRYVLRLHFPASNNVAEYEALVNGLXIAIKLGVRRLDARGDSQLVIDQVMKNAHCRDPKMEAYCDEVRRLEDKFYGLELNHVARRYNETADELAKIASGRMTVPPDVFSRDLHQPSVKTDDTPEPEKVLALPEAPSAQPEAPSAPEGEALRVEEERDGVPPNRNWHTPYLEYLHRGELPLDRAEARRLARCAKSFVLLGDGKELYHRRPSGILQRCISIAEEGTRGLHAPAGCHRQVLQVDRGRPLNSIRSEQAVAFFTNIIHRFGVPNSIITDNGTQFTGRKFLDFCEDHHIWVDWAAVAHPMTNGQVERANDMILQGLKPRIYNDLNKFSRRWMKELPSVVWSLRTTPSRATGFTPFFLVYGAEAILPTDLEYGSSRTRAYDDRSNRTNQEDSLDQLEEARDVALLHSTRYQQSLRRYHARGVRSRDLQVGDLVLRLRQDARGRHKLTPPWEGPFIIAKILKPGTYKLANSQGEVYNNAWNIRQLRRFYP

SEQ ID NO: 299802 - protein, 73 aa, Zea mays
  Clone ID: MRT4577_36489C.1.pep
MSPLLLALRGAFRPCASGVGRLGLGKAELTDGGGDNRFVFSEDASKDSLRMVDHGESSKGLRHKGLYCFRPKP

SEQ ID NO: 299803 - protein, 92 aa, Zea mays
  unsure (1)..(92): unsure at all Xaa locations
  Clone ID: MRT4577_3648C.1.pep
EHEQRLDALQGRXKAIGSSEADQDGLASTVRSLGETQLVLYHDVEELKRSVGELPSTVESLQKVQEQVHTLLSQDQAQAARXPSQDFLDRLS

SEQ ID NO: 299804 - protein, 717 aa, Zea mays
  Clone ID: MRT4577_36490C.1.pep
MGPIKDLKGVQRVMGWLAALSRFISCLGERGLPLYRLLRKTERFTWTPEAEEALGNLKALLTSAPILVPPAAGEALLIYVAATTQVVSAAIVVERREEGHTLPVQRPVYFISEVLSETKIRYPQIQKLLIAKWAVEIMGETISFAPRKAIKSQVLADFVAEWVNSQLPEALIQPEPWTMFFDGSLMKTGAGAGLLFISPLGKHLRYVLRLYFPASNNVAEYEALLVIDQVMKNSHCRGPKMEAYCDEVRRLENKFFGLELNHIARRYNETADELDKIASGRTTVLPDVFSRDLHQPSVKTDDTPEPEKVSALPEAPSAQPEVPSARPEAPSAPEGEALRVEEERNGVLPDQNWQTPYLQYLHQGDLPLDRAEARRLARRAKSFILLGDGKELYHRSPSGILQRCISIAEGCQFYARQTHLPAQALQTIPITWSFAVWDLDLVGPLQKAPRGYTHLLVAIDKFSKWIEVRPLNSIRSEQAVAFFTNIIHRFGVPNSIITDNGTQFTGRKFLDFCEDHHIRVDWATVAHPMTNGQVERVNGMILQGLKPQIYNDLNKFGRRWMKELPLVVWSLRTTPSRATGFTPFFLVYGAEAILPTDLEYGSPRARVYDDRSNRANREDSLDQLEEARDMALLHSVRYQQSLRRYHARGVRSRDLQVGDLVLRLRQDARGHHKLTPPWEGPFIIAKILKPRTYKLANSQGEVYSNAWNIRQLHRFYP

SEQ ID NO: 299805 - protein, 1767 aa, Zea mays
  unsure (1)..(1767): unsure at all Xaa locations
  Clone ID: MRT4577_36491C.1.pep
MGSLQHPLQPGTMLRFGSLEFMSLDGSYNMVLLPPPRDNDNGGRQPARRRQNRQRLPHVAEEQHLGLSRHLPRRRRRRWGNHDQAGGGTSSAVGRVDDAGAPAGDTSGVDLTSETKTSVVSPQHANPKRTDDASTLAKDLLGVSLVPEITVQFVPDATPSPSVDQEVPSVFHPVPFRFSFDPPSDSASVDAFIKAYPNLPGYHMWSTWDRLTAVSTYGPPGSEEDNEPDSGWDFSELGNPSVMRDFTAACDYCLSDYSNDGHSLDDKDCGPSRECFHVDLGGLNEGNQSLRELAVVPVPXGGLRQNIGQEWAGRAPAGEVRHLXPRXVQHRIADDVRARLPPASSGVCQNLAAAAILLRAMPEPSTTEGRRIQGELKNLLEDAAVRRAESSAFRRQGYPXEHRVATSRFMREASVHTGRTRDATPVAPGRLGNEHHRRDRRAHLDKKISNWDDLVKAFAGNFQGTYVHPGNSWDLRSCRQQPGESLRDYIRRFSKQRTELPNITDSDVIGTLLTGTTCRDLRGTKKKGKKKSQAKRDATDADLVAAAEHRNPRKPPGGANLFDKMLKESCPYHQGPVKHTLEECVMLRRYFHKAGPPAEGGRGHDNDKEGHKAEEFPEVHDCFMIYGGQVANASAWHRKQERREVSSVKVAAPVYLDWSDKPITFDQGDHPDRVPSPGKYPLVVDPVVGNVRLTKVLMDEGSSLNIIYAETLGLLQIDLSAIRAGAAPFHGIIPGKRVQPLGQLDLPVCFGTPSNFRKETLTFEVVGFRGTYHAVLGRPCYAKFMAVPNYTYLKLKMSGPNGVITVGSTPSXDWHTEGCRRALAGYPSWSPTREAASTSIRRXKRRAIGEEIHKLMAAVFIKEVFHPEWLANPVLVKKKGGKWRMCVDYTVLNKACPKVPYPLPRIDQIVDSTAGCETLSFLDAYSGYHQIRMKESDQLFGMYCYITMPFGLRNAGATYQRCMNHMFGEHISRTVEAYVDDIVVKTRKVSDLLTDLETTFKCLKAKGVKLNPEKCVFGVPRGMLLGFIVSERGIEANPEKITAITNMGPIKDLKGLQRVMGCLAALSRFISRLGKRGLPLYRLLRKTERFTWTPEAEEALGNLKALLTSAPILVPPAAGEALLIYVATTTQVVSAAIVVERREEGHVLPVQGPVYFISELRHYFKPHPVTVVSSFPLGEIIQCQEASSRIAKWAVEIMGETISFAPRKATKSQVLVDFVAEWVDTQLPAAPIQPELWTMFFDGSLMKTGAGAGLLFISPLGKQLRYMLRLHFPASNNVAEYEALVNGLHITIELGLVIDQVMKNSHCRDPKMEAYCDEVRRLEDKFYGLELNHVARRYNETADELAKIASGRTTVPSDVFSRDLHQPSVKTNDTPEPEEASAQPEAPSAQPEAALAAEGEALRVEEERNGVTPNRNWQTSYLQYIHRGELPLDRAEARRQARRVRSFVLLGEEKELYHRSPSGILQRCISIAEGQELLQEIHSGACGHHGAPRALVGNAFRQGFYWPTAVADATRIVRTCQGCQFYARQTHLPAQALQTIPITWLFAVWGLDLVAPLHKAPGGFTHPLVAIDKFSKWIEVRPLNNIRSEQAVAFFTNIIHRFGVRNSIIIDNGTQFTGIKFLDFCEDHHIRVDWAAVAHPMTNGQVERANDMILQGLKPRIYSDLNKFGRQWMKELLSVVWSLRTTLSRATGFTLFFLVYGAEAILPTDLEYGSPRTRTYDDQSNQTSREDSLYQLEEARDMALLHSARYQQSLRRYHARGVRSRDL

SEQ ID NO: 299806 - protein, 799 aa, Zea mays
  unsure (1)..(799): unsure at all Xaa locations
  Clone ID: MRT4577_36492C.1.pep
MPFGLRNAGATYQRCMNHVFGEHIGRTVEAYVDDIVVKTRKASDLLFDLEVTFRCLKAKGVKLNPEKCVFGVPLGMLLGFIVSERGIEANPEKIAAITSMGPIKDLKGVQKVMGCLAALSRFISRLGERGLPLYRFLRKAECFAWTPEAEEALGNLKALLTKAPILVPPADGEALLVYVAATTQVVSAAIVVERQEEGHALPVQRPVYFVSEVLFETKIRYPQVQKLLYAVILTRQKLRHYFESHPVTVVSSFPPGEIIQCREALGRIAKWAVEIMGETISFAPRKAIKSQVLADFVAEWVDTQLPTAPIQPELWTMFFDGSLMKTGAGAGMLFISPLGKHLRYVLRLHFPASNNVAEYEALVNGLRIAIELGVRRLDARGDSQLVIDQVMKNSHCRNPKMEAYCDEVRRLEDKFYGLELNHIARRYNETADELAKIASGRTTVPPDVFSRDLHQPSVKIDDTPEPEAPSARPEAPSDQPGVPSAPEGEALRIEEERSGATPDRDWQTPYLXISAKESYPSTKPRLGGXAPGGYTHLLVAVDKFSKWIEVRPLNSIRSEQAVAFFTNIIHRFGVPNSIITNNGTQFTGRKFLDFCEDHHIRVDWAAVAHPMSNGQVERANSMILQGLKPRIYNGLNKFGKRWMKELPSVVWSLRTTPSRATGFTSFFLFYGAEAVLPTDLGYGSPRTRAYSDQSNQASREVSLDQLEEARDKALLHSARYQQSLRRYHARGVRPRDLQVGDLVLRLRQDARGRHKLMPPWEGPFVIAKVLKPGTYKLANSQGEVYGXLGTSNSYVTSTL

SEQ ID NO: 299807 - protein, 915 aa, Zea mays
  Clone ID: MRT4577_36493C.1.pep
MRSVLNVTSSPLDDQKVPTDSRPTSFVLSLDPPSNLALAGALVEASTNPLGFRLRSPWDRLTDVSIYGPSGSEEDDDPNICWDFSGFGNPSAMRNFMTACDYCLSDCSDGSRSLDDEDCGPSRECFHVDLGGPSEGNHLGMPEDGAPPGPVPRADIPRELAVVPVPAGGYDPKLEQVRGAQARIDEGAGALEPIRRDVGQAWVGQPSAGEIRHLPQGLQHRVADVVRVRPPPASSGVGQNLATAAMLLRAMPEPSTTEGRRIQGELRNLLEGAAVRWAESTASRRQGYPSEPHAATSRFMREASVYTGRTRNTAPAAPGHLGNERHHRDRRAHLDERVRRGYHPRRGGRYDSGEDRSPSPEPPGPQAFSRAIRRAPFPTRFRPSTTIIKYSGETRPELWLADYRLACQLGGTDDDNLIIRNLPLFLSDTARAWLEHLPPGQISNWDDLVQAFAGNFQGTYVRPGNSWDLRSCRQQPGESLRDYIRRFSKQRTELPNITDSDVIGAFLAGTTCRDLVSKLGRKTPTRASELMDIATKFASGQEAVEAIFRKDKQPQGRPSEDAPEASTPRGAKKKGKKKSQAKRDAADADLVAAAEYKSPRNPPGGANLFDKMLKEPCPYHQGPVKHTLEECVMLRRHFHRAGPPAEGGRARDDDMKEDHQAGEFPEVRDCFMIYGGHAANASVRHRKQERREVCSVKVAAPVYLDWSDKPITFDQADHPDHVPSPGKYPLVVDPIVGDVRLTKVLMDGGSCLNIIYAETLRLLRVDLSSVRAGAAPFHGIIPGKRVQPLGRLDLPVVGFRGTYHAVLGRPCYAKFMAVPNYTYLKLKMPGPNGVITVGPTYKHAFECDMECVEYAEALAESEALIADLESLSKEVPDVKRHAGNFEPVETAKTIPLDPNGDASKQIRIGSGLEPK

SEQ ID NO: 299808 - protein, 1232 aa, Zea mays
  Clone ID: MRT4577_36494C.1.pep
MSFDGSYDMTLLPPPRDYDNGGRQPARRRRNRRHLPRVVEEQHSGSLRSLPRQRRRRRSRQGQTGGHASPAVERIDAPDAPTEGTPDVDLAFETEASAVPPRHADPEQEDDAGALAESLQDVALEPEMAAQPVPDVTTSLLVDQKVTTNSHLASFRLGLNPPNDLVLAGALIEASATPLRFCMRSPWDQLTDVSTYGPSGSEEDDDPSIGWDFSGLGNPSAVRDFMTACDYCLSDCSDGSRSLGDESCGPSRECFHIELGDPTEGNHLGVPEDGDLPRPVPRADIPRELAVVPAPAGGYDPQLEQVREAQARLNEGTGALEPIRRDVGQAWVGQPLAGEIRHLPQGLQHRVANDVRIRPPPASSGVGQNLATAAMLIRAMPEPSTTEGRRIQGELKNLLEGAAARRAESTASRRQGYPSEPHAATSRFMREASVYTGRTRNTAPAAPGHLGNEHHRRDRRAHLDERVRRGYHPRRGGRYDSGEDRSPSPEPPGPQAFSRAIRRAPFPTRFRPPTTITKYSGETRPELWLADYRLACQLGGTDDDNLIIRNLPLFLSDTARAWLEHLPPGQISNWDDLVQAFAGNFQGTYVRPGNSWDLRSCRQPPGESLRDYIQRFSKQRTELPNITDSDVIGAFLADTTCRDLVSRLGRKTPTRASELMDIATPGAFSRAIRRAPFPTRFRPPTTITKYSGETRPELWLADYRLACQLGGTDDDNLIIRNLPLFLSDTARAWLEHLPPGQISNWDDLVQAFAGNFQGTYVRPGNSWDLRSCRQQPGESLRDYIRRFSKQRTELPNITDSDVIGAFLAGTTCRDLVSRLGRKTPTRASELMDIATKFASGQEAVEAIFRKDKQPQGRPSEEAPEASAPRGAKKKGKKKSQSKRDAADADLVAAAEYKNPRKPPGGANLFDKMLKEPCPYHQGPIKHTLEECVMLRRHFHRAGPPAEGGRARDDDKNEDHQAGEFPEVRDCFMIYGGHAANAPARHRKQERREVCSVKVAAPVYLDWSDKPITFDQADHPDHVPSPGKYPLVVDPVVGNVRLTKVLMDGGSCLNIIYAETLKLLRVDLSSVRAGVAPFHGIIPGKRVQPLGRLDLPVCFGTPSNFRREILTFEVVEFRGTYHAVLGRPCYAKFMAVPNYTYLKLKMPGPNGVITVGPTYKHAFECDVECVEYAEALAESEALIADLENLSKEVPDVKRHAGNFEPAETVKAVPLDPSGDTTKQIRIGSGLDPK

SEQ ID NO: 299809 - protein, 978 aa, Zea mays
  Clone ID: MRT4577_36495C.1.pep
MGSLQRPLRPGTVLRFGTLEFMSFDGSYDMTLLPPPRDYDNGGRQPARRRRNRRRLPRVVEEKYSGSLRSLPRQRRRRRSRQGQTGGRASSAVERIDAPNAPTEGTPDVDLAFETEESAVPPRHADLEQEDDAGALAESLQDVALEPGMTAQPVPGVTTSLLVDQKVTTNSHLASFRLGLNPPNDLVLAGALLEASATPLRFCVRSPWDRLTDVSTYGPSGSEEDDDPSIGWDFSGLGNPSAVRDFMTACDYCLSDCSDGSRSLGDESCGPSRECFHIELGDPTEGNHLGMPEDGDLPRPVPRADIPRELAVVPAPAGGYDPQLEQVREAQARLNEGTGALEPIRRDVGQAWVGQPLAGEIRHLPQGLQHRVANDVRIRPPPASSGVGQNLATAAMLIRAMPEPSTTEGRRIQGELKNLLEGAAARRAESTASRRQGYPSEPHAATSRFMREASVYTGRTRNTAPAAPGHLGNEHHRRDRRAHLDERISNWDDLVQAFAGNFQGTYVRPGNPWDLRSYRQQPGESLRDYIRRFSKQRTELPNITDSDVIGAFLAGTTCRDLVSKLGRKTPTRASELMDIATKFASGQEAVEAIFRKDKQPQGRPSEEAPEASAPRGAKKKGKKKSQSKRDAADADLVAAAEYKNPRKPPGGANLFDKMLKEPCPYHQGPVKHTLEECVMLRRHFHRAGPPAEGGRAHDDDKNEDHPAGGFPEVRDCFMIYGGHAANTSARHRKQERREVCSVKVAAPVYLDWSDKPITFDRADHPDHVPSPGKYPLVVDPVVGDVRLTKVLMDGGSCLNIIYAETLKLLRVDPSSVRAGAAPFHGIIPGKRVQPLGRLDLPVCFGTPSNFRRETLTFEVVGFRGTYHAVLGRPCYAKFMAVPNYTYLKLEMPGPNGVITVGPTYKHAFECDVECVEYAEALAESEALIADLENLSKEVPDVKRHAGNFEPAETVKAVPLDPSGDTTKQIRIGSGLDPK

SEQ ID NO: 299810 - protein, 69 aa, Zea mays
  Clone ID: MRT4577_36496C.1.pep
HASIKETRSHIQYLSSSPPTMACDVLHHARHNCTCYVFCDCFVLHPSHLLRLLYAPNLSTFSLPSTLSP

SEQ ID NO: 299811 - protein, 65 aa, Zea mays
  unsure (1)..(65): unsure at all Xaa locations
  Clone ID: MRT4577_36497C.1.pep
LLFLWRMLLWMRFMLMSLLLTWWCSASVCVQLVXWLWSTQSNKNTTPLHGFWRYNINVAVLIWWX

SEQ ID NO: 299812 - protein, 532 aa, Zea mays
  unsure (1)..(532): unsure at all Xaa locations
  Clone ID: MRT4577_36498C.1.pep
MAATLLLASATALLALAAAWLWXTSWXRLLWRPRAVAGMFRAQGVRGPPYSFLSGCNREMRRMKAEADDGLRLDVRDHNYLPRVMPHFLAWKQQYGEPFLYWMGPRPRVCLFDYESVRQVLFNKSGHFFKDDAHPTILAMMGKGLVLVEGTDWVRHRRVVNPAFAMDKLKMMTETMVSCAEPLIKRWEQLVAASRSSEDGGRGEVQVEFSKQFQDLTADVIAHTGFGSSYKEGKEVFHTQKQLLALAMATLLNVQLPGFKYLPTKNNRLKWALEKKMKTTLMAIIQLRVASNGRSSGYGNDLLGLMLEAWLTAERGGERDELSLTMDEIIDECKTFFFAGHETTSHLLTWTMFLLSVYPEWQQRLRDEVLRECGQANPTADTLNKFNEMTMVLLETLRLYGPVMLMLRKPTSDIRLGSLSIPKGNGIAIPVPFLHRDREVWGDNANDFDPLRFQNGVTNAAKTPQALLSFSIGPRACIGQNFAMLEAKSVMAMILKKFSFTLSSSYVHAPVDYITLQPKFGLPIVLRPLPDV

SEQ ID NO: 299813 - protein, 575 aa, Zea mays
  unsure (1)..(575): unsure at all Xaa locations
  Clone ID: MRT4577_36499C.1.pep
MPFGLRIAGATYQRCMNHVFGEHIGRTVDAYVDDIVVKTRKASDLLSDLEVTFRCLKAKGVKLNLEKCVFGVPRGMLLGFIVSERGMEANPKKIATITSMGPIKDLKGVQRVTGCLAALSRFISRLGERGLPLYRLLRKAECFTWTPKAEEALGNLKALLTNAPILVPPAAEEALLIYVAATTQVVSTAIVVERREEGHALPVQRPVYFISEVLSETKIRYPQVQKLLYAVILTRRKLRHYFESHPLVIDQVMKNSHCRDPKMEAYCDEVRRLEDKFYGLELNHIARRYNETADELAKIASGRTTVPPDVFSRDLHQPSVKTGDTPEPEKASAEPEAPSAQLEKAPGGYTXPVGRHRQILQVDRGPXPLNSIRSEQAVAFFTNIIHRFGVLNSIITDNGTQFTGRKFLDFYEDHHIRVDWAAVAHPMTNGQVERANDMILQGLKPRIYNDLNKFGKRWMKELPSVVWSLRTTPSRATGFTPFFLVYGAEAILPTDLEYGSPRTMAYADQSNQANREDSLDQLEEAWDMALLHSVRYQQSLRRYHARGVRSRDLQVGDLVLRLRQDARGRHKLTPP

SEQ ID NO: 299814 - protein, 232 aa, Zea mays
  Clone ID: MRT4577_3649C.1.pep
MPRPRSPRHALRPIRRAPRPSPLVGWDEEFVLLAAMVVEDTPVRESRRKRRASTSSVGDSAGSSTRKRRSRRQSPAKIPPVVFALDDKKSDTAADGKSEVKASKEEEKPVLVGDKEASGSGEKAVGAANMPCMDRLREELSCARTIWLKIPRNSQEKPLSSSWLVEVVRVATTAQVKMKPWKETSRNSKITTSSRRGLAATPSRLPMKATCIYVSFPHDYCKDLCGCLRHMM

SEQ ID NO: 299815 - protein, 68 aa, Zea mays
  Clone ID: MRT4577_364C.1.pep
REAGAKTIGSEPESFLKESEPCLTGPNSHSHGRSTQSQSRPSSCSTMSSDWLELSHMKPDHTTTSTTG

SEQ ID NO: 299816 - protein, 87 aa, Zea mays
  Clone ID: MRT4577_36500C.1.pep
GVARSRRSDRNVSRVVLVLVDPLVKARDVSIGDESYLPEYKYTAWVRVPLEDIYSPSIGGTEKIPCAHDTNCFDVVLRESDKLFGLA

SEQ ID NO: 299817 - protein, 539 aa, Zea mays
  Clone ID: MRT4577_36501C.1.pep
MAVDSPPAGGGIDDVFPAWWKNNIRARPIPSPANGGEGGATKAKQEAAPRRLSSESTAPAPQRGGTYVRPGNSCDLRSYRQQPGESLRDYIRRFSKQRTELPNITDSDVIGAFLAGTTCRDLVSKLGRKTPTRASELMDIATKFASGQEAVEAIFRKDKQPQGRPSEDAPEASTQRGAKKKGKKKSQAKHDAADADLVAAAEYKNPRKPPGGANLFDKMLKESCPYHQGPVKHTLEECVMLRRHFHRAGPPAEGGRARDDDKKEDHQAGEFPEVRDCFMIYGGQAANASARHRKQERREVCSVKVAAPVYLDWSNKPITFDQADHPDHVPSPGKYPLVVDPIIGDVRLTKVLMDGGSSLNIIYAETLGLLRVDLSSVQAGAAPFHGIIPGKRVQPLGQLDLPVCFGTPSNFRRETLTFEVVGFRGTYHAVLGRPCYAKFMAVPNYTYLKLKMPGPNGVITIGPTYKHAFECDVECVEYAEALAESEALIADLDSLSKEVPDVKRHAGNFEPAETVKAVPLDLSSDASKQIRIGSGLDPK

SEQ ID NO: 299818 - protein, 69 aa, Zea mays
  Clone ID: MRT4577_36502C.1.pep
IRTASTTSSYTSSHATYRLIFYLDNLLPSHITSYPKLIIHHITNMINDLHQPHHLSLTQPLLQHNPYIS

SEQ ID NO: 299819 - protein, 848 aa, Zea mays
  Clone ID: MRT4577_36503C.1.pep
MLAKDLLGITLVPETTVQSVPDVTSSPPVDQEVPTDSHLTPFGFSLDPPSDFALVDALVEASPNPLGYHMRSPLDRLTDVSTYGPSGSEEDDEPDFCWDFSGLGNPSAMRDSMTACDYCLSDCSDGSRSLGDEDCGPSRECFHVDLGGPSEGNHLGMPENGDLPRPVPRIDILRELAVVPVPAGGHDPQLEQIRGVQARLDEGAGTLEPIRRDVGQEWAGQPPAREVRHLPQGIQHRIADDVRVRPPPTSSGVGQNLAAATMLLRVMPEPSTTEGRRIQGELKNLLEDAAVRWAESSASRRQGYPSEHRAATSRFTRETSVHTGRTRNTAPAAPGRLGNEHHRHNRRAHLDERVRRGYHPRRGGRYDSGEDQSPSPEPPGPQAFSRAIRRAPFPTRFRTPTTITKYSGEMRPELWLADYRLACQLGGTDDDNLIIRNLPLFLSDIARAWLEHLPPGQISNWDDLPGESLRDYIRRFSKQRIELPNITDSDVIGTFLVGTTCHDLVSKLGRKTPTRASELMDIATKFASGQEAVEAIFRKDKQPQGRPPKDAPVASTQRGAKKKGKKKSQAKRDAADADLVAAAEYKNPRKPPEGANLFDKMLKEPCPYHQGPVKHTLEECAMLRRHFHKAGPPAEGGRARDDDKKEDHQAGEFPEVRDCFMIYGGQAANTSARHRKQERREVCSVKVAAPVYLDWSDKPITFDQADHPDRVPSPGKYPLIVDPVIGDVRLTKVLMDGGSSLNIIYAETLGLLHVDLSSLKMPGPNGVITIGPTYRHAFECDMECVEYAEALTESEALIADLESLSKEEPDVKRHAGNFEPAETVKSVPLDPDNDASKQIRIGSELDPK

SEQ ID NO: 299820 - protein, 218 aa, Zea mays
  Clone ID: MRT4577_36504C.1.pep
MAASTTRSPAAVDRHAVRLITRVSIAMAAVATLSLLYLLRHASIYCSPASHQPALTISLASFPRTSCDAASRRVVPPDHRLAKLRASPRWRRRAASLATSAFPPLRGLGILATPSRVLCLAAGAGHAVDAFRAAGTRDATGIDLVDFPPLVRRADPHHLPFSDGAFDLVFSDDPSATSGALFPSRLAREAERAVRRGGGIALAFDREIETAVVGTLFK

SEQ ID NO: 299821 - protein, 58 aa, Zea mays
  Clone ID: MRT4577_36505C.1.pep
RQIQDLWLCGKTSYHCARHVLIKIHVRVTVGYIQDVARSHSTPFFSYGIIVYFFPTRP

SEQ ID NO: 299822 - protein, 54 aa, Zea mays
  unsure (1)..(54): unsure at all Xaa locations
  Clone ID: MRT4577_36506C.1.pep
SFLSDVSGFPEIIKSISXKKKKKKKKKKKNYXKEKRKKKKKKKKKKTNKKKKKK

SEQ ID NO: 299823 - protein, 212 aa, Zea mays
  unsure (1)..(212): unsure at all Xaa locations
  Clone ID: MRT4577_36507C.1.pep
MMKAGERPNSKLLRGGRQDSRRFRLLAVVVGFSIVSLTFVLVSKPDAILFGLNGRLPAEQAPASIPIQQKVNTPAQKTSTDAVIGGDPKVVDDETYVKPKEMRGGEEEDHQVLSEPDPASGMAEPAANKDGDARKSTEETLGGERKDVEEEGXAEEEKHAKVTLPTVSNYTIHDAEDAENAKQEGSSLSTNVQXQQGSKPLCDFXNFRANVC

SEQ ID NO: 299824 - protein, 43 aa, Zea mays
  Clone ID: MRT4577_36508C.1.pep
KVHWIDTCGKELFEIREFETSDEGLSDDEGENGGFKKCECVIQ

SEQ ID NO: 299825 - protein, 124 aa, Zea mays
  Clone ID: MRT4577_36509C.1.pep
QRYSFICYCPPGCVQHLPKTCILQCTPGRSSLAWDPNPRGSPLNCVWKACGGSTYVAFISTVTGEAWSWRTSGALCRTARYEQMFKARNRRVPSSRPGRGPLPQQLLCAGGPAEVRSTRAFVDS

SEQ ID NO: 299826 - protein, 564 aa, Zea mays
  Clone ID: MRT4577_36510C.1.pep
MKIDDERPYQTHIFHDLASNGSPKLDCEAERQSNHKVEADKMVEQTNQSEVSFVKAEHLNGGKIRKTRIEDYSYDKDVVEIKLPDTDLSSDYGVHFVKDVCIDEGVLPDQKISSEKQVDQKVSINFDSSEYTNGDLREDISADSTKTAHELKSEIVVLPVLCDTHNNNTVEQNSSCKKQDLEDNNTTDVSTDSHDEGLNPKQLPFHEVAQDYQEVDSVIPESNENQDRLFTGDATHQVSSNDCYEAGIGIASEASNIIHNDLPEESAAADFPVVIPEEVAVTAALGMEGSNQVNHYNPFIAYGSLDETWEPNLSLATTVDAASIAPICPVEKTDSFSDLVNRPLEGFDPIELDEAIIEENRSDSVEESSSTLDVQASEQRDDQRESLTNNDVKTDAAHETGTAISLSTSNGEHSGVKGEKCQKHETDGRDTDDFNPRDVEPGTKVSEDTTDVKSSAHVQTESVVQQNGPDSAKVTTAQTVIRNPFESSFSGPSITSGPLTPSGHIPYSGNISLRSESSTTSTRSFAFPVLQNEWNSSPVKMAKADRRRQKEDRGWGYRILCCKF

SEQ ID NO: 299827 - protein, 70 aa, Zea mays
  Clone ID: MRT4577_36511C.1.pep
TRGRWSSRGWAAPRGWECTGEASSASCLPRCSHPWPRRAHPPSLISLFPSSTCPGCYACQPQPPASPHGP

SEQ ID NO: 299828 - protein, 86 aa, Zea mays; identical to SEQ ID NO: 257102
  Clone ID: MRT4577_36512C.1.pep

SEQ ID NO: 299829 - protein, 204 aa, Zea mays
  Clone ID: MRT4577_36513C.1.pep
TFTCSSTSTQHKPYSTNSTSSLVIMGLGDTMKSVLHSDTSSARRSSRVSDTNVDGSPNVTHNASALGTDTNRSSKLPSGTGIGTSGRPAAVSESQMERDRLKQSGQNAAGYGTDAAAAVGGDLSSTHSGARTGTGQTAGGLGNNREFNGNDIKVGPTVLTDPSSESGQPMGGSRVPQGTSNVASSGTGAQAGHLGATHVFGPQA

SEQ ID NO: 299830 - protein, 60 aa, Zea mays
  Clone ID: MRT4577_36514C.1.pep
GMDAPWLAPPHRGKLSGLYEGPVPRMSDTVESHEASPHASVVSAIGFLVRHLPKFCQSST

SEQ ID NO: 299831 - protein, 86 aa, Zea mays; identical to SEQ ID NO: 257102
  Clone ID: MRT4577_36515C.1.pep

SEQ ID NO: 299832 - protein, 86 aa, Zea mays; identical to SEQ ID NO: 257102
  Clone ID: MRT4577_36516C.1.pep

SEQ ID NO: 299833 - protein, 269 aa, Zea mays
  Clone ID: MRT4577_36517C.1.pep
MHRALPPSEPPDGERPRCFRLAAVGGAQLRGGWHLSAIARLQGFSSGSPAASPHQWLPKTVTTSSMVGRSKSGCSLCPALSFKDLHHPCWGGGRGEPGTAFAWAGVPLLPPASGGGNHPPALRRRRPPAMPGKANCCCPARVQHSVLCPGDGGYRTRGSHNTSYAARAVLVFWDGPILVFVARTGVRTCWCDLGQPALAGVVLVGRWTPPSVLRWWQLEKAFLPMRPLVPPADRLWLFGFNIWFSSSARGREREPSSGSVRPRTIAAAA

SEQ ID NO: 299834 - protein, 87 aa, Zea mays
  Clone ID: MRT4577_36518C.1.pep
MRTIGMMDPLFLVCFDQEDRFAPCGVEQEAPKLGRAPRAPSSPWMPFSMLFAAISTKVPRSDMELVIRYYEEFKVVGVLFLSFEVSV

SEQ ID NO: 299835 - protein, 104 aa, Zea mays
  Clone ID: MRT4577_36519C.1.pep
IITIMSPPIFKVLTLIISVFAILQISTAGDPDILTDFIVPPNTIPNGNFFTFTGFRAIFSPNNIVSAFKVLKATKVEFPALEDKVSHMQSLSSQVAASTHHTHT

SEQ ID NO: 299836 - protein, 159 aa, Zea mays
  Clone ID: MRT4577_3651C.1.pep
FNTLVTQTTKKTCLDIYITKTMSPSMVKLFQQQFQKDFSLFLRLRYEELVSGGQMVLTFIGRKHENVFTGESNHLYGLLAQSLKSLVDEGLVEKEKLESFYLPMYSPSVGEVEAILKQVGLFNMNHVKVFQTNWDPYDDLESDVVHNSIRSGENVAKCL

SEQ ID NO: 299837 - protein, 81 aa, Zea mays
  unsure (1)..(81): unsure at all Xaa locations
  Clone ID: MRT4577_36520C.1.pep
PRVRSSTSQIPYXSALAILLMSAHFRLLVKILGSCSIMYVEACCSHNGLLSYVLIPVXCLRVERIVCLHEHEALHVLFEHP

SEQ ID NO: 299838 - protein, 54 aa, Zea mays
  Clone ID: MRT4577_36521C.1.pep
IWQGLCTEPSSLYAGPSCSGPRFFLMYSASPLITFPPFGWTQVTCLSSEQTLLF

SEQ ID NO: 299839 - protein, 166 aa, Zea mays
  unsure (1)..(166): unsure at all Xaa locations
  Clone ID: MRT4577_36522C.1.pep
MNVEKLKKMAGAVRTGGKGSMRRKKKAVHKTTTTDDKRLQSTLKRIGVNTIPGIEEVNIFKDDVVIQFVNPKVQASIGANTWVVSGTPQTKKLQDLLPSIINQLGPXDNLDNLRRLAEQFQKQAPGASGAEAGASAGAAQDDDDDVPELVPGETFEEAAEEKKESS

SEQ ID NO: 299840 - protein, 165 aa, Zea mays
  Clone ID: MRT4577_36523C.1.pep
MNVEKLKKMAGAVRTGGKGSMRRKKKAVHKTTTTDDKRLQSTLKRIGVNTIPGIEEVNIFKDDVVIQFVNPKVQASIGANTWVVSGTPQTKKLQDLLPSIINQLGPDNLDNLRRLAEQFQKQAPGASGAEAGASAGAAQDDDDDVPELVPGETFEEAAEEKKESS

SEQ ID NO: 299841 - protein, 79 aa, Zea mays
  Clone ID: MRT4577_36524C.1.pep
RCEETVASRTHMHGLKSSETTTLFFLSCIFFVVRAVGWVRVGLHQGLSRAVPKHGVRQARVGWWLVEDSNCPEYERGLD

SEQ ID NO: 299842 - protein, 103 aa, Zea mays
  Clone ID: MRT4577_36525C.1.pep
RWVQSVVREEWTAEVFDVELVRLGASAEEEMVALLQVAMACVATVPDARLDAPDVVRMIEEIGGGRTATATATATEEESEGVRGTSEEEPSRSGGTPPAAPTP

SEQ ID NO: 299843 - protein, 134 aa, Zea mays
  Clone ID: MRT4577_36526C.1.pep
GGLRRFYFAEGPASSSRAGADGYKCVLNSKASEDAQANLARWEPAHGRFGFRHPYGQYARVGAAMRACAYCVEALCSCAGAEAQAPPYVKRILRDTCATVAVRCARVLGEAWRSVATMSTSCSRALDLAAADMN

SEQ ID NO: 299844 - protein, 236 aa, Zea mays
  Clone ID: MRT4577_36527C.1.pep
MMSGGGYSALDDPKASGSVPAATGPDPQTIKFTESNLQTFPPSEAKGKISGAYRPPTDSDDTFSSKVGGGGGGRGSDGGSDDAAQGGWFRMFSVAAYKPYFDVDTSDVVERIWESVFPFRGNFTEKTSDKPDLYGPFWTCTTLIFVAASIATFVTYLSHKWHKKEWTYDINLVTWSAGLFYGYVTFVPLGLYVILKYFSAPAGLVQLWCLYGYSLFIFIPASLLSIVPIEIFRWVM

SEQ ID NO: 299845 - protein, 43 aa, Zea mays
  Clone ID: MRT4577_36528C.1.pep
NLAFPRCSRNICSYWERSTLSAVLVAPPRIKRNPSRSFGMAEG

SEQ ID NO: 299846 - protein, 66 aa, Zea mays
  Clone ID: MRT4577_36529C.1.pep
NLYLWGSKMFPINDNSFPFLKDVIVLLLMWIVVIVIKNAKFIYLNSSTTLKKIQISMTFFSFQTEA

SEQ ID NO: 299847 - protein, 214 aa, Zea mays
  Clone ID: MRT4577_3652C.1.pep
KKRYPEWLHAHPDGSVVYASFGSVTKLAKRQMQEIAGGLRQCGRPYLLVVRRDGVDDDEGGIHGLENDTEMQGMVVDWCDQLEVLSHPAVGCFVSHCGWNSATEAMASGVPIVGVPNMFDQPTNMYLVEEEWGVGVRGERDADGVLTGAELARCIELVMGDGAGAVAIRERAKALQETAQAAASAAGGPAETNLCHLVKTMSKYYQGNFPAASR

SEQ ID NO: 299848 - protein, 114 aa, Zea mays
  unsure (1)..(114): unsure at all Xaa locations
  Clone ID: MRT4577_36530C.1.pep
DAVAVRLIDRRRLNTDRRRRRPEELRTALHNCGLFLATDHGVYVSLMNAVTSEAGXAVLITDSDNDECDDRIYDDGQTSEDDRLAFTLGVXQMICXCCNNMDVTTPKYSKDRYE

SEQ ID NO: 299849 - protein, 52 aa, Zea mays
  Clone ID: MRT4577_36531C.1.pep
RSSVLTAQWRTHTPGSRRGLTYYGYGPTPCWLDAVISMACGRRHEHMPGSRL

SEQ ID NO: 299850 - protein, 88 aa, Zea mays
  Clone ID: MRT4577_36532C.1.pep
APWDPPQDPSPPQGEGEGGAAQVPTCPLCGPWAYFLGVWCHVLVLLPCRPMFPPTCPVYSVTKTGPPPLPKSLLMLLVNGINPAPPFG

SEQ ID NO: 299851 - protein, 32 aa, Zea mays
  Clone ID: MRT4577_36534C.1.pep
LGIHDSLSFLATIVIACHAHGTRNRIVGGRGH

SEQ ID NO: 299852 - protein, 94 aa, Zea mays
  Clone ID: MRT4577_36535C.1.pep
KAPQKKFWGKIYRPPGGGSNHPGLGENKIILHRGGKRKPPPSQKNPPGGQNLTDPQIVPTRGRAQPSKFMKRANTNGAGGPKAQRPPPRKKGKT

SEQ ID NO: 299853 - protein, 87 aa, Zea mays
  Clone ID: MRT4577_36536C.1.pep
ESSEQASTRSNDSLGASRSRRASGDSLLRRATRSLEAGAAVPAPARRRPAGERGGVTPVRPSPVRPIGSCRRVPGLCSDLAYLICTP

SEQ ID NO: 299854 - protein, 34 aa, Zea mays
  Clone ID: MRT4577_36537C.1.pep
KEHVIVARPRRTPITRPPGRTPWRSWPAGTDRVT

SEQ ID NO: 299855 - protein, 143 aa, Zea mays
  unsure (1)..(143): unsure at all Xaa locations
  Clone ID: MRT4577_36538C.1.pep
AXXTAAXPTQPHRXRXXRGKPXKGXGRSRGRERAQRSXAGQAASSTPADRXPDREKRKRRNXXXXGAXXXPTXGRXXPNGAFXXPAGAGNAGGGTNAKDKRGNDTTAEAXXNTHXANDRTXAQGXQXDPTXRAEEPDKTRATH

SEQ ID NO: 299856 - protein, 964 aa, Zea mays
  unsure (1)..(964): unsure at all Xaa locations
  Clone ID: MRT4577_36539C.1.pep
MSELSLPEPVTKLLQTFASVFDTPVSLPPSRSCDHSIPLVDGARPMNIRPYRISPALKDEVESQITEMLNTGLIXHSSSSFSSPVLLVKKKDNSWRFCVDYRHLNALTVKSKYPVPIIDELLDELFGAAWFSILDLRAGFHQILLKAGEEHKTAFQTHVGHYEFRVMPFGLTGAPGTFQKATNHTLAPLLRKCVLVFFDDILVYSQTFEDHIQHLTQVFQLLDKEQWKVKLSKCSFAQNKVAYLGHVVSPEGVATDPAKIQAITDWPTPKCLKDLRSFLGLAGYYRKFIKHFGIICQPLTALLKKGVLFIWTNDHQSAFQTLKQALGSALVLSLPDFSSPFTIETDASDIGVGAVLMQKGHPLTFLSKALGPKLRGLSTYEKEYLAVIVAVQQWRAYLQHGEFVILTDHKSLSQLNEQRLHTPWQHKVFTKLLGLQYKIHYRQGTDNRVADALSRCCQSDLHAMSVXHPQWLQDVQQSYLDDAESQSMIAKLAINAKAVPNFVFQYGLLRYKGRIWIGQDPSLQSRIVSALHCAAVGGHSGVPVIYCRVKSLFAWKRLKSFVQTFVTECQTCLQAKPDRAAYPGKLQPLSVPVVAWDIISMDFVEGLPRSGNADCILVIVDKFTKYGHFIPLSHPYTALSVAQCFLNEVYRLHGFPSAIISDRDPVFTSQFWQHLFCLSATELKLSSSYHPQTDGQTKRVNQCLETFLRCFVSACPTKWKAWIPTAEYWYNTSPHSALGRSPFEVLYGRKPRSLGLSLDIAIPATLSEWIQERTAMQALVRQHLIRAQDRMKKQADKNRSERSFVVGDWVYLKLQPYVQSSVLPRAHQKLGFKYFGPYQVLARVGAVAYRLQLSDSSRIHPVIHVSQLKFAAGFKGEASTALPVSLPEFRVPEQILQTRGVTKGNRLVQQVLVAWSGLPHDLATWEDKEALRQCFPRAPAWGQADFQGIGSVTTTGMQGDEQNV

SEQ ID NO: 299857 - protein, 75 aa, Zea mays
  unsure (1)..(75): unsure at all Xaa locations
  Clone ID: MRT4577_36540C.1.pep
PASATDCRSPSLTFKRXNGGRIMHGRGHVMYMRCFFCALCCPXIWFFLRLLVWFIVEHAAVRAVLEVCVRVGCVF

SEQ ID NO: 299858 - protein, 216 aa, Zea mays
  Clone ID: MRT4577_36541C.1.pep
ENAIKNINGKVVAKRPVAVDWAVPKKVYTVAAKVDAKDNEPENIPDNVSDDDTSDDNLVGEASFELDQETSNRPSEDDFETEADISKKVLENLIKSSEKSEPSGIEGSDIGTDTETEDDTSEKEKSDSPVADKLVESKRVTDAEISNPASKPKKNDTGLDRTIFISNLPFDISNEEVTARFSVFGKVESFFPVLHKLTKRPRGTGFMKFSTTEAAD

SEQ ID NO: 299859 - protein, 53 aa, Zea mays
  Clone ID: MRT4577_36542C.1.pep
ISHSSAQNKNPAFMHINIYLFINILECIIYERSNSLTKKNLLVIFKEIISKVG

SEQ ID NO: 299860 - protein, 156 aa, Zea mays
  unsure (1)..(156): unsure at all Xaa locations
  Clone ID: MRT4577_36543C.1.pep
PLSRLSHPVQQCCYQTDSTPVLATCLQQDPDSTXAARPVPYMNMXMASGDIATRAGEDSDQIARHTCRXPANISTTWFLEACRCTGLEINDQQIPDIAQGGHGLFHNQPQETGAVDXGHVLGNATDDTSELIAVCHVLSTKLSARLTDVHKDGTCA

SEQ ID NO: 299861 - protein, 81 aa, Zea mays
  Clone ID: MRT4577_36544C.1.pep
DDGSRIYAQAKLSQILQSTLNSVAFRDFFPAARAVLFDERRAAAGETPSSLEECILHRRGVGDFFKGGCGATCRSSPARRW

SEQ ID NO: 299862 - protein, 62 aa, Zea mays
  Clone ID: MRT4577_36545C.1.pep
VLQESPKPDSMRRGSNERVGTYIRGAGQQKAVELHLRRVLRHTEETHWEPAKVWKTERPREG

SEQ ID NO: 299863 - protein, 84 aa, Zea mays
  unsure (1)..(84): unsure at all Xaa locations
  Clone ID: MRT4577_36546C.1.pep
SATPALEETKKLESPELRWAFVRKIYVILAVQLAMTAAVSAFVVKVPAVSNFFSSTNAXGAQLYIFLIFLAFPGRPRGFHCRPI

SEQ ID NO: 299864 - protein, 73 aa, Zea mays
  Clone ID: MRT4577_36547C.1.pep
ISRHPFPLSCLVVSSISFLIGVFCNSCVGASTCVLPGFSPHPVCSSQVRASIGLLPGVIESARVCAFCLPCLW

SEQ ID NO: 299865 - protein, 369 aa, Zea mays
  Clone ID: MRT4577_36548C.1.pep
MHTMALSTQDLLEAHVELWHQSLCYAKSLALAVALDLRIPDAIHHHGGSATLPQILAETAAHPSKLRALRRLMRVLTVSGTFSVEQQPPAGGDDSTVDAPDEAVYRLTAASRFLVSDEVSSATLAPFVSLALHPIAVSPHTMGICAWFRQEQREPSPYGLAFQQTFPTIWEHADDVNALLNKGMVADSRFLMPIMLRECGEVFRGIESLVDVGGGHGGATAAIAAAFPHLKCSVLDLPHVVAGAPSDVNVQFVAGNMFQSIPPATAVFLKTTLHDWGDDECVKILKNCRQAISPRDAGGKVIILDMVVGYGQPNIKHLETQVMFDLYIMTVNGAERDEQEWKKIFIEAGFKDYKILPILGALSVIEVYP

SEQ ID NO: 299866 - protein, 63 aa, Zea mays
  Clone ID: MRT4577_36549C.1.pep
KKTVLTQALPGGFPGLNLCCSCSQLNGQNKSPKSIYMAFKHKTVKKKGGGSFVPCIIDRMVTF

SEQ ID NO: 299867 - protein, 78 aa, Zea mays
  unsure (1)..(78): unsure at all Xaa locations
  Clone ID: MRT4577_3654C.1.pep
MADHHRGATGGGGGYSDLQRGGGMHGEAQEQQKQGAMMTALKAGTAATFGGSMLMLAGLILARTEIALXTVATPGLVI

SEQ ID NO: 299868 - protein, 59 aa, Zea mays
  Clone ID: MRT4577_36550C.1.pep
TGGLVQMANCPIPPPRTESPLPAGYVWVFVVPFANLCCMLSLDSPCIKRPLNKQPSFRP

SEQ ID NO: 299869 - protein, 54 aa, Zea mays
  Clone ID: MRT4577_36551C.1.pep
CYVQQHGLMLFNVIGYVNVGALMVNIVLMPFLTCPVMIYVVVTLIAGFNTLIAI

SEQ ID NO: 299870 - protein, 72 aa, Zea mays
  Clone ID: MRT4577_36552C.1.pep
NFSTPFPQQTKPKSASSQENNPNNITTYCIHIKPTLNFYPLPHHSTTPKLPNTNTPKCPHIRQSTHSTNLQT

SEQ ID NO: 299871 - protein, 60 aa, Zea mays
  Clone ID: MRT4577_36553C.1.pep
NERSISLNNVYNIYPKYSVYVVDKYYTRIINTNLHNNLDHQNHWQIWALPYCIGHENNRL

SEQ ID NO: 299872 - protein, 55 aa, Zea mays
  Clone ID: MRT4577_36554C.1.pep
MQGDPGYGYGGYGAGYRYGYGGGYGGGYDMAGYGNGAGRSLLHQRPVSRGGGACL

SEQ ID NO: 299873 - protein, 35 aa, Zea mays
  Clone ID: MRT4577_36555C.1.pep
QTKMKNNCANCCTCIVVGQSPIVTRLNLEACVDPR

SEQ ID NO: 299874 - protein, 51 aa, Zea mays
  Clone ID: MRT4577_36556C.1.pep
GGPPQKTKQGGPQRGRKLGPIGGAPPEQKEMRAHYKRTNKNRLPVPVKMLI

SEQ ID NO: 299875 - protein, 133 aa, Zea mays
  Clone ID: MRT4577_36557C.1.pep
MAARAALLQLAVSLVILAAVASASATNCPPPPLPPAPKPPTPGGHHGHGSCPRNALKLGVCANVLGLVKAKVGSPPYEPCCSLLDGLVDLEAAVCLCTAVKANILGINLNLPIDLSLILNNCGKNCPNDFHCA

SEQ ID NO: 299876 - protein, 47 aa, Zea mays
  Clone ID: MRT4577_36558C.1.pep
ESLSKKLEQRPMRNQPLSAVLDYSLIQSFQSVFSVFANNGSVHFLII

SEQ ID NO: 299877 - protein, 129 aa, Zea mays
  Clone ID: MRT4577_36559C.1.pep
MPGEFDSDVEASDSEDAEQKQSEFMKISNYANIVLLVFKVYATIMATLGFQVLVQAVEQLVENKPGEKMTSEQLIWLYSIMLSATAVKLALWLYCKSSGNSIVRAYAKDHYFDVITNVVGLVAAVLGDK

SEQ ID NO: 299878 - protein, 64 aa, Zea mays
  Clone ID: MRT4577_3655C.1.pep
GKELSWVGNTPSPPYGGVGCVKGTARMKGNESVILSTLNKTNMINATKFILPPQKKFLKTPTNK

SEQ ID NO: 299879 - protein, 199 aa, Zea mays
  unsure (1)..(199): unsure at all Xaa locations
  Clone ID: MRT4577_36560C.1.pep
MDNGYLTSWNLATTEDAAPIAHPILAGLHICSTPHVHMRIREILLMAHRNLVSHALLDPFXYFLQKKDRPPLTFSCGGEFYLLAMRVITANHGSYLLGLYHLSPTYATAIQNTIPAITFGMYAALMFXHVDLTRMHGLAKVARTPLSILRCTDITLYYGLSLHHHSDDLPVKPPPVTLSSAQDSPILNCTLGCVFILSH

SEQ ID NO: 299880 - protein, 103 aa, Zea mays
  unsure (1)..(103): unsure at all Xaa locations
  Clone ID: MRT4577_36561C.1.pep
MAPKKNKLVAVVQQRDXEXNGGTTQNNLVAHHPFVSWWHNKEEGSNGRSXQQLSMNGGWCDPCCSASLTAAVVVTTSMTTTIVSSVVAAAFAAFFSFFVAMVG

SEQ ID NO: 299881 - protein, 456 aa, Zea mays
  unsure (1)..(456): unsure at all Xaa locations
  Clone ID: MRT4577_36562C.1.pep
GSSKRSKLPKPAGKRKPKLFPVDRDTHTHPRGRRNRQPDSSRRPANCPILWRETIGGPRCWRPAAAVPRLCGAVTXRSLRSSFLSRLPDKVRAGLDPEHLADVDLSRAKGMSRGVRQYYEKQLATLKTFEQVEARCMPGEFDSDVEASDSEDAEQKQSEFAMKISNYANIVLLVFKVYATIRTGSMAIAASTLDSLLDFMAGGILWFTHLSMKRVNIYKYPIGKLRVQPVGIIVFAAIMATLGFQVLVQAVEQLVENKPGEKMTSEQLIWLYSIMLSATAVKLALWLYCKSSGNSIVRAYAKDHYFDVITNVVGLVAAVLGDKFLWWIDPAGAVILAVYTIVNWSKTVLENAATLVGQCAPPDMLQLLTYLAMKHDTRVRRVDTVRAYSFGALYFVEVDIELAEDMRLREAHAIGESLQERIEKLPQVERAFVHIDFESTHKPEHKVRSRLPSTDP

SEQ ID NO: 299882 - protein, 462 aa, Zea mays
  unsure (1)..(462): unsure at all Xaa locations
  Clone ID: MRT4577_36563C.1.pep
GRDTTHPRGRRNRQPDSSRRPANCPILWRETIGGPRCWRPAAAVPRLCGAVTRRGRCAAASCRGCPTRCAPGSTRSTSPTSTSPAPKACPEVTDLRGLNLRSLVRSPPLLPLRLSRPRAGVRQYYEKQLATLKTFEQVEARCMPGEFDSDVEASDSEDAEQKQSEFAMKISNYANIVLLVFKVYATIRTGSMAIAASTLDSLLDFMAGGILWFTHLSMKRVNIYKYPIGKLRVQPVGIIVFAAIMATLGFQVLVQAVEQLVENKPGEKMTSEQLIWLYSIMLSATAVKLALWLYCKSSGNSIVRAYAKDHYFDVITNVVGLVAAVLGDKFLWWIDPXXXVILAVYTIVNWSKPVLENAATLVGQCAPPDMLQLLTSLPMKHXXRVRRVAPVRASSFGALYFVEVDIELAEDMRLREAHAIGESLQERIEKLPQVERAFVHIDFESTHKPEPKVRSRLPSTDP

SEQ ID NO: 299883 - protein, 124 aa, Zea mays
  Clone ID: MRT4577_36564C.1.pep
MPRALQRSGSNSLASLLRAEPADDVLPDWKPTERDGRRRLRRRRSCLRLPLGAAGGCRVCACDEMDSSAAAPRRRTPGNDEDEDGAAVQCFAWKKGDAAAARGPSSGAGGAGAVVVTEAAADRT

SEQ ID NO: 299884 - protein, 117 aa, Zea mays
  Clone ID: MRT4577_36565C.1.pep
SACSESYTITFKSVRIDDYSPSSGCVIGQANITLTLDTPVPDNVYYSSLPQCHFTPDYYEVSDIRVGEHQITPLQYDAQTGTFFCLTPAWNYVESTATLTLVDPYEQSSISNPVSFS

SEQ ID NO: 299885 - protein, 128 aa, Zea mays
  Clone ID: MRT4577_36566C.1.pep
RQQRRRPPAHEALARRQRRKASPGYGHALDPGPRRARRASAAARKVEAQRRLTTVSSWVCSSSWRWPSRCRVSVDHANLVTADVQRASSGDRPAVGVDPQVARGRRKARVPQRCHHEGPGCTPRAQSV

SEQ ID NO: 299886 - protein, 156 aa, Zea mays
  unsure (1)..(156): unsure at all Xaa locations
  Clone ID: MRT4577_36567C.1.pep
SSPVKQLEDGRALAACRRRATWCSAVEVGRRVVEFVAGDRSHPRSAEIYAKLEEVNSIARARGHVPHTELVLHDLDDAAKERALAVHSEKLALAXYGSLDTPPRTGIKIVKNLRACADCHAVLKLVSAHASGKIVFRDRNRFHHFVDGSCSCGDYW

SEQ ID NO: 299887 - protein, 103 aa, Zea mays
  unsure (1)..(103): unsure at all Xaa locations
  Clone ID: MRT4577_36568C.1.pep
SPGVVLDLVPPLTRLXPLIFRRTWVDSLGEMALTNLSTGYIVVLYFQPCCWFCAGPYXRMRYPYSAVEEPKPMSSGLRNKSLSCQPCDPXVDPLPGTELKDIS

SEQ ID NO: 299888 - protein, 60 aa, Zea mays
  unsure (1)..(60): unsure at all Xaa locations
  Clone ID: MRT4577_36569C.1.pep
TDGMPSSSXLTTTNPSSLILGSNSPFQTSNTRTPMIPFHSLNTSYLNQSLLPNFSPFYQL

SEQ ID NO: 299889 - protein, 79 aa, Zea mays
  unsure (1)..(79): unsure at all Xaa locations
  Clone ID: MRT4577_3656C.1.pep
QPVANPVANLQQLRPFNPRTLSNYGAHQQQRQQXLKPLGVANPLVAPFQQQHPVLPDNQFSLMNPAPPRQQPIVEGAIF

SEQ ID NO: 299890 - protein, 117 aa, Zea mays
  unsure (1)..(117): unsure at all Xaa locations
  Clone ID: MRT4577_36570C.1.pep
HESSPATYGGDHASLSADPETFTRNXRELEVIHSRWAMLGALGCVFPDIHDKNGVKFGXAAWFKAGAQMFSAGXLNYLTNPNLVHAQSILVIWACQVMLMGFVEGYRDGGGXLGEGL

SEQ ID NO: 299891 - protein, 93 aa, Zea mays
  Clone ID: MRT4577_36571C.1.pep
RHYFGGSASERHHDLRVDIVENIQEDYGMFVWPCSVILAEYVWQHRSRFSASSVVELGAGTLLPGLVAAKVGADVSLTDIVLNIYLLNIFRSL

SEQ ID NO: 299892 - protein, 57 aa, Zea mays
  Clone ID: MRT4577_36572C.1.pep
FGSSRTTPRGMASRPPVPLGGTTAVAWAALARSWSRTVCPLPSSSYPTFSTFYFIPF

SEQ ID NO: 299893 - protein, 228 aa, Zea mays
  Clone ID: MRT4577_36573C.1.pep
MSTSDAAATVIPIDDVPRQHGKAPAVDTVTAAPPPLAAAAPPAATTAPRKTRVPFFRRADRGSRCVALLDLVLRVAAFGPALAAAIATGTSDETLSVFTQFFQFHARFDDFPALLFFMVANAIAAGYLVLSLPFSAVVVLRPQAIGLRHLLLICDLIIAALLTAAAAAAAAIVDLAHSGNQRANWVPICMQFHGFCQRTSGAVVASFLAVLVLLFLVILAAFTIRKRC

SEQ ID NO: 299894 - protein, 59 aa, Zea mays
  Clone ID: MRT4577_36574C.1.pep
LPKQVVLFFGSPVILCTASNHLVLNFVKFLFKWKLRSSFFFKTPKQKKKKKKKKKKRAA

SEQ ID NO: 299895 - protein, 68 aa, Zea mays
  Clone ID: MRT4577_36575C.1.pep
TFGSICSIGVSMTNHWYDQSNNAILSISCSVSASTNQRHQISVTAHRPEQVECAGQYGSVTEYHVVTL

SEQ ID NO: 299896 - protein, 75 aa, Zea mays
  Clone ID: MRT4577_36576C.1.pep
WRCWWGSSSRSAFQGWSSASVSGSPTVCSPLASRFWLTFLHSGCRYYGSDWWRCVSHAWKPCSGSVCCPHADVMF

SEQ ID NO: 299897 - protein, 66 aa, Zea mays
  Clone ID: MRT4577_36577C.1.pep
WSNYWHPHCLTGLRHPGGQEHQPGRWGQWDVPSTTGAKEDFASDIGATTMATKRRAAMTKTTLARA

SEQ ID NO: 299898 - protein, 79 aa, Zea mays
  Clone ID: MRT4577_36579C.1.pep
LFDMWGNLFSGKLLIFFSYSRWKYAFVHLARFYSSIPARHGLNIAMVFHLSPVIIKRCMLFPENKLARDFFYIQCNLFI

SEQ ID NO: 299899 - protein, 55 aa, Zea mays
  Clone ID: MRT4577_3657C.1.pep
GLYKTHWSCACYKRLLWNRNLPHTMLTYVNSMIGRIYLDNLKNPSPRCIFDLRLT

SEQ ID NO: 299900 - protein, 54 aa, Zea mays
  Clone ID: MRT4577_36580C.1.pep
SDVCGFPEIRKYISKKKKKKKKKKKKKKKKKKKKKKKKKKKKKKKKKKKKKKNT

SEQ ID NO: 299901 - protein, 95 aa, Zea mays
  Clone ID: MRT4577_36581C.1.pep
KTHATTRRKLHIEAASTTHASGGVATLCTRPPNATHIPLDRTPGMHILKTNPYMQYCIMEHTLSSLITRQSIMLNPLVDIPHHTMPKMTPQMMTP

SEQ ID NO: 299902 - protein, 101 aa, Zea mays
  Clone ID: MRT4577_36582C.1.pep
KTGQPKITWVPGGGGFRNRANQWGNNIWGDQKKGGGVPNGAGQGGQTRRPGLGKPQNFSPNWAGGGPQVFPGGFTHFQGPEGPPFFFPRGGKETGFLGTPP

SEQ ID NO: 299903 - protein, 604 aa, Zea mays
  unsure (1)..(604): unsure at all Xaa locations
  Clone ID: MRT4577_36583C.1.pep
MVHWVSDSDGSDNFEWDSDGNGEQTVSFNAAGAGSSALAATNTDAPGPSTRVANGNGKAGRSASLVQKYVDMGFAEEIVRKAMKDNGDNGADSLVELLLTYXELGNDLKVDNGFASGCAPQTVDDSDDDDILENWDDEDAGGGRSTGVANSIDDSDDEDFLHEMSRKDEKVDSLVKMGFPEDEAALAITRCGPDASISVLVDSIYASQTAGDGYCGNLSDYEDNSYGGRSTGNKKKRKRYGGQAQGSRGPLDGSCDEPMPLPHPMVGFNLPDQWSRRVDRSLPAQAIGPPYFYYENVALAPKGVWTTISRFLYDIQPEFVDSKYFCAAARKRGYIHNLPLENRSPLLPIPPKTISEAFPRTKRWWPSWDPRRQFNCLQTCVSSAKLLERIRVALTNSSDPPPPRVQKYVLEECRKWNLAWVGLNKVAPLEPDEMEFLLGFPKDHTRGISRTERYRSLGNSFQVDTVAYHLSVLKDLFPQGMNVLSLFSGIGGAEVALHRLGIRMNTVISVEKSEVNRTILKSWWDQTQTGTLIEITDVQTLSSERIEAYIRRIGGFDLVIGGSPCNNLTGSNRHHRDGLEGEHSALFHHYFRILHAVKSIMERL

SEQ ID NO: 299904 - protein, 119 aa, Zea mays
  Clone ID: MRT4577_36584C.1.pep
HFDGYQAHRAHSRVVSRQQVDARCRRRVVQSVCRWWCSGRRRCARRYGSVPQSRRSDVSPCSGVHQASLWRRDRSSPWQRSGDDTGFELGDPGSTLRIPDVKVGDRGGKRGKKKNELAQ

SEQ ID NO: 299905 - protein, 186 aa, Zea mays
  Clone ID: MRT4577_36585C.1.pep
MTTDGQLREWVSDKLMSLLGYSKSVVVQYVIRLAKECSSPGDLVGKLVEFGFSSSAETRTFASDVYAKVPRRASGISNYQKQEREAAKLVQKQSTYKLLVNEDDNTDNQTLASQKTSTNPSSKSRKHFRRKADQDSDGDEVVATDSGRNVRRRTEEEDEEGGIGSSDEEKEMIRDQQEKAHLERNM

SEQ ID NO: 299906 - protein, 39 aa, Zea mays
  Clone ID: MRT4577_36586C.1.pep
PSEGDSVTVGITDHAQDHLGDVVYVELPEAGICVSHGKN

SEQ ID NO: 299907 - protein, 42 aa, Zea mays
  Clone ID: MRT4577_36587C.1.pep
ILGRGRRLCSKSIAKAKSLKPKTPCLERTYFIYLERSSSSTK

SEQ ID NO: 299908 - protein, 90 aa, Zea mays
  Clone ID: MRT4577_36588C.1.pep
PRRLNGAPSPGCLPLILGRQPHRCACGPGLAPTLTQLVQTGKTSSASWKGHSRHGRVDRNLPEEASLHWTTDHRGQPSGLHDTARKCCRC

SEQ ID NO: 299909 - protein, 80 aa, Zea mays
  unsure (1)..(80): unsure at all Xaa locations
  Clone ID: MRT4577_36589C.1.pep
TRSTCXGAXGXXRGDFGXXPHCHRXQKKRDTKAQECPRLMTNDGETQAILKASWGLVMMTIAELPSSQGREHRGNKTKEP

SEQ ID NO: 299910 - protein, 91 aa, Zea mays
  unsure (1)..(91): unsure at all Xaa locations
  Clone ID: MRT4577_3658C.1.pep
GRAWFPPGSEGEFFLAFFNLGPLGGKMAVXISALGRVFGKTLLGKTPGGSPEVWGGENFGPVKEGFSGGVPWQGPRGFEILCWDSRSGPVV

SEQ ID NO: 299911 - protein, 49 aa, Zea mays
  Clone ID: MRT4577_36590C.1.pep
HQKQYDHGNVFLLKLAQKFIPHNFLDNKSLCQSNNLLHVFRYKCYVGGG

SEQ ID NO: 299912 - protein, 69 aa, Zea mays
  unsure (1)..(69): unsure at all Xaa locations
  Clone ID: MRT4577_36591C.1.pep
QATGENAVRAPAEAKLKVAINGFGRIGRNFLRCWHGREDSPIDVVAVNTAXAXQNASHSXQYDSMLGPS

SEQ ID NO: 299913 - protein, 193 aa, Zea mays
  Clone ID: MRT4577_36592C.1.pep
HVLISGLSYHQQPAVSPGDGASAAPSDDDRDHNLTVLLTFGIFFSFTLLYLVAGVICASVVTACAVALSCCYLKARQRVALHRREALLLHAERSHGRRTEASAALVLSAIPAFAYKREGGTTGRGGDAAGWAQCVICLGLVQVGEVVRRLPVCQHLFHVECIDMWLRSHSTCPICRAAVEEPNAAGQPVPPPV

SEQ ID NO: 299914 - protein, 320 aa, Zea mays
  Clone ID: MRT4577_36593C.1.pep
IRSTAARLGSRLATHPIPPGSGAAQWPPTQLSPASSRHGVQRLDFADFSGLRPGSCSVSAAAREASFSDVLGAQLVAKATGENAVRAPAEAKLKVAINGFGRIGRNFLRCWHGREDSPIDVVVVNDSGGVRNASHLLKYDSMLGTFKADVKIVNDTTISVDGKPITVVSSRDPLKLPWGELGIDIVIEGTGVFVDGPGAGKHIQAGAKKVIITAPAKGADIPTYVVGVNEGDYDHSVADIISNASCTTNCLAPFVKILDEEFGIVKGTMTTTHSYTGDPLEDFCKDNPRDRRVQGVRSMRPGFFPRRNVQHGREGSFHRE

SEQ ID NO: 299915 - protein, 324 aa, Zea mays
  Clone ID: MRT4577_36594C.1.pep
QATGENAVRAPAEAKLKVAINGFGRIGRNFLRCWHGREDSPIDVVVVNDSGGVRNASHLLKYDSMLGTFKADVKIVDDTTISVDGKPITVVSSRDPLKLPWGELGIDIVIEGTGVFVDGPGAGKHIQAGAKKVIITAPAKGADIPTYVVGVNEGDYDHSVADIISNASCTTNCLAPFVKILDEEFGIVKGTMTTTHSYTGDQRLLDASHRDLRRARAAALNIVPTSTGAAKAVALVLPQLKGKLNGIALRVPTPNVSVVDLVINTVKTGGQVARRRGGRQRRPSGGLLQGQPRDRRVQGVRSMRPGFFPRRNVQHGREGSFHRE

SEQ ID NO: 299916 - protein, 438 aa, Zea mays
  unsure (1)..(438): unsure at all Xaa locations
  Clone ID: MRT4577_36595C.1.pep
MATHAALAASXPASSRHGVQRLDFADFSGLRPGSCSVSAAAREASFSDVLGAQLVAKATGENAVRAPAEAKLKVAINGFGRIGRNFLRCWHGREDSPIDVVVVNDSGGVRNASHLLKYDSMLGTFKADVKIVDDTTISVDGKPITVVSSRDPLKLPWGELGIDIVIEGTGVFVDGPGAGKHIQAGAKKVIITAPAKGADIPTYVVGVNEGDYDHSVADIISNASCTTNCLAPFVKILDEEFGIVKGTMTTTHSYTGDQRLLDASHRDLRRARAAALNIVPTSTGAAKAVALVLPQLKGKLNGIALRVPTPNVSVVDLVINTVKTGITADDVNAAFRKAAAGPLQGILEVCDVPLVSVDFRCSDVSCTIDASLSMVMGDDMVKVVAWYDNEWGYSQRVVDLAHLVAAKWPGAAAAGSGDPLEDFCKDNPETDECKVYEA

SEQ ID NO: 299917 - protein, 97 aa, Zea mays
  unsure (1)..(97): unsure at all Xaa locations
  Clone ID: MRT4577_36596C.1.pep
MAALLQAAATLMQPVKIGGRAPFASMPSRPSTQLGCRAFGAHAGAGRITCSVQDCSSRCAYAAKLVCLALVTSALLVSDASAXGTPKRRSYDETQTK

SEQ ID NO: 299918 - protein, 449 aa, Zea mays
  Clone ID: MRT4577_36597C.1.pep
MATHAALAASRIPAGARLHSRAPASSRHGVQRLDFADFSGLRPGSCSVSAAAREASFSDVLGAQLVAKATGENAVRAPAEAKLKVAINGFGRIGRNFLRCWHGREDSPIDVVVVNDSGGVRNASHLLKYDSMLGTFKADVKIVDDTTISVDGKPITVVSSRDPLKLPWGELGIDIVIEGTGVFVDGPGAGKHIQAGAKKVIITAPAKGADIPTYVVGVNEGDYDHSVADIISNASCTTNCLAPFVKILDEEFGIVKGTMTTTHSYTGDQRLLDASHRDLRRARAAALNIVPTSTGAAKAVALVLPQLKGKLNGIALRVPTPNVSVVDLVINTVKTGITADDVNAAFRKAAAGPLQGILEVCDVPLVSVDFRCSDVSCTIDASLSMVMGDDMVKVVAWYDNEWGYSQRVVDLAHLVAAKWPGAAAAGSGDPLEDFCKDNPETDECKVYEA

SEQ ID NO: 299919 - protein, 116 aa, Zea mays
  Clone ID: MRT4577_36598C.1.pep
ARIRSVLAQHFIGAGSHNEEKVAMYAIDSLRQLGMKYLERAELNNFTFQSDILKPFVILMRNTHNSKIRGLIVDCIVQLIKPKAGSIKPGWRCVFMIFTAAADDEDEPIAESASEN

SEQ ID NO: 299920 - protein, 449 aa, Zea mays
  unsure (1)..(449): unsure at all Xaa locations
  Clone ID: MRT4577_36599C.1.pep
MATHAALAASRIPAGARLHSRAAASRHGVQRVDFADFSGLRPGSCSVSAAAREASFSDVLGAQLVAKATGENAVRAPAEAKLKVAINGFGRIGRNFLRCWHGREDSPIDVVVVNDSGGVRNASHLLKYDSMLGTFKADVKIVDDTTISVDGKPITVVSSRDPLKLPWGELGIDIVIEGTGVFVDGPGAGKHIQAGAKKVIITAPAKGADIPTYVVGVNEGDYDHSVADIISNASCTTNCLAPFVKILDEEFGIVKGTMTTTHSYTGDQRLLDASHRDLRRARAAALNIVPTSTGAAKAVALVLPQLKGKLNGIALRVPTPNVSVVDLVINTVKTGITADDVNAAFRKXAAAGPLQGILDVCDVPLVSVDFRCSDVSCTIDASLSMVMGDDMVKVVAWYDNEWGYSQRVVDLAHLVAAKWPGAAAAGSGDPLEDFCKDNPETDECKVYEA

SEQ ID NO: 299921 - protein, 58 aa, Zea mays
  Clone ID: MRT4577_3659C.1.pep
RIFLIVQSNNGVVFSFQFLKTKYVMACSDFSSGKDEVIMDSSAYEWGVIKFRWPRLLF

SEQ ID NO: 299922 - protein, 58 aa, Zea mays
  Clone ID: MRT4577_365C.1.pep
YRQQQNCPRLCLPLCVSVNCYTALPTVCTAKRVLADTGRAQGMLEAFITGKPRPEIKI

SEQ ID NO: 299923 - protein, 453 aa, Zea mays
  unsure (1)..(453): unsure at all Xaa locations
  Clone ID: MRT4577_36600C.1.pep
MATHAALAASRIPAGARLXHSRAAASSRHGVQRLDFADFSGLRPGSCSVSAAAREASFSDVLGAQLVAKATGENAVRAPAEAKLKVAINGFGRIGRNFLRCWHGREDSPIDVVVVNDSGGVRNASHLLKYDSMLGTFKADVKIVDDTTISVDGKPITVVSSRDPLKLPWGELGIDIVIEGTGVFVDGPXGAGKHIQAGXAKKVIITAPAKGADIPTYVVGVNEGDYDHSVADIISNASCTTNCLAPFVKILDEXEFGIVKGTMTTTHSYTGDQRLLDASHRDLRRARAAALNIVPTSTGAAKAVALVLPQLKGKLNGIALRVPTPNVSVVDLVINTVKTGITADDVNAAFRKAAAGPLQGILDVCDVPLVSVDFRCSDVSCTIDASLSMVMGDDMVKVVAWYDNEWGYSQRVVDLAHLVAAKWPGAAAAGSGDPLEDFCKDNPETDECKVYEA

SEQ ID NO: 299924 - protein, 67 aa, Zea mays
  Clone ID: MRT4577_36601C.1.pep
KAHVHGVILPSVLGFWGHRGLFFWRSGGTALCPCFFRSRTFFFSGSDGVPAVGVGKFLPNLPFSMFV

SEQ ID NO: 299925 - protein, 76 aa, Zea mays
  Clone ID: MRT4577_36602C.1.pep
MSAPYDPNQGYYPPQQGGYPPQGGYPPPQPMQYQQAPPPQEEKSHGCFYTCIATLCCCWVCGETCECCLECLDCCC

SEQ ID NO: 299926 - protein, 50 aa, Zea mays
  Clone ID: MRT4577_36603C.1.pep
SLLHVAIHNISHIFHLYYFHTLRTCVMIFSVYLTGSRLKHLAPLLSMKDS

SEQ ID NO: 299927 - protein, 86 aa, Zea mays
  unsure (1)..(86): unsure at all Xaa locations
  Clone ID: MRT4577_36604C.1.pep
SWMRRSHSSTPLLYSSCSWVKRGRLSTTTYSRQRASPLTPNYLRLHASIVSLVHKSRPSDTWPPCLHLCSAISGRADXPAPLEDPF

SEQ ID NO: 299928 - protein, 132 aa, Zea mays
  Clone ID: MRT4577_36605C.1.pep
TPAGSRSGIPGSTHASAQNVSPETAQLLLIVSDGRGLFLEGKDRVLAAVQAAQNANIFVIFVVLDNPNSRDSILDIKVPIFKGPGEMPEIRSYMEEFPFPFYIILRDVNALPETLSDALRQWFELVTASDHS

SEQ ID NO: 299929 - protein, 56 aa, Zea mays
  unsure (1)..(56): unsure at all Xaa locations
  Clone ID: MRT4577_36606C.1.pep
SLVQSFLANSVSDSTLNIPLPILMFFWAMWRSTGHFLHDAHQEIDXQLRIVMLLEF

SEQ ID NO: 299930 - protein, 111 aa, Zea mays
  Clone ID: MRT4577_36607C.1.pep
KAGPRKNFSPKEFPQERGPPKCPVGPPKARNRKTAPKSLKSFYFWPRIPAPKKIPCQKKTQNCVPPLKANFWGLVAVPIPPHGGKNFFGKIGPFQIFKKGPFQRRKPFVCP

SEQ ID NO: 299931 - protein, 81 aa, Zea mays
  Clone ID: MRT4577_36608C.1.pep
CAYYYCSSFSFSSTCICKAVFFFSFPRRNSLIFVLAVAGLDCRQDLHSELLRCGRSTLPGHLHDQRASCFYGRPAISVYIY

SEQ ID NO: 299932 - protein, 75 aa, Zea mays
  Clone ID: MRT4577_3660C.1.pep
LSIAPQCFSITILSRGRRTQHKDSHTSIQSFSWKGYTPLDFPTNGVAHLKKVHPCFPTHRNPGTCSTWNFPYAWV

SEQ ID NO: 299933 - protein, 77 aa, Zea mays
  Clone ID: MRT4577_36610C.1.pep
SVPLYSKPRSPSTPSDTVVSKPRRTPNCRFGSCLGGLLPDATQTFAPHFNYSEKQGKLSQSESVWPRIIHTGHTYIA

SEQ ID NO: 299934 - protein, 131 aa, Zea mays
  unsure (1)..(131): unsure at all Xaa locations
  Clone ID: MRT4577_36611C.1.pep
KRHFEFLFFFPQEVSKAKYIVEQYVAASGGERALSAATSMYAVGKVLMRTRSSSSTTKQGQRACRTGMVGVVHGGAEIAGGLVLWQKGPEVWCVEMVVAGGTKMPSPSDGRVAWNQXPWQQAHASRGPDAW

SEQ ID NO: 299935 - protein, 36 aa, Zea mays
  Clone ID: MRT4577_36612C.1.pep
LARGFSYMKEYQFGRLKVLNFKNMVMAWSFCFGLIE

SEQ ID NO: 299936 - protein, 62 aa, Zea mays
  unsure (1)..(62): unsure at all Xaa locations
  Clone ID: MRT4577_36613C.1.pep
VFYIILSHFNIFFPYPTFYLSXLYIFYSVLSTLLVLTFAFTEFFFLFLLCYQNSTSIDPFDD

SEQ ID NO: 299937 - protein, 79 aa, Zea mays
  Clone ID: MRT4577_36614C.1.pep
SPASVLMPNPDLETGPDQHVDGDGHEAPTDTRPCRMDLFAEQRPLGYVLGYKIRCQSLIKNLTEDGRRADRGHHARGSA

SEQ ID NO: 299938 - protein, 27 aa, Zea mays
  Clone ID: MRT4577_36615C.1.pep
DHLARSTHARWSQLASMVYCWRPAETI

SEQ ID NO: 299939 - protein, 99 aa, Zea mays
  unsure (1)..(99): unsure at all Xaa locations
  Clone ID: MRT4577_36616C.1.pep
CLLRFLSDSVRCKLNVTSNISKEESHIITAGIGPVDSGKRTTTGHLIYKPGGVDNRASDRFLKEGGXINKRAFKHAPVLLKLKAETETGITIDIGLGEV

SEQ ID NO: 299940 - protein, 65 aa, Zea mays
  Clone ID: MRT4577_36617C.1.pep
YGGRPFSRSCEDLEQVTRYFILRQGYKNICGGNHTAERKHKMLTLDRNRTYLLETILNKLRPIVH

SEQ ID NO: 299941 - protein, 78 aa, Zea mays
  Clone ID: MRT4577_36618C.1.pep
FVVRWVGCAGAAWLITGCACWYGCCAVMVCAVVCATDRAVGCCKVRGVYGLLLVALACWRLKTLTLVVFTASRVSLDL

SEQ ID NO: 299942 - protein, 98 aa, Zea mays
  unsure (1)..(98): unsure at all Xaa locations
  Clone ID: MRT4577_36619C.1.pep
SFSHLRVWFWDEAPILSYAETXVVESDTMTGKPPNDQKGIIPKSFLQKFKTFQNFETATWTYFMNASMPVIYDETILDLISGGGSPSFQAVKHCTIQH

SEQ ID NO: 299943 - protein, 89 aa, Zea mays
  Clone ID: MRT4577_3661C.1.pep
IAGSTSTPVGGRPRSRGSSFENNLNKRHSRGNEGRFWPAELSLTEHECTPERIRRPLDDKQLLRLHERALSHCPCGPPRSFSKGQRTAR

SEQ ID NO: 299944 - protein, 107 aa, Zea mays
  unsure (1)..(107): unsure at all Xaa locations
  Clone ID: MRT4577_36620C.1.pep
SFSSLVCSRGVCLVAVGLLGVRVARRRRPPVCVGRGVVVLFVPAPWVRGSSPAWRVWWRARGAFSGVFSSGCRGAPSWAGWSGRRLAWLXSWLLLVRLLVLARPAGP

SEQ ID NO: 299945 - protein, 107 aa, Zea mays
  Clone ID: MRT4577_36621C.1.pep
PACTHFSIMCAFISSSAQAPELPQTALLVSSSSGWTDRFANLSLDVLDGSSLVHPSLKHHLCCSCLRVSGLEGQCSDLHQHSLSTACSGEKPSMPRQVHTYTYRALV

SEQ ID NO: 299946 - protein, 115 aa, Zea mays
  unsure (1)..(115): unsure at all Xaa locations
  Clone ID: MRT4577_36622C.1.pep
GQEDRESMAQPSLAPTTAAALEQLNSSKMVDGFNLRSRPRALPSAAHSTCPSIXPSLCHXQTLSPPXXHHGGGGLITIFLXNKXIXNIIVLIKPLXDDRSKRXFTVQELENRIHS

SEQ ID NO: 299947 - protein, 112 aa, Zea mays
  Clone ID: MRT4577_36623C.1.pep
MQCFRFASWEKEREEELQGPARSQSARSNSSISTDRDARRSGSECCSLTVSSEISVESFGRYRQLSLPQRPNNDLRIFTFHELKSATRSFSRALMIGEGAFACYYLGTIRHT

SEQ ID NO: 299948 - protein, 111 aa, Zea mays
  Clone ID: MRT4577_36624C.1.pep
MSWVNINTESSDPKIFAEASDGLEGVKRVTDWVYQCKESLERRTCPEATKALELISNALHICPHSDSVKEMKAEALLMLPRYEEVIQLCQESVNLTERNSLLFQDNGEPKN

SEQ ID NO: 299949 - protein, 60 aa, Zea mays
  unsure (1)..(60): unsure at all Xaa locations
  Clone ID: MRT4577_36625C.1.pep
LPNPRRRARFFDSLGNPTVVVDELRSDGTLARAAAPSGASTGVYDASGXRDGGTDYPGKG

SEQ ID NO: 299950 - protein, 227 aa, Zea mays
  Clone ID: MRT4577_36626C.1.pep
PCKMSAVAKRVSKKRKFVADGVFYAELNKFLVNELSADGYAGVEVRTTPQKTDIIIRATHTQRVLGEKGRRIRELTQAVSKRYGFKDGAIEILAERVMFRGLCAFAQAESLRIKLIFGLAVRRACYSILRFVMESGAKGCEVIVSGKVRGQRAKAMKFCDGYMKKSGYATTEYVNRAVRNVLLKTGILGLKVAIMLPHDPLGKKGPKKPLPDVIEVLQPKKDNVVSK

SEQ ID NO: 299951 - protein, 84 aa, Zea mays
  Clone ID: MRT4577_36627C.1.pep
GGSNLTQESWECDATYCFSDWGTPNTGGGAQTESRGYRISEGMAKGPICGVLKRTSRPERSMTKGILGGAWIWNEKGGFVGPGL

SEQ ID NO: 299952 - protein, 480 aa, Zea mays
  unsure (1)..(480): unsure at all Xaa locations
  Clone ID: MRT4577_36628C.1.pep
DGNTKARRNLLLLAXCCRAASSLRPPNLISNSSDGVITHLPGFQGPLPFHLQTGYVEVDEDNGVHLFYYFVRSEREDSPGDDPVVLWLTGGPGCSVLTGLAYEIGPLSFDLNGYVGGLPKLVYKQDSWTKVSNVIFLDSPVGAGFSYSHTEEGYKSSDTRAVNQILVFLKKWFDKYPQFFSSLLYIAGDSYSGMIVPTVTSEIARGKEEGSQPNLNLKGYLVGNPVTDFNFDGPSRIPFAHGMGLISDEIYEAYEKSCSVGDSRRQSIECINSLGAIDECIKGISPNHVLEPLCXRESQAEANKFRCTGDAPAPSPSAHXEEEEELRLSEISLQCRTAGYMMSSMWANDASVRQALGIHKGTVPSWSRCNYDIPYTNDIPSAVKYHLDVTTKGYRSLVYNGDHDMVVPFIGTQAWIRSLNFSTVDEWRPWFVDGQVAGFTRSYSNNLTFATVKGGGHTAPEYMPRQCFAMFVRWVSGDPL

SEQ ID NO: 299953 - protein, 104 aa, Zea mays
  Clone ID: MRT4577_36629C.1.pep
GTRGPFSSFFFFFFFFFFFFFFFFFFFFFFLGQTRAPGTRIRGPGGPTKKPGNPLNERRDNLSSVLAPGEGQKKSHTHLANEVRSLVKKEQNNNGDYPQATGLK

SEQ ID NO: 299954 - protein, 110 aa, Zea mays
  Clone ID: MRT4577_3662C.1.pep
RDESPKKTQGQITLNPIALVPARIKISSNEMKNGMVRRFTYSAGVPRFRTESSVCHRPLAASPFAAKQRLPLVDAELAVASFQHQQESSILVAPIARGRARGRGRALANA

SEQ ID NO: 299955 - protein, 300 aa, Zea mays
  unsure (1)..(300): unsure at all Xaa locations
  Clone ID: MRT4577_36630C.1.pep
MAILAVASPLKTLNPSPGDHSRCRLSSSLLHLPLPVPRWRRLRCSAQYSEAAAQPTSTTTARPADIPWSKELCNSVRLIGTVGTDVELRQLPSGSAVARGRLAVWKSATETTWVTLQFWDDLAIVASEHVKKGDRIFVSGRLVSDTVDEGPEKRHVYYKLAVQQLNFIESQPVRLYEPEXARMPLGGRRADYFNSISNSTEDKNRDNMSSSRSTEELWQVFFANPLDWWDNRTNKKNPRYPDFKHKQTGEALWVDGRNNPNWVISQLAVLDSRMSSLQDNERKPVSYMYADEFMTLDGNR

SEQ ID NO: 299956 - protein, 56 aa, Zea mays
  Clone ID: MRT4577_36631C.1.pep
ENMLLYDPCDVNIFAKKPPFQDVCSQLSFGCNKWSPKRLFCLMRPIICSCPIRGPT

SEQ ID NO: 299957 - protein, 96 aa, Zea mays
  Clone ID: MRT4577_36632C.1.pep
HTDTSKLCQTMSRSSTTRMLITPTRSSGSIDLNRISVHNTLRILKQCWNRCRKFRTKERHVEHQGLQLILLAHEFILHKCLGHKNPLAAMGIPIFV

SEQ ID NO: 299958 - protein, 84 aa, Zea mays
  Clone ID: MRT4577_36633C.1.pep
MVTVIKKKKKKEKKKKKKKKKKKKKKKKKKKKKKKKKKKKKKKKKKKKKKKRGGPFKRSKIYNPGNATKKFFKGDPKIKYRGRI

SEQ ID NO: 299959 - protein, 104 aa, Zea mays
  unsure (1)..(104): unsure at all Xaa locations
  Clone ID: MRT4577_36634C.1.pep
FNLLQSHCPFVTLQFTNXRLEYSFLLHTQVFQGLICTNAGHCFXNTNSTNTQSLCLARLTLIVNLAFSASLYSLYSRRFVQLLSITTQSSIFLVELVTRRGVKT

SEQ ID NO: 299960 - protein, 242 aa, Zea mays
  unsure (1)..(242): unsure at all Xaa locations
  Clone ID: MRT4577_36635C.1.pep
HWVPRGRPGISVAILTPAISVLSAVGGLKEKATFLTTDEIVWITVGILVALFAIQRFGTDKVGYLFAPIILLWLLLIAAVGFYNLVKYDTGALRAFNMKYIIDYFRRNKKKGWASLGGILLCFTGTEALFADLGYFSIRSIQLSFGFGLVPSVLLAYIGQAAYLRVHPEDVANTFYRSTPISLFWPTFILALAASIIGGQAMISCAFATISHSQTLGXFPRVKILHTSRQYSGQLYIPEVNY

SEQ ID NO: 299961 - protein, 727 aa, Zea mays
  unsure (1)..(727): unsure at all Xaa locations
  Clone ID: MRT4577_36636C.1.pep
MADRVTIISPRDPWPFSTVIADDLEALVADGLLRPLSGDSQPEWMAPPSGAAPSPPPGYVVSFVSFHERGFGVPASRFMRAILHVYGVELHNLSPNSISQAAIFAAVCEGYLGIAPHWDLRTHLFSAELFASPTGERRVRMVDPARQTEESPTPFEGPGGATRRRARRRGGGCRHSSLEGAPLDXLRLGSPSLGCLGRPRQGXPKPAAGQTSVVPSGIEVRETSPHARLIMARSGXSISGHLLPGSSSVCADPDFPFLLSKRRHGSTSLASRKVLKTASASTASAAPGLAGQLTPSQDAPQRGAQAAPVVVGRAPEADSSVEAVVALGEAVGAAVASGPPDMLQALAPTAAEAVAVLAVESPVAADAEMAEASLLGASEEEGTEPRPIPGSGNLVPAQRSPDRRQEQSWDGLRECAEATVGSLRSTLEVLCRDVPKILQDLTDLSAAKSSFIRREADVWGSLRSLRTTLAGATERLSQWSAEVADLRLLCVDLRAEAAAARAEAQQRELELGQVIGERDQSRGRAAEAESRAEALGVQLAEASARAGAFAADLAVAQATSSEHRVRAEELESALDKSAKALAQAAEQREADHAAMSEAISAFCRVFGFDDVPSGSSPQSRLQALGDHARGRLREALHHGVRRAFAVLASHYDVDLDRVSEGYCLPDEDEAALAEVQRLDAAAAGPGAVLATTFEAEILPLAPSSEAGANLAEGGDEAEGAAPSPGDA

SEQ ID NO: 299962 - protein, 522 aa, Zea mays
  Clone ID: MRT4577_36637C.1.pep
MAPPSGAAPSPPPGYVVSFVSFHERGFGVPASRFMRAILHVYGVELHNLSPNSISQAAIFAAVCEGYLGIAPHWDLWTHLFSAELFASPTGERKVRMAVRAGGCILQLRRARALQYIPAILASSNKGWQRWWFYLRNDDRRLLSFSQRVVTVAADNWRYGTPRDRQKNLQPLLKALEELREGGLIASGVVAAIHRRRVLPLTERRLPLWEMMLGSTWREIGAHKPSLPPVPEDAVDRAARRVAAEKRKEKKDAKKAWARERTWARDALERFRRRQERDGLPREPSPETPPDDDDDEDDDEDDNMAAHLGLSPDLRLGQGSSSQRSSGLAPSVSGAGTSGSRSEEQGQTEGQAEAQFDRSGSPEELESALDKSAKALAQAVEQREADHAAMSEAISAFCRVFGFDDVPSGTSPQSRLQALGDHACGRLREALHHGVRRAFAVLASHYDVDLERVSEGYCLPNEDEAALAEVQRLDVAVAGPSVVLATTFEAEILPLAPSSEAGVDLAEGGDEAEGAAPSPGDA

SEQ ID NO: 299963 - protein, 216 aa, Zea mays
  unsure (1)..(216): unsure at all Xaa locations
  Clone ID: MRT4577_36638C.1.pep
MADRVTIVPPHDPWPFSTVTADDLEALVAEGLLRPLSGDSQPEWMAPPSGAAPSPPPGYVVSFVSFHERGFRVPASRFMRPILHVYGVELHNLSPNSISQAAIFAAVCEGYLGIDPHWDLWTHLFSAELFASPTEERRVRMAVRAGGCILQLRQARAPQYIPVVLASSNKGWQRRWFYLRNDDVRLPSFSXRVVTAAADNWRXGPCATDRRISSPF

SEQ ID NO: 299964 - protein, 453 aa, Zea mays
  Clone ID: MRT4577_36639C.1.pep
MAPEAGLGRCQPHSVERHSSRSDAGGAVFLSGRCSLMRTGRSPGEQSGPKFLGWFSQPEGIARERKPRTQFLCRHLFRLGMADRVTIVPPRDSWPLSTVTTDDLEALVAEGLLRPLSGDSQPEWMAPPSGAAPSPPPGYVVSFVSFHERGFGVPASRFMRAILHVYGVELHNLSPNSISQAAIFAAVCEGYLGIDPHWDLWTHLFSAELFASPTGETRVHMAVRAGGCILQLRQARTLQYIPAVLASSNKGWQRRWFYLRNDDGRLPSFSQRVAEESPAPSKGPGGAAERRAPEARMKPAAGLTSVVPSEIEARETSPQARLIMARSGKRRHGSTGLAPQEALKTAPTSAASAAPGLADQLAFSQDAPKRGAQAAPVVVGRAPEADSSVGAAVVPRETAGAAAASSPPDVLSALSSAPAEAAAVLAVEPPVAADAEMAEASLLDASEEGGAEP

SEQ ID NO: 299965 - protein, 136 aa, Zea mays
  unsure (1)..(136): unsure at all Xaa locations
  Clone ID: MRT4577_3663C.1.pep
GTGAGCSAGRGSGCSCRRRXIEFGVKNREAQLALLSPVQRSPARLARRRSEVEEELAGEDYTCVIARGPNPKMTHIFEDRVVESSSSSSTSTSCDGCNKDAALLLLLERGESEFCIDQRKALFGGERAGGERAVTN

SEQ ID NO: 299966 - protein, 240 aa, Zea mays
  unsure (1)..(240): unsure at all Xaa locations
  Clone ID: MRT4577_36640C.1.pep
MAEVKRRLLRLPKVPPRPLRRHLFCSVMADRVTVVSPRDPWPFSTVTVDDLEALVADGLLRPLSGDSQPEWMAPPSGAAPSPPSGYVLSFVSFHERGFGVPASRFMRAILHVYGVELHNLSPNSISQAAIFTAVCEGYLGIAPHWDLWTHLFSAELFASSTGERRVRMAVRAGGRIFQLRQARALQYIPAVLASSNKGXWRNGACLPRLWQADPLVQARVLDPGLPPEQLLAPARGRTLR

SEQ ID NO: 299967 - protein, 199 aa, Zea mays
  unsure (1)..(199): unsure at all Xaa locations
  Clone ID: MRT4577_36641C.1.pep
MAGNQQPASVVLDYAAVLDAKPLRTLTPMFPAPLGMHTFTPKSSSSVVCVTPFGPYAGGTEQGMPGGVPPMLTSLSAPADPNQVQPYTAHMNGTSNANGTTNNTVVTPVLQTPPAPTIQESGKKKRGRPRRVQDTTTVPSVPPVQPVPTVPXSSTGSNGSSSXNRFQRFLQFXVPSVPSAPPEVNNIVLQTPPSAVTQE

SEQ ID NO: 299968 - protein, 77 aa, Zea mays
  unsure (1)..(77): unsure at all Xaa locations
  Clone ID: MRT4577_36642C.1.pep
FKRKGYDLFYELTLTLTESVRGFQLVVTESHYNHMINKSNRVEVEXPDYVKAIKNERMAMYQRPVMRGKLFIHLSEE

SEQ ID NO: 299969 - protein, 64 aa, Zea mays
  Clone ID: MRT4577_36643C.1.pep
TPWPLLKGSLFVRVFSYYLKKPGGDFCPLSFLLYSGQCETLIKIMANFKHEFYSKKTNTINVIC

SEQ ID NO: 299970 - protein, 111 aa, Zea mays
  Clone ID: MRT4577_36644C.1.pep
MRQDRVLLQLPYRRSEGSPDYQAVSLFLAGRRVADSPYSSQRGRDYTDGGGPNIERQLSGGRRHARATLLRETCGGVDGGSTRAWTRREQDRPAVGRAWLEPTGGGTSLGD

SEQ ID NO: 299971 - protein, 88 aa, Zea mays
  unsure (1)..(88): unsure at all Xaa locations
  Clone ID: MRT4577_36645C.1.pep
LWEATHSERMILKAKLLGEQIRKENGVATAIQAIYRDLEYATTLTRQRASLSTTPRTDSEDCXPADEGEEADDMEGEESWTFVDDYAD

SEQ ID NO: 299972 - protein, 71 aa, Zea mays
  Clone ID: MRT4577_36646C.1.pep
RTSGNKIVRADAKDHYLDVVTNVVGLAAAVLGDRFYWWIDPIGAIVLAVYTISNWSGTVWENAGLCYLGGV

SEQ ID NO: 299973 - protein, 116 aa, Zea mays
  unsure (1)..(116): unsure at all Xaa locations
  Clone ID: MRT4577_36647C.1.pep
AKSILCFWACQVVLMGXIKGYRVVDGPLXERSWSCXPGVRFVKFGFAVFSQALEDLKVKKIKKARLVIFXLLRFLVQALVXGKGPLYNLFXHLAVPVNXNNAWAYATNFVFGKSWG

SEQ ID NO: 299974 - protein, 155 aa, Zea mays
  Clone ID: MRT4577_36648C.1.pep
KNSRRPNNKQKPKFTSEKTQFYPRGNPPPFGKNFGPKGPRGGGWGPLKIFLNKKKKAKLPKGGKLQSLGANQNGVNYRQDHPGAGAIGGGNGRKGPLGAQWVENWLKKRPNKNRNHWVGGVDGQGNIGHPWNLWGGLMGKANGKLLKKGQKDPRV

SEQ ID NO: 299975 - protein, 55 aa, Zea mays
  unsure (1)..(55): unsure at all Xaa locations
  Clone ID: MRT4577_36649C.1.pep
CSWSKIANWICVRPPADIMSSMQYTIGVFIHHERAGATAYPPPEPLTRLTXGWWA

SEQ ID NO: 299976 - protein, 68 aa, Zea mays
  Clone ID: MRT4577_3664C.1.pep
IAKSPGPSGFLTQVAPQAFWRGARLPGGPPQRKKKKKKKKKKKKKKKKTKKKKKKKKKKVLCVVTTAK

SEQ ID NO: 299977 - protein, 78 aa, Zea mays
  unsure (1)..(78): unsure at all Xaa locations
  Clone ID: MRT4577_36650C.1.pep
LLCIGKLDRSIHGVTHGNGTYTIHLNDSHEDDIXCHVVFVGSPRKDCDHVHADRDRTCVVLTSNVDIRDNLRPAIPLS

SEQ ID NO: 299978 - protein, 511 aa, Zea mays
  Clone ID: MRT4577_36651C.1.pep
MEMVPWLLGFLGRYPELMVSLACFLLLFRRLNQRDGLPTNWPVVGALPAITVNAGRMHEWVTEFLRAAGLSYVMKGPWGSPVDVIMTADPANVAHVFTSNFGNYPKGQEFAALFDVLGDGIFNADGESWAFQRRKAHALLSDARFRAGVAASTARKLRDALVPLLDGIAASGAVVDLQDVFVRLTFDLTAMFVFGIDPGCLAPDFPYVPFAAAMDTVEEVLFYRHVAPVPWLMLQKYLRTGHSKKMWNARRVLDASIAEFISLRRERAAEAEAEADLLTSYLACHDEIGKSGAELERFLRDTTLNLMVAGRDTTSSALTWFFWLLTKHPDVEAKVLEELRAHPPLSGAGGHRTAAELKQLVYLHAALSESLRLYPPVPFEHKAAARTDTLPSGARVGPSRRVIVSFYSMGRMEAVWGKDCSEFRPERWLTAAGRFRHEPSYKFVAFNVGPRTCLGRDLAYSQMKAVVAAVLPRFRVEVDAGPVVRPKLSIILHMKDGLKVRVPKREEDGLC

SEQ ID NO: 299979 - protein, 39 aa, Zea mays
  unsure (1)..(39): unsure at all Xaa locations
  Clone ID: MRT4577_36652C.1.pep
KISRIRNTQLRDTLLYTXIIRYTTPIDXKIWMRPYTRQT

SEQ ID NO: 299980 - protein, 67 aa, Zea mays
  Clone ID: MRT4577_36653C.1.pep
WLLKEWPFFRAVGFPLGFREGQNFKPGEAFLGAGGGPPQTVGFFFIRQLVQGPTVKEEGWPNCRGPL

SEQ ID NO: 299981 - protein, 129 aa, Zea mays
  Clone ID: MRT4577_36654C.1.pep
HQAASQQIPQHHLFWAPGLLCSGVPHLQCSRSQALGRTTNFPWGVWVAGSHRRVFQPSRRGRSNNRCLLPRLQGICSSRFRFLVRVIGMVIDLFLFLSSTGAASTHRAVQGLVRDGERAAGSCNSGARF

SEQ ID NO: 299982 - protein, 45 aa, Zea mays
  Clone ID: MRT4577_36655C.1.pep
TFVVSYIYLFLLIIHSRVVRHLCSRSFIFKSLTRACPEHRRSNMK

SEQ ID NO: 299983 - protein, 72 aa, Zea mays
  Clone ID: MRT4577_36656C.1.pep
ASGLFRVGGGFPGPWDSWFAPPGWRFSFEGTGVFLPKKKKKKKKKKKKKKKKKKEKKKKKKKKKSTLRCYHC

SEQ ID NO: 299984 - protein, 102 aa, Zea mays
  Clone ID: MRT4577_36657C.1.pep
PFVNLNPAALELMERHVVAVVAPQSSGIAHVVSHVANQLRVPLLSFAATDQALASSQYPYFVRATHDDRFQMAAVADVVAHHGWREVMAVYVDNDYGRGGVV

SEQ ID NO: 299985 - protein, 51 aa, Zea mays
  Clone ID: MRT4577_36658C.1.pep
ILIFLFLCIFKTHEFLCTTWSKILSCNMGSHTKAKPPRYLTSCGAQQNQTF

SEQ ID NO: 299986 - protein, 52 aa, Zea mays
  Clone ID: MRT4577_36659C.1.pep
PTEVQVVQCEASSLNKNVFGTFSSQGHVWFAKDACVYNAMTCSLCSSENTSA

SEQ ID NO: 299987 - protein, 114 aa, Zea mays
  Clone ID: MRT4577_3665C.1.pep
QIKCDDGVVHYQQPMFTRATLLIDASRGGILASCLCHGARSFGLGIGGGALDRDRSSCVGVGACPARGRPFSILKPGPRFNCTVPTSLLICLGSRAFPGIGLATIEPWTVHQHN

SEQ ID NO: 299988 - protein, 122 aa, Zea mays
  unsure (1)..(122): unsure at all Xaa locations
  Clone ID: MRT4577_36660C.1.pep
XEPFPGAKESPPTFLRGSPGSPSAPNRPQQADGSPNGSTAEEGGGFAWDDDFPLMTAKAAFAMALDPAAPAPAAPTPTPAPFSRFTVSPAPTSRFSITHVSDSDAESKRGPEAGAGGESKEA

SEQ ID NO: 299989 - protein, 409 aa, Zea mays
  Clone ID: MRT4577_36661C.1.pep
MSSISHQHSSEINPVDVWHVGNVKAQNTAEMVKEKNDSFDDWQDSTTTGQVQDTSLNQTGDMMEVSKASHKETDMDSWFIGHSREPANTGTMNANNMLDDWQGFTGSDQAQQNSSSTGAEMISVPFEQHGGTVSAPSWANGSSNDAAKTSSTNIESDPFDVWQNFTKSGHLQENMSSLGREPSSLSPEPAKGNDSLDLWITSNFKESKSNDVGRTNASSDGWQDFASFDQAQRITKVHVEGHVVKDPSGAETLDLWASSHVNEKNLEQISEHNDLFDDWQDFQNSNPQQTTLQVSSDASLFDITLASRPDAFGEQEFGSVLQVASSENSKDKKEGSNESKAFPSDDHLKSTSGMQQMGDVDSLSSLWPANKPEPANTNVEQLLAQMHDLSFMLKDELSVPDKPIDHSKP

SEQ ID NO: 299990 - protein, 93 aa, Zea mays
  Clone ID: MRT4577_36662C.1.pep
KTIGGRIPTHDLFCQRGNTLLEVIKKTTPHLGLRLIANWYFQYIQTPFSTFCTPKGKLVFKPLPINQLYSFLYLTGLRELEPFGDGETLGDKG

SEQ ID NO: 299991 - protein, 88 aa, Zea mays
  Clone ID: MRT4577_36663C.1.pep
MDNDKSEVSPAARVVQCEGVAFTATEGNEVARVTKGGAARVLSSESYFDADTCTRHHFVDVQEKTEAMLFFVSVREDLNRVVSVRRFS

SEQ ID NO: 299992 - protein, 192 aa, Zea mays
  Clone ID: MRT4577_36664C.1.pep
LGTSRPAGEFISLQNSSKRSHTSPCLLAWSVEMVLRRVSSTIADASCWRTARQSVWSTRARLLADSRMKRVVSWMPSLSAAGRTPPTRTTLPDHAGSGLPCDHRDLAYHANHTQGRRHVLPAFAIHRNFPDDTDRSRRQRGEACSPAAGHGHLCDNVCSRLLLTALRHHVTPPRRLLLLLNAINTVIHAYPC

SEQ ID NO: 299993 - protein, 58 aa, Zea mays
  Clone ID: MRT4577_36665C.1.pep
HTVDADLDGTVFMFRSSMQYYLLLAFEGGSVLRAQLVLLMVPIPYGTYASLLLRVASN

SEQ ID NO: 299994 - protein, 76 aa, Zea mays
  Clone ID: MRT4577_36666C.1.pep
PPPPLRMVGYFAPSAAVSSPREIWWHLYCWAHRAPYTPLIARFSLVPTFCSSVSLECCSHFSCQHIMIRARVAQSR

SEQ ID NO: 299995 - protein, 35 aa, Zea mays
  Clone ID: MRT4577_36667C.1.pep
IHHYSTILINLSTKETLTIILFCLNRTNNTHLRSL

SEQ ID NO: 299996 - protein, 118 aa, Zea mays
  unsure (1)..(118): unsure at all Xaa locations
  Clone ID: MRT4577_36668C.1.pep
PPPPMVSXLGPQTPPDFRPRARNRPPSSAKGGQTPPPPKPXRGLKGLPKPPGTPKEGXAPTRGGGPKNSVPSVWGVMGLPPLGEPPPCFESGPPLXVFPCAPGGGPPPVCCCPFNSPN

SEQ ID NO: 299997 - protein, 109 aa, Zea mays
  unsure (1)..(109): unsure at all Xaa locations
  Clone ID: MRT4577_36669C.1.pep
EVDCQEPRANAXQAERKERLDKGNEGNNPNTICGLKFRTHFGGRETTGVXIIYHNHEAGKKMEPXXRLIXNVLTTKVDKTGKXQMTETLNRTKKIRGAKTTKAVDAKNK

SEQ ID NO: 299998 - protein, 348 aa, Zea mays
  Clone ID: MRT4577_3666C.1.pep
FVVLQDATNHFDEQMVIGVGGFGKVYKAVMQDGSKLAVKRGNQKSHQGLREFRTEIELLSGLRHRHLVSLIGYCDEHNEMILVYEYMEKGTLKSHLYGGDMPPLSWKKRLEICVGAARGLHYLHTGFAQSIIHRDVKSANILLDENLLAKVSDFGLSKVGPEFDQTHVSTAVKGSFGYLDPEYFRRQKLTDKSDVYSFGVVLLEVICARPVIDPTLPRDMINLAEWAIKWQKRGELDQIVDQRIAGTVRPEALRKFGETVEKCLAEYGVERPTMGDVLWNLEFVLQLQEAGPDMSNINSMNQISELPSNPKRVSSLDISSTDQSRVPIDYSDMSTSNAFSQLINAEGR

SEQ ID NO: 299999 - protein, 65 aa, Zea mays; identical to SEQ ID NO: 264737
  Clone ID: MRT4577_36670C.1.pep

SEQ ID NO: 300000 - protein, 65 aa, Zea mays; identical to SEQ ID NO: 264737
  Clone ID: MRT4577_36671C.1.pep

SEQ ID NO: 300001 - protein, 65 aa, Zea mays
  unsure (1)..(65): unsure at all Xaa locations
  Clone ID: MRT4577_36672C.1.pep
MDTQVKLAXVVKVMGRTGSRGQVTQVRVKFLDDQNRLIMRNVKGPVREGDILTLLESEREARRLR

SEQ ID NO: 300002 - protein, 130 aa, Zea mays
  Clone ID: MRT4577_36674C.1.pep
MRYLIASCRIARTIECLNASCARSLLAEGTSAWASRQCSRLDRRRPSSLRVTQSSSASVPARSESMDTQVKLAVVVKVMGRTGSRGQVTQVRVKFLDDQNRLIMRNVKGPVREGDILTLLESEREARRLR

SEQ ID NO: 300003 - protein, 252 aa, Zea mays
  Clone ID: MRT4577_36675C.1.pep
MNNLLTDSFELPRRDSSRDADIEMGMHQADASDNLKDFLKKVDTIESLIAKLTNLLNKLQTANEESKAVTKASSMKAIKQRMEKDIDEVGKIARQAKTKVDELEKDNLSNRQKPGCGKGSAVDRSREQTTGAVKKKLKERMDDFQTLREAIRQEYREVVERRVFTVTGNRPDEETIDDLIETGKSEQIFKDAIQHQGRGQILDTVAEIQERHDAVRDLERKLLELQQIFMDMAVLVEAQGDMIKHIETHVSN

SEQ ID NO: 300004 - protein, 353 aa, Zea mays
  Clone ID: MRT4577_36676C.1.pep
MHSQVDPTRPRGLALKASSPPRRNGHTFRPPASARLSLSLSLLAESPPAMNNLLTDSFELPRRDSSRDADIEMGMHQADASDNLKDFLKKVDAIESLIAKLTNLLNKLQTANEESKAVTKASSMKAIKQRMEKDIDEVGKIARQAKTKVDELEKDNLSNRQKPGCGKGSAVDRSREQTTGAVKKKLKERMDDFQTLREAIRQEYREVVERRVFTVTGNRPDEETIDDLIETGKSEQIFKDAIQHQGRGQILDTVAEIQERHDAVRDLERKLLELQQIFMDMAVLVEAQGDMINNIETHVSNATNHIQQGVSALQNAKKLQRNSRKWMCYAIIILLVIVVVIVVAVIQPWKKGT

SEQ ID NO: 300005 - protein, 302 aa, Zea mays
  Clone ID: MRT4577_36677C.1.pep
MNNLLTDSFELPRRDSSRDADIEMGMHQADASDNLKDFLKKVDAIESIIAKLTNLLNKLQTANEESKAVTKASSMKAIKQRMEKDIDEVGKIARQAKTKVDELERDNLSNRQKPGCGKGSAVDRSREQTTGAVKKKLKERMDDFQTLREAIRQEYREVVERRVFTVTGNRPDEETIDDLIETGKSEQIFKDAIQHQGRGQILDTVAEIQERHDAVRDLERKLLELQQIFMDMAVLVEAQGDMINNIETHVSNATNHIQQGVSALQNAKKLQKNSRKWMCYAIILLLVIVAVIVVAVIQPWKK

SEQ ID NO: 300006 - protein, 95 aa, Zea mays
  Clone ID: MRT4577_36678C.1.pep
LLIGGGRARKIQHNGGCLRGVIKGPIPPTGGRVNIYWAGPFPKLGGKKMTHPPFINKEQIKTSAGGKKKKRPGTPPLPHGWAKKKKKGPPLLINI

SEQ ID NO: 300007 - protein, 51 aa, Zea mays
  unsure (1)..(51): unsure at all Xaa locations
  Clone ID: MRT4577_36679C.1.pep
MGEPHXSMRILVTGGSGLVGRGIQKVVADSAAXPGDEWVFDSSKDADLTDA

SEQ ID NO: 300008 - protein, 113 aa, Zea mays
  Clone ID: MRT4577_3667C.1.pep
RAPLCLGSSVRVWRRASFPRLVRFWPPPRRTPRGSVLSFPRVGPPPRVPSSKPSPGPGSSGFCPPAFLWSPPGGPPRVLFSAGFYPPGVVWFPPSVVSLFSPPLAPGFLSLAF

SEQ ID NO: 300009 - protein, 60 aa, Zea mays
  Clone ID: MRT4577_36680C.1.pep
TLVPCQELSQQHTDQISTKMIATLSELLHLAPLIFQLPSLNTPIQMLLLTLCECYILHGF

SEQ ID NO: 300010 - protein, 112 aa, Zea mays
  Clone ID: MRT4577_36681C.1.pep
GLCLVVTEQLEQLDLGAESTSSRASSGSSCRAHRRPPHRRARGRVAARAGDLLAVKLMGASATFSRAPAGVAVAASSGCREEGDGERRRWAPAGVAAAASRGEERRGGEEET

SEQ ID NO: 300011 - protein, 64 aa, Zea mays
  Clone ID: MRT4577_36682C.1.pep
YRGCVYKKIFVSCRARILGLKNRLILALAMSMYAYGALLGDWCLFIVFRLCHVYEWQFPLSIRP

SEQ ID NO: 300012 - protein, 123 aa, Zea mays
  unsure (1)..(123): unsure at all Xaa locations
  Clone ID: MRT4577_36683C.1.pep
VRRWPARRRVVLXCCCSLAAACXAPGGLCGCGPAVGLXXVLFSPRPACGVWRSLXWLRAGGPARRLSRVXWFWAGXVRLGLGXSLCXXPFSGXGVPCXXVPWPPLGWGGPLGRXALLLLRPAF

SEQ ID NO: 300013 - protein, 51 aa, Zea mays
  Clone ID: MRT4577_36684C.1.pep
YSHAEIVLEEDGSQQGRGQLVHVARRLGPSVQQRRQRHPQPRSVQNCRTRG

SEQ ID NO: 300014 - protein, 143 aa, Zea mays
  unsure (1)..(143): unsure at all Xaa locations
  Clone ID: MRT4577_36685C.1.pep
YAGGRSLTSTSRILLDRGRSRLVSFCRHAFWYEEMVECMEKVSMTVDSEELTVEEGSLLFVAYKNVIGARRDLLGIIYFSELEEVGLGNEDLVILIKDYRGXIETELTQDCDGILKLVETYIVSVFTFXEFKXFYVKMKGDYY

SEQ ID NO: 300015 - protein, 30 aa, Zea mays
  Clone ID: MRT4577_36686C.1.pep
MALLSLYNKIRIMKVRDVPAFLKTVLTCNN

SEQ ID NO: 300016 - protein, 48 aa, Zea mays
  Clone ID: MRT4577_36687C.1.pep
LFAGEDFYYILRFLNTNGGGKHKIIFSITLIKGVFPPFSNICCYILFF

SEQ ID NO: 300017 - protein, 40 aa, Zea mays
  unsure (1)..(40): unsure at all Xaa locations
  Clone ID: MRT4577_36688C.1.pep
IYITACAGQSVVVKHNSVVTYGSITQTQRYPVGGMNNTNX

SEQ ID NO: 300018 - protein, 53 aa, Zea mays
  Clone ID: MRT4577_36689C.1.pep
NIFSLFLPFAFLETIELSCVHALLFRFVFSCDELNFLMPRNDGLLVLGSVRVF

SEQ ID NO: 300019 - protein, 70 aa, Zea mays
  Clone ID: MRT4577_3668C.1.pep
AAVLCYALIALGPACFLFSGVHVRKTLLRLTLLSSTLFRLINLIVLSVIWRGCHSIKSRARWAYEIMILT

SEQ ID NO: 300020 - protein, 36 aa, Zea mays
  Clone ID: MRT4577_36690C.1.pep
FWVGPLVGVAFGAFYPQYIFGAGPIKALGSFRNNAL

SEQ ID NO: 300021 - protein, 124 aa, Zea mays
  unsure (1)..(124): unsure at all Xaa locations
  Clone ID: MRT4577_36691C.1.pep
FGVLQTCGAPYLTGDTTRGGLXLHIYYPTNSQHQPMVILHMCLTLLDTKKAIVFFXTNADGNTSSPKEMTMLFCISEIIPEIENCDFDFQPCHYFMNAIHGSPFSTIHVTPDDSVRYTSDQDMV

SEQ ID NO: 300022 - protein, 76 aa, Zea mays
  Clone ID: MRT4577_36692C.1.pep
MAHRVLLLLSLATADVCADAVDAEDPLIRKVDPGGYDNDLQVNAETHFLSFEQRFCKSYKDADYHAYRLLVCKGQP

SEQ ID NO: 300023 - protein, 80 aa, Zea mays
  Clone ID: MRT4577_36693C.1.pep
ACAAVSAVWSSERLSMVAASRSRPSILTHRTGPRWVRSNLSLGWLAIHARIKRRLVRFLAPPAAGGRPPARGRARARTSE

SEQ ID NO: 300024 - protein, 56 aa, Zea mays
  unsure (1)..(56): unsure at all Xaa locations
  Clone ID: MRT4577_36694C.1.pep
RPRXXXXXWXEXXLRXILDLXXXSRRXXLHESXVRRSGRTREXDXGIWGNGXXVRE

SEQ ID NO: 300025 - protein, 65 aa, Zea mays
  Clone ID: MRT4577_36695C.1.pep
GASCWDGQFSACPHVFPVGSVTQGACLLGEDSRLSLSVGVCFRALAYPLWAFSGDSGSVGIESCA

SEQ ID NO: 300026 - protein, 70 aa, Zea mays
  unsure (1)..(70): unsure at all Xaa locations
  Clone ID: MRT4577_36696C.1.pep
MPSHKTFQDQRRTCAKTVRQKRRITYWIRMRTDNTIRYYAKRXHWCCTKLGFCSSRCAICCVGRLGSKSY

SEQ ID NO: 300027 - protein, 58 aa, Zea mays
  Clone ID: MRT4577_36697C.1.pep
CSYRLSQPMIKIRLGYPSRVGQILSARCVSVHTGHGSNMSFHLVPPHESHIWIFVLRP

SEQ ID NO: 300028 - protein, 145 aa, Zea mays
  unsure (1)..(145): unsure at all Xaa locations
  Clone ID: MRT4577_36698C.1.pep
MPPAPPPQQPKNRIRVPAPTGENRRPQRRMESRNASERAAFFARREAAAVLRRVLRGDATRRAXGSIKSLVYSPTVRNKRATFALVCQTLKYLPILXEVLASSEILSSKWKKQEELVYVTTYDILFGQAIAVFGSVQQILCYKRI

SEQ ID NO: 300029 - protein, 278 aa, Zea mays
  Clone ID: MRT4577_36699C.1.pep
STTCLLLTYCTCAAVPLCQPSINLTQFRSVFAAVNGKGFIARDLTFENTAGPAKHQAVALRCDSDLSVFYRCAFEGYQDTLYAHSLRQFYRDCRVAGTVDFVFGNAAAVFQDCALLARRPLPGQKNSVTAQGRLDANMTTGFAFQFCNVSAHPDLLLLLQQQQQAQASNGTAPPATQTYLGRPWKPYSRVVFMQSYIGDVVRPEGWLAWDGDFALDTLYYGEYANTGPGAAVAARVKWPGFHVMTSPTEAGNFTVAQFIEGNMWLPPTGVKYTAGLTS

SEQ ID NO: 300030 - protein, 28 aa, Zea mays
  Clone ID: MRT4577_3669C.1.pep
STMASTLSLAEGQEMSCYHVTNSYNTMI

SEQ ID NO: 300031 - protein, 71 aa, Zea mays
  Clone ID: MRT4577_366C.1.pep
MRDESDHHAGVCAAEVKAEPVDARPDQQRQRNATEPQSWPIYRPRPVYHPLRACNGSGSAGSDHDGSNDSR

SEQ ID NO: 300032 - protein, 76 aa, Zea mays
  unsure (1)..(76): unsure at all Xaa locations
  Clone ID: MRT4577_36700C.1.pep
LPXFFHSGSXXLGXTSXXLLXXCLFXLPXSEXSRPNLXXLRXFRKFLXQMXXILXNFXLGSSLYKGVHSMXAVVVF

SEQ ID NO: 300033 - protein, 790 aa, Zea mays
  unsure (1)..(790): unsure at all Xaa locations
  Clone ID: MRT4577_36701C.1.pep
MVRSGSIRRSAVPAPMPAPAFTVSPADYRLLEEVGYGANAVVYRAEFIPTGRTVAVKCLDLDRVNSNLDDVRKETQTMSLIDHPNVIRSYCSFVVGHNLWVVMPFMSEGSCLHLMKVAYPDGFEEPIIASILKETLKALDYLHRQGHIHRDVKAGNILIDNPGVVKLGDFGVSACMFDRGDRQRARNTFVGTPCWMAPEVLQPGTGYNFKADIWSFGITALELAHGHAPFSKYPPMKVLLMTLQNAPPGLDYDRDKRFSKSFKEMVAMCLVKDQTKRPTAEKLLKHSFFKNAKPPELTVKNILTDLPPLWDRVKALQLKDAAQLALKRMPSSEQEALSMSEYQRGVSAWNFDIEDLKAQASLICDDDPPEIKEDDDTGRITDIDKDTSSDDYFGKTAPSNGNNCSDRSSVPANPGQNGPEINEILSSNNGNAYSERKPDGRKNPESENDSLPSTSKHDADGKDYRSDFRQKQRTYSGPVLQSGPNNSSMTERGHIIERDAGVQSVSDKQKNGTRRANNLSGPLSLPTRASANSLSRANNLSGPLSLPTRASANSLSAPIRSSAGYVGSLGDKPKRTMVEIKGRFSVTSENVDLAKVQEIPGSSASRKLQVVRIFLGPLFIRNCYFALDISIXQGPSLRKSASVGDWSANDKTTSTNHQRKELCNSSVSTSILIPHLQNLVKQTAFQQFQISLLQDLITNLLSSLQQNERVDAAQSSRVQSTTSDTVVEAATAEREHSLLVKIFELQSRMISLTDELIAAKLKHVQLQEELNVLYCQEEILDMREDESEEA

SEQ ID NO: 300034 - protein, 94 aa, Zea mays
  unsure (1)..(94): unsure at all Xaa locations
  Clone ID: MRT4577_36702C.1.pep
HQLLPGIFQLALLALLLNATNAFIIPQCSLSPIASISQFLPLISLMGFXHPTVQAYMLQLALASSSLQQPIAQLQQQSLAHLTFQTISTHQLQQ

SEQ ID NO: 300035 - protein, 128 aa, Zea mays
  unsure (1)..(128): unsure at all Xaa locations
  Clone ID: MRT4577_36703C.1.pep
MERARRHASRALLRRLLAAAAASPAASPATSSRGIXHPLYARPPARPAVDSMQSXSVCPFPXRWSLHPCTTQGAGRRPVSALQPSDTFPRRHNSATPAEQEAMASACAXRGVNTPGDATVPPVIARRD

SEQ ID NO: 300036 - protein, 61 aa, Zea mays
  Clone ID: MRT4577_36704C.1.pep
LYVLDYSRSSSTTLVDQRLINRLLPARVSPFSIITTFTTSTSHYHHNFLFPFIIIFTLHTT

SEQ ID NO: 300037 - protein, 48 aa, Zea mays
  unsure (1)..(48): unsure at all Xaa locations
  Clone ID: MRT4577_36705C.1.pep
KELRSIRRAKILVSIVAQLLVVDSSFILXRTLPARRDISNHCVCSLAL

SEQ ID NO: 300038 - protein, 46 aa, Zea mays
  Clone ID: MRT4577_36706C.1.pep
HLCSTFCSCTSTYASCLLVFTSSLQPLLVLVLWFLFFCFCRWFLSS

SEQ ID NO: 300039 - protein, 91 aa, Zea mays
  unsure (1)..(91): unsure at all Xaa locations
  Clone ID: MRT4577_36707C.1.pep
GTKRGTRTKDXARKREGRERKRASQRKITREEEEGSKSRGARAAGQNNGGSTRHNRGSKAGEPVTHGDPRRQINRQRERDEPTGDSIRGRA

SEQ ID NO: 300040 - protein, 310 aa, Zea mays
  unsure (1)..(310): unsure at all Xaa locations
  Clone ID: MRT4577_36708C.1.pep
MKQWWDDVDRLLGMAHSTATRSRTRSSRRQHEASASGRSPLVRGAQTNDLRTELDRRRAGEDARVSLERVRERRQNIDGRNLDQDFGAVAPQTPMGTQSQTGVPLAGVGYAALADHLRAASWPPKFWSHLPEKYDGTSNPSEFWQVYITAITAAGGNTTVMATYFHVALFGPARTWLMNLTPGSVYSWEELCVRFVANFASAYQQHXVEAHLHAGVRDEKMLEKLATHDVETVPTLFALADKCARAAEGRAWHSAPQTGAAQSGGLGAIPRDGKXKKKKKDRGYQRPRSTALVVAATTGGQGDRNKRPRP

SEQ ID NO: 300041 - protein, 100 aa, Zea mays
  Clone ID: MRT4577_36709C.1.pep
LAGSTSALRFGIILGLALLALGISSLRSQRDGGRRPRLLVKGQAAIASVIFFREFSVLLQNGWFPKIFMVLLSGVVAGFYFYRIAAGSPKELSSNSDSVN

SEQ ID NO: 300042 - protein, 101 aa, Zea mays
  Clone ID: MRT4577_3670C.1.pep
YVDGFLHTFEGGLSTISLGSGSDPIAETDAVDADNTANWWSISSTPTACAFANITILHLRAHVRVSSSVLPCGSPVVHVHVAVVFGAIRTEVGYSADGHPS

SEQ ID NO: 300043 - protein, 167 aa, Zea mays
  unsure (1)..(167): unsure at all Xaa locations
  Clone ID: MRT4577_36710C.1.pep
GGENPALXPYRLQQAIETRNXLITAGLXQQSPGLCGEQPXTQTRRAQQLQQLELPAIRQGYATNLSAYTEQQQXLPFNQLCTLNPADYWQEQQLLPITQLATAYSQQQQXLSLNQCSELNPYDYIQQHILLPCGQLTTTSPAIFLTQQQLLSXYHQRVANPATLLQL

SEQ ID NO: 300044 - protein, 101 aa, Zea mays
  Clone ID: MRT4577_36711C.1.pep
NGPCMQKKKKKKEKKKKKKKKKKKKKKNKQSISARELMAPGFYWLYKKGYLLIIPHIHLEGGEYFLVEPFLKLGLIGATFPQVYKLRAGQLLNNRMPEKQK

SEQ ID NO: 300045 - protein, 96 aa, Zea mays
  unsure (1)..(96): unsure at all Xaa locations
  Clone ID: MRT4577_36712C.1.pep
MDVSGASGLAYNGAAGRLACWPTNKSVSRSSKAGLYFPVSRVWRYLKKGRFAQRVCTGAPVYLAAVLEYLAAEVLDLVCYAARXDNMKTRIIPRHV

SEQ ID NO: 300046 - protein, 124 aa, Zea mays
  unsure (1)..(124): unsure at all Xaa locations
  Clone ID: MRT4577_36713C.1.pep
MATSSRAHEAPANNPDLPTEDDPYTTGYFLPPTMLREKDPQESLDYYSRERGMSLLHRLDYEEMTFXLYLXGYECAMXCSDDHIKLTVRTIREKATHAIAHYXASXSDPALKGYYNGNSDPRES

SEQ ID NO: 300047 - protein, 89 aa, Zea mays
  Clone ID: MRT4577_36714C.1.pep
EDSAPGVVISTSHQWGSGLAELGLLLLWLVCVLWLLLAWLFLSSVVLCYAFFTHARLNLRLSRKTQSVTSKSLMASPQGMRAVADCDHT

SEQ ID NO: 300048 - protein, 84 aa, Zea mays
  Clone ID: MRT4577_36715C.1.pep
TEHFRYKFANEKLKRTARYYSSNWRTWAAVNIQLAWRRYRARTSATDLAAMAAPPLAGGPDDGDRRLRHYAAMFMSLRPHDHLE

SEQ ID NO: 300049 - protein, 76 aa, Zea mays
  Clone ID: MRT4577_36716C.1.pep
PLFIGFSGQMNRSFLISFLEVAGAPLLVHFVSLSTFPFYVTHLTRRARSFLWNRPLSSNEYLGVLGFRAFSFFQIG

SEQ ID NO: 300050 - protein, 76 aa, Zea mays
  unsure (1)..(76): unsure at all Xaa locations
  Clone ID: MRT4577_36717C.1.pep
CAAXCSTLRSGDLARPETXTSAASHVVAELXELELAFTTSSLYRKVXTRKIETTRPASDSRAVGLRAAGCLAAGAL

SEQ ID NO: 300051 - protein, 84 aa, Zea mays
  Clone ID: MRT4577_36718C.1.pep
PTRPPTRPPTLPPTRPLPAAQTVSGGPPSYICRLSGKSDVDWSFWLEANSSESLRVDVAVLDQYLVDSTKKLKSLFPSWAGLFV

SEQ ID NO: 300052 - protein, 126 aa, Zea mays
  Clone ID: MRT4577_36719C.1.pep
GKNPGPKTGPPKGGPLKPPDLKPRVYPRAWPGTPRGGNPKGRGPAPGGPDLGTQPGEKRGKNVARGKLLAENISPQQTPPKQKGETRGGQRGGPTKINGVGLRGRFQGGKPGGQTGLRNRPTPREK

SEQ ID NO: 300053 - protein, 277 aa, Zea mays
  unsure (1)..(277): unsure at all Xaa locations
  Clone ID: MRT4577_3671C.1.pep
GYLEAGREVPASSAAFLATIGSCEGIILLSYNRISNRKRRLRPSSQILIEFANLQANVEQSPITILKKMMRCIVTGGGCVASWIGDRRSPAVNPFSVRMSTGNVDPEDIPLEKVQAKSSGHVMPYVGVACLGAILFGYHLGVVNGALEYLAKDLGIAENAVXLQGWXVVSTSLAGATLGSFTGGSLADKFGRTRTFILDAAPLAVGAFLSATAQDIRTMXXIGRLLAGIGXIGISSALVPLYISEISPTXIVGTLGSGNQLFICIGXLAALXAGLPL

SEQ ID NO: 300054 - protein, 25 aa, Zea mays
  Clone ID: MRT4577_36720C.1.pep
IDHLRAPDTLTTVFFPASWWIMNNN

SEQ ID NO: 300055 - protein, 40 aa, Zea mays
  Clone ID: MRT4577_36722C.1.pep
RRRCGGGWHWRRRDPGQQTASWPRRCGTWRPRSSTPPAAV

SEQ ID NO: 300056 - protein, 77 aa, Zea mays
  unsure (1)..(77): unsure at all Xaa locations
  Clone ID: MRT4577_36723C.1.pep
MAGGSIISHRRFILLDSSSSXVLAACHRQGRXSFFWGGPSTDXVAFSDDIDMLKGSCGKSLAPFPQGCFYYNALGGL

SEQ ID NO: 300057 - protein, 87 aa, Zea mays
  Clone ID: MRT4577_36724C.1.pep
LLTFVFKGRKGPPKRHTKKNIRTKLGPKKTPTPSPGRGSIPFCPKPNCAFTNPCWQPKIFFLGPPKLNPPAAVYKTRGREKPGGYPN

SEQ ID NO: 300058 - protein, 131 aa, Zea mays
  unsure (1)..(131): unsure at all Xaa locations
  Clone ID: MRT4577_36725C.1.pep
NNMKQVMRLISVLREANQAINPKLLQLVEDRXGSGRSRGRGGMKDDRRDRYSAGKRGGFNTFRDTENYDRGYSSLLKRDFGAKTQNGVYSAANYTNGSFGSNFVSAGIQTSFRTGNPTGTYQNGYDSTQQY

SEQ ID NO: 300059 - protein, 69 aa, Zea mays
  unsure (1)..(69): unsure at all Xaa locations
  Clone ID: MRT4577_36726C.1.pep
MAAKIFSILMLLALSACVANATIFPQYSQAPIAALLPXYLPXMTVXICEXPTLXPYRLTSNDKQYLYLS

SEQ ID NO: 300060 - protein, 89 aa, Zea mays
  Clone ID: MRT4577_36727C.1.pep
MSQRPGRHQRRASQSVFVLPENFALGDVPAAVAEGGGVEQRKPAAADAPELQAARQAGRHRRAMSMAVASRDLEMISEDIGIGAYKYGA

SEQ ID NO: 300061 - protein, 111 aa, Zea mays
  unsure (1)..(111): unsure at all Xaa locations
  Clone ID: MRT4577_36728C.1.pep
SVFEAHDGVLLRYQYKTRYRYSNKVMGHLGDSISIRGDESHSGSFCYMHMDVGLHSAMEGGSGTFGLATACAIGAASAMGGLTEFSYLGRGHWLTLRQLELATNXFSMDNI

SEQ ID NO: 300062 - protein, 60 aa, Zea mays
  Clone ID: MRT4577_36729C.1.pep
HYSDHIVSHQTLLTFYSCNRTQNILAHKDKRNFKKISFVALLMVHPSRNITYIPLIDTSQ

SEQ ID NO: 300063 - protein, 368 aa, Zea mays
  Clone ID: MRT4577_3672C.1.pep
MALITNVSDYEELAKQKLPKMVYDFYAGGAEDQWTLKENKEAFSKILFRPRVLIDVSHIDMSTSILGYKISMPIMVAPTALHKLAHQEGEVASAQAAAAAGTIMTLSSWSSCSIEEVSSIAPGLRFFQLSVFKDRDIVQQLVRRAENAGYKAIAVTVDAPRLGRREADVRNRFRLPENVVLKCFEGLDLSKMDKTKGSGLAAYATSQIDSSLSWKDIKWLQTITGLPILVKGVITAEDARIAIECGVAGIIVSNHGGRQLDYLPATISCLEEVVREAKGRRVPVFLDGGIRRGTDVFKALALGASGVFIGRPVLFALAVDGRAGVRNALRMLRDELEITMALSGCASLKDITRDRVITERDMIRRSRI

SEQ ID NO: 300064 - protein, 58 aa, Zea mays
  unsure (1)..(58): unsure at all Xaa locations
  Clone ID: MRT4577_36730C.1.pep
FVMAKVQFSGGDIKSICPQAGWLPLTQPRIKVTHADFKKAKEKVIFSKKXGVPEGLNM

SEQ ID NO: 300065 - protein, 45 aa, Zea mays
  Clone ID: MRT4577_36731C.1.pep
LFSPVLARFDIRCSLFCCTIECHNDSHKYTSDRVHWCQSFIRMLG

SEQ ID NO: 300066 - protein, 77 aa, Zea mays
  unsure (1)..(77): unsure at all Xaa locations
  Clone ID: MRT4577_36732C.1.pep
YRKTRVLISXSFGNSQNDLKRKQHKSFVSPVGQFCFFAYLILLRGGGAPFIPSLVCASCYRFIVHFGFLPFFWALCV

SEQ ID NO: 300067 - protein, 72 aa, Zea mays
  unsure (1)..(72): unsure at all Xaa locations
  Clone ID: MRT4577_36733C.1.pep
PKSKNEMKKAKKIKKKKKKKKKKKKKKKKKKKKKKKKKKKKKKKXKKKKKKQKKKKKIKKACTNKKKXKKLG

SEQ ID NO: 300068 - protein, 194 aa, Zea mays
  unsure (1)..(194): unsure at all Xaa locations
  Clone ID: MRT4577_36734C.1.pep
PAWISGFPASDGRLQIIKNNDLEELQELGSGTFGTVYHXRYDFWNEASKLADLHHPNVGAFYGVVLDGPGGSIATVTEYMVNGSLRTALLKNAKTLDRRKRLIIAMDTAFGMEYLHSKNIVHFDLKSDNLLVNLRDPQRPICKVGDLGLSKVKCQTLISGGVRGTLPWMAPELLNGSSSLVSEKXDVFSFGIVL

SEQ ID NO: 300069 - protein, 50 aa, Zea mays
  Clone ID: MRT4577_36735C.1.pep
TRANILTINIGLVSNATQRTGRRGHRLQTGALTSIMAESIRIIKVWIYRR

SEQ ID NO: 300070 - protein, 159 aa, Zea mays
  unsure (1)..(159): unsure at all Xaa locations
  Clone ID: MRT4577_36736C.1.pep
DIGGRSRGRSHWQSPPDAERDVQVGVKRQGLPPTQTARAGREHEGCLLLRPYTAQRYAAVMATLLFLLWTGAKKIGRGYLIDIVWLRDPRRRPVRWCWRTAHPLATRWCQLLAALLDPRKDGGPDETMDQLXAHAGAQGGHAHNARWTSLRTGSGHCVG

SEQ ID NO: 300071 - protein, 731 aa, Zea mays
  Clone ID: MRT4577_36737C.1.pep
MEGVTNSVFIDPTGLHQHVYVQQQQQQQQMPPQQLPSTYGFSHIPVISSEKDRVVSPSSAHNDVANSHHQFMQQSQQQLPSGHWMPQYPVKPTSPSNPLAGEGSVSGNSRHNEDGQVYRDNMPPVAPVAVPTYMANVDRMMDSLRMSPSEVSGSTEQRKHAMSPDSGLPQNAVPDYSQGHPENSISTWPDTRANDVHPSNTNTFFDVSEPKVLLQTESAPPPSVASSYLHNVQHVNMSHMPHMVSIGGPYSSYVVATVGPGGLPQSTYGIDMIYPNATVNPVTERRDVPPEVYHKEAPHEVVAPPNTVQLPTAALANHATNVDQAAAHALPPRPKRVASRENISPKDPHPHNSLLNCKGPDLNIPAEDVSLQKQSDHKGDDISNPDLLSMDDGLATSKAQSSEPQPPLVNEGVGAITNKVEGEVHPNEVSKSRPADWISGFPASDGRLQIIKNNDLEELQELGSGTFGTVYHGKWRGTDVAIKRINDRCFAGKPSEQEKMRYDFWNEASKLADLHHPNVVAFYGVVLDGPGGSIATVTEYMVNGSLRTALLKNAKTLDRRKRLIIAMDTAFGMEYLHSKNIVHFDLKSDNLLVNLRDPQRPICKVGDLGLSKVKCQTLISGGVRGTLPWMAPELLNGSSSLVSEKVDVFSFGIVLWELLTGEEPYADLHYGVIIGGIVSNTLRPPVPDSCDPEWRSLMEQCWSTEPSERPNFTEVANRLRSMAASQKVQQH

SEQ ID NO: 300072 - protein, 215 aa, Zea mays
  unsure (1)..(215): unsure at all Xaa locations
  Clone ID: MRT4577_36738C.1.pep
HSVPATSRATLTPSLSTEHITGXXXRGFEVVYMTEPVDEYCVQQLKEFDGKSLVSVTKEGLELPEDEEEKKKMEESKAKFENLCKLMKEILDKKVEKVTISNRLVSSPCCIVTSTYGWTANMERIMQAQALRDNSTMGYMMATEHLEINPDHPIVGTLRQKAEADKHDKAVKDLVVLLFETALLSSGFSLXGPQTHPPHSRMSARSSLMSEWHRE

SEQ ID NO: 300073 - protein, 81 aa, Zea mays
  Clone ID: MRT4577_36739C.1.pep
RAPSGTRCGTSARNTATKSSWNAPPATRVLLNLKPFWMLTNLAQKPKSTAPLSPLPLEPNPTDTACSPPFFLVSCLCRAVQ

SEQ ID NO: 300074 - protein, 366 aa, Zea mays
  unsure (1)..(366): unsure at all Xaa locations
  Clone ID: MRT4577_3673C.1.pep
GWPGKKWGKERVREVPASSAAFLATIGSCEGIILLSYNRISNRKRRLRPSSQILIEFANLQANVEQSPITILKKMMRCTVTGGGCVASWIGDRRSPAVNPFSVRMSTGNGGWCGGLRSRAADLSGLEMAHLRGGIGGLFRASPRYGRLQATAAVDPEDIPLEKVQAKSSGHVMPYVGVACLGAILFGYHLGVVNGALEYLAKDLGIAENAVLQGWVVSTSLAGATLGSFTGGSLADKFGRTRTFILDAAPLAVGAFLSATAQDIRTMIIGRLLAGIGIGVSSALVPLYISEXRYVEMTVALFKTXAVVICTSACVDEHPQQMNFLYSXISPTEIRGTLGTVNQLFICIGILAALLAGLPLAGNPAW

SEQ ID NO: 300075 - protein, 66 aa, Zea mays
  Clone ID: MRT4577_36740C.1.pep
LQIIVLGTGKKKMEEELMELEVKYPKIARGIAKLQCVHWAHMMFARSDFSIVPSRFEACGLIQLQG

SEQ ID NO: 300076 - protein, 148 aa, Zea mays
  Clone ID: MRT4577_36741C.1.pep
CCSGCFGDCLAEPLPCACARETGGDFAYTRDGLLKEGFLDACVSMLREPLKQPHFYCKGVCPIEQIMKGVSSAKPDACKGHLIKKFIKECWIKCGCTRNCGNRVVQRGITRKLQVFLASRKKGWGLRSAENLPRGAFVCEYVGEILTN

SEQ ID NO: 300077 - protein, 87 aa, Zea mays
  unsure (1)..(87): unsure at all Xaa locations
  Clone ID: MRT4577_36742C.1.pep
PPGGAVLVRPSXRGLATGCHPACVPSLGLRRQAAASCGPSWKERPAGLDPVGVCPQGADCAAPRPSSTISQTPPVPASVRCRQVGGV

SEQ ID NO: 300078 - protein, 82 aa, Zea mays
  Clone ID: MRT4577_36743C.1.pep
DRKNGELGLRFPLWPVPIPNHLPTCGLTSLLWDESPCLFTWVNQVQQVRSELVVEDWALLRRSTQLGKKYALLTDCLNDPSY

SEQ ID NO: 300079 - protein, 140 aa, Zea mays
  Clone ID: MRT4577_36744C.1.pep
MLGVARRRLGSGCVLAQLAQALRPAAAPARTYSAAAKEITVREALNTALDEEMSADPSVFLMGEEVGEYQGAYKISKGLLDKYGPDRVLDTPITEAGFTDIGVGAAYHGLRPIVEFMTFNFSMQAIDHIINSAATSNYMS

SEQ ID NO: 300080 - protein, 398 aa, Zea mays
  unsure (1)..(398): unsure at all Xaa locations
  Clone ID: MRT4577_36745C.1.pep
MLGVARRRLGSGCVSALPPPGSPPSPRSHRDPFPSPQVLAQLAQALRPAAVPARTYSAAAKEITVREALNTALDEEMSADPSVFLMGEEVGEYQGAYKISKGLLDKYGPDRVLDTPITEAGFTGXIGVGAAYHGLRPIVEFMTFNFSMQAIDHIINSAAKSNYMSAGQISVPIVFRGPNGAAAGVGAQHSQCYAAWYAHVPGLKVLAPYSAEDARGLLKAAIRDPDPVVFLENELLYGESFPVSAEVLDSSFCLPIGKAKIERQGKDVTITAFSKMVGYALQAADILAKEGISAEVINLRSIRPLDRATINASVRKTNRLVTVEEGFPQHGIGAEICMSVVEDSFEYLDAPVERIAGADVPMPYAANLERMAVPQVDDIVRAAKRACYRAAVPMAATA

SEQ ID NO: 300081 - protein, 216 aa, Zea mays
  Clone ID: MRT4577_36746C.1.pep
MAMQVDLSNAQVMKDEAGRPFIIVRDQGKKQRQHGNEAVKSHILAAKTVANIVKSSLGPRGLDKILISPDGDITVTNDGATILSQMEISNHVAKLLVELSKSQDDEIGDGTTGVVVLAGALLEQAADLIDKGIHPIRIADGYDQACEVAVAKLDEVSDEINFSRENTEELFKVAKTCLGSKIVSKAHDQFANIAVDAVLSLADLERKDVDFELIKV

SEQ ID NO: 300082 - protein, 72 aa, Zea mays
  Clone ID: MRT4577_36747C.1.pep
MAFKDTGKTPVEPEVAIHRIRITLTSRNVKSLEKVCADLIRGAKEKNLKVKGPVRMPTKTLRITTRKTPCGE

SEQ ID NO: 300083 - protein, 80 aa, Zea mays
  Clone ID: MRT4577_36748C.1.pep
HGSAPGSGFKCSIPSKLKLSRAIIGADFLFPPLFFYISRPGVFELVPPCFLFPLVGLKSVWAGIFPWILKACPWLLQRFI

SEQ ID NO: 300084 - protein, 125 aa, Zea mays
  Clone ID: MRT4577_36749C.1.pep
PKSCSEIGARGTTSAGKSPLGERTKETPSGAPNKNFAGWGDPQIKKAGCNASGFFELSSGVWVKHPAPVWVVFQHLSPRLRKKVGVPYPKKGPGHRLLHYKFLIMSYVGTLNQLCMRSHSLFPSE

SEQ ID NO: 300085 - protein, 403 aa, Zea mays
  unsure (1)..(403): unsure at all Xaa locations
  Clone ID: MRT4577_3674C.1.pep
MALITNVSDYEELAKQKLPKMVYDFYAGGAEDQWTLKENKEAFSKILFRPRVLIDVSHIDMSTSILGYKISMPIMVAPTALHKLAHQEGEVASAQAAAAAGTIMXIEEVSSSAPGLRFFQLSVFKDRDIVQQLVRRAENAGYKAIAVTVDAPRLGRREADVRNRFTLPENVVLKCFGGLDLSKMDNVYLKKLSCGPATRHRXEMNXSFHFYFVLFFYFHSNCFVIFDFPDXGSGLAAYATSQIDSSLSWKDIKWLQTITGLPILVKGVLTAEDARIAIECGVAGIIVSNHGGRQLDYLPATISCLEEVVREAKGRRVPVFLDGGIRRGTDVFKALALGASGVFIGRPVLFALAVDGRAGVRNALRMLRDELEITMALSGCASLKDITRDRVITESDMIRRSRM

SEQ ID NO: 300086 - protein, 87 aa, Zea mays
  Clone ID: MRT4577_36750C.1.pep
ERWGTRTIFLWNRPTTRAKKKTPKQRQRNGAGCHLCLDGKSISNIWNIYFATYVLIDSDSDSDGICVRLALRGTSLYIASPLKKRIC

SEQ ID NO: 300087 - protein, 112 aa, Zea mays
  Clone ID: MRT4577_36751C.1.pep
RSGRGRPPGCPPRRWWGFPRGASPGTRPPGRWCFCPNCPKHPRGRFKSSPPGSRPGPWAAFPAQKNRLGQGPRPSFFFNLHAPMDVSSLPLPGSLAPPTLSLFTFFFFFLPL

SEQ ID NO: 300088 - protein, 63 aa, Zea mays
  Clone ID: MRT4577_36752C.1.pep
ADMHANSAHHGTNNRLCFPQCSTGQIVKQCYDNPTYNALKCGDTINCSNLKGAFQILFCLIAL

SEQ ID NO: 300089 - protein, 93 aa, Zea mays
  Clone ID: MRT4577_36753C.1.pep
KETRWDWDAVVVADKSGATALLRLALLLSFGAGDGGRSFLVRLGRRKHVHLRTPLTGGSVAPLAILTILFCRGSVWGATGTFSWERSWVTMGY

SEQ ID NO: 300090 - protein, 94 aa, Zea mays
  Clone ID: MRT4577_36754C.1.pep
ERGIWGPPLFGGWGLLLGPWGFRFFFWDAVFWGNCFGCHFFPWLGPFGFFFLLWAWAGVCNCGGLSFLTVPFWGPAWAGFGKKMGSTRKDKKCN

SEQ ID NO: 300091 - protein, 65 aa, Zea mays
  Clone ID: MRT4577_36755C.1.pep
MFFEPAKNLGKLRELKKNGNFVLFKCELGGGPFSKSGRFEKLQEGGFSYGFILKGLGMTRKLGSL

SEQ ID NO: 300092 - protein, 96 aa, Zea mays
  Clone ID: MRT4577_36756C.1.pep
MATALNRGLRSGIRLLATGAEASKPASRGFHATGVKRMSGHGHDEPYYLHAKHMYNLHRMKHQKLTAWTSVLGAVSIGIGVPVFAVVFQQKKTSSG

SEQ ID NO: 300093 - protein, 71 aa, Zea mays
  Clone ID: MRT4577_36757C.1.pep
FMAEERGSSWCEWKKLLGVASIMEDEWEGMVKIVRRVDFWRVGGMNGQVVSESISRGLLGQSCGVVSGQMF

SEQ ID NO: 300094 - protein, 170 aa, Zea mays
  unsure (1)..(170): unsure at all Xaa locations
  Clone ID: MRT4577_36758C.1.pep
SAGPRPRSTSPTRTRRPSTTTTTTATPTPTPPRRRGCSPCPPAEAGTTTXSTTTSSTSWAWAASSSTTRTCPTPWRSRSRCPRSRTCTTSRRRSNRRALPGWTCGRSTPSTRPCPCDVIDRATGGYASCCAACFVLLMNEHVATFQYLFIFVASFLYLQYISIGAIYLPM

SEQ ID NO: 300095 - protein, 38 aa, Zea mays
  Clone ID: MRT4577_36759C.1.pep
KDHVAGHIGSRVLTPQSSTNTCKEFYFTSTHKFYNICN

SEQ ID NO: 300096 - protein, 61 aa, Zea mays
  Clone ID: MRT4577_3675C.1.pep
DTMIRFTELNAALKFLYNTLNITTRLSIFFPASRVIINFHSVLQGFTFIPACLYCSVHDSY

SEQ ID NO: 300097 - protein, 48 aa, Zea mays
  Clone ID: MRT4577_36760C.1.pep
RHAVPVPKSECTKTTQVGISSAGGCLCYPSQPPPWPGARSCRRLGFWR

SEQ ID NO: 300098 - protein, 64 aa, Zea mays
  Clone ID: MRT4577_36761C.1.pep
SQTIRLASQSIGRALLYGFLRLQLQETRKSDLNTMTTILLTHSDRVSEPSIPSIVNPRINRRTH

SEQ ID NO: 300099 - protein, 78 aa, Zea mays
  Clone ID: MRT4577_36762C.1.pep
GPNLKGVFRGPPPLEKKKAPFAPKINPTPQRAWAVFPFFFFLTPPPTQGPPAPEGFFFHFYPPSHLKTSKGEQFSRGV

SEQ ID NO: 300100 - protein, 210 aa, Zea mays
  unsure (1)..(210): unsure at all Xaa locations
  Clone ID: MRT4577_36763C.1.pep
RRSESLRRIPQGERTNTRRGRTIPELQILARGLSTPLSTLPVPSHWMXDLLCVAFDTNPLSEPLKNKQSVPMILFLRNKFVHGLTYQDKQLIIMRQIIMNDAYVPTXDNTYPAAILHIISITPTGENYRILYEPTARFRLLSVTHEDAKNELCKDTFDSDEQKVIHYLITYDERIIRFPELLMTVTDTIXVDLHTNXIADFIDLDVGNVD

SEQ ID NO: 300101 - protein, 164 aa, Zea mays
  unsure (1)..(164): unsure at all Xaa locations
  Clone ID: MRT4577_36764C.1.pep
MDTVIIMPDXDYALDLARIRFQLIRLEDTITFHLIERVQFALNRTIYAPGADELPESNLSFLDWYFREQEKLQSLIRRFESPDEYPFFPDALQKPILKPLNYPRILYENDVYVNDKIKAFYTEQFLPAVCPDFGREXRSESQDTTGXTATCDIACLXALSRRIH

SEQ ID NO: 300102 - protein, 83 aa, Zea mays
  unsure (1)..(83): unsure at all Xaa locations
  Clone ID: MRT4577_36765C.1.pep
LKTNLFSWASSYKGPARPPPLFGGVLPMLGAPPAQAFFHEAPSEAFGFSLXNAKTMGVCHPGPSVVALPPLGVFSVLQVLPFK

SEQ ID NO: 300103 - protein, 54 aa, Zea mays
  Clone ID: MRT4577_36766C.1.pep
RICPFTVGSIVQLGFGACKSHLRFLRPLCMSPNKLGAPPQRCAHHLGRRRGEIG

SEQ ID NO: 300104 - protein, 119 aa, Zea mays
  Clone ID: MRT4577_36767C.1.pep
GRGGPSLGAHVRVSLAHVRHFSLRGGPTVPRKIADRLAAVFDKHRGGRFFRGGGKPPGGPRHVAVGPPRKGDVLRWTILWFRHALGSWTLLGSISFPCVFYFMRPPVVLNTYRGLDRLS

SEQ ID NO: 300105 - protein, 79 aa, Zea mays
  Clone ID: MRT4577_36768C.1.pep
HLPLIHLKSSTSILSIIPQRLYFSPTTPFSRSSLMPYRSSLLLDPPPLSCRMSNKMIHFTRVLSLLLMYSSDSSKISYI

SEQ ID NO: 300106 - protein, 593 aa, Zea mays
  Clone ID: MRT4577_36769C.1.pep
SVVNNQVAFTTDPRSGRSSQYCTDVAKALDAPIFHVNGDDLEAVVHVCELAAEWRQTFHSDVVVDIVCYRRFGHNEIDEPSFTQPKMYKVIRNHPSALEIYQRKLLESGKISKVDIDKLNKKVSTILNEEFQNSKDYVPNKRDWLSAYWTGFKSPEQISRIRNTGVKPEILKRVGEAMTTLPENFNPHRAVKKIFDQRRQMIKTGEGIDWAVGEALAFATLIIEGNHVRLSGQDVERGTFSHRHSVLHDQETGDQYCPLDHLVMNQDEELFTVSNSSLSEFAVLGFELGYSMENPNSLVIWEAQFGDFSNGAQVIFDQFLSSGESKWLRQTGLVVCLPHGYDGQGPEHSSARLERFLQMSDDNPYVIPEMDPTLRKQIQQCNWQVVNVTTPANYFHVLRRQIHRDFRKPLIVMSPKNLLRHKDCKSNLSEFDDLAGHPGFDKQGTRFKRLIKDQNNHKDLEEGINRLVLCSGKVYYELDEERRKTERTDVAICRVEQLCPFPYDLIQRELKRYPNAEIVWCQEEPMNMGAYSYINPRLLTAMKALGRGGIEDIKYVGRAPSAATATGFYSVHVQEQTELVQKALQRDPINYPF

SEQ ID NO: 300107 - protein, 180 aa, Zea mays
  unsure (1)..(180): unsure at all Xaa locations
  Clone ID: MRT4577_3676C.1.pep
YPRGLGRVPDGXQNPIHLSVPYEDITNVNFLKRGFMKVENSGYIWKAPLDKVSIEERLNWIRECETPIEALYQNIESALHEASIWGEEYFNDLSGRLNSALDRVMLERPDISYQECQARWWANMTDDAIGQPSYIALVSKASRGNIDLHAKYKDLFTGKCHDLRELLARAKPVASIPLEV

SEQ ID NO: 300108 - protein, 64 aa, Zea mays
  Clone ID: MRT4577_36770C.1.pep
MILSSISYKSYSSHPIHHLYIYTITPTIFNIFIHIPIYINFKYQLFYITLLINVYSLLYSSFFY

SEQ ID NO: 300109 - protein, 1025 aa, Zea mays
  unsure (1)..(1025): unsure at all Xaa locations
  Clone ID: MRT4577_36771C.1.pep
MGLFRAASGLARLALRRNLSRAAASPFAGSGGAVPGAMPARYFHSTRPRRFAAPAPRAVPLSRLTDSFLDGTSSVYLEELQRAWEADPNSVDESWDNFFRNFVGQAATTSPGLSGQTIQESMRLLLLVRAYQVSGHLKAKLDPLGLEERPVPDVLDPGFYGFSEADLDREFFLGVWMMAGFLSENRPVQTLRSVLERLEQAYCGTIGYEYMHIPDREKCNWLRDRIETVNPMDYTYDRRQVMLDRLIWSTQFESFLATKWTTAKRFGLEGAETLIPGMKEMFDRAADLGVESIVIGMPHRGRLNVLGNVVRKPLRQIFSEFSGGTKPVNEGEGLYTGTGDVKYHLGTSYDRPTRGGKQIHLSLVANPSHLEAVDPVVAGKTRAKQYYSNDRDRTKNLGVLLHGDGSFSGQGVVYETLHLSALENYTTGGTIHIVVNNQVAFTTDPRSGRSSQYCTDVAKALDAPIFHVNGDDLEAVVHVCELAAEWRQTFHSDVVVDIVCYRRFGHNEIDEPSFTQPKMYKVIRNHPSALEIYQRKLLESGKISKEDIDRLNKKVSTILNEEFQNSKDYVPNKRDWLSAYWTGFKSPEQISRIRNTGVKPEILKRVGEAMTTLPENFKPHRAVKKIFDLRRQMIETGEGIDWAVGEALAFATLIIEGNHVRLSGQDVERGTFSHRHSVIHDQETGEQYCPLDHLVMNQDAELFTVSNSSLSEFAVLGFELGYSMENPNSLVLWEAQFGDFSNGAQVIFDQFLSSGESKWLRQTGLVVCLPHGYDGQGPEHSSARLERFLQMSDDNPYVIPEMDPTLRKQIQQCNWQVVNVTTPANYFHVLRRQIHRDFRKPLIVMSPKNLLRHKDCKSNLSEFDDLAGHPGFDKQGTRFKRLIKDQNNHKDLEEGINRLVLSSSSSXYTFPEQRRKSERTDVAICRVEQLCPFPYDLIQRELKRYPNAEIVWCQEEPMNMGAYSYINPRLLTAMKVLGRGGIEDIKYVGRAPSAATATGFYSVHVQEQTELVQKALQRDPLNYPF

SEQ ID NO: 300110 - protein, 227 aa, Zea mays
  Clone ID: MRT4577_36772C.1.pep
RGRPGQHCRKQIQQCNWQVVNVTTPANYFHVLRRQIHRDFRKPLIVMSPKNLLRHKDCKSNLSEFDDLAGHPGFDKQGTRFKRLIKDQNNHKDLEEGINRLVLCSGKVYYELDEERRKSERTDVAICRVEQLCPFPYDLIQRELKRYPNAEIVWCQEEPMNMGAYSYINPRLLTAMKVLGRGGIEDIKYVGRAPSAATATGFYSVHVQEQTELVQKALQRDPLNYPF

SEQ ID NO: 300111 - protein, 58 aa, Zea mays
  unsure (1)..(58): unsure at all Xaa locations
  Clone ID: MRT4577_36773C.1.pep
TTRHYKKVFSXATKEATGGTKKFAVLMLFVLFTCVANAPIFLKCSHAPLAPIFPQYLP

SEQ ID NO: 300112 - protein, 76 aa, Zea mays
  unsure (1)..(76): unsure at all Xaa locations
  Clone ID: MRT4577_36774C.1.pep
LTTPQIHFENYITISLTDNHCPSMHTPPXSPSPSTPHFXHHHHHNHAHQRSFHLXLNFSHFASTTSLTTTPSFFNP

SEQ ID NO: 300113 - protein, 98 aa, Zea mays
  Clone ID: MRT4577_36775C.1.pep
LHYQASAQAGGFFFNAVGILTHDQTLIMATFIEGPKLTLMTVVNSRCGRRQTPTQPRPTTMETKTTSQGPKHSLNKTVCANKLGLACAVETQTPNKPS

SEQ ID NO: 300114 - protein, 122 aa, Zea mays
  unsure (1)..(122): unsure at all Xaa locations
  Clone ID: MRT4577_36776C.1.pep
WGGGGGFFFFFFFFFFFFLGPFSMLSSIVFFSLPFQKKKGGAQKKATYSFWGSARGYFPPPPXKAFFWGFPSGKLGKKNPKTSFHWGKFFSFPLGPPPPLLLPLFPSPRCGFARLALFFLFG

SEQ ID NO: 300115 - protein, 138 aa, Zea mays
  Clone ID: MRT4577_36777C.1.pep
SPVALAIRNHMMFRIQSARPLALFDFFRFVFFFFFCLLLHRARNRSSNSCVPTHYHLRAEIVALFPRPSALAHRHLPARARLTQLIAMAVAIFPVSCRIYFRHGHAQRAQRVRPLSAWRLGRAHARAGGPASYVLAAS

SEQ ID NO: 300116 - protein, 63 aa, Zea mays
  Clone ID: MRT4577_36778C.1.pep
RGGLKPFSGFFSEETPGVLKFFLENVIRDAVPYPEHAPRKTVTAMDVVYALKRQGRPLYGFGG

SEQ ID NO: 300117 - protein, 100 aa, Zea mays
  Clone ID: MRT4577_36779C.1.pep
MAAASGRAPSACALLLFLLLVVGAAAAAAVVVDAPAPSPVSFIDCGSACGARCALSSRWNLCPRACGSCCARCNCVPPGTAGNHDVCPCYAAITTRGGRP

SEQ ID NO: 300118 - protein, 75 aa, Zea mays
  unsure (1)..(75): unsure at all Xaa locations
  Clone ID: MRT4577_3677C.1.pep
VKDEYFRLFSNKFSEHQPDRSXKHGTYHKDYNEPPPAPLFKPYELKFLSYYHSIIFYFFASLLXLYISILTLIII

SEQ ID NO: 300119 - protein, 125 aa, Zea mays
  Clone ID: MRT4577_36780C.1.pep
MAAASGRAPSACALLLFLLLVVGAAAAAAVVVDANRGEQEQDRDWEQLSAASPSPWSPAPAPAPSPVSFIDCGSACGARCALSSRWNLCRRACGSCCARCNCVPPGTAGNHDVCPCYAAITTRGG

SEQ ID NO: 300120 - protein, 129 aa, Zea mays
  Clone ID: MRT4577_36781C.1.pep
MAAASGRAPSACALLLLFLLLVVGAAAAAVIVVDANRGEQEQEQDWDWEQLSAASPSPWSPAPAPAPSPVSFIDCGSACGARCALSSRWNLCRRACGSCCARCNCVPPGTAGNHDVCPCYAAITTRGGR

SEQ ID NO: 300121 - protein, 87 aa, Zea mays
  Clone ID: MRT4577_36782C.1.pep
TSHLELSVLSVLASLLGFHPRRKSLSMFSRCCPSVNPVIVVVNPHVGLKPQECRLVNAQREDRVWAGKLIRPPGSSRLNRQCVSLMV

SEQ ID NO: 300122 - protein, 190 aa, Zea mays
  Clone ID: MRT4577_36783C.1.pep
MAGYLHTLDTHFDDLFSHCTHLNSQVESLEQRIKELKEENAALQNNLELLEGKEANTREAYRTLKMDYARKLKRFAPVKKTWKRFKSQGCQTDPKEESLQSLPSLGLDNLSDVEEVSLDSLDELLREFGDTLFRDKAIDKVIHADRLLMKKPDMVILEDIVTDMLSAPSVEVGIPPSDSRSASTARNEVA

SEQ ID NO: 300123 - protein, 127 aa, Zea mays
  Clone ID: MRT4577_36784C.1.pep
MEGADPAMAGACWREAGGRRGALLLRAGKKGRTPWEERELPACCMPRTAEGGRRPGCCYARENEQGRRRERGAASMGKKGATTGHHGKREMEVGHGRRRATCSSSDLEKGSYALWSQGRGRWAEEAG

SEQ ID NO: 300124 - protein, 81 aa, Zea mays
  Clone ID: MRT4577_36785C.1.pep
RQVPDILYDKRIPHKLKDEFYRIAISLLCCMVQNVGLQKRQHVQYISVAKLCILRWIYVHTRWDRVQNDDICYRIGIALIE

SEQ ID NO: 300125 - protein, 85 aa, Zea mays
  Clone ID: MRT4577_36786C.1.pep
SIYVLEFIDKSFFTMSHPTKCLYTHERCKGSDERGEDLNLQDQETCPKSDIFDSGHVTTPDEEERLKLSWLIYRDLICTQTMDEY

SEQ ID NO: 300126 - protein, 118 aa, Zea mays
  Clone ID: MRT4577_36787C.1.pep
FFRVKPCLGAELYIFDSNHWNGKGMSIEPGFLLSLTLCMKWKCALERSTIRIVKLYCILAASLETCLDTARTRSKQLDQHRTAEMVELNSKLLQYIKNDLRKARNEKKNSHSVMEMVT

SEQ ID NO: 300127 - protein, 338 aa, Zea mays
  Clone ID: MRT4577_36788C.1.pep
MVAATLALLLVTLAALHGAAPVLAVAGDPPFSCGPSSAEASEGLAFCDVTLAPAQRAADLVSRLTVAEKIAQLGDQAPGVPRLGVPGYKWWNEALHGLATSGKGLHFDAAVRAATSFPQVLLTAAAFDDDLWFRIGQAIGREARALFNVGQAEGLTIWSPNVNIFRDPRWGRGQETPGEDPAVASRYAVAFVRGIQGNSSSSLLQTSACCKHATAYDLEDWNGVARYSFVARVTEQDLEDTFNPPFRSCVVEAKASCVMCAYTAINGVPACANSDLLTGTVRGDWGLDGYVASDCDAVAIMRDAQRYAPTPEDAVAVSLKAGLDIDCGSYVQQHAAAL

SEQ ID NO: 300128 - protein, 1529 aa, Zea mays
  Clone ID: MRT4577_36789C.1.pep
MGTPVGIIVGSHVWVEDPNLAWIDGEVISIKNNEVHVQTSNGKKVTTDRSKVFPKDMEAPPGGVDDMTRLSYLHEPGVLQNLATRYELNEIYTYTGSILIAVNPFQRLPHLYDTHMMEQYKGADFGELSPHDFAIADVAYRAMDNEGKSNSILVSGESGAGKTETTKMLMRYLAHLGGRSGVEGRTVEQQVLESNPVLEAFGNAKTVRNNNSSRFGKFVEIQFDKTGRISGAAIRTYLLERSRVCQINSPERNYHCFYFLCAAPPEYTQRYKLSDPRSFHYLNQSSCIEVDGINDAEEYLATRRAMDIVGINEEEQEGIFRVVAAVLHLGNINFAKGTEIDSSVIKDDKSRFHLNIAAELLKCDCQNLEKALITRVIVTPEEVITRTLDPASAVASRDALAKIIYSRLFDWIVEKINVSIGQDPNSKQLIGVLDIYGFESFKVNSFEQLCINYTNEKLQQHFNQHVFKMEQEEYTREEINWSYIEFVDNQDVLDLIEKKGGLIALLDEACMFPRSTHETFAQKLYTTFKNNKRFAKPKLSRTDFTVVHYAGDVTYQADYFLDKNKDYVVAEHQDLLNASSCLFVAGLFPPLPQETAKSSKFSSIGSRFKLQLQSLMETLSSTEPHYIRCVKPNNLLKPAIFENTNVIQQLRCGGVLEAIRISCAGYPTRKTFYEFVNRFGVLAPEVLEGSNDDKIACQKILEKMGLENYQIGKTKVFLRAGQMADLDARRAEVLGRAARIIQRQIRTYIARKQFAELKRSATQLQSFVRGTLARKLYECMRQEAAAVKIQKNMRRHKARESYLQLQAAAITLQTGLRAMSARKEFRFRKETKAAVHIQAQWRRHRDYSHYKNLQGAALTYQCAWRQRLARRELRKLKMAARETGALKEAKDKLEKRVEELTWRLGLEKRLRTDLEEAKAQEIAKLQETLHDMQLQVEESKAMVVKEREAARKAIEEAPPVIKETPVLVEDTEKINSLTTEVEQLKALLLTERQATEAAKREHAESELRNEELIKKFESAEKKIEQLQETVHRLEEKATNMESENKVLRQQAVAISPTSKSLAAYPKSPFQLKTPENGNALNGEVKSSPDITPILPNPKELEAEEKPQKSLNEKQQENQDLLIKCVSQDLGFSSGKPIAACLIYRCLLHWRSFEVERTGVFDRIIQTIGSAIESQDNNDKLAYWLSNSSTLLLLLQRTLKTTGAAGFTPQRRRSSAASFGRVFSGMRASPQSAGRAFMGSRLIGGLGDLRQVEAKYPALLFKQQLTAFLEKIYGMIRDNLKKEISPLLGLCIQAPRTSRASLIKGSRSQANALAQQTLIAHWQSIVKILTNYLNVLKANYVPSVLISKVFTQIFSFINVQLFNSLLLRRECCSFSNGEYVKAGLAELEQWCIYATEEYAGSSWEELKHIRQAVGFLVIHQKPKKTLKEITNDLCPVLSIQQLYRISTMYWDDKYGTHTVSSDVISSMRVMMTEDSNNAVSSSFLLDDDSSIPFSVDDISKSMTEIEVTDVDMPPLIRENSGFTFLHQRKD

SEQ ID NO: 300129 - protein, 148 aa, Zea mays
  Clone ID: MRT4577_3678C.1.pep
LGAGIGKDDRLFKLGPGEVTTGRVLGENSSPRPPGRDPAGRQAARARTQKWSSEGLEPRGGEAPWMSSVLKLACWPTPEGAHAPGKGTRVGELRACAPWGEGKIPAAGEVRQGGLQERREEDAGGSRLEICGAMDGATSPARGEEGQT

SEQ ID NO: 300130 - protein, 113 aa, Zea mays
  unsure (1)..(113): unsure at all Xaa locations
  Clone ID: MRT4577_36790C.1.pep
RNSXSSXEPGRXTXAFSXCXLPFXSTRGRERNYHAMRRWSPLDDPAAVRCCSPPVPWPGLSPRRPSPXGAAWPFSRGVGPRLVPWSAPRRSLRPRLLVDTALSTGRCCFFXWA

SEQ ID NO: 300131 - protein, 80 aa, Zea mays
  Clone ID: MRT4577_36791C.1.pep
WTTICIACVFIYNTSPYISQSLEVRWHDPTAVVRHEPEVNLQLQVQAHHFVFFFGINLHLCYLDRNALNQSLAQRHGRRQ

SEQ ID NO: 300132 - protein, 93 aa, Zea mays
  Clone ID: MRT4577_36792C.1.pep
RSDSDKMFYVRLESSLIPHMRLSIWVIYNSLLLNKQTINICVICVIRSVNDLIQELMFNSITQKFIKGYYRNNFSSFQQFMVHTIFLFTCMRN

SEQ ID NO: 300133 - protein, 70 aa, Zea mays
  unsure (1)..(70): unsure at all Xaa locations
  Clone ID: MRT4577_36793C.1.pep
NDPVEKAXXYSFXSASQSFPQFPPFSYFSSPPPXPLFKNSTRECIWIVIVEVGHQVANVWWELYCLEYGI

SEQ ID NO: 300134 - protein, 142 aa, Zea mays
  unsure (1)..(142): unsure at all Xaa locations
  Clone ID: MRT4577_36794C.1.pep
SLVPLALPAPARASPRPLRPPLCVRLFLSSVRPESAAPQASPRASDNESHALFPSLLFGDQFAFFDAGAYESLVSLFSAHAVQSDAAAAADQXMPLWXXXXEKIAPPPPRFKLRRLMMCHKFCRPVFFLFLLLWSVWLALTL

SEQ ID NO: 300135 - protein, 37 aa, Zea mays
  Clone ID: MRT4577_36795C.1.pep
LYVIKKSRHSELICCQPDCFLVNVAECCMNKNNKVCL

SEQ ID NO: 300136 - protein, 136 aa, Zea mays
  Clone ID: MRT4577_36796C.1.pep
PLFPPGPPPPCPSQGFPPPPQGRGLGCLPDGLGWFLSISIPSPAPFFHQFKFRPPSGLRCSVSLLLFFFVVLWLVFFLFFCCAPFSRFFRGHLWLVFSCVAGGRFSRGRLLLVFVLGAIGSPLNLVARNVVALLTF

SEQ ID NO: 300137 - protein, 80 aa, Zea mays
  Clone ID: MRT4577_36797C.1.pep
QKKRLRQKNPEHLCNKRLWKKESTVFFPTTNPKCVLKKKKKEFNGGPGRSCSHYRSSVGRFEGSPRTPLSNPGTGRPPKG

SEQ ID NO: 300138 - protein, 215 aa, Zea mays
  unsure (1)..(215): unsure at all Xaa locations
  Clone ID: MRT4577_36798C.1.pep
MAEHLASIFGTEKDRVNCPFYFKIGACRHGDRCSRLHNRPTTSPTIVLANMYQRPDMITPGVDAQGVAIAPEKMQEHFEDFYEDIYEELSKFGEVETLNVCDNLADHMIGNVYVQFREEEQAVAAHNALQGRFYSGRPIIVEYSPVTDFREATCRQFEENSCNRGGYCNFMHVKQIGRELRRKLYGGRSRRSHGRSRSPSPQHRRDNXRDRGGDF

SEQ ID NO: 300139 - protein, 69 aa, Zea mays
  unsure (1)..(69): unsure at all Xaa locations
  Clone ID: MRT4577_36799C.1.pep
GYQGGAKQXPFTPMITAATTSIFQDGKGCGTWYQLKCTXSEASSGSPVTAAITDLRPNTTSPEDSGHFN

SEQ ID NO: 300140 - protein, 46 aa, Zea mays
  unsure (1)..(46): unsure at all Xaa locations
  Clone ID: MRT4577_3679C.1.pep
SFCDDXNRGENCKNPFKEGALYATTNYNLSKHPQIDVPNLHVIKLI

SEQ ID NO: 300141 - protein, 39 aa, Zea mays
  unsure (1)..(39): unsure at all Xaa locations
  Clone ID: MRT4577_367C.1.pep
YGYKLYARXKXKXXNWHXSNAFNXLLXTGTAFXXGCPYH

SEQ ID NO: 300142 - protein, 41 aa, Zea mays
  Clone ID: MRT4577_36800C.1.pep
RTSKVYRSPRPQASGVRAASLVLPTTLYNSADPPTRLSMAS

SEQ ID NO: 300143 - protein, 46 aa, Zea mays
  Clone ID: MRT4577_36801C.1.pep
FLTGTVSLQDGRQWQFHDRGELELDFRHRHYLRHSSYLNAAFLVRS

SEQ ID NO: 300144 - protein, 77 aa, Zea mays
  Clone ID: MRT4577_36802C.1.pep
CSVWPPPSSELPADSCKSCSSNHYENDTNHHTNGFDMKHDVKIAKYKARKMAQLKRAIHPSLDFDNANGVNRMKPSL

SEQ ID NO: 300145 - protein, 139 aa, Zea mays
  unsure (1)..(139): unsure at all Xaa locations
  Clone ID: MRT4577_36803C.1.pep
LEAGRDPFTTGDEIFVXTLTGKTITLGVESSDTIDNVKAKIQDKEGIPPDQQRLIFAGKQLEDGRTLSDYNIQKESTLHLVLRLRGGRIEPSLKVLASKYNCDKQICRKCYARLPPRATNCRKKKCGHTSQLRPKKKLK

SEQ ID NO: 300146 - protein, 136 aa, Zea mays
  Clone ID: MRT4577_36804C.1.pep
PPWGPFSPAMEASSVELAQRLAGSAGVKGARFPPHGEQKPFAPAQLQLQSFPPVLLFPSRPARPIKYPPQKRGVDSLLPFGHRPRWGPPVSQNPRFLSVWPVLPVGVPLGVLYVKREAEGTGMLKKPMPLLLVTPE

SEQ ID NO: 300147 - protein, 73 aa, Zea mays
  Clone ID: MRT4577_36805C.1.pep
FGSRKGRLFRPFGVAAGYRRDYGVDRRVQGGPDRHQLFNSHHSVLDYCASTIPLNAPHGHGYIHQVTTSAYEY

SEQ ID NO: 300148 - protein, 145 aa, Zea mays
  unsure (1)..(145): unsure at all Xaa locations
  Clone ID: MRT4577_36806C.1.pep
TEYQKYWPAHFGCAGVAILPEPTLSLRLVHDRSVVPIDITVKLPDAPCTIGELLMRQLPNHTHYATASVGTTGEIPEFXRLEDGPLNVVARVQQRXGVKEAXMDVDRLVLSEXVQIIREDTPLKTPRDAFGLVARCTTFNCHATS

SEQ ID NO: 300149 - protein, 79 aa, Zea mays
  unsure (1)..(79): unsure at all Xaa locations
  Clone ID: MRT4577_36807C.1.pep
MGLAFGKLFSRXFANKDMQILMVGLDTTGKTTILYKLKLGEIITTIPAIGHIQRNTLDKVLDTVAKGGQTSSKIGLSYA

SEQ ID NO: 300150 - protein, 153 aa, Zea mays
  Clone ID: MRT4577_36808C.1.pep
MYVNHITEMEDGLNDDGMEYPFEGDANTSNNDQIVEDHADDAPIASGDNAIVQQQVGLRKKKYMYVNYHRVEQPDGSSVKQKWAKCLRCSHKAKSDASNGTKAFSNHLKLKHCLVKGQQQLIQSGNDIATYKYDEKASVRLLYYAIIMHEYPF

SEQ ID NO: 300151 - protein, 99 aa, Zea mays
  Clone ID: MRT4577_36809C.1.pep
GSPSRAYRGVYSLRNRGTAIAGVSSALQWVYLSVYKRVVFFGWAQVHDYALLTLRMSGHKGAYDADKRALLFAQTAANIEIDDGLVRKERAPICATLTQ

SEQ ID NO: 300152 - protein, 124 aa, Zea mays
  unsure (1)..(124): unsure at all Xaa locations
  Clone ID: MRT4577_3680C.1.pep
RASARTRLSIIIDGLHNCDGSIDESVVAIVYKESVKHDNIECDNDLEELDMELTNLAICVSYVNTAAVHSDEQTSTQMHDNVNYDSSYDMDIEVSSDQRLDVTKKTTNMLPHITIXLTAPHTLS

SEQ ID NO: 300153 - protein, 100 aa, Zea mays
  Clone ID: MRT4577_36810C.1.pep
YWLSPSGLVYCRCSGSWPGPSDPVHSPPFSSSRVPLVALPPQMFLLPSALNGLPFVPCLGMAGLASALGFCPCAVFLWSPGSLLISPSEALPPRFRETFV

SEQ ID NO: 300154 - protein, 165 aa, Zea mays
  Clone ID: MRT4577_36811C.1.pep
MSSVFSGDETAPFFGFLGAAAALVFSCMGAAYGTAKSGVGVASMGVMRPELVMKSIVPVVMAGVLGIYGLIIAVIISTGINPKAKPYFLFDGYAHLSSGLACGLAGLAAGMAIGIVGDAGVRANAQQPKLFVGMILILIFAEALALYGLIVGIILSSRAGQSRAD

SEQ ID NO: 300155 - protein, 249 aa, Zea mays
  unsure (1)..(249): unsure at all Xaa locations
  Clone ID: MRT4577_36812C.1.pep
PKPFYRRRENFFFAKSPPVPKTPQGNKVPXGPPPTGVPSKGXQDPKPPGPVKKTFPPGGFPPGPKGPXPLPRVAPGIPPCPRGPPWKGPPPRGPIKPFPKTPPPGFFFFPKPPKGXKKPPQPFLGSPPKNPGPPPPGFFFFFKGLVGKNKRGFFFSPVFFSLFFWGGQNSFWGPPPFFFFPPRGKGPFKGGFFKGGPPLFGGFPGPGEKEINPPPKKKGVFFLKKKKKKKKKKKKKKKKKKKKKKKNKK

SEQ ID NO: 300156 - protein, 141 aa, Zea mays
  Clone ID: MRT4577_36813C.1.pep
PHIHPHVPSYSFPNTTITSLWRTIPHSPPSPSLTPHNLHRSPSTSTPTYDGSNPPTTPVILTILTHSFSTSEHQLTTPINSFPISECHDQYQQPPYIIDPNDLYHCDYDHLTHYKLILPDHLRYTLQKHRTTHLFPIQRAT

SEQ ID NO: 300157 - protein, 142 aa, Zea mays
  unsure (1)..(142): unsure at all Xaa locations
  Clone ID: MRT4577_36814C.1.pep
RKQGASALDARATGAGGCAATERGKVLRSRGQDADRGTARDPGASKKARAKAPEGAEESAQRPKAEGRDNNFFFSAEAGCEXVFHEISPXSPTDPXREVEVIAPAGLGTTKELNACYEAKARRAVVVPSCGAVYANPMYPKG

SEQ ID NO: 300158 - protein, 94 aa, Zea mays
  Clone ID: MRT4577_36815C.1.pep
LPPRVRASEESQQVPVFLFVKDVEKICGNNYTYHGLKNKLESFPAGVLLLGPRFRQMLGKISQTMGLLGSSSHTAKQQYLTLHFSLIEGVLQRN

SEQ ID NO: 300159 - protein, 781 aa, Zea mays
  Clone ID: MRT4577_36816C.1.pep
MLSWNAIEYGKVKRKKNACKCKVRAAIRAPGASDPGGSCPLDLSENTKNVLLSSSYVNLCCKESTKWTKDISSLCKRVLLSGPPGSEIYQELLVKALTKSFGAKLLVIDYSLLSGGQPSKSKESKPYKKGDRVRYIGPIQSSGFMFEGQRAPDYGSQGEVRLTFAENGSSKVGVRFDKQIPGGIDLGGSCELDHGLFCSVDSLCLDGPGWEDRAKHSFDVVFEFASEESQQVPVILFLKDVEKICGNNYTYHGLKNKLESFPAGVFIVGSQIQTDARKDKSNNGSPWLKFSYSQAAILDLAFQDSFGRVGEKNKEALKMSKHITKLFPNKVTIESPEDETELSQWKQLLGRDIEILKAKANFLKIQSFLTRHGMECTDLESVVCVKDRNLTSECVDKIVGYALSYQLKDHPIQTPGKDARVVLSGVSLKYGIDLLESIQSGPKKKSTKKSLKDVVTENEFEKRLLPDVIPPDEIGVTFEDIGALENVKETLQELVMLPLQRPELFSKGQLMKPCKGILLFGPPGTGKTMLAKAVATEAGANFINISMSSIASKWFGEGEKYVKAVFSLASKISPSVIFVDEVDGMLGRRENPGEHEAMRKMKNEFMVNWDGLRTKDKERVLVLAATNRPFDLDEAVVRRLPRRLMVNLPDAPNRKKILSVILAKEDLADDVDLEALANLTDGYSGSDLKNLCITAAHRPIREILEREKKERTLAEAENRPAPPQCCSGDVRSLKFSDFKHAHEQVCASISSDSKNMNELVQWNDLYGEGGSRHKTPLSYFM

SEQ ID NO: 300160 - protein, 49 aa, Zea mays
  unsure (1)..(49): unsure at all Xaa locations
  Clone ID: MRT4577_36817C.1.pep
LAIHLIRXXPXXPLXXLPAXGNXNXPGLXTXXPXSWXXXXXRXXLXKLR

SEQ ID NO: 300161 - protein, 100 aa, Zea mays
  Clone ID: MRT4577_36818C.1.pep
GCRPAGGHVSTRKKAAGRYPPVGSTLYEASCISPRMAAVVWSLRVVQVLFSEDAFSSCFLFRVLSCMFRWAFGFVRLQKMVLVPCSFYRCALFIVVGQIK

SEQ ID NO: 300162 - protein, 45 aa, Zea mays
  Clone ID: MRT4577_36819C.1.pep
RKENNLTNCFSVFSNPKGLGFDIFQTKTQKHYHEEGFFFGSPSWI

SEQ ID NO: 300163 - protein, 57 aa, Zea mays
  Clone ID: MRT4577_3681C.1.pep
SLTRQKVFPLSNCGWRSLSRISPVYLRGHFQSFFILKSFQLNYNSANFIPKLQDFFY

SEQ ID NO: 300164 - protein, 146 aa, Zea mays
  Clone ID: MRT4577_36820C.1.pep
SGGGGGRQKKKKTCFSPVPPKKVFPGGKRGALIFWGGGKEKKLPRPREKKKPRGAKKKNPSSPGGWGFFLKKKGATKGFPPLEKRGRWGGPPPIKGGGGPPPIGAPPGFYNFKGPRAPKNCVGGNCEGKKKFFPQKNPFAPFFPQL

SEQ ID NO: 300165 - protein, 68 aa, Zea mays
  Clone ID: MRT4577_36821C.1.pep
STQSSYDSSHNCLTTSTLLQIYILHKFYNCSHTNLHSCLPINHPVPISKSKSAGVSAVHLDRLAQLEF

SEQ ID NO: 300166 - protein, 48 aa, Zea mays
  Clone ID: MRT4577_36822C.1.pep
DVTIVKHQCILVPAQHSGSGCDPDCISDDFGFYSPPHMSHTVKDFNFY

SEQ ID NO: 300167 - protein, 114 aa, Zea mays
  unsure (1)..(114): unsure at all Xaa locations
  Clone ID: MRT4577_36823C.1.pep
MASETETFASQAEXNQLLSLIINTFYSNQEIFLRELIANSFDALDKIRLESLTDKSKLDAQPELFMHLVRDKATNTLCIMDSGIGMTKCDLWNNLGAIARSGTNRVMEALDVVA

SEQ ID NO: 300168 - protein, 130 aa, Zea mays
  Clone ID: MRT4577_36824C.1.pep
RRQAGARFRRNGRFQFRRVRSVAAPLSSATVTGRGAAPDSRPPRQSPPTEVRTASAEWLWQRPSAGRDEAIFSCGPVSQPSGCCRRRDDPPPVQRQLKSMVVVAPIARSSYARRGASSDGSDASGAPARR

SEQ ID NO: 300169 - protein, 147 aa, Zea mays
  Clone ID: MRT4577_36825C.1.pep
KRTAWVSLRNGLYMLPLGLFAYNWGLTSEWFSFEASLLTLGLTIGSLSFVLKPSPKTARRMFYGSLLYLPAFMAGLLLHRLPNEQKAHNLAEKSELDGVLYGADLQDKERATQKRQDRNPSSMQSRPPVAYASVAPFPFLPVPIYDS

SEQ ID NO: 300170 - protein, 107 aa, Zea mays
  Clone ID: MRT4577_36826C.1.pep
PLIPFNYKNLPFTFPTKNGVPWNKKIFSRITRLNKLGPGLKWLVLNLVPGSSGGLFFLVGGGVLVDPHSDLAMGEGPLVTRAWSRGGLCTFNLWPKNKGGFLFLGPP

SEQ ID NO: 300171 - protein, 84 aa, Zea mays
  Clone ID: MRT4577_36827C.1.pep
MARENIRKSEKGIHDAREVAKAAEKSADLERRIAALSPPPEPTEPLADPRAKEDDEIRKMTEAIMDKVVDQLLNEAAEVVLRED

SEQ ID NO: 300172 - protein, 111 aa, Zea mays
  Clone ID: MRT4577_36828C.1.pep
EKKVYPLSQEVIAYSHKQKFFPFNQWAALNPFVYFDQKKILPLGKLAKKSPVSFLEQEQGLRFYQRFVVNPATLLKWRRWGPFVQLVFTNPGAFWEGPPPRPPKFWLGNKL

SEQ ID NO: 300173 - protein, 114 aa, Zea mays
  Clone ID: MRT4577_36829C.1.pep
MANGGGYVWALAAGFNAALAAISAKFIATLPLKYGTVILFNVTMWGCYVNSLKALSSLQATVTNFAANFLSSGLAGYFLFEEPLPSKWFAGASLIILGVFILSKSSIEEKQNTD

SEQ ID NO: 300174 - protein, 50 aa, Zea mays
  Clone ID: MRT4577_3682C.1.pep
ESSDLSWHLRAHLASSVMCSVGAARKQASHVPCCDPSPSIYNLIQTPLFV

SEQ ID NO: 300175 - protein, 200 aa, Zea mays
  unsure (1)..(200): unsure at all Xaa locations
  Clone ID: MRT4577_36830C.1.pep
EFPARPTRPAEVAAGKVILXIDEMHMLLGAGACKGVSMDGANLLKPALARGRIRCVGATTFDEYRKHIERDAAFERLFHXVIVEEPTTQATIAILQGLKQRYEEHHGLKIQDAAIVAAAQLADRYITGRQFPDKAIDLIDEACSTVRLKIDSQKRVNTTGMQNNNGNTSVNGVNEAIVGPDHVAQVVSRWTGIPVTTLDQ

SEQ ID NO: 300176 - protein, 88 aa, Zea mays
  unsure (1)..(88): unsure at all Xaa locations
  Clone ID: MRT4577_36831C.1.pep
NKXXSNEWAKLKTANWKTQISGSNTRTRLTHFRIPTITVASTTLETKHASTQVKNHFRCNSSTGNPILKFEQHLPTTKCPLPLSTVCP

SEQ ID NO: 300177 - protein, 60 aa, Zea mays
  Clone ID: MRT4577_36832C.1.pep
YGLDLLLFSLDGLLGANEVVRLVNLVACVEVVSYTRDQSPWLVVAVERSLASKYPLHSMV

SEQ ID NO: 300178 - protein, 121 aa, Zea mays
  unsure (1)..(121): unsure at all Xaa locations
  Clone ID: MRT4577_36833C.1.pep
GGPPQNFLRGPGGPKGTNGQDXSPKAGRGGGKNXNTGKGGSPGQPPRPXGEGGXNPGTGNFLKRALPGPVFFPGGKNPRGGPKTPGDPRKAPWEKHPPETLGGALVGETTTGGPTLLNPPW

SEQ ID NO: 300179 - protein, 98 aa, Zea mays
  unsure (1)..(98): unsure at all Xaa locations
  Clone ID: MRT4577_36834C.1.pep
FSSQAAAILSTLLAAEVIPTTVRGRGLGLIMALGALGGLSGAAQRLHMGHGAFLQHVVLAACALLCILSIMLLPETKRXLLPEVLRDGELCRRPSLLR

SEQ ID NO: 300180 - protein, 238 aa, Zea mays
  unsure (1)..(238): unsure at all Xaa locations
  Clone ID: MRT4577_36835C.1.pep
NFEEKDGVKLPSYRGDNVNGDAFDLKSRTPDPDRMIRAYAQSVATLNLFRAFATGGYAAMQRVIQWNLDFMDHNEQGDRYRELAHRVDEALGFMTAAGLGMDHPIMTTTDFWTSHECLLLPYEQALTREDSTSGLFYDCSAHMVWVGERTRQLDGAHVEFLRGIANPLGIKVSDKMNPAELVKLIDILNPSNKPGRITIITRMXAENMRVKVPHLIRAVRNSXTDVTWITRPMHXTPS

SEQ ID NO: 300181 - protein, 149 aa, Zea mays
  unsure (1)..(149): unsure at all Xaa locations
  Clone ID: MRT4577_36836C.1.pep
GKKGPWKNGHSKNSKRGNPNLKEKSQPALPRWGKPTTGGKKKPNPGGGGPNLKTQTFGKXAKKSGIKTGGGAPFTGRKWTPGGGPRXGGGGPKGQKNGQKGGGGXGPPNXGPPPGPKKPPFXQPLLGVGEQGGGPHRGPPRKGGPIKAL

SEQ ID NO: 300182 - protein, 70 aa, Zea mays
  Clone ID: MRT4577_36837C.1.pep
NPPENLPVLPLLLEQILKWLPKKKGSSNPTRAFVKEFRNKKGGQWFVLNLCNIRGTQVKKLTPDNSFFPN

SEQ ID NO: 300183 - protein, 167 aa, Zea mays
  Clone ID: MRT4577_36838C.1.pep
MMMAEVVANHSKRSHTDGYFSAKAAVAAAAAASPPEELGSMPMSSKKPRPRNSNSPRTAPVSPKEKKDRIGERVAALQQLVSPFGKTDTASVLQEASGYIRFLHQQLQVLSSPYMRAPPAAGAAPEDTEHYSLRSRGLCLVPVDQTLQLTQSNGADLWAPANTTRRR

SEQ ID NO: 300184 - protein, 225 aa, Zea mays
  unsure (1)..(225): unsure at all Xaa locations
  Clone ID: MRT4577_36839C.1.pep
MMMAEVVANHSKRSHTDGYFSAKAAVAAAAAASPPEELGSMPMSSKKPRPRNSNSPRTAPVSPKEKKDRIGERVAALQQLVSPFGKTDTASVLQEASGYIRFLHQQLQVXSTSDRAHGGRHYVLSSPYMRAPPAAGAAPEDPEHYSLRSRGLCLVPVDQTLQLTQSNGADLWAPANTXQAQVRRGLCLVVVCPEETAASTTAVSAWCACSTVSKRLTQFDLLTRS

SEQ ID NO: 300185 - protein, 95 aa, Zea mays
  Clone ID: MRT4577_3683C.1.pep
LHFVGFDSQKQEDVIVAVDGEGKTCRIIDWHGKDVRLIHFIGQSQDRLHCIGVNTKAGQDHIHITRMSIWVLEDYDTKAWILKHSVGSLQFFGLL

SEQ ID NO: 300186 - protein, 48 aa, Zea mays
  Clone ID: MRT4577_36840C.1.pep
SSFSGVPPFPPFLSASLTVPSLAWTPGLPPLRGHTGSPDESGLPPMTT

SEQ ID NO: 300187 - protein, 56 aa, Zea mays
  Clone ID: MRT4577_36841C.1.pep
LCKCLMDFNIAFGIFFSDGSFWYHLLDGKHMSVQLNTILWNVLHKFSLALHGERVC

SEQ ID NO: 300188 - protein, 67 aa, Zea mays
  Clone ID: MRT4577_36842C.1.pep
RCRVRERVGETWPPSIRPEMAFPRGLAVKLDLPNGANCQSLCALHRATPVCESKTSGKRVTFSTTCI

SEQ ID NO: 300189 - protein, 165 aa, Zea mays
  unsure (1)..(165): unsure at all Xaa locations
  Clone ID: MRT4577_36843C.1.pep
MMMAEVVANHSKRSHTDGYFSAKAAVAAAAAASPEELGSMPMSSKKPRPRNSNSPRTAPVSPKEKKDRIGERVAALQQLVSPFGKTDTASVLQEASGYIKFLHQQLXLSSPYMRAPPAAGAAPEDPQRYSLRSRGLCLVPVDLTLQLTQSNGADLWAPAHTARRR

SEQ ID NO: 300190 - protein, 277 aa, Zea mays
  Clone ID: MRT4577_36844C.1.pep
AALLHCITSSQLARTQRELVLPKFHSSTAQIVGGGAGKATMSPAPSSGKRGRVPDPEEDVYVDNLHSHKRYLTEIMASSMNGLSVGDSVPDNIMGSPMRVENASCIRDEMSMQYSPMSEESDDYRYYDTQVNTNGNQTDVLGNPSTSLISSAHRFQRPHTWFSSASPYPLPSCSLPAVICSPARRGCGTEQEGWIPSSPNDMCYGGDLRRTALLRSVQMKVQSPHPCDVHEREQGRSNVHADELQQDQKEAVGVQLDQRPLSCPKSTQDAKCQSSIH

SEQ ID NO: 300191 - protein, 147 aa, Zea mays
  Clone ID: MRT4577_36845C.1.pep
MAGLPPQPQHVHALPLLLLVVLPCLIPCLRATTEMAPTAATAGASDEGASALLGLLQRVQSEALRTLGPHDFDPKFYVDLPLATDERAAAAALAALPRPSPSRAELDDFLSRYFGDPGSDLVADVPPDFEPEPRGFLPHVHSPEARA

SEQ ID NO: 300192 - protein, 95 aa, Zea mays
  Clone ID: MRT4577_36846C.1.pep
VFPRDWFGGALRVLGLGFFGWMGPSRVPALKGKTLRGFFFSSMGQELALFPRPPPVPSHFWFWLVTWPLGLFFVFPLGQMGFKGGPGGSFEKLRG

SEQ ID NO: 300193 - protein, 78 aa, Zea mays
  unsure (1)..(78): unsure at all Xaa locations
  Clone ID: MRT4577_36847C.1.pep
MAANLKWAPVLALVVVVAAMVGTTSAGNIALYCCQNGXEGXXXDXCNSKLYPYXNIXFLTTFXNPXTPXLNLXXHXXP

SEQ ID NO: 300194 - protein, 154 aa, Zea mays
  Clone ID: MRT4577_36848C.1.pep
MGGACLTLQVMATSSIVVASLPVDTMVDPPMAGVPTSPTAQELVGATVLEVVLLDAPAVASNLERVSLPGLTAQGGGDVHHPVTDILGHLAPECCGGGRSIRVGVIVHGGYWVPGVSSTDRRRFNFCEGCVVCCARGESRGPSTAPRRLGGKGD

SEQ ID NO: 300195 - protein, 67 aa, Zea mays
  unsure (1)..(67): unsure at all Xaa locations
  Clone ID: MRT4577_36849C.1.pep
LDHEDKVHLGGPFHPVAVVIVLDQAAIRKVKQIKIARLPMFSMFAFFIQAXVTGXGPVETLDKHLSY

SEQ ID NO: 300196 - protein, 60 aa, Zea mays
  Clone ID: MRT4577_3684C.1.pep
MFLQTDRKVKICICFGKFCLECVTDRSYNSVSLLKAPIVPIFVDALVAQYHCAFGTELLI

SEQ ID NO: 300197 - protein, 60 aa, Zea mays
  unsure (1)..(60): unsure at all Xaa locations
  Clone ID: MRT4577_36850C.1.pep
MAGKGGKCLLAAMTTAVKSAENDNGKKAPISRSSRAGLQFLVGGIHRXQLMQRTQANGLV

SEQ ID NO: 300198 - protein, 144 aa, Zea mays
  unsure (1)..(144): unsure at all Xaa locations
  Clone ID: MRT4577_36851C.1.pep
RLGEGTYKNTEDXTQWTIPPVPTVXDARDDWPDIQALSEDAGALLPYNTLXGARDRIITCRNNLLHXDQKGSHSQYSPRLKPSXKQKESYKPFKNVVDNXYMTYAITLASNIMAQCTEILHGELIHVPFETNFNKQLFKPLPFL

SEQ ID NO: 300199 - protein, 84 aa, Zea mays
  Clone ID: MRT4577_36852C.1.pep
LCDPHSLPNPVVPNSLWSPAGLLLLILNHNSPDIKPARSPGGCCLSAPVQVPLRPNLHYTAPKSTTLRHSSRREKQVFLARPCW

SEQ ID NO: 300200 - protein, 140 aa, Zea mays
  Clone ID: MRT4577_36853C.1.pep
NAGGPQGRPGPGAGPRWVGGDRVRGWAHARGPPQKKGFGGKVQGKVPGGPQGFGPALAPPRGNRWGGWFWGTPPPPVWGAAPLRPSRKKGFFGQNQGEPPRSALSLKQLPFSFSGKGPFSFSGWGLPVGPCFQNNLTHKE

SEQ ID NO: 300201 - protein, 78 aa, Zea mays
  unsure (1)..(78): unsure at all Xaa locations
  Clone ID: MRT4577_36854C.1.pep
TVGPARPSYPVHYRVVCPSPQGLSSFVSCMMLPICVFDCKVALCQLLVLCSSSASTDPCIKQHGLRINGCCYPXQPLL

SEQ ID NO: 300202 - protein, 212 aa, Zea mays
  Clone ID: MRT4577_36855C.1.pep
MDREALRMLYSPQFWRMALFWALSLLHSYLLVFLCGRADAPRRRRPRPAEGLCLICVVTGATSGLGRAAAAALAREGYHVVLAGRSTQLLYETVQEIQRQQPDAHLKEFQVDLASFKSIKKFGSSLKQWVHEKNVEPSIQLLVNNAGILAKSHRITEDGLDEMIQTNYIGPFMLTNILLPLLKNSSVPSRVVNLTSFTHRCVSGPDVCEDAL

SEQ ID NO: 300203 - protein, 146 aa, Zea mays
  Clone ID: MRT4577_36856C.1.pep
MDREALRMLCSPQFWRMAVLWALSLLHSYLLVFHCGRADAPRRRRPRPAEGRCPICVVTGATSGLGRAAAAALAREGYHVVLAGRSTQLLYEVLYIDLLLYLVVLPFTLVIIVTPYEADSLRNSEATARCPISKKFQSDLASFKSI

SEQ ID NO: 300204 - protein, 109 aa, Zea mays
  Clone ID: MRT4577_36857C.1.pep
RACRTFGTDATHLRFRPHFRGFLRARYLPSASHFSLSPLATKSANSNLRFKVLTVVSWRRTPLSSLVELCAGRFLSTYLLSRTCLPCASIGMKLKVLCLKGWFPFVTPH

SEQ ID NO: 300205 - protein, 53 aa, Zea mays
  Clone ID: MRT4577_36858C.1.pep
MFPGPKLGSRFKKQIHRAPWSKKKKKKKKKKKKKKKKKKKKKKKKKKKKKKKK

SEQ ID NO: 300206 - protein, 94 aa, Zea mays
  unsure (1)..(94): unsure at all Xaa locations
  Clone ID: MRT4577_36859C.1.pep
FSTRGLAAYGADHAIRAGAVDDDLKGKALSSSXILEAVRLLKGSYDANXGSTHPELRXNAVCICSFTLLSIVVNILHESGXVHVTNEHSPKKAL

SEQ ID NO: 300207 - protein, 157 aa, Zea mays
  Clone ID: MRT4577_3685C.1.pep
RPSARTSYMVDIYRRVPSRSSKLAGSTLLVCVQLADHILVGHILAGRQFPIRHGTTPLLNPVSNPPWRSSSFCPSSTHSRVRSSFIGFRACSRLPSSRRTHHSLIDPTSPARSKNDLVVDPCVIKESQGSDEDKANSVIFPKYLIQELHQNPCRVRG

SEQ ID NO: 300208 - protein, 136 aa, Zea mays
  Clone ID: MRT4577_36860C.1.pep
CCYSSPAHAVHVREHHSQHGNSYYNELMDKTQHDLLHAPTSLKIDINSPNSSSTLPLCMPTIAKLNLLGLTVITIRMHGIHHNHLTLPTHTCHLVLHLLRDAKCIASAVGPDCSLEMFCSNRSIKPYSISRELRPA

SEQ ID NO: 300209 - protein, 71 aa, Zea mays
  Clone ID: MRT4577_36861C.1.pep
PGPTQTSTALSLRISALLSERYRSSSPSLRSLTLSSLGTPPPSSRSAGGHSPAITSIVTITLRVRGAPRPP

SEQ ID NO: 300210 - protein, 91 aa, Zea mays
  Clone ID: MRT4577_36862C.1.pep
GAVLRRSSGSHGHSRIASVRQPRVGSGVDRPRVSHDVLAAAAADQRPVSWRRPGKGVARHARGTDSPSAASPRTPVGHRLFRACFTGLGLR

SEQ ID NO: 300211 - protein, 52 aa, Zea mays
  unsure (1)..(52): unsure at all Xaa locations
  Clone ID: MRT4577_36863C.1.pep
DWNDMISDPKTGIIDVRNMYDILIGXLMKAVDPRTNSFIEITTWVDHQFQLV

SEQ ID NO: 300212 - protein, 76 aa, Zea mays
  Clone ID: MRT4577_36864C.1.pep
PGAAARQGSGFCSALARGWCCVASPVATPADLSSARRPVKRRRGGRSHSSDRRACVGLLLRFFLYSLFLGAAFACP

SEQ ID NO: 300213 - protein, 497 aa, Zea mays
  unsure (1)..(497): unsure at all Xaa locations
  Clone ID: MRT4577_36865C.1.pep
MAADAAAAATLRTALSQATGQEQRASLLCTPKHRVAASRRSLRFTTRASSNAGASVSIPKQWYNLIADLPVKPPPPLHPQTHQPLNPSDLSPLFPDELIRQEVTDERFVDIPEEVIDVYKLWRPTPXLIRARRLEKLLGTPAKIYYKYEGTSPAGSHKPNTAVPQAWYNAAAGVKNVVTETGAGQWGSALSFASSLFGLNCEVWQVRASFDQKPYRRLMMETWGAKVHPSPSTATEAGKRILEADPSSPGSLGIAISEAVEVAATSADTKYCLGSVLNHVLLHQTVIGEECLEQLAALGETPDVVIGCTGGGSNFGGLAFPFLREKLRGRMSPAFRAVEPAACPTLTKGVYAYDFGDTAGLTPLMKMHTLGHGFVPDPIHAGGLRYHGMAPLISHVYELGFMDAVAIQQTECFQSALQFARTEGIIPAPEPTHAIAAAIREALECKRTGEEKVILMAMCGHGHFDLAAYEKYLRGDMVDLSHPAEKLEASLAAVPKV

SEQ ID NO: 300214 - protein, 177 aa, Zea mays
  Clone ID: MRT4577_36866C.1.pep
MRKRDLGVLLLAAFAVFFSLQHEGDFSFREAWYHLSDDGFPIKHDADRLPPPLVADLNGDGRREVLLPTHDAKIQVLQLPTHPRLATTTLDGFHEARVMAEISLLPANVRVAAGRRPVAMDVGGVDRSYKHGEGGEHCARARSLRMGRDALTPATPESLGSSTPSASAPSRCKNGRT

SEQ ID NO: 300215 - protein, 117 aa, Zea mays
  unsure (1)..(117): unsure at all Xaa locations
  Clone ID: MRT4577_36867C.1.pep
PRGRPXITFLAAPTYAARDLVQENDKGVRVDETEDTMHDHNTSIPSVLPLLQEVTEKSRNTSAPLHVPPPSMRIHIWLISTTYHQRPSSKRSHLSWLYINPLLLLILAAGTTCYSPQ

SEQ ID NO: 300216 - protein, 192 aa, Zea mays
  unsure (1)..(192): unsure at all Xaa locations
  Clone ID: MRT4577_36868C.1.pep
TTICKLSFRLKIHALNRANDLPEGXTIFLDEVDSFAIARDSEIHEATRRILSVILRQIDGFEQDRRVVVIAATNRKEDLDPALINRFDSIICFGLPDQQTRVEIAAQYAKHLTRSELVQFSLATQEMSGRDIRDVCQQAERHWASKLIRGQVPKDEKGEPSLPPIDEYLSCAEQRRKSLPGRTSPDIQVPCP

SEQ ID NO: 300217 - protein, 34 aa, Zea mays
  Clone ID: MRT4577_36869C.1.pep
CINFNPPARPFSRFFLTIINAIWNVILDAYLLYL

SEQ ID NO: 300218 - protein, 108 aa, Zea mays
  Clone ID: MRT4577_3686C.1.pep
VTVRAKDEGEDVKPAPKHRRRGASGGGERKESERSLAKVMGQTEEQLVPEAGPASGPAPSSSKQGDADTPAGLDADLEALLQPHGALLGRRAGRQWRPALQSIAEGKG

SEQ ID NO: 300219 - protein, 51 aa, Zea mays
  Clone ID: MRT4577_36870C.1.pep
KAHVCWPLWLSKTPACFFIASHPYKKTCVCELLSLFRGGPPRLICPMLWSE

SEQ ID NO: 300220 - protein, 101 aa, Zea mays
  unsure (1)..(101): unsure at all Xaa locations
  Clone ID: MRT4577_36871C.1.pep
ASEATYEHTLTSALVRTSGRMKVTPGSAPPQXAQETVVLRVDKAAGLPRSWGINIEKSDVSAIHLTLRPSHKAIMFDTATTGPSLTPLPNVNCRLDLRNKH

SEQ ID NO: 300221 - protein, 251 aa, Zea mays
  unsure (1)..(251): unsure at all Xaa locations
  Clone ID: MRT4577_36872C.1.pep
NNXDAMLRDSRLRFSISRMPEDLAKQWDKEQKKLVGPAQAVGYLGRGSCSGCSKSASVGAQAQTDLSLGEYYLGRASCSGCSKSSFLGAQTDLSLGDVYLRSGRAPERGHQHHLPTSLGVGGFPGASSSYGRSGGRRRRASKSYYYENKSAWFQEPPSDRVPQQPGGRMGPEMWPSIMVVPPPTADPPRDDDVKPHVLLPDATLKRAIRRSADWGSFSRRLFLSGDLNGGAAGAPVPSDTGASSEETVSDS

SEQ ID NO: 300222 - protein, 284 aa, Zea mays
  Clone ID: MRT4577_36873C.1.pep
MAVRAIDTPLLLCTMVVVLTGLVSPSTAGLSLDTVRDFLTREEDTIVFSLIERAKYPLNRPAYDPLHSAAGRRLNASFVELFIRESEAVQSKAGRYQSLQEIPFFAYRVPSALAPPYNFTSDLYPAAASVNVNDAIWSMYFDELLPRLAKNGDDGNYAVAADADLACLQVLSRRINYGRYVAEVKFRGDQQTYTSLIQAKDRDALVKLLTSEAQEDVVKRRVEKKAAVFGQSVTLDGPVQTDANSQANSSLFKVDPSVVYELYGQRVIPLTKQVEVEYLLHRLD

SEQ ID NO: 300223 - protein, 124 aa, Zea mays
  Clone ID: MRT4577_36874C.1.pep
TQEKEPVFACPGIPALNGHLRGQCGTQTRPRTLFSSPKRPTLHVDPFSLHLRTVVANVPARHSIGTLVTPPKKGIPYPRYCLPVRTLLILLQFLLNSWLNSKNASVKWNQNGIWVQAASKDHDY

SEQ ID NO: 300224 - protein, 274 aa, Zea mays
  Clone ID: MRT4577_36875C.1.pep
FSVKKGEKKIKKKISTAVLPERSPLLPSPGRPHPLRLLGTKICPPVAVLILAADALLKIFLTVVASFPSTRPPWIKIPSVSIFCSQPSAPALLLGLPLLPQLAEFLCSLPSARELAPARSSPGCPFPQPRTPSPELLPVRAGVFSAPKMAAASPPWRLSLGASSSFVLLAGAHCVAPKLPPSAPPSSARPWPSRPCFPVFSMAALSLPPGGELAPVLCPTPAPSTAKLALTSKALLTFKLCSSASFHSTQVESPMSGFVWSGVFGEWWGCSLFK

SEQ ID NO: 300225 - protein, 84 aa, Zea mays
  Clone ID: MRT4577_36876C.1.pep
TGRLCPLSGGIQTSSDDISAPDKHLSERDPFKPELVTTVPVQTLPREVGRHSLSEINPTSPEKNKKKKKKGRAVRMRRGVLATA

SEQ ID NO: 300226 - protein, 95 aa, Zea mays
  Clone ID: MRT4577_36877C.1.pep
FLLHTNRRDQGAYNCKTHRNLLGGVYGQGALATTESQDVTRASLAVHADQLFKCLLHCTRHDIPDAARSLHSGNGPRARLGALQGMPLQNQVARG

SEQ ID NO: 300227 - protein, 90 aa, Zea mays
  Clone ID: MRT4577_36878C.1.pep
AGSGSSPQSVLERQSCSSPAGSFAQPLDSHSSTNTHVSCRVKCLRRGRPEQSRSCPSEQRSMMRVFGWGIARRTEKKPREGGAGAPRWGD

SEQ ID NO: 300228 - protein, 98 aa, Zea mays
  Clone ID: MRT4577_36879C.1.pep
KTPITDKAWTKPGQPVCSKYMVTLRYICWACIPASNNAPGPFSYGKWGMTTRVFGPGTSLFFCPSLYLGFWRGGRFCLELHYSRAPYTSSRARHQNLH

SEQ ID NO: 300229 - protein, 84 aa, Zea mays
  Clone ID: MRT4577_3687C.1.pep
VNCGCVCVCVRAEVLREFASKRHVKLSRVTVRAKDEGEDVKPAPKHRRRRASGGGERKESERSLAKVRRAPPLLHGLPSAVSNH

SEQ ID NO: 300230 - protein, 229 aa, Zea mays
  unsure (1)..(229): unsure at all Xaa locations
  Clone ID: MRT4577_36880C.1.pep
MDKIETTTRRRRKGRSSSSRRRQGARGPAGLVATALALLCACAFSTPAATALTPDGEALLELKLAFNATVHHRLTSWRRSDPNPCVWEGISCSVPDLRVQSINLPYMQLGGIISPSIGRLDKLQRLALHQNSLHGPIPAEIKNCTELRAIYLRANYLQGGIPSEIGDLVHLTILDLSSNLLRGTIPASIGSLTHLRFLKLSTNFFLREIPNVGVLGAFXSXSFVGNLEL

SEQ ID NO: 300231 - protein, 101 aa, Zea mays
  Clone ID: MRT4577_36881C.1.pep
LASSSELRHGMSKFSLIAALESVRSCDLSLDNNVIQRRENCSFTSSFHLYASRHGRVFSVRLFISHRAGQAVEQLTAQSLEAPGCGIDIAVGRGGWRESRI

SEQ ID NO: 300232 - protein, 107 aa, Zea mays
  Clone ID: MRT4577_36882C.1.pep
SGSHALSPSLADEPLTHRFLLAGEALLELKLAFNATVHHRLTSWRRSDPNPCVWEGISCSVPDLRVQSMCVPPRLSLSVSVLFGSDAPNPMRAYGSATDDAICFALL

SEQ ID NO: 300233 - protein, 121 aa, Zea mays
  Clone ID: MRT4577_36883C.1.pep
FYKRGAPSPFENGEWFSGGTCNRGAPFKPGGAGAKEWANSLWGIEKKKFPNRGPIGGARLKLLKTFGLSLPRPDGHPGPYRASPPSEKGGPAKVQNACPPGGLPGPIYGWTEVIMKMGAKG

SEQ ID NO: 300234 - protein, 130 aa, Zea mays
  Clone ID: MRT4577_36884C.1.pep
LNLMPCVQNFSRLGRPFCFKKRGSQSFFPGFRPWKRFFWFWPRRRKNLGFFFRKKNPPLVFPPLEGMDPRFGPLGGVSKAFFFAPAFFWLGAPSPGALGFWVRPIPRGPRLFYWGFARGFPLNRPLGPLG

SEQ ID NO: 300235 - protein, 100 aa, Zea mays
  Clone ID: MRT4577_36885C.1.pep
YPGSHDTDTVFAWWHHLPEYVQAIVIKYLPEAENIYIPWPLITTALSSVPRTSVVPMRGIFVLVSSAGRKAPPTQKGHWRCSIPRSVGFAQPHAPDLSNS

SEQ ID NO: 300236 - protein, 53 aa, Zea mays
  Clone ID: MRT4577_36886C.1.pep
TGVVDTGKKTGDKLLHGDTRLKDNLTRRGEKTAPTKPQGVSALEKPICGGSDR

SEQ ID NO: 300237 - protein, 217 aa, Zea mays
  Clone ID: MRT4577_36887C.1.pep
ILPAYLFSHLNPSSTLTLSLPVRAAHTTLLLVSRGLASSSPTVLMLNLAPFETPPLGRQERPTNTIVTATAAITRGNEESSSNTCLQHGHLDLSLGISLSHGGGGGGGSCDASSCGGNKQDSYGGGQGSRDDKDNNVRRMTSCIGGTATANVITAGHSSLAGDLTAAPGGGGWWRLGQPRSCRARPGSCIHGASPHGSRRLLPSKTGRLLPLTCQVM

SEQ ID NO: 300238 - protein, 81 aa, Zea mays
  Clone ID: MRT4577_36888C.1.pep
PHVNMPGVHRKNKRAGYQKVFRNPSPLACHCTFVQKGYSGLIKVEPFFRCRGPKKYVFLKFPLVGLEFNFPGNRGGSSFSG

SEQ ID NO: 300239 - protein, 83 aa, Zea mays
  Clone ID: MRT4577_36889C.1.pep
PCPCKITKGRNTYIKGLSYYSMARDLWALTASPQSSRATNRRAAVLSGNLLYERAVITRHPVGALRCLFVRAPGVCVTYGSSW

SEQ ID NO: 300240 - protein, 70 aa, Zea mays
  Clone ID: MRT4577_3688C.1.pep
NSVDHASPPSLLCFWGWCLSTCYTTICVGQFNGHMDNIRRIWLSSNSDLIHNEPIPRHQWRCISASLHSD

SEQ ID NO: 300241 - protein, 77 aa, Zea mays
  unsure (1)..(77): unsure at all Xaa locations
  Clone ID: MRT4577_36890C.1.pep
VXHGXXXXRALGALLVSAAERGGLSATRIAAVQRWGMEVSGGCGWFGXVGRRGVGGGGGRTRARSAGSGKESWSLVP

SEQ ID NO: 300242 - protein, 69 aa, Zea mays
  Clone ID: MRT4577_36891C.1.pep
RMSALSIRQTTSAAAGIRCPLLSATDTAMETSRYALRPRALMLDWLITTPRWPNAWTNEWTNAWVDPEI

SEQ ID NO: 300243 - protein, 90 aa, Zea mays
  Clone ID: MRT4577_36892C.1.pep
RSLVLLSHVPSVQYRLKTYASLSAAVSRRLLMYDTPRVHPHQTFSVKHDNEQLKRKRVQSALQNAGGPRGCALTMRWTIAERLLQEVVMR

SEQ ID NO: 300244 - protein, 105 aa, Zea mays
  unsure (1)..(105): unsure at all Xaa locations
  Clone ID: MRT4577_36893C.1.pep
PVIVFHHDEVWELPAGAEVLTLTVQTHVXMIRLRDRAMILHRHRMYSKDMLMSIADRLLRDNHILDCYENVDEASFHVRLRXKELWKKVCRGFLXGRLQSQQQFH

SEQ ID NO: 300245 - protein, 411 aa, Zea mays
  unsure (1)..(411): unsure at all Xaa locations
  Clone ID: MRT4577_36894C.1.pep
MAGGAGNGSNEAVQAKGSGGDGSAAKPLPPCCVKARSAAPESEAKCHATVVSGWFTEPRSHCGKATKVQYYNNPMWPGEAHSLKVENILYQGKSPYQEVLVFESSTYGKVLVLDGIVQLTDKDECAYQEMITHLPLCSIPSPKKVLVIGGGDGGVLREISRHSSVESIDICEIDQLVIDICKEFFPHLSVGFEDPRVQLHVGDAVEFLRNAPEGTYDAIIVDSSDPIGPAQELVEKPFFETIARALRPGGVLCNQAESMWLHTHLIQDMLSICRETFKGSVRYAWASVPTYPSXGGSAGSFASHRIFQALAQLMRGTSHSLTNHXVCSKFCSGVIGFLLCAQDGPPPGFLTPVNPIEEVEGATKAGREIRFYNSEVSFLQRAATGPSPHTLFRSSSVASPLASSSLSQRPV

SEQ ID NO: 300246 - protein, 56 aa, Zea mays
  Clone ID: MRT4577_36895C.1.pep
LPRLTCLCMHSVLEGGHFHGLHLDIQRFEALSYGLNEAHPGHDGLGHDRHKYYCLC

SEQ ID NO: 300247 - protein, 55 aa, Zea mays
  Clone ID: MRT4577_36896C.1.pep
CISLKASSNNLCLQQIAIICYRMAIGCYVHDIFSHGMEQPHFFNQCPGQFASLLK

SEQ ID NO: 300248 - protein, 120 aa, Zea mays
  Clone ID: MRT4577_36897C.1.pep
IGYLEAGRDGGTTHRQSQTHPTSTTARDRRRPQNTMHHVYGADDGVGLYLGGYAEDLRPAHRMRLADIGRHAHIFAWSAYCSNDIDRRHTDGGGSPIFAIYIRGALQCRKNTHRPDMDQR

SEQ ID NO: 300249 - protein, 101 aa, Zea mays
  Clone ID: MRT4577_36898C.1.pep
AVLVRAPRCQLLGWEYSVRITRFSSVSFFLGVGSVLCLERESLGEQPPIPYANIFFSAYIWKILFRPPLEIKRRHFFFSCFPCLFPYCLKTPILVEKTIIR

SEQ ID NO: 300250 - protein, 165 aa, Zea mays
  Clone ID: MRT4577_36899C.1.pep
MSSLIAEDVKSRSEVYHGDEMCQVKSKELLKEIALPNGLLPLKDMEECGYDRQTGFVWLKQKKSYTHKFDKIGKLVSYAPEVTAHVQQGKITKLTGVKTKELLLWITLSDIYVDDPPTGKITFKTPAGLFRSFPVSAFEIQEEPEAKDTTKRVPDTAEPVQVKEL

SEQ ID NO: 300251 - protein, 60 aa, Zea mays
  unsure (1)..(60): unsure at all Xaa locations
  Clone ID: MRT4577_3689C.1.pep
NIPVLFAVPTDRLVDGIPLTKFDTIPDKVVAALSMVFISGAPVMLVGCGQSVXDLKKRIV

SEQ ID NO: 300252 - protein, 69 aa, Zea mays
  Clone ID: MRT4577_368C.1.pep
LWQSAMQRACQLMRCSTHLHYYYMPLKVYLQKFTSTVFAYSSHTYPSWSMGRVYYHAIFKEWHQCYKNE

SEQ ID NO: 300253 - protein, 64 aa, Zea mays
  Clone ID: MRT4577_36900C.1.pep
DIPFFQVPFDCLISCQVWSTSTSLFTLVSCLMMSLCTGASGSPLDMPKPSQPVLNKLFFNRRYS

SEQ ID NO: 300254 - protein, 303 aa, Zea mays
  Clone ID: MRT4577_36901C.1.pep
MTLSGMAVAFKASTSSVTQQHWSSPTKDQCQYGFTHLSRQKCRKRALCVTAISGKLDLDFTDPSWNQKYQEDWNRRFSLPHINDIYDLEPRRTTFSLKKNRIPLGDGDGSSTDMWNGYVNKNDRALLKVIKYASPTSAGAECIDPDCSWVEHWVHRAGPRKEIYYEPEEVKAAIVTCGGLCPGLNDVIRQIVFTLETYGVKNIVGIPFGYRGFFEKGLKEMPLSRDVVENINLSGGSFLGVSRGGAKTSEIVDSIQARRIDMLFVIGGNGSHAGANAIHEECRKRLKVSVSSSDDLPDARSSV

SEQ ID NO: 300255 - protein, 113 aa, Zea mays
  unsure (1)..(113): unsure at all Xaa locations
  Clone ID: MRT4577_36902C.1.pep
QRGPFGRWGGLGGNXNXIALGDPEDVKKVSGTYGAFXKGPXSLTSLRVVPTNKTWGPWGIKNGTRFFFSGPNGKSIAGFFGGGGTRLVDPIGVFIRPVGPGRPRLTTELAPFF

SEQ ID NO: 300256 - protein, 214 aa, Zea mays
  unsure (1)..(214): unsure at all Xaa locations
  Clone ID: MRT4577_36903C.1.pep
EPKLNPVAPPEKRLGVDAAEEAAPNGLTVAAVEEVXPNGLGVVAAEEVPPNRPEVPPNRLGEVAAEPVADAPKRPGLLAAVEVAPKNPGLLAAEVAAPNKLRVVPAEDAGVAPKRDGADAADEAAAMDXPNEKVDPNPKAGEEAGAAAADEALNREEPKAGAGEEADAGWEKEKADGVEEKGEEAVEPAVAELPKPKEVAIAGAGMFGRVLAWS

SEQ ID NO: 300257 - protein, 77 aa, Zea mays
  Clone ID: MRT4577_36904C.1.pep
ILITMGNQSALRNLYYHTLITIKNNVLWNILKMQKIAKVYHHSKQHSPTGSYHKPHTASEDMYDKGRPGIPTVLQIH

SEQ ID NO: 300258 - protein, 121 aa, Zea mays
  Clone ID: MRT4577_36905C.1.pep
LGVVAAEEVPPNRPEVPPNRLGEVAAEPVADAPKRPGLLAAVKVAPKNPGLLAAEVAAPNKLRVVPAEDAGVAPKRDGADAADEALNREDPKVGAEEAAAEDEEKREEPKAGAGEEADDMA

SEQ ID NO: 300259 - protein, 97 aa, Zea mays
  Clone ID: MRT4577_36906C.1.pep
RPSRNRNLRLQRRQRGYSPGRAPPSSVSHSLACVTTFCSCAIVPTAEITTRPTGCTWSRHKAASPPLSPIKRSQRTVSARHQTACSRWLRTPTLSSR

SEQ ID NO: 300260 - protein, 736 aa, Zea mays
  Clone ID: MRT4577_36907C.1.pep
MATSFGFGSSATAGSTASSPFSSTPSAFSFSQPASASSPAPAFGSSLFSSSSAAASSAPTFGSSLFRASSAAAAPASSPAFGFGSTFSFGQSMAAASSAASAPSLFGATPASSAGTTLSLFGAATSAASSPGFFGATSTAASSPGLFGASATGSAATSPSLFGGTSGLFGGTSSAATTPSPFGATSSTAATVSPFGAASSAASTPSLFSGGATGFSFGSSASGSTTTTAAAPAPSFGFSFNSGPAASSTASTPTSAPALGFGGATGSSLFGSTTSAPLFSTTTASSPASAATTTPSFGFSSSPATTASAPSFGFTPSSGSATTANTAPSLFSSSATTLTTPASSSSTGFSLATSQAAPAPSLFSTSAIGSSSVTTPGFSFGSSSAASTPTLASVFATGSSTVPSAAAASAASGSSFPAVSTSGFSFAVAPSSSAAAATATTTTVTSASTSAGMTTTAPLTGTTGFPNFNLQTTTPASTSSPTLAFGVSTTAASSSATSTTTQATSSAVQVSSTGPTTTTSITPAASQAPKLPSEIVGKNVEEIIRDWNNELQDRTAKFRKHATAIAEWDKRILQNRNVLIRLEAEVAKVVETQTGLERQLELIETHQREVDKALQSMEEEAERVFQDERVLLHEDGAASARDTMYEQAEVVEHELQHMTEQVKSIIQTMNATQGGELESADSMTPFDVAVRILDNQLRSLMWIDEKVNEFSGRIQRLPNNSVSAERDSGIPRFWLS

SEQ ID NO: 300261 - protein, 68 aa, Zea mays
  Clone ID: MRT4577_36908C.1.pep
NFIRIQAILVHKRFGSHTEDTTGPLNQRSHNHDSWHTNHRCLLDHDIHIEVHQRAPDDAYTQVQQELK

SEQ ID NO: 300262 - protein, 61 aa, Zea mays
  Clone ID: MRT4577_36909C.1.pep
FIFTTSHSSIILSSMTLVHSLHTLSLSAHHHSTPKLLLDNHLDQISIFTPSSKSPLCLYIS

SEQ ID NO: 300263 - protein, 114 aa, Zea mays
  Clone ID: MRT4577_3690C.1.pep
TANIGHATRIELKKNTLLSSVPTAGKSIIGAKKARTSVAFPFELIKPSSIRGDVTLSDINEKLHAPPPYKIRHKSEEEPSSLQASAISGKPVVHKTKIHTEGGKGSITITRTRG

SEQ ID NO: 300264 - protein, 95 aa, Zea mays
  Clone ID: MRT4577_36910C.1.pep
QLAYYVETLPTRLLSVSRPVHLMLSGIYRTVHIGGKRSYTRCDGIQHSMCCYQAWLATCSRHVLLLTRMTGETMNNMLMISTSPENARGRGMGKE

SEQ ID NO: 300265 - protein, 69 aa, Zea mays
  Clone ID: MRT4577_36911C.1.pep
PQYHKPPTCYGSYHLRSNAVRTPTGLQKSDWTEHTSWAHIQAEGGHCSTAREGYHLPMLLTQGTAQSTY

SEQ ID NO: 300266 - protein, 32 aa, Zea mays
  Clone ID: MRT4577_36912C.1.pep
NFMPWGIGNLAIIRLVCYNTLLNNVPQYFCFL

SEQ ID NO: 300267 - protein, 326 aa, Zea mays
  Clone ID: MRT4577_36913C.1.pep
PVAVGHTSSLASGQIRLASMAADRGFKIFAAADGFGQPLKDAVVAYLRAHPAVAEVVDLGVDKYYAAAAAVARHVSSPDSEPDAPEVRGVVVCGTGAGVCIFANKYPRVYATHCASPADAVNTRSINACNVLALSGIATQPDAAAAIADSWLATPFRAPCPASGDAPWPEDIQGFFDTAPDEMAAIPEAEGAPDSVCAICCLRNGMEFEPVGIMPGGEMRIVRESPTSAYVRFKAGSVEPAHHHTFGHDLVVIKGKKKVWNLTKKESYDLVDGDFLFTPAGDVHRVKYFEDTEFFIRWDGHWDIFLDEDLDTARSAIDAELAAASK

SEQ ID NO: 300268 - protein, 226 aa, Zea mays
  Clone ID: MRT4577_36914C.1.pep
MDHEKVAPIDEKAPHGVSQPTVSSQEEYTGDWREQEDFMTRNGLNLKSFQRRPKGGELVVLDKSMKTRHLHMIAIGGSIGAGFFVGSGAALAKGGPASLLLDFSIMGVMIFNVVYALGELAVMYPVSGGFYTYSTRFIDPSWGFAMGWNYVFQWAIVLPLEINVAAITLEYWPGARNVHVAVWMLIFWLFIVIINVFGTLGYAEEKFWSSLLKLSATVIFMIIALV

SEQ ID NO: 300269 - protein, 92 aa, Zea mays
  Clone ID: MRT4577_36915C.1.pep
YADLVVRLSRIRCNYFIPGTKIISNRHVRIYLFVLQSNLLHPENAHNMSSSSCAALAYEISIGMAVHIDRYISIAHGCPLSLPPLTGILSNW

SEQ ID NO: 300270 - protein, 151 aa, Zea mays
  Clone ID: MRT4577_36916C.1.pep
VPKSMSVVPSLSLTRLSLDNMFLCGILDDMNRFPPIIGTTTLGWWPSRSCFVLSSGSSLLQELICGSDTTSPLSVLDHAYVHTHVLHCICACAHPCLLQGLHLQLCVLCTESFPIKKICLRADFRVCVGGLSSSGELSPSSSGSCSSFGPL

SEQ ID NO: 300271 - protein, 100 aa, Zea mays
  Clone ID: MRT4577_36917C.1.pep
RESTTPPHALSLILRIRMCARAVHRTPFQTLCLSSTVFTLVLAYRSAVQSRQLHARLLLLYKKSLITRSFGASADSEGRYARTCPLIDTILPTPACYAQT

SEQ ID NO: 300272 - protein, 118 aa, Zea mays
  Clone ID: MRT4577_36918C.1.pep
VPLPQRNSMFSSRPKYKKKSSTYNTTTPFHSLQAEKLREKLRQEFLRKGTELAHGVADALFAVPPTEDLDGPIVHLPSPAVRLPREKHLGAGTSLPGLVAAKVGADVTLTDITQNAED

SEQ ID NO: 300273 - protein, 69 aa, Zea mays
  Clone ID: MRT4577_36919C.1.pep
PQKAPLEKEKPGPPFALYAIPVFAQTLRFSGLLVTGGFFRPPPVLVPQIHLRLPWSFKSWDSLFKPLFP

SEQ ID NO: 300274 - protein, 127 aa, Zea mays
  Clone ID: MRT4577_3691C.1.pep
SQVPLAGFEGELTSAGDSVQAVGEHQLVASEESLDEHKRDEVKRSIHDAVKSDGGYALDSREFQLAASEVSPENSMAEVQGAAQEESLPLDGVEERSDKGDFVSTEQAQLCVTNESLAAQLQGNVEF

SEQ ID NO: 300275 - protein, 64 aa, Zea mays
  Clone ID: MRT4577_36920C.1.pep
MVHDLNIRLALTKNKKNGTDTLYTSRLRTGSFDVISLLSTNQNRIHWSPIHNVPTAITLQCPNL

SEQ ID NO: 300276 - protein, 47 aa, Zea mays
  Clone ID: MRT4577_36921C.1.pep
AIGPDERAAAIYGLNSSSSPPPIHIVPARHHCTAGEPPISNGRRRYS

SEQ ID NO: 300277 - protein, 136 aa, Zea mays
  Clone ID: MRT4577_36922C.1.pep
KKKPGGLIPPPPPGGGALVLNPRGAPGKRGVLTKKAAPNGGEGPQPDPFCPNFGPRGGQRGPPPPSPKGGGPGPSPPRGGGGFFGAPQPKKDPPGGGGGQKFGPQRGPPLGAMGQTPVGGPGPKLGGALKRVEGFF

SEQ ID NO: 300278 - protein, 36 aa, Zea mays
  Clone ID: MRT4577_36923C.1.pep
PAFTTIELPCVPPSRHTPLLELNHHHTLSHLLFESR

SEQ ID NO: 300279 - protein, 140 aa, Zea mays
  unsure (1)..(140): unsure at all Xaa locations
  Clone ID: MRT4577_36924C.1.pep
SGDKGSADGSRQDRXRQEXTXGPXQGKXDTRQEXERHTDXXDARGGGXGXGTNREGXEDKRQERPQXEXRGKRPQXPPDXPQTEENADXXGAXHDHAEXPPDSXGPNNNAXATAPXDXXAXEHQQREXGERQPXPEGPNK

SEQ ID NO: 300280 - protein, 85 aa, Zea mays
  Clone ID: MRT4577_36925C.1.pep
FGPSSAGRLLFFFSSSLVNGSLFKGYIFGPSGGVKFVLHLCSKFSIKRVGVCCCPHLLWRSLSFVTGHFLNGSHTARLVVVFQLT

SEQ ID NO: 300281 - protein, 110 aa, Zea mays
  Clone ID: MRT4577_36926C.1.pep
SSSPLPLIFRALLPTNSPRRHVRVKQARPTSKKLPHIERYPSKYRRNIHLLPEAIWPAPNTYWLLRTNLMRSLSFCSFGSRSSTINYTTPPFNHSSAATRHPTKTANKAT

SEQ ID NO: 300282 - protein, 92 aa, Zea mays
  unsure (1)..(92): unsure at all Xaa locations
  Clone ID: MRT4577_36927C.1.pep
SHSSQIYAVIFPSLMQLHDSINEGVGGKQNALCLERHRCLDEDPNTVVSETDDNIXEECDICMDINVIGVLSTCSHAMCIKSFLELVSRSQS

SEQ ID NO: 300283 - protein, 85 aa, Zea mays
  Clone ID: MRT4577_36928C.1.pep
GAGAPELRAHRIPSVTRGKERRRHGCCGRHLTRIRRRRETLDGGGRGLGGSEGGRKGGGGSGSSSREGGEMFLRVSVCAASLVPN

SEQ ID NO: 300284 - protein, 46 aa, Zea mays
  Clone ID: MRT4577_36929C.1.pep
DQIVRLAVQLIIQTVVGISWVVCKCKRHIKRPQHPNGLRNDISIML

SEQ ID NO: 300285 - protein, 155 aa, Zea mays
  unsure (1)..(155): unsure at all Xaa locations
  Clone ID: MRT4577_3692C.1.pep
GHSLTALTNLGSIISFHIDQARIHVVNSCXQLYCLGGGGGHYSTMPIYSXGAVTHDSFTTLLSXTCSRKYVPRAIFGDLVPTVIVXVCTGLYRQLFLSEQVILGKEDAANNFARGHFTRWRRTIXDLYLYRVRKLAYHCTVLQCFLVFNAGGGGT

SEQ ID NO: 300286 - protein, 66 aa, Zea mays
  Clone ID: MRT4577_36930C.1.pep
VELHEGQVEVGAALKLPRVDVDVLAIKQGILFSQIGEDAHDLSCSLRTRAPTRVRTCGRTRGRTRG

SEQ ID NO: 300287 - protein, 91 aa, Zea mays
  Clone ID: MRT4577_36931C.1.pep
MAASSTSAPTMPATVTPLPGYGYQGSAAGAGAGGEPLYSSSGSSSMGTFFGVLVAVVVLTLLSCVFGRVCAGHAEGPDERYDCTRLAPRWW

SEQ ID NO: 300288 - protein, 155 aa, Zea mays
  unsure (1)..(155): unsure at all Xaa locations
  Clone ID: MRT4577_36932C.1.pep
TSFFFFFFFFFLFFFFFFFFFFFFFFFFIKTKTLKPHPSFDPPPPTATPQTLIPPPRGPQLKTPTPNPTKKNPPKKIPXPQTITHKKLPPTKKPKAQSAKTGGPHKLTNPXNTRLPIPKTQSPNPLKKPPKPKDQPPAKRALFHWPHNPPPAHKP

SEQ ID NO: 300289 - protein, 92 aa, Zea mays
  Clone ID: MRT4577_36933C.1.pep
KNAGKPCDKIQDVEETDPEVKTFLARGLCKKKKKKKKKKKKKNKKKKKKKKKKKKKKKKKKKKKKKKKKKKKKKKKKKKKNPQPGGPLKREI

SEQ ID NO: 300290 - protein, 209 aa, Zea mays
  unsure (1)..(209): unsure at all Xaa locations
  Clone ID: MRT4577_36934C.1.pep
AFAQSLQGLAELLQXLDRVRQERRKAKTNRNKYTGTGNDGMSFTTATGSRYGGFGNDQYGGGDSGYGGGYDRDYGGSSSRQGGFSDSTGRQGFDEYDAGDDEDRVSAPAKSSAAAAHQRKXCALPHQFGIRLYTTKKXSQQRPPPLPXAPTKAPAKVMDLLGFDDEEPAPVAQPISGGANPTAIASLDDDFDDFQSAPPATTTTTLPTI

SEQ ID NO: 300291 - protein, 68 aa, Zea mays
  Clone ID: MRT4577_36935C.1.pep
LGVPPRPGVAARIPRGLRGRLGPSWPRSPGWGKPLYAVRLRGLSAPAVARVPSASTEGRGRWSTGAAR

SEQ ID NO: 300292 - protein, 455 aa, Zea mays
  unsure (1)..(455): unsure at all Xaa locations
  Clone ID: MRT4577_36936C.1.pep
MGAAAAEVVALRPPSAKRKSTTLKFLFELEKPDGGLLPGTAKLPPPSPEPEADSLIDKIASCNRAFTFVDAAEREEERDAKRDRLVEVLGAVRSSGGKRQPLDHRVMVALVEMVGANLFRAMPPPAYPALPPDGADEEAPAVALAPSWPHLQVVYDILLSVVAASDARTLRNHVDRAFLSALLALFASEDPRERDRLKTVYHQLYSKLTCERAFMRRSMAAAFLRLAYEAPAAERHCGAAELLEICGSIVNGFAVPLKEEHRMFLARVLLPLHRTRWAHTYHRQLAYCVLQFVRKEPGLADAVVTDILRHWPVTNCQKEVLLIEELEXIVELLEPVQFQRLAVPICSRIARCVSSYSSQVAERALYVWNNERFLELATASPDVAERILPAFVASVESNLERHWSKCVQQVTASVKSLLEQVAPDLYARCAADLATRRSEAEAAAAVRDARWRRLE

SEQ ID NO: 300293 - protein, 198 aa, Zea mays
  Clone ID: MRT4577_36937C.1.pep
MEETAAVAGTAEKASSYRYWVREATGDAAPLPVPRKLDTAANGNGNPPPVGSVWNQAGTWEEKNLNSWANSRIKDLMGSLGSLAFPTGKASIDEVSKCSGDAFQVIVRNKKRVGYNYELSLRFSGEWLIKEENKKIKGHLDIPEFSFGEIDDLEVQVRFGDDKGLASDDRTRICKDLKSFLAPIQEKMRMFEEELKGR

SEQ ID NO: 300294 - protein, 240 aa, Zea mays
  Clone ID: MRT4577_36938C.1.pep
MTRSASFDVIGTCFGFSAPIQAIHSRLGPKLKTADVDPKTLFFSWFYAAQRDFTYVSMTQSYVPIAQILKSTFRRACAVVDLPTDAVTDEDLEEIMKAFRSMGPREGLKKCFDGLREAAWEIYGVTNGGSETSLNYYHSAGIELDADHLLSCDAIQVAKPDVRVYENANEHISKRLQGRGERERWFVAAHAWDLIAARKAGFKTAYLTFEEHDPCTEVFGKFDLYASSMDELLQKLKELK

SEQ ID NO: 300295 - protein, 168 aa, Zea mays
  Clone ID: MRT4577_36939C.1.pep
MAALPLATAEVCDANPHLIMNGELRALQPIFQIYGRRQVFAGPIVTLKVYEDNVLVREFLEEKGHGRVLVVDGGGSMRCAILGGNPVQQAQNNGWAGILVNGCIRDVDEINGCDIGVRALSSHPMKANKKGMGEKHVPVNIAGTRICDGEWLYADPDGILVSRTELTV

SEQ ID NO: 300296 - protein, 87 aa, Zea mays
  Clone ID: MRT4577_3693C.1.pep
FGGAVFSHCPWGGKLGSLGVPPAALFIVHTCAVHGFFFPVFLRPAGWAPLPPAVWGFRVTIDLCLLAWPSKNVVCWSIQQGSGTPEQ

SEQ ID NO: 300297 - protein, 73 aa, Zea mays
  Clone ID: MRT4577_36940C.1.pep
PHWGPAGGLCLHHFWNPPPPARDLRTLFIIAHLPRVGIEGPRRAACPGSGRVTLGRLGSTNECWACCCAKGHM

SEQ ID NO: 300298 - protein, 65 aa, Zea mays
  Clone ID: MRT4577_36941C.1.pep
TRTPASILNDIITYLYFNHTYYKILSNLLCAFPYLFLHIILHFHHCSSPNTTSPTSTTFSYYYYL

SEQ ID NO: 300299 - protein, 186 aa, Zea mays
  unsure (1)..(186): unsure at all Xaa locations
  Clone ID: MRT4577_36942C.1.pep
MTAAGVRSKKIIKKEDMAALPLATAEVCDANPHLIMNGELRALQPIFQIYGRRQVFAGPIVTLKVYEDNVLVREFLEEKGHGRVLVVDGGGSMRCAILGGNPVQQAQNNGWAGILVNGCIRDVDEXEINGCDIGVRALSSHPMKANKKGMGEKHVPVNIAGTRICDGEWLYADPDGILVSRTELTV

SEQ ID NO: 300300 - protein, 90 aa, Zea mays
  Clone ID: MRT4577_36943C.1.pep
LLTSAGRTTLAGLFRWKRVTNHVWRPRTRTNRLGANTSSERQTNHIGPPGAQRTRTTRRRWPPEPRSGRGSRTRCGRRPDSPSTTASTST

SEQ ID NO: 300301 - protein, 80 aa, Zea mays
  Clone ID: MRT4577_36944C.1.pep
DNHQNFFPEPRTISNTKDLFGSPPKQFLDILLGSGRVSAREVWSARPLKYNRAEISGTRLLASSCCLGKKVSHSIENKRV

SEQ ID NO: 300302 - protein, 45 aa, Zea mays
  Clone ID: MRT4577_36945C.1.pep
PSTKTKKDYCTDYNLHRYYKKHYLFLSSLWPFTYPTLPRCFFLTI

SEQ ID NO: 300303 - protein, 91 aa, Zea mays
  Clone ID: MRT4577_36946C.1.pep
GRKGGAPMYLPPLLPPPQCESKLITRADDTEEVVKNRLRVYHDLTEPVEGFYKARQKLLEFNIPGGIPESWRKLLEALNIEDSNNMRSAVA

SEQ ID NO: 300304 - protein, 51 aa, Zea mays
  Clone ID: MRT4577_36947C.1.pep
RGRLGDWTYWILDKGGVGDNGDISGESMRDEEHAHIDTLRGRILDTILRLR

SEQ ID NO: 300305 - protein, 80 aa, Zea mays
  unsure (1)..(80): unsure at all Xaa locations
  Clone ID: MRT4577_36949C.1.pep
RQKPPAGPRPGNGEEXQTPQTSREPPHGKTRTTTAPSGRKTASSPQRETRPTSKRPTRPGKAPVRTQRNPPTEAQATRPR

SEQ ID NO: 300306 - protein, 89 aa, Zea mays
  Clone ID: MRT4577_3694C.1.pep
GWHLHSARGFFSLGGDLGQTDAILGPVGGGVSPRPGFSVFEPSIFKKCPTLTCAPYSQNSQKKKKKKKKKKKKKKKKKKKKKKKKLERG

SEQ ID NO: 300307 - protein, 95 aa, Zea mays
  Clone ID: MRT4577_36950C.1.pep
LSFRPTLTLSLKPYLHPKLTHYANSFYERMFKTHSETHLISTLINHNLNYNPKISPLIKHSLPTSINIHLSLTNLLSHTKPHFHKYKSILHTTIT

SEQ ID NO: 300308 - protein, 149 aa, Zea mays
  Clone ID: MRT4577_36951C.1.pep
MEVSAGLRPPPVAAAASLRGRRFASVPPLAASHSVRSVSRAVKNKASAIYDLQRNRSNLESLFCYDKSVPEENIGKPSGLDLEKKDVGDNPPCSSCEAKGAVLCATCAGSGLYVDSILESQGIIVKVRCLGCGGTGNIMCSKCGGRGHT

SEQ ID NO: 300309 - protein, 111 aa, Zea mays
  Clone ID: MRT4577_36952C.1.pep
LCSLEQQQGAHIFLDFFLIHHLMFFICDNSRTTSPTRRCTCFFTISHPRHMGLILSFSPPTAIIVGLVLTVQLAYPSFTPFKCHLLSHLSLKGHVKSQTEGLAFPPRTASR

SEQ ID NO: 300310 - protein, 56 aa, Zea mays
  Clone ID: MRT4577_36953C.1.pep
FDPYWRMFVHVLENYLLRDPNDHHCYWRFPFLVSFCKAVVVNLCNKWILKKYTIIS

SEQ ID NO: 300311 - protein, 140 aa, Zea mays
  Clone ID: MRT4577_36954C.1.pep
MSKRGRGGSAGAKFRISLGLPVGAVINCADNTGAKNLYVIAVQGIKGRLNRLPAAGSGDMIVATVKKGKPELRKKVMPAVVIRQRKPFRRRDGVFIYFEDNAGVIVNNKGEMKGSAITGPVAKECADLWPRIASNASSIA

SEQ ID NO: 300312 - protein, 71 aa, Zea mays
  Clone ID: MRT4577_36955C.1.pep
WVKGQGGAWFPAGPSGEVLPELMLGSVVGFGQLSNSGGARKSVRVAKPGKFVDSGVVARDRGKMYECAPPP

SEQ ID NO: 300313 - protein, 36 aa, Zea mays
  Clone ID: MRT4577_36956C.1.pep
LFYSKHAFTYLITQSYSEIHNDSSLYLWKMLLNIII

SEQ ID NO: 300314 - protein, 62 aa, Zea mays
  unsure (1)..(62): unsure at all Xaa locations
  Clone ID: MRT4577_36957C.1.pep
YASGASLPMRTRRRVVVLNRMVIRVGVGSFFXGAVWWGLSCVGIRNRQTGPALCIPSQLKNA

SEQ ID NO: 300315 - protein, 73 aa, Zea mays
  Clone ID: MRT4577_36958C.1.pep
SPSKSFSSFLHGHTSMTNLTGHPSTASPPHSHRTTTTQGEAESSSATTTTHTPRRVSHGTAGHASRRSSEPGR

SEQ ID NO: 300316 - protein, 51 aa, Zea mays
  Clone ID: MRT4577_36959C.1.pep
LGSRVPGHIPAMIASGRCAHPRARRGLRPPSTSRGKQARTPASPRLSSPLP

SEQ ID NO: 300317 - protein, 46 aa, Zea mays
  Clone ID: MRT4577_3695C.1.pep
SNHSRGLEISLSRREGQIPSCLTMPHSMLPNKPKTNFITTQLRSSV

SEQ ID NO: 300318 - protein, 97 aa, Zea mays
  Clone ID: MRT4577_36960C.1.pep
MEIRHIPVMSESSEQLFSVDSIAVPEPIQQLLHKYEALFQPPTTLPPSRFCDHSIPLIEGARPVNIRPYRFSPDMKDEIESQVNEMLQSGLIQHCSS

SEQ ID NO: 300319 - protein, 135 aa, Zea mays
  Clone ID: MRT4577_36962C.1.pep
GAGGGGHSIWVGFLLWPPRLCPLVFRFVFCVGLEPDTFFPPHRAMALVCPRFFSTPFKERWFACRVRSGISVSAPPSGPGQGYIFFLPWGGVGVSLWEGPFVPGCLWPWGFFFQVFFSRFSLAHVPGTAHPSPPP

SEQ ID NO: 300320 - protein, 39 aa, Zea mays
  Clone ID: MRT4577_36963C.1.pep
RRKQVYIRYLILHKITKLVQSAYKPTLTLDWEILFYSFF

SEQ ID NO: 300321 - protein, 104 aa, Zea mays
  unsure (1)..(104): unsure at all Xaa locations
  Clone ID: MRT4577_36964C.1.pep
ELFFGGRPIVVTWAXIEEVLAHPDERGFLTHSRRNYTVDAIWEGVPMVCCPLDRDQLRHMRHLRDVCHVGTELEAEQLERGHGKAVINRLFDTKEGVETKVRLK

SEQ ID NO: 300322 - protein, 93 aa, Zea mays
  Clone ID: MRT4577_36965C.1.pep
GTRAGCYFVVKRAAPGAGDFLSSCFACKKKLEGNDIYIYRGEKAFCSANCRDQEIQLEEEAENNTSSGSPGSSSSSSSSSNDDIFMAGMVVAT

SEQ ID NO: 300323 - protein, 67 aa, Zea mays
  Clone ID: MRT4577_36966C.1.pep
SCFSQGENLAMHKHFWVASLVFVNNVRGMHRWPGRAFQCRSFPSASTTSCRKQELHSAAALSHTCPR

SEQ ID NO: 300324 - protein, 111 aa, Zea mays
  Clone ID: MRT4577_36967C.1.pep
ESGEKKKGERMGVPKKKTNFFYPAFRTLITRGGLNRSFEKSNNPAGGTGTLHWGGGFFFSHHWKTALGSSFKEGEQLQEGLFTPPGTKKGARDFPGRATPPPRKETEGLLP

SEQ ID NO: 300325 - protein, 139 aa, Zea mays
  Clone ID: MRT4577_36968C.1.pep
KGTFGHFLGTISTEAASSRKTFGATKHGPNRYQLAYVILGTSAVHTIVDVAIFFIGTTLDPSRYPRIFDQDVEDNAGLSETSKHKMEEGREHEDSDHDAGDGHDAGHDVGALGDIDGAFGFVTHLIRLTDDDGSPGSGR

SEQ ID NO: 300326 - protein, 91 aa, Zea mays
  unsure (1)..(91): unsure at all Xaa locations
  Clone ID: MRT4577_36969C.1.pep
LSPQVSLVCENPIVHXYRIHQAMADGISLLSPLFVRQSSVLLQQXLLVHLLAHDIRARHLQQLVLANPAAYFQLQQFLPFYQQPIIGGALF

SEQ ID NO: 300327 - protein, 49 aa, Zea mays
  Clone ID: MRT4577_3696C.1.pep
RGCSKSLLKLPNHDAPLPTPYRRHCFTRTALSRRAYPKGQASYCSSHMN

SEQ ID NO: 300328 - protein, 45 aa, Zea mays
  unsure (1)..(45): unsure at all Xaa locations
  Clone ID: MRT4577_36970C.1.pep
KYNTSQTHTFTTKGGGITSTXKFTSKHKKNVYITTXYYTNYHSSS

SEQ ID NO: 300329 - protein, 60 aa, Zea mays
  Clone ID: MRT4577_36971C.1.pep
AGGSSCNLLKSLMRRRRAGVDMALAGSEVGHIPGSAVPAEAEEAEAEGAPRGTALPLRSR

SEQ ID NO: 300330 - protein, 92 aa, Zea mays
  Clone ID: MRT4577_36972C.1.pep
MDATFGCWAGAGHHVDEYLSRQAAGCGRLDMVDEAFLGACFGQLQCDGALTTAAGGVDAGACQLVSSNAGAVQGGAGLDGDPVAFLSAGNGD

SEQ ID NO: 300331 - protein, 72 aa, Zea mays
  Clone ID: MRT4577_36973C.1.pep
SFFFFFFFFLGVFFLPWRTQTVPRRIPNFPFRGSYFSLGKEWPKLVPVKNSNPFTIQKNNRPKSIKLKTWGA

SEQ ID NO: 300332 - protein, 152 aa, Zea mays
  unsure (1)..(152): unsure at all Xaa locations
  Clone ID: MRT4577_36974C.1.pep
CLSDAAFCVCKTGVPDQAMQAAIDYACAKGADCASASKGAPCYGNGNXXAVCSYICNSYYQSRSATGATCDFNGVATLTGTDPSSGTCKFASGPSSAGTGGGMGAGAGTGGGMGAGAGTGAGTRRWHRGQARAWAPRRRSAPQVAPVALRLW

SEQ ID NO: 300333 - protein, 72 aa, Zea mays
  Clone ID: MRT4577_36975C.1.pep
LQFIHIFNHATFDHYLTIIHASFLFNTQNQPSSYLIAKDIKIPTKNVTFMAEYHLLQLTKFEPWLGRFSLTT

SEQ ID NO: 300334 - protein, 365 aa, Zea mays
  unsure (1)..(365): unsure at all Xaa locations
  Clone ID: MRT4577_36976C.1.pep
MQAAIDYACAKGADCASASKGAPCYGNGNKVAVCSYICNSYYQSRSATGATCDFNGVATLTGTDPSSGTCKFSASGPSAGTGGGMGAGAGTGGGMGAGAGTGAGTGVGTPQDRSCPIAHTHTHTHTLSPTVHGPVQRAQELLQPWRFPCSPYCTPLTSPHTATPHPAVPIARTLSRSLPPSPSVCGPVQRARAAMAAPLFLLLLLLAMFTGSADAAFCVCKTGVPDQAMQAAIDYACAKGADCASASKGAPCYGNGNKVAVCSYICNSYYQSRSATGATCDFNGVATLTGTDPSSGTCKFASXQQRRHRRWHGRWRGYRRWHGRWRWHRRRDRRWHRSRHGHGHRDGDQHRHRRRAQGSRPPGAP

SEQ ID NO: 300335 - protein, 88 aa, Zea mays
  unsure (1)..(88): unsure at all Xaa locations
  Clone ID: MRT4577_36977C.1.pep
XPRPGXPVVWGXXNGNTIPSPPWQSSRHSPPRRSYLSPPTSPSTKAECTGWSSHATRYTRPQPTVTEARPSTPTPSSRRRRGSTTTNV

SEQ ID NO: 300336 - protein, 151 aa, Zea mays
  Clone ID: MRT4577_36978C.1.pep
APAGAGGGGGGAGGSILCMASVSGILGGLGTYPYSVSKFAIAGIVKAAAAELSRLGVRVNCISPYAVPTPMVLGQFSAMLGGAADEAQVAAIVRGLGELRGATCEAVDIARAAVYLASDDAKYVSGHNLVVDGGFTSYKHMNLPFPTKPHE

SEQ ID NO: 300337 - protein, 56 aa, Zea mays
  Clone ID: MRT4577_36979C.1.pep
LMTISRPTRRWTTRNIMEFMGSLGHELHVAWLRSLGTMLFRPICIPTCSHQPIVIF

SEQ ID NO: 300338 - protein, 64 aa, Zea mays
  unsure (1)..(64): unsure at all Xaa locations
  Clone ID: MRT4577_3697C.1.pep
NQGNLILTNTCLRGIPTYTMGFYRLXGTHSKMDSIRANFFGQGAGQKHKSHMARWEMMTRPKDQ

SEQ ID NO: 300339 - protein, 147 aa, Zea mays
  unsure (1)..(147): unsure at all Xaa locations
  Clone ID: MRT4577_36980C.1.pep
MGPLEPRYRPGGAPEDTTKRRASKSKSFKDAENFEVLVLEKSCGCKFKSLRILLIAIISATVLTLVTPTLYERQLQSASRYVDVGWMWDRASSDPRYASSADVGWEDVYKALGNLRXRLEHAKDSVTWQTLYPEWIDEEEETEIPSC

SEQ ID NO: 300340 - protein, 208 aa, Zea mays
  unsure (1)..(208): unsure at all Xaa locations
  Clone ID: MRT4577_36981C.1.pep
YFGLGTALSIYGCSRXAEENVAAAAAAADMEDGAGYVVARGLGPAAAKPALDERDGAGEVAGFWGYLLQIIYQANAGAVMLTDCVFWFIIFPFLTEKDYSLNFLLIGMHSVNAVFLLGEAALNSLRFPWFRVAYFFLWTALYVVFQWIVHAATPMWWPYPFLDLTSNLAPLWYLAVAALQLPCYVVFWLLIKVKHHLLARCFPVSYVR

SEQ ID NO: 300341 - protein, 114 aa, Zea mays
  Clone ID: MRT4577_36982C.1.pep
KGGAKFLGPFQGKWRFWEPPNLSGPGGPCSSKGCPPVQKGYDPLLKEGGGPFLCPSPPGFFIQVRGMWELLSFFFPPFFFFPSKLGQKKKPTCFFLLHWAPPMVFCWYNPPGED

SEQ ID NO: 300342 - protein, 150 aa, Zea mays
  unsure (1)..(150): unsure at all Xaa locations
  Clone ID: MRT4577_36983C.1.pep
MGPLEPRYRPGGAPEDTTKRRASKSKSFKDAENFEVLVLEKSCGCKFKSLRILLIAIISATVLTLVTPTLYERQLQSASRYVDVGWMWDRASSDPRYASSADVRWEDVYKALXNLRSGNRQSHLRVGLLNFNSTEYGSWTQLLPADSHVI

SEQ ID NO: 300343 - protein, 104 aa, Zea mays
  unsure (1)..(104): unsure at all Xaa locations
  Clone ID: MRT4577_36984C.1.pep
MGPLEPRYRPGGAPEDTTKRRASKSKSFKDAETFXVLVLEKSCGCKFKSLRILLIAIISATVLTLVTPTLYERQLQSASRYVXSGGMWDRASSDPRYASSADVG

SEQ ID NO: 300344 - protein, 102 aa, Zea mays
  unsure (1)..(102): unsure at all Xaa locations
  Clone ID: MRT4577_36985C.1.pep
QKLVKRLRLLFGEGKAYKDSTKRLVTNPTVTLXLPPVAQPPKPQSISSQLLLTHVRDPNIWYYIGFSKFMMCHCTDSRLFCMVLHRVFCPQTYSVMAYLTLL

SEQ ID NO: 300345 - protein, 300 aa, Zea mays
  Clone ID: MRT4577_36986C.1.pep
MGPLEPRYRPGGAPEDTTKRRASKSKSFKDAENFEVLVLEKSCGCKFKSLRILLIAIISATVLTLVTPTLYERQLQSASRYVDVGWMWDRASSDPRYASSADVGWEDVYKALGNLRSGNRQSHLRVGLLNFNSTEYGSWTQLLPADSHVISTVRLEHAKDSVTWQTLYPEWIDEEEETEIPSCPSLPEPNVPRGARFDVVAVKLPCTRVAGWSRDVARLHLQLSAAKLAVASSKRNHDDVHVLFVTDCFPIPNLFPCKNLVTREGSAWLYSPDSKALREKLRLPGGSWELAVPLKAKSRL

SEQ ID NO: 300346 - protein, 51 aa, Zea mays
  Clone ID: MRT4577_36987C.1.pep
THLELLLNRNVTDIYRPNINKNIPPIKRLHRVPKHLFLGAYNIYYDIPTGP

SEQ ID NO: 300347 - protein, 209 aa, Zea mays
  unsure (1)..(209): unsure at all Xaa locations
  Clone ID: MRT4577_36988C.1.pep
RPGCWLCVSPHSLHTLDSSSPQESGRSKKEKRQPKDQRIKRGGVTSMDPFLEKFFPVVFHRKNSGGKNNYCKYDNQGLAAFTSSLYLAGLVASLVASPVTRNYGRKASIVCGGVSFLIGAALNVAAVNLAMLILGRIMLGVGIGFGNQAVPLYLXSEMAPAHLRGGLNMMFQLATTLGIFTANLINYGTQNIKPWXXWRLSLGLAAVPA

SEQ ID NO: 300348 - protein, 181 aa, Zea mays
  unsure (1)..(181): unsure at all Xaa locations
  Clone ID: MRT4577_36989C.1.pep
LNLWSADGRSSVRALLPCGAVDSSDLLLAEFISGGIQMIVCQVIVAVILGVKFGAEKQLARSYSVAVVVVICLFVLAFGWSWGPLGWTVPSEIFPLETRSAGQSITVAVNLLFTFAIAQAFLSLLCAFKFGIFLFFAXWITVMTVFVYVFLPENQGVPIEEMVLLWRKHWFWKKVMXDMPL

SEQ ID NO: 300349 - protein, 46 aa, Zea mays
  Clone ID: MRT4577_3698C.1.pep
DQRTKAKGFPYFASYNFCASSIIGHLSVHFYVVLSLNQHIIPLRFP

SEQ ID NO: 300350 - protein, 523 aa, Zea mays
  Clone ID: MRT4577_36990C.1.pep
MAGGGVAALGVKTERAAQYKGRMTLAVATTCLVAAVGGAIFGYDIGISGGVTSMDPFLEKFFPVVFHRKNSGGKNNYCKYDNQGLAAFTSSLYLAGLVASLVASPVTRNYGRKASIVCGGVSFLIGAALNVAAVNLAMLILGRIMLGVGIGFGNQAVPLYLSEMAPAHLRGGLNMMFQLATTLGIFTANLINYGTQNIKPWGWRLSLGLAAVPALLMTLGGLFLPETPNSLIERGRVEEGRRVLERIRGTADVDAEFTDMVEASELANTVEHPFRNILQPRNRPQLVMAVCMPAFQILTGINSILFYAPVLFQSMGFGGNASLYSSVLTGAVLFSSTLISIGIVDRLGRRKLLISGGIQMIVCQVIVAVILGVKFGAEKQLARSYSVAVVVVICLFVLAFGWSWGPLGWTVPSEIFPLETRSAGQSITVAVNLLFTFAIAQAFLSLLCAFKFGIFLFFAGWITVMTVFVYVFLPETKGVPIEEMVLLWRKHWFWKKVMPDMPLEDGWGAAEGHAAPASNNHKG

SEQ ID NO: 300351 - protein, 62 aa, Zea mays
  Clone ID: MRT4577_36991C.1.pep
VYQLTWTPKKTLLKNGGCKVKEGIKSAQGTRFQITSPCTMQACRCLSLQLTADSFRCSYCCI

SEQ ID NO: 300352 - protein, 67 aa, Zea mays
  Clone ID: MRT4577_36992C.1.pep
ILHTHCSSKPHPTPAIRLLLYHIINSNYTNLSSILHTTLLIAPIQNQSLQPQSITPQCITNIPTIHD

SEQ ID NO: 300353 - protein, 131 aa, Zea mays
  unsure (1)..(131): unsure at all Xaa locations
  Clone ID: MRT4577_36993C.1.pep
MSRHKATCPGTLSTAAVMTNRLLTRKXNELEEIHAHRDNDSDEEMKDRLAKEQXGKHPNTLCPRVRTHFRRRKSTGFFIIYKKLXGAMNLQPKYPLMRNGLATIVEKTRKQMIDCQNGIKKIRAVKNEPSC

SEQ ID NO: 300354 - protein, 114 aa, Zea mays
  Clone ID: MRT4577_36994C.1.pep
CPMGGPLPGCKLVCKQGRSMPPFLVMRSRPWYPVKEKLRPVFCPPVPLFFFWAEPSFSGLKVCSLGGGVLFFLQSGSAGGINKPWSPGPYAIRIFKVAISEQSIGFKGSPPAML

SEQ ID NO: 300355 - protein, 69 aa, Zea mays
  Clone ID: MRT4577_36995C.1.pep
FLLSFLFFCVPTEGGHLTCTLGENQFKKLAEEAPLEFFSFKGIPLSAFSWEKPDRWSILFGFVVFSYKL

SEQ ID NO: 300356 - protein, 93 aa, Zea mays
  unsure (1)..(93): unsure at all Xaa locations
  Clone ID: MRT4577_36996C.1.pep
RSPAVIQPERLSVLPHTRAELCKIILPPLLSINYIPWIQPRKXLAXLEMVEAAXGRLLRALPSXGXXDGXRXXWXXARRVERERPPLSMEDGS

SEQ ID NO: 300357 - protein, 129 aa, Zea mays
  unsure (1)..(129): unsure at all Xaa locations
  Clone ID: MRT4577_36997C.1.pep
GVLFGGLALLALAXASATYTHTIGICGCQPPITDYLPSTGHVPPSVHLPPAVHLPPPVHLPSPVHLPPTVHVPPTVHMPSAPCQYPTXPSRPQSHTQPHLCACQQSHPSPCHLXVTCGVGSTPILGQCV

SEQ ID NO: 300358 - protein, 66 aa, Zea mays
  Clone ID: MRT4577_36998C.1.pep
DNNWMFLLKGSPLITLTEKTVGARKRILYPRRWTQMLTHSPLYMQAHERISPISQQLRGRSLYSRR

SEQ ID NO: 300359 - protein, 77 aa, Zea mays
  Clone ID: MRT4577_36999C.1.pep
WAESPLMLIAVLLLLVCYTGTHGGPVTMVSAKTCNSNSFRFNVPCYRDANCADLCLTEGFTDGVCNGLHDRCFCTND

SEQ ID NO: 300360 - protein, 128 aa, Zea mays
  Clone ID: MRT4577_3699C.1.pep
LITNTTHGHTYGIVALFICCNARVFNQGISDWEWEEDQQMIWCYQGQAPSPRNGSSSFAWATCASGYSSPTVFGMGATNSSTMGMQQQQQQGVYGNMQAGAQNVQSMAGLQNQTQNPNFTQQIQQNQQ

SEQ ID NO: 300361 - protein, 803 aa, Zea mays
  Clone ID: MRT4577_369C.1.pep
MSQILRHRLSAHYHGVCGHCCRRLSSSVYGGGGSRRAVAAPPQDGEGSRAVRVSVWWDFENCHIPNGVNVHRVAPRVSAALRAAGIRGPLSITAFGDVLQLARSSQEALAATGVSISHVPSSGKNSSDRSFMADLVYWIAQNPPPVHFFLISGDRDFANILHRLRMSNYNVLLACPSSATSVLCSAATIMWPWEGLVRGEDLSPKRFNNPPDGLHGSWYGHYRGALDDPPLEKESEEPIKVASVPKQFSVPSNTKHCPVPKHVKNAILEVLRSYPEGVNISLLRNQLVKNKIDLGTNFFGHKKFSSFLESMPHVVKLLGSRLGENELYAIAANKKFMQPGDGALDDPFLEKGAEEPIKVSSDSQHCSVPSDTKSSSIPKYVTDAILEALCSYPEGINLSLLQEELAKKKICLGPDFFGHKDFSCLIQSIPDIVELVCPQTGGQLYAIAVNRRSLQPGDGSTKTLSSAQGNARENNPTGTAHSNKKNTLSSLRSIYKSRSFTETLSEHPPTFSVLPSPSNGLSEDQIECPVVDVNGSTESPAKHREVGEMTTPGTPSSSGVENAANEYGFFKRIWTMWNGPKNVKSEVSQNCESTSAEVIDDLQVSQNCESTFAKVIDDLRTPLEEYNGDHRIKLLRRIHETSSKNDRSDGTEGMLAVSDNLSISLGDDHSEKIKRDPSIPENPEPCRKPAAVSMIKSGKKDDISEMNRGMFNWASRWWPFGKSDADSSTTNINATDEPRTDSIEEFESSNAPTNGSAQQVVHEIFTKPDLWSVLEQQLSEPLGSEVVLKAKTRKRRIQMRSIY

SEQ ID NO: 300362 - protein, 405 aa, Zea mays
  Clone ID: MRT4577_36C.1.pep
MSALGTLSGGAAGVSGLLRLRRRVAPALAAPSHHAAGTLNCAALPDAAPLVWGRQLRPSLLLPATLLPSSSQGARRHTPRRPAAAAGREAKSVGFLEKYPALVTGFFFFMWYFLNVIFNILNKKIYNYFPYPYFVSLIHLVVGVVYCLISWSVGLPKRAPINGTLLKLLFPVALCHGIGHITSNVSFAAVAVSFAHTIKALEPFFSAAATQFILGQQVPFSLWLSLAPVVIGVSMASLTELSFNWTGFINAMISNISFTYRSIYSKKAMTDMDSTNVYAYISIIALIVCIPPAVIFEGPRLMQHGFSDAIAKVGLTKFVSDLFLVGLFYHLYNQIATNTLERVAPLTHAVGNVLKRVFVIGFSIVVFGNKISTQTGIGTSIAIAGVAMYSYIKAKIEEEKRKKSA

SEQ ID NO: 300363 - protein, 46 aa, Zea mays
  Clone ID: MRT4577_37000C.1.pep
MESSDSDSNAAASAAVEEEAAAAAQQSIFLDATQGMVCSLTRTLYP

SEQ ID NO: 300364 - protein, 75 aa, Zea mays
  unsure (1)..(75): unsure at all Xaa locations
  Clone ID: MRT4577_37001C.1.pep
CRDEERKELVMRIIDXXLRQYTWXDKQLETWVKATGFLGGSKDVLPTIISPDQYKKRFRKAMSKYFLALPDQWSP

SEQ ID NO: 300365 - protein, 766 aa, Zea mays
  unsure (1)..(766): unsure at all Xaa locations
  Clone ID: MRT4577_37002C.1.pep
IRHEAFGKFLELSFSNHTTANRIACCGHSLQRDCLRFYGLGSMVAVFRYSPVDILSVNLPSSVLDFACPKAQDWVIKEAVDVCARKEHLYREIVAKLDCIEKIVKDQNIGMKSGLHKHIADLKELLKVEWKKYDVVSAFSIVDDLQTFEPYIGVLELNLLRRELVRDIHVWDRRLYMMHSLTKENCRTMPNDAQFSEKLTESSLEQSKDVTSGKHLNAESSLEQNQPSMLEXEQFQXKSSPMTEQTNTSISHLVLETNIMGDASMHSVSTVISFAPGSYEMQSEGVLAELEAGKTLQKSQSSASNLSDRIDLAWTGSGQLVNDSSSSMEAVSFIPASLKDNPAYQKVIAPIRIKSFDSAISSRNVDDSNASIRRSYSQRPPKAIERTGKGLSPTFLNKLSLPGMIHGESRLLLSQNDSGVIVPIYDDEPSSMIAHAMTVPEYHSFLLPLLYQNNESNLLNYGSDQPQPITRNDSKYNHFTISFEDEDSNSVDKAKFSVTCYFAKQFDAIRRKCCPDELDYIRSLSRCKRWSAQGGKSNVYFAKTLDDRFVIKQVTRTELDSFEDYAADYFKYLIDSVSSGSPTCLTKVLGLYQITAKNLRDGKELKMDVMVMENLFFKRKVSRIYDLKGSLRSRYNPDTSGNNKVLLDLNLLETLHTKPIFLGSKAKRRLERAVWNDTSFLASVDVMDYSLLVGIDEERKELVMGIIDYLRQYTWDKQLETWVKATGFLGGSKDVLPTIISPDQYKKRFRKAMSKYFLALPDQWSP

SEQ ID NO: 300366 - protein, 298 aa, Zea mays
  Clone ID: MRT4577_37003C.1.pep
PSGWARTQGALWTVDVNPSTELLATGGADNTMRLWHVPTGKLLHTWEFNTSIKRCEFSPDGRQLLGVTEKRSGHLSTICVYEINPDPEAQQSDEQLLRIVCDESKATVAGFSYLAKYIISGHEDGSITQWDGKTGELLSSNYDAHEPDMQITDIQWAPDRSYFITASKDKTAKLIDVEDLSVLKSYVADTPLNSAAITPVKDYVILGGGQAAMDVTTTSARQGKFEARFYHKIFMEEIGRVRGHFGPLNYVAVHPKGTSYCSGGEDGYVRVHHFDKPYFDFMYEVEREAAREAAQANL

SEQ ID NO: 300367 - protein, 89 aa, Zea mays
  Clone ID: MRT4577_37004C.1.pep
LLSSTAAALLFFFLEQLFFLIGGFFIIQRGYSINTNSTHPQTTNTYVRTDTPNTYHLSSTTTHPEQFLTTTTTDVQVLIYLPPVTMPCP

SEQ ID NO: 300368 - protein, 133 aa, Zea mays
  unsure (1)..(133): unsure at all Xaa locations
  Clone ID: MRT4577_37005C.1.pep
GFGGLFFVSPLAKGDLLQGVFLGSPGFSPSGVCQTPAGGFVLGPLLEKFFCRLPGSLSLVSFGGPPLFFFFVFLGFFPRSLKDPKGGDFWFKNPQKKGRGGSLRPCPGFLGGVFFFFPVPLLTPARXPFFYFF

SEQ ID NO: 300369 - protein, 211 aa, Zea mays
  unsure (1)..(211): unsure at all Xaa locations
  Clone ID: MRT4577_37006C.1.pep
KKKKIKKKNKTKNKKKTKKQKKIKKKKKKKIKXEKKVKTKKKKNKNKKNKXKKKKKKTKKEKNKKXKNKKRKQKKMKKKKEKNKKKKNNKKKKCKKKKKKKKKKKIKKKKKKKKKKKKKKKKKKKKKKKKKKKKKKKDKIKKNKKIKKKKKKKIKKKNKSNKKKQKKIYNKNNIIKKKNNNKKTKTNKIXKNHKKKKYNNKNTKKINKITT

SEQ ID NO: 300370 - protein, 72 aa, Zea mays
  Clone ID: MRT4577_37007C.1.pep
SYSKLAIYHYTPHYRILMEHHPCLHKKVTAIRSVTAPIIRAFDPENLIGNCANMFIIQPLPCLEGLDCLSLT

SEQ ID NO: 300371 - protein, 63 aa, Zea mays
  Clone ID: MRT4577_37008C.1.pep
GSAWAPIQQSWGPVWRYKSGAALQGPFSVPLTSGSGRTVVPNHVIPPGWTPGAPDRSVVNFSH

SEQ ID NO: 300372 - protein, 76 aa, Zea mays
  Clone ID: MRT4577_37009C.1.pep
PNLDQISINVVPFYQGTALLQSMTFYHHTIVYEFVFSAKICSWPPPLCICHCPSTPDLRSQSQARVRVQSSLLLIG

SEQ ID NO: 300373 - protein, 88 aa, Zea mays
  Clone ID: MRT4577_3700C.1.pep
PSSRSRAAPRDLELGNMVWHCYFSYSCFMSQSEVTRVGNHGISDWEWEEDEEMIWCYQGQAPSPRNGSSSFAWATCASGYSSPTENHH

SEQ ID NO: 300374 - protein, 112 aa, Zea mays
  Clone ID: MRT4577_37010C.1.pep
MQLAMSPSSSLRRTAAAFVFVALLGLASSSLLQLQAARTTPSDRRGRVDPRQKQEEEEVRAAAMTTSSRSGSTPASASVQESPPPTTITVEEASSPPRSRMLGSVPSPGVGH

SEQ ID NO: 300375 - protein, 162 aa, Zea mays
  Clone ID: MRT4577_37011C.1.pep
MKSFSLITLFCTLVTAAVIPRDTVFDGHCCFTLHDVANDAAVQENSNGNLLLNAGSTSGFFCIDLSNSQNILRDRSFNACFLNPSGEVKCVDPTPGFESWTLKKSGSNTLLHRDGATAFNSCSKTSTSSKGTVLFGDKHTGASTCKKTTLKVKNLKGTCKNF

SEQ ID NO: 300376 - protein, 59 aa, Zea mays
  Clone ID: MRT4577_37012C.1.pep
SREPLGPSNIPPASVFGLVGFSKKNARGKLYCQAQECFMSKRSVSDKLLFVGTQKGFPR

SEQ ID NO: 300377 - protein, 359 aa, Zea mays
  Clone ID: MRT4577_37013C.1.pep
MESGQPGHVPAHGRLVGFGARQVVGHAAADEEKRMEQKEQLGSSMSMDTLPHLTTPLGNITTLDLSNNNLQSIPESIIARLLNVVVLDVRSNQLKSLPNSIGCLSKLKVLNVSGNLLQELPATIEECRALEELNANFNQLTRLPDTLGFELHGLRRLSDNSNKLAYLPSSTSHMTALRSLDARLNCLRALPDGLENLGGLEAHSARQNFQYLRELPYGIGLLVSLRELDVSYNSIAALPDSMGCLTKLARFSAAGNPLVCPPMDVVEQSLDAMRAYLSARMNGTAKAKKKSWVPKLVKYSTFSAGMMTPGRTKVHGNNTDGLHMSDYRSLDGGGVASSAFLSMLSPRRLFSPRRNSTKH

SEQ ID NO: 300378 - protein, 34 aa, Zea mays
  Clone ID: MRT4577_37014C.1.pep
FQFSWHWGDPQKIISETLIEQTRHVVHSSTPKTL

SEQ ID NO: 300379 - protein, 139 aa, Zea mays
  unsure (1)..(139): unsure at all Xaa locations
  Clone ID: MRT4577_37015C.1.pep
MDMAKAGAPRVWEPQQMVTLGLALLCAVDGPAAAQNCGCQPNXFDXSRFGYCGTTNEYCGDGCQLGPCRSGGXGGXSGGRGANVASVDTGLFFNGIKNQAGSRCEVKNLYTQSACLSAVKVEPGFDHGGXQVQGKREIA

SEQ ID NO: 300380 - protein, 74 aa, Zea mays
  Clone ID: MRT4577_37016C.1.pep
TKDDSEIRLSGRLIHLNWTSQKHLLSESFVLDYLKVGQTCYLQQGSFGEILKANWRGTPIAVKTFFHPYLMTGW

SEQ ID NO: 300381 - protein, 391 aa, Zea mays
  Clone ID: MRT4577_37017C.1.pep
MSMLLIQKQPLPLSVRPRTTLRQCRLPTTRFSAAAAAADSASRAAPFAVEDYLVAACHLTPAQALKASKVLSHLKSPSRPDAVLAFLSDLGLSDADIAAAVAYDPKLLCSEVERTLAPRLAELRDLGLSPSQIARLALVDPARFRRPTVVSKLQYYVPLFGSFENLLQALRNNAYLLSSDLERVVKPNVAFLVECGLDACDIAKLSIPVPRLITTNPERVRAMVERAEAVGVPRGTGMFRHALLAVAFLSEEKIKAKAEFLKTTFRWSDAEVGVAVSKLPLVLKHSKDRLRRMSEFLITKVGLEPEYIAHRPALLTYSLERRLMPRHYVVNYLKENGLLEQDRSYYTAVQMSESAFMDKFICPYKEAAPSLALDYAAACRGEVPTTFLANV

SEQ ID NO: 300382 - protein, 69 aa, Zea mays
  Clone ID: MRT4577_37018C.1.pep
MSVTKFIKCVTVGDGAVGKTCMLICYTSNKFPTDYIPTVFDNFSANVSVGGSIVNLGLWDTAGQEDYSR

SEQ ID NO: 300383 - protein, 229 aa, Zea mays
  Clone ID: MRT4577_37019C.1.pep
MELALSLVSVPDPCELPATAMNSIKATKGLLALSQQDDLMDLTSNYPLSASEDEGDSDGERKHQKLLEAIGSLSGKNRWKLPERSEAGLKVSEFNVSSEGSGEKLALSDLLGPLKPSSSLAAVKKQLSRVKSKKTLELPLHKREVEQIHREVAFSKTSQTLSKWDSVVQKNREAEQLVFPLEKEPSSFAPMEHVFREWKARTPLGTENLLHKNQPVTDPLLTPVGKASL

SEQ ID NO: 300384 - protein, 144 aa, Zea mays
  Clone ID: MRT4577_3701C.1.pep
MSATDSCGAYCLMRGHGIHLMRHINFRLVIDKETGKPKGYGFCEYKDEETVLSACRDLHGYEINGRQLCVDFAENGRNTYSNREKVDNPQNYYRRAITTTLEFFINTSSCIVFIHVNDNSCASSDYHVSPVAISYKHVYICTTA

SEQ ID NO: 300385 - protein, 76 aa, Zea mays
  unsure (1)..(76): unsure at all Xaa locations
  Clone ID: MRT4577_37020C.1.pep
LRQHHQLQPFSQIVGVSPATFXTQRQLLPFCQHVAPSAGSLXQVHQWLPVNQRALTNPAVFCLHPIIEWCPLLDLV

SEQ ID NO: 300386 - protein, 221 aa, Zea mays
  unsure (1)..(221): unsure at all Xaa locations
  Clone ID: MRT4577_37021C.1.pep
MSVTKFIKCVTVGDGAVGKTCMLICYTSNKFPTDYIPTVFDNFSANVSVDGSIVNLGLWDTAGQEDYSRLRPLSYRGADVFVLAFSLISRASYENVLKKWVPELRRFAPNVPVVLVGTKLDLRDHRAYLADHPGASAVTTAQVCSLLPTSSXAXYSEACSSKTQXWLPLSVTXNVKAVFDAAIKVVIQPPTKLREKKKKKSRKGCSMVNILSGRKMLCFKS

SEQ ID NO: 300387 - protein, 113 aa, Zea mays
  Clone ID: MRT4577_37022C.1.pep
SCLASSASATAATAAAAAAHATACAMTWRPTSTAASRPWSSLCRPLRPAPAASTRAPRAAAATATATAAAPAAAAAAAAAAEPARQAWRSGTRVERTTTTTRITMLNSIVYIR

SEQ ID NO: 300388 - protein, 39 aa, Zea mays
  Clone ID: MRT4577_37023C.1.pep
ERYGESYQRHPCLDSNSLHRHSLSTDYDVSQCWLCRQIC

SEQ ID NO: 300389 - protein, 111 aa, Zea mays
  Clone ID: MRT4577_37024C.1.pep
AVLLSIGFSDAARVVRLGSHASAGGGGGGGGGGSGSTGGGFGGGSGGGGGYGIGKGGGDWWNNFVSSIAGGGGGGQGGGGGTNGGSGSGGSQGGSGGGGGSGSGSGSGGIH

SEQ ID NO: 300390 - protein, 258 aa, Zea mays
  unsure (1)..(258): unsure at all Xaa locations
  Clone ID: MRT4577_37025C.1.pep
MATSTKLVALGFAVLLSIGFSDAARVVRLGSHASAGGGGGGGGGGSGSTGGGFGGGSGGGGGYGIGKGGGDWWNNFVSSIAGGGGGGQGGGGGTNGGSGSGGGSGYGSGSSSTAASGPSSGNYADAEGKGAGGGMGGGANGAYGSGAGGGVGKGEGVSGVALAPSSNGYYNGGAADATGGGSGAGGGHGGGAAGAPSYGTGGGLXAEARVRXRQRXSWGSGYAQGIGAGTGGGGGGGSQGGSGGGGGSGSGSGSGGIH

SEQ ID NO: 300391 - protein, 82 aa, Zea mays
  unsure (1)..(82): unsure at all Xaa locations
  Clone ID: MRT4577_37026C.1.pep
QIQSIGERRECPFTYKKTNLXNKVSLSNHKTKKHHLVNLQYKKLCWEAGKRFDKLRLYTKXVKTIEKHYLYGVARKDDIDLN

SEQ ID NO: 300392 - protein, 43 aa, Zea mays
  Clone ID: MRT4577_37027C.1.pep
PLLKTPPFKGASFKKKKKKKKKKKKKKKKKKKKKKKKKKKKQQ

SEQ ID NO: 300393 - protein, 214 aa, Zea mays
  unsure (1)..(214): unsure at all Xaa locations
  Clone ID: MRT4577_37028C.1.pep
MMTNMLNKLHGQPDSYDRKSRYRFGKTLGAGTYGIVREADCPEGKVAVKIILKKNVRGNEQMVYDELEMLQRMKHPHIVKFHDWFESRDKYYIVTQLATGGELFDRICEKGKFTEKDAAETIRQVLDAVNYLHQNNVVHRDLKPENLLYLTRDEXSSLVLADFGIAKMLDSXTEVLTTMAGSFGYXAAPEVMLKXGHGKPXDMWSMGXITYTLL

SEQ ID NO: 300394 - protein, 395 aa, Zea mays
  Clone ID: MRT4577_37029C.1.pep
HSKVCGTREYRCDCGTLFSRRDSFITHRAFCDALAQESARLPPPGLTASHLYGATNAANMGLSLSQVGSHLASTLGADAHGHHQDLLRLGGSNAASRFEHLLGPSNASAFRPLPPPPSSAFLMGAPQEFGAGDGSGSHGFLQGKPFHSLMHLPDLQGNGAGGASASSATGLFNLGYIANSANSSGTSSHGHASQGHLTSDQFSEGGGGGGSESSAAMLFSGGGNFAGGDHQVAPGGMYNNDPAVMLPQMSATALLQKASQMGSSASAHGGVSSVFGGLVGSSAPSARHARAPMLDQSQMHLQSLMSSLAAGGMFGGANSGSMIDPRMYDMNQDVKFSQGRGGAEMTRDFLGVGGDGVMRGMTVARAGHQDGADDMNSLEAEMKSASSPFTGDRMQ

SEQ ID NO: 300395 - protein, 68 aa, Zea mays
  unsure (1)..(68): unsure at all Xaa locations
  Clone ID: MRT4577_3702C.1.pep
MSYRGRGGSAGNEFRMSLVLPIPTTXNXADNTXAKNLYIISVMGIKGRSIQSYFCLCLLHCYSIFYNM

SEQ ID NO: 300396 - protein, 68 aa, Zea mays
  unsure (1)..(68): unsure at all Xaa locations
  Clone ID: MRT4577_37030C.1.pep
LSNLVAYFQQQQILPFNQLGSLNSASYLQHQHLPFNQLPAIYLQXILLFTNYQSLNYTXHIPHLQLLP

SEQ ID NO: 300397 - protein, 64 aa, Zea mays
  Clone ID: MRT4577_37031C.1.pep
MVAYSMLKMHTHTTTTCGALSSCALTLAGRRRNKAHPLLWRRLARIDRACLFQLPSVSGHQKLL

SEQ ID NO: 300398 - protein, 193 aa, Zea mays
  unsure (1)..(193): unsure at all Xaa locations
  Clone ID: MRT4577_37032C.1.pep
FXRRRVVHLELEKVQQEIPQFKEDWETAEVAKSDVIEELERTNRLVDELKHKLERAQLEVDQAKQDSELALLRAQEMEQGIDDDASVIAQTQLAVAKERHEKAVEELELLKEELRSTHEQYAVLATERDAAVKRAEEVVRAAKDTEKQVEELTLELIASKESLESAHASHHEAEEHRLGAALAKEQDFLAWEK

SEQ ID NO: 300399 - protein, 96 aa, Zea mays
  Clone ID: MRT4577_37033C.1.pep
LFPRDNHGPLINTLKKPLMLAHIFDLNASCIHLFLLFSNHELFYIKNPIRFTKQRGWAEKSPRSRPNEKNLTAHCIFCFPKIKGKRNCFQRGGILG

SEQ ID NO: 300400 - protein, 57 aa, Zea mays
  Clone ID: MRT4577_37034C.1.pep
TCSRALWVLPTEFWTRAGRPGIFDCNLAGYHLFVIMGIIGAWGKIGICVSNLETKIL

SEQ ID NO: 300401 - protein, 170 aa, Zea mays
  Clone ID: MRT4577_37035C.1.pep
MGKHLPAAATAAAAAAVRSYARSLRVPSDTAASAGRAAKTPSAPLDTPRKSAAAAAAASSGRAEVRDLAAACGLEADERVPLAEVVSDCTRRWFQDALKEARAGDITMQVLVGQMYRSGYGVNKNEHKARVWMEKASRYRSTVWKVSNKRPGYNASDSDSGTDDAKETCK

SEQ ID NO: 300402 - protein, 89 aa, Zea mays
  Clone ID: MRT4577_37036C.1.pep
MGRATHPSNSWSAERSALWLELSSPPPLSGSPPAATLAARALSGGAGGASSGSTGEQLLTDYLLLKRERGVLLLQLLSSTLLLLVQAVV

SEQ ID NO: 300403 - protein, 71 aa, Zea mays
  Clone ID: MRT4577_37037C.1.pep
FWQSVVRLLLYGCLSTVGRSVDIDQYGLKICDFVPPCSCLPRIEFTPDVLSWLGPVSVRSESHALLRCSVV

SEQ ID NO: 300404 - protein, 66 aa, Zea mays
  Clone ID: MRT4577_37038C.1.pep
RHKIGNRASLHIMHLLCFRSSWTPVVAQIIIQSSARGLPQVRLDSQFLQLVESSLDFFTCLQEGKE

SEQ ID NO: 300405 - protein, 228 aa, Zea mays
  unsure (1)..(228): unsure at all Xaa locations
  Clone ID: MRT4577_37039C.1.pep
MFSKALTALALVAPLVSAQTFTSCNPLTTTCPPDPAFGKDTVHCDFTKGACPDFKEDAGTSITHNANGAVFTIGGPNQAPTIATGKYIMFGRVDIEVQASTGVGIVTSAVLQSDCLDEIDWDGLGGDNAQVQSNYFSKGDVSTYDRGAFHPVQNPXXXFHVYSIEWTPALINWXIDXXVXXTLTYEDXXKGGSAFPQTPMXIKLXTXVXGSPDAAEXTIXWXGXXTDF

SEQ ID NO: 300406 - protein, 78 aa, Zea mays
  Clone ID: MRT4577_3703C.1.pep
GFPLDHASGRCSNPSYLVVVRSKAGREYKMLVQAVGRRGAIPRPETGLRSFAVPPPPVHSHQQRLGRGSYMRRSPCLY

SEQ ID NO: 300407 - protein, 87 aa, Zea mays
  unsure (1)..(87): unsure at all Xaa locations
  Clone ID: MRT4577_37040C.1.pep
RLRPLLPADDKKKIXRPSSRAISCLAPVQLSEALEFXDKIPQLESLCPPLIAKMFQGAGEFMVGAGGMDEVAPAVTGGPGPKIEEVA

SEQ ID NO: 300408 - protein, 86 aa, Zea mays
  Clone ID: MRT4577_37041C.1.pep
LRSVSADFGMFFLLSSLVLSGSSGTTLPASAQEIKGYFDSYISLVTLQAESFEVTYATSATTSTKPLVLVERSSVEHQCPYSKTVG

SEQ ID NO: 300409 - protein, 122 aa, Zea mays
  unsure (1)..(122): unsure at all Xaa locations
  Clone ID: MRT4577_37042C.1.pep
PVPAGLALCPCYPRPTALTRSRTSAGHDASLSSTFARRDCGVNVQPYSGSPANFSGYTGLLNPHDRIMGLDLPSGGHLTHGYYTVRXKKISATSIYFESLPDKVSAESGDIDYEKLEEKALD

SEQ ID NO: 300410 - protein, 85 aa, Zea mays
  Clone ID: MRT4577_37043C.1.pep
FWAKGGKPPFPKGCLSQKGFPPKDILVKGFSGPQYPPLFSKKKIFFFLSQGFCFMFPKCGGGASGSTFFRGGAPHFKKISGPRRA

SEQ ID NO: 300411 - protein, 143 aa, Zea mays
  unsure (1)..(143): unsure at all Xaa locations
  Clone ID: MRT4577_37044C.1.pep
RGVLALGLPVPPPCSASGRXAPPGXGSXACSGAPAACPPVCSXGPCRVXPSPCXPAPPAPVXAPXAPSGRRAPPPPSPPAWRAXGXSPPPPGGWCSACAPRPRWSWRRRARRPRRRRCGRGWPPCCSRAPPLASRRSFRWVGP

SEQ ID NO: 300412 - protein, 147 aa, Zea mays
  Clone ID: MRT4577_37045C.1.pep
MGPPMAPSFGPPSWEKARAPWDFSPGGVLAPNFLKIPKKGGQGFFLFFPSGGFFFGGGALFPLFWGPRGFGFPVPGPPPKGSCPPRGPTFLTKPRGGLGPCLKLGFFGCPKKKKKKKKKKKKKKKKKKKKKKKQKKKKKKKKKTRER

SEQ ID NO: 300413 - protein, 89 aa, Zea mays
  unsure (1)..(89): unsure at all Xaa locations
  Clone ID: MRT4577_37046C.1.pep
KLWRRNEADVMPFEKHVCCWDDRQQESIDLLTKTYHRDEGHHHQYCEERGYAVXHGRADRGGTKNPACKEIDYEKDTHAXTSQCKWQRR

SEQ ID NO: 300414 - protein, 24 aa, Zea mays
  Clone ID: MRT4577_37047C.1.pep
GFGLIRRMYHEGSYFQSCSTQTII

SEQ ID NO: 300415 - protein, 53 aa, Zea mays
  Clone ID: MRT4577_37048C.1.pep
KESVSQDAVVVNHLLLGRNIGVIVQSADHIVRKWVGEHRHRIDTASVCNLSHD

SEQ ID NO: 300416 - protein, 75 aa, Zea mays
  Clone ID: MRT4577_37049C.1.pep
YDPSSNTLQKLEPKRTNTKNCAFTTASYELHEHDRSHIHTTLCDHIIARLNSYYVMKGITSGLQNRPLTIKTHQT

SEQ ID NO: 300417 - protein, 95 aa, Zea mays
  Clone ID: MRT4577_3704C.1.pep
RRHILLIAFLVSMWVATIVQCATGSDVLRWRSLYASFHIKGRVHYHEVFDHGICDVLCCLGCVQYSCMIYTEYQEGRARRQARRVCAPRPQAINR

SEQ ID NO: 300418 - protein, 75 aa, Zea mays
  Clone ID: MRT4577_37050C.1.pep
AGPETLGVPHARIKAADKEEKKVCIYRLNEGYQHAQGGRETRKGEEAGTNSKEKESIPGIPMGTIRQPRKWKAGE

SEQ ID NO: 300419 - protein, 66 aa, Zea mays
  Clone ID: MRT4577_37051C.1.pep
KHLTIHTFFLFLTTAHGTRTSTSPRCINLLLFFSSLSTISLLRHPLPFLFPQSYYQSCSNYNKTFH

SEQ ID NO: 300420 - protein, 123 aa, Zea mays
  Clone ID: MRT4577_37052C.1.pep
MAHPMPPLSASQSTITTVLKILPKPPAAPESRSNNCAFGAKFDSRRALLCGLVAAAAAAGTMLGADIAGAASKRRPPPPAPAEAKKDPNVSGVQAKVLASRKRKEAMKEAVAKLREKGKPVDK

SEQ ID NO: 300421 - protein, 54 aa, Zea mays
  Clone ID: MRT4577_37053C.1.pep
PLRGGLLSPAIFFPCNLFGWEFRPVTDVHHIMPVSWGGIKRKKQCLTLGNIFNF

SEQ ID NO: 300422 - protein, 104 aa, Zea mays
  Clone ID: MRT4577_37054C.1.pep
LGDRCKFAHGVEDLRQKPIDTRSRNSGNSHSNRSHGNYGNQNTSMIPAPHSGYNQYFSNQPYPAPTFSYPMPSIPMSQGFQTPPMMGGYFMQGPGQNYPGYQNQ

SEQ ID NO: 300423 - protein, 424 aa, Zea mays
  Clone ID: MRT4577_37055C.1.pep
VNLKEVNHMCPFNTAAFPDSLAIAKEGELSIGTIDDIQKLHIRTIPLNEQARRICHQEQSKTLAFCSFKYNQSVEESETHLIRLLDHQTFESLCVYPLDQYECGCSIISCSFVDDNNVYYCVGTAYVIPEENEPTKGRSLVFAVEDGSLQLIVEKETKGAVYSLNAFNGKLLAAINQKIQLYKWMSREDGSHELQSECGHHGHILALYTQTRGDFIVVGDLMKSISLLVYKHEESAIEERARDYNANWMTAVEMLDDEVYVGAENGYNLFTVRKNSDAATDDERAKLEVVGEYHLGEFVNRFRHGSLVMRLPDSEIGKIPTVIFGTINGVIGIIASLPHDHYTFLEKFQSTLVKYIKGVGNMSHEQWRSFHNDKKTAEARNFLDGDLIESFLDLSRSKMEVVSKAMGVSVEDLSKIVEELTRLH

SEQ ID NO: 300424 - protein, 62 aa, Zea mays
  Clone ID: MRT4577_37057C.1.pep
MDPGECTCMSGGICVRGDNCKCTTCSCKTCRKSCCPCCLPGCAKCARCCICKRGSYKCSCCA

SEQ ID NO: 300425 - protein, 93 aa, Zea mays
  unsure (1)..(93): unsure at all Xaa locations
  Clone ID: MRT4577_37058C.1.pep
WPASRRXPRPGSRPWTPAGGAPRAAPRQSSALASPRTWPGAPTTTRRARTAGAGCWACRRTRTPPASRCAPGQRRPGAADQEAGAGQRRPHPG

SEQ ID NO: 300426 - protein, 75 aa, Zea mays
  Clone ID: MRT4577_37059C.1.pep
LGALTTAGNDLTNTAPNDSHKIIYYYNTHLFSRRIISHQQRHNSLTMITLFLFQAKHDSIQSIDSKITRSLPIQL

SEQ ID NO: 300427 - protein, 59 aa, Zea mays
  Clone ID: MRT4577_3705C.1.pep
GKALPCITKMCGLNAKVFSLGIHVSIFVGNPVAQTLGGAPPFNMWSVLKIMGIGPFVPP

SEQ ID NO: 300428 - protein, 127 aa, Zea mays
  unsure (1)..(127): unsure at all Xaa locations
  Clone ID: MRT4577_37060C.1.pep
DSPLGLPPPPPPGXKGGPPPEAGANPGGXPPVLGAPDYAPGGGGIKPSRGPLAVSAPGGGRVLPPPAPVFLFFKRGPCGPVQPFCFPLMGGAAGFFFISPLSPPFSPAPXARPPWGQRPINKRTGGT

SEQ ID NO: 300429 - protein, 75 aa, Zea mays
  unsure (1)..(75): unsure at all Xaa locations
  Clone ID: MRT4577_37061C.1.pep
GSKVRIFSYSEMRKATHDFSGANKIGEGGFGSVFRGKLKDGTXVAVKVLSANSRQGXVREFVTELTAISDIVHEN

SEQ ID NO: 300430 - protein, 369 aa, Zea mays
  Clone ID: MRT4577_37062C.1.pep
MFNFQEMSCCFTCATGMERNNENEGGSKVRIFSYSEMRKATHDFSGANKIGEGGFGSVFRGKLKDGTIVAVKVLSANSRQGVREFVTELTAISDIVHENLITLVGCCAEGSQRILVYNYLENNSLSYTLLGSGRSNIRFNWRARVKIAVGVARGLAYLHDGIRPPIIHRDIKASNILLDKDLTPKISDFGLARLLPPNATHVSTRVAGTIGYLAPEYAVRGQVTKKSDIYSFGVLLLEIVAGRCNYNSRLPQGDQFLLEKTWAYYVQGKLEKVIDAEAGEDLNVEEACRFLKVGLLCAQDAMKLRPNMASVVLMLIGEKGISVDRITKPAVIGDPYLDRRPSNADSTTMKSFATTEALTSSEANTEWSL

SEQ ID NO: 300431 - protein, 506 aa, Zea mays
  unsure (1)..(506): unsure at all Xaa locations
  Clone ID: MRT4577_37063C.1.pep
EQSPPESTSNALQLATAALVKKELLGHADSNIRLAVASCISEITRITAPDAPYDDDAMKXVCPEXKISAVLYLHVFLLGXDVFSLIVEAFKHLDDIESPFFGRRTSILDTVAKVRSCVVMLDLECDDLINDMFHHFLRTVNSGHSEAVICCMETIMRLVIEESEDVQPQIASCLLQNVRKEEKESSSASFELAEKVIGTCREKLKPVFLQSLKGTSLSEYSQIVASCCEDVSDDREDNNADPSGKDTVDDGKLSERTMADELPQESSKAEQDVSRPEQDGTCMNGNTGTAISSGATLPDTSESDQGPPKEKTEQPCYADDITDTDQLKSDHNEGAEFDTAKPEKKAAVDSDKIAKLKPSDKCEAPVHSDADTKKEXTRGYRXAADDTSTPADCTPKPKRGRPPGPKSSQKKAAGKDQSSGSDLKKVNEAGDLAGKLAKRPAKDEKSTKKAGEGESSKKTQKYNSKQQKDENLSEDPAKDLSLKEMITPKSSTKVPGRTKKLRCYHC

SEQ ID NO: 300432 - protein, 121 aa, Zea mays
  Clone ID: MRT4577_37064C.1.pep
HIESVCVEFVHNRACAFSKLELVQASPGGRLESITDGFLCLLSYSSDKPALSSPHGPANTVNASHSRLSALDIDQLLVHVNDNGTDGGEIMRLAATIGVGSGSGAPIIEFIRAEVTNENPG

SEQ ID NO: 300433 - protein, 75 aa, Zea mays
  unsure (1)..(75): unsure at all Xaa locations
  Clone ID: MRT4577_37065C.1.pep
MATKILSLLALLALFASATHALIIPQCSLAPSSIITQILPPVTTMGFEHPAAQAYRLQHAYCGERLXQQPISQLP

SEQ ID NO: 300434 - protein, 147 aa, Zea mays
  Clone ID: MRT4577_37066C.1.pep
GDNDPTCTITVTTFQGGGAGGSWWWAWWLAVAQWSLRECGQVITAPHLGISRHWCAGSRRRWDRGWRANRPHLCFREAVEAPEPTVSGDSAAHQVLHSCGTRDIQADHCLDRGAARAGAARDCHRVHLDPRLRWSMDLRRVASDEDG

SEQ ID NO: 300435 - protein, 148 aa, Zea mays
  Clone ID: MRT4577_37067C.1.pep
VIIHFIITSKKYMHLISLLQVFILAIALSVTPISAYLPTRLCPSSKMGGPHVLARAAPQLAGAPRHRRPAARVPWRRLLRARLVRRNANPLLCRSCPLAPARGRVLRHLFALYDTLLLLDYDDDQSISNFKMLQLHCGGGGGGREAQR

SEQ ID NO: 300436 - protein, 100 aa, Zea mays
  Clone ID: MRT4577_37068C.1.pep
CPVSPLWLDFPGFSVLPDCLGYVPRCFLFFGTWSMFVFGVRQVFFWVCLFALFFLFFLVRFFVAFVPKGLASGPCPVPGPFRFCVCPSGENVVLLFVITP

SEQ ID NO: 300437 - protein, 84 aa, Zea mays
  unsure (1)..(84): unsure at all Xaa locations
  Clone ID: MRT4577_37069C.1.pep
LKLAGSPVKPGERSSIVPRHVQLMIRTYEQRGHLLTGVHMAXRGLVALLNXPVRLPKNPLLKESIGGSKEVNSSNKSAESPNKA

SEQ ID NO: 300438 - protein, 102 aa, Zea mays
  Clone ID: MRT4577_3706C.1.pep
PRVRLPFQNWANFGYQNPGLALAPAQNGAPKVLNNNQDLFFGTFGFGPPGMPNITPAVPANGAPAAGVNNNGPASNAFSPLPSQFGKDFDFSPLTQGFFPHP

SEQ ID NO: 300439 - protein, 63 aa, Zea mays
  Clone ID: MRT4577_37070C.1.pep
ELTSWWPPFLFFFSQQLHVILLGTTLLPLYSMVKAGTAYIGQQSRQGGDSQTRSFGQLHPRQG

SEQ ID NO: 300440 - protein, 57 aa, Zea mays
  Clone ID: MRT4577_37071C.1.pep
DQQLFPRGIIVMCREMDAAGFLRVQHQLGRDILEPIPGNSKAKLGPSVHVQVGGRNG

SEQ ID NO: 300441 - protein, 86 aa, Zea mays
  Clone ID: MRT4577_37072C.1.pep
PAHSRRPPSSFFFFFFFFFTFSNFFIWFCLIKKNPSSTLNHKTNKNQQEPRENQNLPPRAPLQIKPLLGYNYLIATNIINFLTTTS

SEQ ID NO: 300442 - protein, 49 aa, Zea mays
  Clone ID: MRT4577_37073C.1.pep
VSTSATRIPRQQRKASCCNESMAMPQVKRNNHSMPAEDEMDPRPQNVPD

SEQ ID NO: 300443 - protein, 120 aa, Zea mays
  unsure (1)..(120): unsure at all Xaa locations
  Clone ID: MRT4577_37074C.1.pep
NKVSKARGGSPRRSASRAKSYDEGKESAGHPGVLRLRGLPFSAXKDDIMEFFKDFGLPEDSIHIIMNSEGRPSGEAYAEFESAEDSKAAMIKDRMTLGSRYIELFPSSHGEMEEAISRGR

SEQ ID NO: 300444 - protein, 70 aa, Zea mays
  Clone ID: MRT4577_37075C.1.pep
MLYCKKKKKKKKKKKKKKKKKKKKKKKKKKKKKKKKKKQKKKKKKTKKNKTKQQTHQKKNYSVPRGRGFF

SEQ ID NO: 300445 - protein, 148 aa, Zea mays
  Clone ID: MRT4577_37076C.1.pep
GVARAGKKGPPPRPGQEGQGYAPAALGPQVRLSKALLFLPLPFPLGPRGGSLFLFPPPARRGCFCTCPPVKLVLLLGLSQRTVFCFVRASSKPLPFSPFFFFFPPPFLFCSWLWSSPAAGAAAFSFALFGINPSPTRANPPSLSWRGF

SEQ ID NO: 300446 - protein, 113 aa, Zea mays
  Clone ID: MRT4577_37077C.1.pep
PRAGGIHSHERVRSLPFPHHSGRIVEIYGILPRRALRPLTLAPHRPVQDASITSGGPEELAPNTDWVVSEYRLPDARNNHSDNNTARHFDSSTSMAATSNITCTSRKEDMVLS

SEQ ID NO: 300447 - protein, 86 aa, Zea mays
  Clone ID: MRT4577_37078C.1.pep
TSGEKKGNRKQKQTPPVPAGGDKMFHLITVGPNFEFSCPWMEIHSFFLGRPKFYSLGGILQGGSWKNPAGPQFKGLEGHPFFTGWV

SEQ ID NO: 300448 - protein, 326 aa, Zea mays
  Clone ID: MRT4577_37079C.1.pep
MGVDYYKVLGVGRGATDDELKKAYRRLAMKYHPDKNPTPQADTLFKQVSEAYDVLSDPQKRAIYDQYGEEGLKAGAPPPAASTHGAGAGVHRFRFNTRSAEEIFSEIFGGGFAGAGPRTPGGGVPSGFPMFGGAAGAGEASSAASQRKAPPIERPLACTLEDLYKGATKKMKISRDVLDATGRPTNREEILSIDIKPGWKKGTKITFPEKGNEARNVVPSDLVFIVEERAHPRFRRDGNDLIYTHKISLVEALTGCTVQVTTLDGRTLTVPVKSVVSPTYEEVVPGEGMPITREPSRKGSLRIKFQIKFPTSLTGDQKAAIQQLLS

SEQ ID NO: 300449 - protein, 89 aa, Zea mays
  unsure (1)..(89): unsure at all Xaa locations
  Clone ID: MRT4577_3707C.1.pep
RRRRPNSPCTESSGAAHARSESRDTQXKXXXXXKXXGRTGPRXQGTQXRGKRXXDQNRXXXRRGEGPXREGDXRTPPEXEREATRXRRS

SEQ ID NO: 300450 - protein, 118 aa, Zea mays
  Clone ID: MRT4577_37080C.1.pep
VGGLKVLNNNGDWVPAEPFEGSFLVNLGEVIQGVGNNKFKSAPPRVVRKPGPRHSLVFFFNIPGAKWIDPLPGFPAKIGERGRYKGFVFNGSMQLGMRTKPLPPGRPEEVVPITPYAF

SEQ ID NO: 300451 - protein, 214 aa, Zea mays
  unsure (1)..(214): unsure at all Xaa locations
  Clone ID: MRT4577_37081C.1.pep
SSTYSDQIDKLTLHVEIAGKLNNIIKEHHLKDVGQLEQDLVFGDAGTKELISFLRTRMRKXESEKGAKLMQLAGLSADDMIVVNNMRCLRGADSKKSSVGAFTLKFDLQKKKPGIRKERTGEESTWMLSRFYPILEDLIEKLSKGELPKDEYHCMNDPSPSFRGIPGSTSARTSPAHQPAQSMRSRRIGGTWARPRNSDDGYSSDSVLKHASSD

SEQ ID NO: 300452 - protein, 369 aa, Zea mays
  Clone ID: MRT4577_37082C.1.pep
AGRVGRRFWLEDHDPVWLELRHAHIAHVNETLHEKMTSFVSKNKAAQLQQARSGGELSTKQLQKMVQALPQYSDQIDKLTLHVEIAGKLNNIIKEHHLKDVGQLEQDLVFGDAGTKELISFLRTRMDVSRENKLRLLMIYASINPEKFFESEKGAKLMQLAGLSADDMIVVNNMRCLRGADSKKSSVGAFTLKFDLQKKKPGIRKERTGEESTWMLSRFYPILEDLIEKLSKGELPKDEYHCMNDPSPSFRGIPGSTSARTSPAHQPAQSMRSRRIGGTWARPRNSDDGYSSDSVLKHASSDFRKLGQRLFIFVIGGATRSELRVAHKLSGKLKREIILGSSSLDDPPQFITKLKMLSTEELSLDDLQI

SEQ ID NO: 300453 - protein, 491 aa, Zea mays
  Clone ID: MRT4577_37083C.1.pep
MKESDQLATSFITPFGMYCYVTMPFGLRNAGATYQRCMNHVFGEHIGRTVEAYIDDIVVKTKKASDLLSDLETTFRCLKAKGVKLNPEKCVFGVPRGMLLGFIVSERGIEANPEKIAAITNMGPIKDLKGVQRVMGCLAALSRFISRLGKRGLPLYRLLRKAECFTWTPEAEEALGNLKALLMNAPILVPPAAGEALLVYVAATTQVRPVYFISEVLSETKIRYPQIQKLLYAVILTRRKLRHYFESHPVTVVSSFPLGEIIQCREASGRIAKWAVEIMGETISFAPRKAIKSQVLADFVAEWVDTQLPAAPIQPELWTMFFDGSLMKTGAGAGLLFISPLGKHLCYVLRIHFPASNNVAEYEALVNGLRIAIELGLVIDQVMKNSHCRDPKMEAYCDEVRCLEDKFYGLELNHVARRYNETADELAKIASGRTTVPPDVFSRYLHQPSVKTDDTPEPEKASAQPEAPSAPEGEALRVKEERSGVTPNRNW

SEQ ID NO: 300454 - protein, 90 aa, Zea mays
  Clone ID: MRT4577_37084C.1.pep
LKRQRVSAPEAAFSKCNLRICCLLSICTLTHRNNCVQPRLAHHLRATYGTSAMPVSTNLTSQPEKYTNCHEFAVPIHEDTKVLSCDPGFF

SEQ ID NO: 300455 - protein, 1017 aa, Zea mays
  Clone ID: MRT4577_37085C.1.pep
MGSLQQPLRPGTVLRFGTLEFMSFDGSYDMILLPPPRDYDNGGRQPARRRRNRRRLPRVVEEQHSGSLRSLPRQRRRRRGRQGQTGGRASSAVERIDAPDAPTEGTPDVDLAFKTEASAVPPRHADPEQEDDAGALAESLQDVALEPEMTAQPVPDVTTSLLVDQKVTTNSHLASFRLGLNPPNDLVLAGALIEASATPLRFRMRSPWDRLTDVSTYGPSGSEEDDDPGIGWDFSGLGNPSAVRDFMTACDYCLSDCSDGSRSLDDESCGPSRECFHIELGDPTEGNHLGMPEDGDLPRPVPRADIPRELAVVPAPAGGYDPQLEQVREAQARLNEGTGALEPIRRDVGQAWVGQPLAGEIRQPPQGLQHRVANDVRIRPPPASSGVASVYTGRTRNTAPAAPGHLGNEHHRRDRRAHLDERVRRGYHPRRGGRYDSGEDRSPSPEPPGPQAFSRAIRRAPFPTRFRPPTTITKYSGETRPELWLADYRLACQLGGTDDDNLIIRNLPLFLSDTARAWLEHLPPGQISNWDDLVQAFAGNFQGTYVRPGNSWDLRSCRQQPGESLRDYIRRFSKQRTELPNITDSDVIGAFLAGTTCRDLVSKLGRKTPTRASELMDIATKFASGQEAVEAIFRKDKQPQGRPSEEAPEASAPRGAKKKGKKRSQSKRDAADADLVAAAEYKNPRKPPGGANLFDKMLKEPCPYHQGPVKHTLEECVMLRRHFHRAGPPAEGGRAHDDDKNEDRPAGEFPEVRDCFMIYGGHAANTSARHRKQERREVCSVKVAAPVYLDWSDKPITFDRADHPDHVPSPGKYPLVVDPVVGDVRLTKVLMDGGSCLNIIYAETLKLLRVDPSSVRAGAAPFHGIIPGKRVQPLGRLDLPVCFGTPSNFRRETLTFEVVGFRGTYHAVLGRPCYAKFMAVPNYTYLKLKMPGPNGVITVGPTYKHAFECDVECVEYAEALAESEALIADLENLSKEVPDVKRHAGNFEPAETVKAVPLDPSGDTTKQIRIGSGLDPE

SEQ ID NO: 300456 - protein, 38 aa, Zea mays
  Clone ID: MRT4577_37086C.1.pep
QAGHMALTNVGVTVWVPAISRALNAVKHGASLHRSGRP

SEQ ID NO: 300457 - protein, 854 aa, Zea mays
  Clone ID: MRT4577_37087C.1.pep
MADVPYPLPHIDQIVDSTAGCETLSFLDAYSGYHQIKMKESDQLATSFITPFGMYCYVTMPFGLRNAGATYQRCMNHVFGEHIGRTVEAYVDDIVVKTRKASDHLSDLETTFKCLKAKGVKLNPEKCVFGVPRGMLLGFIVSERGIEANPEKIAAITNMGPIKDLKGVKRVMGCLAALSRFISRLGERGLPLYRLLRKTECFTWTPEAEEALGNLKALLTNAPILVPPDTVEALLIYVAATTQVVSATIVVERREEGHALPVQRPVYFISEVLSETKIRYPQIQKLLYALLAASIQPELWTMFFDGSLMKTGAGASLLFISPLGKHLRYVLRLHFPASNNVAEYEALVNGLRIAIELGVRCLDARGDSQLVIDQIMKNSHCRDPKMEAYCDEVRRLEDKFYGLEVNHVARRYNETVDELAKIASARTTVPPNVFSRDLHQPSVKTNDTPEPEKASARPEAPSAPPEAPSATEGEALRIEEERNGVTPNRNWQTPYLQYLHRGELPLDRAEARRLARRAKSFVLLGDGKELYHRSPSGILQRCTSIAEGQELLQEIHSGACGHHAAPRALVGNAFRQGFYWPTMKAPGGYTHLLVAIDKFSKWIEVRPLNSIRSEQAVAFFTNIIHRFGVPNSIITDNGTQFTGRKFLDFCEDHHIRVDWAAVAHPMTNGQAERANGMILQGLKPRIYNDLHKFGRRWMKELPLVVWSLRTTPSRATGFTPFFLVYGAEAILPTDLEYGSPRTRAYDDRRNQTNREDSLDQLEEARDVALLHSARYQQSLRRYHARGVRSRDLQVGDLVLRLRQDARGRHKLMPSWEGPFVIAKVLKPETYKLANSQGEVYSNAWNIRQLRRFYP

SEQ ID NO: 300458 - protein, 60 aa, Zea mays
  Clone ID: MRT4577_37088C.1.pep
VYSFGTPGSATRMLFGTCTWAHVHIAPVCIATCSTCIHGSISSRYPHIDYWSVASLNRIT

SEQ ID NO: 300459 - protein, 341 aa, Zea mays
  Clone ID: MRT4577_37089C.1.pep
MAADSPPSGGGIDDVFPAWRRRGNQGQAGGRASSAVERVDVPSAPTGGASGVNLAFETKASAVSPRHAKPEQVDDASALAKSLQDVALVPEATVQSVLDVTSSPLDDQKVPTDSHPTSFGLSLNPPSDLALAGALVEASSNPLGFRMRSPWDRLTDVSTFGPSGSEEDDDPNICWDFSGFGNPSAMRDFMTACDYCLSDCSDGSRSLDDEDCGPSRECFHVELGGPSEGNHFGMPEDGDLPRPVPRADIPRELAVVLVPAGGYDPQLEQVRGAQARLDEGAGALEPIRQDVGQVWAGQPPAGEIRHLPQGLQHRVADDIRVRPPPASSGVGVRKMDPGPFG

SEQ ID NO: 300460 - protein, 236 aa, Zea mays
  unsure (1)..(236): unsure at all Xaa locations
  Clone ID: MRT4577_3708C.1.pep
HATNLRAQLAVDPTLVPTFALVEGLLRYKSKVWIFHNVPLQXKLLSACYASALGGHSRFPVTYMRMKKLFAWTDMCVAVKQFVQTCLVCQQAKPDRTRLPGLLQPLPMPSSAWQIISVDFVEGLPTSSSYKXILVVIDFFTKYGHFIPLPHPFTATSIAKLFLLHVYRLHGMPSSIVSDWDRIFPSSLWKELFRLAEVXLQMSSSYHPQSGEQKERLNQTVIPKLVNYIKGNNSLM

SEQ ID NO: 300461 - protein, 51 aa, Zea mays
  unsure (1)..(51): unsure at all Xaa locations
  Clone ID: MRT4577_37090C.1.pep
XATYHSCAMTRTTINITLGSXAGHDHMWALHRGASCDNAARHPHLEKLVRQ

SEQ ID NO: 300462 - protein, 950 aa, Zea mays
  unsure (1)..(950): unsure at all Xaa locations
  Clone ID: MRT4577_37091C.1.pep
MGSLQQPLQPETVLRFGSLEFMSLDDSYDMMLLPPPRDNGNGGRQPARRRRNRRRLPRVAEEQSSSSSRLLPRRRRGRQGNQGQAGGSASSAVERVDNVGTPTRGAPGIDFAPETKTSAVSPRHANPERADDASALAEGLLDVTLVPETTVQSVPDVTSSPLVDQEVPTDSHPTSFGFSLNPPSDLALADALVEASPNSLGFRMRSPWDRLTDVSTYGPSGSEEDDDPNICWDFSGLGNPSAMRDFMTACDYCLSDCSDGSRSLDDEDCGPSRECFHVDLGGPSEGNHLGMPEDGDLPRPVPRADIPRELAVVPVQAGGHDPQLEQIRGAQARFDEGAGALESVHRDVGQAWAGQPLAGEIRHLLQGFQHCIADDTRNLAAAAMLLRAMPEPSTTEGRRIQGELKNLLEGAVVRRAESSASRRQGYPSEPHAATSRFMREASVYTGRTRNTAPAAPGRLGNEHHYRDRRAHLDERVRRGYHPRRGGRYNSGEDRSPSPEPPGPQAFSRAIRRAPFPTRFRPPTTITKYSGETRPKLWLADYRLACQLGGTDDDNLIIRNLPLFLSDTARACCRQQPGESLRDYIRRFSKQRTELPNITDSDVIGAFLAGTTCHDLDKQPQGRPSEDAPEASTQRGAKKKGKKKSQAKRDAADADLVAAAEYKNPRKPTGGANLFDKMLKEPCPYHQGPVKHTLEECVMLRRHFHRAGPPAEGGRARDDDKKEDHQAGEFPEVRDCFMIYGGQAANASARHRKQERRXRLTKVLMDGXSSLNIIYAETLGLLRVDLSSVRAGAAPFHGIIPGKRVQPLGRLNLPVCFGTPSNFRRETLTFEVVGFRGTYHAVLGRPCYAKFMAVPNYTYLKLKMPGPNGVITVGPTYKHAFECDVECVEYAEALAESEALITDLENLSKEVPDVKRHPGNFEPVETVKTVPLDPSGDASKQVRIGSGLDPK

SEQ ID NO: 300463 - protein, 1030 aa, Zea mays
  Clone ID: MRT4577_37092C.1.pep
MGSLQQPLRPGTVLRFGSLEFMSFDGSYDMILLPPPRDNDNGGRQPARRRRNRRHLPRMVGEQHSSSPRPLPRQRRRTRGNQGQAGGRASSAVERIDVPSAPTEGTPGVDLAFETKASAVPPRHANPEQVDDASALAESLQDVAHVPETTVQPVPDVTMSLLVDQKVPTNSHLTSFRLGHNPPSDLALAGALVEASATPLGFRIRSPWDRLTDVLTYGPSGSEEDDDPSICWDFSGFGNVSAMRDFMTACDYCLSDCSDGSRSLDDEDCGPSRECFHVELGDPSEGNHLGMPEDGDLPRPVPRADIPRELAVVPVPAGGHDPQLEQVRGAQARLDEGAGALEPIRRDVGRVWAGQPPAGEMRHLPQDFQHRVANNVRVRPLPASSGVGQNLAAAAMLLRAMPEPSTTEGRRIQGELKNLLKGAAARRAESSASRRQGYPSEPHAATSRFMREASVYTGRTRNTAPAAPGHLGNEHHRRDRRAHLDERYSGETRPELWLADYRLACQLGGTNDDNLIIRNLPLFLSDTARAWLEHLPPGQISNWDDLVQAFAGNFQGTYVRPGNSWDLRSCRQQLGESLRDYIRRFSKQRTELPNITDSDVIGAFLAGTTCRDLVSKLGRKTPTRASELMDIATKFASGQEAVEAIFRKDKQPQGRPSEEAPEASTQRGAKKKGKKKSQSKRDAADADLVAAAEYKNPRKPPGGANLFDKMLKEPCPYHQGPVKHALKECVMLRRHFHRAGPPAEGGRAHDDDKKEDHQAGEYPEVRDCFMIYGGHVANASARHRKQERREVCSVKVAAPVYLDWSDKPITFDQADHPDHVPSPGKYPLVVDPIVGDVRLTKVLMDGGSCLNIIYAETLRLLRVDLSSVRAGAAPFHGIIPGKRVQPLGRLDLPVCFGTPSNFRRETLTFEVVGFRGTYHAVLGRPCYAKFMAVPNYTYLKLKMPGPNGVITVGPTYKHAFECDVECVEYAEALAESEALIADLENLSKEVPDVKRHAGNFEPAETVKAVPLDPSGDTSKQIRIGSGLDPK

SEQ ID NO: 300464 - protein, 870 aa, Zea mays
  Clone ID: MRT4577_37093C.1.pep
MVSLQQPLRPGTVLRFGSLEFMSFDGSYDMILLPPPRDNDNGGRQPARRRRNRRHLTRVVEEQHSSSPRPLPHQRRRRRGNQGQAGGRASSAVERIDVPSAPTGGASGVDLAFETKASAVPPRHTNPEQVDDASALAEGLQDVALVHKTTVQSVPDVTISLLVDQKVLTDSHPTSFRLGLNPPSDLALAGALVEASATPLGFHMRSPWDRLTDVSTYGPSSRSLDDEDCGPSRECFHVELGDPSEGNHLGMPEDGDLPRPVPRADIPRELAVVPVPAGGHDPQLEQVRGAQARLDEGAGALESIRRGVGQVWAGQPPAGEIRHLPQGFQHRVANNVRVRPPPASSGVGQNLAAAAMLLRAMPELSTTEGRRIQGELKNLLEGAVARRAESSASRRQGYPSEPHAATSRFMREASVYTGRTRNTAPAASGHLGNEHHRRDRRAHPDERVRRGYHPRRGGRYDSGEDRSPSPEPPGPQAFSRAIRRAPFPTRFRPPTTITKYSGETRPELWLADYRLACQLGGTDDDNLIIRNLPLFLSDTARAWLEHLPPGQISNWDDLVQAFAGNFQGMYRTELPNITDSDVIGAFLAGTTCRDLVSKLGRKTPTRASELMDIATKFASGQEAVEAIFRKDKQPQGRPSEEAPKASTPRDAKKKGKKKSQAKRDAADADLVAAAEYKNPRKPPGGANLFDKMLKEPCPYHQGPVKHTLEECVMLRHHFHRAGPPAEGGRARDDDKKENHQAGEFPEVRDCFMVYGGHAANASARHRKQERREVCSVKVAAPVYLDWSDKPITFDQADHPDHAPSPGKYPLVVDPIVGDVRLTKVLMDGGSCLNIIYAETLRLLRVDLSSVRAGAAPFHGIIPGKRVQPLG

SEQ ID NO: 300465 - protein, 900 aa, Zea mays
  unsure (1)..(900): unsure at all Xaa locations
  Clone ID: MRT4577_37094C.1.pep
GGRQPTRRRRNRRRLPRVVEEQPSSSSRPLPRRRRGRRGNQGQAGGSASSAVEQVDSASTPTAGAXRSVPDMTLSPLIDQEVPTDPHPTSFGFSLNPPSDFALAGALVEASPNPLGFRMRSPWDRLTDVSTYGPSGSEEDDEPSICWDFSGLGNPSAMRDFMTACDYCLSDCSDGSRSLGDKDCGPSRECFHVDLGGPSEGNHLGMPEDGDLPRPVPRVDIPRELAVVPVQAGDHDPQLEQIRGVQARLDEGAGALEPIRRDVGQAWAGQPPAGEIRHLPQGFQHRIADDVRVRPPPASSGVGRNLATAAMLLRAMPEPSTTXGRRIQGELKNLLEGAAVRRAESSASRRQGXFSRAIRRAPFLTRFRPPTTITKYSGXEMRPELWLTDYRLACQLGGTDDDNLIIRNLPLFLSDTARAWLEHLPPGQISNWDDLVQAFAGNFQGTYVRPGNSWDLRSCRQQPGESLRDYIRRFSKQRTELPNITDSDVIGAFLAGTTCRNLVSKLGRKTPTRASELMDIATKFASGQEAVEAIFRKDKQPQGRPSEDAPEASTQRGVKKKGKKKSQAKRDAADADLVAVAEYKNPRKPPGGANLFDKMLKEPCPYHQGPVKHTLEEAPRRHKKEDHQAGEFPEVRDCFMIYGGQAANASARHRKQERREVCTVKVATPVYLDWSDKPITFNRADHPDHVSSPGKYPLVVDPIIGDVRLTKVLMDGGSSLNIIYAETLGLLRVDLSSVRAGAAPFHGIIPGKRVQPLGQLDLPVCFGTPSNFRRETLTFEVVRFRGTYHAVLGRPCYAKFMSVPNYTYLKVKMPVPNGVIAVGPTYKHAFECDVECVEYAEALAESEALIADLESLSKEVPDVKRHAGNFEPAETVKSVPLDPSDDASKQIRIGSGLDPK

SEQ ID NO: 300466 - protein, 71 aa, Zea mays
  Clone ID: MRT4577_37095C.1.pep
PAPLGGFWKLLFHFNLSGPGCLLLKWNFPTASKTVWVGPLISPPPKKSLCPWGPVSKFFGRPAPKLLFFVP

SEQ ID NO: 300467 - protein, 1026 aa, Zea mays
  Clone ID: MRT4577_37096C.1.pep
MGSLQQPFQPGTVLRFGSLEFMSLDGSYDMILLPLPCDSDNGGRQPARRRRNRRRLPRVVEEQHSSSPRPLPRRRRRRRGNQGQAGGGTSSAVERVDGAGAPTGGTSGIDLAFETKTSAVSPQHANSKQTDDASTLAKGLLGVTLIPETTVQSVPDVTSSPPVDQEVPTDSHLTPFGFSLDPPSDFALADALVEASPNPLGFRMRSPWDRLMDVSTYGPSGSEEDDVSDFCWDFSGLDNPSAMRDFMTACDYYLYDCSDGSRSLDDEDCGPSRECFHVDLGGPSEGNHLGMPENGDLPRPVPRVDILRELAVVPVQAGGHDPQLEQIRGVQARLDEGAGTLEPIRRDIGQEWAGQPPAGEVRHLPQGIQHRITDDVRVRPPPASSGVGQNLAAAAMLLRAMPEPSTTEGRRIQGELKNLLEGAAEASVHTGRTRDTAPAAPGRLGNEHHHRNRRAHLDERVRRGYHPRRGGHYDSGEDRSPSPEPPGPQAFSRAIRRAPFPTQFRTPTTITKYSGETRPELWLADYRLACQLGGTDDDNLIIRNLPLFLSDAARAWLEHLPPGQISNWDDLVQAFAGNFQGTYQRTELPNITDSDVIGAFLAGTTCCDLVSKLGRKTPTRASELMDIATKFAFGQEAVEAIFRKDKKPQGRPPEDAPEASTQRGAKKKGKKKSQAKHDVADADLVAAAEHKNPQKPPGGAILFDKMLKESCPYHQGPVKHTLEECAMLRRHFHRAGPPAEGGRARDDDKKEDHQAGEFPEVRDCFMIYGGQAANASARHRKQERWEVCLVKVATPVYLDWSDKPITFDQADHPDRVPSPGKYPLVVDPIIGDVRLTKVLMDGGSSLNIIYAETVGLLRVDLSSIRAGAAPFHGIIPGKRVQPLGQLDLPVCFGTPSNFRRETLTFEVVEFRGTYHAVLGRPCYAKFMTVPNYTYLKLKMSGPNGVITVSPTYRHAFECDVECVEYAEALTEYEALIADLESLSKEVPDVKRHAGNFEPAETVKYVPLDPSSDASKQIRIGSELDPK

SEQ ID NO: 300468 - protein, 1689 aa, Zea mays
  unsure (1)..(1689): unsure at all Xaa locations
  Clone ID: MRT4577_37097C.1.pep
MGSLQQPLRPGTVLRFGSLEFMSFDGSYDMILLPPPRDNDNGGRHPARRRRNRRHLPHAVEEQHSSSPRPLPRQRRRKRGNQGQAGGRASSAVERINIPSAPTEGTPGVDLAFETEASAVPPRHADPEQEDDASALAESLQDVALVPETTVQPVPDVTTSLLVDQKVLTNSHLTSFRLGLNPPSNLALAGALIEASATPLGFRMRSPWDRLADVSTYGPSGSEEDDDSGICWDFSGFGNPSAMRDFMTACDYCLSDCSDGSRSLDNEDCGPSCECFHVELGDPSEGNHLGMPEDGDLPRPVPRADIPRELAVVPVPAGGHDPQLEQVRGAQARLDEGAGVLEPIRRDVGQVWAGQPPAGEIQHLPQGLQHRVANDVRVRPPPASSGVASVYTGRTRNTAPAAPGHLGNEHHRRDRRAHLDDRVRRGYHPRRGGRYDSGEDRSPSPEPPGPQAFSRAIRRAPFPTWFRPPTTITKYSGETRPELWLADYRLACQLGGTDDDNLIIRNLPLFLSDTARAWLEHLPPGQISNWDDLVQAFAGNFQGTYVRPGNSWDLRSCRQLPGESLRDYIRRFSKQRTELPNITDSDVIGAFLAGTTCRDLVSKLGRKTPTRASELMDIATKFASGQEAVEAIFRKDKQPHGRPSEEAPEASTPRGAKKKGKKKSQSKRDAADADLVATAEYKNPRKPPGGANLFDKMLKEPCPYHQGPVKHTLEECVMLRRHFHRAGPPAEGGRAHDDDKKEDHRAGEYLEVRDCFMIYGGHAANASARHSKQERREVCSVKVAAPVYLDWTDKPITFDQADHPDHVPSPGKYPLVVDPIIGDVRLTKVLMDGGSCLNIIYAETLRLLRVDLSFVRAGAAPFHGIIPGKRVQPLGRLDLPVCFGTPSNFRRETLTFEVVGFRGTYHAVLGRPCYAKFMAVPNYTYLKLKMSGPNGVITVGPTYKHAFECDVECVEYAEALAESEALIADLESLSKEVPDIKCHAGNFEPTETVKSVPLDPSGDASKQIRIGSELGYHQIRMKESDQLATSFITPFGMYCYVTMSFGLRNAGATYQRCMNHVFDQHIGRTIEAYVDDIVVKTRKASDLLSDLEVTFRCLKAKGVKLNPEKCVFGVPRDMLLGFIVSERGIEANPEKIAAITSMGPIKDLKGVQRVMGCLAALSRFISRLGERGLPLYRLLRKAECFTWTPEAEEALENLKALLTKAPILRPVYFVSEVLSETKIRYPHVQKLMYAVILTRRKLRHYFESHPLPTAPIQPELWTMFFDGSLMKTGAGAGLLSISPLGKHLRYVLRLHFPASNNVAEYEALVNGLRIAIELGVRRLDARGDSQLVIDQVMKNSHCRDPKMEAYCDEVRRLEDKFYGLELNHIARRYNETEDELTKIASGRTTVPPDVFSRDLHQPSVKIDDTPEPEAPSVQPEVPSAQSEAPSARPEAPSVQPEVPSAPEGETLHVEGKQSGVAPDQNWQAPYLQYLHQGELPVDRAEARWLARRAKSFVLLRDGKELYHRSPSGILQRCISITEVQELLREIHSGACGHHAAPRALVGNAFRQGFYWPTAVADATRIVRTCEGCQFYARQTHLPAQALQTIPITWPFAVWGLDLVGPLQKAPRGYTHLLVAIDKFSKWIEVRPLNSIRSEQAVAFFTNIIHRFGVPNSIITDNDTQFTGRXSWTSARITTSGWTGPPWLIP

SEQ ID NO: 300469 - protein, 39 aa, Zea mays
  Clone ID: MRT4577_37098C.1.pep
VDMQSDALRHADDHHPWDQKPFMVFLLHNNLMSNVFQNS

SEQ ID NO: 300470 - protein, 48 aa, Zea mays
  Clone ID: MRT4577_37099C.1.pep
GSIYYSAAFLLKRMMPEELEIYQRMFESLFSKAQQVKVFSPISKSSTG

SEQ ID NO: 300471 - protein, 75 aa, Zea mays
  Clone ID: MRT4577_3709C.1.pep
CAWCVLPASAFGRACGPLVLRGWVCPSCSPVFCAVPFSSVGVLPRFPFKFLPGSFSVRCAASGRVGRPGGSGPVP

SEQ ID NO: 300472 - protein, 121 aa, Zea mays
  Clone ID: MRT4577_370C.1.pep
APELYLKRLIVGGFERVFEINRNFRNEGVSPRHNPEFTMMEFYAAYTDYRWLMDFTEQLIRQAAIDALGTATIQYQGRELDLAKPFHRLTITQAIQKYAPQYTDGQLSDDAFLRTELKRFG

SEQ ID NO: 300473 - protein, 69 aa, Zea mays
  Clone ID: MRT4577_37100C.1.pep
HAIACGSLLTIKQVSSYYLLKKKKKKKKKKKKKKKKKKKKKIKKKKKKKTKKKKKKKKKKGLPLARAAP

SEQ ID NO: 300474 - protein, 124 aa, Zea mays
  Clone ID: MRT4577_37101C.1.pep
GAAKILNLIAAVNHLNWGATNILQGGPPPLVTLNLGAAQTNYRAQNPILGENYKTGAIWHLPPYPTNNLHDYWPLATFFTKKNNPLASFPGGAGATSPAKNPGVVSKGDWICSTGQYRTGPTYI

SEQ ID NO: 300475 - protein, 51 aa, Zea mays
  Clone ID: MRT4577_37102C.1.pep
IRILSNLESGDNIMCPHPSNNAKNIFKPRIAGNFCAKYFPQNKCTNMKKVC

SEQ ID NO: 300476 - protein, 72 aa, Zea mays
  Clone ID: MRT4577_37103C.1.pep
PTPGLMRAPTRDEMLIRAHINSSTASLHVRRTLDQFFYPNIDTETRDSDQVVYRYQTRWTEHKAKDPKIFMV

SEQ ID NO: 300477 - protein, 202 aa, Zea mays
  Clone ID: MRT4577_37104C.1.pep
METSKEQASKDYAGFEKKVKRTIYIDHLSPQVKESAIKAALAQCANVVHVEFIVNYTIPYKDIASAALVELDDDVQAKAAVELMNDFPFIIGGMPRPVKAIHAKAEMFRDRPPCPGLRKDFCWVKQGDKDYEAMQKLKNLAKRQESENMALIQKILKDEKELATRQQEVLDGNCKKYDMLEALVQKGDITNLAQQYGVNLND

SEQ ID NO: 300478 - protein, 65 aa, Zea mays
  unsure (1)..(65): unsure at all Xaa locations
  Clone ID: MRT4577_37105C.1.pep
QQVPVAHXMTQNIKGQQLQQLELTNLAGYSQQQXQWLPFNQLSTLNSACYLQQQRLPLQSATCCL

SEQ ID NO: 300479 - protein, 169 aa, Zea mays
  unsure (1)..(169): unsure at all Xaa locations
  Clone ID: MRT4577_37106C.1.pep
GTTRLENRKVSTVTLDNCTTNDSIMSSMQDKLPLLSLMLDGKLLHMRCVAHIINLIVKDGMTVMDKGIKKVRNSVAFWCATPKRHERSHNXAQMNVKYDKRIALDCKTRWNSTYLIVELGRNLINYVIQLLKIVLCYIRWISNGYPKPDGHGYGYEFLTAGIVAGRYYL

SEQ ID NO: 300480 - protein, 198 aa, Zea mays
  unsure (1)..(198): unsure at all Xaa locations
  Clone ID: MRT4577_37107C.1.pep
METSKEQASKDYAGFEKKVKRTIYIDHLSPQVKESAIKAALAQCANVVHVEFIVNYTIPYKDIASAALVELDDDVQAKAAVELMNDFPFIIGGMPRPVKAIHAKAEMFRDRPPCPGLRKDFCWVKQGDKDYEAMQKLKNLAKRQESENMALIQKILKDEXKELATRQQEVLDGNXQKYDMLEALVQKGDITNLLHNTE

SEQ ID NO: 300481 - protein, 202 aa, Zea mays
  Clone ID: MRT4577_37108C.1.pep
METSKEQASKDYAGFEKKVKRTIYIDHLSPQVKESAIKAALAQCANVVHVEFIVNYTIPYKDIASAALVELDDDVQAKAAVELMNDFPFIIGGMPRPVKAIHAKAEMFRDRPPCPGLRKGFCWVKQGDKDYEAMQKLKNLAKRQESENMALIQKILKDEKELATRQQEVLDGNCKKYDMLEALVQKGDITNLAQQYGVNLND

SEQ ID NO: 300482 - protein, 127 aa, Zea mays
  Clone ID: MRT4577_37109C.1.pep
SMGVISGFPGAELGKRKLKRPRKRGMDPFCGNIKKATQAKGGDLLTSGCGICQREGFKKKGDLNVGKAPGKRPLGPKVWCKAEKKTPLGQLFSWNACSLPNNKLGKARTKKKKKKKKKKKKKKKPPP

SEQ ID NO: 300483 - protein, 219 aa, Zea mays
  unsure (1)..(219): unsure at all Xaa locations
  Clone ID: MRT4577_3710C.1.pep
MDAQRALLDALMGSSRDLTEEEKKEHREVAWDDPDVCAPYMARFCPHDLFINTKSNLGVCPKIHDPALKQSFESSPRYAAVLPKFEADLAHRCERLVQDLDKKIRRGRDRLAQDVVEVPPPAAHAEKVEQLAILEDKIKKLLEQIEQLGDTGKIDEATALMRKVDILNLEKSALTHQIETKLSMVPQXEKKMELCEQCGSFLVTNDVLEXRTQSHVTGN

SEQ ID NO: 300484 - protein, 61 aa, Zea mays
  unsure (1)..(61): unsure at all Xaa locations
  Clone ID: MRT4577_37110C.1.pep
RTPLIGESXVYVLPGYRVPGEFNFPGGPNEAPLSPGGPLAESKNLVPRAEFPKLTYACXRR

SEQ ID NO: 300485 - protein, 61 aa, Zea mays
  unsure (1)..(61): unsure at all Xaa locations
  Clone ID: MRT4577_37111C.1.pep
EPRAGEKGVRKREAELEGGRGRGGKESIGCGSCCGHSGSGGEGPEEAHHPALSAARXLXSA

SEQ ID NO: 300486 - protein, 38 aa, Zea mays
  Clone ID: MRT4577_37112C.1.pep
RPGQKPMAHPIDLAHPAAPLQRVNDLPSSEVDTKPPAW

SEQ ID NO: 300487 - protein, 399 aa, Zea mays
  Clone ID: MRT4577_37113C.1.pep
FGTRQDYVDRFSELVDLLVTYEHTTDPLYYTMRFIDGLRDDIKSVILVQRPSTLDTACALALLQEEAEASRPREVRRGDAHLSYKTPTKTSSYQDWDKHSPQASDRPTSMVSDPSSSDSKVASLRAYRRARGLCQYCADKWVKGHKCSPTIQLHVMQELWDLLTPESQEPEAEFQDTSEQFMILLSTEAVSSKSSRSTFRLSGSLFGQELSMLLDSGSSHCFLNTSLASSLTGVNQLAQPLSVTVANGNKLQCTAELTNAEWTCQGLSFTSSFKLLPIPCYDAIIGMDWLESCSPMYVDWKHKWISLSHLGKSALLQGVQPTTPSASLLELRHTAPDQSEIFQLQIAHDSSVPEAIQHLLHEFDFLFAEPKSLPPSRFCDHHIPLLAGARPVNFRPYRF

SEQ ID NO: 300488 - protein, 92 aa, Zea mays
  unsure (1)..(92): unsure at all Xaa locations
  Clone ID: MRT4577_37114C.1.pep
SPRGKPGPKPLWPRAQGPPXLRKKKRGPKGPXTPPLKPRKGPWGGPPPGXNPFLTXPLNGGPSPGGPRGFQTRNPGGGRNFSPPPGAPVQSF

SEQ ID NO: 300489 - protein, 59 aa, Zea mays
  Clone ID: MRT4577_37115C.1.pep
QRGGSSRRSSRGGVNRSILITTAALLLILQQYTIRPFYKHVWRLSGIYIASGEKNFSYI

SEQ ID NO: 300490 - protein, 145 aa, Zea mays
  unsure (1)..(145): unsure at all Xaa locations
  Clone ID: MRT4577_37116C.1.pep
IPPTHHHAVEPXNSVLSTHSLLDHTDVDIXLLNNEVIYDKCRRTLVIERATXTNLNRLGSXAMSSLTGSLTLDGALXVDENETHTRLIPYPKMHFMLSSYASXMXSLEKAYQELDVCRTITPTDGFEPSSMKAKRDPRHGKYARS

SEQ ID NO: 300491 - protein, 128 aa, Zea mays
  unsure (1)..(128): unsure at all Xaa locations
  Clone ID: MRT4577_37117C.1.pep
MRIENTHINLXNIAHAYSAERTTTGHLTYKIGRIDERWSERIKKYCAKTYKRSXKYRRVLGNLRISHRQXITIDTALCKCEITKXYCTVIDAPXHRCTSSYRCTTASXKRDCXILTSDSTTGHVETHI

SEQ ID NO: 300492 - protein, 1950 aa, Zea mays
  unsure (1)..(1950): unsure at all Xaa locations
  Clone ID: MRT4577_37118C.1.pep
MGNSAPPDPRARTRAKTRKTTNSAPPDPRARTRAKTRKTTNSAPPDPRAQTRAKTRKTTNSAPPDPRARTRAKTRKTTNSAPPDPRARTRAKTRKTTNSAPPDPRARTRAKTRKTTKLRLARPQGSDSALASAERSPPRPTRGLGLGLGNGRQTRPRLRRSPHIALPRAQARHVNRKRHHHPTPSRLGSRRTRPASHLASSTGWAMMALHKLCDDGGSQLSYGSRATRRRGHQGQAGGRASSAVERIDAPDAPTEGTPGVDLAIETKASAVPPRHADPEQEDDASALAESLQDVALVPGTTVQPVPDVTTSLLVDQKVPTNSHITSFRLGLNPPSDLALAGALIEASATPLGFRMRSPWDRLTDVSTYGPSGSEEDDDPSICWDFSGLGNPSAMRDFMTACDYCLSDCSDGSRSLDDEGCGPSRECFHIELGDPSEGNHLGMPEDGDLPRPVPRADIPRELAVVPAPVGGYDPQLEQVREAQARLNEGTGALEPIRRDVGQVWAGQPPAGEIRHLPQGLQHRVANDVRVRPPPASSGVGQNLAAAAMLLRAMPEPSTTEGRRIQGEIKNLLEGAAARRAESTASRRQGYPSEPHAATSRFMREASVYTGRTRNTAPAAPGHLGNEHHRRDRRAHLDERVRRGYHPRRGGRYDSGEDWSPSPEPPGPQAFSRAIRRAPFPTRFRPPTTIAKYSGETRPELWLADYRLACQLGGTDDDNLIIRNLPLFLSDTARAWLEHLPPGQISNWDDLVQAFAGNFQGTYVRPGNSWDLRSCRQQPGESLRDYIRRFSKQRTELPNITDSDVIGAFLAGTTFRDLVSKLGRKTPTRASELMDIATKFASGQEAAPEASTPRSAKKKGKKKSQSKRDAADADLVAAAEYKNPRKPPRGANLFDKMLKESCPYHQGPVKHTLEECVMLRRHFHRAGPPAEGGRARDDDKNEDHLAGEFPEVRGCFMIYGGHAANTSARHRKQERREVCSVKVAAPVYLDWSDKPITFDQADHPDHVPSPGKYPLVVDPVVGDVRLTKVLMDGGSCLNIIYAETLKLLRVDLETLTFEVVGFRGTYHAVLGRPCYAKFMAVPNYTYLKLKMPGPNGVITVGPTYKHAFECDVECVEYAKALAESEALIADLENLSKEVPDVKRHAGNFEPAETVKAVPLDPSGDTTKQVPYPLPRIDQIVDSTAGCETLSFLDAYSGYHQIRMKESDQLATSFITPFGMYCYVTMSFGLRNAGATYQRCMNHVFGEHIGRTVEAYVDDIVVKTRKASDLLSDLEVTFRCLKAKGVKLNPEKCVFGVPRGMLLGFIVSERGIEANPEKIAAITSMGPIKDLKGVQRVMGCLAALSRFISCLGERGLPLYRLLRKAECFTWTPEAEEALGNLKALLTKAPVLVPPADVEALLVYVAATTQVVSAAIVVERQEEGHALPVQRPVYFISEVLSETKIRYPQVQKLLYAVILTRRKLRHYFESHPVTVVSSFPLGEIIQCREASGRIAKWAVEIMGETISFAPRKAIKSQVLADFVAEWVDTQLPTTPIQPELWTMFFDGSLMKTGAGAGLLFISPLGKHLRYVLRLHFPASNNVAEYEALVNGLRIAIELGVRRLDARGDSQLVIDQVMKNSHCRDPKMEAYCDEVRRLEDKFFGLELNHIARRYNETADELAKIASGRTTVPPEVFSRDLHQPSVKLDDAPEPEVPSAQPEVPSAPEGGALNVEEGQSGATPDQDWRAPYLQYLRRGELPLDQVEARRVARRAKSFVLLGDEEELYHRSPSGILQRCISIAEGRELLQEIHSGACGHHAAPRALVGNAFRQGFYWPTAVVDATRIVRTCEGCQFYAKRTHLPAQALQTIPITWPFAVWGLDLVGPLQKAPGGYTHLLVAIDKFSKWIEVRPLNSIRSEQAVAFFTNIIHRFGVPNSIITDNGTQFTGXKNSWIFVRITISGWTGPPWLIPCRMGK

SEQ ID NO: 300493 - protein, 893 aa, Zea mays
  Clone ID: MRT4577_37119C.1.pep
MGSLQQPLQPGTVLRFGSLEFMSLDGSYDMILLPPPRDNDNGGRQPARRRWNRRRLPRVVEEQPSSSSCPFPRRRRGRQGDQGQAGGSASLAVERADSTGTPTRGTPGIDFAHETKTSVVSLRHASPEQADDASALAESLLDVTLVPETTVQSVPGVTLSPLVDQEVPTDSHPTSFGFSLNPPSDLALAGALVEASPNPLGFRMRSPWDRLTDVSTYGPSGSEEDDDPSIYWDFSGLGNPSAMRDFVTACDYCLSDRSDGSRNLDDEDCGPSRKCFHVDLGGPSEGNHLGMPEDGDLPRPVPRIDIPRELAVVPVQAGGHDPQLEQIRGVQARLDEGAGALEPIRRDVGQAWAGLPPAGEIRHLPQGFQNCVADDVRFRPPPASSGVGQNLAAAAMLLRAMPEPSTTEGRRIQGELKNLLEGAAVWRAESSASRRQGYPSEPHAATSRFMREASVYTGRTRNTAPVAPGRLGNEHHHRDRRAHLDERGTYVRPGNSWDLRSCRQQPGESLRDYIRRFSKQRTELPNITDSDVISAFLAGTTCRDLVSKLGRKTPTRASELMDIATKFASGQEAVEAIFQKDKQPQGRPSEDAPEASTQRGAKKKGKKKSQVKRDAADADLVATAEYKNPRKPPGGANLFDKMLKSGPPAEGGRACDDDKKEDHQAGEFPKVRDCFMIYGGQAANASARHRKQERREVCSVKVAAPVYLDWSDKPITFDQADHPDHVPSPGKYPLVVDPVIGDVRLTKVLMDGGSSLNIIYAETLGLLETLMFEVVGFRGTYHAVLGRTCYAKFMVVPNYTYLKLKMSGPNGVITVGPTYKHAFECDVECVEYAEAFAESEALIADLESLSKEVPDVKRHAGNFEPVETVKAVPLDPSGDTSKQIRIGSGLDPK

SEQ ID NO: 300494 - protein, 60 aa, Zea mays
  Clone ID: MRT4577_3711C.1.pep
MHHRSPEAASASVSPTARAVEAMAPVVVGVEPAVTLDQVPGSSDPDQLILLMYPTDGGYA

SEQ ID NO: 300495 - protein, 40 aa, Zea mays
  unsure (1)..(40): unsure at all Xaa locations
  Clone ID: MRT4577_37120C.1.pep
FLEILLKTAKFLQASXTCETNFEDKSFHLLSICIFIDYDV

SEQ ID NO: 300496 - protein, 820 aa, Zea mays
  Clone ID: MRT4577_37121C.1.pep
MGCLAALSRFISRLGERGLPLYRLLRKAECFTWTPEAEEALRNLKVLLTNAPILVPPSAGEALLIYVAATTQVVSAAIVVERQEEGHALPVQRPVYFISEVLSETKIRYPQVQKLLYAVILTRRKLRHYFESHPATVVSSFPLGEIIQCREASGRIAKWAVEIMGETISFAPRKAIKSQVLADFMAEWVDTQLPTAPIQPELWTMFFDGSLMKTGAGADLLFISPLGKHLRYVLRLHFPASNNVAEYEALVNGLRIAIELGVRRLDTRGDSQLVIDQVMKNSHCRDPKMEAYCDEVRRLEDKVYGLELNHIARRYNETTDELAKIASERTTVPPDVFSRDLHQPSIKIDDTAEPQAPSTQPEVPSAQSEASSARPEAPSARPEAPSTPEGEALRVEEERSGVTPNQDWQTPYLKYLHRGELPLDRAEARRLARRAKSFVLLGDEKELYHRSPSGILQRCISVTEGQELLREIHSGACGHHTVSRALVGNAFRQGFYWPTAVADATRIVRTCEGCQFYAKQTHLPTQALQTIPITWPFAVWGLDLVGPLQKAPGGYTHLPVAIDKFSKWIEVRPLNSIRSEQAVAFFTNIIHRFRVPNSIITDNGTQFTGRKFLDFCEDHHIRVDWAAVAHPMSNGQVEHANDMILQGLKPRIYNDLNKFGKRWMKELPSVVWSLRTTPSRATGFTPFFLVYEAVAVLPTDLEYGSPRTRVYSDQSNQASREDSLDQLEEARDKALLHSARYQRSLRRYHARGVRSRDLQVGDLALRLRQDARGRHKLTPPWEGPFVVAKVLKPGTYKLANSQGEVYGNAWNIKQLRRFYP

SEQ ID NO: 300497 - protein, 978 aa, Zea mays
  Clone ID: MRT4577_37122C.1.pep
MGSLQQPLRPGTVLRFGTLEFMSFDGSYDMILLPPPRDNDNGGRQPARRRRNRRHLPRVVEEQHSSSLRSLPRQRRRRRGHQGQAGGHASLAVERIDAPDAPTEGTPDVDLAFKTKASAVPPRHADPEQEDDAGALAESLQDVALVPEMTVQPVPDVTTSLLVDQKVPTNSHLASFRLGLNPPNDLVLAGALIEAGATPLGFRMRSPWNRLTDVSTYGPSGSEEDDDPSICWDFSGLGNPSAVRDFMTACDYCLSDCSDGSRSLGNESCGPSRECFHIELGDPSEGNHLGMPEDGDLPRPGPRVDIPRELAVVPAPAGGYDPQLEQVREAQARLNEGTGALEPIRRDVGQVWAGQPLAGEIRHLPQGLQRRVANDARVRPPPTSSGVGQNLAAAAMLLRAMPEPSTTEGRRIQGELKNLLEGAAARRAESTASRRQGYPSEPHAATSRFMREASVYTGRTRNTAPAAPGHLGNEHHRRDRWAHLDERISNWDDLVQAFAGNFQGTYVRPGNSWDLRSCRQQPGESLRDYIRRFSKQRTELPNITDSDVIGAFLAGTTCRDLVSKLGRKTPTRASELMDIATKFASGQEAVEAIFRKDKQPQGRPSEEAPEASAPRGAKKKGKRKSQSKRDAADADLVAAAEHKNPRKPPGGANLFDKMLKESCPYHQGPVKHTLKECVMLWRHFHRAGPPAEGGRARDDDKNEDHQAGEFPEVRDCFMIYGGHAANASARHRKQERREVCSVKVAAPVYLDWSDKPITFDQADHPDHVPSPGKYPLVVDPVVGNVRLTKVLMDGGSCLNIIYAETLKLLRVDLSSVRAGAAPFHGIIPGKRVQPLGRLDLPVCFGTPSNFRRETLTFEVVGFRGTYHAVLGRPCYAKFMVVPNYTYLKLKMSGPNGVITVGPTYKHAFECDVECVEYTEALAESEALIADLENLSKEVPDVKRHAGNFEPAETVKAVPLDPSGDTTKQIRIGSGLDPK

SEQ ID NO: 300498 - protein, 922 aa, Zea mays
  Clone ID: MRT4577_37123C.1.pep
MVPDKKVPTDSHLTSFGFSLNPPSNLALADAFVEASPNPLGFRLRSPWDRLTDVSTYGPSRSEEDDDPNICWDFSGFGNPSAMRDFMTACDYCLSDCSDGSRSLDDEDCGPGCECFHVDLGGPSEGNHLGMPEDGDLPRPMPRADIPRELAVVPVPAGGHDPQLEQVRGAQARLDEGAGALEPIRRDVGQAWAGQPPAREIRHLPQGLQHRVADDVRVRPPPTSSGVGQNLAAAAMLLRAMPEPSTTEGRRIQGELKNLLEGAAVRRAESSASRRQGYPSEPHAATSRFMREASVYTGRTRNTAPVAPGHLGNEHHHRDRRARLDERVRRGYHPRRGGRYDSGEDRSPSPEPPGPQAFSRAIRRAPFPTRFRPPTTITKYSGETRPELWLADYRLACQLGGTDDDNLIIRNLPLFLSDTARAWLEHLPPGQISNWDDLVQAFAGNFQGTYVRPGNSWDLRSCRQQPGESLRDYIRRFSKQRTELPNITDSDVIGAFLAGTTCRDLVSKLGRKTPTRASELMDIATKFASGQEAVEAIFRKDKQPQGRPPEDAPEASTQRGAKKKGKKKSQAKRDAADADLVAAAEYKNPRKPPRGANLFDKMLKESCPYHQGPVKHTLEECVMLRRHFHRAGPPAEGGRARDDDKKEDHQAGEFPEVCDCFMIYGGQAANASARHRKQERREVCSIKVAVPVYLDWSNKPITFNQDDHPDHVPSPGKYPLVVDPVVGDVRLTKVLMDGGSSLNIIYAETLRLLRVDLSSVRAGAAPFHGIIPGKRVQPLGRLDLPVCFGMPSNFRRETLTFEVVGFRGTYHVVLGRPCYAKFMAVPNYTYLKLKMSGPNGVITVGPTYKHAFECDVECVEYAEALAESEALIADLESLSKEVSDVKRHAGNIEPVETVKAVPLEPSGDASKQIRISSGLDPK

SEQ ID NO: 300499 - protein, 911 aa, Zea mays
  Clone ID: MRT4577_37124C.1.pep
MPFGLRNAGATYQRCMNHVFGEHIGRTVEAYVDDIVVKTRKASDLLSDLEVTFRCLKAKGVKLNPEKCVFGVPRGMLLGFIVSERGIEANPEKIAAITSMGPIKDLKGVQRVMGCLAALSRFISRLGERGLPLYRLLRKAECFAWTPEAEEALGNLKALLTKAPVLVPPADGEALLVYVAATTQVVSAAIVVERQEEGHALPVQRPVYFVSEVLFETKIRYPQVQKLLYAVILTRRKLRHYFESHPVTVVSSFPLGEIIQCREASGRIARWAVEIMGETISFAPRKAIKSQVLADFVAEWVDTQLPTAPIRPELWTMFFDGSLMKTGAGAGLLFISPLGKHLRYVLRLHFPASNNVVEYEALVNGLRIAIELGVRRLDARGDSQLVIDQVMKNSHCRDPKMEAYCDEVRRLEDKFFGLELNHVARRYNETADELAKIASGRTTVPPDVFSRDLHQPSVKLDDAPEPEVPSAQPEVPSAPEGETLDVEEEQSEATPDRDWQAPYLQYLRRGELPLDQVEARRVARRAKSFVLLGDEEELYHRSPSGILQRCISIAEGRELLQEIHSGACGHHAAPRALVGNAFRQGFYWPTAVADATRIVRTCEGCQFYAKQTHLPAQALQTIPITWPFAVWGLDLVGPLQKAPGGYTHLLVAIDKFSKWIEVRPLNNIRSEQAVAFFTNIIHRFGVPNSIITDNGTQFTGKKFLNFCEDHHIRVDWAVVAHPMSNGQVERANGMILQGLKPRIYNDLNKFGKRWMKELPSVVWSLRTTPSRATGFTPFFLVYGAEAILPTDLEYGSPRTRAYTDQSNQASREESLDQLEEARDRALLHSARYQQSLRRYHARGVRSRDLQVGDLVLRLRQDARGRHKLTPPWEGPFVIAKVLKPETYKLANNQGEIYGNAWNIKQLRRFYP

SEQ ID NO: 300500 - protein, 111 aa, Zea mays
  Clone ID: MRT4577_37125C.1.pep
RVVPRFAQRPPSVRTHTAYTTHILSGAVILSAWLVASMVYYLPCTHRTARRMGQVDVLWEGPFTMRKTVANPSPTANGSYWYCTTRAFLTGPHVHMRPCYLTEDFPRDYLV

SEQ ID NO: 300501 - protein, 748 aa, Zea mays
  unsure (1)..(748): unsure at all Xaa locations
  Clone ID: MRT4577_37126C.1.pep
MPFGLRNAGATYQRCMNHVFGEHIGRTVEAYVDDIVVKTRKASDLLSDLEVTFRCLKAKGVKLNPEKCVFGVPRGMLLGFIVSKRGIEANPEKIAAITSMGPIKDLKGVQRVMGCLAALSRFISRLGERGLPLYRLLRKAECFAWTPEAEEALGNLKALLTKAPVLVPPVDGETLLVYVAATTQVVSAAIVVERQEEGHTLPVQRPAYFISEVLSETKIRYPQVQKLLYVVILTRRKLRHYFESHPVTVVSSFPLGEIIQCREASGRIAKWVVEIMGETISFAPRKAIKSQVLADFVAEWVDTQLPTTPIQPELWTMFFDGSLMKTGAGADLLFISPLGKHLRYVLRLHFPASNNVAEYEALVNGLRIAIELGVRRLDARGDSQLVIDQVMKNSHCRDPKMEAYCDEVRRLEDKFYGLELNHIARRYNKTANELAKIASGRTTVPPDVFSRDLHQPSVKIDDAPKPEAPSVQPEVPSAQPEAPSARPEAASVQPEVPSASEGEALRIKEERSGATPDRNWQTPYLXISAKESYPSTEPRLGGXAPGGYTHLLVAIDKFSKWAEVRPLNSIRSEQAVTFFTNIIHRFRVPNSIITDNGIQFTGRKFLDFCEDHHIRVDWAAVAHPMSNGQVECANGMILQGLKPRIYNDLNKFGKRWMKELPSVVWSLRTTPSRATGFTPFFLVYGAEAILPTDLEYGSPRMRAYSDQSNQASREDSLDQLEEARDKALLHSARYQQSLRRYHARGVRP

SEQ ID NO: 300502 - protein, 83 aa, Zea mays
  Clone ID: MRT4577_37127C.1.pep
FPNPAELYPVHHTCQWVQLCLLVLTYGSQLQILSAVQWQDTAPCSCRECYSKPTTIHYYRRLIPRQNLRQRLRRATATDLLLT

SEQ ID NO: 300503 - protein, 568 aa, Zea mays
  Clone ID: MRT4577_37128C.1.pep
MAAVSPPGGGGLATSSPMAEEQHPALSRRLPRHRRRKQGNHGQAGGGTSSAVERVDDAGAPAGDMSGVDLAPEMTTSAVSPQHANPKRTDDASTLATGLLGVSLVPEITVQSVPDATLSPSIDREISNWDDLVKAFAGNFQGTYVRPRNSWDLRRCRQQPGESLRDYIWWFSKQRTELPNITDSDVIDAFLAGTTCRDLVSKLGHKTPTRASELMDIATKFASGQEAVEAIFRKDKQPQGRQQEDVPEASAQRGTKKKAKKKSQAKRDAADADLVAAVDHRNPRKPLGGANLFDKMLKESCPYHQGPVKHTLEECVMLRRYFHKVGPPAEGGKGQDNDKKEGDKAEEFPEVHGCFMIYGGRVANASARHRKQERREVCSVKVATPVYLDWSDKPITFDQGDHPNCVPSPGKYPLVVDPVIGNTRLTKVLMDGGSSLNIIYAKTLGLLDINLSTIRARNPHVRGGYAKFMVVPNYTYLKLKMSGPNGVITVGSTYRHAYECDVECVEYAKALAKFEALIADLECLSKEVPDAKRHAGNFEPAEAVKSVPLDPSNDTCKQVQICSELDPK

SEQ ID NO: 300504 - protein, 1656 aa, Zea mays
  unsure (1)..(1656): unsure at all Xaa locations
  Clone ID: MRT4577_37129C.1.pep
MVAARENGLTDMLSLSPSRTLVTPYCKRICPRRRTTRAAVPFFAPPCVLSRADPSGLGHAATIYSSVQGPPGVETPTVGAPGRGLLRVDGHLPVKLQMGSLQQPLQPGTLLRFGSLEFMSLDGSYDMVLLPPSRDNDNGSRQPARWRLNRRRLPRVAKEQHPAGDTADVDLASETKMSVVSPQHANPKQTDDASMLAKDLLGISLVPEITVQSVPDATSSPSVDQEVLSVFHPVPFRFSFDPPSDPASVDAFVKAYPNLPGYHTWSTWDRLTTVSTYGPPGSKEDDEPDSGWDFSRLDNPSAMRDFMAACDYCLSDSSDGGHSLGDEDCGPSRECFHVDLGVSTKATILRTELPNITDSDVIGAFLAGTTCRDLVSKLGRKTPTRASELMDIATKFASGQEAVEAIFRKDKQPQGRQPEDVPEASAQRGTKKKGKKKSQAKRDAADADLVAAAEHRNPRKPPGGTNLFDKMLKESCPYIQGPVKHTLGECVMLQRYFHKAGPPVEGGRAHDNDKKEGHKAEEFPEVHDCFMIYGGKVANASARHRKQERREVYSVKVAAPVYLDWSDKPITFDQGDNPDHVPSPGKYPLVVDPVNGNVRLTKIDLSTIRAGTTSFHEIIPGKRVQPLGQLDLPVCFGTPSNFRKETLTFEVVGFRGTYHAVLGRPCYAKFMAIPNYTYLKPKMPGPNGVITVGSTYRHAYECDMECVEYAEALVESEALITDLESLSKEVPDAKRHTGNFEPAEAVFAWSPSDMPGIPRDVAEHSLDIRAGARPVKQPLRRFDEEKRIAIGEEIHKLMAAGFIKEVFHPEWLANPVLVKKKGGKWRMCVDYTGLNKACPKVPYPLPRIDQIVDSIAGCETLSFLDAYSGYHQIRMKESDQLATSFITPFGMYCYITMPFGLRNACATYQRCMNHVFGEHIGRTVEAYVDDIVVKTRKASDLLTDLETTFKCLKAKGIKLNPEKGMPLYRLLRKAKRFTWTPKAEEALGNLKALLTSAPILVPPAAGEALLIYVAATTQVVSAAIVVERREEGHALLVQRPVYFISELRHYFESHLVTVVSSFPLGEIIQCREASGRIXKWAVEIMGEKISFAPWKAIKSQVLADFVAEWVDTQLPLAPIQPELWTMFFDGSLMKTGAGAGLLFISPLGKHLRYVLRLHFPASNNVAEYEALVNGLRITIELGVRRLDARGDSQLVIDQVMKNSHRRDPKMEAYCDEVRRLEDKFYGLELNHVARRYNETVDELAKIASGRTTVTLDVFSRDLHQPSVKTDDTPEPEEASAQPEASSAQPEAPSAAEGEAMHIVEERNGVTHNRNWQTPYLXISTKESYPSTEPKLGNWRGAPSRSSCWVTERSSTAAAPQASSSDAYPSPKVSTGQPWWPMPLGLYTPTEGANSTQGRHTCPLRPCKQYPSPXFAVWGLDLVGPMQKAPGGFTHLLVAIDKFSKWIEIRPLNSIRKFLVDWAAVAHPMTNGQVERTNGMILQGLKXEDLQQPQQVRQXWMKELPSVVWSLRTTPSRATGFMPFFLVYGAEAILPTDLEYGSPRTRAYNEESNQASREDSLDQLEEARDMALLHSARYQQSLRRYHARGVRSQDLQVGDLVLRLRQDDRGRHKLTPPWEGPFIIAKILKPGTYKLANSQGEVYNXLGTSDNYVAFTL

SEQ ID NO: 300505 - protein, 272 aa, Zea mays
  unsure (1)..(272): unsure at all Xaa locations
  Clone ID: MRT4577_3712C.1.pep
MGDWVPRGRPGTTCCAARHSVLCTPSTGATTAATMAVGNTNRISSGTKGDKKETGDPFSKKDCYDIEAPSLFSVRNIGKTLVPRTQGTRIASDGLKLRCCEDCLTXDLQGDEDQXYWKIRFRAEDVXQGKNGLTNFWSMNFTTDKVRSLVXKRKTLIVAHVDVKTTXDDYLLRLFCIVFTKRRPNQVKRTCYAHASQIRQIRRKMAEIMINQASTCDLKELVSKIIPEVIGKQIENSTSSNLPLQNVFIRKEQILKXAPKFDLGKLMYVHGD

SEQ ID NO: 300506 - protein, 103 aa, Zea mays
  Clone ID: MRT4577_37130C.1.pep
AFHGKSGARVPNPSEHLRLTFHREQVVTGVERHGQAMCGEVCAFHVDRVMSHTRIPCTETCRRFGVQHAGNRVVAYAERVGPGFRVDPSIADTTPMESVDAGE

SEQ ID NO: 300507 - protein, 916 aa, Zea mays
  unsure (1)..(916): unsure at all Xaa locations
  Clone ID: MRT4577_37131C.1.pep
MTVQSVPDVTSSPFVDQKVPTDSHPTSFGFSLNPPSDLALVGTLVEASSNPLGFRMRSPWDQLTNVSTYGPSGSEEDDDPSICWDFSGFGNPSAMRDFMTACDYCLSDCSDGIRSLDDEGCGPSRECFHVDLGGPSEGNHLGMSEDGDLPRPVPRADIPWELVVVPVPAGGHDPQLEQVRGAQARLDEGAGALEPIXRRDVGQAWAGQPPAGEIRHLPQGLQLRVANDVRVRPPPASSGVGQNLAAAAMLLRAMPEPSTTEGRRIQGELKNLLEGAAVRRAESSASRRQGYPSEPHAATSRFMREASVYTGRTRNTTPAAPGHLGNEHHHRDRRAHLDERVRRGYHPRRGGRYDNGEDRSPSPEPPGPXAFSRAIRRAPFSTRFRPPTTITKXGGTDDDNLIIRNLPLFLSDTARAWLEHLPPGQISNWDDLVQAFAGNFQGTYVRPGNSWDLRSCRQQPGESLRDYIRRFSKQRTELPNITDSDVIGAFLAGTTCRDLVSKLGRKTPTRASELMDIATKFASGQEAVEAIFRKDKQPQDRPPEDAPEASTQRGAKKKGKKKSQVKRDTADADLVAAAEYKNPRKPPGGANLFDKMLKEPCPYHQGPVKHTLEECVMLRRHFHRAGPPAEGGRARDDDKKEDHQAGEFPEVRDCFMIYGGQAANASARHRKQERREVCSVKVAAPVYLDWSDKPITFDQADHPDHVPSPGKYPLVVDPVIGDVRLTKVLMDGGSSLNIIYAETLGLLRVDLSSVRAGAAPFHGIIPGKRVQPLGQLDLPVCFGTPSNFRRETLTFEVVRFRGTYHAVLGRPCYAKFMAVPNYTYLKLKMPGPNGVITVGPTYKHAFECDVECVEYAEALAESEALIADLESLSKXVPDVKRHAGNFEPAETVKAVPLDPSGDASKQIRIGSGLDPK

SEQ ID NO: 300508 - protein, 74 aa, Zea mays
  Clone ID: MRT4577_37132C.1.pep
PDFGVGDNKHLSEHHARKGHSGITGQLRLLDQVDTLPPKRIQGLSDNQNHRQEGVASVYSDLRTGAEAPLRQEL

SEQ ID NO: 300509 - protein, 120 aa, Zea mays
  Clone ID: MRT4577_37133C.1.pep
MEISSSVDCGQEKEQPTNKRPRSESTTESSTKASREKIRRDKLNERFLELGAILEPGKTPKMDKTAILSDAIRVVGELRSEAKKLKDSNENLQEKIKELKVYTISCGQVINGAVQMGGGT

SEQ ID NO: 300510 - protein, 66 aa, Zea mays
  Clone ID: MRT4577_37134C.1.pep
GGPPQGIPTKRGFLFPNKYWPPEISCSPPYPPWDHKPCNPSPLKNLGPPDGTFFGGYKKGPPSPSK

SEQ ID NO: 300511 - protein, 241 aa, Zea mays
  Clone ID: MRT4577_37135C.1.pep
MRTRSGSRYSNGGEVVALVGQKRKRSPSAVAGECDCGGRRKRPAGEPDYLDALPDDLVLSILSKLAAASSAPSDLLSVHLTCKRLNELGSHDMVFAKASPASLAVKAAAWSEPAQRFLKRCADAGNLEACYNLGMIRFYCLGSRSGGAALLARAAVGGHAAALYSLAVIQFNGSGGAKSDRDLRAGAALCARAASLGHVDALRELGHFLQDGYGVRRDPAEGRRLLVAANARELTLALSAA

SEQ ID NO: 300512 - protein, 37 aa, Zea mays
  Clone ID: MRT4577_37136C.1.pep
FIFPSLMSFGCLSVFSSGRIIYVTCSCCVYTWFSAYT

SEQ ID NO: 300513 - protein, 71 aa, Zea mays
  Clone ID: MRT4577_37137C.1.pep
HRRQKDPILRAHQNGGGASNFLLLTLRNPEGIKRRPQKGVALLNKPVTPITIHRRHGNPFDGTIYGSPIFL

SEQ ID NO: 300514 - protein, 51 aa, Zea mays
  Clone ID: MRT4577_37138C.1.pep
QLALPARRGVLPAVRRLRAALRAAVPVPGRAGPELVPGPPHGVCGPTRLLR

SEQ ID NO: 300515 - protein, 97 aa, Zea mays
  unsure (1)..(97): unsure at all Xaa locations
  Clone ID: MRT4577_37139C.1.pep
KSLENPALEXXPHFPGKSWPILRKMVGVPPPKEKAFQVFCLGILNPKPFKPKSFQPSVFVKLIKGFKSREVLPIVKNPIFHFFPLEVHMDLSPPIPP

SEQ ID NO: 300516 - protein, 259 aa, Zea mays
  Clone ID: MRT4577_3713C.1.pep
AGKKAAHQLTKKVWSCSCLQPPAHRPFRPTSSIPRSAMAAPAEETLAAEDTASPPPPARSAGFWFLGEDKSVHKALGGGKNKKTSAAVVGGATVLWVLFEIVEYHLLTLVSHVLIAALTILFLWSNATVFIKKSPPDVPEVQISEDVAVNIALALRADINKALALLREIALGHNLMKFLGVVVALWILSEIGELCDLLRLMYIVVLILHTVPILYHKYQDHVDDFAAKAHRELCKQYAVLDAKVLSKIPRAPPKDKKQN

SEQ ID NO: 300517 - protein, 126 aa, Zea mays
  Clone ID: MRT4577_37140C.1.pep
EGKGEVLITIHAGSPPEDHPPRGDRDSISPTFASGPHCAHALTNAISSKWCVGHLITKTTTNGPLSISHEDWLSFLFFSGTPSHKDLHTKKWSLLLNFSTFENGVRERMKTQMKSTRVCNTQGHKH

SEQ ID NO: 300518 - protein, 82 aa, Zea mays
  Clone ID: MRT4577_37141C.1.pep
GRIHLAQHVGCPAEVSVPSENEAVRCRAPQAEGYLGLGYELHVPRRTVSRQVGPVSPYPVRCRGHQWRRFVLGSVPQHPDGQ

SEQ ID NO: 300519 - protein, 281 aa, Zea mays
  Clone ID: MRT4577_37142C.1.pep
MWRRASHLLIRTAAAAAAPTRRLPLPHPPLPIAPRVASASSSYATAVAARAPRTVGTLLRLNDLCDNPGARKQKTRKGRGIGSGKGKTAGRGHKGQKARGTARFGFEGGQTPLRRRLPRRGFKNPFSLTFQPCGLGKIAKLINAGKIDSSELITMKTLKETGAIGKQIKDGIRLMGRGAEEIKWPIHLEVSRATARAKAAVEAAGGTVRLVYYNKLGFRALLKPEWFEKKGRLLPKAARPPPKQRDKVDSIGRLPAPTKPLPFTVEELEFAAQREAARVTA

SEQ ID NO: 300520 - protein, 160 aa, Zea mays
  Clone ID: MRT4577_37143C.1.pep
CDVQMNVQTHIRSHNHNRYFLRNNHISALTFRCKPPLGASSPFTSAESALTFRYKLCILLGTSLELLRLLLSAESALTFRCKLCIPLGTSLELLPCFFPALDGAFSAFTFTSLGDFALIELKKEITCDGPIKNLSPPSERKRVQKKKKKKKKSTLRCYHC

SEQ ID NO: 300521 - protein, 56 aa, Zea mays
  Clone ID: MRT4577_37144C.1.pep
CPFYGISRCQTHVCEPPPPCPVQSNLPPLPPRPPLAGDLMLLPPRRACSPRRVARV

SEQ ID NO: 300522 - protein, 87 aa, Zea mays
  Clone ID: MRT4577_37145C.1.pep
QVKIGYNATTPQVHDNLGKKLFRKTQNSYHTATARPKLIVHVSVFTVAGLPSLSDTISTVITQYAKQGYVAPTVVTMKYFFYKPMHS

SEQ ID NO: 300523 - protein, 130 aa, Zea mays
  Clone ID: MRT4577_37146C.1.pep
SSEPGERPPTSGHAPEEHKNEGKPGHPADGKQRPDHNDNHPHNANGPSNGRAALSTAGMNPLAERSHTHSGGPGILTVDNDPAGQMQKRQHLWLTILRSGPTQPGADMHVCSEPLMEDNKLQRATRQNEQ

SEQ ID NO: 300524 - protein, 39 aa, Zea mays
  Clone ID: MRT4577_37147C.1.pep
MRSYHLPISLSSQKSTSRKRHHITRLRYTPNTPTRNHTI

SEQ ID NO: 300525 - protein, 135 aa, Zea mays
  Clone ID: MRT4577_37148C.1.pep
MAAAEIKIGQVDDVQELHRTGLQTVPDRYIRDGDDRPDGDNVCAVAHIPVIDVTELQHDDVGLDKLRLACEEWGFFQVVNHGIAHELLDEMERLAREFFMLPLEEKEKYPLARTWSWGSARTRTAAPSPCFSKTW

SEQ ID NO: 300526 - protein, 388 aa, Zea mays
  unsure (1)..(388): unsure at all Xaa locations
  Clone ID: MRT4577_37149C.1.pep
MAAAEIKIGQVDDVQELHRTGLQTVPDRYIRDGDDRPDGDNVCAVAHIPVIDVAELQRDDVGLDKLRLACEEWGFFQVXAGLLLDSSRARRHAEIYICVXVNHGIAHELLDEMERLAREFFMLPLEEKEKYPMAPGGIQGYGHAFVFSEDQKLDWCNMLALGVEPASIRQPRLWPTAPAGFGETLETYSAEVGELCRRLLARIAETLGLAPATFADMFGEAVQAVRMNFYPPCPRPDLVMGLSAHSDGSAVTVLQQDAGCAGLQVRGKGGAWVPVHPVPHALVVNIGDTLEVLTNGRYKSVEHRAVANGEQDRLSVVTFYAPAYDVELGPLPEFVTDEAPCRYRRFNHGEYSRHYVTSRLEGKKTLEFAKIDPLAGEHDGTAPEETST

SEQ ID NO: 300527 - protein, 302 aa, Zea mays
  Clone ID: MRT4577_3714C.1.pep
WPGCQRIETHECVTRPPRLQRERKGSLPAPKKKAAHQLTKKVWSCSCLQPPAHRPFRPTSSIPRSAMAAPAEETLAAEDTASPPPPARSAGFWFLGEDKSVHKALGGGKRILRSSTADVLLWKDKKTSAAVVGGATVLWVLFEIVEYHLLTLVSHVLIAALTILFLWSNATVFIKKSPPDVPEVQISEDVAVNIALALRADINKALALLREIALGHNLMKFLGVVVALWILSEIGELCDLLRLMYIVVLILHTVPILYHKYQDQVDDFAAKAHRELCKQYKVLDAKVLSKIPRATPKDKKQN

SEQ ID NO: 300528 - protein, 1584 aa, Zea mays
  unsure (1)..(1584): unsure at all Xaa locations
  Clone ID: MRT4577_37150C.1.pep
MAEEQHPGLSRHLPRRERRRRGNHGQTGGDTSLAVDRVDDAGAPAGDTSGVDLASETKTSIISPQHANPKRMDDASTLAKDLLDVSLVPEITVQSIPDATSSPSVDQEVPSVFHPVPFRFSFNPPSDPASVDAFIKAYPNLPGYHMWSNWDRLTTVSTYGPPVSEEDDEPDSGWDFSGLDNPSAMRDFMTACDYCLSDYSEGGHNLDDEDCGPSSECFHVDLGGLDEGNHLGRALAEEARHLAQDIQHRVANDARARLSPASSGVGQNLAAAAILLRAMPEPSTIEGRHIQGELKNLLEDAMVRRAESSASRRQGYPXEHRVATSRFMREASVHTGCTRDATPAAPGRLGNEHHHRDCRAHLDEKVCRGYHPSRPSCPTSPTRMSSXAFITGTTCRDLVSKLGRKTPIRASELKDIATKFASGQEAVEAIFRKDKQPQGRQQEGIPEASAQRGTKKKGKKKSQAKHDATDADLVAAAGHKNPRKPPGGANLFDKMLKESCPYHQGPVKHTLEECVMLRRHFHKVGPPAEGGKGHDNDKKEGHKAEEFSEVHDCFMIYGGQVANASTRHRKQEHREVCSVKVAAPVYLDWSDKPITFDQGDHPDRVPSPGKYPLVVDPVIGNVRLTKVLMDGGSSLNIIYAETLGLLQIDLSTIRAVLGRPCYAKFMAVPNYTYLKLKMSGPNGVITVGSTYRHVYECDVECVEYTEALAESEALIADLESLSKEVPDAKRHAGNFDPAEAEAVLVDFLCANAEVFAWSPSDMPSIPRDVAEHSLDIRAGARPVKQPLHRFDEEKCRAIGEEIHKLMAAGFIKEVFHPEWLSNPVLVKKKGGKWRMCVDYTGLNKACPKVPYPLPRIDQIVDSTAGCETLSFLDAYSGYHQIRMKESDQLATSFITPFGMYCYITMPFGLRNAGTTYQRCMNHVFGEHISRTVEAYVDDIVVKTRKASNLLTDLETTFKCLRAKGVKLNPEKCIFGVPRGMLLGFIVSERGIEANPEKIAAITNMGPIKDLRGVQRVMGCLTALSRFISRLSERGLPLYRLLRKTERFTWTPEAEEALGNIKVLLTSAPILVPPAAGETLLIYVAATTQVVSVVIVVERREQGHALPIQRPVYFISEVLSETKIRYTQIQKLLYMYFESHPVTVVSSFPLGEIIQCREASGRIAKWVVEIMGETISFAPRKAIKSQVLADFVVEWVDTQLPVAPIQPELWTMFFDGSLMKTGASTGLLFISPLVKHLRYVLRLHFPESNNVAEYEALVNGLRIAIELGVRRLDARGDSQLVIDQVMKNSHCRDPKMEAYCDEVRCLEDKFYGLELNHVARRYNETADELAKIASGRTTVPPDVFSRDLHQPSVKTDDTPEPEGEALPRTCNISTEESYPSTEPKLGDWRGAPSRSSCWVTKRSSTTAAPQASSSDAYPSPKKAPRGYTHLLVAIDKFSKWIEVRPLNSIRSEQAVAFFTNIIHRFGVPNSIITDNGTQFTGKKFLDFCEDHHIRVDWAAVAHPMTNGQVERANGMILQGLKPRIYNDLNKFGKRWMKELPSVVWSQRTTTSQVTGFTPFFLVYGAEAILPTDLEYGSPRTRAYND

SEQ ID NO: 300529 - protein, 843 aa, Zea mays
  unsure (1)..(843): unsure at all Xaa locations
  Clone ID: MRT4577_37151C.1.pep
MGSLQQPFQPRTVLRFGSLEFMSLDGSYDMILLPPPRDSDNGGRQPARRRRNRKRLPHVAEEQHSGLSRPLPRRRRRRRGNQGQAGGGTSSAVKRVDGAGAPTGGTSGIDLASETKTSVVSPQHAHSKRTDDASTLTKDLLGVTLVPETTVQSAPDVTPSLPVDQEVPTDSHLEPVGFSLDPPSDFASVDAFIEASPNPPGYGMWSPWDRLTAVSTYGPSGSEEDDEPDFCWDFSGLGNPSAMRDFMTACDYCLSDCSDGSRSFGDEDCDPSRECFHVDLGGPGEGNHLGIPENGDPPRPAPRVDILRELVVVLVPAGGQDAQLEQIRXFSRAIRRAPFPTRFRXPTTITKYSGETRPELWLVDYRLACHLGGTDDDNLIIRNLPLFLSDTARAWLEHLPPGQISNWDDLVQAFAGNFQGTYQPGESLRDYIRRFSKQRTELPNVTDSDVIGAFLAGTTWHDLVSKLGRKTPTRASELMDIATKFASGQEAIEVIFRKDKQPQGRQPEDVPEASTQRGTKKKGKKKSQAKRDAADADLVATDEYKNPRKPPGGANLFDKMLKEPCPYHQGPVKHTLEECAMLRRHFHKAGPPAEGGRARDDDKKEDHKAGEFPEVHDCFMIYGGQVANASARLCKQERREVCSVKVAALVYLDWSDKPITFDQGDHPDRVSSPGKYPLVVDPVIGNVRLTKVLMDGGSSLNIIYAETLGLLRIDLSSVRAGATPFHGIIPRKRCWGRPCYAKFMAVPNYTYLKLKMMGPNGVITVGPTYRHAYECDVECVEYVEALAESEALIADLESLSKEEPDVKRHAGNFEPAETVKSVPLDPSNDTSKRIRIGSELDPK

SEQ ID NO: 300530 - protein, 1010 aa, Zea mays
  Clone ID: MRT4577_37152C.1.pep
MSLDGSYDMILLPPPCDSDNGGRQPARRRRNQRHSGLSHHLPRRRRRRRGNHGQAGGGTSSAVEQVDDAGAPAGDTSGFDLASETKTSTVSPQHANPKQTNDASTFAKDLLGVALVPETTVQSAPDATSSPPVDQEDRLTAVSTYGPSGSEEDDEPDFCWDFSGLGNPSAMQDFMTACDYCLSDCSDGSRSFSDEDCGPSRECFHVDLGGPGEGNHLGIPENGDPPRPVPRVDILRELAVVSVPVGGQDAQLEQIHEMQARLDEGAGTLEQFRRNIGQEWADQAPAGEARHLPQGIQHRIADDARTRPPPASSGVGQNLAAAAILLRAMQEPSTTEGRRIQGELKNLLEDATVRRAESSTSRRQGYPSEHRAATSLFMREASVHTGRTRNTAPVAPGRLGNEHHHRNRRAHLDERVRRGYHPRRGGRYDSGEDRSPSPEPPGPQAFSRAIRRAPFPTRFRTPTTITKYSGETRPELWLADYRLACQLGGTNDDNLIIRNLPLFLSDTARAWLEHLPPGQISNWDDPVQAFAGNFQGTYMRPGNSWDLRRCRQQPGESLRDYIRRFSKQRTELPNVTDSDVIGAFLAGTTYHDLVSKLGRKTPTRASELMDIATKFASGQEAVEAIFRKDKQPQGRQPEDVPEASTQRDTKKKGKKKSQAKRDAADADLVAAAEYKNPRKPHGGANLFDKMLKEPCPYHQGPVKHTLEECVMLRCHFHKVEPPAEGGRAHNNDKREDHKAEEFPEVHDCFMIYGGPVANASARHRKQERREVCSVKVAAPVYLDWSDKPITFDQGDHPNRVPSLGKYPLVVDPVIGNVRLTKVLMDGGSSLNIIYAETIGLLRIDLSSLRAGATPFHGIIPGKRVQPLGQLDLSVCFGTPSNFRRETLTFEVVGFRGTYHVVLGRPCYAKFMVVPNYTYLKLKMSGPNGVITVSPTYRHTYECDVDCVEYAEALAESEALIADLESLSKEAPDVKRHADNFEPAETVKSVPLDPSNDASKQIRIGSELDPK

SEQ ID NO: 300531 - protein, 123 aa, Zea mays
  Clone ID: MRT4577_37153C.1.pep
VRASCMTEEREHADVVGFYLIWRWWLPGSPRPPCWSCASAGFLRRRSLCPARRRRQTTSSTHRACTGHRTFGTGPATYRDYTSDNRTTIPIRTINYAIYSSALLNCLQVTLHLTTSRLRGRSA

SEQ ID NO: 300532 - protein, 74 aa, Zea mays
  Clone ID: MRT4577_37154C.1.pep
LLISSISLLPPLTVAAFSTTVFLLAPPPFAAFNQSVLWSPLLPHDRSASCRPLTIGVAHPSSLLRCTQHRWCLL

SEQ ID NO: 300533 - protein, 144 aa, Zea mays
  unsure (1)..(144): unsure at all Xaa locations
  Clone ID: MRT4577_37155C.1.pep
PPPPRGLKGHTRGGPLPKQGYKLGARANRGGPLVKKPTGKKGIACQAIKVGTTRVLPNQAGVKPRATQVVKRPHQRAKMGPQKSKHRAALRGEGKPPKWPPWRGAARAKDNPFYFFFLFFFYFFFFFFFFFFFFFFFFFFFFEX

SEQ ID NO: 300534 - protein, 108 aa, Zea mays
  unsure (1)..(108): unsure at all Xaa locations
  Clone ID: MRT4577_37156C.1.pep
LAMSFYKKLVIVGFALTLLLVSFRMDATAKLCSTTMERLICGGASRGDVNRACDETCRSKGYTGGGFCNMKIQRCVCRKPCVQEEQTEARARDEAXGAGDMMSRTMAD

SEQ ID NO: 300535 - protein, 1015 aa, Zea mays
  Clone ID: MRT4577_37157C.1.pep
KEGNKAEEFPEVHDCFMIYGGQVANTSARHHKQERREVCSVKVAAPVYLNWSDKPITFDQGDHPDRVPSPGKYPLVVDPVIGNVRLTKVLMDGGGSLNIIYAKTLGLLQIDLSTIRETLTFEVVGFRGTNHAVLGRPCYAKFMAVPNYTYLKLKMSGPNGVITVGSTYRHAYECNVECVEYAEALAESEALIANLECLSKEVPDAKRHAGNFEPAEAVKSVPLDPSNDASKQVFAWSPSGMPGIPRDVAEHSLYIRAGARPVKQPLRCFDEEKRRVIGEEIHKLMAAGFIKEVFHPKWLANPVLVKKKGGKWKMCVDYTGLNKACPKVPYPLPRIDQIVDSTAGCETLSFLDAYSGYHQIKMKESDQLATSFITPFGMYCYITMPFGLRNAGATYQRCMNHVFGEHISRTVEAYVDDIVVKTRKASDLPSDLETTFKCLRAKGVKLNPEKCVFGVPRGMLLGFIISERGIEANPEKIAAITNMGPIKDLKGVQRVMGCLAALSRFISRLGEKGLPLYRLLRKTERFTWTPEAEEALGKLKALLSNAPILVPLAAREALLIYVAATTQVVSATILVERREEGHALLVQRPVYFISEVLSETKIQNPQIQKLLYASHPVTVVSSFPLGEIIQCREASGRIAKWAVEIMDETISLAPRKAIKSQVLADFVAEWVDTQQPTAPIQPELWTMYFDGSLMKTGAGAGLLFISPLGKHLRYMLRLHFPASNNMAEYEALVNGLRIAIELGVRCLDARGDSQLVIDQVMKNSHWRDRKMEAYCEEVRRLEDKFYGLELNHVARRIVRSCQGCQFYARQMHLPTQALQTIPITWPFAVWGLDLVGPLQKAPGRFSHLLVAIDKFSKWIEVRPLTSIRSEQVVVFFTNIIHRFGVPNSIITDNGTRFTGKKFLGICEDHHIRVDWAAVAHPMMNGQVERANGMILQGLKPRIYNNLNKFGKRWTKELPSVVWSLRTTPSRATGFSPFFLVYGAEAILPTNLEYGSPRTKAYDGRSNQTSREDSLD

SEQ ID NO: 300536 - protein, 965 aa, Zea mays
  unsure (1)..(965): unsure at all Xaa locations
  Clone ID: MRT4577_37158C.1.pep
MGSLQQPLQPGTVLRFGSLEFMYLDGSYDMILLPPPCDSDNGGRQPARRRRNRRRLPRVVEEQHSSSPRPLPRRRRGRRGNQGQAGGSASSAVERVDGASAPTGGASGIDLAFEMRTSAVSPQRTDSEQTDDASTLAKGLLDVTLVPETTVRSVPDVTSSLPVDQEVPTDSHLTPPGFSLDPPSDFALAGALIEASPNPLGFRMRSPWDRLTDVSTYGPSGSEEDDVSDFCWDFSGLGNPSAMRDFMTACDYCLSDCSDGSRSLGDEDCGPSRECFHVDLGGPSEGNHLGMPEDGDLPSRLDEGAGALEPXRWDVGQGWAGQPPAGEMRHLPEGFQHRIANDVRVRPPPASSGVGQNLAAATMLLRAMPEPSTTEGRRIQGELKNLLEGATARRAESSASRRQGHPSEHHATTSRFMREASVYTGRTCNTAPAAPGRLGNEHHHRDRQAHLDERXAEATTPGTEDATTTGRIGVPRPNHPISNWDDLVQAFAGNFQGTYVRPGNSWDLRSCRQQPGESLRDYIRRFSKQRTELPSITDSDVIGAFLVGTTCRDLVSKLGRKTPTRASELMDITTKFASGQEAVEAIFRKDKQPQGHPPEDAPEASTQCGAKKKGKKKSQAKRDAADADLVAAAEYKNPRKPPGGANLFDKMLKESCPYHQGPVKHTLEECVMLRRHFHRAGPPVEGGRARDDDKKEDHQAGEFPEVRDCFMIYGGQAANASARHRKQERREVCSVKVAAPVYLDWFDKPITFDQADHPDRVPSPGKYPLVVDPVIGDVRLTKVLMDGGSGLNIIYAETLGLLRVDLSSVRAGVAPFHGIIPGKRVQPLGQLDLPVCFGTPSNFRRETLTFEVVGFRGTYHAVLGRPCYAKFMAVPNYTYLKLKMPGPNGVITVGPTYRHAFECDVECVEYAEALIADLESLSKEVPDVKHHAGNFEPAETVKSVPIDPSSDASKQIRIGSKLDPE

SEQ ID NO: 300537 - protein, 632 aa, Zea mays
  Clone ID: MRT4577_37159C.1.pep
MPFGLRNAGATYQRCMNHVFGKHIGRTVEAYVDDIVVKTRKASDLLSDLEVTFRCLKAKGVKLNPEKCVFEVPRGMLLGFIVSKWGVEANLEKIAAIISMGPIKDLKSVQRVLGCLAALSRFISRLGERGLPLYRLLRKAECFTWTPGAEEALGNLKALLTNAPVLIDDTPEPEVPSAQPEVPLAQSEVPTVQPEVPSAPEGEALCVEEERSGVTPNRNWQTPYLQYLHRGELPLDRAKARRLAWRAKSFVLLGDGKELHHRSPSGILQRCISIAEGQELLREIHSGACGHHAAPRALVGNAFRQGFYWPTAVADATRIVRTCEGCQFYARQTRLPAQALQTIPITWPFAVWGLDLVGPLQKAPGGYTHLLVAIDKFSKWIEVRPLNSIRSEQAVAFFTNIIHRFGVPNSIITDNGTQFTGRKFLDLCEDHHIRVDWAAVAHPMTNGQVERANSMILQGLKPRIYNDLNKFGKRWMKELPSVVWSLRTTPSRATGFTPFFLVYGAKAILPTDLEYGSPRTRAYADQSNQASREDSLDQLEEARDMALLHSARYQQSLRRYHARGVQFRDLQVGDLVLRLRQDARGRHKLTPPWEGSFVITKVLKPRTYKLANSQGEVYSNAWNIQQLRRFYP

SEQ ID NO: 300538 - protein, 82 aa, Zea mays
  unsure (1)..(82): unsure at all Xaa locations
  Clone ID: MRT4577_3715C.1.pep
IVQGPDFPTEAEIITPRDEIRXIYQNGRGSIRQRAVWKKEDGEVVITALPHQVSGARVLEQIASQMXNXXLPMXXDXXYEXY

SEQ ID NO: 300539 - protein, 64 aa, Zea mays
  Clone ID: MRT4577_37160C.1.pep
SSPRLQLFFTATDRKLTGNKVVLLSSRQIVLTRTLACAHITTQANKKLVTIVHIYGKSVQNNYY

SEQ ID NO: 300540 - protein, 1785 aa, Zea mays
  Clone ID: MRT4577_37161C.1.pep
MSGSGCRPHPAGLVRTWQPQRCSSARCRSHQPPRVGESRESSRISWKALRPDGPRALPPEGKDIPRNLMPRLPDSCGKPRSTPGARATPRLRPRATSATSTIDATVEPTSTKGCAEATTPGVGGATTAGRIGVPRLNHPLGGTDDDNLIIRNLPLFLSDTARARLEHLPPGQISNWDDLVQAFAGNFQGMYVRPGNSWDLRSCRQHLGESLWDYIRRFSKQRTELPNITDSDVIGAFLAGTTCRDLVSKLDRKTPTRASELMDIATKFASGQEARDTKKKNKKKSQAKRDATDADLVAAAEYKNPQKPPGGANLFDKMLKEPCPYHQGPVKHTLEECVMLRCHFHKAGPPAKGGRDHNNNKKEDHKVEELPEVHDCFMVYGGPVANASARHHKQEHREAHQGPHGRRQQPQHHLRRDPRAPADRSVLDPDRETLTFEVVGFRGTYHAVLGRPCYAKFMAVSNYTYLKLKMTGPNGVITVGPTYRHAYKCDVECVEYAEALAESEALITDLESLSKEAPDVKRHAGNFELAETEAVLVDFLRANAEVFAWSPSDMPGIPRDVVEHSLDIRAGARPVKQPLRRFDEEKRRAICEEIHKLMAAGFIKEVFHPEWLANPVLVRKKGGKWRMCVDYTGLNKACPKVPYPLPRIDQIVDSTAGCETLSFLDAYSGYHQIRMKESDQLATSFITPFGMYCYVIMPFGLRNAGATYQRCMNHVFGEHIGRTVEAYVDDIIVKTRKASDLLSDLETTFRCLRAKGVKLNPEKCVFGVPRGMLLGFIVSERGIEANPEKIAAITNMGPIKDLKGVHRVMGCLAALSRLISRLGERGLPLYRLLRKTECFTWTPEAEEALGNLKALLTNAPILVPPAAGEALLIYVAATTQVVSAAIVVERQEEGHALPVQRPVYFISEVLSETKIRYPQIQKLLYAVILTRRKLRHYFESHPVTVVSSFPLGEIIQYREASGRIAKWVVEIMGETISFAPQKAIKSQVLADFVAEWVDTQLPTAPIQPELWTMFFDGSLMKTGAGAGLVFISPLGKHLRYVLRLHFPASNNVAEYEALVNGLRIAIELGVRRLDARGDSQLVIDQVMKNSHCRDPKMEAYCNETADELAKIASGWTTVPSDVFSRDLHQPSVKTDDTPEPEKASAQPEAPSVPEGEALRVEEERNGVPPNRDWHTPYLQYLHRGELPLDRAKARRLARRAKSFILLGDGKELYHRSPSGILQRCISIAEGQELLQEIHLGASGHHAAPRALVGNAFRQGFYWPTAVADATRIVRTCQGCQFYARQTHLPAQALQTIPMTWPFAVWGLDLVGPLQKAPGGYTHLLVAIDKFSKWIEVRPLNNIKSEQAVAFFTNIIHRFGVPNSIITDNGTQFTGRKFLDFCEDHHIRVDWAAVAHPMTNGQVERANGMILQGLKPRIYNNLNKFGRRWMKELPSVVWSLRTTPIRATGFTPFFLVYGAEAILPTDLEYGSPRTRAYDDQSNRTNQEDSLDQLEEAQDMTLLHSARYQQSLRRYHARGVRSRDLQVGDLVLRLRQDARGRHKLTPPWEGLFVIAKVLKPGTYKLANSQGEPQKTYAHYRRTAMQAACNRTKGAHPFDFDASSMEAQAHTSCNRRAGYYVRETAPPLVPVPRLLDCGTGAATRGDPAHDPTVPTEHIGHGDRERGYSERDPSPRRKRAPSPLLIRGSKAGPSEGFNSRLRALGLRAHYWSEVRRLAPRKGSTSASGHSGSAPTTDQGFVGWPPKGSDSRLRAHRARDDPGYVRYITKARATLPRYPRTFPRPTGTIL

SEQ ID NO: 300541 - protein, 33 aa, Zea mays
  Clone ID: MRT4577_37162C.1.pep
CNSRNVALILLMTDGKNQLKDTPSPLSYDGYAT

SEQ ID NO: 300542 - protein, 1324 aa, Zea mays
  unsure (1)..(1324): unsure at all Xaa locations
  Clone ID: MRT4577_37163C.1.pep
MADAAQLPSTLALALVGSLAVAGSGRRAPPHHMALGGLRSVSTGAAPEGGGGSWSVRAAPRETPGQGRACMCVARGRSALARGSRGRVAVSVAATTRGRGRGTLKTPNSQLSRSDRRHSTAPLTGLTEGQRRLRHSDCGATRQSESDRQSGLAKGATANSAPPDPRARTRAKTRKTANSAPPDPRARTRAKTRKTANSAPPDPRARTRAKTRKTTKLRLARPQGSDSALASVERLPPRPTPWLGLGLGNRGQTQPRLRRSPHVTLPRAQTRHLPVKLQMSSLQQPLRPGAVLRFGTLEFMSFDGSYDMILLPPPRDDDNGGRQPARRRRNRRHLPRVVEEQHSSSLRSLPRQRRRRRGRQGQAGGRASLAVERIDAPDAPTEGTPDVDLAFETEASAVPPRHADPEQEDDASALAESLQDVALVPEMTVQPVPDVTTSLLVDQKVPTNSHLASFRLSLNPPNDLVLAGALIEASATPLGFRMRSPWDRLTDVSTYGPSGAVRDFMTACDYCLSDCSDESRSLGDESCGPSRECFHIELGDPSEGNHLGMPEDGDLPRPVPRADIPRELAVVPAPAGGYDPQLEQVREAQARLNEGTGALEPIRRDVGXGLQHRVANDARVRLPPASSGVGQNLAAAAMLLRAMPEPSTTEGRRIQGELKNLLEGAAARWAESTASRRQGYPSEPHAATSRFMRQASIYTGRTRNTAPAAPGHLGNEHHRRDRRAHLDERVRRGYHPRRGGXYDSREDRSPSPEPPGPQAFCRAIRRAPFPTRFRPPTTITKYSGETRPELWLADYRLACQLGGTDDDNLIIRNLPLFLSDTARAWLEHLPLGQISNWDDLVQAFAGNFQGTYVRPGNSWDLRSCRQQPGESLQDYIRRFSKQRTELPNITDSDVIGAFLAGTTCRDLVSKLGRKTPTRASELMDIATKFASGQEAVEAIFRKDKQPQGRPSEEAPEASAPRGAKKKGKKKSQPKRDAADADLVAAAEYKNPRKPHGGANLFDKMLKEPCPYHQGPVKHTLEECVMLRRHFHRAGPPAEGGRARDDDKNEDHPAGEFPEVRDCIMIYGGHAANASARHRKQERQEVCSVKVAAPVYLDWSDKPITFDQADHPDHVPSPGKYPLVVDPVIGDVRLTKVLMDGGSCLNIIYAETLKLLRVDLSSVRAGAAPFHGIIPGKRVQPLGRLDLPVCFGTPSNFRRETLTFEVVGFRGTYHAVLGRPCYAKFMAVPNYTYLKLKMSGPNGVITVGPTYKHAFECDVECVEYAEALAESEALIADLENLSKEVPDVKRHAGNFEPAETVKAVPLDPSGDTTKRVRIGSGLDPK

SEQ ID NO: 300543 - protein, 1334 aa, Zea mays
  unsure (1)..(1334): unsure at all Xaa locations
  Clone ID: MRT4577_37164C.1.pep
MGSLQQPLQPGTVLRFGSLEFMSIDGSYDMVLLPPQRDNNNDGRQLAQRWRTRRRLPPVVEEQHPGLPCHPPCRRRRRRGNRGQAGGSTSSAVGPERVDDAGTLAGDMSGVVLAPETMMDVVSPRRANPKRTDDASTLVKDLLGVSLVPEMTVQSVPNATSPPSIDREVPSVFHPVPFRFSFDPPSDPDAVSAFVKLYPNLLGYHMWSSWDRLTAVSTYGPPGSEEEDDPDSGWDFFGLSDPNAMRDFMTACDCCLSGCSDVGHSLDDEGCGPSRECFHVDLGGHNEGNHLGMPEDDDPPVPASRVDIPRELAVVPVPAGGQDTQLEQIREMQAKLDEEAGQLVQLRQNIEQEWAGRALAREACHRVRDVQRRIVDDARARLPLASSGVGQNLAAAAILLRAMPXPSTTEWRRIQGELKNLLEDAAVRRAESSASRRQGCPPEHRATTSRLMREASVHTGRTRDGTPAAPGRLGDEQHHRNRRARLDERVRRGYHPRRGGRYDSEDDRSSSPELPXLGGTNDDNLIIRNLPLFLSDAARAWLEHLPPAQISNWDNLVKAFAGNFQGTYVCLGNSWDLRSYRQQLGESLREYIRRFSKQGTELPNITDSDVIGAFLAGTTCRDLXRSKPSSGRTSSLRDGSRKTSPRRSPSVARRRRPRRRRKQSATRISSXAVEHRNPRKPPGGANLFDEMLKESCPYHQGPVKHTLEECVMLRRYFHKAGPPAEGGKDQDNNKKEGDKEEEFPEVHGCFMIYGGQVANASARHRKQERREVCSVKVAAPVYLDWSDKPITFDQGDHPDCVPSLGRYPLVVDPVIGNARLTKVLMDGGSSLNIIYVETLGLLEINLSMIRAGAAPFHGIVPGKRVLPLWQLDLPIYFGTPSNFRKETLTFEVVGFQGTYHAVLGRPCYTKFMVVPNYTYLKLKTPGPNGVITVGSTYRHAYECNVECMEYAEALAESEALIADLECLSKEVPDAKRHTGDIEPAEAQPLRRFDEEKHRAIGEEVHKLMVAGFIKEVFHPEWLANPVLIKKKGGKWRMCVDYTGLNKACPKVPYPLPRIDQIVDSTAGCETLSFLDAYSGYHQIKMKESDQLATSFITPFGMYCYTTMPFGLRNAGATYQRCMNHVFGEHIGRTVEAYVDDIVVKTRRASDLLSNLETTFKCLRAKGVKLNPEKCVFGVPRGMLLGFIVSERGIEANPEKIAAITNMGPIKDLKGVQRVMGCLAALSRFISRLGEKGLPLYRLLRKTERFTWTPEAEEALGNLKALLTNAPILVPPAAGEALLIYVAATTQVVSVAIVVERREEGHALLIQRLVYFISEVLSKTEIRYPQIQKLL

SEQ ID NO: 300544 - protein, 69 aa, Zea mays
  Clone ID: MRT4577_37165C.1.pep
LALVFFFFFFFWGRGRFIFISPQWFWTKIWEGKQNLSFLTPKWGWEKREEEGAPPFQGTNYRPNKGRGF

SEQ ID NO: 300545 - protein, 51 aa, Zea mays
  Clone ID: MRT4577_37166C.1.pep
RAILLTGNCRPALQLLDVAFLGAPAPIALPRSAIASHDRTIGRLCAGGYER

SEQ ID NO: 300546 - protein, 1548 aa, Zea mays
  unsure (1)..(1548): unsure at all Xaa locations
  Clone ID: MRT4577_37167C.1.pep
MGSLQQPLQPRTVLRFGSLEFMSLDGSYDMILLPPPRDNDNGGRQPARRWRNRRRLPRVVEEQLSSSSRPLPHRRRGRRGNQGQAGGSASSAVERVDSAGTPTGGAPGIDFALETKTSAVFPRHANPEQADDASTLAKSLLDITLVPETTVQSVPDVTLSPLVDQEVPTDSHPTTFGFSLNPPSDPALAGALVEASPNPLGFRMRSLXGPADGRLDLRALRVRGRRRAQLLLGFLWTWQPQCHVGLHXPHVTTASPTVXDASVYTGRTRNTAPAAPGRLGNEHHHRDRRAHLDERVRRGYHPRRGGRYDSGEDWSPSPEPPDPQAFSRAIRRAPFSTRFRPPTTITKYSGETRPELWLADYRLVCQLGGTDDDNLIIRNLPLFLSDTARAWLEHLPPRQISNWDDLVQAFAVNFQGTYVRPGNSWDLRSCQQQPGESLRDYIRRFSKHRTELPNITNSDVIGAFLASTTCRDLVSKLGPKTPTRASELMDIATKFASGQEAVEAIFRKDKQPQGRPSEDAPEASTQRGAKKKGKKKSQAKHDAADADLVAAAEYKNPRKPPGGANLFDKMLKEPCPYHQGPVKHTLEECVMLRRHFQRAGPPAEGGRARDDDKKEDHQAGEFPEVRDCFMIYGGHAVNASARHRKQERREVCSVKVAAPVYLDWSDKPITFDQADHPDHVLSPRKYPLVVDPVVGDVRLTKVLMDGGSSLNIIYAETLGLLRVDLSSVRAGAAPFHGIIPGKRVQPLGRLDLPVCFGTPSNFRRETLTFEVVGFRGTYHVVLGRPCYAKFMAVPNYTYLKLKMPGPNGVITVGPTYKHAFECDVECVEYAEALAESEALIADLESLSKEVPDVKRHAGNFEPMETEAVLVDFLRANTDVFAWSPSDMPGIPRDVAEHSLDIRAGARPVKQPLRRFDEEKRTAIGEEIHKLMAAGFIKEVFHPEWLANPVLVRKKGGKWRMCVDYTSLNKACPKVPYPLPRIDQIVDSTAGMKESDQLATSFITPFGMYCYVTMPFGLRNAGATYQRCMNHVFGEHIGRTVKAYVDDIVVKTRKAFDLLFDLEVTFRCLKAKGVKLNPEKCVFGVPRGMLLGFIVSERGIEANPEKIAAITSMGPIKDLKGVQRVMGCLTALSRFISRLGERGLPLYCLLRKAECFAWTPEAEEALGNLKALLTKAPILVVSAAIVVERQEEGHALPVQRPVYFVSEVLSETKTRYPQVQKLLYAVILTRQKLRHYFESHPAIKSQVLADFVAEWVDTQLPTAPIQPELWTVFFDGSLMKTGAGAGLLFISPLGKHLRYVLRLHFLASNNVAEYEALVNGLRIAIELGVRRLDARGDSQLVIDQVMKNSHCRDPNMEAYCDEVRRLEDKFYGLELNHIARCYNETADELAKIASGRATVPPDVFSRDLHQPSIKIDDSPEPEAPSVQPEAPSVQPEVPSAQPGAPSARPEAPSVRPKVPSASEGEALRIEEERSGATPDQNWQTPYLXISAKESYPSTEPRLGGWHDAPSHSSCWAMRRSSTTAVPQASSSDASPSPKVRNSSKRYTRG

SEQ ID NO: 300547 - protein, 173 aa, Zea mays
  unsure (1)..(173): unsure at all Xaa locations
  Clone ID: MRT4577_37168C.1.pep
AALSRVGRKQKRQKGSEAVARFPAVAPFSXCLLLLLNLELFKDYLFMEXXFFASQYRLRPSEEKTEEDRXKXDDLRGTPMNVGSLEENNDETQAXXXXXXXPENNXGKXXXXXKDQXEXGXAKXKHNKXXQXXXXXQDEXXXXXXXXKXEKAXXGXXXDXXXXEXQKQEXKEA

SEQ ID NO: 300548 - protein, 114 aa, Zea mays
  Clone ID: MRT4577_37169C.1.pep
SPPSEHFTLQDNPPQPKSVQGGVLPPPYQGQFDHHLWLNLKINHLKINQAGASGLIKLPFRGVPYNVNPMFPKGSNPHFNTFKINVWVNQDFNNANGKDTGGKSSCRGSNNNIG

SEQ ID NO: 300549 - protein, 93 aa, Zea mays
  Clone ID: MRT4577_3716C.1.pep
TSAPRSKPTLLHCQYLQHPTTLHLFGCVQHPQLQHSHLPHPFFFKYFHTPQAKNPTPNHLLDITTTPFPINKGSSTFLPWSTPKKTNFLSPKF

SEQ ID NO: 300550 - protein, 118 aa, Zea mays
  unsure (1)..(118): unsure at all Xaa locations
  Clone ID: MRT4577_37170C.1.pep
AGGAGCRIGRCPRRRGGGEKNRPRPRPARCWRVRAPCSCGRACPAPPSPSAPAPARRAPRCWCCWSCRRAPPRRWRPPXRRGGGPGGGAGLGXXXPWRRRVTSXXXRPFLPSXVCLRL

SEQ ID NO: 300551 - protein, 101 aa, Zea mays
  unsure (1)..(101): unsure at all Xaa locations
  Clone ID: MRT4577_37171C.1.pep
KNRPASCPGTVALPEIRKSPKSTELLFLKLPLQGLXVQEIAQDFKRDLGFQSSAVAGLQKPPKAFLVGLFKNTNLWAIHAKRVPLMPKDIQLAPRIRGQRA

SEQ ID NO: 300552 - protein, 129 aa, Zea mays
  unsure (1)..(129): unsure at all Xaa locations
  Clone ID: MRT4577_37172C.1.pep
VAVDRGRAALGGKLTGACLRGPSALLAQRLSIRLAAGRQRGDWQTPGVTSLVAYVGTHLRSGVFFYTRHQETLLRNRLAAXQEEWDAPFSTAVLPARVVVPRKETHPLDLEIGGHSFNKGCSFPIPCYG

SEQ ID NO: 300553 - protein, 86 aa, Zea mays
  Clone ID: MRT4577_37173C.1.pep
MGASIFPLPPVFVCSVFPQKKKKKKKNPGFFKNGHVLLGVWVFPTPPFWGFPGLKKKKKKKKKKKKKKKKKKKKKKKKKTRGRRRY

SEQ ID NO: 300554 - protein, 129 aa, Zea mays
  Clone ID: MRT4577_37174C.1.pep
SKRDKQDLKSSLGEEANEELATKQTIPGARNQKTNARERKKQANRTSHNQKPIRGKKKTNTRPPITSKPQQPKPGVTKPQNRQPSARGTHDKPAWPDRRGQTGQQKPFTQRIPNQTKPGKKKEGGPNTA

SEQ ID NO: 300555 - protein, 64 aa, Zea mays
  Clone ID: MRT4577_37175C.1.pep
LVLLGALTFGLRLKRRKGKRAHDCCGEDYRDLPRTQHRAQSRPTSISCFVFILGQSVHCLFPVW

SEQ ID NO: 300556 - protein, 69 aa, Zea mays
  Clone ID: MRT4577_37176C.1.pep
DSPCKQWIEVRAHHLLHGCNYGCGGLWSGVPSDRCPKIKGTPLRRREGSINPTSHPGRTAACRICRRRC

SEQ ID NO: 300557 - protein, 124 aa, Zea mays
  unsure (1)..(124): unsure at all Xaa locations
  Clone ID: MRT4577_37177C.1.pep
QLHDNMVRLRLSTKATKHVPPPSYSGSGRENVTLRPGAASPSCSQGRPEKKXWLPPPRXPXSQHLLVGGWPWXLRLARFPRPVPGASVPACWGLVPPVVGGGAEAPDLGVSPLRTRGVRPPRGF

SEQ ID NO: 300558 - protein, 95 aa, Zea mays
  Clone ID: MRT4577_37178C.1.pep
TDRGIVRIIVLIHKLRSNHFSTVLALLEVTGTMSSNASRCSNKGSLVVDGRRWTCRPQVRRVRSRRLPLPWWFLMGSPNSLANSTGSDRIRDNPL

SEQ ID NO: 300559 - protein, 77 aa, Zea mays
  Clone ID: MRT4577_37179C.1.pep
MFVMSWEGGRGSPPLGMLGPLGGSPLNLGMGVMGSRLKKKKKKKKKKKKKKKKKKKKQKKKKKKKKKKLVPARAAAR

SEQ ID NO: 300560 - protein, 83 aa, Zea mays
  Clone ID: MRT4577_37180C.1.pep
SFSQQHPFEGYIKGTTLLQGFSTYLTSTVAGGGLNLLAYLQVFERTRLLMGGWVVRTRDSKGKESFLAPRSKRVATNPPVLGG

SEQ ID NO: 300561 - protein, 97 aa, Zea mays
  Clone ID: MRT4577_37181C.1.pep
HFLSGPIPSLVIDLFLNMGLLGRGCIRHAHFNLGFLFHRLFKGKRNLGFCKYQWVNFSRRGFRNQILCCRIFIRDIICIAEVKGCVKGAPHIKKNKQ

SEQ ID NO: 300562 - protein, 1661 aa, Zea mays
  unsure (1)..(1661): unsure at all Xaa locations
  Clone ID: MRT4577_37182C.1.pep
MRDFMTACDYCLSDCSDDGHNLDDEDYGPSRECFHVDLGGLDEGNQLGMPEDGDPPRPAPRVDILRELAVVPVPMGGQDTQLEQIREMQARLDEEAGQLVQLRQNIGQEWAGRATTREARHLAQDVQHRITDDARARLPPASSGVGXAILLRAMPEPSTTEGXRIQGELKNLLEDAAVRRAKSSASRXASVHTGRTQDTAPAAPGRLGNEHHRCNRRAHLDEKVRQGYHPRRGGHYDSGEDRSPSPEPPGLQAFSRAIRRAFFPTRFQTPTTITKYSGETRPELWLVEYRLACQLGGTDDDNLIICNLPVFLSDAARAWLEHLPPAQISNWDDLVKAFAGNFQDTYVRPGNSWDLRSYRQQPRESLRDYIRRFSKQCTELPNITDSDVIGAFLAGTTCRDLVSKVGRKTPTRASELMDIATKFASRQEAVEAIFRKDKQPQGRQPEGIPEASAQRGTKKKGKKKSQAKRDAADADLVAAAEHRNPRKSPGGANLFDKMLKESCPYHQGPVKHTLEECVMLRRYFHKAGPPAEGGRGHDNDKKEGHKAEEFTEVHDCFMIYGGQVANASARHRKQERREVCSVKVAAPVYLDWSDKPITFDQGDHPDLVPSPGKYPLVVDPVIGNVRLTEVLMDGGSSLNIIYAETLELLQIDLFAIRAGAGPFHGIILGKRVQPLEQLDLPVCFGTPSNFRKETLTFEVVGFRGTYHAVLGRPCYAKFMAVPNYTYLKLKMSGPNGVITVGSTYRHAYECDMECVEYAEALTESEALIADQESLSKEVPDAKRHTGNFEPAEAFKSIPLDPSNDASKQVFAWSPSDMPGIPRDVAEHSLDIRAGARPMKQPLRRFDEEKRRAIGEETHKLMAAGFIKEVFHLEWLANPVLVKKKGGKWRMCVDYTGLNKACPKVPYPLPRIDQIVDSTAGCETLSFLDAYSGYHQIRMKESDQLATSFITPFGMYCYITMPFGLRNAGATYQRCTNHVFGEHIGRTVEAYVDDIVVKTRKASDLLADLETTFKCLKARGVKLNPEKCVFGVPRGMLLGFIVSERGIEANLEKIAAITNMGPIKDLKGVQRIMGCLAALSRFISRLGERGLPLYRLLRKTERFTWTPEAEEALENLKALLTSAPILVPPAAGEALLIYVAATTQVVSVAIVVERREEGHALPIQRSVYFISELRHYFESHLVTVVSSFPLGEIVQCREASGRIAKWAVEIMGETISFAPRKAIKSQVLADFVAEWVDTQLPAALIQPELWTMFFDGSLMKTGAGAGLLFISPLGKHLRYVLRLHFPASNNVAEYEALVNGLHITIELGVRRFDARGDSQLVIDQVMKNSHCRDLKMEAYCDETDDTPEPEGASAQPEAPSAAEGEALRVEEERNGVPPNRNWQTPYLXISIEESYPSTEPKLGDXRGAPSRSSCXGDGKXSTTAAPQASSSDAYLSPKVRSYCKKYTRGLAVITQHLEPSLETPSDKXYWPTAVADATRIKAPGGFTHLMVAIDKFSKWIEAVAFFTNIIHRFGVPNSIITDNGTQFTGRKFLDFCEDHHIRVDWAAVAHPMTNGQVERANDMILQGLKPRIYNNLNKFGRRWMKELPSVVWSLRAMPSRAMGFTPFFLVYGAEAILPTDLEYGSPRTRAYDDRSNQTSREDSLDQLEEVRDMALLHSTRYQ

SEQ ID NO: 300563 - protein, 1802 aa, Zea mays
  unsure (1)..(1802): unsure at all Xaa locations
  Clone ID: MRT4577_37183C.1.pep
MAAISQPAGGGIDDVFPTWRKSYIRSVSDATSSPSVDQEVPSVSHPMPFGFSCDPPSDPALVDAFIKACPNPPGYHMWSTWDRLTAVSTYRPLGFEEDDESDSGWDFSGLDNPSAMRDFMTACDYCLSDCSDSSHSLGDEDCGPSHECFHVDLGGLDEGNHLGQLVQLQQNIGQEWAGRAPTGESRHLAQDDLHRITDDARARLPPASSGVSQNLAAVAILLRAMPEPSTTEGRRIQGELKNLLEDAAVRRVESSTSRRQGYPPEHRAATSRFRREASVHTGRTRNTAPAAPGRLDNEHHRRDRRAHLDEKVCRGYHPRRGGRYDSGEDQSPSPEPPGPRAFSRAIRRAPFPTRFRTPTTITKYSGESKPELWLADYRLACQLGGTDDDNLIIRNLPLFLSDAARAWLEHLSPAQISDWDDLVKAFTGNFQGTYRTELPNITDSDVIDAFLAGTTCHDLVSKLGRKTPTRASELMDIATKFASGQEAVEAILWKDKQPQGRQPEDVPEASAQHGTKKKGKKKSQAKRDTADADLVTAAEHRNPRKPPGGANLFDKMLKESCPYHQGPVRHTLEECVMLRRYFHKAGPPTEGGRAPDNDKKEDHKAEEFPEVHDCFMIYGGHVANASARHRKQERREVCSVKVAAPVYLDWSDKPITFDQRDHPDRVPSPGKYPLVVDPVIGNIRLTKVLMDGGSSLNIIYAETLGLLQIDLSSILAGAVPFHGIIPGKCVQPLGQLDLPVCFGTPSNFRKETLTFEVVGFRGTYHAVLGRPCYAKFMVVPNYTYLKLEMSGPNGVIIVGSTYRHAYECDVEYAEALAESVALIADLESLSKEAPDAKRHDGNFEPAETVFAWSPSDMPGIPRDVAEHSLDIRAGARPVKQPLRRFVEEKRRAIGEEIHKLMAAGFIKEVFHPEWLANPVLVRKKGGKWRMCVDYTGLNKACPKVPYPLPRIDQIVDSTAGCETLSFLDAYSGYHQIRMKESDQLATSFITPFGMYCYVTMPFGLRNAGATYQRCMNHVFGEHIGRTVEAYVDDIVVKTRKASDLLSDLETTFKCLKAKGVKLNPEKCVFGVPRGMLLGFVVSEQGIEANLEKIAAITNMGPIKDLKGVQRVMGYLAALSRFISRLGERGLPLYRLLRKTERFTWTPEVEEALGNLKALLTSVPILVPPAAGEALLIYVAATAQMVSATIVVERREEGHALPVQRPVYFISEVLSETRIRYPQIQKLLYAVILTRRKLRHYFESHPVTVVSSFPLGEIIQCQEASGRIAKWXEIMGETISFAPRKAIKSQVLADFVAEWVDTQLPAAPIQLELWTMFXDGSLXKTGAGAGLLFISPLGKNLRYVLRLHFPASNNVAEYEALVNGLRIAIELGXTPRRSWRLAACHRPSHEELPLQHPKMEAYCDEVRRLEDKFYGLELNHVTRRYNEIVDELAKXASGRTTVPPDVFSRDIHQPSIKTDDMPKPRPSPGKPXAQPEEASAQPEAPSAAEGEALRVEGERNEVTPNRNWQTPYLXISTEESYPSTKPKLGDWRGAPSCSSYWVMKRSSTTAAPQPFSNDAYPSLKDRSCCKRYTRGLAGCXSTQDRRTCPLRPCRQYPSPXFAVWGLDLVGPLQKAPGGFSHLLVAIDKFSKWIEVRPLTSIRSEQAVAFFTNIIHRFGVSNSIITDNGTQFTSKKFLDFCEDHHIRVDWAAVAHPMTNGQVERANDMILQGLKPRIYNDLNKFGKRWMKELPLVVWSLRTMPSRATGFSPFFLVCGAEAILPTDLEYGSPRTRAYDDQSNQTSREDSLDQLEEARDVALLHSA

SEQ ID NO: 300564 - protein, 59 aa, Zea mays
  Clone ID: MRT4577_37184C.1.pep
IIHPSNNQKMAYINPNPVTFITRKPGNLLSNQSRKSLPQKAPMAAQGPSPASSQFCNTP

SEQ ID NO: 300565 - protein, 684 aa, Zea mays
  unsure (1)..(684): unsure at all Xaa locations
  Clone ID: MRT4577_37185C.1.pep
MAEEQHPGLSRHLPRRRRRRRGNHGQAGSGTSLAIERVDDAGAPARDTSGVDLASETKTSVVSPQHANPKRTEDASTLAKDLLGVSLVPEITVQFVPDATSSPSVDQEDRLTVVSTYGPRGSEEDDEPDSGWDFSGLDNPSAMRDFMTACDYCLSNYSDGGHSLDDEDCGPSRECFHVDLGGLDEGNHLGMPEDSDPPRPAPRVDILRELAVVPVPAGGRVAQLEQIREMQARLDEEAGQLVQLRQNIGQEWAGRAPAGEARHLPQDVQHRIADDARARLPPASSGVGQNVATAAILLRAMPEPSTTEGRHIQGELKNLLEDAAVRRAESSTSRRQGNPPEHRAATSRFMREASVHTGRTWDATPAAPGRLSNKHRRHDRRAHLDEKVRRGYHSRRGGRYDNGEDQSPSAEPPGPQAFSRAIRRAPFPTRFRTPTTITKYLGETRPELWLVDYRLACQLGGTDDDNLIIRNLPLFLSDAARAWLEHLPPAQISNWDNLVKAFAGNFQGTYVRPGNSWDLRSCRQQPGESLPDYIRRFSKQRTELPNITDSDVIGAFLAGTTCRDLVSKLGRKTPTGASELMDIATKFASGQEAVEAIFWKDKQPQGRXQEDVPEASAKRGTKKKGKKSQAKRDAADVDLVAAAEQTFKVASSSQVKRGGIILRLTRSPSDYNWANWAYCVFANG

SEQ ID NO: 300566 - protein, 902 aa, Zea mays
  unsure (1)..(902): unsure at all Xaa locations
  Clone ID: MRT4577_37186C.1.pep
MGSLQQPFQPGTMLRFGSLEFMSLDGSYDMILLPPACDNDNSGRQSARRRRNRRRLPRVVEEQHSSSPRPLPHRRRRRRGNQGQAGGGTSSAVERVDGAGAPTVGTSSIDLASKTKTSAVSPQRANPEQTDDASTLAKDLLGVTLVPETMVQSVPDVTSSPPINQEVPTDSHLTPFGFSLDPPSDFALVDALVEASPNPLGYRMRSPWDRLTDVSTYGPSGSEEDDEPDFCWDFSGLRSPGAMRDFMTACDYCLSDCSDGSRSLGDEDCGPSRECFHVDLGGPNEGNHLGMPENGDLPRPVPRVDMLRELTVVPVLSRVHDPQLEQIRGVQARLDEGAGTLEPIRRDVGQEWVGQPPAGEMRHLPQGIQHRIADDVRMRPPPTSNGVGQNLAAAAMLLRAIPEPSTTEGWQIQGELKNLLEDATAXTAAPYDGRRSRPGSEPRLLSQSTRGRRDRSCGSRTTGWLANWVERTMTTSSSATSPCSSPTPLAPGXHLPPGQISNWDDLVQAFADNFQGTYVHPGNSWDLRSCRQQLGESLRDYIRRFSKQRTELPNITDSDVIGAFLASTTCRDLVSKLGRKTPTRASELMDIATKFASGQEAVEAIFRKDKQPQGRPPEDAPEASTQCGAKKKGKKKSQVKRDAADAELVAAAEHKNPRKPPGGANLFDKMLKESAGPPAEGGRARDDDKEDHQAGEFPEVRDFFMIYGGQAANASARHCKQERREVCSVKVAAPVYLDWSDKPITFDQVDHPDHVPSPGKYPLVVDPIIGDVRLTKVLMDGGSSLNIIYAETLGLLRVDLSSVRAGATPFHGIIPRKRVQPLGQLDLPVCFRTPSNFRRETLTFEVVGFRGTYHAVLGRPWYAKFMAVPNYTYLKLKMSGPNRVITIGPTYRHAFECDVECV

SEQ ID NO: 300567 - protein, 839 aa, Zea mays
  Clone ID: MRT4577_37187C.1.pep
MPFGLRNAGATYQRCMNHVFGEHIGRTVEAYVDDIVVKTRKASDLLSDLEVTFQYLKAKGVKLNPEKCVFGVPRGMLLGFIISKRGIEANPKKIAAITSMGPIKDLKGLPLYRLLRKAECFAWTPEAEEALGNLKALLTKAPILVPPADGEALLVYVAATTQVVSAAIVVERQEEGHALPVQRPVYFVSEVLSETKIRYPQVQKLLYAVILTRRKLRHYFESHPVTVVSSFPLGEIIQCREASGRIAKWAVEIMGETISFAPRKSIKSQVLADFVAEWVDTQLPTAPIQPELWTMFFDGSLMKTGAGAGLYFISPLRKHLRYVLRLHFPASNNVAEYEALVNGLRIAIELGVRRLDARGDSQLVIDQVMKNSHCRDPKMEAYCDEVRRLEDKFYGLELNHIARRYNETVDELAKIASGRTTVPPDVFSQDLHQPSVKINDTPEPEAPSVQPEASSVQPEVPSAPKGEALRVEEERSGATPDRDWQTPYLQYLRQGELPLDQAEARRVARRAKSFVLLGDEKELYHRSPSGILQRCISIAEAPRALIGNAFRQGFYWPTAVADATRIVRTCEGCQFYAKQTHLPAQALQTIPITWPFAVWGLDLVGPLQKVPGGYTHLLVAIDKFSKWIEVRPLNSIRSEQAVAFFTNIIHRFGVPNSIITDNGTQFTGRKFLDFCEDHHIRVDWAAVAHPMSNGQVERANGMILQGLKPRIYNDLNKFGKRWMKELPSVVWSLRTMPSRATGFTLFFLVYGAEAVLPADLEYGSLRTRAYDDQSNQASREDSLDQLEEARDRALLRSARYQQSLRRYHARGVRPRDLQVGDLVLRLRQDTRGRHKLTPP

SEQ ID NO: 300568 - protein, 1884 aa, Zea mays
  unsure (1)..(1884): unsure at all Xaa locations
  Clone ID: MRT4577_37188C.1.pep
MGSLQQPFQPGTMLRFGSLEFMSLDGSYDMILLPPPCDSDNGDRQPARRRRNQRRLPHMAEEQHPGLSRHLPRRRRRRRGNHGQAGGDTSSAVEQVDDAGAPAGDTSGFVLASETKTSAGSPQHANPKQMNDASTLAKDLLGVALVPETTVQSAPDATSSPPVDQEVPTDSHLVPFGFSIDPPSDLASVEAFIEACTNPPGYHMRSPWDRLTVVSTYGPSGSEEDDEPDFCWDFSGLGNHSAMRDFMTACDYCLSDCPDGSRSFGDEDCGPSRECFHVDLGGPDEGNHLGMPENGDPPRPAPRVDILRELVVVPVPAGGQDAQLEQIHEMQARLDEGAGTLEQFRRNIGQEWADQAPAGEARHLPQGIQHCIADDVRARPPPASSGVGQNLAAAAILLCAMPEPSTTEGQRIQGELKNLLEDAAVRRAESSASRSCRQQPGESLRDYIRRFSKQRTELPNVTDSDVIGAFLAGTTCRDLVSKLGRKTPTRASELMDIATKFASGQEAVEAIFRKDKQPQGRQLEDVPEASTQRGTRKKGKKKSQAKRDAADADLVAAAEYKNPRKPPGGANLFDKMFKESCPYHQGPVKHTLEECVMLRRHFHKAGPPAEGDRAHNNDKKEDHKAEEFPEVHDCFMIYGGPVANASARHRKQERREVCSVKVAASVYLDWSDKSIAFDLGDHPDRVPSPGKYPLVVDPVIGNVRLTKVLMDGGSSLNIIYAETLELLQIDLSSIRAGAAPFHGIIPGKRVQPLGQLDLPVCFGTPSNFRRETLTFEVVGFRGTYHVVLGRPCYAKFMAVPNYTYLKLKMPGPNGVITVGPTYRHAYECDVECVEYAEALAESEALIADLESLSKEAPDVKHHAGNFEPTETRRAIGXDPQADGRRVHQRGIPSRMACQPCACEKERREMVDVCRLHLSKQXCPKVPYPLPRIDQIVDSTDGCETLSFLDAYSGYHQIRMKESDQLATSFITPFGMYCYVTMPFGLRNAGATYQRCMNHVFGEHIGRTVEAYVDDIVVKTRKASDLLSNLETTFLCLKAKGVKLNPEKCVFGVPRGLPLYRLLRKTERFTWTSEAEEALGNLKALLTSAPILVPPAAGEALLIYVAATTQVVSAAIVVERREEGHALPVQRPVYFISEVLSETKIRYPQIQKLLYAVILTRRKLRHYFESHPIIQCREASGRIAKWAVEIMGETISFAPRKAIKSQVLADFVAEWVDTQLPAAPIQPEVWTMFFDGSLMKTGAGAGLLFISPLGKHLRYVMRLHFPASNNVAEYEALVNGLRIAIELGVQRLDARGDSQLVIDQVMKNSHCRDPKMEAYCDEVRRLEDKFYGLETDDTPEPEKVSALPEVPSAQPETPSAPEGEALRVEEERNGVPPNRDWQTPYLQYLHRGELPLDRAEARRLVRRAKSFVLLGDGKELYHRSPSGILQRCISIAEGQELLQEIHSGACGHHAAPRALVGNAFRQGFYWPTAVADATRIVRTYQGCQFYAKQTHLPAQALQTIPITWPFVVWGLELVGPLQKAPGGYTHLLDAIDKFSKWIEVRPLNNIRSEQAVAFFTNIIHRFGVPNSIITDNGTQFTGRKFLDFCEDHHIRVDWAAVAHPMTTXGLKPRIYNDLHKFGRRWMKELPLVVWSLRTTPSRATGFTPFFLVYGAEAILPTDLEYGSPRTRAYDDQSNRTNREDSLDQLEEARDVALLHSARYQQSLRRYHARGVRSRDLQVGDLVLRLRQDARGRHKLTPPWEGPFVIAKVLKPRTYKLANSQGEALTTTMNRHRHSRCHYKRNSGSAPAGARKVEGRDTWSAKIWLPSKGVTLLLKATLPTCVLSRRGLSLLQHAPRSPPTTRGLGPTRHASWPRTEGAKTATLCAQLPSGYKHSSTIARTSG

SEQ ID NO: 300569 - protein, 940 aa, Zea mays
  unsure (1)..(940): unsure at all Xaa locations
  Clone ID: MRT4577_37189C.1.pep
PARRRRNRRRLPRVVEEQPSSSSRLLPRRRRGRQGNQGQAGGSASSAVERVDAAGTPTGXAHRSPWDRLRDVSTYGPSGFEEDDEPNICWDFSGLGNPSAMRDFMTACDYCLSDCSDGSHSLGDEDCGPSRECFHVDLGGPSEGNHLGMPEDGDLPRPVPRVDIPRELAVVPVQAGGHDPQLEQIRGVQARLDEGAGALEPIRRDVGQAWAGQPPAGEIRHLPQGFQHRVADDVRVRPPPASSGVGQNLAAAAMLLRAMPEPSTTEGRRIQGELKNLLEGAAVRRAESSASRRQGYPSKPHVATSRFMREASVYTGRTRNTAPAAPGRLGNEHHHRDRRAHLDERVRRGYHPRRGGRYDSGEDRSPSPEPPGPQAFSRAIRRAPFPTRFRPPTTITKYSGETRPELWLADYRLACQLGGTDDDNLIIRNLPLFLSDTARAWLEHLPPGQISNWDDLVQAFADNFQGTYVRPGNSWDLRSCRQQPGESLWDYIRRFSKQRTELPNITDSDVIGAFLAGTTCRDLVSKLGRKTPTRASELMDIATKFASGQEAVEAIFRKDKQPQGRPSEDAPEASTQRDAKKKGKKKSQAKRDATDADLVAAAEYKNPRKPPGGANLFDKMLKESCPYHQGPVKHTLEECVMLRRHFHRVGPPAEGGRAHDGDKKEDHQAGEFPEVCDCFMIYGGQAANASARHRKQERREVYSVKVAAPVYLDWSDKPITFDQADHPDHVPSPEKYPLVVDPVVGDVRLTKVLMDGGSSLNIIYAETLGLLRVDLSSVRAGVAPFHGIIPGKRVQPLGQLDLPVCFGTPSNFRRETLTFEVVGFRGTYHAVLGRPCYAKFMAIPNYTYLKLKMPSPNGVITVGPTYKHAFECDVECVEYAEALAESEALIADLESLSKEVPDVKRHASNFEPAETVKAVPLDPSSDTSKQIWIGSGLDPK

SEQ ID NO: 300570 - protein, 64 aa, Zea mays
  unsure (1)..(64): unsure at all Xaa locations
  Clone ID: MRT4577_3718C.1.pep
SGPGKPAQFLAGEAEEVNAFALGXYLSTSSGVSGADEVEPLHDGVEEAEKKMEEEGVSVRKMEA

SEQ ID NO: 300571 - protein, 1937 aa, Zea mays
  unsure (1)..(1937): unsure at all Xaa locations
  Clone ID: MRT4577_37190C.1.pep
MAADSPPAGGGIDDVFPAWRKQGNQGQAGGSASSAVERVDGPSAPTGGASGIDLAFETKASAVSPRHANSEQTDDADTLAKGLLDVTLVPETTVQSVPDVTSSPPIDQEVPTVSHPTPFRFSLDPPSGFALADALVEVSPNPLGFRMRSPWDRLTNVSTYGPSGSEEDDEPSFCWYFSGLGNPSAMRDFMTACDYCLSDCSDGSHSLGDEDCGPSRECFHVDLGGPSEGNHLGMPEDGDLPRPVPRVDIPRELDVVPVQAGGHDPQLEQIRGVQARLDEGAGALEPIRRDVGQEWAGQPPAGEIRHLPQGFQHRIVDDVRVRPPPASSGVGQNLAAAAMLLRAMPEPSTTKGRRIQGELKNLLEGAAVRQAESSASRRQGYPSEPHAATSRFMREASVYTGRTRNTAPAAPGRLGNEHHHRDRRAHLDERVRRGYHPRRGGRYDSGEDRCPSPEPPSSQAFSRAIRRAPFPTRFRPPTTITKYSGETRPELWLADYCLACQLGGTDDDNLIIRNLPMFLSDTARAWLEHLPLGQISNWDDLVQAFAGNFQATYVRPRNSWDLRSCQQQPGESLRDYIRRFSRQRTELPNITDSDVIDAFLAGTTCRDLVSKLGRKTSTRASELMDIATKFASGQEAVEAIFRKDKQPQGRPSEDAPEASTQRGAKKKGKKKSQAKRAAADADLVAAAEYKNPRKPPGGANLFDKMLKESCPYHQGPVKHTLEECVMLRRHFHRVGPPAEGGRARDDDKKEDHQAGEFPEVRDCFMIYGGQAANASARHRKQERREVCSVKVAAPVYLDWSDKPITFDQADHPDHVPSPGKYPLVVDPIIGDVRLTKILMDGGSSLNIIYAETLGLLRVDLSSVRXAGVAPFHGIIPGKRVQPLGQLDLPVCFGTPSNFRRETLTFEVVGFRGTYHAVLGRPCYAKFMVVPNYTYLKLKMSGPNGVITVGPTYKHAFECDVECVEYAEALAESEALIADLENLSKEVPDVKRHAGNFEPAETVKAVPLDPSGDASKQIRIGYHQIRMKESDQLATSFITPFSMYCYVTMPFGLRNAGATYQRCMNHVFGEHIGRTVEACVDDIVVKTRKASDLLTDLEVTFRCLKAKGVKLNPEKCVFGVPRGMLLGFIVSERGIEANPEKIAAITSMGPIKDLKGIQRVMGCLAALSRFISRLSERGLPLYRLLRKAECFARTPEAEEALGNLKALLTKAPILVPPADGEALLVYVAATTQVVSAAIVVERQEEGHALPVQRPVYFVSEVLSETKIRYPQVQKLLYAVILTRRKLRHYFESHLVTVVSSFPLGENIQCREASGRIAKWAVEIMGETISFAPRKAIKSQELADFIAEWVDTQMPTAPIQPGLWTMFFDGSLMKTGASAGLLFISPLGKHLRYVLRLHFPASNNVAEYEALVNGLRIAIELGVRRLDARGDSQLVIDQVMKNSHCHDPKMEAYCDEVRRLEDKFYGLELKHIARRYNETADELAKIASRRTTVPPDVFSQDLHQPSVKINDTPEPEAPSVQPEVPSAQPETPSARPEAPSVQPEVPSAQPEVPSASEGEALHVEEERNGVTPDQNWQTPYLQYLRQGELPLDQAEARRVARRAKSFVLLGDEKELYHRSPSGILQRCISIDEGQELLQEIHSGACGHHAAPRALVGNAFWQGFYWPTAKAPRGYTHLLVAIDKFSKWIEVRPLNSIRSEQAVAFFTNIIHRFGVPNSIITDNGTQFTGRKFLDFCEDHHIGVDWAAVAHPMTNGQVERANGMILQGLKPRIYNDLNKFGKRWMKELPSVVWSLRTTSSRATGFTPFFLVYGAEVVLPTDLEYGSPRTRAYHDQSNQASREDSLDQLEEARDKALLHSARYQQSLRRYHARGVRPRDLQVGDLVLQLRQDARGRHKLTPPWEGPFVIAKVLKPGTYKLANSQGEVYGNAWNIKQLRRFYP

SEQ ID NO: 300572 - protein, 71 aa, Zea mays
  Clone ID: MRT4577_37191C.1.pep
MGPPKSYSLAAFLQTGHWKNPGFTKFNRVTQNPPFHYWHIKKKARPYCPLQFSHTLNGNWAPPLFGSLNAG

SEQ ID NO: 300573 - protein, 1032 aa, Zea mays
  unsure (1)..(1032): unsure at all Xaa locations
  Clone ID: MRT4577_37193C.1.pep
MGSLQQPFQPGTVLRFGSLEFMSLDGSYDMILLPPPCDSDNGGRQPARRRRNRRRLPCVVEEQHSSSPRPLPRRRRRRRGNQGQAGGDTSSAVERVDGAGAPTGGTTGIDLLFETKTSAVSPQHANSKQTDDASTLAKGLLGVTLVPETTVQSVPDVTSSPPVDQEVPTDSHLTPFGFSLDPPSDFALADALVEASPNPLGFRMRSPWDWLTDVSTYGPSGSEEDDVSDFCWDFSGLGNPSAMRDFMTACDYCLSDCSDGSRSLGDEDCGPSRECFHVDLGGPSEGNHLGMPENGDLPRPVPRVDILRELAVVPVQVGGHDPQLEQIRGVQARLDEGAGTLEPIRRDIEQEWAGQPPAGEVRHLPQGIQHRIADDVRVRPPPASSGVGQNLAAAVMLLHAMPEPSTTEGRRIQGELKNLLEGAAVRQAESSASRRQGYPSEHRAATSRFMREASVHTGRTRDTAPVASGRLDNEHHHRNRRAHLGERVRRGYHPRHGGRYDSGEDRSHSPEPPGPQAFSRAIRRAPFPTRFRTPTTITKYSGETRPELWLADYRLACQLGGTDDDNLIIRNLPLFLSDTARACCRQQSGESLRDYIRRFSKQHTELPNITDSDVIGAFLAGTTCRDLVSKLGRKTPTRASELMDIATKFASGQEAVEAIFRKDKQPQGRPPEDAPEASTQRGAKKKGKKKSQAKHAAADADLVAAAEHKNPRKPPGGANLFDKMLKELCPYHQGPVKHTLEECAMLRRHFHRVGPPAEGGRACDDDKKEDHQAGEFPEVRDCFVIYGGQAANTSARHRKQERRETGSDKPITFDQADHPDHVPSPGKYPLVVDPIIGDVRLTKVLMDGGSSLNIIYAETLGLLRVDLSSVRAGGAPFHGIIPGKRVQPLRQLDLPICFGTPSNFRRETLTFEVVGFRGTYHAVLGRPCYAKFMTVPNYTYLKLKMPGPNGVITVGPTYRHAFECDVECVEYAEALAEFEALIVDLESLSKEVPDVKRHAGNFEPAETVKSXPLDLSSDASKHIRIGSELDPE

SEQ ID NO: 300574 - protein, 1233 aa, Zea mays
  unsure (1)..(1233): unsure at all Xaa locations
  Clone ID: MRT4577_37194C.1.pep
MASIRAPIAYGGFALGFWGDPHLDVHDKLGHDIQGSLHLVKILNSRFEGGNPGVDTLSNTWGVTVSKLGRKTPTRASELMDITTKFATGQEAVKAIFQKDKQPQGRQPEDVPEGPVKHTLEECVMLRRYFHKAGPPAEGGRAHNNDKKEDHKAEEFHEVHDCFMIYGGQVANASARHRKQERREVCSVKVAAPVYLDWSDKPITFDQGDHPDRVPSPGKYPLVVDPVIGNVRLTKVLMDGGSSLNTIYAETLGLLQIDLSSIRAGAAPFHGIIPGKRVQPLGQLDLPVCFGTPSNFRKETLTFKVVGFRGTYHAVLGRPCYAKFMAVPNYTYLKLKMSSPNGVITVGSTYRHAYECDVECMEYAEALAESEALIADLESLSKEVPDAKRHAGNFEPAEAEAVLVDFLRANAEVFAWSPSDMPGIPRDVAEHSLDIRAGARPVKQPLRRFDEEKRRAIGEEIHKLIAAGFIKEVFHPKWLANLVLVRKKGGKWRMCVDYTGLNKACPKVPYPLPRIDQIVDSTAWNAGATYQRCMNHVFGEHIGRTVEAYVDDIVVKTRKASDLLSDLETTFKCLKAKGVKLNPEKCVFGVPRGMLLGFIVSERGIEANPEKIAAITNMGPIKDLKGVQRVMGCFAALSRFISRLCERGLPLYRLLRKTERFTWTPEAEEAFENLKALLTSVPILVPXAAGEALLIYVAATTQVLPAAPIQPELWTMFXDGSLMKTGAGASLLFISPLGKHLRYVLRLHFPASNNVAEYEALVNGLRIAIELWVQRLDARGDSQLVIDQVMKNSHYRDPKMEAYCDETTVPPDVFSRDLHQPSVKTDDMLEPEKVSALPEAPSAQPKAPSAPEGEALRVEEERNGVTPNRNWQTPYLQYLHRAPRASSSDAYPSPKVRSYYKKYTRGLAVTTQHLGPSLETPSDRGFYWPTAVTDATRIVRTCQGCQFYTRQMHLPAQALQTIPITWPFAVWGLDLVDPLQKAPGGYTHLLVAIDKFSKWIEAVAFFTNIIHRFGVPNSIITDNDTQFTGRKFLDFCEDHHIRVDWAAVAHPMTNGQXWMKELPSVVWSLRTTPSRATGFTPFFLVYGADAILPTDLEYXSPRTRAYDDRSNRTNREDSLDQLEEARDMALLHSARYQQSLRRYHARGVRSQDLQVGDLVLWLRQDARGRHKLTPPWEGPFIIAKILKLGTYKLANSQGEVYXSTLGTSDSYVASSLKMFSSRSYTSFTYTNKV

SEQ ID NO: 300575 - protein, 50 aa, Zea mays
  Clone ID: MRT4577_37195C.1.pep
LVCTRRKLVPPHTPKLSCSLLDCCPCWRTPAPPFRISLTPCSSLASKLTL

SEQ ID NO: 300576 - protein, 58 aa, Zea mays
  Clone ID: MRT4577_37196C.1.pep
FLRVLNIADLKNACKNLFRRFFLVLPMGVGTKPRKRGGPENHVSFNCLFLARRTTPKP

SEQ ID NO: 300577 - protein, 126 aa, Zea mays
  unsure (1)..(126): unsure at all Xaa locations
  Clone ID: MRT4577_37197C.1.pep
KPKEGKRLPAAXSPXAGEGKKGKKKSEKSVETYKIYVFYVLXLVHPDIRISSNAMSIMNFCINEHLSRYLSAEGAKFARYNXKPIITYREMQTSGRLVLPGKLAKLAXSEGTKAVTKFTSSHIGCL

SEQ ID NO: 300578 - protein, 299 aa, Zea mays
  Clone ID: MRT4577_37198C.1.pep
RGRLSRGQYRNPKEFAEDVRLTFHNAMTYNPKGQDVHFMAEQLSGIFEAQWPEIEAEVNYLASCPPLPKKFPPPPIDLHFLERSDSMRHHMALDTNSRPISHTPTYTRTPSMKKPRAKDPNKRDMTIDEKRKLSENLQNLPPEKLDAVVQVIKNKNLSVMQHDDEIEVEIDSMDAETLWELDRFVANYKKNLSKQKRKAERAMLARQDAELRAQRLIQQPQPTPVPQEPVGEKSLKQVAKDSLAGEQLPTSASEKNDENRQNASGSSNSSSSSSDSGSSSSDSDSDSSSSDGSDAANSS

SEQ ID NO: 300579 - protein, 93 aa, Zea mays
  Clone ID: MRT4577_37199C.1.pep
DFETDVVFLVPTEIALAQHRANAKSAKTYAYLFSHPSRMRVYPKWVGADHADDIQYVFGKPVATPTGYRPQDRTVSKAMIAYWTNFAKTGDPN

SEQ ID NO: 300580 - protein, 105 aa, Zea mays
  Clone ID: MRT4577_3719C.1.pep
VLCLADLAPGRHLDTSWTRALPLQHHGLGLRDRLAAGRASEGVTAGMRVPEHSVRCNNVWLRRFGSHKTWTNGVSVAARSGVQLVNYICCAWARRTTSSRGPRSR

SEQ ID NO: 300581 - protein, 93 aa, Zea mays
  Clone ID: MRT4577_371C.1.pep
KCISYTMGGGGKIPYPKEVWSPAGGWYAQPGYWKANTAIMGAFVIGVAAVAFSISADREYRDRMPEPGRLLPSRYWSLQIREHEKQQAAQNSS

SEQ ID NO: 300582 - protein, 61 aa, Zea mays
  Clone ID: MRT4577_37200C.1.pep
TSIVTWRVCVQKLTYCCRKCRGLKRPAVARIERFPLGGVLRSPRHGIAGGQPHGFKLKRTG

SEQ ID NO: 300583 - protein, 375 aa, Zea mays
  unsure (1)..(375): unsure at all Xaa locations
  Clone ID: MRT4577_37201C.1.pep
FAAGLERPKHHKKKHRSLESRGADFDAERRLYSHAFKKSSSLLSRLMKHKFGWVFNKPVDPVTLGLHDIKHLDLGTITXLSRGQYRNPKEFAEDVRLTFHNAMTYNPKGQDVHFMAEQLSGIFEAQWPEIEAEVNYLASCPPLPKKFPPPPIDLHFLERSDSMRHHMALDTNSRPISHTPTYTRTPSMKKPRAKDPNKRDMTIDEKRKLSENLQNLPPVKLDAVVQVIKNKNLSVKQHDDEIEVEIDSMDAETLWELDRFVSNYKKNLSKQKRKAERAMLARQDAELRAQHPIQQPQPTPVPQEPFGEKSPKQVVKDSLEGEQLPASAPEQNGENRQNASSSSNSSSSSSGSGSSSSGSDSDSSSSDGSDAGNSS

SEQ ID NO: 300584 - protein, 68 aa, Zea mays
  Clone ID: MRT4577_37202C.1.pep
IETMTTIQILLAIRFGNEENVTTEIFIIPLLSPKSYLKNMTSNSVLLIIYYCLLPAFKGLHILIKSNI

SEQ ID NO: 300585 - protein, 122 aa, Zea mays
  unsure (1)..(122): unsure at all Xaa locations
  Clone ID: MRT4577_37204C.1.pep
HGSIDKXAIHCNGSGXLAALSVLERGWKPDMTLEEGKQLVRNAIAAGVFNDXGSGNNIDLCVITKDGADYLRNYEIAVKRGEKEKKYRFKRGSAAIISRFVIPIKIENTIARQLEAEPMDTQ

SEQ ID NO: 300586 - protein, 59 aa, Zea mays
  Clone ID: MRT4577_37205C.1.pep
GPGFQNCLGCCLVAFPVRRAFFLCPLWVTLCCDRSPSVRVGFGPPVIFKNSPRKSELTS

SEQ ID NO: 300587 - protein, 71 aa, Zea mays
  Clone ID: MRT4577_37206C.1.pep
NKSEYMETVCRCNGSGPAGNFGEEQLCSVRQPCLFLLEGQKSPPRQQNKRGEQKISWMSCLETNSELPDGA

SEQ ID NO: 300588 - protein, 68 aa, Zea mays
  Clone ID: MRT4577_37207C.1.pep
SFSFSRRPPACSLRLYQVPTSTPAPATADQPTSSQTISTRLLLSPATAAARQALAVRPIAYKAEAKIQ

SEQ ID NO: 300589 - protein, 359 aa, Zea mays
  Clone ID: MRT4577_37208C.1.pep
MDDAANPTPPPSTSAASAAAAAAQHQQLQRQLFLMQQAQSHPQQLSQQAMSRFPSNIDAHLRPLGPLRFQQPQPQPQPSHSQGPSQSPSQATQQASPQQQQQQAAAAAAAAQAQAQAQAQAARVRSPEMEMALQDAMRVCNPDVKTPFQSIEDAVNRLLPYHVVADYEAEEDDRILDSDTTGQIPSRLQQWDHNILVKIAEFTTTFDKQVLAYNIMTKKRAIGEFRSEERLMLEQALLQEEKQAMLGLRAEMESREKAGREAAEVKMRLAMEHARAEAQAHSEMMNHGPIRASAVASQGEDGPSHDMVQEHGEDGWGNSQRDDEDPSEDFLNDENEPENGNSDGQEDWRRSGEFDLNSR

SEQ ID NO: 300590 - protein, 82 aa, Zea mays
  unsure (1)..(82): unsure at all Xaa locations
  Clone ID: MRT4577_37209C.1.pep
MYADFSARVXYMVSRSVSYGFSANLRASCGAVGGKYTYQNGASCGMPGAHAWSNLLWSLRWGGIHLTEAAYRKIAAGWVSGP

SEQ ID NO: 300591 - protein, 50 aa, Zea mays
  Clone ID: MRT4577_3720C.1.pep
WDNAKKYMHRLRRLQKHDNERSTDILTFNKERINHNMQERGMDKDFVKGI

SEQ ID NO: 300592 - protein, 59 aa, Zea mays
  Clone ID: MRT4577_37210C.1.pep
MEKALTKLGSFTISRKAKQELSAIGDDISRFSSTVEEKAKWVFEKLKGTVVLFHCILWL

SEQ ID NO: 300593 - protein, 49 aa, Zea mays
  Clone ID: MRT4577_37211C.1.pep
AQGSTFGVLLIFDGTIISPADLVFPGVPGIYNQEQTYSLKKEVDAEHAK

SEQ ID NO: 300594 - protein, 90 aa, Zea mays
  unsure (1)..(90): unsure at all Xaa locations
  Clone ID: MRT4577_37212C.1.pep
MGKDDVIESGAGGGEFAAKDYTDAPPGPLIDADELGSXWSCSAPRAARSSHTLLGRGGAVAALVPGHHQTDSAAAERVRTLHLDERVLLP

SEQ ID NO: 300595 - protein, 967 aa, Zea mays
  unsure (1)..(967): unsure at all Xaa locations
  Clone ID: MRT4577_37213C.1.pep
GGRQPARRRRNRRRLPHVXRRRGNQGQAGGGTSSAVERIDGADAPTGDTSGVDLASETKTSVVSLQHANSKRTNDANTLAKDLLGVTLVPETTVQSAPDATSSPPVNQEVPTDSHLVPFGFSLDPPSDFASVEAFIEACPNPPGYGVRSPWDRLTAVSTYGPSGSGKDDEPDFCWDFSGLGNPSAMRDFMAACDYCLSDCSDGSRSFGDEDCGPSRECFHVDLGGPDEGNHLGIPENGDPPRPAPRVDILRELAVVPVPAGGQDAQLEQIREMQARLNEGAGTLEPFRRDIGQEWAGQAPAGEARHLPQGIQHRIADDVRARPPPASSGVGQNLAAAAILLRAMPEPSTTEGRRIQGELKNLLEDVAVRRAESSASRRQGYPSEHRAATSRFMREASVHTGRMRNTAPAAPGRLGNEHHHRNRRTHLDERVHRGYHPRHGGRYDSGEDQSPSPEPXRAIRRPSFPTRFXTPTTITKXSNWXDLVQAFAGNFQGTYVRPGNSWDLQSCRQQPGESLRDYIRRFSKQRTELPNVTDSDVIGAFLAGTTCRDLVSKLGRKTPTRASELMDIATKFASGQEAVEAIFRKDKQPQGRQPKDVPEASTQRGTKKKGKKKSQAKRDAADADLVAAAEYKNPRKPLGGANLFDKMLKESCSYHQGPVKHTLEECAMLRRHFHKARPPAEGGRAHNNDKKEDHEAGEFPEVHDCFMIYGGQMANASARHRKQERREVCSIKVAAPVYLDWSDKPITFDQGDHPDCVPSPGKYPLVVDPVIGNVRLTKVLMDGGNNLNIIYAETLGLLQIDLSSVWAGAAPFHGIIPGKRVQPLGQIDLPVCFGTPSNFRRETLTFEVVGFRGTYHAVLGRPCYAKFMAVPNYTYLKLKMPGPNGVITVGPTYRHAYECDMECVEYAKALAESEALIVDLESLSKEAPDMKRHAGNFEPAETVKSVPLDPSNDASKQIRIGSELDPK

SEQ ID NO: 300596 - protein, 1528 aa, Zea mays
  Clone ID: MRT4577_37214C.1.pep
MGSLQQPLQPGTVLRFGSLEFMSLDGSYDMVLLPPQRGSNRDGRQLARRRWTRRRLPPVAEEQYPGLSRHPPRRRRRRRGNRGQAGGGTSSTVERVDDAGTPAGDMSGVVLAPGTTTDVVSPQRANPKRTDDDSTLAKGLLGVSLVPEITVQSVPDATSSPSIGQEVPSVFHPVSFRFNFDPPSDPASVSAFVKAYPNLLWYHMWSTWDRLMAVSTYGPSGSKEEDEPDSGWDFSGLSNPSAMRDFMTACDYCLSDCSDDGHSLDDEGCGPSRECFHVDLGGHDEGNHLGMLEDDDPLGPVPRVDILRELDVVPVPAGGQDTQLEQIREMQAKLDEEAGQLVHLRQNIEQEWAGRALAGEACHRAQDVQRRIVDDARARLPPTSSGVGQNLAAAAILLRAMPEPSTTEGRRIQGELKNLLEDAAVRRAESSASRRQGCPPEHRATTSRLMREASVHTGRTRDTTPAAPDRLGNEHHRRDRRACLDEKVRRGYHPRCGGRYDNEEDRSPSPEPPGESLREYIRRFSKQRTELPNITDSDVIGAFLAGTTCLDLVSKLGRKTPTKASELMDIATKFTSGQEAVEAIFRKDKQPQGRQQEDVPEASAQRGTKKKAKKKAQPKRDATDADLVTAVEHRNPRKPPGGANLFDKMLKESCPYHQGPVKHTLEECVMLRCYFHKAGPLAEDGKGQDNNKKEGDKEEGFPEVHGCFMIYGGQVANASAQHCKQERREVCSVNVAAPVYLDWFDKPITFNQGDHPDCVPSPGKYPLVVDPVIGNARLTKVLMDRGSSLNIIYAETLGLLGIDLSTIRAGAAPFHGIVPGKHILPLGQLDLPVCFGTPSNFRKETLTFEVVGFRETYHAVLGRPCYAKFMVVPNYTYLKLKMSGPNGVITVGSTYRHAYECDMECVEYVEALAESEALIADLECLSKEVPDAKRHAGNFEPAEALANLVLVKKKGGKWRMCVDYTGLNKACPKVPYPLPRIDQIVDSTAGCETLSFLDAYPGYHQIKMKESDQLATSFITTFGMYCYTTMSFGLRNAGATYQRCMNHVFGEHIGRTVKAYVDEIVVKTRKASDLLSDLEMTFKCLRAKCVKLNPEKCVFGVPRGMLLGFIVSERGIEANPEKIAAITNMGPIKDLKGVQRVMGCLAALSRFISCLGEKGLPLYHLLRKAERFTWTPEAEEALGNLNALLTNAPILAIKSQVLADFLAEWVDTQLPTAPIQPELWTMYFDGSLMKTGAGAGLLFISPLGKHLRYVLRLHFPASNNVAEYEALVNGLRIAVELGVRRLDARGDSQLVFDQVMKNSHCRDQKMEAYYDKVRRLEDKFYGLELNHIARRYNETADELAKIASGRTTVPPDVFSRDIHQPSVKTDDTPEPKEISAQHEVSSAAEGEALRIEGERNGVTPNPNWQTSYLEYLLRGELPLDKAEARRLARRAKSLVLLGDEKELYHRSTSGILQRCISVAQGQELLQEIHSGACGHHAAPRALVGNAFRQGFYWPTVVADATRIVRSYQGCQFYARQTHLPAQAL

SEQ ID NO: 300597 - protein, 52 aa, Zea mays
  Clone ID: MRT4577_37215C.1.pep
LLYFSCSCDGNARFVPGLAGSAGRQAVRSSVFVGHNSDSALRGRCRCVRAVP

SEQ ID NO: 300598 - protein, 917 aa, Zea mays
  unsure (1)..(917): unsure at all Xaa locations
  Clone ID: MRT4577_37216C.1.pep
MSGVVLAPETTTGVASPQRANPERTDDASTLAKDLLGVSLVPKITAQSVPDATSPPSIDQEVPSVFHPIPFRFSFDPPSDPASVSASARAYPDLPGYHMWSSWDRLTAVSTSRLVGSEEDDDSDFGWDFSRLSNPSAMRDFMSACDYCLSGCSDDGHSLGDEGCDPSRECVHIDQGDHGEDNHLGMPQDDNTAVPASRVDIPRELAVVPVPAGDQDTQLEQFREMQAKLDEEAGRLVQLRQNIEQEWAGRALAGGAPHRARDVQRRIVDDARARLPPASSGVGRNLAAAAILLRAMPEPSTIEGWHNQGELKNLLEDAAVRRAESSASRRQGXPPEHRATTSRLMREASVHTGRTXRDGTPAAPDRLGNEQHHRDRRARLDERVRRGYHPRRGGRYNSEEDRSPSPEPPXLGGTDDDNLIIRNLPLFLSDAARAWLEHLPPAQISNWDDLVKAFARNFQGTYVHPRNSWDLLSCRQQPGESLREYIRRFSKQRTELPNITDSDVIGAFLAGTTCRDLVSKLGCKTPTKASELMDIATKFASGQEAVEAIFRKDKQPQGRQQEDVLEASAQRGTKKKAKKKSQAKRDAADADLVAAAEHRNPRKPLGGANLFDKMLKESCPYHQCPVKHTLEECVMLRRYFHKAGPPAEGGKDQDNNEKEGDKEEEFPEVHSCFMIYGGQVANASARHCKQERREPITFDLGDHPDCVPSLGRYPLVVDPIIGNARLTKVLMDGGSSLNIIYAETLGLLEIDLSTIRAGAAPFHGIVPRKRVLPLGQLDLPVCFGTPSNFRRETLTFEVVGFQGTYHAVLGRPCYAKFMVVPNYTYLKLKMPGPNRVITVGSTYRHAYECDVECVEYTEALAESEALIADLECLSKEVPDAKRHAGNFEPAEAVKFVALDPSNDACKQVRIGSELDPK

SEQ ID NO: 300599 - protein, 64 aa, Zea mays
  Clone ID: MRT4577_37217C.1.pep
KNLEDCSLIPLLKLTKSPSIHMDKKLCYLTLVCTDALAHDHSLIASVSTLARNQSLYSTWIVRD

SEQ ID NO: 300600 - protein, 1201 aa, Zea mays
  unsure (1)..(1201): unsure at all Xaa locations
  Clone ID: MRT4577_37218C.1.pep
MPEPSTTEGRRIQGELKNLLEDAAVRRAESSASRRQGHPSEHRAATSRFMREASVQTGRTRNTAPAAPGRLGNKHHHRDRRAHLDDKAHRGYHPRHGGRYDSGEDRSPSPEPPGPQAFSRAIRRASFPTRFRTPTTITKYSGETRPELWLADYRLACHLGGTDDDNLIIRNLPLFLSDTARAWLEHLPPGQISNWDDLVQAFAGNFQGTYVRPGNSWDLQSCRQQPGESLRDYIRRFSKQRTELPNVTNSDVIGAFLAGTTCRDLVSKLGCKTPTRASELMDIATKFASGQEAVEAIFRKDKQPQGRQPEDVPEASTQRGPKKKGKKKSQAKRDAADAGPPAEGGRARDDDKKEDHQAGEFPEVRDCFMIYGGQVANASARHHKQERWEVCSVKVVAPVYLDWSDKPITFDQGDHPDHVPSPGKYPLVVDPVIDNVRLTKVPMDGGNSLNIIYAETLGLLRIDLSSVRAGAAPFHGIIPGKRVQPLGQLDLPVCFGTPSNFRRETLTFEVVGFRGTYHTVLGRPCYAKFMAVPNYTYLKLKMSGPNGVITVGPTYRHAYECDVECVEYAEALAESEALIADLESLSKEAPDVKRHAGNFEPAETIRMKESDQLATSFITPFGMYYYVTMPFGLRNVGATYQRCMNHVFGEHIGRTVEAYVDDIVVKTRKASDLLSDLETTFRCLKAKGVKLNPEKCVFGVPRGMLLGFIVSERGIEANLEKIAAITNMGPIKDLKGVQRVTGCLAALSRFISRLGERGLPLYRLLRKAECFTWTPEAEEALGNLKALLTNAPILVPPAAGEALLIYVSATTQVVSAAIVVERREEGHALPVQRPVYFISEVLSETKIRYPQIQKLLYAVILTRRKLRHYFESHPIIQCREASGRIAKWAVEIMGETISFAPRKAIKSQVLADFVAEWVDTQLPTVPIQPELWTMFFDGSLMKTGAGAGLLFISPLGKHLRYVLRLHFLASNNVAEYEALVNGLRIAIELGVRRLDARGDSQLVIDQVMKNSHCRDPKMEAYCDEVRRLEDKFYGLELNYIARRYNETADELAKIASGRTTVPXDVFSRDLHQPSVKTDDTPEPEKASAQPRHPXGPARDTLGSARGTLGSARDLVGPLQKAPGGYTHLLVAIDKFSKWIEVRPLNSIRSEQAMVFFTNIIHRFGVPNSIITDNGTQFTGRXSWTSARITTSGWTGPPWLTP

SEQ ID NO: 300601 - protein, 234 aa, Zea mays
  unsure (1)..(234): unsure at all Xaa locations
  Clone ID: MRT4577_37219C.1.pep
ILCSSSWFLRDTTTTTTMKASAPFSTSQPLSCRTHGGRPSSMSMSAGARTATSVGTSSKRPWFGDLLGRLSSTMDGASRALKDAPQRFLDALVDATFRFTDQALNSAESNFAPVDETGEAIEIHQSQIQGAIPDGFPEGVYIRNGSNPLFGALHSTSSVLGQSREIWVEGEGMRAPRRLLHQKQRGSSMVSLLRQPLRAVRDAGAGNGAAQTLLPPCRRGRLCXHRRRLRFQLS

SEQ ID NO: 300602 - protein, 45 aa, Zea mays
  Clone ID: MRT4577_3721C.1.pep
RSRVRHATTRPAPVTTREAKAEITHDRANATLCTQPGAATSARHM

SEQ ID NO: 300603 - protein, 1055 aa, Zea mays
  Clone ID: MRT4577_37220C.1.pep
MVEEQHSSSPRPLPRRRRRGRGNQGQAGGSASSAVERVDGASAPTGGASGIDLAFETKTSAVSPRHASSEQTDDASTLAKGLLDVTLVPETTVHLDPPSGFALADALAGANPNPLGYRMRLPWDRLTDVSTYGPSGSEEDDEPDFCWDFSGLGDPSAMWDFMTACDYCLSDCSDGSCSLGDEDCGPSRECFHVDLGGPSEGNHLGMPEDGDLPRPVPRVDIPRELAVVPVQAGGHDPHLEQIRGVQARLDEAAGALEPIRRDVGQEWAGQPPAGEMRHLPQGFQHRIADDVRFRPPPASSGVGQNLAAAAMLLRAMPEPSTTEGRRIQGELKNLLEGAAVRRAESSASRRQGYPSEHHAATSRFMREASVHTGRTRNTAPAAPGRLGNEHHHRDRRAHLDERVHRGYHPRRGGRYDSGEDQSPSPEPPGLQAFSRAIRRAPFPTRFRPPTTITKYSGETRPELWLADYRLACQLGGTDDDNLIIRNLPLFLSDTARAWLEHLPSGQISNWDDLVQAFAGNFQGTYVRPGNSWDLRSCRQQPGESLRDYIRRFSKQRTELPNITDSDVIGAFLAGTTCRDLVSKLGRKTPTRASELMDIATKFASGQEAVEAIFRKDKQPQSRPPEDAPEASTQRGAKKKGKKKSQAKRDAADADLVAAVEYKNPRKPPGGANLFDKMLKEPCPYHQGPVKHTLEECVMLRRHFHRAGPPAEGGRAHDDDKKEDHQAGEFPEVRDCFMIYGGQAANASARHRKQERREVCSVKVAAPVYLDWSDKPITFDQADHPDHVPSPGKYPLVVDPIIGDVRLTKVLMDGGSSLNIIYAETLGLLRVDLSSVRAGAAPFHGIIPGKRVQPLGQLDLPVCFGTPSNFRRETLTFEVVVFRGTYHAVLGRPCYAKFMAVPNYTYLKLKMPGPNEVITVGPTYKHMFECDVKCVEYAEALAESEALIADLESLSKEVPDVKRHAGNFEPAETVKAVPLDPSSDASKQIRIGSGSIPIGKQCSSTFSARTPMSSRGVPRTCPAYRGMSPSTRWTSEPEPDPSSSLCADSTKKGAEL

SEQ ID NO: 300604 - protein, 89 aa, Zea mays
  Clone ID: MRT4577_37221C.1.pep
TQVCSTIFITNLRKHPARFDPQPPLFFLEKKSCQPVPLKGGRCRLEICHLVGNHIILQDDTFSGHHTKSEGRETHAPRGSLEGGAFKQT

SEQ ID NO: 300605 - protein, 63 aa, Zea mays
  unsure (1)..(63): unsure at all Xaa locations
  Clone ID: MRT4577_37222C.1.pep
SAIDYLTRPLSRAATLRSXAFTVRVSLPSAAVTMATIRPLNPDYLMFSEVCLFMRRCTFFVTS

SEQ ID NO: 300606 - protein, 612 aa, Zea mays
  unsure (1)..(612): unsure at all Xaa locations
  Clone ID: MRT4577_37223C.1.pep
AAAILLRAMPEPSTTEGRRIHGELKNLLEDAVIRRAESSASRRQGXYPSEHRAATSRFMRGASVHTGRTRNMAPAAPCRLGNEHHHRNRRAHLDERVRRGYHPRRGGRYDSGEDRSPSPEPPGPQTFSRAIRRAPFPTRFRTPTTITKYSGETRPELWLADYRLACQLGGTDDDNLIIRNLPLFLSDTARAWLEHLPPGQISNWDDLVQAFAGNFQGTYPGESLRDYIRRFSKQRTELPNVTDSDVIGAFLAGTTCRDLVSKLGRKTPTRTSELMDIATKFASGQEAVEAIFRKDKQPQGRPPEDVPEASTQRGTKKKGKKKSQAKRDAADADLVAAAEYKNPRKPPGGANLFDKMLKESCPYHQGPVKHTLEECAMLRRHFHKAGPPAEGGKALDDAKKEDHKAGEFLEVRNCFMIYGGQVANASAQHRKQERREVYSVKVAVPVYLDWSDKPITFDQADHPDHVPSPGKYPLVVDPIIGNVRLTKTLTFEVVGFRGTYHAVLGRPCYVKFMAIPNYTYLKLKMPGPNGVITVGPTYRHAYECDVECVEYAEALTESEAVIADLENLSREAPDVKRHAGNFEPAETVKSVPLDPCNDASKQIQIGSELDPK

SEQ ID NO: 300607 - protein, 880 aa, Zea mays
  Clone ID: MRT4577_37224C.1.pep
MPFGLRNAGATYQRCMNHVFGEHIGRTVEAYVDDIVVKTRKASDLLSDLEATFRCLKAKGVKLNPEKCVFGVPRGMLLGFIVSERGIEANPKKIAAITNMGPIKDLKGIQRVTGCLAALSRFISRLGERGLPLYRLLRKAECFTWTPEAEEALGNLKVLLTNAPILVPLAAGEALLIYVAATTQVVSAAIVVERREEGHALPVQRPVYFIREVLSETKIRYPQIQKLLYAVILTRRKLRHYFESHPWAVEIMGETISFTPRKAIKSQVLADFVAEWVDTQLPTAPIQPELWTMFFDGSLMKTGAGAGLLFISPLGKHLLYVLRLHFPASNNVAEYEALVNGLRIAIELGVRHLDTRGDSQLVIDQVMKNSHCRDPKMEAYCDEVRRLEDKFYGLDLNHIARRYNETADELAKIASGQTTVPPDVFSRDLHQPSVKIDDAPEPEAPSAPEGEALRVEEERSGVTPNRNWQTPYMQYLHQGELLLDRAEARRLARCAKSFVLLGDGKELYHRSPLGILQRCISIAEGQELLQEIHSGACGHHAAPRALVGNVFRQGFYWPTAVADATRIVRTCQGCQFYARQTHLPAQALQTIPITWSFAVWGLDLVDPLQKAPGGYTHLLVAIDKFSEWIEVRPLNSIRSEQAVAFFTNIIHRFGVPNSIITDNGTQFTGRKFLDFCEDHHIRVDWAAVAHPMTNGQVERANDMILQVLKPRIYNDLNKFGKRWMKELPSVVWSLRTTPSRATGFTLFFLVNGAEAILPIDLEYGSPRMRAYDDQSNRANREDSLDQPEEARDMALLHSTRYQQSLRRYHARGVRSRDLQVGDLVLRLRQDARGRHKLTPPWEGPFVIAKVLKPGTYKLANSQGEVYSNAWNIRQLHRFYP

SEQ ID NO: 300608 - protein, 1232 aa, Zea mays
  unsure (1)..(1232): unsure at all Xaa locations
  Clone ID: MRT4577_37225C.1.pep
MSGVVLAPETTTGVASPQRANPERTDDASTLAKDLMGVSLVPEITVQSVPDATSPPSIDQEIQLRSTKRPRFGFEEDDNSDFGWDFSGLRDPSAMRDFMSACDYCLSGCSDDDHDLGDEGCDPSRECFHIDQGDHGEDNHLGMPQDDNAPVPASRVDIPRELAVVPVPAGGQDTHLEQFREMQAKLDEEAGRLVQLRQNIEQEWAGRALAGGARHRARDVQRHIVDNSRAGLPPTFSGVGQNLAAAAMLLRAMLKPSTTEGRRIQGKLKGLLEDAAVRRAESSASRRQGCPSEHRAMSSRRLRETMVRTRRTRDGTPAVPDRLGDEQHRRDHRARLEEKVRRGYHPRRGGRCDSEEDRSPLPEPPGPRVFSRAIRRASFLARFRAPTTITKYSGETRPELWLADYQLACQLGGTDDDNLIIRNLPLFLSDAARAWLEHLPPAQISDWDDLVKAFAGNFQGTYVRPGNSWDLRSCRQQPGESLREYIRRFSKQHTELPNITDSDVIGAFLAGTMCRDLVSKLGRKTPTKASELMDIATKFASGQEAVEAIFRKDKQPQGRQKEDTPEVSVQRGLKKKAKKKAQAKRDAIDADLVAAAEHRNPRKPPGGVNMFDKMLRESCPYHRGPAKHTLEECDMLRRYFIKAGPSAEGGKDQGNNKKGGDKDEEFPERTPVYLDWSEKPITFNQGDHPDYVPSPGRYPLVVDPVIGNARLTKVLMDGGSSLNIIYAETLGLLGIDLSMIRAGAAPFHGIVPGKRVLPLGQLDLPVCFRTPSNFRRETLTFEVVGFRGTYHSMLGRPCYAKFMAVPNYMYLKLKMPGPNGIITVGSTYRYAYECDVECVEYAEAIAESEALIADLECLSKEAPDVKRYTGNFEPAEAVKTVALNPSNDACKQEAVLVDFLRANAEIFAWSPSDMPGIPRDVAEHSLDIRAGARPVKQHLRCFDEEKRRAIGEEVHKLMAAGFIKEVFHPEWLANPVLVKKKGGKWRMCVDYTGLNKTCPKVPYPLPRIDQIVDSTAGCETLSFLDAYSGYHQIKMKESDQLATSFITPFGMYCYITMPFGLRNAGATYPWCMNHVFGEHIGRTVEAYVDDIVAKTRKASDLLSDLEVTFGCLRAKGVKLNPEKCVFRVPRGMLLGFIVSERGIEANPEKIAAITNMGPIKDLKGVQRVMGCLAALSRFISRLGEKGLPLYHLLRKAKRFTWTPEAEEALGNLKALLTNAPILVPXAAGEALL

SEQ ID NO: 300609 - protein, 953 aa, Zea mays
  Clone ID: MRT4577_37226C.1.pep
MGSLQQPFQPGTMLRFGSLEFMSLDGSYDMILLPPPRDSDNGGRQPARRRRNQRRLPHVAEEQHSGLSRCLPRRRRRRRGNQGQAGGGTSSVVEQVDGAGAPTGDTSGVDLASEAKTSAVSPQDANSKRTNDASTLAKDLLSVALVPETTVQSAPDATSSPPVDQEDRLTAVSTYGPSGSKEDDEPDFCWDFFGLGNPSAMRDFMTACDYCLSDCSDGSRSFGDEDCGPSRECFHADLGGPGEGNHLGIPENGDPPRPAPRVDILRELAVVPVPAGGQDAQLEQIREMQARLDEETGTLEPFRRDIGQEWAGHAPAGEARHLPQGIQHRIADDVRARPPPASSGVGQNLVAAAILLRAMPEPSTTEGLRIQGELKESPGRRRASVHTGRTRNTAPAAPGRLGNEHHHRNRRTHLDERVRRGYHPRRGGRYDNGEDRSPSLEPPGPQAFSRAIRRALFPTRFRTPTTITKYSGETRPELWLADYRLACHLGGTDDDNLIIRNLPLFLSDTARAWLEHLFPGQISNWDDLVQAFAGNFQGTCRQQPGESLRDYIRRFSKQRTELPNVTDSDVIGAFLAGTTCRDLVSKLGPKTPTRASELMDIATKFASGQEAVEAIFRKDKQPQGRPPEDVPEASTQRGTKKKGKKKSQAKRDAPDADLVAAAEYKNPRKPPGGANLFDKMLKEPCPYHQGPVKHTLEECAMLRRHFHKAGPPAEGGRAHNNDKREDHKAEEFPEVHDCFMIYGGQVANASARHRKQERREVCLVKVAAPVYLDWSDKPITFDQGDHPDRVPSPGKYPLVVDPVIGNVRLTKVLMDGGSSLNIIYTETLGLLWIDLSSVRAGAAPFHGIILGKRVQPLGQLDLPVCFGTPSNFRRETLTFEVVGFRGTYHAVLGRPCYAKFMAVPNYTYLKLKMSGPNGVITVGPTYRHTYECDVECVEVLAGAGFARAAPEPL

SEQ ID NO: 300610 - protein, 88 aa, Zea mays
  Clone ID: MRT4577_37227C.1.pep
PGMYKCSKAAHLFRTCRGVSTPEVSQWAVSSTRGRGSVKSARGYRREPRATWHSRANPCRTGAGRVERRSWAPPPPPQISAGALLIFK

SEQ ID NO: 300611 - protein, 680 aa, Zea mays
  unsure (1)..(680): unsure at all Xaa locations
  Clone ID: MRT4577_37228C.1.pep
MRDFMTACDYCLSDCSDGSRSLGDEDCGPSRECFHVDLGGPSEGNHLGMPEDGDLPRLVPRVDIPRELVVVPVQAGDHDPQLEQIRGVQTRLDEGAGALEPICRDVGQAWAGQPPAGEIRHLPKGFQHRDADDVRVRPPPASSGVGQNLAAAAMLLRAMPEPSTTEGRRIQGELKNLLEGAAVRRAESSASRRQGYPSEPHAATSRFVREASVYTGRTRNTAPAALGRLGNEHHHRDRRAHLDERGTYVRPGNSWDLRSCRQQPGESLRDYIRRFSKQRTELPNITDSDVIDAFLAGTTCRDLVSKLGRKTPTRASELMDIATKFASGQEAVEAIFRKDKQPQGRPSEDAPEASTQRGAKKKGKKKSQEKHDAADTDLVAAAEHKNPRKPHGGANLFDKMLKEPCPYHQGPVKHTLEECVMLRRHFHRAGPPAEGGRARDDDKKEDHQAGEFLEVRDCFMIYGGQAANASARHRKQEHREVCSVKVVAPVYLDWSDKPITFDQADHPDHVPSPGKYPLVVDPVIGDVRLTKVLMDGGSSLNIIYAETLGLLRVDLSSVRAGAAPFHGIIPWKRVXPLGQLDLPICFGAPSNFRRETLTFEVVGFRGTHHTVLGRPCYTKFMAVPNYTYLKFKMSGPNEVITVGPTYKHAFECDVECVEYTEALIANLESLSKEVPDVKRH

SEQ ID NO: 300612 - protein, 84 aa, Zea mays
  Clone ID: MRT4577_37229C.1.pep
MVGVIRYQLHERYPIIILKKTAVATSSAALDETHQVCCEVTHILHLSLRVHNLVLLGARCCRCRIQSSCLYIAFPPPTSKFIRQ

SEQ ID NO: 300613 - protein, 143 aa, Zea mays
  Clone ID: MRT4577_3722C.1.pep
TQATDIDFSEGNKLFAERGLSSPVKLNVRNSYRQIYDIPSNDYASNYTEETSIQLPEIGTSNTIVQGHVDVNEHRFDGPRTIEEIVPVPLDEIQIHEDVPGQPGAADEIDEVPFSDAPIIGAPFRLISFVARYVSGADLVNQK

SEQ ID NO: 300614 - protein, 152 aa, Zea mays
  unsure (1)..(152): unsure at all Xaa locations
  Clone ID: MRT4577_37230C.1.pep
EFLGKSLGLTNAPAYFMYLMNYVFMPELDKFILVFIDDILVYSKNEEEHVGHLHVVLQRLREHHLYAKLSKCDFWLKEIKFLGHTISQAGIAADLDKVHEVMNWKPPTTVRQIRSFLGLAGYHRRFIPDFSXLXKPITELLKKDAKFVWGQK

SEQ ID NO: 300615 - protein, 121 aa, Zea mays
  unsure (1)..(121): unsure at all Xaa locations
  Clone ID: MRT4577_37231C.1.pep
RQPSHKKQNPGSPGPGKHKPATAGAGKESKKKDARRKKNEKKKSQPRPPPAENPPPQGTPRGKPEPQDQGARGGQPKEGPQEGPXQPQPGPERPPPAGHGEPGEPRRGNLERGPPGGRRGR

SEQ ID NO: 300616 - protein, 87 aa, Zea mays
  Clone ID: MRT4577_37232C.1.pep
SRDRCFFPSRWMSNPALVSLIALHLVPVSVDPYALGPLLVWGLRHSLVLLSLGGCCRFPLFSIGVAVAFFFAKTRRAPNEPVAFGRD

SEQ ID NO: 300617 - protein, 127 aa, Zea mays
  Clone ID: MRT4577_37233C.1.pep
MGKSKKGGSSSHHSGDKQKREPTPSSEDFGNSEYLEEEFSSESEGLPVHASPPAVERAGLEGSDELEVSSDEGDSSDSSEEGSDGDDGGEGDGGDGDGGGDGSKGDGKGDGGNVNGKGGSGGGKASG

SEQ ID NO: 300618 - protein, 217 aa, Zea mays
  Clone ID: MRT4577_37234C.1.pep
MSRRAAAALALACLAVMAAALADGALLPWFGEGRRGGDEAAAAAASPLSGPGVGLLADPFRILEHVPLGFDRDDVAMVSMARADWRETPDAHEIVVDVPGMRREDLKIEVEDYSRVLRVSGERRRAEEHRGDHWHREERSHGRFWRQFRLPENADLDSVGASLDNGVLTVRFRKLAPEQVKGPRVVGIAGGDGDGDAKKSIGGGAGDGHHQTKKVEL

SEQ ID NO: 300619 - protein, 110 aa, Zea mays
  Clone ID: MRT4577_37235C.1.pep
PDRSAFPVDCVRSLDRVARCDDYLYGESLYLRRHKLLRRVFRTRGAVGECCVDEEDELGLIGGGGISAGDALLRTLAQLKLTKRYISDAALLADHLPCNKLGRSYYTNCA

SEQ ID NO: 300620 - protein, 234 aa, Zea mays
  Clone ID: MRT4577_37236C.1.pep
MDAATGTGMEELSWCARCAGLAFLVFSVCVVALGAALFLARRWPWCSCHVCRSYLTGSWARDFTNLGDWYAHLLRCSPTGTVAVHVLGCTITANPANVEHMLHTRFDNFPKGKPFAAVLGDLLGGGIFNVDGDAWRHQRKMASLELGSVAVRSYAYGIVAEEVEARLLPLLADAADNGRVVDLQDVFRRFAFDTICKISFGLDPGCLELDMPMSKLAAAFDTASRLSAMRGAAA

SEQ ID NO: 300621 - protein, 184 aa, Zea mays
  Clone ID: MRT4577_37237C.1.pep
PAGLPGPFSHFALPPPARVTATAFHPSPTARGWRRLVGVQGTSAAEMEPDFSTVGGPSFEFAFNEANFSDRELRIEVVAGDYDAPGSTGGGSGGGGLADWARHRKRRREELFKEKGDDEQGIDPSWAAVVTPVLRVKTIYISSAILAAKSPFFFKLFSNGMKESDQRHATLRITDSGNVTILGN

SEQ ID NO: 300622 - protein, 610 aa, Zea mays
  Clone ID: MRT4577_37238C.1.pep
MTTLRGPAAPVPVDGGGSPFPNLAATARSLSPGHFSHFALPPPARVTATAFHPSPTARGWRRLVGVQGTSAAEMEPDFSTVGGPSFEFAFNEANFSDRELRIEVVAGDYDAPGSTGGGSGGGGLADWARHRKRRREELFKEKESTTYMPDQTNFNEVEAEECDAYEENQEEPVAMMEGSPPDVGQDGDDEQGIDPSWAAVVTPVLRVKTIYISSAILAAKSPFFFKLFSNGMKESDQRHATLRITDSEEIALMELLSFMYSGKLTTTEPTLLLDILMAADKFEVVSCMRYCSQLLTSLQMTTESALLYLDLPCSVSMAAAVQPLTDAAKDFLAVKYKDLIKFQDEVMNIPRAGIEAILSSNDLQVASEDTIYDFLLRWARAQYPKSEERREVLSSRLLPLVRFSHMTCRKLRKVLACTDIDHEQATKCVTEALLFKADAPHRQRALAADAITCRKFAERAYKYRPLKVVEFDRPYPQCIAYLDLKRDECSRLFPAGRIYSQAFHLAGQGFFLSAHCNMEQQSAFYCFGLFLGMQEKGSTSVTVDYEFAARTRPSGEFVSKYKGNYTFTGGKAVGYRNLFAIPWQKFLADDSLFFVDGMLHLRAELTIKQP

SEQ ID NO: 300623 - protein, 120 aa, Zea mays
  unsure (1)..(120): unsure at all Xaa locations
  Clone ID: MRT4577_37239C.1.pep
MTTGGNGEEQQGRRLFGVSLTDRPVWQQLLICSSGFFFGYLVNGICEEYVYNRLQFSYGWYFTFVQGFVYLGLIRLQGFTTKQMVNPWRTYVXLSAVLMRSNGPHKGSLVFLHYPPQNHV

SEQ ID NO: 300624 - protein, 146 aa, Zea mays
  unsure (1)..(146): unsure at all Xaa locations
  Clone ID: MRT4577_3723C.1.pep
PKKKKRQTETYVLRPDGRAQDPGPQGAALLMIGLSDILFLQYFVSTIIATCQRWICCLHGCGFVLMSSPQILLLASFLLLLSFWVDLCHQTNDEDQEDGRSQSHHEALLDRTKAKPGIHPVNIRQRRCPGIQLGKXRQKFGILGAS

SEQ ID NO: 300625 - protein, 540 aa, Zea mays
  unsure (1)..(540): unsure at all Xaa locations
  Clone ID: MRT4577_37240C.1.pep
MDPDFSPGGGGPSFEFAFNEVNFSDRELRIEVVAGDDYAPGSSGAGAGGGGLADWARHRKRRREELLKEKESTTHMSDQTNCNEVEAEECDAYEENQEEPVAMVEESPPDVGQDGDDGQGIDSSWTVVGTPVLRVKTIYISSAILAAKSPFFFKLFSNGMKESDQRHATLRITDSEETALMELLSFMYSGKLATTEPTLLLDILMAADKFEVVSCMRYCSQLLTSLPMTTESALLYLDLPCSISMAAAVQPLTDAAKDFLAVKYKDLTKFQDEVMNIPLAGIEAILSSNDLQVASEDTIYDFLLRWARAQYPKSEERREILSSRLLPLVRFSHMTCRKLRKVLTCTDIDHEQATKCVTEALLYKADAPHRQRALAADTTTCRKFAERAYKYRPLKVVEFDRPYPQCIAYLDLKREEXCSRLFPAGRIYSQAFHLAGQGFFLSAHCNMEQQSTFYCFGLFLGMQEKGSTSVTVDYEFAARTRPSGEFVSKYKGNYTFTGGKAVGYRNLFGIPWQAFMADDSLFFIDGMLHLRAELTIKQPT

SEQ ID NO: 300626 - protein, 953 aa, Zea mays
  unsure (1)..(953): unsure at all Xaa locations
  Clone ID: MRT4577_37241C.1.pep
MGSLQQPLQPGTVLHFGSLEFMSLDGSYDMILLHPPRDDDNGGRQPARRRRNRRRLPHVAEEQHPGLSRHLPRRWRGRRGRHGQAGGGTSSAVERVDDAGAPAGDTSGVDLASEMKTSVVSPQHGNPKQTDNASTLANDLLGVSLVPETTVQSIPDAASSXHPSIKRFSCDPPSDPASVDAFIKACPNPPGYHMRSPWXRLTVVSTYGPLGSEEDDEPDSGWDFSRLDNPSAMRDFMTACDYCLSDCSDSSHSFGDEDCGPSRECFHVDLWGLDEGNHLGMLGDGDPPRPAPRVDILRELAVVTVPAGGQDAQLEQIREGYPPEHRTVTSRFMREALVHTGHTRNTAPAALGRLGNEHHRRDRRAHLDEEVRRGYHPRRGGCYDSREDRSPSPEPSGPRAFSRAIRRAPFPTRFRTPTTITKYSGESKPELWLADYRLACQLGGTDDDNFIIRNLPLFLSDAARACLEHLPLAQISNWDDLVKAFAGNFQGTYMRPGNSSDLRSCRQQPGESLRDYIRRFLKQRTELPNITDSDVIGAFLAGTTCRDLVSKLGRKTPTRASELMDIATKFASGQDAVEAIFRKDKQPQGRQQEDVPEASAQRGAKKKGKKKSQAKHDAADADLVAAAEHRNPRKPPGGANLFDKMLKETCPYHQGPRYFHKAGPPAEGGKGHGNDKKEGHKAEEFPEVHDCFMIYGGQVANASARHRKQELREVCSVKVAAPVYLDWSDKPITFDQGDHPDRVPSPGKYPLVVDPVIGNVRLTKVLMDGGSSLNIFYAETLGLLQIDLSTIRASAAPFHGIIPGKRVQPLGQLNLPVCFGTPSNFRKETLMFEVVGFRGTYHAVLGRPCYAKFMVVSNYTYLKLKMSGPNGVITIGSTYRHAHECDVECMEYAEALAESEALIADLESLSKEVPDVKRHAGNFEPAEAVKSVPLDPSNDASKQVRIGSELDPK

SEQ ID NO: 300627 - protein, 43 aa, Zea mays
  Clone ID: MRT4577_37242C.1.pep
GGSSSVGRQEGSTLCRRWTACLRGGLRSELVAQSIYLSNLLYN

SEQ ID NO: 300628 - protein, 819 aa, Zea mays
  unsure (1)..(819): unsure at all Xaa locations
  Clone ID: MRT4577_37243C.1.pep
MGSLQRPFQPGTVLRFGSLEFMSLDGSYDMILLPPPCDNDNGGRQPARRRRNRRRLPRVVEEQHSSSPRPLPRRRRRRRGNQGQAGGGTSSAVDLVDGAGTPTGGTSGIDLAPETKTSAVSPQRANPKQTDDASTLAKDLLGVTLVPEMTVQSVPDVTSSPPVNQEVPTDSHLTPFGFSLDPPSDFTLVGALVEVSPNPLGYRMRSPWDRLTDIPTYGPSGSEEDDELDFCWDFSGLGNPSAMRYFMTACDYCLSDCSDGSRSLGDEDCCPSRECFHVDLGGPSEGNHLGMPENGDLPRHVPRVDIQRELAVVPVSAGGHDPQLEQIRGVQARLDEGAGTLEPIRRDVGQEWAGQPPVREVRHLPQGIQHRIVDDVRGTHVRPGNSWDLRSCRQQPGECLRDYIRRFSKLCTELPNITDSDVIGAFLAGTTCHNLVSKLGRKTPTRASELMDIATKFASGQEAVKAIFRKTKQPQGRPPEDVPEASTQRGAKKKGKKKSQAKRDAADADLVAAAEYKNPRKPPGGANLFDKMLKEPCPYRQGPVKHTLEECAMLRRHFHKAGPPAEGGRARADDKKEDXQAGEFPEVRDCFMIYGGQAANASARHRKQERREGKYPLVVNPVIGDVRLTKVLMDGGSSLNIIYAETLGLLRVDLSSIRAGVAPFHGIIPGKRVQPLGQLDLPVCFGTPTNFRRETLTFEVVGFRGTYHTVLGRPCYAKFMAVPNYTNLKLKMPGPNGVITVGPTYRHAFECDVECVEYAEALAESEALIADLESLSKEVPDVKRHAGNFEPAETVKSVPLDPSHDASKQIRIGSELDPK

SEQ ID NO: 300629 - protein, 927 aa, Zea mays
  Clone ID: MRT4577_37244C.1.pep
MGSLQQPLQPKTVLRFGSLEFMSLDGSYDMILLPPPRDNDNGGRQPARRWQNRRRLPRVVEEQPSSSSCPFPRRRRGRQGDQGQAGGSASSTVERVDSPGTPTRGAPGIDFALETKTSAVSPRHAIPEQADDASALAESLLDVTLVPETTVQSVPDVTLSPLVDQEVPTDPHPTSFGFSLNPPSDRALAGALVEASPNPLGFRMRSPWDRLTDVSTYGPSGSEEDDEPSLCWDFSGLGNPSAMQDFMTACDYCLSDCSDGSRSLGDEGCGPSRECFHVDLGGPSEGNHLGMPEDDDLPRPVPRVDIPRELAVVPVQAGGHDPQLEQIRGVQARLDEGAGALEPIRRDVGQAWAGQPPAGEIRHPPQGFQHRVANDIRDRPPPASSGVGQNLAAAAMLLRAMLEPSTTEGRRIQGELKNLLEGAVVRRAESSASRGQGYPSEPHAATSRFMRVASVYTGRTRNTAPTALGRLGNEHRHRDRRAHLDERPGESLRDYIRRFSKQRTELPNITDSDVICAFLAGTTCRDLVSKLGRKTPTRASELMDIATKFASGQEAVEAIFRKDKQPQGRPPKDAPEASTQRGAKKKGKKKSQAKRDAVDADLVAAAEYKNPRKPPGGANLFDKMLKEPCPYHQGPVKHTLEECAMLRRHFHRAGPPAEGGRARDDDKKEDHQAGEFPEVRDCFMIYGGQAANASARHRKQERREPITFDQANHPDHVPSLGKYPLVADPVIGDVRLTKVLMDRGSSLNIIYAETLGLLRVDLSSVRTGAAPFHRIIPGKRVQPLGQLDLPVCFGTPSNFRRETLTFEVVGFRGTYHAVLGRPCYAKFMAVPNYTYLKLKMLGPNGVITVGPMYKHTFECDVECVEYAEALTESKALIADLESLSKEVLDVKRHAGNFEPAETVKSVPLDPNSDASKQVRIGSELDPK

SEQ ID NO: 300630 - protein, 47 aa, Zea mays
  Clone ID: MRT4577_37245C.1.pep
QIRVHKIDVFLNKKDMDDDEELLELIELEVQKLLSNYEYDGDEVPIV

SEQ ID NO: 300631 - protein, 101 aa, Zea mays
  unsure (1)..(101): unsure at all Xaa locations
  Clone ID: MRT4577_37246C.1.pep
RCRDEQNQCQDNDNMVDDVASVNVMLLEQRYNYHESILPTSTSXXHKVAQECIVEPRNAIQLDEIADSLAPEVRREYCEDNVIRNLDFIXTFSPPSIANAS

SEQ ID NO: 300632 - protein, 83 aa, Zea mays
  Clone ID: MRT4577_37247C.1.pep
STMSFSLSPVSTSLMLMISPIEGCLSRSSSAIGVGVRFISALMLQLGLGFAPPADTTMILLIRPPLLLRSGSSKKGCSRARAE

SEQ ID NO: 300633 - protein, 636 aa, Zea mays
  unsure (1)..(636): unsure at all Xaa locations
  Clone ID: MRT4577_37248C.1.pep
MSFGLRNAGATYQRCMNHVFGEHIGRTVEAYVDDIVVKTRKVSDLLSDLEVTFRCLKAKGVKLNPEKCVFGVPRGMLLGFIVSERGIEANPEKIAAITSMGPIKDLKDGEALLVYVAATTQVVSAAIVVERQEEGHALPVQRPVYFVSEVLSETKIRYPQVQKLLYAVILTRRKLRHYFESHPVIKSQVLADFVAEWVDTQLPTAPIQPELWTMFFDGSLMKTGAGAGLLFISPLGKHLRYVLRLHFPASNNVAEYEALVNGLRIAIELGVRRLDARGDSQLVIDQVMKNSHCRDPKMEAYCDEVRRLEDKFFGLELNHIARRYNETADELAKIASGRTTVPPDVFSRDLHQPSVKIDDAPEPEKAPGGXHAPAGRHRQILQVDRGPTSEQHQVRAGGGVLHQHHPSLRGPELHHXTDNGTQFTGKKFLDFCEDHHIRVDWAAVAHLMSNGQVERANGMILQGLKPRIYNDLNKFGKRWMKELPSVVWSLRTTPSRATGFTPFFLVYGAEAILPTDLEYGSPRTRAYTDQSNQASREESLDQLEEARDRALLHSARYQQSLRRCHARGVRSRDLQVGDLVLRLRQDARGRHKFTPPWEGPFVIAKVLKPGTYKLANIQGEIYGNAWNIKQLRRFYP

SEQ ID NO: 300634 - protein, 1787 aa, Zea mays
  unsure (1)..(1787): unsure at all Xaa locations
  Clone ID: MRT4577_37249C.1.pep
MGSLQQPFRPGTVLRFGSLEFMSFDGSYDMILLPPPRDNDNGGRQPAHRRRNRRHLPRAVEEQHSSSPRPLPHQWRRRRGNQGQAGGRASSAVERIDVPSAPTEGAPGVDLAFETKASAVPPRHADPEQVDDAGTLARSLQDVALVPEMTVQPVPDVTTSPRVDQKVPTNSPLTSFRLGLNPPSDLALAGALIEASATPLGFRMRSPWDRLTDVSTYGPSGSEEDDDPSICWDFSGLGNPSAMRDIMTACDYCLSDCSDGSRSLDDEGCGPSRGCFHVELGDPSEGNHLGMPEDGDFPRPVPRADIPRELAVVPVPAGGHDPQLEQVRGAQARLDEGTGALETIRRDVGQVWAGQPPAGEIRHLPQGFQHRVANDVRVRPPPASSGVGQNLAAAAILLRAMPEPSTTEGRRIQGELKNLLEGAAARRAESTASRRQGYPSEPHVATSRFMREASVYTGRTCNTAPAAPGHLGNEHHCRDRRAHLDERVRRGYHPRRGGRYDSGEDRSPSPEPPGPQAFRRAIRRAPFPTRFRPPTTITKYSGETRPELWLADYRLACQLGGTNDDNLIIRNLPLFLSDTARAWLEHLPPGQISNWDDLVQAFAGNFQGTYVRPGNSWDLRSCRQQPGESLWDYIRRFSKQRTELPNITDSDVIGAFLAGTTCRDLVSKLGRKTPTRASELMDIATKFASGQEAAPEASTPRGAKKKGKKKSQSKRDAADADLVAAAEYKNPRKPPGGANLFDKMLKEPCPYHQGPVKHTLEECVMLRRHFHRAGPPAEGGRARDDDKNEDHQAGEFPEVRDCFMIYGGHAANASARHRKQERREVCSVKVAAPVYLDWSDKPITFDQADHPDHVSSPGKYPLVVDPVIGDVRLTKVLMDGGSCLNIIYAETLKLLRVDQSSVRAGAAPFHGIVPGKRVQPLGRLDLPVCFGTPSNFRRETLAFEVVGFRGTYHAVLGRPCYAKFMVVPNYTYLKLKMPGPNGVITVGPTYKHAFECDVECVEYAEALAESEALIADLENLSKEVPDVKRHAGNFEPVETVKAVPLDPSGDTSKQIRIDYTGLNKACPKVPYPLPRIDQIVDSTAGCETLSFLDAYSGYHQIRMKESDQLATSFITPFGMYCYVTMPFGLRNAGATYQRCMNHVFGEHIGRTVEAYVDDIVVKTRKASDLLSDLEVTFRCLKAKGVKLNPEKCVFGVPRGMLLGFIVSERGIEANPEKIAAITSMGPIKDLKGVQRVMGCLAALSRFISRLGERGLPLYRLLRKAECFAWTPEAEEALENLKALLTKAPVLVPPADGEALLVYVAATTQVVSAAIVLERQEEGHALPVQRSVYFVSEVLSETKICYPQVQKLLYAVILTRRKLRHYFESHPVTVVSSFPLGEIIQCREASGRIAKWAVEIMGETISFAPRKAIKSQVLADFVAEWVDTQLPTASIQPELWTMFFDGSLMKTGAGAGLLFISPLGKHLRYVLRLHFPASNNVAEYEALVNGLRIAIELGVRRLDARGDSQLVIDQVMKNSHCRDPKMEAYCDEVRRLKDKFFGLELNHIARRYNETADELAKIASGRTTVPPDVFSRDLHQPSVKIDDAPEPEVPSAQPEAPSARPEEELYHRSPSGILQRCISIAEGQELLQEIHSGACGHHAAPRALVGNAFRQGFYWPTAVADATGIVRTCEGCQFYAKETHLPAQALQMIPITWPFAVWGLDLVGPLQKAPGGYTHLLVAIDKFSKWIEAVAFFTNIIHRFGVPNSIITDNGTQFTGXKNSWIFARITTSGWTGPPWLIPCRMGK

SEQ ID NO: 300635 - protein, 47 aa, Zea mays
  Clone ID: MRT4577_3724C.1.pep
RKTMTKNAKEIFIQTNKMTKLCRYIKSYLHTVTKSCDKNIYIHHKKN

SEQ ID NO: 300636 - protein, 1105 aa, Zea mays
  Clone ID: MRT4577_37250C.1.pep
MPTVGAPGRGLLRVDEQLPVKLQMGSLQQPLRPGTVLRFGSLEFMSFDGSYDMILLPPPRDNDNGGRQPARRRRNRRHLPRAVEEQHSSSPRPLPRQRRRRRGNQGQAGGRASSAIERIDVPSAPTGGASGVDLAFETKASAVPPRHTNPEQVDDASALAEGLQDVALVPKTTVQSVPDVTMSLLVNQKVLTDSHLTSFRLGLNLPSDLALAGALVEASATPLGFRMRSPWDRLTDVSTYGPSGSEEDDDPSICWDFSGFGNPSAMRDFMTACDYCLSDCSDGSRSLDDEDCGPSRECFHVELGDPSEGNHLGMPEDGDLPRPVPRADIPWELAVVPVPAGGHDPQLEQVRGAQARLDEGAGALEPIRRDVGQVWAGQPPAGEIRHLPQGFQHRVANDVRVRPPPASSGVGQNLAAAAMLLRAMPEPSTTEGRRIQGELKNLLEGAAVRRAESTASRRQGYPSEPHAATSRFMREASVYTGRTHNTAPAAPGRLGNKHHHRDRRAHLDERVRRGYHPRRGGRYDSGEDRSPSPEPPGPQAFSRAIRRAPFPTRFQPPTTITKYSGETRPELWLADYRLACQLGGTDDDNLIIRNLPLFLSDTARAWLEHLPPGQISNWDDLVQAFAGNFQGTYVRPGNSWDLRSCRQQPGESLRDYIRRFSKQCTELPNVTDSDVIGAFLAGTTCHDLVSKLGRKTPTRASELMDIATKFASGQEAVEAIFRKDKQPQGRPSEDAPEASTLRGAKKKGKKKSQAKCDAADADLVAAAEYKNPRKPPGGANLFDKMLKEPCPYHQGPVKHTLEECVMLRRHFHRAGPPAEGGRARDDDKKEDHQAGEFPEVRDCFMIYGGHVANASARHRKQERREVCSVKVATPVYLDWSNKPITFDQADHPDHVPSPGKYPLVVDPIVGDVRLTKVLMDGGSCLNIIYAETLRLLRVDLSSVRAGAAPFHGIIPGKRVQPLGRLDLPVCFGTPSNFRRETLTFEVVGFRGTYHAVLGRPCYAKFMAVPNYTYLKLKMPDPNGVITVGPTYKHAFECDVECVEYAEALAESEALIADLESLSKEVPDVKRHAGNFEPAETVKAVPLDPSGDTSKRIRIGSGLDPK

SEQ ID NO: 300637 - protein, 97 aa, Zea mays
  Clone ID: MRT4577_37251C.1.pep
VNISSMLGRMANPARSPYCITKFGVEAFSDCLRYEMHPLGVKVSVVEPGNFIAATSLYSPERIQAIAKKMWDELPEVVRKDYGEKYFDEKIAKMETY

SEQ ID NO: 300638 - protein, 1831 aa, Zea mays
  unsure (1)..(1831): unsure at all Xaa locations
  Clone ID: MRT4577_37252C.1.pep
MDSAPPDPRARAQPRLRKTMNSASPDPRARTQPRLRKTTNSASPDPRARTQPQLRKTTNSASPDPRARTQPRLRKTTNSASPEPRARTQPWPRTTVSASPDPGLGLDLERRTRPRPQRSLRLARPRARTDHVTRGAIITLPLASSGYGEQDRRPVWLAPLPVKLEMGSLQQPFQPGTILHFGSLEFMSLDGGYDMILLPPPRDSVNGGRQPARRRRNQRRLPHVAEEQHSGLSRRLPRRRRRRRGNHDQAGSGTLSAVERVDDAGAPMGDTSGDDLASETKTSVVSPQHANSKRTNDASTLARDLLGVTLVPETTVQSAPDATSSPPIDQEVPTDSHLVPFGFSFDPPSDLASVEAFIEARTNPPGYHIRSPWDRLTAVSTYGPSGSEEDDEPDFCWDFSELGNPSAMRDFMTACDYCLSDCSDGSRNFGDEDCGPSRECFHVDLGGPGEGNHLGMPENGDPPSPAPRVDILQELAVVPVPAGEPSTTEGRRIQGELKNLLEDAAVRRAESSASRRQGYPSEHRVVTSRFMREASVHTGRTRNTAPAAPGRLGNEHHHHNRRAHLDERVRRGYHPRRGGRYDSGEDLSPSPEPPGPQAFSRAIRWASFPTRFQTPTTITKYSGETRPELWLANYRLACQLGGTDDDNLIIRNLPLFLSDTARAWLEHLPPGQISNWDDLVQAFAGNFQGTYVRPGNSSDLRSCRQQPGESLRDYIRRFSKQRTELPNVTDSDVIDAFLAGTTCRDLXASRKMSPRRPLSAAXKKGKKNSQAKRDTADADLVAAAEYKNPRKPPGGANLFDKMLKEPCPYHQGPVKHTLEECVMLRRHFHKARPPAEGGRAHNNDKKEDHKAEEFPEVHDCFMIYGGPVANASARHRKQERREVCSVKVVAPVYLDWSDKPITFDQGDHPDRVPSSGKYPLVVDPVIGNVRLTKVLMDGGSSLNIIYVETLGLLQIDLSSIRTGAAPFHGIIPGKRVQPLGQLELPVCFGTPSNFRRETLTFEVVEFQGTYHAVLGRPCYAKFMVVSIYTYLKLKMSGPNGAEALAESKALIADLESLSKEAPDVKRHAGNFKPVETEAVLVDFLRANAEVFAWSPSDMPGIPRDVAEHSLDIRAGARPVKQPLRQFDEEKRRAIGEEIHKLMAAGFIKEVFHPEWLANPLLVRKKGGKWWMCVDYTGLNKACPKVPYPLPRIDHIVDSTAGCETLSFLDAYSGYHQIRMKESDQLATSFITSFGMYCYVTMPFGLRNAGATYQMCMNHVFGEHIGRTVEAYVDDIVVKTRKASDLLSDLGTTFRCLKAKGVKLNPEKCVFGVPRGMLLGFIVSERGIEANPEKIATITNMGPIKDLKGVQRAECFTWTPEAEEALGNLKALLTNAPILVPPAAGEALLIYVAATTQVVSAAIVVERREEGHALPVQRPVYFISELRHYFESHPVTVVSSFPLWEIIQCREASGRIAKWAVEIMGETISFSPRKVIKSQVLADFVAEWVDTQLPAAPIQPKLWTMFFDGSLMETGADAGLLFISPLGKHLSYVLRLHFPASNNVAEYEALVNGLRIAIELGKAPGGYTHLLVAIDKFSKWIEVWPLSSIRSEQAVAFFTNIIHRFGVPSSIITDNGTQFTGRKFLDFYEDHHIRVDWAAMAHPMTNGQVERANGMIMQGLKPRIYNDLNKFGKRWMKELPSVVWSLRTTPSRATGFTPFFLVYGAEAILPTDLEYGSPRARAYDDQSNRASREDSLDQLEEARDMALLHSARYQQSLRCYHARGVRSRDLQMGDLVLRLRQDAQGRHKLTPPWEGPFIIAKVLKPGTYKLANSQGEVYSNXGTSDSYVASTL

SEQ ID NO: 300639 - protein, 59 aa, Zea mays
  Clone ID: MRT4577_37253C.1.pep
MNPASVMGWAYARGDHITKEHFLVYWLAPIEATILAVWTFKFLVQPGKEDKSTSKSKSD

SEQ ID NO: 300640 - protein, 96 aa, Zea mays
  Clone ID: MRT4577_37254C.1.pep
GYVACRPSFRGLLFPGSFYLPCVYGHLVILLCLSPLLYCVRARSASRCALGSFCSFSPVRLRLLGCSVPLFTRKLWLGVPGISFVWIAIAVVMCSC

SEQ ID NO: 300641 - protein, 1865 aa, Zea mays
  unsure (1)..(1865): unsure at all Xaa locations
  Clone ID: MRT4577_37255C.1.pep
MGSLQQPLRPRTMLRFGTLEFMSFDGSYDMILLPPPRDYDNGGRQPARRRRNRRRLPRVVEGQHSGSLHSLPRQRRRRRGRQGQVGGHASSAVERIDAPDAPTEGTPDVDLAFKTEASAVPPRHADPEQEDDAGALAESLQDVALEPEMTVQPVPDVTTSLLVDQKVPTNSHLASFRLGLNPPNDLVLAGALIEASATPLRFHMRSPWGRLTDVSTYGPSGSEEDDDPSIGWDFSGLGNPSAVRDFMTACDYCLSDCSDGSRSLGDESCGPSRECFHIELGDPSEGNHLGMPEDGDLPRPVPRADIPRELAVVPAPAGGYDPQLEQVREAQARLNEGTGALEPIRRDVGQAWGAPRLPPQAWGALRQRGGSESLRPXPPGPQAFSRAIRRAPFPTRFRPXPTTITKYSGETRXTVARGLPPRLPTGWNGRRQPHXVTSPCXLRHCSRLVGAPAXPGQISNWDDLVQAFAGNFQGTYVRPGNSWDLRSCRQQPGESLRDYIRRFSKQRTELPNITDSDVIGAFLAGTTCRDLVSKLGRKTPTRASELMDIATKFASGQEAVEAIFRKDKQPQGRPSEEAPEASAPRGAKKKGKKKSQSKRDAADADLVAAAEYKNPRKPPGSANLFDKTLKEPCPYHQGPVKHTLEECVMLRRHFHRAGPPAEGGRARDDDKNEDRPAGEFPEVRDCFMIYGGRAANTSARHRKQERREVCSVKVAAPVYLDWSDKPITFDRADHPDHVLMDGGSCLNIIYVETLKLLRVDPSFVRAGAAPFHGIIPGKRVQPLGRLDLPVCFGTPSNFRRETLTFEVVGFRGTYHAVLGRPCYAKFMAVPNYTYLKLKMPGPNGVITVGPTYKHAFECDVECVEYAEALAESEALIADLENLSKEVPDVKRHAGNFEPAETVKAVPLDPSGDTTKQIRIGYHQIRMRESDQLATSFITPFGMYCYVTMPFGLRNAGATYQRCMNHVFGEHIGRTVEAYVDDIVVKTRKASDLLSDLEVTFRCLKAKGVKLNPEKCVFGVPRGMLLGFIVSERGIEANPEKIATVTSMGPIKDLKGVQRVMGCLAALSRFISRLGERGLPLYRLLRKAECFAWTPEAEEALGNLKALLTKAPVLVPPADGEALLVYVAATTQVVSAAIVVERQEEGHTLPVQRPVYFISEVLSETKIRYPQVQKLLYAVILTRRKLRHYFESHPVTVVSSFPLGEIIQCREASGRIAKWVVEIMGETISFAPRKAIKSQVLADFVAEWVDTQLPTTPIQPELWTMFFDGSLMKTGAGAGLLFISPLGKHLRYVLRLHFPASNNVAEYEALVNGLRIAIELGVRRLDARGDSQLVIDQVMKNSHCRDPKMEAYCDEVRRLEDKFFGLELNHIARRYNETADELAKIASGRTTVPPDVFSRDLHQPSVKLDDTPEPEVPSAQPEVPSAQPEVPSAPEGRALNVEEGQSGATPDQDWQAPYLQYLRRGELPLDQVEARRVARRAKSFVLLGDEEELYHRSPSGILQRCISIAEGRELLQEVHSGACGHHAAPRALVGNAFRQGFYWPTAVADATRIVRTCEGCQFYAKRTHLPAQALQTIPITWPFAVWGLDLVGPLQKAPGGYTHLLVAIDKFSKWIEVRPLNSIRSEQAVAFFTNIIHRFGVPNSIITDNGTQFTGKKSLDFCEDHHIRVDWAAGAHPMSNGQVERANGMILQGLKPRIYNDLNKFGKRWMKELPSVVWSLRTTPSRATGFTPFFLVYGAEAILPTDLEYGSPRARAYTEQSNQASREESLDQLEEARDRALLHSARYQQSLRRYHARGVRSRELQVGDLVLRLRQDARGRHKLTPPWEGPFVIAKVLKPGTYKLANNQGEIYGNAWNIKQLRRFYP

SEQ ID NO: 300642 - protein, 59 aa, Zea mays
  unsure (1)..(59): unsure at all Xaa locations
  Clone ID: MRT4577_37256C.1.pep
MAXGGDXLQVVRALDAAKTQWXXFXXIXXAGMGFFTNXXNLFWXSLVXKXVXRIYYTET

SEQ ID NO: 300643 - protein, 1777 aa, Zea mays
  unsure (1)..(1777): unsure at all Xaa locations
  Clone ID: MRT4577_37257C.1.pep
GGRPPARRRRNRRCLPRVAEERHSGLPRHLPRXRRRRRGNHGQTGGGTSSAVERVDDAGTPAGDTSGVDLASETKTSVVSPQHPNPKRTDDASTLAKDLLGISLIXFDPPSDPASVDAFIKAYPXPSEVSYVVNLGPTDDRLDXGPPGSEEDDEPDYGWDFFGLGNPSAMRDFMTACDYCLSDCSDGSHSLGDEDCGPSRECFHIDLGGLDEGNHLGMPEDGDPPRPAPRIDILRELAVVPVPAGGQDAQLEQIREMQARLDEEAGQLVQLRQNIGQEWAGRAPAREARHLPQDVQHRIADNARARLPPASSGLGGTDDDNLIIRSLPLFLSDAARAWLKHLPPAQISNWDDVVKAFAGNFQGTYVRPGNSWDLRSCCQQPRESLRDYIRRFSKQRTELSNITDSDVIGALLAGTTCRDLVSKVGHKTPTRASELMDIATKFASGQEAVEAIFRKDKQPQGRQQEDIPEVSAQRGTKKKGKKKSQAKHDAADADLVVAAEHRNPRKPPGGANLFDKMLKESCPYHQGPVKHTLEECVMLRRYFHKAGPPAEGGRAHDNDKKEGHKAEEFPEVHDCFMIYGGQVANASARHRKQERREVCSVKVAAPVYLDWSDKPITFDQGDHPDRVPSLGNYPLVVDPVIGNVRLTKVLMDGGSSLNIIYAETLGLLRIDLSAIRAGAAPFHGIIPGKRVQPLGQLDLSVCFGTPSNFRKETLTFEVVGFRGTYHAVLGRPCYAKFMAVPNYTYLKLKMSGPNGVITVGSTYRHAYECDMECVEYAEALAESEALIADLESLSKEVPDAKRHADNFEPVEAVKSVPLDPSNNASKQEAVLVDFLRTNTEVFAWSPSDMPGIPRDVAEHSLDIRAGARPVKQPLRQFDEEKRRAIGEEIHKLMAAGFIKEVFHPEWLANPVLVKKKGGKWRMCVDYTSLNKACPKVPYPLPRIDQIVDSTAGCETLSFLDAYSGYHQIRMKESDQLATSFITPFGMYCYITMPFGLRNAGATYQRCMNQVFGEHVGRTVEAYVDDIVVKTRKASDLLTDLEMAFKCLKAKGVKLNLQKCVFGVPRGMLLGFIVSERGIDANPEKIAAITNMGPIKDLKGVQRVMGCLAALSRFISRLGERGLPLYRLLRKTERFTWTPEAEEALGNLKAILTSMPILVPPAAGEALLIYVAATTQVVSAAIVVERQEEGHALLVQRPVYFISEVLSETKIRYPQIQKLLYALSAALIQPKLWTMFFDGSLMKIGAGVGLLFISPLGKHLRYVLRLHFPASNNVAEYEALVNGLSIAFELGVRRLDARGDSQLVIDQFMKNSHCRDPKMEAYCDEVRRLEDKFYRLELNHVARRYNETADELAKIASGRTTVPXDVFSRDLHQPSIKTDDTPEPKEASAQPEAPSTXPEAPSAPEDPVPAXISTEESYPSTEPRLGDWRNAPSRSSCWVMRRSSTTAAPQAPSKDAYPSSKCLEPSLETPSDKVSTGQPRCPTPLGLYAPAKGVNSTQGRHTCPLRPCKQYPSPXFAVWGLDLVGPLQKAPRGYTHLLVAIDKFSKWIEVRPLNNIRSEQAVAFFTNIIHRFGVPNSIIIDNDTQFTGRKFLDFCEDHRIRVDWAAVAHPMTNGQVERANGMILQGLKPRIYNDLNKFGRRWMKELPSVVWSLRTTPSRATGFTLFFLVYGAEAILPTNLEYGSPRTRAYDDRSNQTSREDSLDQLEEARDMALLHLARYQQSLRRYHARGVRSRDLQVRDLVLRLRQDARGRHKLTPPWEGPFIIAKILKPGTYKLA

SEQ ID NO: 300644 - protein, 1645 aa, Zea mays
  unsure (1)..(1645): unsure at all Xaa locations
  Clone ID: MRT4577_37258C.1.pep
MGSLQQPLQLGTLLRFGSFEFMSLDGSYDMVLLPPQRDGNNGCRLARQRRTRRRLPPMAEEEHSGLSHRPPCRRRRRRGNRGHAGGDTSSAIRPERVDDAGTPAGAMSGVVLAPETTTGVASPQRANPKRTDDASTLAKDLLGVSLVPEITVQSVPDATSPPSIDQEVPFVFHSVPFRFSFDPPSDPASVSASARAYPDPPGYHIWSSWDRLTVVSTSGPTGSEEDDDSDFGWDFSGLSDPNAMRDFMSACDYCLSGCFDDGHSLGVEGCDPSRECFHIDQGDHGEDNHLGMPQDDNTPVPASRVDIPRELAVVPVPAGGQDTQLEQFREMQTKLDEEAGXASVRRAESSASXRQGCPSEHRATSSRLMREASVHTGRTRDGTPMAPDRLGDEHHFRDHRARLEEKVRRGYHPRRGGRYDXRTELPNITDSDVTGAFLAGTTCRDLVSKLGRKTPTKASKLMDIATKFASGQEAVEAIFRKDKQPQGRQKEDAPEAFVQRGSKKKAKKKVQAKRDAIDADLVAAAEHRNPRKPPGGVNTFDKMLKESCPYHRGGTLGRRWQGPRQQQEGGDKEEEFPEVHDCFMIYGGPVANASTRHRKQERRDVCSVKVAVPVYLDWSDKPITFNQGDHPDYVPSPGRYPLVIDPIIGNARLTKVLMDGGSSLNIIYVETIGLLGIDLSTIWAGATPFHGIVPGKRVLPLGQLDLPVCFGTPSNFRRETLTFEVVGFRGTYHAVLGRPCYAKFMAVPNYMYLKLKMSGPKGIITVGSTYHHAYECDVECVEYAEAIAESEAPDAKHHIGNFEPAEAVKTIALDPSNDACKQEAVLVDFLRANAEIFAWSPSDMPGIPRDVTEHSLDIRAGARPVKQHLRHFDEEKRRAIGEEIHKLMAAGFIKEVFHPEWLANPVLVKKKGGKWRMCVDYTGLNKACPKVPYPLPRIDQIVDSTAGCETLSFIDAYSCYHQIKMKESDQLATSFITPFGMYCYITMPFGLGNAGATYQRCMNHVFGEHISRTVEAYIDDIVVKTRKASDLLSDLEVTFGCLRAKGVKLNPEKCVFGVPRGMLLGFIVSERGIEANPEKIAAITNMGPIKDLKGVQRVMGCLAALSRFISRLGEKGLPLYRLLRKVERFTWTPEAEEALGNLKALLTNTPILVPPAAGEALLIYVAATTQVVSAVIVVERQEEGHTLLVQRPVYFISEVLSETKIRYPQIQKLLYAVILTRQKLRHYFKSHPVTVVSSFPLGEIIQCREASGAGASLLFISPLGKHVHYVLRLHFPASNNMVEYEALVNGLRIAVELGVRRLDARGDSQLVIDQVMKNSHCRDRKMEAYCDEVRRLEDKFHGLELNHVARRYNETADEVAKIASGRTTVPPDIFSRDIYQPFVKLDDAPEPDETSAAEGEALRIEGERNGVAPNQNWXPRTCNISSEESCPSTRTKLGDWLSAPSRSFYWVMKKSCTTAAPQAFSNGAYPSSKDKSCYKKYTRGLAVTMQHLGPSSETLSDKKAPGGFKHLLVAIDKFSKWIEVRPLTSIRSEQAVAFFTNIIHHFGVPNSIITDNGTQFTGKKFLDFCEDHHIHVDWAAVAHPMTNGQVEHANGMILQGLKPRTYNGLNKFGKRWVKELPSVVWSLRTTPSRATGFSPFFLVYV

SEQ ID NO: 300645 - protein, 96 aa, Zea mays
  Clone ID: MRT4577_37259C.1.pep
LLRRVLFRPLFPLLRNLLEELLDTKLATLFPALSLAMPVHIAHFCQHWVHLFMLLVLILLLMRVSLLTKQITIYIGIYVGRLLNAMFNNTTELIIE

SEQ ID NO: 300646 - protein, 67 aa, Zea mays
  unsure (1)..(67): unsure at all Xaa locations
  Clone ID: MRT4577_3725C.1.pep
HQQGRLXEQHPVQPPPPFSPRNGRKNQEKKMVMSPPTCQRVSPQSLASKRAFGLQKRRLIAPLTSPR

SEQ ID NO: 300647 - protein, 45 aa, Zea mays
  Clone ID: MRT4577_37260C.1.pep
RTARSLKQSPTEGTGPPCRCYSGGRSSRGQASFLNRARTEGSKRT

SEQ ID NO: 300648 - protein, 696 aa, Zea mays
  Clone ID: MRT4577_37261C.1.pep
MAREEQEQSALGAAHVHHHQPPAGGCGLSANPTAAAAEYAHEQGYSVVLPEKLHTGKWNVYRSAHSPLRLINKFPDNPEIGTLHDNFVYAVETFRDCRYLGTRIRPDGTVGDYKWMTYGEASTSRTAIGSGLIYHGISEGARIGLYFINRPEWIILDHACAAYSYVSVPLYDTLGPDAVQFIVNHATVEVIFCVPQTLSAILSFITQMPCVRLIVVVGGDDSNMPSAPATTECKIMTYNRLHNEGKMSPQTFRPPKPEDIATICYTSGTTGTPKGAVLSHENLIANVAGSSLGIKFYPSDVYISYLPLAHIYERANQVALLHYGVAIGFYQGDNLRLMDDLAVLRPTIFASVPRLYNKIYAAITNAVKESGGLRERLYHTAYNAKRHAMINGRNPSPMWDKLVFNKIKARLGGRMRLMTSGASPLSPDVMEFLRICFGEVLEGYGMTETSCVISTMNIGDRSIGHVGSPNPSCEVKLVDVPEMNYTSEDQPYPRGEICVRGPIIFWGYYKDEVQTREVIDEDGWLHTGDIGLWLPGGRLKIIDRKKNIFKLAQGEYIAPEKIENVYAKCKFIAQCFIYGDSFNSSLVAIVAVEPDVLKAWAASEGIQYEDLRQLCADPRATAAVLADMDSIAKEAQLRGFEFAKAVTLVAEPFTLDNGLLTPTFKVKRPQAKAYFAKEISDMYSRLLETELARSKL

SEQ ID NO: 300649 - protein, 127 aa, Zea mays
  unsure (1)..(127): unsure at all Xaa locations
  Clone ID: MRT4577_37262C.1.pep
VDVPEMNYTSEDQPYPRGEMCVRGPIIFCGYYKDEVQTXLLSLHIYLHPLNKXPLNFDKCIXTCRREVIDEDGWLHTGDIGLWLPGRRLKIIDRKKNIFKLTQGEYIAPEKIENVYAKCKFIAQCFI

SEQ ID NO: 300650 - protein, 211 aa, Zea mays
  Clone ID: MRT4577_37263C.1.pep
ATICYTSGTTGTPKGAVLSHENLIANVAGSSLGIKFYPSDVYISYLPLAHIYERANQVALLHYGVAIGFYQGDNLKLMDDLAVLRPTIFASVPRLYNKIYAAITNAVKQSGGLRERLYHTAYNAKRHAMINGRNPSPMWDKLVFNKIKARLGGRMRLMTSGASPLSPDVMEFLRICFGEVLEGYGMTETSCVISTMNIGDRSIGYGWSSEV

SEQ ID NO: 300651 - protein, 75 aa, Zea mays
  Clone ID: MRT4577_37264C.1.pep
KSGTKIEHPLEIGAPQTRVGSKHTPPSPDPATANHSTPWPLRSDPLARGPLQLQPPTRSNATQRNHHTSTPMDGN

SEQ ID NO: 300652 - protein, 78 aa, Zea mays
  Clone ID: MRT4577_37265C.1.pep
WGLLKMRPSNPERKGVMGINPEVFKVSPPFLLVEKKKTNGHPLKDQKVLNQKIRPAPKKIVWACQGDHSNQKQEHQSC

SEQ ID NO: 300653 - protein, 99 aa, Zea mays
  unsure (1)..(99): unsure at all Xaa locations
  Clone ID: MRT4577_37266C.1.pep
GAGRAVXRXRXXPPVVXALXPPVAXRXVXLPPPPARRXXXGXXXAXXXXXRGPPXXXRRXXRCXPPPRXXXXSXXSXLMXEPVAPRCSXXSAGXSELGW

SEQ ID NO: 300654 - protein, 174 aa, Zea mays
  Clone ID: MRT4577_37267C.1.pep
MSMALSRFTQWLWPGGAAARVDTHEHPSGGLTSSSFPDFPSGFREPDTVTFYTGRQRARPRRVRNRRRSRGEPRVDREYDMVIVPSDGGGCLSGSDSDDSDWSIGWLEPQAPELQTDGDPENCFAVLVPCYRHGRQEQQPGRHEGRFLGAGTLTNGGFSDGKNFVEQWLSSLQN

SEQ ID NO: 300655 - protein, 44 aa, Zea mays
  unsure (1)..(44): unsure at all Xaa locations
  Clone ID: MRT4577_37268C.1.pep
GGYTPCFRKHXKRLCLLSCASLVMLSDGLHGIWIIPLCQTHALW

SEQ ID NO: 300656 - protein, 75 aa, Zea mays
  Clone ID: MRT4577_37269C.1.pep
MMKLLLLLPLACLVSSADEPLPFSGQLNTIFLAAKCVDSIKEDSQARILMREVNFFNKYTLMSMTFYVRRNGTCQ

SEQ ID NO: 300657 - protein, 98 aa, Zea mays
  unsure (1)..(98): unsure at all Xaa locations
  Clone ID: MRT4577_3726C.1.pep
QAGLAADRRTACILNTRKALLLCNYLLMVAGFRCMILTLTLRLLIDQSGLLLILLXHAVTVVFSVVGCLGSLTEPASPAQRHIEHTVGAVLTVIFQGA

SEQ ID NO: 300658 - protein, 114 aa, Zea mays
  Clone ID: MRT4577_37270C.1.pep
PSDKVMQGYAYILTHPGVPCIFYDHMFDWNLKQEISTLSAIRARNGIRADAWVRILVADADAYVAVVDEKVMVKIGTRYDVSSVVPSDFHPAAHGKDYCVWEKASLRVPAGRHL

SEQ ID NO: 300659 - protein, 83 aa, Zea mays
  Clone ID: MRT4577_37271C.1.pep
SFLLFILFFHFPNSNFLCAYVLFTLLPLYIHLFSLLYTNFFYHSKQPLFLQHILKIHHLNHILPIHPLMEKQILLLTLTLHLN

SEQ ID NO: 300660 - protein, 73 aa, Zea mays
  Clone ID: MRT4577_37272C.1.pep
LVCSYSFNYTYHYLGFVLGAGTSEREAKTYQGRESRPSGLNRNARGLPLFSFGGGKKFFKNATLFYNPRGGIQ

SEQ ID NO: 300661 - protein, 38 aa, Zea mays
  Clone ID: MRT4577_37273C.1.pep
LVSAGLGYDSWGASCRVRFRFSMQFKPSPGCSGSGYQQ

SEQ ID NO: 300662 - protein, 111 aa, Zea mays
  Clone ID: MRT4577_37274C.1.pep
CDLRPETPPCLVGPECCGAPKVFGPSSCRAALLGGAFLRLVGGGFVLVSARLGWEVCLWAGFIGLLVFFRPLLGPVGVVARRGWVVLCSLPPLWARLRGGCYLGGNYTECK

SEQ ID NO: 300663 - protein, 70 aa, Zea mays
  unsure (1)..(70): unsure at all Xaa locations
  Clone ID: MRT4577_37275C.1.pep
LRQLDFVCHRATCDHTSHTQSSSAVETVSVVMLDVIADVSLHCCVASPACVSGCTVVXKPLSTVETVNNA

SEQ ID NO: 300664 - protein, 733 aa, Zea mays
  unsure (1)..(733): unsure at all Xaa locations
  Clone ID: MRT4577_37276C.1.pep
MGSLQQPLXPGMVLRFGSLEFMSFDGSYDMILLPPPCDNDNGGRQPARRRRNRRRLPRVVGEQHSSSPSPLPHRWRRRRGNQGHAGGSASSAVERVDSAGTPTRGAPDIDLAFETKTSTVSPRHANPEQADDASALAESLLDVTLVPETTAQSVPDVTSSPLVDQKVPNSHPTSFGFSLNPPSDLALADALVGASPNPLGFCMWSPWDRLTDVSTYGPSGSEEDDEPSICWDFSGLGNPSAMRDFMTACDYCLSGRSDGSRSLDNEDCGPSRECFHVDLGGPFEGNLLGMPEDGDPPRPARLDEGAGALEPIRRDVGQAWANQPPAGEIRHLPQGLQHRVADDIRVRPPPASSGVGQNLAAAAMLLRAMSEPSTTEGRRIQGELKNLLEGAAVRRAESSASRRQGYPLEPHAATSRFMREASVYTGRTRNTAPAAPGRLGNEHHHRDRRAHLDERVRRGYHPRRGGRYDSGEDLSPSSEPPDDDNLIIRNLPLFLSDTARAWLEHLPPGQISNWDDLVQAFAGNFQGTYVRPGNSWDLRSCRQQPGESLRDYIRRFSKQRTELPNITDSDVIGAFLAGTTCRDLVSKLGRKTPTRASELMDIATKFASSQEAVEAIFRKDKQPQGRPPEDAPEASTQRDAKKKGKKKSQAKRDAADADLVAAAEYKNPQKPPGGANLFDKMLKESCPYHQGLVKHTLEECAMLRRHFHRAGPPAEGGRARDDDKKEDHQAGEF

SEQ ID NO: 300665 - protein, 1044 aa, Zea mays
  unsure (1)..(1044): unsure at all Xaa locations
  Clone ID: MRT4577_37277C.1.pep
MGSLQQPLQPGTVLHFGSLEFMSLDGSYDMILIPPPGDSDNGGRQPARRRRNRRRLPRVVEEQPSSSPRPLPRRRRGRRGNQGQAGGSASSAIERVDSASTPTGGAPGIDLALETKTSAVSPQRADSGQTDDASALAKGLLDVTLVPETTVQSVPDVTSSPPVDQEVPIDSQPTSFGFSLDPPSGFALAGALVEASPNPLGFRMRSPWDRLADVSTYGPSGSEEDDEPSFCWDFSGLGNPSAMRDFMTACDYCLSGCSDGSRSLGDEDCGPSRECFHVDLGGPSEGNHLGMPEDGDLPRPVPRVDIPRELVVVPVQAGGHNPQLEQIRGVQARLDEGAGALEPIRRDVGQAWAGQPPAGEIRHLPQGFQHRIADDVRVRPPPASSGVGQNLAAAAMLLRAMPEPSTTEGRRIQGKLKNLLEGAAVRRAESSASRRQGYPSEHHAATSRFMREAXSVYTGRTHNTAPAAPGRLGNEHHHRXDRRAHLDERVRXRGYHPRRGGRYDSGEDRSPSPEPPGPQAFSRAIRRASFPTRFRPPTTITKYSGETRPELWLVDYRLACQLGGTDDDNLIIRNXPLFLSDTARAWLEHLPPGQISNWDDLVQAVAGNFQGTXVIGAFLAGTTCRDLVSKLGRKTPTRVSELMDIATKFASDQEAVEAIFRKDKHPQGRPSEDAPEASTQRGAKKKGKKKSQAKRDAADADLVAAAEYKNPRKPPGGANLFDKMLKEPCPYHQRPVKHTLEECVMLRRHFHRAGPPAEGGRAHDDDKKEDHQAGEFPEVRDCFMIYGGQAANASARHRKQERREVCSVKVAAPVYLDWSDKPITFDQADHPDHVPSPGKYPLVVDPVIGDVRLTKVLMDGGSSLNIIYTETLGLLRVDLSSVRAGAAPFHGIIPGKRVQPLGQLDLPVCFGTPSNFRRETLTFEVVGFRGTYHAVLGRPCYAKFMAVPNYTYLKLKMPGPNGVITVGPTYTHAFECDVECVEYAEALAESEALIADLESLSKEVPDVKRHAGNFEPAETVKSVPLDLSGDASKQIRIGFELGPK

SEQ ID NO: 300666 - protein, 1044 aa, Zea mays
  unsure (1)..(1044): unsure at all Xaa locations
  Clone ID: MRT4577_37278C.1.pep
MGSLQQPFQPGTVLRFGSLEFMSLDGSYDMILLPPPCDSDNGGRQPARRRRNRRRLPCVVEEQHSSSPRPLPRRRRRRRGNQGQAGGDTSSAVERVDGAGAPTGGTTGIDLLFETKTSAVSPQHANSKQTDDASTLAKGLLGVTLVPETTVQSVPDVTSSPPVDQEVPTDSHLTPFGFSLDPPSDFALADALVEASPNPLGFRMRSPWDWLTDVSTYGPSGSEEDDVSDFCWDFSGLGNPSAMRDFMTACDYCLSDCSDGSRSLGDEDCGPSRECFHVDLGGPSEGNHLGMPENGDLPRPVPRVDILRELAVVPVQVGGHDPQLEQIRGVQARLDEGAGTLEPIRRDIEQEWAGQPPAGEVRHLPQGIQHRIADDVRVRPPPASSGVGQNLAAAVMLLHAMPEPSTTEGRRIQGELKNLLEGAAVRQAESSASRRQGYPSEHRAATSRFMREASVHTGRTRDTAPVASGRLDNEHHHRNRRAHLGERVRRGYHPRHGGRYDSGEDRSHSPEPPGPQAFSRAIRRAPFPTRFRTPTTITKYSGETRPELWLADYRLACQLGGTDDDNLIIRNLPLFLSDTARACCRQQSGESLRDYIRRFSKQHTELPNITDSDVIGAFLAGTTCRDLVSKLGRKTPTRASELMDIATKFASGQEAVEAIFRKDKQPQGRPPEDAPEASTQRGAKKKGKKKSQAKHAAADADLVAAAEHKNPRKPPGGANLFDKMLKELCPYHQGPVKHTLEECAMLRRHFHRVGPPAEGGRACDDDKKEDHQAGEFPEVRDCFVIYGGQAANTSARHRKQERREVCSVKVAAPVYLDWSDKPITFDQADHPDHVPSPGKYPLVVDPIIGDVRLTKVLMDGGSSLNIIYAETLGLLRVDLSSVRAGGAPFHGIIPGKRVQPLRQLDLPICFGTPSNFRRETLTFEVVGFRGTYHAVLGRPCYAKFMTVPNYTYLKLKMPGPNGVITVGPTYRHAFECDVECVEYAEALAEFEALIVDLESLSKEVPDVKRHAGNFEPAETVKSXPLDLSSDASKHIRIGSELDPE

SEQ ID NO: 300667 - protein, 57 aa, Zea mays
  Clone ID: MRT4577_37279C.1.pep
QGSPNLALPPCPNIPVPMDLGIRPKRRSPATSTPPLISLKDSTHSRRFKNGEFSSPS

SEQ ID NO: 300668 - protein, 63 aa, Zea mays
  Clone ID: MRT4577_3727C.1.pep
NGVLTAVCGIGTAAPKEEGENGQGQQHSKNGDQKAAFGGVHLVPVSCHRRRSRLPNPRFPTQS

SEQ ID NO: 300669 - protein, 1671 aa, Zea mays
  unsure (1)..(1671): unsure at all Xaa locations
  Clone ID: MRT4577_37280C.1.pep
MPGRGLLRVDEQLPVKLQMGSLQQPFQPGTILRFESLEFMSLDGGYDMILLPPPRDGDNGGRQPARRRWNQQRLPHVAEEQHSGLSRHLPRRRRRRRGNHGQAGGGTSSAVERVDGAGAQTGDTSGDDLASEMKTSAVSPQHANSKRTNDASTLARDLLGVTLVPEMTVQSAPDATSSPPVDREVPTDSRLVPFRSSCDPPSDPALVDAFIKACSNPPGYHMQSPWHRLTAVSTYGPSGSEEDDEPDFCWDFSGLGNPSAMRDFMTACDYCLSDCSDGSRSFGDEDCGPSRECFHVDLGGPGESNHLGXDEGAGTLEQFRQNIGQESADRAPAGEVRHLPQGIQLRIADDVRARPPPASSGVGXNLAAAAILLPAMPEPSTTKGRCIXGELKNLLEDAAVXRAESSASRRQGYPSEHRAATSRFMREASVHTGRTRNTAPAAPGRLGNEHHHRNRQAHLDERXAEATTPGVGDATTTGRIGVPRPNHPGTYVRPGNSWDHRSCRQQPGESLRDYIRRFSKQRTELPNVTDSDVIGVFLAGTTCRDLVSKLGRKTPTRASELMDIATKFASGQEAVEAIFRKDKQPQGRQPEDVPEASTQRGTKKKGKKKSQAKRDAANADLVAAAEYKNPRKPLGGANLFDKMLKEPCPYHQGPIKHTLEECVMLRRHSHRAGPPAEVANTSARHRKQERREVCSVKVAAPVYLDWSDKPITFDQGDHPDRVPSPGKYPLVVDPVIGNVRLTKVLMDGGSSLNIIYAETLGILQIDLSSIQAGVTPFHGIIPEKRVQPLGQLDLPVCFGTPSNFRRETLTFEVVSFRGTYHAVLGRPCFAKFMAVPNYTYLKLKMSGPNGVITVGPTYRHAYECDVECVEYAEALAESEALIADLESLSKEAPDMKRHAGNFEPAEMVPYPLPRIDQIVDSTAGCETMSFLDAYSGYHQIKMKESDQLATSFITPFGMYCYVTMPFGLRNAGATYQRCMNHVFGEHIGRTVEAYVDDIVVKTRKASDLLFDLEATFRCLKAKGVKLNPEKCVFGVPRGMLLGFIISERGIEANPEKIVAITNMGPIKDLKGIQRVMGCLAALSRFISRLSERGLPLYRLLRKTESFTWTPEAEEALGNLKALLTNAPILVPLAAGEALLIYVAATTQVVSAAIVVERREEGHALPVQRPVYFISEVLFETKICYPQIQKLLYVVILTRRKLRHYFESHPVTVVSSFPLGEIIQCREASGRIAKWAVEIMGETISFAPRKAIKSQVLADFVAEWVDTQLPVALIQPELWTMFFNGSLMKTGAGAGLLFISPLGKHLRYVLRLHFPASNNVAEYEALVNGLRIAIELGLVIDQVMKNSHCRDPKMEAYCDETADELAKIVSGRTTVPPDVFSRDLHQPSVKTDDTPEPEKASALPEAPSAQHEAPSARPEAPSVQPETPSAPEAPRALVGNAFRQGFYWPTTVADATRIVRTCQGCQFYARQTHLPAQALQTIPITWPFAVWGLDLINPLQKAPGGYMHLLVAIDKFFKWIEAVAFFTNIIHRFGVPSSIITDNDTQFTGRKFLDFCKDHHIRVDWATVAHPMTNGQXRWMKELPSVVWSLRTTPSRATGFTPFFLVYGAEAILPTDLEYSSPRARAYDDQSNQTNREDSLDQLEEARDMALLHSARYQQSXRXCYHARGVRS

SEQ ID NO: 300670 - protein, 879 aa, Zea mays
  unsure (1)..(879): unsure at all Xaa locations
  Clone ID: MRT4577_37281C.1.pep
MPFGLRNAGATYQRCMNHVFGEHIGRTVEAYVNDIVVKTRKASDLLSDLEVTFRCLKAKGVKLNPEKCVFGVPRGMLLGFIVSERGIEANPEKIAAITSMGPIKDLKGVQRVMGCLAALSRFISRLGERGLPLYRLLRKAECFTWTPEAEEALGNLKALLTKAPILVPPAAGEALLVYVAATTQVVSAAIVVERQEEGHALPVQRPVYFVSEVLSETKIRYPQVQKLLYAVILTRRKLRHYFESHPVTVVSSFPLGEIIQCREASGRIAKWAVEIMGETISFAPRKAIKSQVLADFVAEWVDTQLPTAPIQPELWTMYFDGSLMNTGSGAGLLFISPLGKHLRYVLRLHFPASNNVVEYEALVNGLRIAIELGVRRLDARGDSQLVIDQVMKNSHCRDPKMEAYCDEVRCLEDKFYGLELNHIARRYNETADELAKIASGXRTTVPPNVFSWDLHQPSVKIDDTPEPEAPSAQSEVPSVQPEVPSAQPEAPSARPEAPSVQPEVPSASEGEALRFEEEQSGATPDRNWQTPYLQYLQQGELPLDRAEARRVARRAKSFVLLGEEKELYHRSPSGILQRCSSVTEGQELLREIHSGACGHHAAPRALVGNAFRQGFYWPTAVADATRIVRTCEGCQFYAKQTHVPAQALQTIPITWPFAVWGLDLVGPLQKAPGGYTHLLVAIDKFSKWIEVRPLNSIRSEQAVAFFTNIIHRFGVPNSIITDNGTQFTGRKFLDFCEDHHIRVDWAAVAHPMSNGQVERANGMILRGLKPRIYNDLNEFDKRWMKELPSVVWSLRTTPSRATGFTPFFLVYGAEAVLPIDLEYGSPRTRAYSDQSNQASREDSLDQLEEARDKALLHSARYQQSLRRYHARGVRSRDLQ

SEQ ID NO: 300671 - protein, 1066 aa, Zea mays
  unsure (1)..(1066): unsure at all Xaa locations
  Clone ID: MRT4577_37282C.1.pep
MGSLQQPLRPGAVLRFGTLEFMSFDGSYDMILLPPPRDNDNGGRQPARRRWNRRHLPRVVEEQPSSSLRSLPCQRRRRRGHQGQAGGRASSAVERIDAPDAPTEGTPDVDLAFKTKASAVPPRHADPEQEDDAGALAESLQDVALVPEMTVQPVPDVTTSLLVDQKVPTNSHLTSFRLGLNPPNDHVLAGALIEASATPLGFRMRSPWDRLTDVSTYGPSGSEEDDDPSICWDFSGLGNPSAMRDFMTACDYCLSDCSDGSRSLDDESCGPSRECFHIELGDPSEGNHLDMPEDGDLPRPVPRADIPRELAVVPAPAGGYDPQLEQVREAQARLNEGTGALEPIRRDVGQAWAGQPLAGEIRHLPQGLQHRVANDARVRPPPASSGVGQNLAAAAMLLRAMPEPSTTEGRRIQGELKNLLEGAAARRAESTASRRQGYPSEPHAATSRFMREASVYTGRTRNTAPAAPGHLGNEHHRRDRRAHLDERVRRGYHPRRGGRYDSGEDRSPSPEPPGPQAFSRAIRRAPFPTRFRPPTTITKYSGETRPELWLADYRLACQLGGTDDDNLIIRNLPLFLSDTARAWLEHLPPGQISNWDDLVQAFAGNFQGTYVRPGNSWDLRSCRQQPGESLRDYIRRFSKQRTELPNITDSDVIGAFLAGTTCRDLVSKLGRKTPTRASELMDIATKFASGQEAVEAIFRKDKQPQGRPSEEAPEASAPRGAKKKGKKKSQSKRDAADADLVAAAEYKNPRKPPGGXPVKHTLEECVMLRRHFHRAGPPAEGGRARDDDKNEDHPAGEFPEVRDCFMIYGGHAANTSARHRKQERREVCSVKVAAPVYLDWSDKPITFDQADHPDHVPSPGKYPLVVDPVVGDVRLTKVLMDGGSCLNIIYVETLKLLRVDLSSVRAGAAPFHGIIPGKRVQPLGRLDLPVCFGTPSNFRRETLTFEVVGFRGTYHAVLGRPCYAKFMAVPNYTYLKLKMPGPNGVITVGPTYKHAFECDVECVEYAEALAESEALIADLENLSKEVPDVKRHAGNFEPAETVKAVPLDPSGDTTKQIRIGSGLDPK

SEQ ID NO: 300672 - protein, 222 aa, Zea mays
  Clone ID: MRT4577_37283C.1.pep
GRDLLPASPSARCSSGVFSLLCSPELLQLDRSASPSLFPCELDSCSPMEFFQLPAPVTRARRPAPWMLALLAAILLGQRSPFSALSLYSLLIGSRLPLPPMDASRAPGSCLCFCSEFPWPELSPSPDLTQSPSLALSILQLPLCLFSLLGRVCSATESDPLLCTQSRPVSCSPVRPLGSLDFNSQSRRRSRRLPSSRRTCHPLLKPHLTSSLQTRSRRRASP

SEQ ID NO: 300673 - protein, 1772 aa, Zea mays
  unsure (1)..(1772): unsure at all Xaa locations
  Clone ID: MRT4577_37284C.1.pep
GDRQPARRRRNRRHLPRVXRRRGNQGQAGGRASSAVERIDVPSAPTGGASGVDLVFETKASAVPPRHANPEQVDDTSALAESLRDVALVPETTVQSVPDVTMSLLVDQKVLTDSHLTSFRLGLNPPSDLALAGALVEASATPLEFHMRSPWDRLTDVSTYGPSGSEEDDDPSICWDFSGFGNPSAMRDFMTACDYCLSDCSDGSRNLDDENCGPSRECFHVELGDPSEGNHLGMPEDGDLPRPVPRADIPRELVVVPVPAGGHDPQLEQVRGAQARLDEGAGALESIRRDVGQVRAGQPPAGEIRHLPQGFQHRVANDVRVRPPPASSGVVQNLAAAAMLLRAMPEPSTTEGRQIQEELKNLLEGAAVRRAESSAFRRQGYPSEPHAATSRFMREASVCTGRTRNTAPAAPGHLGNEHHRRDRRAHLDKRVRRGYHPRRGGRYDSGEDRSPSPEPPGPQAFSRAIRRAPFPTRFRPPTTITKYSGETRPELWLADYHLACQLGGTDDDNLIIRNLPLFLSDTARAWLEHLPPGQISNWDDLVQAFAGNFQGMYVRPGNSRDLRSCRQQPGESLRDYIRRFSKQRTELPNITDSDVIGAFVAGTTCRDLAPEASTPRGAKKKGKKKSQAKRDAADADLVAAAEYKNPRKPPGGANLFDKMLKEPCPYHQGAVKHTLEECVMLRCHFPRAGPPAEGDRARDDDKKEDHQAGEFPEVRDCFMIYGGHAANALARHRKQERREVCSVKVAAPVYLDWSDKPITFDQADHPDHVPSPGKYPLVVDPIVGDVRLTKVLMDGGSCLNIIYAETLRLLRVDLSSVRAGAAPFHGIIPGKRVQPLGRLDLPVCFGTPSNFRRETLTFEVVGFRGTYHAVLGRPCYAKFMAVPNYTYLKLKMPGPNGVITVGPTYKHAFECDVECVEYAEALAESEALIADLENLSKEVPDVKRHAGNFEPAETVKAVPLDPSSDTTKQVPYPLPRIDQIVDSTAGCETLSFLDAYSGYHQIRMKESDQLATSFITPFGMYCYVTMPFGLRNAGATYQRCMNHVFGEHIGRTVEAYVDDIVVKTRKASDLLSDLEVTFRCLKAKGVKLNPEKCVFGVPRGMLLGFIVSERGIEANPEKIAAITSMGPIKDLKGVQRVMGCLAALSRFISRLGERGLPLYRLLRKAECFAWTPEAEEALGNLKALLTKAPVLVPPADGEALLVYVAATTQVVSAAIVVERQEEGHALPVQRPVYFISEVLSETKIRYPQVQKLLYAVILTRRKLRHYFESHPVTVVSSFPLGEIIQCREASGRIAKWAVEIMGETISFAPRKAIKSQVLADFVAEWVDTQLPTAPIQPELWTMFFDGSLMKTGAGAGLLFISPLGKHLRYVLRLHFPASNNVAEYEALVNGLRIAIELGVRRLDARGDSQLVIDQVMKNSHCRDPKMEAYCDEVRRLEDKFFGLELNHIARRYNETADELAKIASGRTTVPPDVFSRDLHQPSVKLDDAPEVSSAQPEVPSAQPEVPSAQPEAPSAQPEVLSAPEGGALNVEEGQSGATPDQDWQAPYLQYLRRGELPLDQVEARRVARRAKSFVLLGDEEELYHRSPSGILQRCISIAEGRELLQEVHSGACGHHAAPRALVGNAFRQGFYWPTAVADATRIVRTCEGCQFYAKRTHLPAQALQTIPITWPFAVWGLDLVGPLQKAPGGYTHLLVAIDKFSKWIEVRPLNSIRSEQAVAFFTNIIHRFGVPNSIITDNGTQFTGXKNSWIFARITISGWTGPPWLIPCRMGK

SEQ ID NO: 300674 - protein, 1756 aa, Zea mays
  unsure (1)..(1756): unsure at all Xaa locations
  Clone ID: MRT4577_37285C.1.pep
QPLQPGTVLRFGSLEFMSFDRSYDMILLPPPRDNDNGDRQPARRRRNRRRLPRVAEEQPSSSSRLLPRRRRGRQGNQGQAGGSASSAVEQVDSASTPTGGAPGIDFALETKTSAVSPRHTNPEQADDASMLAKSLLDVTLVPETTVRSVPDVTLSPLVDQEVPTDSHPTSFGFSLNPPSDLALAGALVEVSPNPLGFRMRSPWDRLTDVSTYGPSGSKEDDEPSICWDFSGLGNPSAMRDFMTACDYCLFDCSDGSRSLGDEDCGPSRECFHVDLGGPSEGNHLGMPEDGDLPRPVPRVDIPRELAVVPVQAGGHDPQLEQIRGVQARLDEGAGALEPIRRDVGQAWAGQPPAGEIRHLPQGFQHRVADDVRVRSPPASSGVGQNLAAAAMLLRAMPEPSTTEGRRIQGELKNLLEGAAVQRAESSASRRQGYPSEPHAATSRFMREASVYTGRTRNTAPAAPGRLGNEHHHRDRRAHLDERVRRGYHPRRGGRYDSGEDRSPSPEPPGPQAFSRAIRRAPFPTRFRPLTTITKYSGETRPELWLADYRLACQLGGTDDDNLIIRNLPLFLSDTARAWLEHLPPGQISNWDDLVQAFAGNFQGTYVRPGNSWDLRSCRQXPGESLRDYIRRFSKQRTELPNITDSDVIGAFLAGTTCRDLVSKLGRKTPTRASELMDIATKFASGQEAVEAIFRKDKQPQGRPLEDAPEASTQRGAKKKGRKKSQAKRDAANADLVAAAEYKNPRKPPGGANLFDKMLKEPAGPPAEGGRARGDDKKEDHQAGEFPEVHDCFMIYGGHAANPSARHRKQERRESDKPITFDQADHPDHVPSPGKYPLVVDPVIGDVRLTKVLMDGGSSLNIIYAETLRLLRVDLSSVRAGAAPFHGIIPGKSVQPLGRLDLPVCFGTPSNFRRETLTFEVVGFRGTYHAVLGRPCYAKFMAVPNYTYLKLKMPGPNGVITVGPTYKHAFECDVECVEYAEALAESEALIADLESLSKEVPDVKRHAGNFEPVEMVKAVPLDPSGDASKQIRIGSGLDPKQEAVLVDFLRANTDVFAWSPSDMPGIPXGCRRALAGYXRAGARPVKQPLRRFDEEKRRAIGEEVHKLMAAGFIKEAKGVKLNPEKCVFGVPRGMLLGFIVSERGIEANPEKIAAITSMGPIKDLKGVQRVMRCLAALSRFISRLGERGLPLYRLLRKAECFTWTPEAEEDLGNLKALLTKAPILVPPAAGEALLVYVAATTQVVSAAIVVERQEEGHALPVQRPVYFVSEWAVEIMSETISFAPRKAIKSQVLADFVAEWVDTQLPTAPIQPELWTMFFDGSLMKTGAGAGLLFISPLGKHLRYVLRLHFPASSNVAEYEALVNGLRIAIELGVRRLDARGDSQLVIDQVMKNSHCRDPKMEAYCDEVRRLEDKFYGLELNHVARCYNETADELAKIASGRTTVPSDVFSRDLHQPSVKIDDTPEPEVPSAQSEAPTAQPEVPSAQSEAPSAHPEAPSARPEAPSVQSEVPSAPEGEALRIEEEQSGVTPNRNWQTPYLQYLHQRELPLDRVEARRVARRAKSFVLLGDEKELYHRSPSGILQRCISIAEGQELLREIHSGACGHHAAPRALVGNAFRQGFYWPTAVADATRIVRTCEGCQFYARQTHLPAQALQTIPITWPFAVWGLDLVGPLQKAPGGYTHLLVAIDKFSKWIEVRPLNSIRSEQAMAFFTNIIHRFGVRNSIITDNGTQFTGRXSWTSARTTTSGWTGPPWLIP

SEQ ID NO: 300675 - protein, 1087 aa, Zea mays
  Clone ID: MRT4577_37286C.1.pep
MPGIPREVAEHSLDIRAGARPVRQPLRRFDEEKRRVIGEEIHKLMAAGFIKEVFHPEWLANPVLVRKKGGKWRMCVDYTGLNKACPKVPYPLPRIDQIVDSTAGCETLSFLDAYSGYHQIRMKESDQLATSFITPFGMYCYVTMPFGLRNAGATYQRCMNHVFGEHIGRTVEAYVDDIVVKTRKASDLLSDLEVTFRCLKAKGVKLNPEKCVFGVPRGMLLGFIVSERGIEANPEKIAAITSMGPIKDLKGVQRVMGCLAALSRFISRLGERGLPLYRLLRKAECFAWTPEAEEALGNLKALLTKALLTKAPILVPPADGEALLVYVAATTQVVSAAIVVERQEEGHTLPVQRPVYFISEVLSETKIRYPQVQKLLYAVILTRRKLRHYFESHPVTVVSSFPLGEIIQCREASGRIAKWAVEIMGETISFAPRKAIKSQVLADFVAEWVDTQLPTTPIQPELWTMFFDGSLMKTGAGAGLLFISPLGKHLHYVLRLHFPASNNVAEYEALVNGLRIAIELGVRRLDARGDSQLVIDQVMKNSHCRDPKMEAYCDEVRRLEDKFFGLELNHIARRYNETADELAKIASGRTMVPPDVFSRDLHQPSVKLDDTPEPEVPSAQPEVPSAQPEVPSAQPEVPSAQPEVPSAQPEAPSAPEGRALNVEEGQSGATPDRDWRAPYLQYLRRGELPLDQVEARRVARRAKSFVLLGDEEELYHRSPSGILQRCISIAEGRELLQEVHSGACGHHAAPRALVGNAFRQGFYWPTAVADATRIVRTYEGCQFYAKRTHLPAQALQTIPITWPFAVWGLDLVGPLQKAPGGYTHLLVAIDKFSKWIEVRPLNSIRSEQAVAFFTNIIHRFGVPNSIITDNGTQFTGKKFLDFCEDHHIRVDWAAVAHPMSNGQVERANDMILQGLKPRIYNDLNKFGKRWVKELPSVVWSLRTTPSRATGFTPFFLVYGAEAILPTDLEYGSPRARAYTEQSNQASREESLDQLEEARDRALLHSARYQQSLRRYHARGVRSRELQVGDLVLRLRQDARGRHKLTPPWEGPFVIAKVLKPGTYKLANNQGEIYGNAWNIKQLRRFYP

SEQ ID NO: 300676 - protein, 121 aa, Zea mays
  Clone ID: MRT4577_37287C.1.pep
QDGSGWDGNLEDGDDTIESEFRRLVDDLHTYHELGADPSFSFLLVVVVVAGATLLLLALALEIILAGGAGVAVCCRCGSSADGDGSSSSSSSPPPAPDDVPAASAVTTGGGATGGAVGLPR

SEQ ID NO: 300677 - protein, 188 aa, Zea mays
  unsure (1)..(188): unsure at all Xaa locations
  Clone ID: MRT4577_37288C.1.pep
XMXVAYYEAWVALASFDDQLLQSGCLGGILQRRPLSSFVYACSCWFEPYTKDFFPXKLWMDWVCIYATFLEMILWLFGRKFKPQNRKVFFRGIFFLGEKKKKKVFLAKKKKKKGRAPPPPPFFFSFFFGGGFFRPGGKKKRKKIFFCRGKKIFFFPXSHPQQKKPGGKKKKKKKQRGGGAVFLVPPPP

SEQ ID NO: 300678 - protein, 117 aa, Zea mays
  unsure (1)..(117): unsure at all Xaa locations
  Clone ID: MRT4577_37289C.1.pep
AQVKLSARAMFSYPLIHGVNMLAISARDATMLDECKQEIXLMPARINNVKRKLYYRLSLKLKNTKNWSTILSHIFTFSYTRMNKTHSDNMTDKWLIYMTNDGLXIVARLLLSKCDYL

SEQ ID NO: 300679 - protein, 119 aa, Zea mays
  Clone ID: MRT4577_3728C.1.pep
GLPLVFFFCDCLYISRTAAYYIATVTFLPSPDILPVHALFRYQQGSYPPQVILKPTSSSCQKWRCPPASGTGGVLLNTFAGVGSHVLLNVLYFVQPYPPKVKCLSSINWLNRNQGKGFS

SEQ ID NO: 300680 - protein, 169 aa, Zea mays
  Clone ID: MRT4577_37290C.1.pep
SVPAISHAVKSALVRAGYGGVDIVVAETGWPTRGDAGEPGATVENARAYVSNLVAHLRSGAGTPLMPGRSVDTYLFALYDEDLKPGPTSERSFGLYHTDLTMAYDAGLTSNSNAGGGTGTAAPAQPKAGGWCVELRLPGVRHAHLREPKLRRMRVHRGRPIIHRVAAHD

SEQ ID NO: 300681 - protein, 778 aa, Zea mays
  Clone ID: MRT4577_37291C.1.pep
MLLGFIVSERGIEANPEKIAAITSMGPIKDLKGVQRVMGCLAALSRFISRLGERGLPLYCLLRKAECFTWTPKAEEAFGNLKALLTNAPILVPPAAGEALLIYVTATTQVVSAAIVVERQEEGHALPIQRPVYFVSEVLSETKIRYPQVQKLLYAVILTRRKLQHYFESHPVTVVSSFPLGEIIRCREASGRIAKWAVEIMGEAISFAPRKAIKSQVLADFVAEWVDTQLPTAPIQPELWTMFFDGSLMKTGAGAGLLFISPLGKHLRYVLRLHFPASNNVAEYEALVNGLRIAIELGVRRLDARGDSQLVIDQVMKNSHCRDPKMEAYCDEVRRLEDKFYGLELNHIARRYNETADELAKIASGRTTVPPDVFSRDLHQPSIKIDDTPEPEAPSAQPEVPSAQSEASLARPEAPSARPEPPSVQPEAPSAPEGETLHVEGERSGITPNQNWQTPYLQYLHRGELPLDRAEARQLARRAKSFVLLGDGKELYHRSPSGILQRCISIAEGQELLRQIHSGACGHHTAPRALVGNAFRQGFYWPTAVVDATRIVRTCEGCQFYARQTHLPAQALQTIPITWPFAVWGLDLVGPLQKAPGGYTHLLVAIDKFSKWIEVRPLNSIRSEQAVAFFTNIIHRFGVPNSIITDNGTQFTGRKFLDFCGAAVAHPMSNGQVERANGMILQGLKPRIYNELNKFGKQWMKELPSVVWSLRTTPSRATGFTPFFLVYGAEAVLPTDLEYGSPRTRAYTDQSNQVSREDSLDQLEEARDKALLHSARYL

SEQ ID NO: 300682 - protein, 64 aa, Zea mays
  Clone ID: MRT4577_37292C.1.pep
YLLKIGGAKGLKRLLYVGLFLFPKKIVPNPLVEMASRVFKPDPVGHVSLKLAYGQIGKSFLVPP

SEQ ID NO: 300683 - protein, 127 aa, Zea mays
  Clone ID: MRT4577_37293C.1.pep
AERLCLAPCTAATATLRVLACVSRPPTLSPCFPQRLRSLSPLASSPAAAASWAAANIPTTLPVSSISVGNELLNSGDPTLAPQLLPAMQNLLAALPAGSTTKISTVHSMAVLSASDPPSSGAFHPDL

SEQ ID NO: 300684 - protein, 81 aa, Zea mays
  Clone ID: MRT4577_37294C.1.pep
PPRVFFFFFFFFFFFFFFFFCFLFDSFTAATVQSPDWIQRSIQGGSLLFIHSKRGGKRARENQHPHSTKLNMEEPGAQKPE

SEQ ID NO: 300685 - protein, 163 aa, Zea mays
  Clone ID: MRT4577_37295C.1.pep
GRVGGRVGGRVGSVDTYLFALYDEDLKPGPTSERSFGLYHTDLTMAYDAGLTSNSNAGGGTGTAAPAQPKAGGWCVARDGASDAELQADLDYACSQVGVDCGAIQPGGACFEPNTVHAHAAYAMNQLYQAAGRQPWNCDFRASATLTSENPSYGACVYTGGGQ

SEQ ID NO: 300686 - protein, 139 aa, Zea mays
  Clone ID: MRT4577_37296C.1.pep
MPVAAHELRRQMSMPPALAATFASCGSGGGGHGWRRNLAGGGDGDGDGELGWRAPRPTAGGVGAVVRALWAWIARGRRKVVISRTGSSVKEQQYGHEEYAQNFDEGGAAREPENLSRSFSARYARQAAPWDGARRRRRG

SEQ ID NO: 300687 - protein, 417 aa, Zea mays
  Clone ID: MRT4577_37297C.1.pep
MGMRRRQDAAAILGLLKLFLFRLAASQSFIGVNYGTIADNLPPPASTASLLMSTSIAKLRLYEPQPDLVAALAGSNISILLGIPNGAVPNLASSPAAAASWAAANIPTTLPVSSISVGNELLNSGDPTLAPQLLPAMQNLLAALPAGSTTKISTVHSMAVLSASDPPSSGAFHPDLAGSLDPVLDFLHQNGAPFMINPYPYFAYASDTRPETLAFCLFQPNAGRVDAVSGLTYTNMFDAQLDAIRAALDAKGYSDVEIVIAETGWPYKGDADEAGATVDNAKAYNSNLVAHLKSQVGTPRTPGKSVDTYIFALYDEDLKGGPESERSFGLYKTDLTANYDVGLAKDNGTAAPTSLTPVPAQGTPQPSKGTMPTGYCETTSAVPGTTQGQQLPQSSSCYIPGGLSRGTPHGSLFYWVF

SEQ ID NO: 300688 - protein, 118 aa, Zea mays
  Clone ID: MRT4577_37298C.1.pep
ARGRKLGIRLEETGTYRWMAPEVINHKPYDHRADIFSFAVVLWELVTSKGMRLEIPSWVNPQLSKLIQRCWDENPNLRPSFSEITAELEGMLRDHQASKGSNKHSKAKAHKKSQREAE

SEQ ID NO: 300689 - protein, 249 aa, Zea mays
  Clone ID: MRT4577_37299C.1.pep
VPPGLPRPIPTPSPCLLHRASPWPPTEARRPFLLFLPRRRLVPSLLASTRSGPAVTSPRPLESRLARPPITPFPHALLQVRPPVMLLPSTSNCAPCPASIGRCASSSAIQHRAQAPLISLKSGHAAPLVTVAQSLGVCPYLSVEPLVPPSTHQPHHRALSLCPHGPAGARRPPPPHRCCSPAVAHMRQVRAVRCRTLQPFSERRHRDFSASRVLLLVVLNRSVSTVLRHVCFLSSCSTDPFLLSVLLYR

SEQ ID NO: 300690 - protein, 100 aa, Zea mays
  Clone ID: MRT4577_3729C.1.pep
MKRNPRVTSSRRKCRKAHFTALFYVRRVLMFVVLSTELRHKFNVRSIPIRMDDEVHVVRGTYHGREVKVVQVYRRLWVIHVERIIREKVNGCTVNVGIHP

SEQ ID NO: 300691 - protein, 98 aa, Zea mays
  Clone ID: MRT4577_372C.1.pep
PGLVSVRLAWCLVGGVVVFWRLRFGFGAGSCLPLFCVCASLWCCLCVLGRAPSPWWLFFSSLCGLGCRRPVFLCPSLPLRLLSGRRARGSPPGFRGGA

SEQ ID NO: 300692 - protein, 54 aa, Zea mays
  Clone ID: MRT4577_37300C.1.pep
EVWETRNWFGLSPRQNITNSTIYCSEDTRHGYGLGLLAGGHLRRGQGPVTGDGR

SEQ ID NO: 300693 - protein, 399 aa, Zea mays
  unsure (1)..(399): unsure at all Xaa locations
  Clone ID: MRT4577_37301C.1.pep
KVVGDYVAGSSRGECRNPPMFKMLFFTXDKPKLLAQLSALLSEVGLNIREAHVFSTTDGFCLDVFVVDGWDTKETDTLLQILKETAARNHASXQTQPILQPQKEXGTTREDWXSNIDRNFLQIGEKIASGSSGDLHRGTYQGMDVAVKFLRTEHVNDSSKVEFLQEIIILKSVNHDNVGRFYGACTKQRKYVIVTEYMPGGNLYDFLHTLKNTLDLPTVLRIAIGISKGMDYLHQNNIIHRDLKTANLLMGSDYVVKIADFGVSRNPSQGGDMTAETGTYRWMAPEVINHKPYDHRADIFSFAVVLWELVTSKIPYRNLTPLQAALGVRQGMRLEIPSWVNPQLSKLIQRCWDENPNLRPSFSEITAELEGMLRDHQASKGSNKHSKAKAHKKSQREAE

SEQ ID NO: 300694 - protein, 367 aa, Zea mays
  Clone ID: MRT4577_37302C.1.pep
PPTRPRTRGDDGNGGGGGGKETSTPSRLRKLLQSISFNERVQQLTGGSPAKKKSTVIRLSYKTTSSCGGDDYEDGGGGGGGECGRSKKYVVRPKVGQTVPCGGERPATGCWSRMDPSLFKLRSDTFLKDKKKCAAPNYAAYYPIGVDLFACPKKVHHIAQHLDLPQIKTHPKIPSLLIVNIQMPTYPATMFLGDSDGEGLSLVLYFRVSECYDKEVSEHFKESMMRFFEDETEKVKGFTSESTVSYRDRLKIMAGLVNPDDLQLGSTERKLVQAYNEKPVLSRPQHSFYEGEDYLEVDLDIHRFSYIARKGLDSFRARLKNGILDLGLTIQAQKQSELPEQVLCCVRLNKIDFTDQEVPTIVTVDDT

SEQ ID NO: 300695 - protein, 101 aa, Zea mays
  Clone ID: MRT4577_37303C.1.pep
MGGFAIHPAHGRPSDSLPSAGTGRSTTSSSASSLDDNGVRGQQARTPGHTLEEPPSRRRHQAGSSSRPARLFQRLRHALPLLTLAPRCGRMPQVGTPAEIA

SEQ ID NO: 300696 - protein, 122 aa, Zea mays
  Clone ID: MRT4577_37304C.1.pep
MVDQGWRNLTMVTQCLTLFTACGGSRVQWQNSGRSTGRPFLPRPRAHSTQCRESPRPPRNHRTPAEAEGGYRQDVQAQRRMSKWTRKVSWAWRAICRAANTASMIGSYAARFGGSGHPQLRR

SEQ ID NO: 300697 - protein, 46 aa, Zea mays
  Clone ID: MRT4577_37305C.1.pep
NGDITETPVPQSYILGYINYCLVLCQLIIKPCVNDLGPRSNHGYIY

SEQ ID NO: 300698 - protein, 62 aa, Zea mays
  Clone ID: MRT4577_37306C.1.pep
HLNPWSPVSSSCISSMAGASVSSALLASLVKLPMIPPPLLYTGPCSLQPSSLKRKKQVFCGH

SEQ ID NO: 300699 - protein, 340 aa, Zea mays
  unsure (1)..(340): unsure at all Xaa locations
  Clone ID: MRT4577_37307C.1.pep
ITDDQLQEYHRIKEDAGMKTAKLRDEKEVIEKKLNADAEAKKNLVENMQQLESRKDEISSQERELQTKLSKILHSIPKLENELTHLHEEHNKIAKERQSSGSEYQMLKQRLDEIETQLRELKADKHESERDARLKETVGRLKRLFPGVHGRMLELCRPSQKKYNLAVTVAMGKFMDAVVVEDENTGKECIKYLKEQRHPPQTFIPLQSVRVKPIIEKLRTLGGSAQLVFDVIHFPRLLVGAALLAVGITLVCVYLVGPMAFCGRADRLIVVTVDGILLTKSGTMTGGTSGGMEARXNKWADSTIESLKKEENLLENKMSELGSPKELQRKELPYLRKNWT

SEQ ID NO: 300700 - protein, 204 aa, Zea mays; identical to SEQ ID NO: 299733
  Clone ID: MRT4577_37308C.1.pep

SEQ ID NO: 300701 - protein, 130 aa, Zea mays
  Clone ID: MRT4577_37309C.1.pep
RKSTWHTAAFHDGGDCCLFWSLLDRLPMPQLGIASPVHPRQTISVGIFICRDYSKITVELIGSFHASLLTPCSSMELQNPPGICYPGTHDCFPDHAPQLTKLHYPVGIHQRYEIQIIPSPASSSAQCTQG

SEQ ID NO: 300702 - protein, 163 aa, Zea mays
  unsure (1)..(163): unsure at all Xaa locations
  Clone ID: MRT4577_3730C.1.pep
LFLPLXXALXXRXPLVXXLXXXXXXXXXXXLVXAPLAAXSXXXXFLXFXXXAALXSASXLXXXXXPFXXXPAAXPXXFLXFXXLXXLXSPAFFFLXXXXPFXXXAGVXPAXVGXXPPLLPFXXXVAPXAGKKXQLPXFLPFNQLALTNPAAFYQQPIIGGALF

SEQ ID NO: 300703 - protein, 100 aa, Zea mays
  Clone ID: MRT4577_37310C.1.pep
LPRSTGFLRELSRGSGGWSNTGVAVALGAGRRRTLVSWRRKTVPGAVDLRGNGRDEIKHRNLVGPLDRRWMDMISFLSIKSRPVDLDRTTLDYRGGFVVD

SEQ ID NO: 300704 - protein, 233 aa, Zea mays
  unsure (1)..(233): unsure at all Xaa locations
  Clone ID: MRT4577_37311C.1.pep
VLGPTADALSDSHVWGFTVCCTVSRCGAGAYKYVSELWRRKQSDVMRFVQRVRCWEYRQQPAIVRLTRPTRPDKARRLGFKAKQGYVVYRVRVRRGGRKRPVPKGIVYGKPKHQGITQLKFQRNKRSVAEERAGRKLGGLRVLNSYWVNEDSTYKYFEIILVDVAHTAIRNDPRINWLCNPVHKHRXELRGLTSAGKKFRGLRGKGHTHHKNRPSRRATXWKRNQTLSLRRYR

SEQ ID NO: 300705 - protein, 102 aa, Zea mays
  unsure (1)..(102): unsure at all Xaa locations
  Clone ID: MRT4577_37312C.1.pep
YSARGFGGGELEDGRTLADYNIQKESTLHLVLRLRGGMQIFVKTLTGKTITLEVESSDTIDSAKSXFLDKEGXPPDQQRGRRXGTHPEXGRTXADHNXQKES

SEQ ID NO: 300706 - protein, 1008 aa, Zea mays
  unsure (1)..(1008): unsure at all Xaa locations
  Clone ID: MRT4577_37313C.1.pep
GGRQPARRRRNRQHLPREVEEQHSSSLRSLPRQRRRRRGHQGQAGGRASLAVERIDAPPTPXDGSLQDVALVPEMTVQPVPDVTTSLLVDQKVPTNSHLASFRLGLNPPNDLALAGALIEASATPLGFRMRSPWDRLTDVSTYGPSGSEEDDDPSICWDFSGLGNPSAVRDFMTACDYCLSDCSDGSRSLGDESCGPSCECFHIELGDPSEGNHLGMPEDGDLPRPVPRADIPRELAMVPAPAGGYDPQLEQVREAQARLNEGTGALEPIRQDVGQVWAGQPLAGEIRHLPQGLQHRVANDVRVRPPPASSGVGQNLAAAAMLLRAMPEPSTTEGRRIQGELKNLLEGAAARRAESTASRRQGYPSEPHAATSRFMREASVYTGRTRNTAPAAPGHLGNEHHRRDRRAHLDERVRRGYHPRRGGRYDSGEDQSPSPEPPGLQAFSRAIRRAPFPTRFRPPTTITKYSGETRPELWLADYRLACQLGGTDDDNLIIRNLPLFLSDTARAWLEHLPPGQISNWDDLVQAFAGNFQGTYVCPGNSWDLRSCRQQPGESLRDYIRRFSKQRTELPNITDSDVIGAFLAGTTCRDLVSKLGRKTPTRASELMDIATKFASGQEAVEAIFRKDRQPQGRPSEEAPEASALRGAKKKGKKKSQSKRDTADADLVAAAEYKNPRKPPGGANLFNKMLKEPCPYHQGSVKHTLEECVMLRRHFHRAGPPAEGGRARDDDKNEDHQAGEFPEVRDCFMIYGGHAVNASARHRKQERREVCSVKVAAPVYLDWSDKPITFDQADHPDHVPSPGKYPLVVDPVVGNVRLSKVLMDGGSCLNIIYAETLKLLRIDLSSVRAGAAPFHGIIPGKRVQPLGRLDLPVCFGTPSNFRRETLTFEVVGFRGTYHAVLGRPCYAKFMVVPNYTYLKLKMPGPNGVITVGTTYKHAFECDVECVEYAEALAESEALIADLENLSKEVPDVKRHAGNFEPAETVKAVPLDPSGDTTKQIRIGSGLDPK

SEQ ID NO: 300707 - protein, 1869 aa, Zea mays
  unsure (1)..(1869): unsure at all Xaa locations
  Clone ID: MRT4577_37314C.1.pep
MGNLQQPLQPGTVLRFGDLEFMSLDDSYDMILLPPSRDNDNGGRQPARRRRNRRHLPHVAEEQHSGLSRHLPRRWRRRRGRHGQAGGGTSSAVERVDGSGAPAGDMSGVDLASETKTSVVSPQHANPNCDPPSDPASVDAFIKACPNXSEVPYAVTLGPTDGRLXPTGLWVPRKMTSPTLVGISXGLGDSSAMRDFMTACDYCLSDCSDSSHSLGDEDYGPSCECFHVDLGGLDEGNHLGMLEDGDPPRPAPRIDILRELAVVPVPAGDQDAQLEQIREMQARLDEEAGQLVQLRQNIGQEWAGRAPAGEARHLSQDVQHCIADDARARLPPASSGVGQNLAAAAILLRAMPEPSTIEGRRIQGELKNLLEDAAVRRTESSASRRPGYPXEHRAATSRFIREASVHTGRTRNTAPAASGRLGNEHHRDRRAHLEEKVRRGYHPRRGGRYNSGEDRSPSPEPPGLRAFSRAIRRAPFPTRFXTPTTITKYXGESKPKLWLADYRLACQLGVTDDDNLIIRNLPLFLSDAARAWLEHLPPAQISNWDDLVKAFVGNLQGTYVRPRNSWDLRSCRQQPGESLRDYIRRFLKQRTELPNITDSDVIGAFLSGTTCRNLEAVEAIFRKDKKPQGRQPEDVPEASAQRGVRKKGKKKSQAKRDAADVDLVTAAEHRNPRKPHGGANLFDKMLKESCPYHQGPVKHTLEECVMLRRYFHKVGPPVEGGRAPDNDKKEGHKAEEFPEVHECFMIYGGHVANASARHRKQERREVCSVKVAAPVYLDWSDKPIIFDQGDHPDRVPSPRKYPLVVDPIIGNIRLTKVLMDGGSSLNIIYAETLGLLQIDLSSIRADAAPFHGIILGKRVQPLGQLDLPVCFGTPSNFRKETLTFEVVGFRGTYHAVLGRPCYAKFMSVPNYTYLKLKMSGPNGVITVGSTYRHAYECDVECVEYAEALAESEALTADLESLSKEASDAKRHAGNFEPAETEAVLVDFLRANAEVFAWSPSDMPRIPRDVAEHSQDIRAGARPVKQPLRRFDEEKRRAIGEEIHKLMAAGFIKEVFHPEWLANPVLVRKKGGKWWMCVDYTGLNKACPKVPYPLPRIDQIVDSTAGCETLSFLDAYSGYHQIRMKESDQLATSFITPFGMYCYITMPFGLRNAGSTYQTCMNHVSGEHIGRTVEAYVDDIVVKTRKASDLLSDLETTFKCLKAKGVKLNPEKCVFGVPRGMLLGFVVSERGIEANPEKIAAITNMGPIKDLKGVQRVMGFLAALSRFISCLDERGLPLYRLLRKTERFTWTPEAEEALGNLKALLTSAPILVPPAVGEALLIYVAATTQVVSAVIMVERREEGHALPVQRLVYFISEVLSETKIRYPQIQKLLYAVILTRRAGAGLFFISPLGKHLRYVQRLHFPASNNVAEYEALVNGLRIAIELGMEAYCDEVRRLEDKFFGLELNHMARRYNETADELAKIASGRTTVPPDVFSRDLHQPSVKTNDTPEPEKASAQPEAPSAPEGEALRVEGERNGVTPNRNWQTPYXNISTEESYPSIEPKLGGLRGAPNRSSCWVTGRSSTTAAPQASSSDAYPSPKRLDPLLETPSDKXYWPTAVADATRIKALGGYAHLLVAIDKFSKWIEVRPLNSIRFEQAVAFFTNIIHCFGVPNSIITDNDTQFTGRKFLDFCEDHHIRVDWAVVAHPMTNGQXWMKELPSVVWSLRTTPSRATGLTPFFLVYGAEAILPTDLEYGSPRTRAYDDRSNQSNREDSLDQLEGARDIALLHSARYQQSLRRYHVRGVRSRDLXVGDLVLRLRQDARGRHKLTPPWEGPFIIAKILKPGTYKLANSQGEVYNXLGTSDNYVASTLKMFSSRSYTSFTYANKV

SEQ ID NO: 300708 - protein, 113 aa, Zea mays
  Clone ID: MRT4577_37315C.1.pep
MLSSSASRRDAARSGAELPRPHAVAGMARSGELPKGAPSATAPDAVRCEGWMVRHGRRKIGRSFFHTRYFVLDNGVLAYYKKKPRDHMVSTCHASSARCMPLKPEPLVCGIRL

SEQ ID NO: 300709 - protein, 1744 aa, Zea mays
  unsure (1)..(1744): unsure at all Xaa locations
  Clone ID: MRT4577_37316C.1.pep
MGSLQQPFQPGTVLRFGSLEFMSLDGSYDMILLPPPCDSDNGGRQPARRRRNRRRLPRVVEEQHSSSPRPLPRRWRRRRGNQGQAGGGPSSAVEQVDGAGAPTGGASGIDLAFETKTSAVSPRHANSEQTDDASTLAKGLLGVTLVPRTTVQSVPDVTSSPPVDQEVPTGSHLTPIGFSLDPPSDFALADALVEASPNPLGFCMRSPWDRLTDVSTYGPLGSEEDDEPDFCWDFSGLGNPSSMQDFMTTCDYCXSDCSGGSRSLGDELEQTRXVQARLDEGAGALEPIRRDVGQEWAGQPPSGEVRHLPQGIQHRITDDVRMRPPPSSSGVGQNLAAAAMLLRAMPEPSTTEGRRIQGELKNLLEGAAVQWAESSASRRQGYPSEHHAATSRFMREASVHTGRTRNTAPVAPGRLGNEHHHRDRRAHVDERVRRGYHPKHGGRYNSGEDRSPSPEPPGPRAFSRAIRRAPFPTRFRPPTTITKYSRETRPELWLADYRLACQLGGTDDDNLIIRNLPLFLSDTARAWLEHLPPGQISNWDDLVQAFAGNFQGTYVRPGNSWDLRSCRQQPGESLRDYIRRFSKQRTELPNITDSDVIGAFLAGTTCRDLVSKLGRKTPTRASELMDIATKFASGQEAVEAIFRKDKQPQGRPPEDAPEASTQRGAKKKGKKKSQAKRDAADADLVAAAEYKNPRKPPGGANLFDKMLKESCPYHQGPVKHTLEECAMLRRHFHRAGPPAEGGRARDDDKKEDHQAGEFPEVRDCFMIYGGQAANASARHRKQERREVCSVKVAASVYLDWPDKPITFDQVDHPDHVPSPGKYPLVVDSVIGDVRLTKILMDGGSSLNIIYAETLGLLRTDLSSPLGQLDLPVCFRTPSNFRRETLTFEVVGFRGTYHAVLGRPCYTKFMAIPNYTYLKLKMSGPNGVITAGPTYRHAYECDVECVEYAEALAESEALIADLESQRRRPSDMXRHTEGCRRALAGYPSWSPTREAASAPIRRRKAQSHRRGDPQANGSXFIKEVPYPLPRIDQIVDSTAGCETLSFLDAYSGYHQIRMKESDQLATSFITPFGMYCYVTMPFGLRNAGATYQRCMNHVFGEHIGRTVEAYVDDIVVKTRKASDLLSDLEATFWCLKAKGVKLNPEKCVFGVPRGMLLGFIVSERGIEANPKKIAAITNMGPIKDLKGVQRVMGCLAALSCFISRLGERGLPLYPLLRKAECFTCTPEAEEALGNLKALLTNAPILVPPATGEALLIYVAATTQVVSTAIVVERREEGHALPIQRPLYFISEVLSETKIRYPQIQKLLYAVILTWRKLRHYFESHPVTVVSSFPXGEIIQCREASGRIAKAGASLLFISPLGKHLRYVLRLHFPXASNNVAEYETLVNGLHITIELGVRRLDARGDSQLVIDQVMKNSHCRDPKMEAYCDEVWRLEDKFYGLELNHVTRRYNETADELAKIASGRTTVPPDVFSRYLHQPSVKTDDTPEPEAPSAQPEAPLAPEGEALRFEEEWNGVMPNRNWQTPYLQYLHRGELPLDRAEARRLARRAKLFVLLGDGKELYHRSPSGILQRCISIAEGQELLQEIHSGACGHHAAPRALVGNAFRQGFYWPTAVADATRIVRTCQGCQFYARQTHLPAQALQTIPITWPFAVWGLDLVGPLQKAPGGYTHLLVAIDKFSKWIEVRPLNSIRSEQAMAFFNNIIHRFGVPNSIITDNGTQFTGRXSWTSARITTSGWTGPPWLTP

SEQ ID NO: 300710 - protein, 72 aa, Zea mays
  Clone ID: MRT4577_37317C.1.pep
VACHRVCRQLQQVLSRPLHFHVGNQDQVWCRSKSTCHFSMSSCRRPLQPERMFSITAASPYSLVCHIQILAA

SEQ ID NO: 300711 - protein, 109 aa, Zea mays
  unsure (1)..(109): unsure at all Xaa locations
  Clone ID: MRT4577_37318C.1.pep
MLAEAVKKMXTFKSSNEEEFKEEQEESMEPQTIRHMIDDDCADHGVPLPKDVSKILYEGIDNCKKHIXAPSQQRPHSNGGGEDVGDASGKSSAASEDILINGYADFVRV

SEQ ID NO: 300712 - protein, 1082 aa, Zea mays
  Clone ID: MRT4577_37319C.1.pep
MGSLQQPLRPGTVLRFGALEFMSFDGSNDMILLPPPCDHDNGGRQPARRRRNRRRLPRVVEKQHSGSLRSLPRQRRRRRGRQGQTGGRASPAVERIDAPDAPTEGTPDIDLAFKTEASAVPPRHDDPEQEDDAGALAESLQDVALEPEMTAQPVPDVTTSLLVDQKVTTNSHLASFRLGLNPPNDLVLAGALIEASATPLRFCMRSPWDRLTDVSTYGPSGSEEDDDPSIGWDFSGLGNPSAVRDFMAACDYCLSDCSDASRSLGDESCGPSRECFHIELGNPTEGNHLGMPEDGDLPRLVPRADIPRELAVVPAPAGGYDPQLEQVREAQARLNEGTGALEPIRRDVGQAWVGQPLAGEIRHLPQGLQHRVANDVRIRPPPASSGVGQNLATAAMLIRAMPEPSTTEGRRIQGELKNLLEGATARRAESTASRRQGCPSEPHAATSRSMREASVYTGRTRNTAPAAPGHLGNEHHRRDRRAHLDERVRRGYHPRRGGRYDSGEDRSPSPEPPGPQAFSRAIRRAPFPTRFRPPATIVKYSGETRPELWLADYRLACQLGGTDDDNLIIRNLPLFLSDTTRAWLEHLPPGQISNWDDLVQAFAGNFQGTYVRPGNSWDLRSCRQRPGESLRDYIRRFSKQRTELPNITDSDVIGAFLAGTTCRDLVSKLGRKTPTRASELMDIATKFASGQEAVEAIFRKDKQPQGRPSEEAPETSAPRGAKKKGKKKSQSKRDAADADLVAAAEYKNPRKPPGGANLFDKMLKEPCPYHQGPVKHTLEECVMLRRHFHRAGPPAEGGRARDDDKNEDHQAGEFPEVRDCFMIYGGHAANASARHRKQERREVCSVKVAAPVYLDWSDKPITFDRADHPDHVPSPGKYPLVVDPVVGDVRLTKVLMDGGSCLNIIYAETLKLLRVDPSTVRAGAAPFHGIIPGKRVQPLGRLDLPVCFGTPSNFRRETLTFEVVGFRGTYHAVLGRPCYAKFMAVPNYTYLKLKMPGPNGVITVGPTYKHAFECDVECVEYAEALAESEALIADLENLSKEVPDVKRHAGNFEPAETVKAVPLDPSGDTTKQIRIGSGLDPK

SEQ ID NO: 300713 - protein, 175 aa, Zea mays
  unsure (1)..(175): unsure at all Xaa locations
  Clone ID: MRT4577_3731C.1.pep
SCWGDLPWRALLPRRPDGSGEAGPASPRSEGRGAXRRRSSLRSTAPVGALAERVVVTPAPPERAGAGPPEPHPQSVAARAVVTVRRRRKEDAKRRVAEQLDAYADRVGRSVLLELISTETDPRKGGPKKSRRSALVGWFEKXDVKTERVVYPADFTVDGSFREPGRVTVLNRHQR

SEQ ID NO: 300714 - protein, 43 aa, Zea mays
  Clone ID: MRT4577_37320C.1.pep
YRCSSKITILGLYALNRGRGSVNKMDIDVSHVMTQKLFYTNKA

SEQ ID NO: 300715 - protein, 522 aa, Zea mays
  unsure (1)..(522): unsure at all Xaa locations
  Clone ID: MRT4577_37321C.1.pep
MFFDGSLMKTGAGAGLLFISPLGKHLLYVLRLHFPASNNAAEYEALVNGLRIAIKLGVRRLDARGDSQLVIDQVMKNSHCRDPKMEAYCDEVRRLEDKFYGLELNHIARRYNETADELAKIASGRKTVPPDVFSRNLHQPSVKTDDTPEPEKASAQPEAPSAPSEAPSARPEAPSAPEGEALRVEEERSGVMPNRNWQTPYLQYLHRGELPXDRAEARRLARRAKSFVLLGDGKELYHRSPSGILXRCISFAEGQELLQEIHSGACSHHAAPRALVGNAFRQGFYLPTAVADATRIVRTCKGCQFYARQTHLPAQALQTIPITWPFAVWGLDLIGPLQKAPGGYTHLLVAIDKFSKWIEVRPLNSIRSEQAVAFFTNIIHRFGVPNSIITDNGTQFTGRKFLDFCEDHHIRVDWAAVAHPMTNGQVERANGMILQGLKPQIYNDLNKFGKQWMKELPSVVWSLRTTPSRATGFTPFFLVYGAEAILPTDLEYGSPRTRAYADQSNQVNREDSLDVASQKFKF

SEQ ID NO: 300716 - protein, 44 aa, Zea mays
  Clone ID: MRT4577_37322C.1.pep
LAVLRFEGLVPHILVTLDFDKLPCDKKKKKKRGCPIVGVWGGRS

SEQ ID NO: 300717 - protein, 1082 aa, Zea mays
  Clone ID: MRT4577_37323C.1.pep
MGSLQQPLRPGTVLRFGTLEFMSFDGSYDMILLPPPRDYDNGGRQPARRRRNRRRLPRVVEEQHSGSLRSLPRQRRRRRGRQGQTGGHASPAVERIDAPDAPTEGTPDVDLAFETEASAVPPRHADPEQEDDAGALAESLQDVALEPEMTAQPVPDVTTSLLIDQKVTTNSHLASFRLGLNPPNDLVLAGALIEASATPLRFRMRSPWDRLTDVSTYGPSGSEEDDDPGIGWDFSGLGNPSAVRDFMTACDYCLSDCSDGSRSLGDESCGPSRECFHIELGDPTEGNHLGMPEDGDLPRPVPRADIPRELAVVPAPAGGYDPQLEQVREAQARLNEGTGALEPIRRDAGQAWVGQPLAGEIRHLPQGLQHRVANDVRIRPPPASSGVGQNLATAAMLIRAMPEPSTTEGRRIQGELKNLLEGAAARRAESTASRRQGYPSEPHAATSRFMREASVYTGRTRNTAPAAPGHLGNEHHRRDRRAHLDERVRRGYHPRRGGRYDSGEDRSPSPEPPGPQAFSRAIRRAPFPTRFRPPTTITKYSGETRPELWLADYRLACQLGGTDDDNLIIRNLPLFLSDTARAWLEHLPPGQISNWDDLVQAFAGNFQGTYVRPGNSWDLRSCRQQPGESLRDYIRRFSKQRTELPNITDSDVIGAFLAGTTCRDLVSKLGRKTPTRASELMDIATKFASGQEAVEAIFRKDKQPQGRPLEEAPEASAPRGAKKKGKKKSQSKRDAADADLVAAAEYKNPRKPPGGANLFDKMLKEPCPYHQGPVKHTLEECVMLRRHFHRAGPPAEGGRAHDDDKNEEHPAGGFPEVRDCFMIYGGHAANTSARHRKQERREVCSVKVAAPVYLDWSDKPITFDRADHPDHVPSPGKYPLVVDPVVGDVRLTKVLMDGGSCLNIIYAETLKLLRVDPSSVRAGAAPFHGIIPGKRVQPLGRLDLPVCFGTPSNFRRETLTFEVVGFRGTYHAVLGRPCYAKFMAVPNYTYLKLKMPGPNGVITVGPTYKHAFECDVECVEYAEALAESEALIADLENLSKEVPDVKRHAGNFEPAETVKAVPLDPSGDTTKQIRIGSGLDPK

SEQ ID NO: 300718 - protein, 283 aa, Zea mays
  Clone ID: MRT4577_37324C.1.pep
MGKLGAKSDYESLRDARISENMARMEMLGLLRCAGELSDIASASSHRAAGSATPRKTPRPRVTSMTPLRRSGRLLAATPTRPTGSASTHRCSTRLNGQGTGVLSKLTAAGSEEEDDTWEDDKEGKWAVAVAKERVQALQERRCDSRGRGGAYDSVLGICCHFCRQKKLCGEGDCKRCGEGDLKQPCLGKTECSSCHSSNGILCRACLKVRYGEEMEEVRKNKNWLCPHCVEEKGIKKFWICNSSFCLKKRKIPPTGIAIYNAREQGYESVAHLLMDRLKRQAF

SEQ ID NO: 300719 - protein, 94 aa, Zea mays
  unsure (1)..(94): unsure at all Xaa locations
  Clone ID: MRT4577_37325C.1.pep
MTTIGGLLMGIGRSFRRKRSSSLDILSPKRAPRDFYKGKNCKPTGFHTRKGGYVVQPDKLPNYVVPDLTGFKLKPYVSQCPIQVNTXESTEASK

SEQ ID NO: 300720 - protein, 56 aa, Zea mays
  Clone ID: MRT4577_37326C.1.pep
RISGVNQPFRPPGTGLNFLFQEAGRSRGPQSSLGLDRNGNPPGPAGVLSFFALMSS

SEQ ID NO: 300721 - protein, 83 aa, Zea mays
  Clone ID: MRT4577_37327C.1.pep
NVGPHGRDEVMPVCLRLGGGIGRGVGLSIGRGHLWPTSQLRCSYIYGWSPCRHAGRESVDSRKRIAPILGSTNGVDKTHGSTD

SEQ ID NO: 300722 - protein, 114 aa, Zea mays
  Clone ID: MRT4577_37328C.1.pep
GASGNLDGSVYSVLIHGHCRAGNVMKALSFHKQMLQRGFAPNSTSTISLIRGLFENGMVVEADQVIQQLLNCCSLADAEASKALIDLNLNEGNVDAVLDVLHGMAKDGLLPSPR

SEQ ID NO: 300723 - protein, 84 aa, Zea mays
  Clone ID: MRT4577_37329C.1.pep
QRRPSTSAPRPRPLQLQLQLLLRLRRPRDGSQRPKERLSNRPCPSRPPARRRKKKQLLRSRRKKNRFLRRFDRLSVTIHCPVRY

SEQ ID NO: 300724 - protein, 72 aa, Zea mays
  unsure (1)..(72): unsure at all Xaa locations
  Clone ID: MRT4577_3732C.1.pep
MAEETDTRPASAGSRSCPVPEDDDRDDGEITDLACAHSPPATHPLEHSWYFWFENPQSXSKQAAWGHSIGAI

SEQ ID NO: 300725 - protein, 106 aa, Zea mays
  Clone ID: MRT4577_37330C.1.pep
GGGFWGPWGSFPGVPGSGHPLVFHSPFWAEGPFPGALQGPGAVSPPLVVGSAPFVPGDPGHALFLHGLTSRSPRAAFCFVPSPVLGGSCLSLSPPPFRLSVFFFVV

SEQ ID NO: 300726 - protein, 139 aa, Zea mays
  unsure (1)..(139): unsure at all Xaa locations
  Clone ID: MRT4577_37331C.1.pep
MAAKILCFLVLVGLSASIATSTIFPQCSQAPIASLLPSYLSPNVSSICXTPIVQPYLIQQAIPTSILPLSTLLLQQPVTLLQQLPLVHFVAQNINAQQLPQLVLTNLTSYSXQHQFLSFNQLASLNSTAYFQQQLPFNH

SEQ ID NO: 300727 - protein, 71 aa, Zea mays
  Clone ID: MRT4577_37332C.1.pep
CAEALYLVRSISTIPMYGTTSLNLMPSYCRSDPAFLILHCLLILQVTCMNLTVLTENLCELDPDPKILILN

SEQ ID NO: 300728 - protein, 149 aa, Zea mays
  Clone ID: MRT4577_37334C.1.pep
MAEAPASPGGGGGSHESGSPRGGGGGGSVREQDRFLPIANISRIMKKAIPANGKIAKDAKETVQECVSEFISFITSEASDKCQREKRKTINGDDLLWAMATLGFEDYIEPLKVYLQKYREVRTVFGNLGVRSCNRQSVTLSIVPLIELK

SEQ ID NO: 300729 - protein, 272 aa, Zea mays
  unsure (1)..(272): unsure at all Xaa locations
  Clone ID: MRT4577_37335C.1.pep
MGMAKEQHFVLVHGEGHGAWCWFKLRWLLEGAGHRVTCVDLAGGGVDPTDPNTIRSFKQYDKPLIDLISNLPDGEKVILIGHGAGGLSVIHAMHEFVDRIGQAFFVAATMLPFGFQADEDKNDGLPTLPENEIELTLGAGADDPPTTIALRPEFQRDRLSQQSPEEESVLASMXXMRPWPATAISTASFEGDDERLNRIKRTFIKMERDHMLDPQQQDSMIKKWPPSEVLVIDTDHSPSDPRPEQLMTIWGLINCQNKYEQKLNQFPVHYGS

SEQ ID NO: 300730 - protein, 65 aa, Zea mays
  unsure (1)..(65): unsure at all Xaa locations
  Clone ID: MRT4577_37336C.1.pep
MFLSAVFFAKSKSKNILVRMVSEAGTGFCFNTKRNRLREKLTLLHYDPVVKQRXLFVEKKKIRSL

SEQ ID NO: 300731 - protein, 91 aa, Zea mays
  Clone ID: MRT4577_37337C.1.pep
NAGELRVSQWIGPTAGELKGPRQGGALSRRGRSPFGKGQRWGPLIGLGLLAKRASGAKGLSWEPQGFATPGVFKPPARVNVRPPPIGRNGP

SEQ ID NO: 300732 - protein, 55 aa, Zea mays
  Clone ID: MRT4577_37338C.1.pep
SNNSNEKAMNEQPKRLSHVSRLYHGTTSDAAVSKMYKSRRYVRAAPTETIIVINV

SEQ ID NO: 300733 - protein, 76 aa, Zea mays
  Clone ID: MRT4577_37339C.1.pep
HLCYAFYVCFTFLFYNYMLFFPGAQCFSAGKKTSVSSPLKTNVTLLLNAATFLHSTSPISLLIVDSEQKLLDAKPY

SEQ ID NO: 300734 - protein, 72 aa, Zea mays
  Clone ID: MRT4577_3733C.1.pep
SHGSMLTPPCPPTMGMSTTTPTTAVVDHVLPAFDEERNVPYHHVFSTEQLIIGWSHVTDNLHLADYTMWKDT

SEQ ID NO: 300735 - protein, 147 aa, Zea mays
  Clone ID: MRT4577_37340C.1.pep
QIIPSIWTVVTVSRRLYMSVSSYIGLPSCIDADSSHSLFWPRSLGRSSTLFQQHSCHLAVVLTKRSCIIVVVLLIHWGLRFEPHMELGLKESVRILAFARWPCAVIGLSIRRAFHVIMPPSYVDIIGRVTRRKATCSQPMSMPWKAR

SEQ ID NO: 300736 - protein, 91 aa, Zea mays
  unsure (1)..(91): unsure at all Xaa locations
  Clone ID: MRT4577_37341C.1.pep
GLISKNHSLQWAESPHKFKXLGQAYDVLSDPXKREMYDQYGEVVLKEGMRGGGSHVDTFDILXLFFGPSFGGRGGSVXGRKVRRGEAVGTL

SEQ ID NO: 300737 - protein, 93 aa, Zea mays
  unsure (1)..(93): unsure at all Xaa locations
  Clone ID: MRT4577_37342C.1.pep
YGKWTTTGHLIYKLGGIDKRVIEKFEKKAXKMNKRSXNYEGWVHNLSVNRNKGFKIDFALWKFETTKYYCTVIDAPGHQQHSGNMITGTSQAD

SEQ ID NO: 300738 - protein, 66 aa, Zea mays
  Clone ID: MRT4577_37343C.1.pep
LSGCFFRYLFLPKYLSGHSVKMRRFFVFSHASAGLIHSGAMPGVLETIHSRWTMCVRSKFQSASSR

SEQ ID NO: 300739 - protein, 76 aa, Zea mays
  Clone ID: MRT4577_37344C.1.pep
PAGIQKEGCLVAYLPCLSDGPGAAPGQPARRPAPRLDWPAGRPAGAPGPGAAPCMLLPHALLLADHLLGRCLSIAS

SEQ ID NO: 300740 - protein, 210 aa, Zea mays
  Clone ID: MRT4577_37345C.1.pep
MDLVPHPDSPHSDNSGGGGGSASGALSPGASSAGAASALASPSRYESQKRRDWNTFGQYLRNHRPPLSLARCSGAHVLEFLRYLDQFGKTKVHTPACPFFGHPAPPAPCPCPLRQAWGSLDALVGRLRAAYEENGGRPENNPFGARAVRLYLREVRDHQSRARGVSYEKKKRKKAPAHPVPAAVISSSHDGNGHHYEHQMPPPPPPGAAA

SEQ ID NO: 300741 - protein, 213 aa, Zea mays
  Clone ID: MRT4577_37346C.1.pep
MDLVPQLDSPHSDNGGGGGSGSLASGALSPGASSAGTVSALASPSRYESQKRRDWNTFGQYLRNHRPPLSLARCSGAHVLEFLRYLDQFGKTKVHTAACPFFGHPAPPAPCPCPLRQAWGSLDALVGRLRAAYEENGGRPENNPFGARAVRLYLREVRDHQSRARGVSYEKKKKRKKAPPHPVPAAVISSSHDGNGHHYEHQMPPPPPPGAAA

SEQ ID NO: 300742 - protein, 354 aa, Zea mays
  unsure (1)..(354): unsure at all Xaa locations
  Clone ID: MRT4577_37347C.1.pep
MEMLSMLKVGYTILRSETPATDLVNTFMDWAARRSLMLLAIFLPPYYIYKLTTSAFAAAVPEDVAGKVVLITGAASGIGQQIAYQYAKKVARLALVARMVGSLHDVAARARDGGSPDVLVVAGDVAKPEDCRRFVQATVEHFGRLDHLVNNAGVANVCWFEDVPDVAALKRVLAVNFWGAVHATHCALPHLKKSGGGKVFVNSSAAAALAMPGMSLYNASEAAVLNFFETLRVELRDEVGITIATSGWIVSEMTGGKQLSKEGTVEVXPVRCAEATVDAICRGRRHLTVPLWYRALFLWRALAPEVVEFSQRLLCRRTAGGRGHQAKGKRLQEVTGAKGGLQPAPLHSSDIKRE

SEQ ID NO: 300743 - protein, 192 aa, Zea mays
  unsure (1)..(192): unsure at all Xaa locations
  Clone ID: MRT4577_37348C.1.pep
IRSFIVNADLVGFFYVDTTPLQLEYWTHAAELRYDXRGVAYRQLVXANSLKNLVVIINKSTSSCTIXALGLTTMSSMSQHXGPTIXFLESLRAVNKANGCPIXVKGHDHCLEHINSRRQSPXQCFASEGGSNRHEXVFHAIKDQLRFFLVGQGFMSLHLTQVQALFXFCDAFSEDILSPWSCSHPQYSSYLY

SEQ ID NO: 300744 - protein, 74 aa, Zea mays
  Clone ID: MRT4577_37349C.1.pep
FCLKKMKTNRCSLGLNFTIFLLVQFRTMQSSPDPSPSRCQPGRVSLFRSPGAFPLWVSIWANGPPCPKHKSFFL

SEQ ID NO: 300745 - protein, 76 aa, Zea mays
  Clone ID: MRT4577_3734C.1.pep
EQNCNLTTGGKKLISGPILASGSVTEGGRKGNKRAKHVQTQHEPGDPKGPPIHIYFGDTQAGTIHGKGGGKTPTGA

SEQ ID NO: 300746 - protein, 82 aa, Zea mays
  Clone ID: MRT4577_37350C.1.pep
SSIVHSKKNPIYWLYPIEREHLFNLCTPPAIAPYSLLTSVAGPVWFTTSVATLCLTFLPKVSYSIRTTNLSQSVAHLATNQT

SEQ ID NO: 300747 - protein, 68 aa, Zea mays
  Clone ID: MRT4577_37351C.1.pep
RYISHLLFTHYIRLLCLLTQQYRPKSYSCYRQDRCVPCLEIAPTYMTCFKNRTDYDRQVSFILMAQDG

SEQ ID NO: 300748 - protein, 111 aa, Zea mays
  unsure (1)..(111): unsure at all Xaa locations
  Clone ID: MRT4577_37352C.1.pep
AHINPTSVPPLPHKIYNLHMVIVLSSTASTSTIFPKCSHAPITSLLPPYLLPTVSSICXNPILQPYMIQHAITAGILPLSPLFLQQSSSLLHYLPLLHXLTQNIMSHQLQQ

SEQ ID NO: 300749 - protein, 146 aa, Zea mays
  unsure (1)..(146): unsure at all Xaa locations
  Clone ID: MRT4577_37353C.1.pep
DSSPRERHACHNYEPPPGIHPNNDHRVKMLAQASLHQRLMNPPPILRRENQLRTILHWQVDKHAIPRDIIIKNNQRSSQCFLKTITLNDVRXHGNIGFIANXSWIYPLDAXRYKRRLRLQNTYLPXEMSAALKSYREEEIRELMCD

SEQ ID NO: 300750 - protein, 68 aa, Zea mays
  Clone ID: MRT4577_37354C.1.pep
ASRPLVVYIGRRRTEQSGRRWCSLMPATHRCKVRNLPPTPTGLPESSRWSDQSSWHKYKTYEDASRRE

SEQ ID NO: 300751 - protein, 98 aa, Zea mays
  unsure (1)..(98): unsure at all Xaa locations
  Clone ID: MRT4577_37355C.1.pep
RRRRAAGEHGPRTTATSAEXRANQEPHTEDPKGGEGAXHFFFPXXXHXILXAIAIEHRKDADSADDTVLDEVRPIMTGKNGEDGTVGNLASMDGYVGN

SEQ ID NO: 300752 - protein, 75 aa, Zea mays
  Clone ID: MRT4577_37356C.1.pep
LPVADTAADSFFIEGPRRQLRSRIKRVGTGATAQQDEDLYDQSAAPRTSRLDHESPPCAALNILICAPKGEPTRP

SEQ ID NO: 300753 - protein, 51 aa, Zea mays
  Clone ID: MRT4577_37357C.1.pep
AVDCVQAQGFRPGQDLMLWKGLHRNNVWAHLYDKLAGARQLSVMEMKLDGP

SEQ ID NO: 300754 - protein, 248 aa, Zea mays
  unsure (1)..(248): unsure at all Xaa locations
  Clone ID: MRT4577_37358C.1.pep
MPSFIDGPTFRALLRPSTNGRRTKISDSGGGGGGIFKMFKLMPMLSSGCKMVALLGKHNNRALLADHATTVTLFGPRRGRVSLAIHEDTRAPPLFLIELPMLTSALHREISSGALKLALESDTRSARRRLVEEYVWAVYCNGRKAGYSIRRKEASDDERHVLRLLRGVSMGAGVLPAXPAEKEGGVPAGPDGELTYVRARVERVVGSKDSEAFYMINPEEGGNGADNNGGGGGAGGAPELSIFLVRMK

SEQ ID NO: 300755 - protein, 137 aa, Zea mays
  unsure (1)..(137): unsure at all Xaa locations
  Clone ID: MRT4577_37359C.1.pep
TYRIVLPLGCCKGLYHLREDCXLRVIHRVIKADKNLTDXSIYRLMQRIXLDTLSTDTNTHVCTRVMGAFGYFIPEYXSSGKRTDKXDEYYLCVMLLELMSGRXPGDTTNXHVXDRLVDWARRLLERALCEDNYNELL

SEQ ID NO: 300756 - protein, 202 aa, Zea mays
  unsure (1)..(202): unsure at all Xaa locations
  Clone ID: MRT4577_3735C.1.pep
ERVAIFADTRAEXWQIALQACFRQNIAVVTIYASLGEGALCHSLNETEVTTVVCGRKEFKKLIDISGQLDTVKHVIYIDEEGISVEVSLAENCTSWTVKSFEEVESIGLQRPVEANLPLPSDTAVIMYTSGSTGMPKGVMMSHQNVLAVVSAVMTIVPGLGKKDVYLAYLPLAHILELAAEAIITGVGASIGYGSPLTLTDT

SEQ ID NO: 300757 - protein, 50 aa, Zea mays
  Clone ID: MRT4577_37360C.1.pep
FPQQPDTTCKRGATALTHDVGLGAHADAHIGVHVARRSQVLEVAQSVRFV

SEQ ID NO: 300758 - protein, 36 aa, Zea mays
  Clone ID: MRT4577_37361C.1.pep
APSRPSCYLYLVSRHDFRAICRPHSPTLYSLDQVLN

SEQ ID NO: 300759 - protein, 96 aa, Zea mays
  Clone ID: MRT4577_37362C.1.pep
DGHRTKICLTPATVHRLLQLHSDAHSHNHLLSLPRKGMHLSYMHLATLALDLACLRLLGSNTDHPQVQYPCLLLVRLHHYFRGSDMLAGPSLLTSY

SEQ ID NO: 300760 - protein, 71 aa, Zea mays
  Clone ID: MRT4577_37363C.1.pep
RRKAFRKQRNARLLHRTDQRDTACSPWHFPASEGRLKSKKPSRMALPLKLQLIVELGLYNPPFVIPRPPRP

SEQ ID NO: 300761 - protein, 44 aa, Zea mays
  Clone ID: MRT4577_37364C.1.pep
RYKKIYIRLLLDRIYMASRTDSCMYQCMTLFRNDRVQESAYAWV

SEQ ID NO: 300762 - protein, 112 aa, Zea mays
  unsure (1)..(112): unsure at all Xaa locations
  Clone ID: MRT4577_37365C.1.pep
MKVLIADLALLALDDSAVSXTSGGXGCHTPHVHLXPYHYMPPAAYLSQQQQPQPWKYPTEPQQVSQCQQLRLXRVSRVGRPSLAQCVTQQRHQCSYQETAYNSAQCQQLQQQ

SEQ ID NO: 300763 - protein, 130 aa, Zea mays
  Clone ID: MRT4577_37366C.1.pep
LLWAIGYLEAGRDKYPQLGLHSALHLKRWTSLQHSVAPYLSAQPHDHLYPPNNVGTSPHGRCGGIGVHPGVELAAWPPLPLGIEIGPRYFTIVERGYVSSEKQVGTWILKSQVKNRYRRMRRLEDAAMSS

SEQ ID NO: 300764 - protein, 67 aa, Zea mays
  Clone ID: MRT4577_37367C.1.pep
GELTPRVCSPEPAIIDWDYLWTSQFASILSGPVSSGLFPRITFSSSVTEVPHPKRTASFTIGVDSSR

SEQ ID NO: 300765 - protein, 135 aa, Zea mays
  unsure (1)..(135): unsure at all Xaa locations
  Clone ID: MRT4577_37368C.1.pep
PPGPRGPGNGGDAPPPGTWRRAVPGAKAVGAGQPPKGGPPGPGXXGTGAPGGQPPSESGPQAGGPPPAVVGDPDVRPPDGKNRVGETLPGVVGFSPKVGLIRPGGEAQFLFSKAGPHQGESRAGGFFAKRGPPQF

SEQ ID NO: 300766 - protein, 119 aa, Zea mays
  unsure (1)..(119): unsure at all Xaa locations
  Clone ID: MRT4577_37369C.1.pep
LGGGKKKKKARGRRKKHPPPQETEKGSQNGNGDGAPHTEKGDDTKGEQPPPWGGKKNPRPPRRNRAPGPGPDPLQETTPRPQGPPPPGXPGGGGPETPPSXLRGGPRQAPQKTPKEGGP

SEQ ID NO: 300767 - protein, 48 aa, Zea mays
  Clone ID: MRT4577_3736C.1.pep
RVLLPICLHTILFYIELNSQTFDRHLSTPAALEGKNSLNGKGIPVFSS

SEQ ID NO: 300768 - protein, 227 aa, Zea mays
  unsure (1)..(227): unsure at all Xaa locations
  Clone ID: MRT4577_37370C.1.pep
IRHEGYYDDRGSHDKHGDRERSASIGYSNSGRRRYHDDRESHTRRAERERSTSNEYTNKRSRHEHSSRSSRTSARSDWDDGRWEWEDTPRRDYRDNRPGSRRQHPTRSPMLAAASPDARLVSPWLDGNTPRLAASPWDNVSPSPAPIRASGSSKGSSYSHSSGRSHQLTFSSTTSSNIIDADRSPSNPDRNSEITEEMMQEMXLHADRAWYDCEXHTTMFDGDHSMY

SEQ ID NO: 300769 - protein, 75 aa, Zea mays
  unsure (1)..(75): unsure at all Xaa locations
  Clone ID: MRT4577_37371C.1.pep
FGSSELLNRPFCFLPSSDYIDGHVKPVXGRKINWKKTGIADSDLFITARTHLLAELAYLPFKGIELDGVLLTKPH

SEQ ID NO: 300770 - protein, 89 aa, Zea mays
  Clone ID: MRT4577_37372C.1.pep
TGTRGHLCRFPSAGAYSVTEEAIDNILASSILSSSPADISTAGLSSCSSSRLSPRTLPPTTPDYSIPTPKHHMAVDQRSPAADHQRDAP

SEQ ID NO: 300771 - protein, 172 aa, Zea mays
  Clone ID: MRT4577_37373C.1.pep
MMAAMNIDLGGLAGRPTTSQADPFQSALYGAGPGLIRSGLGVYSEKFLGSSSDFMQSNITQYLSNPQYYFQVNNQYVRNKLKVVLFPFLHRGHWTRITEPVGGRLSYKPPVQDINAPDLYIPLMAFATYIVVAGYALGVLGRFTPEALTIQFTKGLLGWFMQAILIKALLYS

SEQ ID NO: 300772 - protein, 44 aa, Zea mays
  Clone ID: MRT4577_37374C.1.pep
FPGRQWRSHGLNIKVLDTERNSVESLYIKTSEREKPIFMPLEEN

SEQ ID NO: 300773 - protein, 36 aa, Zea mays
  Clone ID: MRT4577_37375C.1.pep
RPGVSFDTTAESWRVSEEVSCSPLGHGGFHSRIGYE

SEQ ID NO: 300774 - protein, 237 aa, Zea mays
  unsure (1)..(237): unsure at all Xaa locations
  Clone ID: MRT4577_37376C.1.pep
MPATELAAGVAWDRRRELQAFDDTKAGVKGLVDAGVTALPPIFRHSPESLEGITSSNHVAGAIPTVDLSAXAARGHXVALVRRAAGTVGFFQVVNHGVPAELMAGMLEGVRRFNEGPAEAKQAIYSRDQARKVRFASNFDLFSSAAANWRDTLFFHLAPDPAPSQELPEAVRDVVTEYGNAVTKVALSVLELLSESLGLSSDHLRXGLRGEXLNAVCQYYPPCPEPYLTWGTKKHTD

SEQ ID NO: 300775 - protein, 268 aa, Zea mays
  unsure (1)..(268): unsure at all Xaa locations
  Clone ID: MRT4577_37377C.1.pep
MSHSPLPPPVFQNISLRFSESFSLQGTETTGAFTPPAFPSPPGTTGLLAIIRPSMAKLVNKLVDSFDHHEAPAPDVGCVRAVLAELVLTFLFVFTGVSXHLNPAVTVGILVRGHITKLRALLYVAAQLLASSLACILLRYLSGGMVTPVHALGAGISPMQGLVTEVILTFSLLFVTYAMILDPRSQVRTIGPLLTGLIVGANSLAGGNFTGASMNPARSFGPAMATGVWTNHWVYWIGPLLGGSLAGFVYESLFMVNKTHEPLLNGDI

SEQ ID NO: 300776 - protein, 311 aa, Zea mays
  Clone ID: MRT4577_37378C.1.pep
MSHSPLPPPVFQNISLRFSESFSLQGTETTGAFTPPAFPSPPRTTGLLAIIRASMAKLVNKLVDSFDHDEAPAPDVGCVRAVLAELVLTFLFVFTGVSASMAAGSGGKPGEAMPMATLAAVAIAHALAAGVLVTAGFHVSGGHLNPAVTVGILVRGHITKLRALLYVAAQLLASSLACILLRYLSGGMVTPVHALGAGINPMQGLVMEVILTFSLLFVTYAMILDPRSQVRTIGPLLTGLIVGANSLAGGNFTGASMNPARSFGPAMATGVWTNHWVYWIGPLLGGSLAGFVYESLFMVYKTHEPLLNGDI

SEQ ID NO: 300777 - protein, 56 aa, Zea mays
  Clone ID: MRT4577_37379C.1.pep
TSLMKRADLLVWCCQGRGNGCQLGDLPAHCWSGPLDFVRRLECPSRAMFCYRLSVP

SEQ ID NO: 300778 - protein, 78 aa, Zea mays
  Clone ID: MRT4577_3737C.1.pep
SLEGVSGGLLGGSIRRTTHHSRRIGCNASSLAHQAVAAYATPYSPVFTDPLLGVHYLQTNPPLHRHMGSAGRPLLDGN

SEQ ID NO: 300779 - protein, 100 aa, Zea mays
  unsure (1)..(100): unsure at all Xaa locations
  Clone ID: MRT4577_37380C.1.pep
GRDVEHIGXQAGIEGGNARWELHCLEHGIQAEGQRPGDKTIGGGDEAFNTVCSETGGGKHVARAGLADVEPTASDEVRTGTYGQLFQPEQVIRGKEDEAN

SEQ ID NO: 300780 - protein, 66 aa, Zea mays
  Clone ID: MRT4577_37381C.1.pep
ECCELRPCACVRAMHRLKKFMHTTPEGVTLHIPAINYGDTLPYKISGNPNTCKNAAFALLFWLVMI

SEQ ID NO: 300781 - protein, 312 aa, Zea mays
  unsure (1)..(312): unsure at all Xaa locations
  Clone ID: MRT4577_37382C.1.pep
VPDPPPPPPPPMSXPPRAAPPAXCRRGSPRTPLSASPPRRSRPRRKPADSLPPPPRRPXPLRRRAPPPTRAARALPPXPPCARSPPWPTRSRFPRPSRCSRPPPSSSTTSPPLPXEDPPASPPVPRVPRSRPPGLPPRAFYPPPTRGPXSSPPRASSSSLTPRAPCSPAPCAGPPAAESSPPPSPPYPLSXLPFPFRDPXSPSPLASFPRSNNRPRRGMPHAVGAPARRHLRSLPSSACRRLWVSSFSVAAMRAMVLLMEQCRSARSGGCCLTLPSLAWLWGDDRSMAAAVVGQVWILHDVLMHSLFWSCCT

SEQ ID NO: 300782 - protein, 158 aa, Zea mays
  Clone ID: MRT4577_37383C.1.pep
KKKGTARGRNGGQGEPRLPSWGAPALTRPCPVRCIVWVGASVGSGRGVVAVARRASDPCMCPCVPLGPALVAFTRFITCRTQPAHALLGVRKYVCSTQMLTFRCAGRITVLYRPAGVRTYKASKPLVPYVRAHRPSRHTQTHEWSSSSGCLALPFVLK

SEQ ID NO: 300783 - protein, 50 aa, Zea mays
  Clone ID: MRT4577_37384C.1.pep
RINMKCVNSFYFPLPASSVLMACKDRVIPSFLISGRACISLPIKDQKFYQ

SEQ ID NO: 300784 - protein, 53 aa, Zea mays
  unsure (1)..(53): unsure at all Xaa locations
  Clone ID: MRT4577_37385C.1.pep
TCNYFLRVFSPTCGIFGCKRFIVGVFVXCRRSHKDILVSWFFRKRNIVSRAEF

SEQ ID NO: 300785 - protein, 90 aa, Zea mays
  Clone ID: MRT4577_37386C.1.pep
PLIVAPGGPGPMFSWESSALSVVEPSWGLASRSRRFPGLGFGASGGRGPSPVGRSRVWCRLGCGLSWRVSLSLCFVRSASRLGFVESTGL

SEQ ID NO: 300786 - protein, 415 aa, Zea mays
  Clone ID: MRT4577_37387C.1.pep
MDPEDSSDFEEEDDEEEDDDLMIFILPALYLASTGIGTLDQTSMVSDGTAIETPSQVSKFNDAERICKVLEDDRGQGYDKLRVEPHVLLELSRYLRSNDLLKNTRGVSVEEKIGMFIYMLSRNASFQKLSDRFKYSTETIHRHIKACFDAVTPMTGEFVRPPSIQAHRKISSDTRYGPYFENCIGAIDGIHVPMTISDSEAAPYRNRQESLSQNVMLACDFDLNFVHVSCSREGSASDAAVLYSAIEYGFEVPRGKFYLVDGGYANTPSFLAPFSEVSYHAEEQDESNFQPIDYRELFNLRHAQLYRHIKRAVGLLKMRFPILNVATSYRKDTQLKIPSAAVVMHNIIQRQGGSEELLCEQTIPFASRKTVNLPSGDDTYGYDVSAFNSECDMGNALRDGIALRMWADYESSMYV

SEQ ID NO: 300787 - protein, 51 aa, Zea mays
  Clone ID: MRT4577_37388C.1.pep
LFVLMTGQSLHLHLHVPVGYVFFHLSNQQVALQQMIVLFPSAWPPAKTRLF

SEQ ID NO: 300788 - protein, 115 aa, Zea mays
  Clone ID: MRT4577_37389C.1.pep
GVGFFFFFFFFLSFFCPGAGNNMGKKKTLSSHKILGDFPPGAKIYRDPGALGALKKKKPDIPTPTPGPQGTNNFFIPPRGWHKGAFPDPGAMGFFFPPEPLGVWRALTKPKGAPW

SEQ ID NO: 300789 - protein, 522 aa, Zea mays
  unsure (1)..(522): unsure at all Xaa locations
  Clone ID: MRT4577_3738C.1.pep
TEVTTVVXGRKEFKKLIDISGQLDTVKHVIYIDEEGISVEVSLAENCTSWTVKSFEEVESIGLQRPVEANLPLPSDTAVIMYTSGSTGMPKGVMMSHQNVLAVVSAVMTIVPGLGKKDVYLAYLPLAHILELAAEAIITGVGASIGYGSPLTLTDTSNKIKKGTQGDASVLKPTLMTAVPAILDRVRDGVRKNVDAKGGLAKRLFDIAYSRRLAAVNGSWLGAWGLEKLLWDMLVFRKVRAILGGRIRFILAGGAPLSGETQRFINICLGAPISQGYGLTETCAGGTFSEYDETSVGRVGPPLPCSYIKLIDWAEGGYLTTDSPMPRGEIVIGGPNVTKGYFKNEAKTNEVYKVDERGMRWFYSGDIGRLHPDGCLEIIDRKKDIVKLQHGEYVSLGKVEATLSVCSYVDQIMIHADPFHSYCVALVVTAQSELKSWASKQGMTYSDFSDLCHKQGTVKEVLQSLVKAGKQARLEKFEIPAKIKLIPEPWTPESGLVTAALKLKREVIKKAYEMDLAQLYSQ

SEQ ID NO: 300790 - protein, 195 aa, Zea mays
  Clone ID: MRT4577_37390C.1.pep
MQPEPQVFDPKKPHPVKKTFKVKVYMGHGGRMDFKQTPFGQDFPPNFFTRVGIGGVPPKSVIKKTHPVGGNWAPVWEKEFNFPLIVPELAFFGGEGAEFPMLEKGDFGGQKILPGLEIRPGIRGGGLFAPKGVKDPPGEPFLGFEFAQPDPGQGRPPPPPPLLLCEWILQSQWASFGQKLLGLDEMGNRQFLQLL

SEQ ID NO: 300791 - protein, 183 aa, Zea mays
  Clone ID: MRT4577_37391C.1.pep
MQLRHPNEPPGRDHQHSASITTTTSNNHSSTLHLNLITKPPKTITMKFFSAVSAAVLGFSSMASAITVSYDPGYDDAGRSMNVVSCSDGANGLAARFPTQGSLPRFPLIGGYQGIAGWNSPQCGTCYGLTYNGKTIYVLAMDHTGAGFNIAQAAMNQLTNGQAAALGRIDAQYQQVAVSNCGL

SEQ ID NO: 300792 - protein, 160 aa, Zea mays
  Clone ID: MRT4577_37392C.1.pep
SLPPPNNLPAPNPPADPTPPTVAQPPPPRRRPPRSPQTEPPPLAPPPSGIPVEPSPTSPSPTSADPSIPTPSSPSSPGTTPSTPGSGGTPSVPAPATPGDSVSPVTTGGQGSNKSSSPASQSSSSSVDSGGLSSGAKACIGVVVAILVLSLVGAAFWYKK

SEQ ID NO: 300793 - protein, 201 aa, Zea mays
  unsure (1)..(201): unsure at all Xaa locations
  Clone ID: MRT4577_37393C.1.pep
WPCRRRQSSRTPRPTARPAAAGARRPARRRRRTGGPAPPPPWPXLARRVVAPVXSRRTPPRTPSPPRRTASGTAPAPPAPGRRPAAWPAGPXDXRRRRPRRWRRPRRRPPWPGPRCPRRGCRGGGSASTRRSRSPRAGRGPPPPRTSSPGWRRRSARASRRGPRRPERQPWKVSLVSYLCWITGAVPAIELGGWWLCCLES

SEQ ID NO: 300794 - protein, 76 aa, Zea mays
  unsure (1)..(76): unsure at all Xaa locations
  Clone ID: MRT4577_37394C.1.pep
MSSGGGRGKPKGCKAVSRATKGRLXFPVWRIWRYLKGGKYAQRVCGGAPVYLFAVLEYISAEVLELAGNTARDNKK

SEQ ID NO: 300795 - protein, 62 aa, Zea mays
  Clone ID: MRT4577_37395C.1.pep
LPGFPSRCPLPSAALPPRLFLVRHQRPARLRRGSPARFCASALGLRLVWAHAPADAWVGPGF

SEQ ID NO: 300796 - protein, 101 aa, Zea mays
  Clone ID: MRT4577_37396C.1.pep
YFFAFVYIVWGPTKSIERLAHPRRGLHAHNQGAETLIKFSFEAAHTGATMACICIRLLGASNNCRGSAVALAEVEQVVPPWVGVHGRDYNATGGGEPSALL

SEQ ID NO: 300797 - protein, 68 aa, Zea mays
  Clone ID: MRT4577_37397C.1.pep
HNTNLFNYSLTINNYKEPWINFFFSLHLPTASTLLLSLILSQQDSLPSTIIPNVIYIITSIYLIFSAK

SEQ ID NO: 300798 - protein, 69 aa, Zea mays
  Clone ID: MRT4577_37398C.1.pep
FSSMYFSASLNDKPTRATDKTPTARPVLAPYLPFSLPLPQDPVLPSKSHTACCSTPVQRVYRRANTIGS

SEQ ID NO: 300799 - protein, 100 aa, Zea mays
  Clone ID: MRT4577_37399C.1.pep
HMATSLLYGHFHGRHSRLVLWKSQSNYERLSFADSLCYLKPYLCFSYYMFFATSTIRRQFEQANLEAMDESAEWRMQYDKEVEKNRHLHDELSKVLLTYQ

SEQ ID NO: 300800 - protein, 116 aa, Zea mays
  unsure (1)..(116): unsure at all Xaa locations
  Clone ID: MRT4577_3739C.1.pep
FEFAFVNHGSCRKEFEXKGKYGQYHVVVATKPHYFRDXDVLRVMDNFLEYVXDFWSVDELXVDQFLYFMYQENSXNMXHVIDXFFMDEQFSYLXQHLLIHVDEERXLLDFLKSLGK

SEQ ID NO: 300801 - protein, 80 aa, Zea mays
  unsure (1)..(80): unsure at all Xaa locations
  Clone ID: MRT4577_373C.1.pep
MWWGRSGDWMQQALAPKRSYNKDRHTKDDGRGRRIRMPALCAERILQLTRELGHKSDGETVQWLLQQAEPAIVAXTGTGT

SEQ ID NO: 300802 - protein, 84 aa, Zea mays
  Clone ID: MRT4577_37400C.1.pep
PAPKKWPPFFFFYLVKPGWVQNKGHAVWAQLGRIFSFSMLQGLFFKTNNPSKGSGLFSITSYPKESIGEKAQRIGPLGWLFPPH

SEQ ID NO: 300803 - protein, 62 aa, Zea mays
  Clone ID: MRT4577_37401C.1.pep
QTQGQRGREERRPPPPKKRDKRNQGASRKHGRRGARRKKTRQGNKTNSGHFKCSGRSLLTLT

SEQ ID NO: 300804 - protein, 52 aa, Zea mays
  unsure (1)..(52): unsure at all Xaa locations
  Clone ID: MRT4577_37402C.1.pep
MVAKARVCMGKNQPPLFPXISDRLLKKKWVKKDGGWTPGYSPLRYXRCQKGC

SEQ ID NO: 300805 - protein, 109 aa, Zea mays
  Clone ID: MRT4577_37403C.1.pep
MATVNIRRDVTDPFYRYKMERIQSKIEGKGNGIKTVIVNLTSVAGSLARPPAHVIKYFGFELGAQTNTSPNDDRWIINGAHDASKLQDYLDGFISQFVLCKKCKNPEND

SEQ ID NO: 300806 - protein, 79 aa, Zea mays
  Clone ID: MRT4577_37404C.1.pep
GQLLFNVSHYPERRKFSKEEYKAFTREEMNKAMKQLLSSPDFNRWALAKADRISVWLCQEETTAAATATNSGIVSWDYF

SEQ ID NO: 300807 - protein, 95 aa, Zea mays
  unsure (1)..(95): unsure at all Xaa locations
  Clone ID: MRT4577_37405C.1.pep
MGRARATAGVLRSMRAFGLCMATACLLLSVXMPSLLVAQDSVILSLQNYSNTCPNEQHIVRTEMDCKARANTRNVVLMLMLYFHDCFMHNCDVMV

SEQ ID NO: 300808 - protein, 277 aa, Zea mays
  Clone ID: MRT4577_37406C.1.pep
MPPPSLTAAGTTTTTTRRRNDRAAKVHQVLGEGAGTEEMGAVADGWTRPEWCSAAGVAGVLRRHPAPALFGCGLLLFMAVEYTIPMVKPDAPPLDLGFLATAGMHAAIAARPWLNSLLAALNTVFVAMQAAYILWAILAEQRPRAAVAALMMFTCRGALGCATQLPLPEEFLGSGMDFPVGNVSFFLFFSGHVAGAVIAAADMRREGRLALARPYDALNALQGVRLLACRGHYTIDLAVGVGAGILFDMLSGWYFHAKNAPEKHCRSCQCHKALLSR

SEQ ID NO: 300809 - protein, 46 aa, Zea mays
  Clone ID: MRT4577_37407C.1.pep
STDNPERLDWAYGRIDAVIHPPALFPTVLATTGLPMPTPSQVRRSS

SEQ ID NO: 300810 - protein, 362 aa, Zea mays
  Clone ID: MRT4577_37408C.1.pep
MAFTEESSQDLLQAHDELWHQSVSYLKSLALTVALDLRIPDAIHHHGGGATLLQILDKTALHQSKLRALRRLMRVLTVSGTFSVVQQPPCGDDDSTVYRLTAASRFLVSEEVSSATLAPFMSVVLHPISQSSHARGICAWFRQEHHDPSAFGLAFGQAPTIWEHADDTNAILNKGLAAQSRFLVPVMLRECGEAVFRGIDSLVDVGGGHGGAATAIAAAFPHLKCSVLDLPHVVAGAPSDGNVQFVAGDMFQSIPPATAVFLKTALHDWGDDECVKILKNCRQAISPCDEGGKVIIMDMVVGYDESNTKRLEVQILFDLFIMMVNGAERDEQEWKKIFIQAGFKDYKILPVVGSLSVIEVYP

SEQ ID NO: 300811 - protein, 112 aa, Zea mays
  Clone ID: MRT4577_37409C.1.pep
KISISIQINNNSIINVFDLNPKDAFFFFFFPSNIGLYSIRLQPYMLRMLCTESEDGGGPIGSTEVLGFLEARRGLRSVERARLLQRRQLARRAVVGVHGHAAHRRLDRLLPA

SEQ ID NO: 300812 - protein, 82 aa, Zea mays
  Clone ID: MRT4577_3740C.1.pep
GKKRGAPPFFFFFFFFFFFSFFFFFFFFFFFLYTYSYLLSDKTSEYPKKIHIASEPVFIFFQSGFGRIISKPFYIFSRVHQS

SEQ ID NO: 300813 - protein, 71 aa, Zea mays
  Clone ID: MRT4577_37410C.1.pep
PPLFLCEGIYLQWVFVIKYLLLPSCLYTILYVSLCAILGVLFLGLGVLAERPTSLEPQIQPPTSLPPDAPG

SEQ ID NO: 300814 - protein, 222 aa, Zea mays
  unsure (1)..(222): unsure at all Xaa locations
  Clone ID: MRT4577_37411C.1.pep
XRXMINPWTQXXERXIFMEMLAKFGKDFSKISSFITHKTTADCVEFYYKHHKSDSFREVKKLLDLHQQLPASNYLGAKSGQKWNPESNAASLDMLGVASAEAAHDLEYANKVEKISVKSLIRTAYGSNVSFVTKKSSDKECIDNVPLHERESVAADVLAGICGTPSPDGMGSCITSSADPGLKISMKRVEHVLSQENDKNVNEEESLSDQECEXDPVDWNDD

SEQ ID NO: 300815 - protein, 80 aa, Zea mays
  Clone ID: MRT4577_37412C.1.pep
QASWSPVVNIYISKLHESKKKKKHDDHCCGRQAPDSRTPLLRRLSSGFQHLLITYSATGTKGEPCGTSSIHVQTVNTGAT

SEQ ID NO: 300816 - protein, 61 aa, Zea mays
  unsure (1)..(61): unsure at all Xaa locations
  Clone ID: MRT4577_37413C.1.pep
NDICVSQTEEDMVKHITETLLLCLVFLLGAFLTSSPRXILWRRLRFHMQXXEKGREREAWC

SEQ ID NO: 300817 - protein, 141 aa, Zea mays
  unsure (1)..(141): unsure at all Xaa locations
  Clone ID: MRT4577_37414C.1.pep
MDSFGDLGGGGSSSSRAASAPFLQLPLPASTSSSAQQXGVSAAGRAAAAALSPQLEHPVATVTVTGRPVVGSXHSHRKXHGNSAGRDVVAGXDGDADAIKARIMSHPQYSALLAAYLDCQKVSTTSESIHAQDMICDHVFV

SEQ ID NO: 300818 - protein, 78 aa, Zea mays
  Clone ID: MRT4577_37415C.1.pep
LTQSLPHTSFRSLYFYDPVIPSMVLRLSIFFLSFCLLFVRKICKIREGQYGQCRRCGKNQKKKKKKKKKKSTLRCYHC

SEQ ID NO: 300819 - protein, 101 aa, Zea mays
  unsure (1)..(101): unsure at all Xaa locations
  Clone ID: MRT4577_37416C.1.pep
VSHGGRIRRMHVWPAYGNKMCETHFHLAPLSTDDLLNHVHYLLRIGWILCLEFSKVCLQYRXNFTCACYYHSRYCTMCKLPMIXXDDANHVYKELHDAIKY

SEQ ID NO: 300820 - protein, 126 aa, Zea mays
  Clone ID: MRT4577_37417C.1.pep
AAFLAVPASAKVGDLSAVEFVAARGSSIPGQRSSKCSGAVGECGVDEEEELGLSGGGGIGAGDALRRTLAQRKPTNRYISYAALRADQVPCNKRGRSYYTNCAAQTAANPYRRGCSAITRCARSMN

SEQ ID NO: 300821 - protein, 231 aa, Zea mays
  unsure (1)..(231): unsure at all Xaa locations
  Clone ID: MRT4577_37418C.1.pep
LPGSQKNHIHHNVQAKHPLRPTSHNKLGDTGKPTGWYLPELAHPYHVLHNKANITVASPKGGEAPLDPSSVEAAKDDVSVTFLKNDEAVWKTTKKLSDFIGKASEFDAIFYVGGHGPMFDLADDATSQQLIREFWEAGKIVSAVCHAPAVLYNVKLSDGSLLVAGKEVTAFTNAEEEQVGLTRXVPFLPEDALQKASGGKFVKXGAVGGEXXXVSGKLITGQNPASATGVG

SEQ ID NO: 300822 - protein, 199 aa, Zea mays
  unsure (1)..(199): unsure at all Xaa locations
  Clone ID: MRT4577_37419C.1.pep
MSKEKHHRDWILRRCCGSVAACILTLAAVVGFIVLVIYLALRPSKPSFYLQDVQLRSIDLSDPALSLDLQVTIASRNPNERVGVYYKTLDAFTTYRDEAVTVPVSMPAVYQGHRDASVWSPVMSGDAVPLPQYVADAMRQDIAAGYVLLHVRVDGRVKWKVGSWVSGSYRLFVNCPALLAASGXAGAGGAFAASAASLG

SEQ ID NO: 300823 - protein, 207 aa, Zea mays
  Clone ID: MRT4577_3741C.1.pep
RPDRRPPHPHRSSPRAPADLRGRRPYSSAAHLSRRSSLAMSTMKGQTRRERPRTRPHGLTQQKRQEIKEAFDLFDTDNSGTIDAKELNVAMRALGFEMTEEQINQMIADVDKDGSGSIDYEEFEHMMTAKIGERDTKEELTKAFRIIDQDKNGKISDVDIQRIAKELGENFTLQEIQEMVQEADQNGDGEIDFGEFARMMKKTSYGY

SEQ ID NO: 300824 - protein, 51 aa, Zea mays
  Clone ID: MRT4577_37420C.1.pep
GAACPAHTAAARNPKGQDPAKSYYTVHTRYGIRACEKAGLISRPMVRALVC

SEQ ID NO: 300825 - protein, 52 aa, Zea mays
  Clone ID: MRT4577_37421C.1.pep
CYEIISRYENIISVIKYIIRLFRFRCKSDMYCQSLQLLFGIIGKYIYIGLDF

SEQ ID NO: 300826 - protein, 61 aa, Zea mays
  unsure (1)..(61): unsure at all Xaa locations
  Clone ID: MRT4577_37422C.1.pep
EVKEPSLGACLCSCXPVGHXDPLLPWXLXEPLCFKPKGGWWPLKALCFLLSLXQSYGHFGV

SEQ ID NO: 300827 - protein, 177 aa, Zea mays
  unsure (1)..(177): unsure at all Xaa locations
  Clone ID: MRT4577_37423C.1.pep
PXXTHAXDQRXAXKREGPGAATQXTGKXATAGETRNAWTNXNRPRRPXXHPHPTGLKKARHQAFSRGGAVSPCPDVTTSAHDMNRKTEPNGAQIHNAHTFPPQDPPPDHKPRSSQATQFAKGGHHLMEHPPGTHHPIFLLDICPSMMRQNQHHLKNQSNVRTHAMIQMQLHYLGQVQ

SEQ ID NO: 300828 - protein, 63 aa, Zea mays
  Clone ID: MRT4577_37424C.1.pep
SADCTNAVDLDPKSVKAYLRRGTAREMLGYYKDAGDDLNHALVLEPMNKTAGVAINRIKKLFP

SEQ ID NO: 300829 - protein, 84 aa, Zea mays
  Clone ID: MRT4577_37425C.1.pep
DTLGCRSKCASSVMVWCQHFISSWCILPMTGCVHGICSSSSQVSQLVSPRLRACIILIGQPTVPLPICIYLCLKKCILNTFRFV

SEQ ID NO: 300830 - protein, 379 aa, Zea mays
  unsure (1)..(379): unsure at all Xaa locations
  Clone ID: MRT4577_37426C.1.pep
PRVRRTTTCVGTAVVIVMXRTTFLMVPIMLLVWKSHWILVVTFIVLSLMVEVPYFVACILKIDQGGWVPLVVATAFFLIMXVWHFCTVKRYEFEMHSKVSMAWTXGLGLGLGLVRVPGIGFVYTELASGVPHIFSHFITNLPAIHSVVVFVCVKYLPVYTVPTGQRFLVRWIGPRSFYMFRCVAWYXHPRVHHRARAVGTLLFDCVLFFVRLESMMEGYSDSTEFSVPEQAPPGSGSGSGRGGPAAAFLQGGERTCSTMCSNGELSFSSQDSIVPAAQSPAPRGLRLLQCSASASASAGQAGSCGTVGDELEFLNRCKDAGVVHILGNTIVRARRDSGVVKKLAVDYMYAFMRRMCRENSVIFNVPHESLLNVGQIYYI

SEQ ID NO: 300831 - protein, 54 aa, Zea mays
  Clone ID: MRT4577_37427C.1.pep
PKKKNIPSQPRVGKPGIRPKACSLVGKKFSEINFNVEPVYLKFQIYETEFGSVN

SEQ ID NO: 300832 - protein, 60 aa, Zea mays
  Clone ID: MRT4577_37428C.1.pep
GRMTDDSIRLMVQRYTTFSCGLIYHAESRVCITLRSPDTMRRQLSRFMKTPDQCCVLVLY

SEQ ID NO: 300833 - protein, 112 aa, Zea mays
  Clone ID: MRT4577_37429C.1.pep
CCPLPGPDGETIPLSPSPWSHYSPPALPLPLSRGLAFVTAVAPTFPSLIRAVSSPVIVFAPLAPGFPFVRVAVWLSRPLSQARLTCPPRCALHRQLVAAARPFPVFPGPGSH

SEQ ID NO: 300834 - protein, 40 aa, Zea mays
  Clone ID: MRT4577_3742C.1.pep
ADKLDTKRHGVQKQHGSSVQGHRSSFILQHRQATNMRTLG

SEQ ID NO: 300835 - protein, 387 aa, Zea mays
  Clone ID: MRT4577_37430C.1.pep
MITSFYHIGGCYIASQTVVHLRSYFSAGIFAAYFSHVLPCCVDLVPGIGTSRPAGTSLFFISYLLQQHIPYCSTLFLVSIGSHTNRTIFSVDFDGRFGSQLDELEKKLAGEVRVRNRAERRLRRAIKKLESLKILDVELSEGSIGSLSSNGRSDHQAPEAEERNGPGSLTTRGSVLASGPSGDPDPDADRESSEGSCTQVNSSSRDGSWCSVASEQSRPGSCMDLAGNTTNCSSEGSCGDHDSEREHLDASSGCGSAKSEEAFYESDDRLALSRGLVEPPPAAAGEGPRTQDNDTHAGEVRAMDHEEEEETNKLAIVLADPQPQSQGDVESVLLALRRVKEQLRYTMNQELAAPTRSSTPTERACHTRKPCGSLLLRCPTFGSVNYS

SEQ ID NO: 300836 - protein, 38 aa, Zea mays
  Clone ID: MRT4577_37431C.1.pep
RSTKPDLNTTTFTVKRAALNSHTPHIEFSLDARSHTRK

SEQ ID NO: 300837 - protein, 73 aa, Zea mays
  Clone ID: MRT4577_37432C.1.pep
HNGPTHKFLLAWATRLMYMTLLFSVTTMVRFRPPFTTVFTYLSHCTSNRPYCSLIYYYQAWWLCHNKVTLFYS

SEQ ID NO: 300838 - protein, 565 aa, Zea mays
  Clone ID: MRT4577_37433C.1.pep
MGSTAAVSVSASAIASRGCARSEAARRPGGIRVCGLRSEALTCHSLRISQAPARLTVARPPPPAAATNGAAAGTCGFDYDLVIIGAGVGGHGAALHAVEEGLKTAIIEGDVVGGTCVNRGCVPSKALLAVSGRMRELHDEHHMKSLGLQVSSPGYDRQAVADHANNLASKIRINLTNSMKALGVDILTGVGTIVGKQKVRYGKAGFPDKEITARNIIIATGSVPFVPKGIEIDGKTVFTSDHALKLESVPDWIAIVGSGYIGLEFSDVYTALGSEVTFVEALDQLMPGFDPEIAKLAQRVLINPRKIDYHTGVFASKITPAKDGKPVLIELIDAKTKEHKETLEVDAALIATGRAPFTKGLGLENINVVTQRGFVPVDERMRVMDADGNVVPNLYCIGDANGKLMLAHAASAQGISVVEQISGKDHILNHLSIPAACFTHPEISMVGLTEPQAREKADKEGFEINVVKTSFKANTKALAENEGDGIAKLIYRPDTGEILGVHILGLHAADLIHEASNAIALGTRVQDIKFAVHAHPTLSEVLDELFKAAKVNSGVSHSVNEPVAA

SEQ ID NO: 300839 - protein, 101 aa, Zea mays
  Clone ID: MRT4577_37434C.1.pep
QEQRRGGSARTASQTARTVHCRGKSPRKQLATKATRKSAPTTVGVKKPHRYRSVTVWLREIRKYQKSTELLIRKLPFQRLVREIAQDFEIYFFFQSPAGVA

SEQ ID NO: 300840 - protein, 56 aa, Zea mays
  Clone ID: MRT4577_37435C.1.pep
ELKSSVKTKDKKVSYNISICLLEVVFLLIFNVKDYQKQENKNILIVLFMQLSTFLL

SEQ ID NO: 300841 - protein, 220 aa, Zea mays
  Clone ID: MRT4577_37436C.1.pep
DVGKDAYEEVDLVTKGGNYGWRVYEGPYIFHPQKSPGGNTSPESINAIFPVMGYDHSAVNKEIGSASITGGYVYRGSADPCLYGRYLYTDLYSSLMWTGTEAPEGSGNYTSAVKPVSCSKASPIGCESVAGSTDPLLGYVFSFGEDSRKDVFVLASKGVYRVVRPSLCGYTCPAERPATDNGTAPGPGGPSSGAPAATRLGRSVAAVAGALALIPCVLLL

SEQ ID NO: 300842 - protein, 141 aa, Zea mays
  unsure (1)..(141): unsure at all Xaa locations
  Clone ID: MRT4577_37437C.1.pep
MADSLTEEQASXEVKEAFSLXDKDGDGQITTXELGTVMRSLGQNPRESELQDMIYEVYADNNGTIDFPEFLTMMARKMKDTDSKEEIRKAFWVFNRDNNGFISGGXLRNVMTSIGDKLTDDEAXXMIREADHYGDGRIDYN

SEQ ID NO: 300843 - protein, 46 aa, Zea mays
  Clone ID: MRT4577_37438C.1.pep
QCRCSPDYPNKVSLKQPVKCCFTLTSRVNQAQMELVGWSSQPMLYL

SEQ ID NO: 300844 - protein, 83 aa, Zea mays
  unsure (1)..(83): unsure at all Xaa locations
  Clone ID: MRT4577_37439C.1.pep
RARGVRGYNLPFKNCIVSMNGKLYAAQKLREXXXTIVLSESKFNTQNHNIILPICHPQDRTRYTSMTLTWGWKSRLNFSVPHN

SEQ ID NO: 300845 - protein, 406 aa, Zea mays
  Clone ID: MRT4577_3743C.1.pep
MATPPTALLLLLAAAAAFHGATAKTTIEPCSGADACPALLGYKLYADMKVSEVAALFGADPAAVLAANALDFASPGAANRILPAGTPLRVPTRCACADGVRKSVAIRYAARPSDTLGSISEVVFAGLPSADQIRTANGLAAEDPDAPLNPGQELVIPLPCVCFNSTDNNLPAVYLSYVVQVGDTVESIAASHTTTVTDISNVNAMGSPIVAPGDILAIPLSACASAFPNSASDYGLLVANGTYALTAGNCVECSCGPANLNLYCTPSSLSASCSSMQCSNSSLILGNVTAQPTTGGCSVSSCNYDGYVNGTIATSLSSGLQPMCPGPHQFPPLTAVPTAANHGSYSPSPAPGPGDAGGATPGGSSLSPSNEPAGNSSQAAAINQPCRFLLIFILSVTLSLRVWIPV

SEQ ID NO: 300846 - protein, 56 aa, Zea mays
  Clone ID: MRT4577_37440C.1.pep
VGFLTGTNMGMVFPRVFTGLSYLSHQWKSDLHNLPAIKNDSPPSHEQSATFRTYNT

SEQ ID NO: 300847 - protein, 43 aa, Zea mays
  Clone ID: MRT4577_37441C.1.pep
AELVVMEAAAAADLAACRQAVMAPWTLLNCSCAPTSLQTDQLP

SEQ ID NO: 300848 - protein, 102 aa, Zea mays
  Clone ID: MRT4577_37442C.1.pep
VQLAVNEPQHKFHRDQPCLHSKDVGTDMLQKQLFGSAPHASKGPKNLAQNRVCPIRHSSFLDSRLHSLVLKDFRESKLHKALAAPLAAPPKKLPPASLPRAE

SEQ ID NO: 300849 - protein, 110 aa, Zea mays
  Clone ID: MRT4577_37443C.1.pep
YKSKCYLKSLETLSGHSNCESGSVSSVVFEKALQVLALEKNPLSSERCHAVKLTKTLHLASYKEAIENQAFFITLGETRPSSWLRHWRRKLWQDAHATQNAQRGGCREAL

SEQ ID NO: 300850 - protein, 112 aa, Zea mays
  unsure (1)..(112): unsure at all Xaa locations
  Clone ID: MRT4577_37444C.1.pep
HESLGPDCRSTRINRGEPRCXIQTPRPPHRXRQGPRSDRRMDPLSTIAGDHSSEALRPLHRSXPIPGXANHQAAADNVRAGVPSEPYAHKTPKITPAVTGTHPRTHVTVLAS

SEQ ID NO: 300851 - protein, 153 aa, Zea mays
  unsure (1)..(153): unsure at all Xaa locations
  Clone ID: MRT4577_37445C.1.pep
MAAVGGENSGAGEGGGPSSTLRYYVXHDGXFGHELLXFKIRPDGKLRYDNNSNYENDTVIRKEDFVSTSVLREVRRIIQQSDIMKEDDSHWTESYRIGRHDLEIVVGNXHISFSCSKIESLGDVQYRKDPERLRIFYYTVQHLKCVVISLIDL

SEQ ID NO: 300852 - protein, 38 aa, Zea mays
  Clone ID: MRT4577_37446C.1.pep
AVACQKWRNNLTSSIDANKSYVSIRKLPILVFIFLLAS

SEQ ID NO: 300853 - protein, 157 aa, Zea mays
  unsure (1)..(157): unsure at all Xaa locations
  Clone ID: MRT4577_37447C.1.pep
LTGATFLFSPPGPRATGASLLPPRGAXPPQGSXSPPPVPLPPSXRLPPRPRRQGPLPLPPPWRAPPGSLVPPRLPPPLPPPPPPLSVAALGLLGPVCLFSCAAFCPPAPPIGGVAVPCRFCLWFFPWWVPVLWVWGVVASLFFSLRWAGLGGFSTLT

SEQ ID NO: 300854 - protein, 117 aa, Zea mays
  Clone ID: MRT4577_37448C.1.pep
LIQVCIPMPDRHSSNTFFSLFQTRIAQAFLNRFVPQPWLFRFTIKIHDPKYVDHKLCGSEVGHTSLKHSFSPLNLLNQPTLPPCTFHCLAALITQFLLVTDHYPFTKVILHGYLYLF

SEQ ID NO: 300855 - protein, 91 aa, Zea mays
  Clone ID: MRT4577_37449C.1.pep
IQSVSEVTVVVTAIALVVATSLVARAVVVATDQAVHISALRSVVVIPALLVVTTFPSPVVISAGLPVVAAVVVVSSTRPTVPPPAVLVHHG

SEQ ID NO: 300856 - protein, 316 aa, Zea mays
  Clone ID: MRT4577_3744C.1.pep
MAAAAATRLSGGGVALLLLVLLAAGTSTSSAQLSTGFYSHSCPGVHDAVRSVLQAAIAREQRMGASILRLFFHDTPSFQGEKMAKPNNGSVRGFEVIDAIKSAVDKACPGVVSCADILAIAARDSVVTLGGPNWDVKLGRRDSRTASFSGANNNIPPPTSGLANLTSLFAAQGLSQKDMVALSGAHTIGQARCTNFRAHVYNDTNIDGAFARARRSVCPAAASSGSGGDNNLAPLDLQTPTVFENDYYRNLVCRKGLLHSDQELFNGAATDAQVQAYVSSQSAFFADFVAAMVKMGDISPLTGSSGEIRKNCRRIN

SEQ ID NO: 300857 - protein, 42 aa, Zea mays
  Clone ID: MRT4577_37450C.1.pep
LQFEIFPPYGPGFAQLRFGLVAPRLGHGRVAGKFGINPGGFF

SEQ ID NO: 300858 - protein, 456 aa, Zea mays
  unsure (1)..(456): unsure at all Xaa locations
  Clone ID: MRT4577_37452C.1.pep
MDFQVVVLAGGTSEKLSPLVSKDVPKALLPVANRPVLSYALDLLEASDLKDLIVVVEGQEAAQLVDAWVSSAYLDRLRVEVVVVSEDLGSAGALRAISKRLMANDILVVSGDLVTDVLPGAVAATHRRNGAAVTALLCSVPVSGPSDTSSSSGKDKAKKPNRLNIVGLDRSKQFLLHIVSGTDVEKDVQVHKRKIQAXGQMEIRSDLMDAHLYAFKRTILQDVLEQKEAYRSIRLEVLPYLVRSQLRSTPSGGSGTSVDEIESSAFQSSGNLQCLSQHRVIAPSAFKQDVLSRSSGGHRCCAYIASKSKYCHRLNSIQSYCDINRDVIGEVSHLSGYSFSAQNNIIHPSSVLGSKTTIGPHCILAEGSQLGDKCSVKRSVIGRHCRIGSNVKIVNSVVMNHVVIEDGCHIQGSVVCNNVQLQERAVLKDCQVGAGYIVTAGSEHKAESLARKYSEL

SEQ ID NO: 300859 - protein, 84 aa, Zea mays
  Clone ID: MRT4577_37453C.1.pep
SHSPPTVFPTHHTQTASAHLPHPPGHVLLLPMSPPLDLYYICLSPAAASVSAHHDLNCTQLRLGLPGTASPYRRVVTATATTLD

SEQ ID NO: 300860 - protein, 79 aa, Zea mays
  Clone ID: MRT4577_37454C.1.pep
VEAPQRCFQEKTLEETCPCEGASCRLGRRCSRHHCHPCLCSSVDHYCPLACHQGQGTGALDFVVAMELRHPSKVVPRAE

SEQ ID NO: 300861 - protein, 157 aa, Zea mays
  unsure (1)..(157): unsure at all Xaa locations
  Clone ID: MRT4577_37455C.1.pep
SYQTNMPNALXNSPHMQFQSRSNFELRNLTKHFQSMISKIQVTKRIATYNVIHSNTXTSXAPIVCSAAITIVFVATEMHPWQQTGDLADDIIXLPPHLNAMKHRDMTILPLYDKYHDACDTHXLDDLNIGDXTQTDQFYHCYFTLYNPVCAHHPTTL

SEQ ID NO: 300862 - protein, 76 aa, Zea mays
  unsure (1)..(76): unsure at all Xaa locations
  Clone ID: MRT4577_37456C.1.pep
MPQVKSSYDGAGGDYIKWMCGAGGRPGGAMASLHRGVGSLXRDISDPCLNPSPXKGNRMLKPERWXRXFDSDGKAI

SEQ ID NO: 300863 - protein, 1655 aa, Zea mays
  unsure (1)..(1655): unsure at all Xaa locations
  Clone ID: MRT4577_37457C.1.pep
MVAVACTGPRRHQTQRAGLQWRLGGPCRRRRLAERPRPPLPRRPVPQDLRGRCFNCLATSHRAAACRHPSCCLRCRRPGHRAAECPGADRGHDVTKVLSGGPDLHPLVARRLNVASASSGGRPVWERLGSQPVEVSVPFSKRRLVWRRVSPPMDHGRHAAAEDGPGQSMNHTKKGRHRTRGRRPRSRSAASLPPVDDDSSARLPSHQSAVVKNAGSAARPVCVLERARDLTLVENNLRHCALFVVVIGSRPPVTAELLAAEIAAEYELDPASFSVHRSVPEDFVIIMQNEQAVLRVFNNGAVLNSPSGSFKFIKWSRLAHAEAVSLPSFVSVSFEGVPLHAWSVETARSLLRAHCTALELHPDTVARLNFSSFRVLGWSRHPELIPVAVDLLILKPVQSFEVETTVKHLLAYQVMASVSLISPSAGDVSPPPSPPASNDDRDTRSRRRRLQQASPARQGGPVEALAVRRPVHERLGPLPICPRHVAISQEVLEQEVSKEASLNGSSNLEEHIPAVKELNIGAMIEASEDNVESNGRRHEQACMVEAGASGLSGGCPSHSPLPVPSSPSSPLRAPAVCCSMGGCEKEQAIQVLPPGSPSRATFDMGGQKSALVDARTSSRLSRRSPIITYFRQRRKKDSQPSLLLGASPSPPSGAKEFIDKLTRPAGGILRAPVRRPRQGKATATEVVPRHNRRVAGAGVERLATPPPATQGKKHILKELGIVNAEETVTIRPKDLDEYARVFSKGLSEVQTKMVDVSRFLVLRMLGPAFDNFVFLPSVGASGGILVAWKNSIGICAGSRVNDHSVSVNFHSSTSPPWWLTCVYGPQGNQEKIQFLQSLREIRALCNGPWLVLGDFNPILREEEKNNNNLDRAMMGRFRRWANDLALNEIPLIGRKYTWSNGPCPPITLAKKLKATARSLQSWNDKKAGKIKQKLEMARELLHQLEVAQDNRSLSHAELWLRNMLKKHSLALSSISRTVARLKSRIGWLNEGDANTSLFHAQTRFRKKKNFIAAIHSEDGQIWTAHEGNAAAFFNFYQGLLGTAEVRDVTVDLDALGMPSFDLVALDAPVSEEEVWDTIKALPSDKSPGPDGFTGRFYKSCWSVIMADFMAAIHCIWARNFRNLGSLNSAFITLLPKVEGATSVRDFRPISLVHSFAKVVTKLLANRLADRLQNMVSPNQTAFIKKRFILDNFMLVQQTTRFLHCQKQARILLKLDISKAFDSRASEEGFLQPLPSRNMQDRISLYAGDAVVFLYPTDRVITMVMAIQQKSGRDSLLKMLGEQNRLIPIAFXSSDVXTMDETQEIIDKASIRLAWESAAAVTRTGSSLYAEYVMTAKVMYVALPLVLPDFAFKAIEMLRKFFFLSYRXNSFLLFIASRGGLRLAVPSSWMILGLNSXNNLCWELSPSRAWEPRTPPSKPWADLPSHVXRXVNNLFAAALLSKIGHVENRLIGKVQCLXSGGXLKEIVAAIFDLMTXSSQHMVVXDALPHFASILDSHALISIGVAAELLELCELLFAVVLLQRIXRDHHXLISAPGAYTSFYVYNALFLGSVQFEPAERVWKSWAPGKCTFFLWIVEQRRCSAAATFGQGWLERPERCPMXSQEGENIIYLVFECVLAKQFWFDYLYEVALPGLYRAHKKYLDSYRKSSISRASDR

SEQ ID NO: 300864 - protein, 71 aa, Zea mays
  Clone ID: MRT4577_37458C.1.pep
AISRSGGLYCDSARHVRYNDWLGGSSPPSVAVVGIRSTRDSRIYRVLFFFCSSSFFRLRRRQILTPSPTGG

SEQ ID NO: 300865 - protein, 74 aa, Zea mays
  Clone ID: MRT4577_37459C.1.pep
KDWNRSGSPNFSYLGFYPRGNTRVYKKLNRGWYPPFFFPRETGFGAYILTLDNHWWATVCASKLPLGHSFFKLG

SEQ ID NO: 300866 - protein, 334 aa, Zea mays
  Clone ID: MRT4577_3745C.1.pep
MAASVAAATRLSGGGGGVALLLLVLLAAGTSSSSAQLSTGFYSHSCPGVHDAVKSVLQAAIAREQRMGASILRLFFHDCFVQGCDASLLLDDTPSFQGEKMAKPNNGSVRGFEVIDAIKSAVDKACPGVVSCADILAIAARDSVVTLGGPNWDVKLGRRDSRTASFSGANNNIPPPTSGLANLTSLFAAQGLSQKDMVALSGAHTIGQARCTNFRAHVYNDTNIDGAFARARRSVCPAAASSGSGGDNNLAPLDLQTPTVFENDYYRNLVCRKGLLHSDQELFNGAATDAQVQAYVSSQSAFFADFVAGMVKMGDISPLTGSSGEIRKNCRRIN

SEQ ID NO: 300867 - protein, 197 aa, Zea mays
  Clone ID: MRT4577_37460C.1.pep
GAAARAVAMEACQARAEGHGLAGVGAWGSAARRRPTSQRRVRTQDVQGARLQGLGHGHALGPHIGGKGSRAGARREETNCLAGGRQGYSPGKNLWGGREQPERKRDKGRRGSLTRPPTSATTRASQIFLGDRRGERLSGQDMEGSSPESRGRLGAGLAAAMATARGCSRPDAVRRGPALPCRVHGSGCCPGRPRGTQ

SEQ ID NO: 300868 - protein, 69 aa, Zea mays
  Clone ID: MRT4577_37461C.1.pep
HLARSSPPPAPADQPPSSLPSSTRLLLPPAPAADRQALAARPSAYRAQPQIQPTSRLAPCFPLPTFCFL

SEQ ID NO: 300869 - protein, 100 aa, Zea mays
  Clone ID: MRT4577_37462C.1.pep
GPKKNFKGNSLKTNDLGGAIYFKIFQGGFPKGGHKQEGGDRVLCQKKEGGGAKKPYKGKKKNGEFQPLFFLYPPKKPQATKGLDFPYNPPIKKTCQGGGR

SEQ ID NO: 300870 - protein, 49 aa, Zea mays
  Clone ID: MRT4577_37463C.1.pep
SLFTSLCSSEMAGAIASTTYLFIGRITLNPARSVATAGTSVCLSRHAAP

SEQ ID NO: 300871 - protein, 54 aa, Zea mays
  Clone ID: MRT4577_37464C.1.pep
MAGMEELLTLLFNALLLVFVVKLLLALFHTKIIVILLYILVLLFAMLLSGRFPG

SEQ ID NO: 300872 - protein, 206 aa, Zea mays
  Clone ID: MRT4577_37465C.1.pep
MLPLHHHPAAAPESAAPATDPPPPPVLDPSSLRIHIPSSPHHALPSTPHKRPVVMTSSSSSSTPTRPSPLPFTPPRRRKVPAPAAPAGTAAARHLLRCLHLRLRVLLLISLPSLYFLSPTPAIFPRSLLADFLSAAAFSCALLLLLCLSLPRLPFALTLPLPLRRARRSPILWSIGSSPSASATTPTTGHFVQVYSNGDVYEGQFH

SEQ ID NO: 300873 - protein, 58 aa, Zea mays
  Clone ID: MRT4577_37466C.1.pep
GRSSTTPPESCSRCSREDLKVGSRHQQTRSNPLEIISSYGFSCVHRANNNSNSYLRNI

SEQ ID NO: 300874 - protein, 108 aa, Zea mays
  Clone ID: MRT4577_37467C.1.pep
SLIRRKSECPQIDGLSCLHLQFRVGLFSGGAPWYCNLLGSPHVSQDVRFKKLYGAGNDYRGRFFLNPPDLVKKSQLWSFMRIFLVQGLGKFFCFGYCFPFFILFLTKG

SEQ ID NO: 300875 - protein, 111 aa, Zea mays
  Clone ID: MRT4577_37468C.1.pep
PRIHPVLDLRILAPRGHAQAPRHRTCLPAIRRAARHLRPRDVRGARPTGRATLEAAGGLRRGAATPFCRMTGRQTITIIEDVHDTGIMLPNQMNYSMLSAHAQPLLGVSQQ

SEQ ID NO: 300876 - protein, 81 aa, Zea mays
  Clone ID: MRT4577_37469C.1.pep
KESQRALEIAGRESDGGMVTRTVRMRNGSCWSGDRVRACTAVARARGQSPWVLSTHGRRTCADCIRAPVASPSEHCAATGC

SEQ ID NO: 300877 - protein, 87 aa, Zea mays
  Clone ID: MRT4577_3746C.1.pep
LVHVLLKIHIPCLYRLTTSLKRFFLQSVQNGWCNGVSPKSHPPTFFSANSLNYRLGFYPLEPFKQWLKKKYRIILLPFCFAGKVKNL

SEQ ID NO: 300878 - protein, 55 aa, Zea mays
  Clone ID: MRT4577_37470C.1.pep
MILCVDNEQSVVPECVVGDFPEQQHGEGCSNCNQCSGGDEGNMEDFEEFQDYDEF

SEQ ID NO: 300879 - protein, 117 aa, Zea mays
  Clone ID: MRT4577_37471C.1.pep
KIYKKKKKRGGGGKKKKKKKKYRGIRNYVRGGPNVMDSFLGPPKFFFLAVFFQCLDWVFPGGGGLIGWGPFLFSPAGVFALGPGPFALPAGCASSLALGAPLVGARYARWGGCLRAG

SEQ ID NO: 300880 - protein, 62 aa, Zea mays
  Clone ID: MRT4577_37472C.1.pep
QITSIVFTFSTWIEIQIYDVLFRCIIFICSQFGVSLCFAHGRLLWMYIKVEYACEVALSAYF

SEQ ID NO: 300881 - protein, 28 aa, Zea mays
  Clone ID: MRT4577_37473C.1.pep
FPSAMLEMRNSKKIVRLPKNPRRRVANN

SEQ ID NO: 300882 - protein, 81 aa, Zea mays
  Clone ID: MRT4577_37474C.1.pep
RDCGSLQHERQGQERHGVLSDSAQRLELPHSLTASEYEGFTSSVPMHKGLFQRAGQHYLVADCHRIEPGTDARLRYAWEQA

SEQ ID NO: 300883 - protein, 116 aa, Zea mays
  Clone ID: MRT4577_37475C.1.pep
RLVALECVEAWEALQLVQLLQPWRRPFLGASALMVVMQDAGQRHLPLQLAEALAAVDDAAAFWERVVRWERDHGVRRPHLDRRRRSPAATAAATAARVSRPWGSGIRLAPCQERRF

SEQ ID NO: 300884 - protein, 107 aa, Zea mays
  Clone ID: MRT4577_37476C.1.pep
PPIFQPPSNLQGPKSKQTGGLPLRGDIPPPPNLTALFTQQNPCSYLTKKKSYKSFCPPQLGAPIMPKAFENRPPLIVGGAGPGPQVRTPPQHKGPLSWLFLPNRGQT

SEQ ID NO: 300885 - protein, 40 aa, Zea mays
  Clone ID: MRT4577_37477C.1.pep
AFFGYSRSILIGLYCVGARRFLRLERLERSTEPIPTYYLC

SEQ ID NO: 300886 - protein, 63 aa, Zea mays
  Clone ID: MRT4577_37478C.1.pep
LKVPRRLIDLANYEPLMLNQPLGYSQHSFRHSDGKKSILESSFFRGYITQLARITTPLFLHIK

SEQ ID NO: 300887 - protein, 104 aa, Zea mays
  Clone ID: MRT4577_37479C.1.pep
VAVGIMRGAWRNEPNPEACKEFFRCLAICHTVLPEGEETPEKISYQAASPDEAALVSAAKNFGFFFYRRTPTTVMVRESHVERMGSIQDVPYEILNVLEFNRQQ

SEQ ID NO: 300888 - protein, 109 aa, Zea mays
  unsure (1)..(109): unsure at all Xaa locations
  Clone ID: MRT4577_3747C.1.pep
LPVLFFSRVPVWVCALPRLPCFRLRALPGFCFAFSFPSLVRLXAPPPFRXVPLLVLVFPLLAAAALGAGPRPCGPLFLFFRFVSWXSCSLVLAPPPRSSAXXVSXLRSR

SEQ ID NO: 300889 - protein, 303 aa, Zea mays
  Clone ID: MRT4577_37480C.1.pep
MEEIDAAKPTKDNVDVRLKWLGLFHRYKHQCTPTDSTPPAMVVVAVGRSDPASVTQTKQPSVPGVLAFLVHGFIAQVKMSAFYITYYICMEKHVEVDLCIGIICSLHKDANDRSSTQALLFQTTYLVSRFFMALTLKDQSILVNGDINEGLLRLCHKLHRLRKEYAYTFESTSLSYQCSEVSRILQGYKVVHDIKRFVGHNLYYMKIMGVSPKFTFSAIYRFMFMRLSSFHFNANPAGQHHVTKQRKRTRVIGKKKRIAKKSEAAEYQKLLAQRLKEQRDRESLAKRRSKLSAASKASAATAA

SEQ ID NO: 300890 - protein, 73 aa, Zea mays
  unsure (1)..(73): unsure at all Xaa locations
  Clone ID: MRT4577_37481C.1.pep
KHTEIQWLVTPXPLXRKRTRVIGKKKRIAKKSEAAEYQKLLAQRLKEQRDRESLAKRRSKLSAASKASAATAA

SEQ ID NO: 300891 - protein, 234 aa, Zea mays
  Clone ID: MRT4577_37482C.1.pep
MLPCARSVLRRRGLASSLLRMCGGEGQCSTGTGELVANARWAYLQTGVIGAGRMARTQTRCFLGCGDGEEGGVLSKVYEERRVMGYSPEQMFAVVAAVDLYEDFVPWCQRSRVVRRHDDGSFDAELEIGFKFLVESYVSRVEMEKPRYIKTTASESGLFDHLINVWEFKPGPVPGTCDLYFLVDFKFQSPLYRQVASMFFKEVVSRLVSSFSDRCFRIYGPAVPVLENTYGQGR

SEQ ID NO: 300892 - protein, 194 aa, Zea mays
  unsure (1)..(194): unsure at all Xaa locations
  Clone ID: MRT4577_37483C.1.pep
RPGSGLDDNVPLPVRATTMQXLASSRHAPLSVLLLRRPAPDAPGPGXAERPRLRRPRHQLXSMDPTVERSKSGFQNFKTXEVYDXKPELLEPIKTGQSPRYMAIGXSDSRVFPLGTLGLASGEALTGRNXISCMVPPYDKIKCAXTANSMEYPARALTVQDIXAVVHSWCGGFRALLXSVRTGATDIFXTLVDD

SEQ ID NO: 300893 - protein, 254 aa, Zea mays
  Clone ID: MRT4577_37484C.1.pep
MLPCARSVLRRRGLASSLLRRCGGEGECSTCAGELVANARCASTLAALGGGGRVLERGARWAYLQTGVIGAGRMARTQTRCFLGCGDGEEGGVLSKVYEERRVMGYSPEQMFAVVAAVDLYEDFVPWCQRSRIVRRHDDGSFDAELEIGFKFLVESYVSRVEMEKPRYIKTTASESGLFDHLINVWEFKPGPVPGTCDIYFLVNFKFQSPLYRQVASMFFKEVVSRLVSSFSDRCFRIYGPAVPVLENSYGQRR

SEQ ID NO: 300894 - protein, 52 aa, Zea mays
  Clone ID: MRT4577_37485C.1.pep
SIDTLKPSPPFCFLFDFFILIYFFFYFYPFSLYFLVCIFFFFFIVFFIIFFF

SEQ ID NO: 300895 - protein, 147 aa, Zea mays
  unsure (1)..(147): unsure at all Xaa locations
  Clone ID: MRT4577_37486C.1.pep
LKPRFFXPXNDVAVRLALLPWTRLHDVFHVGLLKKFXGLPPEVPLSLLLIHHGAVIPELEXAVKTRIARWVRQVLVQWKGQTVASATWEDIEPFVTKYPTFQLADELPLEEGRDVMWGLKYARCRMARDVRRAAERAAHAEAERSNT

SEQ ID NO: 300896 - protein, 144 aa, Zea mays
  Clone ID: MRT4577_37487C.1.pep
MDENVHLKVRGENNRLHHHKKDKDFHDKEHGELLMKDSGQPTVGMGQNIKDKIAEERADQPDGHHGNTAKKNKDKSKHGEGHDHDSLQRSSTRDCEWDLRAPTSMLSYNAARVQHKHAGWMEDSYQLMLMQRFTGDMHACIVLL

SEQ ID NO: 300897 - protein, 38 aa, Zea mays
  Clone ID: MRT4577_37488C.1.pep
RLLNQTYKEIAILYFNLKSIRGHDFYNKVPEKTLAKLN

SEQ ID NO: 300898 - protein, 224 aa, Zea mays
  Clone ID: MRT4577_37489C.1.pep
MRAPLLLWAAATWLAVSAVAHPGRRGGGGGEQPLSRIAVESAVLAVDDAAHVRASPLVLGLKGESSEWVDVEFFHPDPSSDDWIGVFSPADFSAAICEPENPRQSPPVLCSAPIKYQFATFKNDGYNKTGKGYLKLQLINQRGDFSFALFSGGLLKPKLIAVSNKVAFANPKAPVYPRLAQGKSWNEMTVTWTSGYDITEAGPFVEWGEKAGRRFLAPAGTLTF

SEQ ID NO: 300899 - protein, 53 aa, Zea mays
  Clone ID: MRT4577_3748C.1.pep
DNKHCYAVVLKKKKKKKKKKKKKKKKKKKKKKKKKKKKKKKKKKTQKKKKKKK

SEQ ID NO: 300900 - protein, 288 aa, Zea mays
  Clone ID: MRT4577_37490C.1.pep
RPPPAPEPRRRDDLESLGYVLMYFLRGSLPWQGLKAGTKKQKYEKISEKKVATSIEALCRGYPTEFASYFHYCRSLRFDDKPDYSYLKRLFRDLFIREGFQFDYVFDWTILKYQQAQIATAPPRAGHGAGPSGLAPALQNDRQPGPEEARTSGWSSMDRRRAPLPITSVGTLSKQKAPIGNDATVSRDAVISGPNFMGRSSGSSRRPVVSSSRDMVATDSSEPSRARATDASPGAFRRASGPQRSSPVHSAEQKRSSSGRHPSNVKNYDSALKGIEGLHFDGDERVQY

SEQ ID NO: 300901 - protein, 97 aa, Zea mays
  Clone ID: MRT4577_37491C.1.pep
HAYMRSPLAACLSPPSSASTGLALAMVRPTPLRCLCVSAGRAFPVRTIALCVHGKLSPCRFSSSSQDRSSSFSPTSPVESFSCASWSVRLAEHLAID

SEQ ID NO: 300902 - protein, 71 aa, Zea mays
  Clone ID: MRT4577_37492C.1.pep
GGGLFFFTPPGEKGMFCKKIKLGEARVFSLTLFLKPGHCIFIRLTIKGIWAFKNMLESPRNVIDIFKNFPF

SEQ ID NO: 300903 - protein, 57 aa, Zea mays
  Clone ID: MRT4577_37493C.1.pep
SRASATRATESVTPLGYYRWLVITSVTRVVLPKLNAAGFVQRNTVPKLLLLERAPQS

SEQ ID NO: 300904 - protein, 76 aa, Zea mays
  unsure (1)..(76): unsure at all Xaa locations
  Clone ID: MRT4577_37494C.1.pep
TIYRRSGPELKKQHGFVKNGHHGILXMIFSYPMLMKPFSAYPTLGRITVLVMSQTLPVGVVQTVMRMSPQVKKGNK

SEQ ID NO: 300905 - protein, 94 aa, Zea mays
  Clone ID: MRT4577_37495C.1.pep
CQSLTFRRDCVSKSCLRLSEWHVSRRQQQRMRKLIKSIIDSERAFLLWGRSKDRSLVSSQMRLLQSPSSPYRLCGAQCQQHSPSCMPRCSCRNT

SEQ ID NO: 300906 - protein, 113 aa, Zea mays
  Clone ID: MRT4577_37496C.1.pep
VRREKRGGAKASCSYTHHPPGRTRTGVSPIPNYAIIRRAPPRPDDGPPPHADADAVVDDDGELRGGGVLEAADAGVHAQLAPRLGAMLPPRAHAARRVGGGVRPGTRLAHQLQ

SEQ ID NO: 300907 - protein, 45 aa, Zea mays
  Clone ID: MRT4577_37497C.1.pep
HLFKSSPPSVPTHYKFWRKKNYTLVCLTSDSAVRLYKGKSVALPF

SEQ ID NO: 300908 - protein, 55 aa, Zea mays
  Clone ID: MRT4577_37498C.1.pep
TSGWELLYCIFFTQTNQQLSFAFSQPNAPISYFIKPPISSFRKPHGINSTGDLTT

SEQ ID NO: 300909 - protein, 57 aa, Zea mays
  Clone ID: MRT4577_37499C.1.pep
MKSANPSFVSNLLSKFPVGFVSYIRKNLIPYAVPTLEKNCSTSEDNCKMAINVNKSM

SEQ ID NO: 300910 - protein, 65 aa, Zea mays
  unsure (1)..(65): unsure at all Xaa locations
  Clone ID: MRT4577_3749C.1.pep
LSPPPQALRSTLYSALLYSCVHGLFPPLFIHYPTQPPIHPNHPSPSTTTRPPXCILNSPFKFKIP

SEQ ID NO: 300911 - protein, 76 aa, Zea mays
  Clone ID: MRT4577_374C.1.pep
PRAITTTLMSKPAGTFKQCHAMYRTISTNVHNHHHTTIVCMLTTQTQDLILAQSYHSSFFFTPAATSCSVRLDHWY

SEQ ID NO: 300912 - protein, 51 aa, Zea mays
  Clone ID: MRT4577_37500C.1.pep
SPPFTSSFNQLAYYPIAPSPITLPNTYSPFMTNFTPPVSTHYSPLLLFYTH

SEQ ID NO: 300913 - protein, 102 aa, Zea mays
  Clone ID: MRT4577_37501C.1.pep
PKSNHRSVALEFNGISNGANPPRIRKSATPKQSMSAKKAAFPKRPGSPLVELRVFISPSFLSAAAAASSSPAFILEKSFQYKQRGEVTAQAKNLLTSRPWHR

SEQ ID NO: 300914 - protein, 96 aa, Zea mays
  Clone ID: MRT4577_37502C.1.pep
PPPGEKFPPPPGPPEPDNKKKRPRPQINRVFRKVFFFLKRNPLFGKGSGKNSPEAQNASGPFSPHEGAFLRTLFGGITGNKFPWEVLIKGFPRACF

SEQ ID NO: 300915 - protein, 97 aa, Zea mays
  Clone ID: MRT4577_37503C.1.pep
HLTPAYANPPPAISRLEWVPATREHSYSTVRPLATEGRHYSHHLPCPVRASCSDIGPAEIRLTLSHTRAGGQLIYASISKPTFPVFFNQLGQNITCS

SEQ ID NO: 300916 - protein, 163 aa, Zea mays
  unsure (1)..(163): unsure at all Xaa locations
  Clone ID: MRT4577_37504C.1.pep
MHLCKMNRSTSKCHLCQMSSDGMVAVSAVTSLSPLPFHADTLSSKKLSSRHYLIVSAVTNLLVNLLGVWFFRNYARVNIXREATYILLLLVQMEILYLFPCKGCKLNRIMIGXYRNAEDMNYHSVCLHVLADSIRRYMHSQALLDSSLVHIILLYLAGCHTRY

SEQ ID NO: 300917 - protein, 108 aa, Zea mays
  unsure (1)..(108): unsure at all Xaa locations
  Clone ID: MRT4577_37505C.1.pep
IPHVNRTEYQLIDISEDGFVXSLISKATFFYELNFRLSLIIQFSFVSXSLLTSDGNTKDDLRLPTDETLVAQVCLEIFSILSPVSFLVGFQVLQMVVKFVSLVICYGS

SEQ ID NO: 300918 - protein, 109 aa, Zea mays
  unsure (1)..(109): unsure at all Xaa locations
  Clone ID: MRT4577_37506C.1.pep
SQQLVSSGRQESYFLAFNGRTALALHSSAPAACFLSPLSLGSRFSKPFGAPXMRPHFLRAHHIYNEKLITPEGEVELQVPDDVYILDFAEEEGINLPFSSLRGSCSFCP

SEQ ID NO: 300919 - protein, 68 aa, Zea mays
  unsure (1)..(68): unsure at all Xaa locations
  Clone ID: MRT4577_37507C.1.pep
KMCKKFPQPGVGPQVRRGGNILAWRVQKQNIFRWLLLPRNLFRSIQAKFDRGAFKNRKNSXRLRVEYN

SEQ ID NO: 300920 - protein, 229 aa, Zea mays
  Clone ID: MRT4577_37508C.1.pep
MRRPPIVARVRRSLFLLLCCCCCLAAWSSPPAVRALPLCTDGRAPVPLNRTLGFCSAYGGGGSSSSCCDAAADAALRKRFNAMNISDAACAGVIKSVLCAECSPFSAELFNSSSKIQMVPLLCNYTSSSSSAQSKDSTRDYCKLVWETCKNVTIVNSPFQPPLQGSARLPSSSSKLTDVWQSEHDFCTSFGGSSGEQSLCFNGNRGFFNSTEPSPTPKGICLERISNGS

SEQ ID NO: 300921 - protein, 95 aa, Zea mays
  Clone ID: MRT4577_37509C.1.pep
RATRRAPAAQSRAELSAAAQGGLTSDAGRMGRGGRRTQHRYQGGSGRSTGSQGHGGPAAARVACLSCVGMRMTARRDAGGWLAPGVRVAAWGLTD

SEQ ID NO: 300922 - protein, 89 aa, Zea mays
  Clone ID: MRT4577_3750C.1.pep
RWQGSGLPAVADNGRAVDNRMVALDTLHKGSDEQRARHEHEETVRQIRVASAADLKAGLAPIFEALESFTAETLRGYENVRIPAKSVAG

SEQ ID NO: 300923 - protein, 319 aa, Zea mays
  Clone ID: MRT4577_37510C.1.pep
MPITEGAPRHGNPAHLLPPSWRKHITLWLEEDTPSFDYGGFVVGDDLAEARLLAKSQGIVAGVPFFDEVFKQLDCTVEWQVKEGDEVGVTDKKQCCAIVRGPVRNLLLGERVALNLLARCSGIATKSHEMLQLLRNAGYKNTLAGTRKTTPGFRLVEKYGMLVGGCDPHRQDLSAMTMLKDNHIWACGGSIPSAVAAAKASGGFAVKVEVECQSEEEANTAIEAGADVVMLDNFTGDGVKVASKNLKNKWGRGNQARALIEVSGGLTAENVQDYVCDDIDVISSSSIHQGTKHVDFSLKVVPRTKSTGGKLGNGESIET

SEQ ID NO: 300924 - protein, 110 aa, Zea mays
  Clone ID: MRT4577_37511C.1.pep
KTLCGWTEYFYALLAYEESTFILTYIFGLFHLRDALTAEEVTDFTRNSYGILLDEKTVTINVTTNALNGLKFISPVGTTVSATSTVLTACSICSTTLGKASGVVTGGVIS

SEQ ID NO: 300925 - protein, 96 aa, Zea mays
  Clone ID: MRT4577_37512C.1.pep
QSRVTLSSFCQWAMHGIKVNHFGFHKNIHCIVTHFETCGSISTQKFWCGNRNSIKNAHEEPLGPYGSVLHLFVASSSTYRIIIHLPDIITRHYMYT

SEQ ID NO: 300926 - protein, 98 aa, Zea mays
  unsure (1)..(98): unsure at all Xaa locations
  Clone ID: MRT4577_37513C.1.pep
NCDRLSSSSFSLPSSNISSSPSNYYSSTGLRARPKSFDASSSSAPCDTISVDDKESNKLTLXKDLSGQPIHSQDVTTIKTNDSEDVKDYELLYEQLLV

SEQ ID NO: 300927 - protein, 50 aa, Zea mays
  Clone ID: MRT4577_37514C.1.pep
LAKANLVARFPFLFLLGWLKRCGVYSARKQEKNIDLVFPFTYGEAIASLY

SEQ ID NO: 300928 - protein, 55 aa, Zea mays
  unsure (1)..(55): unsure at all Xaa locations
  Clone ID: MRT4577_37515C.1.pep
LVRIHTSIIGXARVPSWYIYLFQVLGEGKEIGASLYIISRCGGCGRXCXGRCAPG

SEQ ID NO: 300929 - protein, 43 aa, Zea mays
  Clone ID: MRT4577_37516C.1.pep
HLREGYIKPRDKLSDYASATMPVVPCRDPKLHGAPQYNGREVL

SEQ ID NO: 300930 - protein, 129 aa, Zea mays
  unsure (1)..(129): unsure at all Xaa locations
  Clone ID: MRT4577_37517C.1.pep
GRTTPFRCVGHLLIALVFPKPLYLASGGIGFCLGAHCPLLFAIISKVFGLKSYXTLYNFGSEASPIGPYLLNFRLGGALYNLKAAKQNGGSLAAGPTKTCIGFHCFRKASLIFTAAHGRRPPFFVFPVL

SEQ ID NO: 300931 - protein, 138 aa, Zea mays
  unsure (1)..(138): unsure at all Xaa locations
  Clone ID: MRT4577_37518C.1.pep
MKMRNAPLLFPPPCTAPLTVTGPQQRSMAEVHNERPVGMVGGVRDAPVGRENDLEAIELARFAVAEHNSKTNAMLEFERLVKVRHQVVAXGTLHHFTVEVEKAGGGEKKLYEAKVWEKAWENFKQLQSFELVGDAAVA

SEQ ID NO: 300932 - protein, 89 aa, Zea mays
  unsure (1)..(89): unsure at all Xaa locations
  Clone ID: MRT4577_3751C.1.pep
AARGTEYMFMLWLDCDARLIMACHGNXAICTYSCSLETIAALCTCTMAFSFIIYYSRTKDAFIYIPFFPFGEKEKKKKKKKKKKKKKKK

SEQ ID NO: 300933 - protein, 79 aa, Zea mays
  Clone ID: MRT4577_37520C.1.pep
TVNLSGRQFDNVCYSPQVNIYAIGWTHKSYDIFIECTQIYFKIIGTFNTLSPNLFKKSNIYTLQHIYVHVLTLYIAFTF

SEQ ID NO: 300934 - protein, 61 aa, Zea mays
  unsure (1)..(61): unsure at all Xaa locations
  Clone ID: MRT4577_37521C.1.pep
ILTKEXPCVCVLVLLSIXYXLHNLASNIMPNQPPPLSIAPPIFFNLPYNSKHAKLSLCSLP

SEQ ID NO: 300935 - protein, 74 aa, Zea mays
  Clone ID: MRT4577_37522C.1.pep
SINKVQNSDARALPGNTVKLDLAFFRRTTEYCSILFLLISCCPESVALLRKAMTALKVDALVSYQCFLDKHGGY

SEQ ID NO: 300936 - protein, 118 aa, Zea mays
  Clone ID: MRT4577_37523C.1.pep
MDLLDGPSPPFFSKSQSRSTSLSSSPPPPAAVSTPSPPSPPASPPRKRRRDDAWDEDGVSDVVGALRAIGEGFLRAEERRMEAARETQRMRMEMALRHLDAQRRLMDALVGRIVDALD

SEQ ID NO: 300937 - protein, 71 aa, Zea mays
  unsure (1)..(71): unsure at all Xaa locations
  Clone ID: MRT4577_37524C.1.pep
QQFLQYNQLSEVNPFAYFQQVKLKPFXMLDKASAASLLTTXQLLPLYQQFVANPATVXQMGQMLPFVQLAL

SEQ ID NO: 300938 - protein, 106 aa, Zea mays
  Clone ID: MRT4577_37525C.1.pep
LLHVLGDPPCELPPPWRSGRSSHGRHPLQLPLVGAQQQQQHLPPLPCFCMDELAPCQEHAMAGSAPPWTPPCCSLRPTLYPARPIFFHGKTSRKPPPLSSNGEPLH

SEQ ID NO: 300939 - protein, 185 aa, Zea mays
  Clone ID: MRT4577_37526C.1.pep
LVGCAEKQRKEPNFAQEQERFAYHKLLVETKPLHAPKTGRALLPLTASALPTRWDPPGRRPERRRKLGGRRLACTEDGWNQWACQLGSSLSRFLTFCAVDHGGWAPPVCSFPLVSLSLSLSLSLSLSLSLSTAPLPLLTSPCSCCFLSLFGHSGSPGGDVCTHLPTWPCPRPSCLCSCFGLFTGL

SEQ ID NO: 300940 - protein, 119 aa, Zea mays
  Clone ID: MRT4577_37527C.1.pep
HVYEFFKIWNCSRERANFLVHEFFTTHYFQDGIHPIPGARDALQTLSSFCNLLSPMRTVNYNNHVLFVKKKKKKKKKKKKKKKKKKKKKKKKKKKKKKKKKKKKKKKKKKKKKKKGGAF

SEQ ID NO: 300941 - protein, 172 aa, Zea mays
  Clone ID: MRT4577_37528C.1.pep
ANASTYVIVADMHARAKDWAAAAQLRTEAVDWGLAQSPGVSAVEVRGELHRFVSQDRSHPRTSDIYEMLHQMEWQLRFDGYKPDTSEVALDVGEEEKRRVVAAHSQKLAMAFGLLSTAEGAPVRIVTNLRMSKECHAYSALISEIFGREIVIRDRNRLHRFRRGVCSCRDYW

SEQ ID NO: 300942 - protein, 81 aa, Zea mays
  Clone ID: MRT4577_37529C.1.pep
YCSELSFFSSINQHKKITTGQTPERTNPQTDNMTRERGRSPRNPHGAKDQGRGKKPKGRGKTRGRWTKGGHTGIGFKSGDL

SEQ ID NO: 300943 - protein, 76 aa, Zea mays
  Clone ID: MRT4577_3752C.1.pep
ASGSGGGQTKIKVLLLQHEIEKSHTNFWWRLDKKSVFIWIWFCELKETCSTQFSPCMPTCRNAESISTCSLPCLPT

SEQ ID NO: 300944 - protein, 70 aa, Zea mays
  Clone ID: MRT4577_37530C.1.pep
KETLAQKNPFLPRALLQNTLGGSSPPWGSPPPPPNKNPGQITGGPPPRSPWGKRPLFMFFQRIFCFGEKN

SEQ ID NO: 300945 - protein, 117 aa, Zea mays
  unsure (1)..(117): unsure at all Xaa locations
  Clone ID: MRT4577_37531C.1.pep
MVNHAQLNIVAGGGVLISELIQDIDSPLAKGERAIKPRRGRRGEEFRFSEAILKTIFWFLFAICSIGIGFSITVINNLTQIXELLHVXDTTISLSAFSFCNFXGCLEGVVVPEYLVR

SEQ ID NO: 300946 - protein, 46 aa, Zea mays
  Clone ID: MRT4577_37532C.1.pep
DRRGLYPSRSGDGEHSMTNYWRLLDKTDTKQSCSYSKGRTPHAGDL

SEQ ID NO: 300947 - protein, 198 aa, Zea mays
  Clone ID: MRT4577_37533C.1.pep
MEGSFQLNPNASPFIPGLLGSSAQKAPEKQGGLIISAGSSSKGEPSGSTFDPSEYEENDMDELALVKMVFSMFPNVSTDFIDELIKANDFDMNLTVDMLYELNSQDMVHDDSEVINHFHDDSEATNDLHDGKGVPGADYHKTVVPESSSNMNQDLQNEESATTSDVKSVLPKFSQINLLHNDLGLPDDDKSAGTSIAN

SEQ ID NO: 300948 - protein, 192 aa, Zea mays
  Clone ID: MRT4577_37534C.1.pep
MEGSFQLNPNASPFIPGLLGSSAQKAPEKQGGSSSKGEPSGSTFDPSEYEENDMDELALVKMVFSMFPNVSTDFIDELIKANDFDMNLTVDMLYELNSQDMVHDDSEVINHFHDDSEATNDLHDGKGVPGADYHKTVVPESSSNMNQDLQNEESATTSDVKSVLPKFSQINLLHNDLGLPDDDKSAGTSIAN

SEQ ID NO: 300949 - protein, 123 aa, Zea mays
  unsure (1)..(123): unsure at all Xaa locations
  Clone ID: MRT4577_37535C.1.pep
FPSCLCEKGLFPHDVRSTHVSRRLKAIANRIXRRGLQKLQXYCHMCHKHRRDQKELKCHCMRETHQRNMHVLGMSTDRVVXGFSKEFLXSFLSFIRHADRHSRLTATXVYNKYIVDRYHVHMN

SEQ ID NO: 300950 - protein, 67 aa, Zea mays
  Clone ID: MRT4577_37536C.1.pep
VRSTYQSSVFIVTTSKAVRSSEPGICRLHATHIAMKGTFSLSPCAVTFLSSSTSSPSCSSAPVNVSF

SEQ ID NO: 300951 - protein, 76 aa, Zea mays
  Clone ID: MRT4577_37537C.1.pep
TLHLSNLTLVELTECPKNLVFKIAFEFRGLSNSKHHYLCENYQGRNKSGDLRNIESFTRSSYGNFSRHHLMYFLCP

SEQ ID NO: 300952 - protein, 82 aa, Zea mays
  Clone ID: MRT4577_37538C.1.pep
WQMKLPILLPIKVAILIKEVRRGNPCCQRTLPPLFPQARVRSTKLVMMNWTKIVVICPMERMGKQTNGISTDTHIILHQTKP

SEQ ID NO: 300953 - protein, 49 aa, Zea mays
  Clone ID: MRT4577_37539C.1.pep
GSSPVFLVDTRQEDDYVYSINHITILKPLIYLNSVPKKKIYCSEFIDMM

SEQ ID NO: 300954 - protein, 145 aa, Zea mays
  Clone ID: MRT4577_3753C.1.pep
QNTPKWESKQGPIPLQKSGFAGHCQPGGGGGQKRPSLSGGKGGPIPSTQHRREPSWAHWAHLDPMDFAWPKGEGTDAPKNLGQNLFQGSYPKGVSDPLVGPGGDPPPTAQGVKIGFTIWPRRVNFILKIKPFFCTRPGKKGRALS

SEQ ID NO: 300955 - protein, 61 aa, Zea mays
  Clone ID: MRT4577_37540C.1.pep
RWKLSMPSQLCISCIMAGYADKRLKVSRGCFLGEPPPGSEVVKRSVFIRKPPVLCLVRGGK

SEQ ID NO: 300956 - protein, 81 aa, Zea mays
  Clone ID: MRT4577_37541C.1.pep
CWIRCYHITIVIHSVRISHVLHFFLLYMVFVVHKTNNLEFVCKYLRSSVLVCQLCTSIKQWSQKLRMPYNTIHLDDVYIMG

SEQ ID NO: 300957 - protein, 45 aa, Zea mays
  Clone ID: MRT4577_37542C.1.pep
PCIFAHIFYGVTGNIVPFPLHTGTLHMLLLNISDEHTRKSHAPYG

SEQ ID NO: 300958 - protein, 55 aa, Zea mays
  Clone ID: MRT4577_37543C.1.pep
LTIISQTLLDTSSDEIRPDYYERTMCKPPTVQAKNFSCNHLFHLPCLCIIRLIND

SEQ ID NO: 300959 - protein, 132 aa, Zea mays
  Clone ID: MRT4577_37544C.1.pep
VVAILSAASYTFKCFTQNVQHWNLKVWSPSELFGMAMLFPWPAILYTGILSTSFCLWAEVAAMRVVSATETAIIYGLEPVWGAAFAWVMLGKRWGLTGFVGAIFIMAGSLMVQIYGSILDDVSRGDDYQMNI

SEQ ID NO: 300960 - protein, 53 aa, Zea mays
  Clone ID: MRT4577_37545C.1.pep
FRNSAGCSSPSLHCGSAPIHHAVAELAYLDACSTNSPICHMTLHRHAKPTLTE

SEQ ID NO: 300961 - protein, 66 aa, Zea mays
  Clone ID: MRT4577_37546C.1.pep
TIERHTLSNLLNTSWGALTYSYELNFQGLNLFHTTVGPKANQSAIKDSKATIVVGATWVNNWSGCD

SEQ ID NO: 300962 - protein, 672 aa, Zea mays
  Clone ID: MRT4577_37547C.1.pep
MKNVAKCDTWCELQNPANHRVFETSPPTRPPRHQAKHAAATPKHQCTNGGAPRGPASPTPTVLILNNSLPFQSVPTSAPRSGGSNSTREEPTTRKFPPPPVSTRSARRCGRGRMASEAESPVVIHAWSAPRSLSTSLMYSFAQRDDMEVLDEPLYANFLRATGVDRPYRQELLSKMDPDGNKVVKEVIFGPGDKKYRYCKHISKQHLPNLSSDLMKKGKHFILIRNPLDILPSFDKVVPPSFMELGIGELVSIYSELCGLGSPPPVIDADDLQQDPEAVLSGLCEDLGIPFQPQMLKWEAGPKEFDGIWAPWWYGSVHKSSGFSKPRQYPLTFPFVFYDLLEQSLPFYNMLKRQIRKIRGPQQPPLSDPPLPVPANKNILVWVGDELLPRNSAKVSVFDSVVQGGDAVWEGLRIYDGKVFKLDEHLDRLFDSAKAMAFSNVPTRDWIKDAIFKTLIANGMFNNAHIRLTLTRGKKVTSGMSPAFNLYGCALIVLAEWKPPVYDNSHGIKLVTATTRRNSPNSIDSKIHHNNLINNILAKIEGNLAQAEDAIMLDKDGFVSETNATNIFMVKKGIVLTPHADYCLPGITRATVMDLVVKENFVLHERRISLSEFHAADEVWTTGTMGEITPVVMIDGREIGDGKIGPVTRQIQKAYKILTAGQGVPIPGVAEV

SEQ ID NO: 300963 - protein, 138 aa, Zea mays
  unsure (1)..(138): unsure at all Xaa locations
  Clone ID: MRT4577_37548C.1.pep
QAEDAIMLDKDGFVSETNATNIFMVKKGIVLTPHADYCLPGITRATVMDLVVKENFVLHERRISLSEFHAADEVWTTGTMGEITPVVMIDGREIGDGKIGPVTRQIQKAYKILTAGQGVPIPGVAEVXNCQRCIPLSS

SEQ ID NO: 300964 - protein, 131 aa, Zea mays
  unsure (1)..(131): unsure at all Xaa locations
  Clone ID: MRT4577_37549C.1.pep
MPINKIALRSHQDVYHPDALKAACAEFISTLIFVFGGRGSEMAFSKLTGGGPTTPAGLIAEVEAHAFALVVAEXMSANISGGHEYPGETFGAFVGXNITLFRGLLYWVVHMMESTVACFLLRFSTGGQDTG

SEQ ID NO: 300965 - protein, 63 aa, Zea mays
  Clone ID: MRT4577_3754C.1.pep
RARPRVRQRVRLTFSSEHNTSFLIPIESIMPVVRTSFLESSQQDTTKHYKFQEFPLHGDSAVS

SEQ ID NO: 300966 - protein, 95 aa, Zea mays
  Clone ID: MRT4577_37550C.1.pep
RDLPIPVSRASMDQVYPLFVPMAVALGICSYQLVRNITGNPEVRVTKEKRAAGVLDNHDEGERYAMHGLRKFVRGKKPEIMASINSFFADPPKDD

SEQ ID NO: 300967 - protein, 60 aa, Zea mays
  unsure (1)..(60): unsure at all Xaa locations
  Clone ID: MRT4577_37551C.1.pep
HQWLRTILSILALLSLLLSATXAFIIPHCSLAPRASLPQTLPPVTSLCFQHAXLSAYRLN

SEQ ID NO: 300968 - protein, 98 aa, Zea mays
  Clone ID: MRT4577_37552C.1.pep
QGQKQNKGLQPKCYNNLFKIRRCPACSTRAKKHQKLRQYWLSKSLSNQQFARQIPSNDFFAKTCCVDEHHNAIPKYLRPLKCLGHGLITFHTRCIEFL

SEQ ID NO: 300969 - protein, 63 aa, Zea mays
  Clone ID: MRT4577_37553C.1.pep
HEQHNKKKDRTMGETIQTPLTRLLGIKHPILLAGMNQAAGPALAAAVSNAGGLGSIGGVGYTP

SEQ ID NO: 300970 - protein, 98 aa, Zea mays
  Clone ID: MRT4577_37554C.1.pep
MASSAYASWSKRWIRPEVYPLFVPMAVALGICSYQLVRNITGNPEVRVTKEKRAAGVLDNHDEGERYAMHGLRKFVRGKKPEIMASINSFFADPPKDD

SEQ ID NO: 300971 - protein, 98 aa, Zea mays; identical to SEQ ID NO: 300970
  Clone ID: MRT4577_37555C.1.pep

SEQ ID NO: 300972 - protein, 129 aa, Zea mays
  Clone ID: MRT4577_37556C.1.pep
RDLPIPVSRASMDQVYPLFVPMAVALGICSYQLVRNITGNPEVRVTKEKRAAGVLDNHDEGERYAMHGLRKFVRGKKPEIMASINSGVLDNHDEGERYAMHGLRKFVRGKKPEIMASINSFFADPPKDD

SEQ ID NO: 300973 - protein, 187 aa, Zea mays
  unsure (1)..(187): unsure at all Xaa locations
  Clone ID: MRT4577_37557C.1.pep
HYHVDHSATGGHTRGHLRPLYIKGEAPPPPSPQEQPLPPLEQEQGPRREGGGWPPPSPRHGGPAPPPNPPGGGLSLGARHAPXVTSPSSPPNPHTHAPPXTPAPPPHPPPPPHPPHPPPYPLPPPPPPPPPPPTSPPLPLPPPSPPPHPPPPPTNTPPTFPPLPXSPPPPPPSDXPPPPPPPPSPPP

SEQ ID NO: 300974 - protein, 648 aa, Zea mays
  Clone ID: MRT4577_37558C.1.pep
MGKNMRIKTAPKANRVPLLGDGETSRALSDLEEGSDVQPANVGFCRVIKLAKHDAGKLVLATAALLVASLSNLLVPKYGGKIIDIVSRDVRRPEDKAQALEDVKGTILYIVTIVLVGSVCTALRAWLFNSASERVVARLRKDLFSHLINQEIAFFDVTRTGELLSRLSEDTQIIKNAATTNLSEALRNVTTTAIGLGFMFSTSWKLTLLALVIVPVISVAVRRFGRFLRELSHQTQAAAAVASSIAEESFGAIRTVRSFAQEYHEISRYGEKVEETLKLGLKQAKVVGLFSGGLNAASTMSVVIVVIYGANLTINGYMTTGSLTSFILYSLTVGSSVSALSGLYTTVMKASGASRRVFQLLDRVSSMTNSGDKCPINEKDGEVELDDVWFAYPSRPSHMILKGITLKLAPGSKVALVGPSGGGKTTIANLIERFYDPLKGRILLNGVPLAEISHQYLHSKVSIVSQEPTLFNCTIEENIAYGLEGTTNFADVESAAKMANAHNFICGFPDQYKTVVGERGIRLSGGQKQRIAIARALLMNPRVLLLDEATSALDAESEYLVQDAMDSLMKGRTVLVIAHRLSTVKSADTVAVISDGLIVESGTHDELLDRDGIYTALVKRQLQGPKFEATSSISEASEIEAEPSSNGQ

SEQ ID NO: 300975 - protein, 92 aa, Zea mays
  Clone ID: MRT4577_37559C.1.pep
YLQHFIIIVLLQAMAILRDTVNIHDTLCSLCLFALWLLQRRLGDKTLYLLDVCMLCTIDGRWSYHRGQYRAGFHAGVPSHHFRARRRCVTDP

SEQ ID NO: 300976 - protein, 69 aa, Zea mays
  Clone ID: MRT4577_3755C.1.pep
GRGYVRRGSRSEGGVGLQDIRPGAAEKKNRCVFCQFEPFNMERKLAMVTGVSSATGIPSTGVCAVVSYC

SEQ ID NO: 300977 - protein, 424 aa, Zea mays
  unsure (1)..(424): unsure at all Xaa locations
  Clone ID: MRT4577_37560C.1.pep
MVRIIEHRAKTSKDFVMEQEVASSAPRVPDRLDSGSAAVHAVQQHTPAQASQTPSRAAPTALSAARELLRHPPSSTASLGAMKQWRDDVDRLLVMAHSTSTRSRPRSSRRQREATTSVRSPSIRGAQTDDLRAELNRLRCGRPLTPMGTRSPTGVPLAGVGCAALADHLRAASWPPKFRPHLAEKYDGTSNPSEFLQVYVTTITAAGGNTTVMATYFHVALPRPARTWLMNLTPGSVYSWEELCARFVANFASAYQQHGVEAHLHAVRQEAGETLRKFISRFTKXAAQSGGXGGILWDGKKKKKKDHDYQKPRSTALMVAAATGGQGDRNKRPRLQKGSSGSCPVHSHGRHSAAKCCEINDLTKRISERREQSSKDSSPPRRWPGKEKVDDGEVAAAERDLGYQSPEGDLKDIFAGGSYSGEDN

SEQ ID NO: 300978 - protein, 90 aa, Zea mays
  Clone ID: MRT4577_37561C.1.pep
RLLKGATDMNGDSHLKQRVPFTMYVKKASKRQMLVGLMTQTVCEHRTRTEETVPLSNTGDETHKADADVTTHPVDDKDPFFFAEAPPEDT

SEQ ID NO: 300979 - protein, 109 aa, Zea mays
  Clone ID: MRT4577_37562C.1.pep
ILDEVHQQINSWIFQITRVYKEKDFLETEFIVGPISVDDGNGKEVATEIVTNMVTNKTFYTDSSGRDFIKRIRDYRSEWKIEVHQPIAGNYYPVIFRLLPSLCFFNEVQ

SEQ ID NO: 300980 - protein, 1016 aa, Zea mays
  Clone ID: MRT4577_37563C.1.pep
MGPVRLALLLSVAAVLAAAGAVYIPYNTSAGVVPGKLNVHVVPHTHDDVGWLKTVDQYYVGSNNSIQGACVQNVLDSLIPALLKDENRKFIYVEQAFFQRWWRNQNDMIKDTVKGLISSGRLELINGGMCMHDEAAVHYIDMIDQTTLGHKYIKEEFGQIPRIGWQIDPFGHSAVQAYLLGAEVGFDAFYFFRIDYQDRDTRKGTKELEVVWRGSKTLGSSADIFAGIFPKNYEPPPGDFYFEVDDNSPVVQDDPLLFDYNVEERVNDFVAAAVAQANITRTNHIMFTMGTDFKYQYAESWFRNMDKLIHYVNKDGRINALYSTPSIYTDAKYAANEQWPLKTNDFFPYADNPNAYWTGYFTSRPALKRYVRTMSGYYLAARQLEFFKGRYSSGLSTDSLGDALALAQHHDAVTGTEKQHVANDYAKRLSIGYTQAQELVSTSLACLTESGSKSRCASPVTKFSQCLLLNVTYCPPSEMDLTKGKSLVVLVYNSLGWKREDVIRIPVFSDSIVVHDSEGREIESQLLPIATASLNIREKHVKAYLGTTPGAKPKFWLAFPVSVPPLGFNTYFVSNLKKSAHISSKSTQYSPQGSESSNLQVGQGNLKLQYNEAGKLSLYSDSKTMVQANFEQKYKYYIGQDGNGSDPQASGAYIFRPNGTVPISTDGQVSLTVLRGPILDEVHQQINSWIFQITRLYKEKDFLETEFIVGPIPVDDGNGKEVATEIVTNMVTNKTFYTDSSGRDFIKRIRDYRSEWKIEVHQPIAGNYYPVNLGIYVEDGSKELSVLVDRSIGGSSIKDGQIELMLHRRLLHDDGKGVAEALNETVCLDKQCEGLIIQGKYYVKIDPQGEGARWRRTFGQEIYSPLLLAFTEQDGGNWANSHVAKFSAMDSTYSLPDNVAMLTLQELEDGSVLLRFAHLYEAGEDKDLSSLASIDLKRVFPEKKIGKVIETSLSANQERAAMEKKRLKWKAQGSAADEKVVRGGPVDPSKLVVELGPMEIRTFIVSFDHISDKQQL

SEQ ID NO: 300981 - protein, 65 aa, Zea mays
  unsure (1)..(65): unsure at all Xaa locations
  Clone ID: MRT4577_37564C.1.pep
MSSQQYQQQRRKFAAAFLALIFILAAVDTXEAGKKEKPEKKVKKSDCGEWQWSVCVPTSGDCGLG

SEQ ID NO: 300982 - protein, 44 aa, Zea mays
  Clone ID: MRT4577_37565C.1.pep
IAVKTFRSMSLLLLNAEIVDSLEPVFYTSVISSTLGQQAYPSKC

SEQ ID NO: 300983 - protein, 50 aa, Zea mays
  unsure (1)..(50): unsure at all Xaa locations
  Clone ID: MRT4577_37566C.1.pep
FQWFAGLVERXGKVHVDRNNKCPLYIKESAQWLKQFISXRKPSKNIVLHS

SEQ ID NO: 300984 - protein, 218 aa, Zea mays
  Clone ID: MRT4577_37568C.1.pep
METESEQNSSSTNGSSSSGASSRPQIAQMSLYERQAVQALQALQRQPNAAQYFHQFMLQQQLSNAQLHSLAAVQQATIAASRQASSPNSSTAQQQTATTQASMNLATTSAAQLISRSQSVSSPSATTLTQSVLLGNTTSPPLNQSQAQMYLRPQLGNLLQVNRTLGRNVPLASQLILMPNGAVAAVQQEVPPAQSPGVHADADQVQNLAVRDQQASAQ

SEQ ID NO: 300985 - protein, 75 aa, Zea mays
  Clone ID: MRT4577_37569C.1.pep
QSSINLITNYTPTEFHLYFQHLILLPNPTSYLSTIHNCSYMCLYSSSSLNNSWFTSQPQSFILSTIHSLIHKHIY

SEQ ID NO: 300986 - protein, 106 aa, Zea mays
  Clone ID: MRT4577_3756C.1.pep
DLSSGLRPFSCILQSASCVGKRTVHLLQLKYKQAYVSLLRILCSCMFSFDLVSMMLRRVTRARASCCVITGPHFLVESVPLYELMKPVCTSDGRICTIQNDSDPFY

SEQ ID NO: 300987 - protein, 55 aa, Zea mays
  Clone ID: MRT4577_37570C.1.pep
PVMHEKKKKKKKKPSEQSTQQSTEEEECNIVLKKQQQQQRKERKQSSIATKISVQ

SEQ ID NO: 300988 - protein, 103 aa, Zea mays
  unsure (1)..(103): unsure at all Xaa locations
  Clone ID: MRT4577_37571C.1.pep
KKYSQYPGTHSKSPKVMFTYLLLHFTNIMHTTFFLCPFSLHIPNXYLLDVTDLNHLFPFPLFSNCLFPSVPPNYRHSHELGRLPAKXATLILDLLKTAASFAA

SEQ ID NO: 300989 - protein, 119 aa, Zea mays
  Clone ID: MRT4577_37572C.1.pep
KSGGSGVSKERKKKKGAPGNPGREPGGEPIVQKGGRIKIGQKKGKGSARGKTVNSQKFEKKNDREEKREKPGVPKGGANSDEGEGLNCLVTDRKNFLAERGKKSAKPVEEGDKNRGRGG

SEQ ID NO: 300990 - protein, 39 aa, Zea mays
  Clone ID: MRT4577_37573C.1.pep
AAHKAVLKIGQPMFGGGFGGFQSGFGPQGGGDPAPGAKF

SEQ ID NO: 300991 - protein, 42 aa, Zea mays
  Clone ID: MRT4577_37574C.1.pep
TGSELEPRLTLPLKANDSDFTFSYGYYQTGPGIYGMQSSLFH

SEQ ID NO: 300992 - protein, 85 aa, Zea mays
  Clone ID: MRT4577_37575C.1.pep
LPCGGAPLGREALGLPVPVSCRVGLPRVGLWPLHRRAQGLGNFFPFPVLLACTTSLPLVLHSFLAGPPPRPKKKTFVACFGASPP

SEQ ID NO: 300993 - protein, 53 aa, Zea mays
  Clone ID: MRT4577_37576C.1.pep
VYRHSLGRNHNVSCCRMRTWGANIQDLHLIRSISVSESVICLLCTVFYGTAEA

SEQ ID NO: 300994 - protein, 104 aa, Zea mays
  unsure (1)..(104): unsure at all Xaa locations
  Clone ID: MRT4577_37577C.1.pep
VSCSLLVWGRVVRAPVRWAFFLVLLCGGCGXGGAVYQSGSLRPVAWVNKQGVPFACGVICVGTKKLGCSFLRPLGGLVLWGARPVVFRRSRVSAGLGWLVFRFF

SEQ ID NO: 300995 - protein, 93 aa, Zea mays
  Clone ID: MRT4577_37578C.1.pep
SARVRSLSGAPRVLMPGAASVQGIRVALRGCRRPVGSWRPSLSRALKCMRVTRWLVGVGKRVGRCSPDRRGLSPPLVRFSRCRVVIRKIGRLG

SEQ ID NO: 300996 - protein, 158 aa, Zea mays
  Clone ID: MRT4577_37579C.1.pep
SLKPLPGAQPTAAPRDPPSTEAVCHRSPARISRPPRAPAIGPWRPGPSTYAPLSAARGSPDHRRWPFAGASRYSGTGRAHAATRDAPTRDSGSDTTQAANLELWKSSSLRICDLLDALLWLMAMVGDGTINVVLIGGQAPGVYLNIFLLMFCLARFIN

SEQ ID NO: 300997 - protein, 52 aa, Zea mays
  Clone ID: MRT4577_3757C.1.pep
LAGPFREKERYGIDLHRRARSMRSCSTTYSSGNLCKREDGELCRLRTMNRVR

SEQ ID NO: 300998 - protein, 100 aa, Zea mays
  Clone ID: MRT4577_37580C.1.pep
RPPIRSFPRVASHPGASHGGACGANPLLTRRRRRALVCRADLQQDAPFAAAIGACVLASLVLPPPRSRGEAGDEVEDEGEFGATDTRMAVMGIILLPALL

SEQ ID NO: 300999 - protein, 56 aa, Zea mays
  Clone ID: MRT4577_37581C.1.pep
FQGRFVPIISLGLNRGRQQTHRSTRWVGGSMNAVTPVRICFKLILRKKWCFLVPPQ

SEQ ID NO: 301000 - protein, 62 aa, Zea mays
  unsure (1)..(62): unsure at all Xaa locations
  Clone ID: MRT4577_37582C.1.pep
SPCYXKEARGHHAVAWVNIDYTYPPTLSGAAGAAPTSLPRRGPFWGPFQRERGGPRWSLSHC

SEQ ID NO: 301001 - protein, 59 aa, Zea mays
  Clone ID: MRT4577_37583C.1.pep
RARIEWSPIRTKLRDHLIGPSTGAASIPVTTSSEFNPRTWTKLIARSAAVSMRQQLPNH

SEQ ID NO: 301002 - protein, 68 aa, Zea mays
  Clone ID: MRT4577_37584C.1.pep
SNTSLSIRCPASCIGSIVVLPSASKDRRTHLLSGHRMQAPSGQRGLSGVACPWSGCSPRRRRIGWYSR

SEQ ID NO: 301003 - protein, 308 aa, Zea mays
  Clone ID: MRT4577_37585C.1.pep
MAMVASQGGGRRDAEAELNLPPGFRFHPTDEELVVHYLCRKVACQQLPVPIIAEVDLYKFDPWDLPEKALFGRKEWYFFTPRDRKYPNGSRPNRAAGRGYWKATGADKPIAPKGGGGAAGIKKALVFYSGKAPRGFKTDWIMHEYRLADADRAPGKKGSRKLDEWVLCRLYNKKNNWEKVKAEEPEAAAPLRNQQGAAEDSMSDSFQTHDSDIDNNAFGVQNGFGNMVHGQAMTMRNGIGSVARTVKEDSYWFTDLNLDDLQAPYNVTHVLNPNPVQTMNLAAGQGHGYLQSMSSPSTKMWQTILPPF

SEQ ID NO: 301004 - protein, 52 aa, Zea mays
  Clone ID: MRT4577_37586C.1.pep
TPPGGWENNRGPGATPKIMKTTLATAFLPVINHEPKQPGQVLELWASSLPYA

SEQ ID NO: 301005 - protein, 67 aa, Zea mays
  Clone ID: MRT4577_37587C.1.pep
YITTLNKMYKALIKIAGINVFLASSNKQIQMTKKDAYPYIFFSLFILCVPFLCTCLFLYVPLLNCPT

SEQ ID NO: 301006 - protein, 83 aa, Zea mays
  Clone ID: MRT4577_37588C.1.pep
MPAFRPTPLALRAQPNFNPHVGRITPSTFVKWGPTLALWGGAGAGAVMLFMSNVPIFKHDVLIKMPFIASYFEDKTHPADNAF

SEQ ID NO: 301007 - protein, 98 aa, Zea mays
  Clone ID: MRT4577_37589C.1.pep
KTIACSYKYRYSMRNFLFVYHSICSIIVQYNSMVRRQFQKHVDPCPGPSGCQQARLSHQLYVNLYTAIQDCLFPVLWVVLPSGSLYFLARPNGQFTNV

SEQ ID NO: 301008 - protein, 13 aa, Zea mays
  Clone ID: MRT4577_3758C.1.pep
TESLPCPCYFAGT

SEQ ID NO: 301009 - protein, 38 aa, Zea mays
  Clone ID: MRT4577_37590C.1.pep
THSKLSFADMFDLPQLESCIRTDDTDTRVTYIFTWTRL

SEQ ID NO: 301010 - protein, 75 aa, Zea mays
  unsure (1)..(75): unsure at all Xaa locations
  Clone ID: MRT4577_37591C.1.pep
DSLMLGSSITLHTYCTSLFAAAACLLLFTFLLVSRGFCSAFLTXXFAAXLRRRXAELXXGSLPCAATRXXSXXSG

SEQ ID NO: 301011 - protein, 53 aa, Zea mays
  Clone ID: MRT4577_37592C.1.pep
LVVHHAFGAVPGRRLGCYLYITFGGRWFYICDDVWKVSNISYTVVILFLVLVS

SEQ ID NO: 301012 - protein, 60 aa, Zea mays
  unsure (1)..(60): unsure at all Xaa locations
  Clone ID: MRT4577_37593C.1.pep
VPLGPPWSPSSSAAACSRTAVXLFASPCREGVGVGLGGTVSVRPPPVLSRRLRLVSCLCP

SEQ ID NO: 301013 - protein, 804 aa, Zea mays
  unsure (1)..(804): unsure at all Xaa locations
  Clone ID: MRT4577_37594C.1.pep
MSEDKKVVAESKLSLSEEMNLDFLESIAKTNTEKITKEILEGLSEDTGDSDSYDVESGGEDSEDRPWRPSHAVFGKSSIKQSHLVNMRGRYFRDLSIVRADEGEKTCPTPEENEVVIFRSFFKAGLRFPLSSFVVEVLKIFEICLHQITPEAIIRMGIFVWAVKSQAEECQRAFGVVCSFIGTRDLVQEHIAFRVWPLVEKWEMPKETISKPDEGGLVRLKYTFRYGDKFVEPDDDWLKCIEATSDELLGSYSKAEDTALSAAFGGRKKKRLNRVFDAIGFVYPDYRYPIRGQKRKDTTSVKEVASATPMPEFVGETSSATEAKEPTPLQNIEEPAVMLEMEKIEEPRAEETKTSEILSPSARVEVPMPMPRAQKDLSTTPKRKRMVNVLDVLETIKSSSSASKIAVEAPKTQIEAEATKSQAETETGLSEPTKREFLEIEKETKKETAEEILSEKITTPIPEASSEASDYVLRHALGKNLTEKEKREAQFYAQKLKYPKGALIFNGSGEEDFLYCLPDSKEISVCREISKSFGFPTLEDGLSXVGLILSNALRAQKDAEDXKEDEAAFKAQAEAQKREIEDLRKQLARAKEXNAQLKKLNEKLVNNGQXLEKNVEELRASKKRCYEKSIECVKKIRTSFASVGAFSSEENFIRGDPEGPIGWISHEAEAFEEILNGHRDICAFSGARGIATVLEKKGCDHVKSLAQTEADLSSEDIKDPSAEASLVGRKFFTDVWENGGREIAQEIIRKSEKAAHSPPSEPAEPLADPNVKGDDEIRKMVEAIMDKVVDQLLNEAAEVVLRED

SEQ ID NO: 301014 - protein, 652 aa, Zea mays
  Clone ID: MRT4577_37595C.1.pep
MSEDKKVIAETKLGLSEEMNLGFLESIAKTNTEKITMEILEGLSEDTGDSDNYDVESGGEDSEDRPWRPSHAVFGKSSIKQSHLVNMRGRYFRDLSIVRADEGEKTCPTPEENEVMILRSFFTAGLRFPLSSFVVEVLKIFEICLHQITPKAIIRMRIFVWAVKSQGLEPNAKSFCSMHELLYETKPWEKWEMLKETISEPDEGGLVRLKYTFKYGDKFVEPDDDWLKSIEAISDELLGPYSKAEDTALSAAFGGRKKKRLNRVFDAIGFVYPDYRYPTRGQKRKDTASAKEVASAAPSEPAPKRKKMKVLTHRPRYIEPVTVPEFVGETSSATEAKEPTLLSNIEEPAKMPAMEKIEEPKVEETKTSEILSPSARIEAPTTTPKRKRMVNVLDVLETIKSSSSTSKIAAEVPKTQTEAEAAKNQAETETGLSESTKREFLEIEKETEKESAEETLSEKIATPILEASSEASDYILRHASGKSLSEKEKREAQFYAQKLKYPKGALIFNGSGEEDFLYCLPDSKEISVCREMSKSFGFPTLEDGLSVLSKNELADSLAYNSLKGLILSNALRAQKDAEDEGCTIALSNLRSEVIELRNESLEKDKILHSLLNKIKEDEAAFKAQAEAQKREIEDLRKQLVRAKEECTHEETK

SEQ ID NO: 301015 - protein, 145 aa, Zea mays
  Clone ID: MRT4577_37596C.1.pep
RRHAPPRLLCFRVLRRAETMQPNEVADKAIGIMQHAAKQVLVTCKEKLHLGKPLSVFEVKELKEALEAIAEALDQDSLLCQVALDAGAPSLVEDHWVDEGGEAVVAGLPWPESPRPEDFMSLEKHIETYWSVEYDSDNMLPSLSD

SEQ ID NO: 301016 - protein, 784 aa, Zea mays
  unsure (1)..(784): unsure at all Xaa locations
  Clone ID: MRT4577_37597C.1.pep
MPKLPCAQLRLCSTLLSCFMLLYAMVSNQVRSFGLESTFSAFSKMSEDKKAVAKSKLSLSEEMNLGFLESIAKTNTEKITREILDGLSEDTGDSDSYDVESGGEDSEDRPWRPSHAVFGKSSIKQSHLVNMRGRYFRDLSIVRADEIEKTCPTPEENEVVIFRSFIKAGLRFPLSSFVVEVLKIFEICLHQITPEAIIRMGIFVWAVKSQVWPLVEKWEMPKETISKPDEGGLVRLKYTFRYGDKFVEPDDDWLKCIEATSDELLGSYSKAEDTALSAAFGGRKKKRLNRVFDAIGFVYPDYRYPTRGQKRKDTASVKEAASAAPSEPAPKRKKIKVLTHRTRYIEPATVPEFVGETSSATEAKESTPLPNIEEPTIMPEMEKIEEPRAKETKTSEILSPSAKVEVPMPMPRAQKDLTTTPKRKRMVNVLDVLETIKSSSSTSKIAAXSKDTNXAEAAKESTRRELLEIEKETEKESAEEILSEKIATSIPEASSKASDYVLRHASSKNLTEKEKREAQFYAQKLKYPKGALIFNGSGEEGFLYCLPDNKEISVCREMSKSFRFPTLEDGLSVLSKKELADSLAYNSLKGLILSNALRAQKDAEDEGCAIALSNLRSEVIELRNEGLKKDKILHSLVNKIKEDEAAFKAQAEAQKRETEDLRKQLARAKEECIVEEAKREISEQWANHLERNVEELRASKKRGDPEGPIGWISHIAEAFEEVLNGRGDICAFSAALSPPSEPAEPLADPNVKGDDEIRKMAEAIMDKVVDQLLNEAAEVVLRED

SEQ ID NO: 301017 - protein, 153 aa, Zea mays
  Clone ID: MRT4577_37598C.1.pep
LRPRALANPSAAPPRLLCFRVLRRAETMQPNEVADKAIGIMQHAAKQVLVTCKEKLHLGKPLSVFEVKELKEALEAIAEALDQDSLLCQVALDAGAPSLVEDHWVDEGGEAVVAGLPWPESPRPEDFMFLEKHIETYWSVEYDSDNMLPSLSD

SEQ ID NO: 301018 - protein, 790 aa, Zea mays
  Clone ID: MRT4577_37599C.1.pep
MSEDKKVVAESKLSLSEEMNLDFLESIAKTNTEKITKEILEGLSEDTGDSDSYDVESGGEDSEDRPWRPSHAVFGKSSIKQSHLVNMRGRYFRDLSIVRADEGEKTCPTPEENEVVIFRSFFKAGLRFPLSSFVVEVLKIFEICLHQITPEAIIRMGIFVWAVKSQAEECQRAFGVVCSFIGTRDLVQEHIAFRVWPLVEKWEMPKETISKPDEGGLVRLKYTFRYGDKFVEPDDDWLKCIEATSDELLGSYSKAEDTALSAAFGGRKKKRLNRVFDAIGFVYPDYRYPIRGQKRKDTTSVKEVASATPMPEFVGETSSATEAKEPTPLQNIEEPAVMLEMEKIEEPRAEETKTSEILSPSARVEVPMPMPRAQKDLSTTPKRKRMVNVLDVLETIKSSSSASKIAVEAPKTQIEAEATKSQAETETGLSEPTKREFLEIEKETKKETAEEILSEKITTPIPEASSEASDYVLRHALGKNLTEKEKREAQFYAQKLKYPKGALIFNGSGEEDFLYCLPDSKEISVCREISKSFGFPTLEDGLSGLILSNALRAQKDAEDEGCTIALSNLRSELARAKEECTVEEAKREISEQWANHLEKNVEELRASKKRCYEKSIECVKKIRTSFASVGAFSSEENFIRGDPEGPIGWISHEAEAFEEILNGHRDICAFSGARGIATVLEKKGCDHVKSLAQTEADLSSEDIKDPSAEASLVGRKFFTDVWENGGREIAQEIIRKSEKAAHSPPSEPAEPLADPNVKGDDEIRKMVEAIMDKVVDQLLNEAAEVVLRED

SEQ ID NO: 301019 - protein, 70 aa, Zea mays
  Clone ID: MRT4577_3759C.1.pep
IWWSRPPVCPLGGPGTPKAFFPRILVQKKALNNIFPPPKGPTPVFWGQPKPVANGLGTRFSQKKKLKGSP

SEQ ID NO: 301020 - protein, 137 aa, Zea mays
  unsure (1)..(137): unsure at all Xaa locations
  Clone ID: MRT4577_375C.1.pep
PPQTLLWQIKSDVERQGDFIRFLIKEVEGAAFVDIEDVVSFVKWLDDELSRLVXQGSRRAHRRLQPLLTIRHSCPCXDERAVLKHFEWPENKADALREAAFGYCDLKKLEREAASFRDDARQPCAAALKKMQALFEK

SEQ ID NO: 301021 - protein, 60 aa, Zea mays
  Clone ID: MRT4577_37600C.1.pep
ALIKSRSRPPISICQAPADTTCRQLYRKNERLPKSCYASTREGSKTALTVTVVSSQPTRQ

SEQ ID NO: 301022 - protein, 792 aa, Zea mays
  Clone ID: MRT4577_37601C.1.pep
MSEDKKSVAESKLSLSEEMNLGFLASIAKTNTEKITREILEGLSEDTGDSDSYDVESGGEDSEDRPWRPSHAVFGKSSIKQSHLVNMRGRYFRDLSIVRADEGEKTCPTPEENEVVIFRSFFKAGLRFPLSSFVVEVLKIFEICLHQITPEAIIRMGIFVWAVKSQDLEPNAKSFCSMHELLYETKPWGKEQYHNNFGCYSFGARSGSSCPVPTFRKRWPGDWMKEWFYVKNDLKTREDIKDIIMRPIWQRFGLQKPKVEIDEAAEECQRAFGVVCSFIGTRDLIQEHIAFRETVSEPNEGGLVRLKFTFKYGDKFVEPDDDWLKSIEAISDELLGPYSKAEDTALSTAFGGRKKKRLNRVFDAIGFVYPDYRYPTRGQKRKDTASAKEIASAALSEPAPKRKKIKVLTHRPRYIEPATVPEFVGESSSAPEAREPTPLPNIEEPVIMPEIEKIEEPKAKETRTSEILSPSAKVEVSKSQKGPALTPKRKRMVNVLDVVETIKSSSTTPKKIVETPEVQIEAFGAEASKHQAETEVGPSEPAKGLILSNVLRAQKDAEDEGCTIALSNLRSEVIELRNEGLEKNKILHSLVNKIKEDEAAFKAQAEAQKREIEDLRKQLVRAKEECTLEETKREISEQLANHLEKNVEELRASKKKCYEKSIECVKKIRTSFASVGAFSSEENFIRGDPAGLIGWISHEAGAFEEILNSRGDICAFSGARGIATILERKDCDHVKFLAQFEAALSYEDIKDPRPKRAWSVENFSPTSGTMVAGRWPKKLYEKARKAFMTLEK

SEQ ID NO: 301023 - protein, 561 aa, Zea mays
  Clone ID: MRT4577_37602C.1.pep
MSEDKKAVAETKLSLSKEMNLGFLESIAKTNTEKITGEILEGLSEDTGDSDSYDVESGGEDSEDRPWRPNHAVFGKSSIKQRHLVNMRGRYFWDLSIVRADEGEKTCPTPEENEVVIFRSFFKAGLRFPLSSFVSQGLEPNAKSFCSMHELLYETKPWGKEQYHNNFGCYSFGAHSGSSCPVPTFRKRWPGDWMKEWFYVKNDLKTREDIKDIIMRPIWQRFGLRKSKVDIDEAAEECRRAFGVVCSFIGTRDLIQEHIAFRVWPLVEKWEMPKETISKPDEGGLVRLKYTFRYGDQFVEPDDDWLKCIEATSDELLGPYSKTEDTALSTAFGGRKKKRLNRVFDAIGFVYPDYRYPTRGQKRKDTTSAKEVASAAPSEPAPKRKKMKVLTHRPHYIEPATVPEFVGETSSAPEAKEPIPLPNIEEPVIMPEIEKIEEPKAKETRTSKILSPSAKVEVPKSQKGPAMTPIRKRMVNVLDVLETIKSSSTTPKKIAETPEVQIEAFGAETSKHQAETEAGPSELAKVKSLEAKETEAAEQILAEETGTAAPEAFSEAFNYIL

SEQ ID NO: 301024 - protein, 89 aa, Zea mays
  Clone ID: MRT4577_37603C.1.pep
TIKKKMRVKERTPGPQALARAQERVRRLPRRRRRRRRFHDRDGVGVVVAGGRPKHLAAAGPDGAVLPSLPLHRPASAGIAGFVAWGWLV

SEQ ID NO: 301025 - protein, 989 aa, Zea mays
  unsure (1)..(989): unsure at all Xaa locations
  Clone ID: MRT4577_37604C.1.pep
MSEDKKTVAKSKLSLSEEKNLGFLELMAKTNIEKITREILEGLSEDTGDSDSYDVESGGEDSEDRPWQPSHTVFGKSTIKQSHLDNMRGRYFRDMSIIRADDGERTVPTPEENEVVIFRSFFKARLRLPLSKFVVEVLKIYQVYLHQITPEAIIRMGIFVWAVRSQGLEPNTKNFCNLHELVYETKPWGKEQYHNNFGCYSFGARSGSSCPVPTFRKRWPGDWMKEWFYVKNDLKVREDIKDIIMRPIWQRFGLRKPKVEMDEAAEECQRAFGAVCSCIGTRDLVQEHVAYRVWPLVEKWEIPKETISKHDEGGLVRLKYTFKYGDKFVEPDDDWLKSIEAISNELLGSYSKAEDTALSAAFGGRKKKRLNRVFDAIGFVYPDYRYPIRGQKRKDTASVKEAASAAPGEPAPKRKKMKVLTHRPCYIEPAIVPEFVGETSSATKVKESTPLSNIEEPAKMPEMEKIEEPRAXDKDIRNSKSFSKNXCQCQCRRHKKTLRXPKRKRMVNVLDVLETIKSSSSASKIAAEVPKAQTEVEGAKSQAEAETGLSEPTKREFLKIEKETEKESAEETLSEKIATPIPEASSEASDYVLRHASGKNLNEKEKREAQFYAQKLKYPKGALIFNGSGEEDFLYCLPDSKEISVCREMSKSFGFPTLEDGLSVLSKNELADRLAYNSLKGLILSNALRAQKDAKDEGCTIALSNLRSEVIELRNEGLEKDKILHSLVNKIKEDEAAFKAQAEAQKREIEDLRKQLARAKEECTVEETKREISEQLANHLEKNVEELRAFKKRCYEKSIECVKKIRTSFASIGAFSSEENFIRGDPEGPIGWISHEAEAFEEVLNSRGDICAFSGARGIVTVLEKKSCDHVKSLALTEADLSSEDIKDPSAEASLENGGREMAQEIIGKSEKGIHDARKVAEAAEKSTDLEGRIATPSPHSEPAEPLADPNVKRDDEIRKMAEAIMDKVVDQLLNEAVEVVLWEDYMLL

SEQ ID NO: 301026 - protein, 182 aa, Zea mays
  Clone ID: MRT4577_37605C.1.pep
SSGNNAEYFFFFFFFFFNFFFFFFFFFFFFFFLGGEIKHKKTRGGSPGPSQITGWYHENGRARYILQKARLRGGPLVGGLPKQITGPQKLILAQNYKTGANGHLPLYPRNNLHDHWPVATFFANRPWESLPAGATATSLAENPVAGGVPKGDGIWPTAHYRIRPNICTEGTIQVPTLGYGQG

SEQ ID NO: 301027 - protein, 117 aa, Zea mays
  Clone ID: MRT4577_37606C.1.pep
QIHIIQACILSGRRAFISTASVCRTNPKKKKDGGSNCPQRHRTKPFLSSLTTTNGSDPVYTIIAILNYCRYATDPTNSKDKRRAPVTRERHEASGTVSRYENPNMVLLLTVRGSSIC

SEQ ID NO: 301028 - protein, 846 aa, Zea mays
  unsure (1)..(846): unsure at all Xaa locations
  Clone ID: MRT4577_37607C.1.pep
MSQEKKAVAEMKLSLSEEKNLGFIESIARTNTKKITREILEGLSEDTDDGERTVPTPEENEVMIFRSFFKARLQFPLNRFVVEVLKIYQAREDIKDIIMRPIWQRFGLRKPKVDIDEAAEECQRAFGVVCSFIGTRDLVQEHITFRVWPLVEQWEMPKETISKSDEGGLVRLKYTFRYEGKFIEPDDDWLKCIKATSDELLGPYSKAEDNALSTTFRGWKKKRLNRVFDTIGFIYPDYRYPLKGQKRKSATSGKGDVSVALSEAAPKRKKVKVLTHRXASSNQPQCPNLVVRPLWLLKPKSLLLHRRMKSQLQRRRLIKLKSRELKGQXSEFLSPSAEVEVPKTQKGPVVTPKRKRMVNVLDVLETIKSSSTTPKKIGKVPEAQIETTASDAEAAKHQAETEAGASEPVKVKSLGTIEKETKTAEQILTEETITATPEAFSETLNYTLRHASGKQLPEKEKQEAQFYAQKLKYPKGALIFNGSGEEDFLYCLLDSKEISVCREMGRSLLEDGLSVLSKDELADSLAYNSLKGLILSNALRAQKDAEDEGCTIALNNLRSEVIELRNEGLEKDKILNSLLSKIKEDEVVSKAQAEAQKQEIEDLRKQLFEFKEKCDVAKAKREISDQMGQSFRKNVEELRASKKRCYEKSIECVKKIRTSFASVGAFSSEENFIRGDPEGPIGWISHEAEAFEEVLNSRRDICAFSGARGIATILERKDCDHVKSLAQSEAALSSEDIKDPSAEASLVGGKFFTDIWDNGGREMAQEIIRKSEKGTHDAREVGEAAEKSADLEGRIAALPPPPEPVEPSADPHGKGDDEIRKMAEATMDKVVDQLLSEAAEVVLRED

SEQ ID NO: 301029 - protein, 667 aa, Zea mays
  Clone ID: MRT4577_37608C.1.pep
MSEDKKVVAESKLSLFEEMNLGFLESIAKTNTEKITREILEGLSEDTGDSDIYDVESGGEDSKDRPWRPSHAVFGKSSIKQSHLVNMRGRYFRDLSIVRAGEGEKTCPTPEENEVVIFQSFFKAGLRFPLSSFVVEVLKIFEICLHQITPEAIIRMGIFVWAVKSQGLEPNAKSICNMHELLYETKPWGKEQYHNNFGCYSFGARSRSSCPVPTFRKRWPGDWMKEWFYVKNDLKTREDIKDIIMRPIWQRFGLRKPKVDIDEAAEECQRAFGVVCSFIGTRDLIQEHIAFTVWPLVEKWEMPKETISKPDEGGLVRLKYTFIYEDKFVEPDDDWLKCIEATSDELLGPYLKAEDTALSAAFGGRKKKRLNRVFDAIGFVYPDYRYPIQGQKRKDTASVKEVASAAPSEPAPMRKKMKVLTHQPRYIEPATVPEFVGETSSAIEAKEPTPLQNIEESTVMPEMEKMEEPRAEETKTSEILSPSARVEVPMPMPRAQKDLTTTRKRKRMVNVLDVLETIKSSSSTSKVAAEVPKTQIEAEAAKSQAETETGLSEPTKREFLEIEKETEKESAEEILFEKTATPIPEASSEAPNYVLRHASGKNLTEKEKREAQFYAQKLKYPKGALIFNGSGEEDFLYSLPDNKEISVCREMSKSFGFPTLEDGLSVL

SEQ ID NO: 301030 - protein, 46 aa, Zea mays
  Clone ID: MRT4577_37609C.1.pep
NIFIVGNYSICIFGLMHDSSYGKGIRAILEFPESSILSFSKYFFSF

SEQ ID NO: 301031 - protein, 72 aa, Zea mays
  Clone ID: MRT4577_3760C.1.pep
QMGSCYKKEIFNDHVQKGVLVWAQKVKMRKGLKGALSKSDSAKNNNADPAGPSVKIEMAKAGEDAKVVGNTE

SEQ ID NO: 301032 - protein, 52 aa, Zea mays
  Clone ID: MRT4577_37610C.1.pep
FSITIFIHTYGNHSSKLLHSSNTFISLLVPLTIININYFKTQFFNLIKLNKA

SEQ ID NO: 301033 - protein, 63 aa, Zea mays
  Clone ID: MRT4577_37611C.1.pep
LLPSGNGLIIQRDVASHSHPLCLHRCPLLWFKAFRKSQPLGGEGGKKVRKCGSWSLKKCRIKN

SEQ ID NO: 301034 - protein, 74 aa, Zea mays
  unsure (1)..(74): unsure at all Xaa locations
  Clone ID: MRT4577_37612C.1.pep
ALEXSRVFFFFFYEKFSKKYKRYESLITRQCSYYKRGKENLSDLQKQCTTTQVHNLTIQCCCQMKYQKNAPVII

SEQ ID NO: 301035 - protein, 85 aa, Zea mays
  Clone ID: MRT4577_37613C.1.pep
RRYSPHRPSKPRGRSADSSLRPSRSIRRCDGVCSPKHPLPHCRATKPPIREEAVEQYVEGDEHGTIVPLEDEVFQSIVRFSSVRP

SEQ ID NO: 301036 - protein, 74 aa, Zea mays
  Clone ID: MRT4577_37614C.1.pep
KFCSGQRAGFQRVGPKKCFSKSVGPGKRKRSLLTKVIKKANWGFGARKQGGPWGPSFFRGKNYGGCPPPKTKRV

SEQ ID NO: 301037 - protein, 90 aa, Zea mays
  Clone ID: MRT4577_37615C.1.pep
ASMLLAVGPWCLTWCAIVAHQELHGAIIGPSASFPDDNGLRVARCCPVCVQVNCVFKTVQRFTWSLWDQGALLCLNSAGVERSARVCLSV

SEQ ID NO: 301038 - protein, 46 aa, Zea mays
  unsure (1)..(46): unsure at all Xaa locations
  Clone ID: MRT4577_37616C.1.pep
KLAXYTSSFNDITYKHIRDMCTFEYSILLQSIYHMGMYTTNSPNKY

SEQ ID NO: 301039 - protein, 75 aa, Zea mays
  unsure (1)..(75): unsure at all Xaa locations
  Clone ID: MRT4577_37617C.1.pep
VNSEGCLFDKHARTALAFVTLKHDGEREFMFYRNPSADMLLTKANLNLXLVPRAKVFHYGSISVIFEPCRSAKMA

SEQ ID NO: 301040 - protein, 70 aa, Zea mays
  unsure (1)..(70): unsure at all Xaa locations
  Clone ID: MRT4577_37618C.1.pep
NPVLKNLADDEPVIXNAPAGKNPNAAKRVPTGKSISKDGAVEKKDRKMRTNSVETYTIYIFKVLKHVHQY

SEQ ID NO: 301041 - protein, 152 aa, Zea mays
  unsure (1)..(152): unsure at all Xaa locations
  Clone ID: MRT4577_37619C.1.pep
IGRDKKKLGKHPRXRGKALFXKNRRVPLGRTSFESVVRPPGKAPEGAVPGPSPGRNGGGPFCRGSSLSIPPKNNGFGAGTPEPNPXSQSFSQNNGSVLPTSLAYIGPLAKGCSPWKPDAGIKTTGRGRNSAPRILKGPRGRTGHRAMGGAFP

SEQ ID NO: 301042 - protein, 76 aa, Zea mays
  Clone ID: MRT4577_3761C.1.pep
PPCPHYSFWCPPPRVKGSRSRRESMGGRGFPLLIRVYRACMTEMEKPLAPMYVCLFNTPRHCPMFNFEAPFSGVFF

SEQ ID NO: 301043 - protein, 80 aa, Zea mays
  Clone ID: MRT4577_37620C.1.pep
LHRNSDLLEILMKTRFLMVFVQYKGSLKTIIGPGQIFWVGGLNYRIMFSPQLVKALVKMGNFKKKLGESLVPPRFFLVTQ

SEQ ID NO: 301044 - protein, 93 aa, Zea mays
  unsure (1)..(93): unsure at all Xaa locations
  Clone ID: MRT4577_37621C.1.pep
PPPPGNIIFRVTKTNPKTGRVIGVFXRVNTSEPALGAKAPKDVKIQGVWYPPPQYLKCLHARWPTPPMDLGKVFVFPGNLLKTEEQSGMTCPC

SEQ ID NO: 301045 - protein, 120 aa, Zea mays
  unsure (1)..(120): unsure at all Xaa locations
  Clone ID: MRT4577_37622C.1.pep
LRANSTPLPIERNARDPRARYEGGWRSHVQERCGHHATQNGIHXFYYQDMTGMFGKWEFDPIALAXPSCPVHLWHGDXDGLLPAVLHRCLRPKIGWINYHELSGTGXHLLRYVPGLRDTS

SEQ ID NO: 301046 - protein, 245 aa, Zea mays
  Clone ID: MRT4577_37623C.1.pep
MGSEANGGAAAIDLLRSAAPFLPDADLLLTPGTGLVLVDLVNGFCTVGAGNLAPVTPNKQIEKMVEESTRLAKVFCQRNWPVFAFLDTHHPDKPEPPFPPHCIIGSGEENFVPALEWLENDPNVTMRRKDCIDGYLASFEKDGSNVFSEWVAKFQIKTVLVVGICTDFCVLDFVSSTLAARNIGRVPPLEDVVIYSEGCATFDLPVEVARSIKGALAHPQDLMHHMGLYMAKSRGAKIVDGILEE

SEQ ID NO: 301047 - protein, 113 aa, Zea mays
  Clone ID: MRT4577_37624C.1.pep
KAWAEKPTRSEPEHSSEPTKGRAAERQVANKRGRRTGNIMVGQRSNSGKHQGEAWMNLDIKCTLNCLLPDRRARQLAQAAGCMIRRSPGIEMSRTGHELHSKTSSRAQKTQQP

SEQ ID NO: 301048 - protein, 59 aa, Zea mays
  Clone ID: MRT4577_37625C.1.pep
VLHESRVLRLEARLEASRTVQSHACYNPEVQHDPLYVWPVSDPRALPGITHRATRSVAT

SEQ ID NO: 301049 - protein, 101 aa, Zea mays
  Clone ID: MRT4577_37626C.1.pep
YRQRGVTMPRLQGPSMQYTARIWTLRCEGPCMIAVCECTPPMPLGGIYSGRMYYLTLVNVNCVLDDKRAYLICYGSNVTMIYGEDGYSCLKQDRASKKSLS

SEQ ID NO: 301050 - protein, 268 aa, Zea mays
  Clone ID: MRT4577_37627C.1.pep
HWVPRGRPGKSDSRPSTPKSEITPMPLGLSDAPDLIQTPATPISKTHSREPSSPTTTKAQRRLSNLIQTQTNKIEAASDAVRDSILDSADQALGRINNTLDTSFKFFFGGLKEKNPDGPMQEQPVLPKTLEDARKLVSSPTRAERDDDNLSGSAASSVHGDESTETPVSKGLDAKMADLFAGKRQIRDRSVDSTKSGGSSSGRRVAFATSQNVEEKAPSPAPIKADAPAPGNISAVDSLRNMGNNFNPFEPIVQYERTAPICTRRKQQ

SEQ ID NO: 301051 - protein, 326 aa, Zea mays
  Clone ID: MRT4577_37628C.1.pep
WITRLASMFEEREAELTYHTTGDRSSAASSSLVCPYLALRGFLHPVHVPSTSNPGAESTSFRRHATGLEGHATLDLNNAQLFHAIESINHDSEHRHLSNLPVSGIPEYSMTPFGIGLPRYDSGSQQRFRSYAHHHPLIHRPAPRSGSNLVAPPLGSVPAVVAAAETARGSHMYQRSSVHGSPFPPTTTRRVRPRALTITSFIAATSSDPLTGRTMHGAGRASLRSPGSPLKASLTGGAPSTLCRTMRMEALAEGLLGSGCRRRAKATRRTAIRLCRRHRGCRRSCDSTRLFLRPIAVYKKKYSVRDLREHIERRSTALQSPALGPV

SEQ ID NO: 301052 - protein, 41 aa, Zea mays
  Clone ID: MRT4577_37629C.1.pep
KDQRTRVASLSHHHGNDTKSSTRGLSASFFGMIDSSQHPIS

SEQ ID NO: 301053 - protein, 57 aa, Zea mays
  Clone ID: MRT4577_3762C.1.pep
NSRYLALNMNVNYHIPFFMQTDTVYSYYCTQNLTHANCIYWLKYFSIFHFVHDSLIR

SEQ ID NO: 301054 - protein, 458 aa, Zea mays
  Clone ID: MRT4577_37630C.1.pep
MLTVPHAHERLRGDEENHQAERGWGGAQMDLERSPPASSAEAPGDGGGGGAAACSICLDAVLARGAGRSVAKLQCGHEFHLDCIGSAFNAKGAMQCPNCRKIEKGRWLYASGHRASVDIDMGGWVTSDNYDITSELPFGFQWCPFSGFTRLASMFEEREAELTYHTTGDRSSAASSSLVCPYLALRGFLHPVHVPSTSNPGAESTSFRRHATGLEGHATLDLNNAQLFHAIESINHDSEHRHLSNLPVSGIPEYSMTPFGIGLPRYDSGSQQRFRSYAHHHPLIHRPAPRSGSNLVAPPLGSIPAVVAAAETARGSHMYQHSSVHGSPFPPTTTRRVRPRALTITSFIAATSSGEIGGPHGFSAPGATMNRSVSDAEGISRPIDRPYNAWGREGFAPFPWIPAEGESHWWGTFNPVQNHAHGGFSRRPAGERMPPQSQSHPENSYQAVPPSQRMPPFL

SEQ ID NO: 301055 - protein, 51 aa, Zea mays
  Clone ID: MRT4577_37631C.1.pep
KQNGGGRISVARNAYGLFYPKISTLRKINFQYCSRFLARKRLPSWPGIKTG

SEQ ID NO: 301056 - protein, 121 aa, Zea mays
  unsure (1)..(121): unsure at all Xaa locations
  Clone ID: MRT4577_37632C.1.pep
MPLMMWASVTANALKLSSVSKPHLLPPLSFSRCLSSVLDGLKYAHSHEWLKHQCSVAPIVITDHAQYHLVEVAYVELSEPHDTVSNKSGFXPVKXVKATSDINPSISHEIAYVNKKLTKTP

SEQ ID NO: 301057 - protein, 103 aa, Zea mays
  Clone ID: MRT4577_37633C.1.pep
TTRTIFPVFADIHLWDIKLLIRLEGNHSTTERSMTISGNKMMPNEMMRRTSGVSEPYQTGSTPDTEKLWLWDLKWIGDLSEGRFGRVYKARHCRNGKVLWPKM

SEQ ID NO: 301058 - protein, 109 aa, Zea mays
  Clone ID: MRT4577_37634C.1.pep
SRPSGRSTLGSKTFFKTLGNSKGRWFIMETKGPPFRRFEMESYPRLAKVGGHHFNGTNVVLGTACGRTYRGGCLRLIDPGDWAIISPTLGPQWASPGTHGSCLAFLKKR

SEQ ID NO: 301059 - protein, 53 aa, Zea mays
  Clone ID: MRT4577_37635C.1.pep
YFLFVYLFSGGFYLFFFFYLLFQKEKTPVNIQNYYKYLVTNSSPLASKMNNPN

SEQ ID NO: 301060 - protein, 196 aa, Zea mays
  unsure (1)..(196): unsure at all Xaa locations
  Clone ID: MRT4577_37636C.1.pep
MLAKEEFAANDYTDPPPAPLIDAAELGDXSLDHDEIAEFIVTLLVLXYITWAIEIGDKHQTDATLFFVDVSSVPSWVLSIACAFGAMIFFLVYCSAVISMIHINPDCTFGLFLARKDSLVSVLLYMVRKWLLTICGVYLIMECLSAYCDRYVVKANXTPWTSADGTGLNVEIIGIFVLDYIVFSATDPKSNARDSH

SEQ ID NO: 301061 - protein, 188 aa, Zea mays
  Clone ID: MRT4577_37637C.1.pep
SPSLLAGVVGWELVTKRASQLPASSTRVAERAPNPPPRNSSSEASQFCPSKRPRGFNYCIYIILRHLLVPQILLLLLLLPLRWSCQRAEDWSARVRRLYKRDRPAIWSAPLCSPLPVCFQLHLSPRSSLARLPSSLSLRRDREEEEARQASLTYGRRPWGRRRRRTTPPRRTRGARGRKPLTTGSRSP

SEQ ID NO: 301062 - protein, 221 aa, Zea mays
  unsure (1)..(221): unsure at all Xaa locations
  Clone ID: MRT4577_37638C.1.pep
MGTQAPENYPAEKDARSAREKAIDDWLPITSSRNAKWWYSAFHNVTAMVGAGVLSLPYAMSELGWGPGIAVLVVSWVITLYTLWQMVEMHEMVPGKRFDRYHELGQHAFGDRLGLWIVVPQQLVVEVGVNIVYMVTGGKSLKKFHDVLVCGDTGVCEGKDNIKTTYFIMIFASVHFVLSQLPNFNSISGVSLAAAVMSLSYSTIAWXASVPKGRMSGVDYH

SEQ ID NO: 301063 - protein, 66 aa, Zea mays
  Clone ID: MRT4577_3763C.1.pep
SLIGGTFIDKDRQIMWTASSFWDEYWYSKCLSTYLSFFQISPTHCFLKKKKKKKGRPSRSHASADA

SEQ ID NO: 301064 - protein, 471 aa, Zea mays
  unsure (1)..(471): unsure at all Xaa locations
  Clone ID: MRT4577_37640C.1.pep
LALQSPLLKGVRRRRDEARPPADDGDATTTDGHARPEKPATAXEESIESWLPISSSRNAKWWYSAFHNVTAMVGAGVLSLPYAMSQLGWEVGVTVLVLLRAITLYTLWQMVEMHECVPGKRFDRYHELGQHAFGERLGLWIVVPQQLVVEVGVNIVYMVTGGTSLKKFHDTVCGDSCTDIKLTYFIMIFASCHFVLSQLPSLHSISGVSLAAAVMSLCYSTIAWVASAHKGRSPDVHYGLRATTAPGKVFGFFGALGDVAFAYAGHNVVLEIQATIPSTPERPSKKPMWKGAVVAYAIVAACYFPASLVGYWAFGNQVNDNVLVSLSKPKWLIALANMMVVVHVIGSYQIXYAMPVFDMIETVLVKKLRFPPGLTLRLIARTLYVAFTMFIAITFPFFGGLLGFFGGFAFAPTTYFLPCVMWLAIYKPKRFSLSWLTNWICIILGVLLMILSPIGGLRQIIMDAKTYQFYS

SEQ ID NO: 301065 - protein, 131 aa, Zea mays
  Clone ID: MRT4577_37641C.1.pep
GIVRAAHTYASMDAALRAIMPNLHGAPCEGDQPSDCGLCHGSGVEVWGPQQARSRTCWPRRALYEPPTPVFPPPYGPGGRSYIPLPARPATPFTRSGFATFTAKRRPRRWSPRPRRQEQMMGRERNRSAYI

SEQ ID NO: 301066 - protein, 95 aa, Zea mays
  Clone ID: MRT4577_37642C.1.pep
TNPLPPIISLRNLTTLVFLQPVTSVRCLRTSIPSFPLTVNDHWGNANNGKRSEATAKDSPAAYYMALLSQLSEPRDRRCRLRITYESLSEAEGGV

SEQ ID NO: 301067 - protein, 130 aa, Zea mays
  Clone ID: MRT4577_37643C.1.pep
HASVCPRLPDSRSFDQIPSDLSENHNSPSNRAEHSITSNSHTPVPLSSTEHLAIDAYIENLLTGGSSLTPSKFTSHMNSTAPVSTQNTLFGYPMPVDLFSAFYAGAVTTGGLIGYFKAGSKPSLAAGLLF

SEQ ID NO: 301068 - protein, 240 aa, Zea mays
  unsure (1)..(240): unsure at all Xaa locations
  Clone ID: MRT4577_37644C.1.pep
MEMQPQLGDSSPEDKLASRPLTPGGRWPDSQWRPAEEKAIDDWLPINARRNAKWWYSAFHNVTAMVGAGVLGLPYAMSELGWGPGIAVLLLSWIITLYTLWQMVEMHEMVPGKRFDRYHELGQHAFGERLGLWIVVPQQLVVEVGLNIVYMVTGGTSLKKFHDTVCGDDDHRCKGRDIKLTYFIMIFASCHLVLSQLPNFHSISGVSLAXAVMSLCYSTIAWIASAQKGKSPDVHYGLRA

SEQ ID NO: 301069 - protein, 64 aa, Zea mays
  Clone ID: MRT4577_37646C.1.pep
FFFYIFFFFFFFFFFFFLAPKLSITTRGSFNYTNNWVHTEVFVFQRPYLHSNVNGRPAQFFFKK

SEQ ID NO: 301070 - protein, 228 aa, Zea mays
  Clone ID: MRT4577_37647C.1.pep
MGTQAPENYPAEKVQDARSAREKAIDDWLPITSSRNAKWWYSAFHNVTAMVGAGVLSLPYAMSELGWGPGIAVLVVSWVITLYTLWQMVEMHEMVPGKRFDRYHELGQHAFGDRLGLWIVVPQQLVVEVGVNIVYMVTGGKSLKKFHDVLVCGDTGVCEGKDNIKTTYFIMIFASVHFVLSQLPNFNSISGVSLAAAVMSLSYSTIAWGASVHKGRMSGVDYHLRATT

SEQ ID NO: 301071 - protein, 116 aa, Zea mays
  unsure (1)..(116): unsure at all Xaa locations
  Clone ID: MRT4577_37649C.1.pep
GQPTPKGFCFLTLHGPCASGATXSIYPQCSQATISYLFPPYLSPATTXMCENPIVQPYRIQHAIGTGILPLSPLILQHTAALLHHIPLAHLAAQDIKAQQLQQLGLANLAAYSYQH

SEQ ID NO: 301072 - protein, 94 aa, Zea mays
  Clone ID: MRT4577_3764C.1.pep
SSAELKLSMISSSGKLSSSFSSCKRRALSPTLWTNSMVTVHSPCAILFDSSLKSSHSFLVYFRVCMLCKVQYSSSSSLGTERFTSVEHTRPRLV

SEQ ID NO: 301073 - protein, 98 aa, Zea mays
  Clone ID: MRT4577_37651C.1.pep
KTPTMNVHASGQLQTFGSHTSWNNIDFYNKNGIFVNSPNSGIALRGTTKCLACMDIFIILHFIFQRTYVFLLAWTNFLPCQWIDGRDQNPWKPKGTPL

SEQ ID NO: 301074 - protein, 97 aa, Zea mays
  unsure (1)..(97): unsure at all Xaa locations
  Clone ID: MRT4577_37652C.1.pep
KHHPSYPTYGAVATHSSPARAPTSLPLCTTTPRDHPKIYPSNLRHLLHTRHRTSHVSPHIPRDPKTLFQYPQLPFTPSSTTNTXTSPAPELKVIHFP

SEQ ID NO: 301075 - protein, 98 aa, Zea mays
  Clone ID: MRT4577_37653C.1.pep
TLFPRNHIFTIISPHLGTNLDPIKSAFIFLEISHKGVLPQVQKEDFWFQHNFYLGEITPFGFFSGVGFNQREFFSVFHKKTHSLFPPPPLNPPCFFFF

SEQ ID NO: 301076 - protein, 115 aa, Zea mays
  Clone ID: MRT4577_37654C.1.pep
MVTLKQTILRRHQLCSSHASRMGRQSFGMFRNLGSAVPMLIIVPWLFVQVNYGNFMHGLMKENIQLNRKVLSELSMHEPYSFKALVDVSRNAFPGNRPVPAKEGLTSILLTFFSQ

SEQ ID NO: 301077 - protein, 72 aa, Zea mays
  Clone ID: MRT4577_37655C.1.pep
AGKRNHIEGTVNADNVDLDQELQARMDRTNDCIAMNNRTWEAVEGHTSKTDEHGHAESHCVAIDIVNGKKDQ

SEQ ID NO: 301078 - protein, 49 aa, Zea mays
  unsure (1)..(49): unsure at all Xaa locations
  Clone ID: MRT4577_37656C.1.pep
LLIIKEHQGRLSRWTIESWTFPFIHTGRIMSERVTCMMLPLRALASXRI

SEQ ID NO: 301079 - protein, 122 aa, Zea mays
  Clone ID: MRT4577_37657C.1.pep
MNKGKIFKLAKGFRGRAKNCIRIARERVEKALQYSYRDRRNKKRDMRSLWIERINAGTRLHGVNYGNFMHGLMKENIQLNRKVLSELSMHEPYSFKALVDVSRNAFPGNRPVPAKEGLASIL

SEQ ID NO: 301080 - protein, 81 aa, Zea mays
  Clone ID: MRT4577_37658C.1.pep
WGPGPLRLVQIVVRGSWGWGELCPFWGIFCCCGSPYLKNNVGPCFIPYEVPPRERGWRYFIIWVSLAPPFALQKKRKKKEG

SEQ ID NO: 301081 - protein, 109 aa, Zea mays
  Clone ID: MRT4577_37659C.1.pep
VGTFAGPRSSCRISASCRGILLSPPMANPFCLDGGRQLCSLYAEPRYPLLMSRACHGGARHRPAVWPLRACVCGVLSSSPAAAPGSGVLEPIREGHAVVSSRVGDLGRP

SEQ ID NO: 301082 - protein, 56 aa, Zea mays
  Clone ID: MRT4577_3765C.1.pep
HWIPISHVEKCHTCTNEMYMLHRHIDHLAKTCSVTKHPWQVNTTETGYIQCVAYSR

SEQ ID NO: 301083 - protein, 117 aa, Zea mays
  unsure (1)..(117): unsure at all Xaa locations
  Clone ID: MRT4577_37660C.1.pep
ALIVVFPNMAPMRELAFALECFWDGKSSAADLXERXATGLRASISLPMADAGIKFMPSNSLSYYDQVRDTTDMLXGVPGRYSWTGGEIGFDTYFCMCRGNATVPAIEITKWVDTNYH

SEQ ID NO: 301084 - protein, 22 aa, Zea mays
  Clone ID: MRT4577_37661C.1.pep
LTRSVSCLSQTITCCRSYLSET

SEQ ID NO: 301085 - protein, 68 aa, Zea mays
  Clone ID: MRT4577_37662C.1.pep
TAAPFFFFFFTPSNIGAKNNATILPLPKKIHYLLNHKPSTMWSPPQYPRLQAAFVILTRTYRLNKGQP

SEQ ID NO: 301086 - protein, 78 aa, Zea mays
  Clone ID: MRT4577_37663C.1.pep
RFKKHMFEKQEHQIFSGPFKQTRGIHIYRRQNSCKKTPTWLQVLPKKFQGLSSRSLGRHIFLKKQSRSSPPLGEDIPT

SEQ ID NO: 301087 - protein, 95 aa, Zea mays
  Clone ID: MRT4577_37664C.1.pep
GRLEEAKKVIQDMPMEPDVGVLGALFGASKIHGDVDLGEAIGWRVIELDPQNSGRYVLLANLLATAGRWEDVARVRRLMDERNVSKEAGRSVIEV

SEQ ID NO: 301088 - protein, 77 aa, Zea mays
  Clone ID: MRT4577_37665C.1.pep
MEDKASNLDAVLKEAVDLENIPIEEVFENLRCSPQGLTTEQAEQRLAIFGPNKLEEKQESKFLKFLGFMWNPLSWVM

SEQ ID NO: 301089 - protein, 154 aa, Zea mays
  Clone ID: MRT4577_37666C.1.pep
RRKACAQVACNVPACAEARNALMNAGAVASVSAILLSDGGAAAAAAGLEEWCVSAMYAMSRGSLRFRGLARAAGADRALRRVVADEGGGVRREMARKTLRAMRGDLDNDDGGTEYNNDLTGSSAECEDCGGSIVSDGLMSFRRRQRELGNTAEF

SEQ ID NO: 301090 - protein, 227 aa, Zea mays
  Clone ID: MRT4577_37667C.1.pep
MPVGKPVNTLKGSWKRLLNDERLRRSSQVLSVVDSNVCIFGGEVKPREPIDDKVDVVPLKSNATNLETKSASSAPSPRVGSASAVLNGKMHLFSGRGGIDMAPIEEQGAVWCYDPTSSSWTKITPADSSAPFPPARSYHCSTSDGKETFFLHAGCPEKGRLSDLWMFNINNRTWTQAPDAPGSQRGGASIAYHDGKLYRMNGFDGTTEQGGSVDVFDTANSTWSTDT

SEQ ID NO: 301091 - protein, 91 aa, Zea mays
  Clone ID: MRT4577_37668C.1.pep
LNQSLPVQAQLSSASVPTCPTGFDLSSDRDSWSTSTQRSHQRLASGFALNFPLRSGVSVCVCVSTQQQLAGLFGLVWFGWFDCEIKVFCWF

SEQ ID NO: 301092 - protein, 56 aa, Zea mays
  Clone ID: MRT4577_37669C.1.pep
RRTALMWGPGTSPEVACPANYRWYVKCVRKGCGWRRKLMLVVFIYICMFVKFHGAQ

SEQ ID NO: 301093 - protein, 90 aa, Zea mays
  Clone ID: MRT4577_3766C.1.pep
YYYITPTKHLINWLRRRLRAQHLGCKDPRHFGLSQIEKRVANSGRLPIHLFSLLNVTLTYSNRDTRRSYQKAPNVWYGGAWPFSRKPMLT

SEQ ID NO: 301094 - protein, 132 aa, Zea mays
  Clone ID: MRT4577_37670C.1.pep
MGKNNKRKREPTPPSEEFGDSEYSEEEFSSESEGSPAPIPCVWTYIRAVERSGLEGSDELEYSSDEEDSDGGGEDEDDDDDDDDDDDDDGGDGDDSGRGGGSKDGDGGGSRGSNRGGSSRGGSGGGSNGASG

SEQ ID NO: 301095 - protein, 155 aa, Zea mays
  Clone ID: MRT4577_37671C.1.pep
MGKNNKRKREPTPPSEEFGDSEYSEEEFSSESEGSPAPIPLRESSDDSDDSQGLTTEVWTYIWAIERSGLEGSDELEYSSDEEDSDGGGEDEDDDDDDGGGGGDGDGDGSGKGGGGSKDGVGGGSRGSNRGDSSRGSSRGSTRGGSGGGSNRASG

SEQ ID NO: 301096 - protein, 152 aa, Zea mays
  Clone ID: MRT4577_37672C.1.pep
MGKNNKRKREPTPQSEEFGDSEYSEEEFSSESEGSPAPIPLRESSDDSDDSQGLAAEVWTYIRAVERSGLEGSDESEYSSDEEDSDGGGEDEDEDDDDDDDDDGGDGDGSGKGGGGGSKDGDGGGSRGSNRGGSSRGSTRGGSGGGSSRASG

SEQ ID NO: 301097 - protein, 156 aa, Zea mays
  Clone ID: MRT4577_37673C.1.pep
MGKNNKRKREPTPPSEEFGDSEYSEEEFSFESEGSPAPVPLRESSDDSDDSQGLAAEVWTYIRVVERSGLEGSDESKYSSDEEDSDGGGEDEDDDDDDGDDDDDDDGDGDGISSGRGSGGDNKDGDGGGSRGSNRGGSSRGSTRGGSGGGSNRASG

SEQ ID NO: 301098 - protein, 39 aa, Zea mays
  Clone ID: MRT4577_37674C.1.pep
TRVRTRGSEHHHTSLGPGLSRAIQWRRRGLQLRGCRLSP

SEQ ID NO: 301099 - protein, 146 aa, Zea mays
  Clone ID: MRT4577_37675C.1.pep
MGKNNKRKREPTPPSEEFGDSEYSEEEFSSKSEGSPAPIPLRDSSDDSDDSQGLAVEVWTYIRAVERSGLEGSDESEFSSDEEDSDGGEDEDDDDDDGNDDDGGDGDGDGGNGGGGSGGKGGTKGGSSVGSTGGGGGKGSGGRASG

SEQ ID NO: 301100 - protein, 94 aa, Zea mays
  unsure (1)..(94): unsure at all Xaa locations
  Clone ID: MRT4577_37676C.1.pep
MAENGLKELGMCSSPMLISVECALRLKDVQYEYVDEDLVNKIVDLLRHNPVTEKVSVLVHDGKPGAEATIIAEXLHEAWKGDYPTLLGEPYERA

SEQ ID NO: 301101 - protein, 106 aa, Zea mays
  Clone ID: MRT4577_37677C.1.pep
MRLILLWLSIWAVCSAASAGAGSDMEALLEFSRGIRQDPSRRQAIPWNPTSALDSDDCPVDWHGVQCIGGQILSIAFDGIGLVGNASLSVLARMPVLRNLSLSDNK

SEQ ID NO: 301102 - protein, 44 aa, Zea mays
  Clone ID: MRT4577_37678C.1.pep
RCRLGCQHSKLARQAFVSSICSWLSLIDLVFKSAVALHLMQVGD

SEQ ID NO: 301103 - protein, 895 aa, Zea mays
  Clone ID: MRT4577_37679C.1.pep
LWPPRPVRPCAAGCASPPSAAGHSSLVVTQVLLSAQSADGAVRKHAEESLKQFQEQNLPGFLLSLSGELANEEKPEESRRLAGLILKNALDAKEQHRKNELFQRWLALDAGAKAQIKGLLLQTLTSPVASARSTASQVIAKVAGIEIPQKQWPELIGSLLANIHQVQPNVKQATLETLGYLCEEVSPDAVDQDQVNKILTAVVQGMNASEANSDVRLAATRALYNALGFAQVNFSNDMERDYIMRVVCEATQSPEVKIRQAAFECLVAISSTYYDKLATDMRDIFNITAKAVRGDEESVALQAIEFWSSICDEEIDILDEYSSEFTADSDVPCYYFIKQALPALVPMLLETLLKQEEDQDLDEGAWNLAMAGGTCLGLVARTVGDDIVPLVMPFVEENITKSEWRQREAATYAFGSILEGPSADKLAPLVNVALGFMLSALMKDPSNHVKDTTAWTLGRIFEFLHGSALETPPIITAENCQQILTVLLHSMKDVPNVAEKACGALYFLAQGYVDSGSASPLSPFFQDIVQNLLMVTHREDAGESRLRTAAYETLNEVVRCSTEETAAIVMQLVPVIMVELHQTLEAEKLSTDEREKRSELQGLLCGCLQVIIQKLGGMESTKYSFLQYADQMMELFLRVFACRNATVHEEAMLAIGALAYAAGPNFAKYMAQFYQYLEMGLQNFEEYQVCAITVGVVGDLCRALEDKILPFCDGIMTQLLKDLSSNQLHRSVKPPIFSCFGDIALAIGENFEKYLIYAMPMLQSAADLSAHTTATDDEMLDYTNQLRSGILEAYSGILQGFKSSPKTQLLMPFAPHIIQFLDALYNGKDMDDAVMKTAIGVLGDLADTLGVHAGPLINQSTSTQAFLEECLASDDPLVKESADWARIAVSRAVSG

SEQ ID NO: 301104 - protein, 64 aa, Zea mays
  Clone ID: MRT4577_3767C.1.pep
MDKVTLARVTKVLGRTGSTGQCTQVKVEFIGENNRSLIRNVKGPVREGDVLTLLECEREARRLR

SEQ ID NO: 301105 - protein, 104 aa, Zea mays
  unsure (1)..(104): unsure at all Xaa locations
  Clone ID: MRT4577_37680C.1.pep
MSERGKGGKGLGKGGAKRHRKVLRDNIQGITKPAILRLAXRGGVKRISGLIYXETRRVLKIFLENVIRDADTYTEHARSKTVTAMDVVYCLKRQGRTLXYSFGG

SEQ ID NO: 301106 - protein, 61 aa, Zea mays
  Clone ID: MRT4577_37681C.1.pep
PLFLSLRTSFKLFGCWRYWFIDRFNHQLVCCNTRGFNILWCFSWQMRLFLTNIWDVGPHRA

SEQ ID NO: 301107 - protein, 89 aa, Zea mays
  Clone ID: MRT4577_37682C.1.pep
LENMIKQEGEARQRGGVEKNNPGPGKGLSGLNHLPPWGGGCQFERKEPPMGGGPIHGPWPQPPTQEVSKAPGSAKKPNKVAGFWVLNER

SEQ ID NO: 301108 - protein, 80 aa, Zea mays
  Clone ID: MRT4577_37683C.1.pep
NLWRSKKRATGRGSFSRSCPVVAVSDPEGLLKKGEICPVSPAYRSGSWWSCYPHQQPSVIQVVRTRTCDRRKKKTRDQYH

SEQ ID NO: 301109 - protein, 30 aa, Zea mays
  Clone ID: MRT4577_37684C.1.pep
REQPALPLYLGLGNHYYRGDPLAQVSTIPL

SEQ ID NO: 301110 - protein, 74 aa, Zea mays
  Clone ID: MRT4577_37685C.1.pep
MSSTAAAAPECGGAKTSWPEVVGKSVEEAKKVILKDKPDADIVVLPVGSPVTMDYRTNRVRIFVDTVAQTPHVG

SEQ ID NO: 301111 - protein, 72 aa, Zea mays
  Clone ID: MRT4577_37686C.1.pep
LLSSLIARIGLSLPERQGAKRCRPLGFDFLTSILFREKEIHTTSFLPPPYSPALACQFGFVNLKYPLSSLLG

SEQ ID NO: 301112 - protein, 41 aa, Zea mays
  Clone ID: MRT4577_37687C.1.pep
CQLRMVTRCASVCICEDSALGVLMRHLHYAVRYLCISMPPL

SEQ ID NO: 301113 - protein, 25 aa, Zea mays
  Clone ID: MRT4577_37688C.1.pep
MAYLGDVYWKPVAIKGLHGRYISGR

SEQ ID NO: 301114 - protein, 78 aa, Zea mays
  Clone ID: MRT4577_37689C.1.pep
TVGGIIKEICLSMRAIGILGSLKCPPVLCLCNKFAADSGIHTISPGTAIRRCDPHRRDPVDQPSMEQIYRFRLHNHFS

SEQ ID NO: 301115 - protein, 745 aa, Zea mays
  unsure (1)..(745): unsure at all Xaa locations
  Clone ID: MRT4577_3768C.1.pep
GLLENVGASMCPDHSDWFGTGGLDAQSRNADRSVVTKFLQAHPADYATKKLQEMIRLMKQRHFSAAFKCYWNYHKIDSLSNDNLYYKMVIHVHNDSVFRRYQQEMRRNQGLWPLYRGFFVDVNLFKANNKKAAELAKDGNTLLKNINGALDSNGSVVDGLADEDSNLMVKLKFLTYKLRTFLIRNGLSTLFKDGPSAYRTYYLRQMKNWGTSTNKQRELIKLLDEWAVFIRRKYGNKPLSSSTYLSEAEPFLEQYAKRSPANQALIGAAGNLVQTENFLAILDAERDEEGDLRTDHGAAPSGPVSTSVDVVPKTEGLIVFFPGIPGCAKSALCKEILNTPGGLGDDRPFHSLMGDLIKGRYWQKVADERGKRLARITLADKNAPNEEVWKQIEDMCGSTKAAPASTXIHFLFALSSSSGSXPVSSLYLLXNLLVIFMHCDMADIILTCHXKGNLDKASPNAGYVLLMFYHLYDGKSRREFENELYERFGSLVKMPLLKPDRAPLPDAVKAILDEGISLFKMHRSRHGRAEPSKGSYAKEWAQWEQRLRATLFGNADHLNSIQVPFDYAVKAVLEQLKAVAKGDLKTPDTGKRKFGNIMFAAVRLTPPDILGLLRKVAEKDTAVDSFVNKIRLEDNLTKVHVTLAHKRGHGVSAVASYGIYQHQEVPVSFNALYYTDKMAALEAQLGAVNDEPINSRNEWPHATLWTAPGVTPKEANMLPQLASEGKAERVPIDPPITISGVVDFY

SEQ ID NO: 301116 - protein, 93 aa, Zea mays
  Clone ID: MRT4577_37690C.1.pep
GGAVGRSGWGARVRAGVRSLFVFPPPAPRGVLRCRVSSVRPGGCPPVGWAIGAGLFVFVAAGRRGMCCWPSRLGWVRVLGVPPLSPVGFVFFF

SEQ ID NO: 301117 - protein, 99 aa, Zea mays
  unsure (1)..(99): unsure at all Xaa locations
  Clone ID: MRT4577_37691C.1.pep
TCPWLTPDGKTLLXLEHRNQGGGRGAKQAHTELTFTQHDETVTNDXIAGDLNEHCIKPVIPEQYLDQKTIFHPNPLGRFVIRGPHGDPGLTGRKIIIYT

SEQ ID NO: 301118 - protein, 167 aa, Zea mays
  Clone ID: MRT4577_37692C.1.pep
MPGSQASCFMAIYIQEAARGQGVQKPRSCSSEAAFLKKTVASDFGCHDCYQVAECTIPWAGGVSERPEWARGPACDSVSLGFSPSSSPVANQRNHVLFCCLAAGTGQEHDSPITPADEPLSGSQLSPSPPADEPLSIRARETTRLMSNISHKSGSAKLSASTLNKDR

SEQ ID NO: 301119 - protein, 128 aa, Zea mays
  Clone ID: MRT4577_37693C.1.pep
KKPPQGVPGHKKKRGPSHPLINFGERGIFWVFWDKPTWKEQAPQGTGVQKKGGGGFGPRGKASPPALRETKFAPGGRAKKKYLGGGATPFFWGPSKKKGGPKKPLVLVFSRGQRRRGWRAPHFPPVFF

SEQ ID NO: 301120 - protein, 877 aa, Zea mays
  Clone ID: MRT4577_37694C.1.pep
MSGAHAKKEMGTGEKPATSHGKAPSGESANKKREESPPRIKSHRSGDKKKKMKKVVYYETDSLLPSTSGSDAPSVTSKRHERKKFSKIPLRYPRISKRTPLLSVPLGKPPVFYGEDYCMWSDKMRHHLTSLHASIWDIVECGAQEPSVGDEGYDSDEVAQIRHFNSQATTILLASLSREEYNKVQGLKSAKEIWDVLKIAHEGDEVTKITKRETIEGELGRFMLHQGEEPQAMYNRLKTLVNQVRNLGSTKWDDHEMVKEVIGKFVSFELMIKGSKKIIEQGATSTSEVLPVTFKATEEKKELESTSSRIPIDASKLDNEEMTLIIKRFRQILKQRRGKDYRPRSKKVCYKCGRRQEGRRKENKKYYKKKDGDAHVCHEWDSDESSTDSSSDEDATNIAVNKGLLFPNVGHKCLMAKDGKKKKVKPRASTKYATTSDYEDDLLTLFANLNMQQKEKLNELISAIHEKDELLNSQEDFLIKENKKHVKVKNAYAQEIEKCEKLTSELSTCHDTISNLRCENDKLIAKVEKLNAKDLHVCKVSISNLRDENAILHAKIVELNTCKPSTSIVEHVTICTRCRSINVDAIHDQLALIKQQNDHIAQLSAKINEHDLENEKFKFARSMLYSGRRPSIKDGIGFQKGDNVKLNAPKKLSNFVKGKVVAKYVGGKHKGSKTCVWVPKVYASGGSSWIIDSGCTNHMTGEKRMFSSYEKNHDPQRAITFRDGNQGVTVFRRSDDSVAFKGVLEGQLYLVDFNRAELDTCLIAKTNKGWLWNRRLAHVGMKNLHKLLKGEHILGLTNVHFEKDRICSACQAGKQVGVHHPHKNIMTSDRPLELLHMDLFGPIAYISISGSKYCLVIVDDYSRFTWVFFLQDKSQTQ

SEQ ID NO: 301121 - protein, 160 aa, Zea mays
  unsure (1)..(160): unsure at all Xaa locations
  Clone ID: MRT4577_37695C.1.pep
MLDLCRSIAQSNSKISIEAIVGKELQEKGLNLIYSVGRGAAKKPCLVTLSYKGNPNRADDVLALVGKGVCFDSGGLNLKPTGFIEEMWSDKGGACTTLAIFKAAVELNLPINLVCTMAFVENLVGSDAYHPSAIIKSYKGXLTVEIGNTDAEGRLILCDA

SEQ ID NO: 301122 - protein, 78 aa, Zea mays
  unsure (1)..(78): unsure at all Xaa locations
  Clone ID: MRT4577_37696C.1.pep
MMPLDRIVFYGGPNATYGHTNKEGGGGRLLVEQLKMGMLNDKVPSAXQALTEATXLIPVGGLILVLXGLALTASVGGL

SEQ ID NO: 301123 - protein, 640 aa, Zea mays
  Clone ID: MRT4577_37697C.1.pep
MSRDHAKKEMVTGEKPATSHGKAPSGESDNKVNGSPSHNKSQRSGEKKKKMKKVVYYETDSSSPSTSGSDAPSVTSKRHERKKFSKIPLRYPHISKRTPLLSVPLGKPPVFDGEDYCMWSDKMRHHLTSLHASIWDIVEFGAQEPSVGDEGYDSDEVAQIRQFNSQATTILLASLSREEYNKLQGLKSAKEIWDVLKTAHEGDEVTKITKRETIEGELGRFMLHQGEEPQAMYNRLKTLVNQVRNLGSTKWDDHEMVKVILRSLIFINPTQVQLIRGDPRYKLMSPEEVIGKFLSFELMIKGSKKIIEQGVSSTTDVQPVAFKATEEKKDESTSSRLPIDASKLDNKEMQRRGKDYKPRSKKVCYKCGKPGHFIAKCPLSSDSDRGDNKKGRRKEKKKYYKKKGGDAHVCREWDSNESSTDSSSDEDAANIAVNKGLLFPNVDHKCLMEKDGKKKKVEKCEKLTSELSTCHDTISNLRNENSKIIAKVEKSNVCDDSIVDLRNDNASLIAKIDMLNGSLASLKIENEKLIAKAKDLNVCNATITNLRDDNAILQTNIVELNTCKPSTSTVEHVSICTKCRDINVDAIHDHLALIKKQNDHIAQLSAKINEHDLENEKFKFARSMLYSGRRPDIKDGIGFQ

SEQ ID NO: 301124 - protein, 147 aa, Zea mays
  Clone ID: MRT4577_37698C.1.pep
SLAVLVFAFAVFAFVVTHRGAGGAVSGSGYREYRLGDYSGWLQARIAEPETWRRVESCLSEARVCGGREFYRQHLSPIQSGCCKPPTWCRFRYVNATFWEAPRSGLSAAAVSDGDCRAWSNDQQVLCFECDTCKGRVLETAKKKWKT

SEQ ID NO: 301125 - protein, 61 aa, Zea mays
  Clone ID: MRT4577_37699C.1.pep
ILFDRGFCHGKTMSYKGQQIVFTFRYSRVIVFACLRCFVAIPFLGFCFFFIFLFFFFFFFF

SEQ ID NO: 301126 - protein, 98 aa, Zea mays
  Clone ID: MRT4577_3769C.1.pep
LYRVNIAYVEEPASGRPPMREVVHMLSSSPAAQYFVPHALCKIVVYSALYITIMYMIRSGLAPVIYLSPAVSATPVSSVIMPVCMCLTHIQQVASREF

SEQ ID NO: 301127 - protein, 41 aa, Zea mays
  Clone ID: MRT4577_376C.1.pep
LVRVCPTDVDVAYRDHGFPVKKPKAKHPPGVCIRLRGKHKN

SEQ ID NO: 301128 - protein, 275 aa, Zea mays
  unsure (1)..(275): unsure at all Xaa locations
  Clone ID: MRT4577_37700C.1.pep
MKRGARDDALMGSQLKRPNVGRSDPSAQPQHMPVPGLASAAAPPPQAGARAPAQPQQTSGAALTNQKLTTNDALVYLKAVKDKFQDKREKYEEFLEVMRDFKSERIDTNGVIGRVKTLFNGYPELILGFNAFLPKGYAIKLQEEKKPVDFVEAINFVNKIKIXHDERVYKAFLDILNMYRKDNKSIQDVYHEVARLFKDHKDLLEEFQHFLPDTSVAPQAVASKGGLVKREDRSSLVPPANKILHNEKRDRDMLRACLSHADRDFSVDRPDVDHD

SEQ ID NO: 301129 - protein, 79 aa, Zea mays
  Clone ID: MRT4577_37701C.1.pep
SKKPCVSSCEGRSSGPLFLRAEKAVAKCLLGLGGVAPGSRLPWLGGVPLRAYVVWWRVSPGIGGSVYWSPPVAIVLCWN

SEQ ID NO: 301130 - protein, 432 aa, Zea mays
  unsure (1)..(432): unsure at all Xaa locations
  Clone ID: MRT4577_37702C.1.pep
DTNGVIVRVKTLFNGYPELILGFNAFLPKGYAIKLQEEKKPVDFVEAINFVNKIKNRFQHDEQVYKAFLDILNMYRKDNKSIQDVYHEVAMLFKDHKDLLEEFQHFLPDTXVAPQAVASKGGLVKREDRSSLVPPANKILHNDKRDRVYLSHADRDFSVDRPDVEHDRQRRRLDKDKERKVERDRRDYEREDKDGEHDSRDLELGQRKRKPFSRNIEDNVGAETHQGGPSENHGIHSVSASSYDDKDALKSVYTHEFHFCEKVKEKLEHEAYQEFLKCLHIYSQEIITRSELKNLVNDILQHYPDLMEGFNEFLEHCENIDGFLAGVFNKRPSTRAVKTEDKEKDRDRDREDKDRDRERERACLSHADRDFSVDRPDVEHDRQRRRLDKEKERKVERDRRDYEREDKDGEHDSRDLEIAQRKRKPFPKEDGG

SEQ ID NO: 301131 - protein, 88 aa, Zea mays
  unsure (1)..(88): unsure at all Xaa locations
  Clone ID: MRT4577_37703C.1.pep
GGXGPKQKSTWNFKIHWHFAYWTTCCTMGFETHYILKYMGKLLEGFTRNLSGNFFYNWVFTKKNWRKQGFIFQFIFVKNIGAGGIGTI

SEQ ID NO: 301132 - protein, 60 aa, Zea mays
  Clone ID: MRT4577_37704C.1.pep
FRIFSLVNLRQFSPPKDDLVFQNWWANLEAKVPYALRKGINPPVMLVAWGLWKQRNNCVF

SEQ ID NO: 301133 - protein, 96 aa, Zea mays
  unsure (1)..(96): unsure at all Xaa locations
  Clone ID: MRT4577_37705C.1.pep
CLWXAGVFAGRAGRSAGCGVXGSASGPAFCGGRLGGCGFLRRFLVGPACGALCVVAGLPPRLCCGAFALARPGCPWCSFPLAARSVGACGRWPLPV

SEQ ID NO: 301134 - protein, 88 aa, Zea mays
  Clone ID: MRT4577_37707C.1.pep
AVVTTQSTRGNKSGKPLLDKNGGIQILTSHTLQPVPVAIGGPGLHPGVKFRNDIQIPGLANVAATVMNLHGFEAPADYEQTLIEVADN

SEQ ID NO: 301135 - protein, 72 aa, Zea mays
  Clone ID: MRT4577_37708C.1.pep
PMFGRTHGPGTGRFNESCIPLQISHYASREGSQGKRKSPEGRIRTQADPPDCVLRHWGWGGPTARSEARSLH

SEQ ID NO: 301136 - protein, 166 aa, Zea mays
  unsure (1)..(166): unsure at all Xaa locations
  Clone ID: MRT4577_37709C.1.pep
YRXLGDXRPLGLLVGVNNHKKTTIFGAALLYDETTESFIWLFRTFLNVMSGKKPQTILTDEDAAMAKAIKIVLQGTHHRICVWHMNQNACKPLRSCXEDYKKFNVEFQKCIYDQEEEDFINAWNQLLTTFNLQGNQWLQRLFDKRYLWALVYGRNTSLLIWCPLTR

SEQ ID NO: 301137 - protein, 55 aa, Zea mays
  Clone ID: MRT4577_3770C.1.pep
ATGTPILKEIKVPKALLGGTGYYAIALFLTGAKSNALGYAASYIIAIADHLSHEP

SEQ ID NO: 301138 - protein, 68 aa, Zea mays
  Clone ID: MRT4577_37710C.1.pep
MSLTHSLCPIHDAHARHLCARRFLVDAAASSSINAVVTHRLRSGNDVFRYAVCNVMKQAMRPDSHAVA

SEQ ID NO: 301139 - protein, 254 aa, Zea mays
  unsure (1)..(254): unsure at all Xaa locations
  Clone ID: MRT4577_37711C.1.pep
MAAEAGPISKVLIVVAMQTEAMPLVHKFKLVEAPAHESTFPKGAPWVRYHGNYKGLHIDLVLPGKDAVLGVDSVGTVSAALLTSFSIQTLKPDLIINAGTAGGFKAKGASITDVFLXASDVSFHDRRIPIPVFDMYGIGARKTSAVPNILKELNLKIGKLSTGDSLXDMSPQDEKVILSNDATVKDMEGAAVAYVADMFSTPAIFVKAVTDIVDGEKPTSEEFLQNLIAVTAALDLAVTKVVXDFISGKRISDL

SEQ ID NO: 301140 - protein, 109 aa, Zea mays
  Clone ID: MRT4577_37712C.1.pep
ACHASAPNMAKASRCSHLLFLNLLRPLHKHLACYMLLPYVTSDLLDLIIIDISSNNYYQHKEPLAVVARGRGADGIPRACRKTRRQPLRRLETAGNNQIRREASDQQQI

SEQ ID NO: 301141 - protein, 50 aa, Zea mays
  Clone ID: MRT4577_37713C.1.pep
ECENHVGADAVTGSDGCGVGVLLSVSWRGSSNVHPVKNINVTYGKNCLDA

SEQ ID NO: 301142 - protein, 81 aa, Zea mays
  Clone ID: MRT4577_37714C.1.pep
WLHKHGNWGTCFNNRGGSPTVSFQHPGGGGGCLKRGGALAFLVSPNLKRLAFFEGGLGRRFPFLATELKKNFFGGFGLFGE

SEQ ID NO: 301143 - protein, 102 aa, Zea mays
  Clone ID: MRT4577_37715C.1.pep
KKKFLRSIFKHRTLNEGVYMGGGTQIRETTKTWVIFPGKQIGKGLGKWGPTFWPPGGKKNGGGKGLPFPLGGGPPLRGGPQGGPWVPVFLLKRFPGEITNPI

SEQ ID NO: 301144 - protein, 94 aa, Zea mays
  Clone ID: MRT4577_37716C.1.pep
TPRKVNQKFLGWGGTCKKIFWKGTFKAPHEKKIFGESPPPGVVLRAPTPLFGGPRVKKFPGESKKMPAGKNGGGMGTHRLETFYTPRTRGAPRE

SEQ ID NO: 301145 - protein, 59 aa, Zea mays
  Clone ID: MRT4577_37717C.1.pep
NSKLHYCSLALPIRADHNIMCVTRDTIVARLKHCANRLTLPPLPLQFHYEQPLLVDLLV

SEQ ID NO: 301146 - protein, 166 aa, Zea mays
  Clone ID: MRT4577_37718C.1.pep
NAKTNFPVPRSGTGELLAPAVPAAREARGGGGGGTSLSQILSAKLRRCCKTPSPSLTCLRLDPEKSHIGVWQKRAGARADSSWVMTVELNKDAPPPPSSGEEPAPSYGGAATTSTSTPTSSTITAGSPPPEMMDDEESVALQMIEELLGSHGMMLQVQGAAGSLVI

SEQ ID NO: 301147 - protein, 58 aa, Zea mays
  Clone ID: MRT4577_37719C.1.pep
PRPLPSGVVCVRARRVAALCAPRWARSVPGAAFSAVPLACGVLSVGSLRLAGSFRSVL

SEQ ID NO: 301148 - protein, 48 aa, Zea mays
  Clone ID: MRT4577_3771C.1.pep
LVSFPNFRQNVMALALFHNINRHACIITCLPKFVQLYLVSVIEFAQCL

SEQ ID NO: 301149 - protein, 58 aa, Zea mays
  unsure (1)..(58): unsure at all Xaa locations
  Clone ID: MRT4577_37720C.1.pep
DDWSDKQLXNYLYDYYLVFYCPFHIXLFTHVPVLLNFFXHLKLININFCSVYLLYSQF

SEQ ID NO: 301150 - protein, 61 aa, Zea mays
  Clone ID: MRT4577_37721C.1.pep
LYNLFLFNPCSICFKPIRIGRDRKDQIFYDFSYQFALCISLENMKLFSSELTNEEKVLIAA

SEQ ID NO: 301151 - protein, 113 aa, Zea mays
  unsure (1)..(113): unsure at all Xaa locations
  Clone ID: MRT4577_37722C.1.pep
DSSIMCMLPIASLMERMLNNKHYTTKVISAIAKANHGAXLXTLTHVQINTKRTICSSLAVFTTWIQQITIASSDKQNNIVLLXMLNKTEPIQSIRLIIHVPYEXYYLNGLSSH

SEQ ID NO: 301152 - protein, 117 aa, Zea mays
  unsure (1)..(117): unsure at all Xaa locations
  Clone ID: MRT4577_37723C.1.pep
VGERAWGTVLGDHPGGMMRVTEXLPKAPLGSGKNGDRTSTITXAHIFGSLEGLKLQXALDRSSVYILDHHEHYMSLVIEGNKLNDNFVYATRTLLLLRGDXTLAPVAIEMSLPELRD

SEQ ID NO: 301153 - protein, 172 aa, Zea mays
  unsure (1)..(172): unsure at all Xaa locations
  Clone ID: MRT4577_37724C.1.pep
VFPPAGSSLSSKKPRPGEKKKSSDGREAKSFPTAVISLLLALILTPALHILLVLFGAPFLTHVPHTFLCCAHIALLAIYPVFYXSRFRSRSPAGRCWCVCSFRSDIWRXFLGTVVGAWLGSVPIPLDWDREWQKWPVTIVVGAYLGYIVGSQLLGTVFYGRRWEVTPEMKEE

SEQ ID NO: 301154 - protein, 102 aa, Zea mays
  unsure (1)..(102): unsure at all Xaa locations
  Clone ID: MRT4577_37725C.1.pep
PVFVFKFFFFFIFFSFFFLFFFFFFYHYSSFSYSRKHPPTSFFLHLSAPSRGGFNFSFSTIHYNFNSKTTPXNITXLTFFIPPXIQNPYLNXXXYTPSFLHT

SEQ ID NO: 301155 - protein, 53 aa, Zea mays
  Clone ID: MRT4577_37726C.1.pep
GNGALHELLNDCLICPHITGYKRMCYIANISNCECYCHGMVWNLGENARATCW

SEQ ID NO: 301156 - protein, 123 aa, Zea mays
  unsure (1)..(123): unsure at all Xaa locations
  Clone ID: MRT4577_37727C.1.pep
MSFFFCGKPQNIGGDQIQGGELSNLAVYSKQHQLPMGHLMTQNIRAHHLQQLELANLAVYSNKQQHLTFNQLAALNSVAYLHNQQLLPFRQLATAYHRXYLTFNQLATLNFNAYSHQHQLLPF

SEQ ID NO: 301157 - protein, 104 aa, Zea mays
  Clone ID: MRT4577_37728C.1.pep
GPPEPPGGGRGHGGLREGAPARLPPWARGAQGCQDPGGRAPPARVFPVFAFSVPPPRHGSWLGVCFPSFPLETRGGIVYLMFLFMPVRAVKFPPEKKKKRKKLA

SEQ ID NO: 301158 - protein, 82 aa, Zea mays
  Clone ID: MRT4577_37729C.1.pep
NEKKKVLFQKKKKKKKKKKKKKKKKKKKKKKKKKKKKNKKKKKKPKKKKKKKKKNFFTFPGGPLKREIFEKFQKMGGGWRFN

SEQ ID NO: 301159 - protein, 55 aa, Zea mays
  Clone ID: MRT4577_3772C.1.pep
LPVKYPPGSCRPDVNPDVFNFNQPNYGCVKNNQKNPSPRIRINPLKRLPVWNLSQ

SEQ ID NO: 301160 - protein, 371 aa, Zea mays
  unsure (1)..(371): unsure at all Xaa locations
  Clone ID: MRT4577_37730C.1.pep
NFPLPQFATLAIGDEGLGARILLPRGDRSSEIDLPQVRRTQLYSQFFLCSLESSHGRVVAVTILLLIVASCLKSSRXNSIVLSGLSGSGKTTIYYQLRDGSSHQGTVTSMEENSDTFVLHSEQERKDKVKPVHIVDVPGHARLKPKLDEVLPKAAGVVFVVDAQDFLSSXSCCRVNFVPPVLLFSKYYWCLFHLLLLSFVVSXINSVIRGPFQTETADITLYEYFSIVTVCVTRRFHCSQDCRAXSVSSFISVVNISXILSSFCRYLYDILTKASVVKKRIPVLIFCNKTDKVTAHSKEFIKKQLEKELNKLRESRNAISSADISDEVQLGVPGEAFNFSQCQNKVAVAEGAGSTGNVLAVEQFIREHVRA

SEQ ID NO: 301161 - protein, 213 aa, Zea mays
  Clone ID: MRT4577_37731C.1.pep
PASAPRPPRVRPRVRPRVRSGKTTIYYQLRDGSSHQGTVTSMEENSDTFVLHSEQERKGKVKPVHIIDVPGHARLKPKLDEVLPKAAAVVFVVDAQDFLSSMQAAAEYLYDILTKATVVKKRVPVLIFCNKTDKVTAHSKEFIKKQLEKELNKLRESRNAVSSADISDEVQLGVPGEAFNFSQCQNKVAVAEGAGSTGNVLAVEQFIREHVRA

SEQ ID NO: 301162 - protein, 256 aa, Zea mays
  Clone ID: MRT4577_37732C.1.pep
MDEWIRQTEVWVHQTDSWIRQQPPEQIYVAAAVVAVTILLLIVASCLKSSRPNTIVLSGLSGSGKTTIYYQLRDGSSHQGTVTSMEENSDTFVLHSEQERKDKVKPVHIIDVPGHARLKPKLDEVLPKAAAVVFVVDAQDFLSSMQAAAEYLYDILTKATVVKKKVPVLIFCNKTDKVTAHSKEFIKKQLEKELNKLRESRNAVSSADISDEVQLGVPGEAFNFSQCQNKVAVAEGAGLTGDVSAVEQFIREHVKA

SEQ ID NO: 301163 - protein, 107 aa, Zea mays
  Clone ID: MRT4577_37733C.1.pep
GTATQRPSPTGGERRVAQPQTLASSAPAAQSSTTARLLLWRERDCSCSAAAPGLYALRCQLPRPLRRRPRRATAGQRRTPLHATLCSATSPNQSCRAGASSHVCLLP

SEQ ID NO: 301164 - protein, 148 aa, Zea mays
  Clone ID: MRT4577_37734C.1.pep
TECYHGEFVSVVHRQLPFIIRMLRFAAEFSATRLSLAICSPPPPLGASTLQLRKGACRTQRRMRPRRTAPSCCWGSSRTWQRPLGPDAGAELQWRRSSAWAEHGRGGARHRRMGRGGRSDMGASRPGERLCAWSRSPATTMASYPMRR

SEQ ID NO: 301165 - protein, 165 aa, Zea mays
  unsure (1)..(165): unsure at all Xaa locations
  Clone ID: MRT4577_37735C.1.pep
GRVYDPSASSPASMSATALLQKAAEMGATAGGYGAGAGFSTVGFGPMMAGPSVMGLFGPVKTPAGALARGVXGMPLGPTQLVXGLDVGRLLPGQHHLYGSSHGHGVGIGSMTRAIGSLMHGGGQQAEQHRRPDDDTRVVDYLGVDDQRTCFSGVSPFGPHIGPWA

SEQ ID NO: 301166 - protein, 256 aa, Zea mays
  Clone ID: MRT4577_37736C.1.pep
MDEWIRQAEVWVRQSESWIRQQPPEQIYVAATVVAVTILLLIVASYLKSSKPSTIVLSGLSGSGKTTIFYQLRDGSSHQGTVTSMEENSDTFVLHSEQERKGKVKPVHIVDVPGHARLKPKLDEVLPKAAGVVFIVDAQDFLSSMQAAAEYLYDILTKATVVKKRIPVLIFCNKTDKVTAHSKEFIKKQLEKELNKLRESRNAISSADISDEVQLGVPGEAFNFSQCQNKVAVAEGAGSTGNVLAVEQFIREHVRA

SEQ ID NO: 301167 - protein, 69 aa, Zea mays
  Clone ID: MRT4577_37737C.1.pep
LYLGPPCPRRAGRGDPRVRAEGRRRRASQPAKAVAYMHIYYRETCKEGRKKEAKHSRAREESIGRVDAR

SEQ ID NO: 301168 - protein, 143 aa, Zea mays
  unsure (1)..(143): unsure at all Xaa locations
  Clone ID: MRT4577_37738C.1.pep
FTPAFYPRLVDXLQCDIHCTVHKSXLRSIPLDRGSALQXLNRRLTIGRTSPASEVRPPXKASQGAVPCPSPGRNTWARSRRASRSSIPSATYGFGSGTPKPNPXRQSFCRRSXTFMTTCVAYIATIVTQADPLXPDPVESTGA

SEQ ID NO: 301169 - protein, 138 aa, Zea mays
  unsure (1)..(138): unsure at all Xaa locations
  Clone ID: MRT4577_37739C.1.pep
ARRGCLRVWAVRSPLGWCGRAGXAPWRGXWAGSPRAPAPRXPGPRSXAAVPPPAXPXARSPALXGXVXSSVXPRXRXPPPPCRPPPPRPPAPSPWPPVLPPXGXRAXXGFGXXGXPRPPXCXGPPLPXGSCPPPLPFP

SEQ ID NO: 301170 - protein, 70 aa, Zea mays
  Clone ID: MRT4577_3773C.1.pep
LCRRNVLWPWVVCPLQFKTTYWLLHCEMVTGSLCKLGNPGVVFNPTGSLREFSFKVLINAYVLVKFNSKA

SEQ ID NO: 301171 - protein, 54 aa, Zea mays
  Clone ID: MRT4577_37740C.1.pep
NPPKKKNRKKSPSIMVNINSRLLAERGIPPFLGRIIPGPKLLRNYPTVSGKKNA

SEQ ID NO: 301172 - protein, 33 aa, Zea mays
  Clone ID: MRT4577_37741C.1.pep
GIGRITISGPGVLHNQLAWQIRTTWMGKTDTGS

SEQ ID NO: 301173 - protein, 85 aa, Zea mays
  unsure (1)..(85): unsure at all Xaa locations
  Clone ID: MRT4577_37742C.1.pep
THQSKRTINNLTSLATKILSLPALLALIASAIYSSIIPQCSLAPSYIILQYRLPITYMALEHPCMQAXYMLQHAIDGSVLQQPIV

SEQ ID NO: 301174 - protein, 62 aa, Zea mays
  Clone ID: MRT4577_37743C.1.pep
KTIVSIMIGRFLSIMATMLTRRLVDLLGRASDVEDDLRGKKKPNIHHLKVKACPWTDGHATI

SEQ ID NO: 301175 - protein, 65 aa, Zea mays
  Clone ID: MRT4577_37744C.1.pep
QTQTPGFGPRLKRAIKKLRVLMLRKGALIRRETYPTGSLPGQWCQPFFSQGFFFFGRKSSMGPGG

SEQ ID NO: 301176 - protein, 81 aa, Zea mays
  Clone ID: MRT4577_37745C.1.pep
CTSQTPDVALLNHSTLNSLGAGHNPLKNTSITVLPNLPSNQNDQGIACDRPMTRCFEKVAFYHFTILIMNRNGNSSRHQQL

SEQ ID NO: 301177 - protein, 92 aa, Zea mays
  unsure (1)..(92): unsure at all Xaa locations
  Clone ID: MRT4577_37746C.1.pep
FDENAKIGQATVASGIPAGWMGLDCGPESSKXYAEAVTRAKQIVWNGPVGVFEWEAFARGTKALMDEVVKATSRGCITIIGGGDTATCCAKW

SEQ ID NO: 301178 - protein, 145 aa, Zea mays
  unsure (1)..(145): unsure at all Xaa locations
  Clone ID: MRT4577_37747C.1.pep
FLVGPIPAQFQAVVGISLLEIPSPPPPPKGFLGQGAPKEWTLAPKAQGGFKGFGGGLPKIKKRVGAINKDPRFKNRXGXAQFPYPLFFPNPSAKGENPGVPPKGIPPSISFLFDRVLARVSPKKKKQPGFPVCPPFLFFQKKKGG

SEQ ID NO: 301179 - protein, 68 aa, Zea mays
  unsure (1)..(68): unsure at all Xaa locations
  Clone ID: MRT4577_37748C.1.pep
WARCRTRRSGRTCAFSRPRGLPEXLLFLLFRVVLRHRLQPPVLTFDAAAATASASRRLLTQHVAGRVA

SEQ ID NO: 301180 - protein, 231 aa, Zea mays
  Clone ID: MRT4577_37749C.1.pep
MELLSVSSLLSNGFGESLERLERLIRSYREQRGHGPLNWNLDPPMHPSNGPNANQEQDGKPESQQSQAPVNRPALVIPPPPLPPRPPLWHSELRHNNWSSRHREWDAINDLRADMGRLQQGMSSMQRMLEACMDMQLELQRSVRQEVSAALNRFAGPEGFSMDLSDDGSKCNQVRKGTCCICCDTQIDSLLYRCGHMCTCSKCANELVRSGGKCPLCRAPIVEVVRAYSVL

SEQ ID NO: 301181 - protein, 57 aa, Zea mays
  Clone ID: MRT4577_3774C.1.pep
TTMDADLSLFLSMQQHTHRPGRVSNPEPHHIKCAGPIRHHLTFAYVQTYTSIKPNFN

SEQ ID NO: 301182 - protein, 85 aa, Zea mays
  Clone ID: MRT4577_37750C.1.pep
KKNFIKFATEIYIKEPKPFDGAFLKLGFKEKIKGFKIIPKGANFFFIRSTIKYLIFNAPPELKFMVTPPLLVKTPQKFSNFFKPK

SEQ ID NO: 301183 - protein, 67 aa, Zea mays
  unsure (1)..(67): unsure at all Xaa locations
  Clone ID: MRT4577_37751C.1.pep
MVHVNFYRNXWKTFKKPWRTYEKERRDAEPTLAGEYRLRCQRQLRRVHNELSRNRNAARDVFTLDEK

SEQ ID NO: 301184 - protein, 62 aa, Zea mays
  Clone ID: MRT4577_37752C.1.pep
YKNENGITFPRLNIIVHENRVYLDIIIDTSYWSLKADLTDWLDRRGLNMHTAALGRLPGCTY

SEQ ID NO: 301185 - protein, 42 aa, Zea mays
  Clone ID: MRT4577_37753C.1.pep
KNHVRVDGLKVEKGKVQSPKKAHLQQPTLMVERGNNTPLLLH

SEQ ID NO: 301186 - protein, 64 aa, Zea mays
  Clone ID: MRT4577_37754C.1.pep
KTTFFGGTPIFPRKFSSPSGTWKTGKFTSTSSGLASLLFHPPGEERKNRGPKPIPFSPFVKGGL

SEQ ID NO: 301187 - protein, 91 aa, Zea mays
  unsure (1)..(91): unsure at all Xaa locations
  Clone ID: MRT4577_37755C.1.pep
SAGLVSVGPASFLALRRLLPFSLRSLPXAGALLGWGPPPPPPVFCFGGGAGVRAGGPVIGGALFWXGLWAGAALVSSPFFFSPFFFFFLVI

SEQ ID NO: 301188 - protein, 208 aa, Zea mays
  Clone ID: MRT4577_37756C.1.pep
MFGADGRPAIGTAAGKSWHFSRTMEELVHDLVSALEESSEQARGGFAETGEHSRNLSCPLKRQARKRRGRKRRSYNVHHPWETGHCLSEGSDSSLEEPSKDYREKHSNNKKDRSDSDDQMLVAKRRPSSNLSSSVRGKRLLWHESDFAVDSLGNRTLRRRRKVKRMAVDLPQDVSSKRTMTQLPEGCRDQDMDHDRASQYPEFTREES

SEQ ID NO: 301189 - protein, 44 aa, Zea mays
  Clone ID: MRT4577_37758C.1.pep
PGGGEGCIRRFREHNEQDGSGSRGYRRGSGGAGGGTGSAGINEL

SEQ ID NO: 301190 - protein, 84 aa, Zea mays
  Clone ID: MRT4577_37759C.1.pep
LRTGSPGTLLVWNQWTRLDCPYNRKPLALYKHNTTAHGQTYHNRAQDLMKTNPKLIAAFALKEMKPLLFLQKTSCDLCVNVHTI

SEQ ID NO: 301191 - protein, 83 aa, Zea mays
  Clone ID: MRT4577_3775C.1.pep
LGTWRRCTCTENASATIASLALPQDDRPSRLPAAASMSSPKTTTEYDNSYTGLRRTTWPRTKFRQSGAVGCDAQEVYHPLASL

SEQ ID NO: 301192 - protein, 86 aa, Zea mays
  Clone ID: MRT4577_37760C.1.pep
IKFKWTTLCVKPLISEFARLIRNRLHYCFPFSTTRRGRPGTVTSKTDSLPRTLPNPRSRHLLGRRAVATTSRGYSLTTRTVRFPRV

SEQ ID NO: 301193 - protein, 71 aa, Zea mays
  Clone ID: MRT4577_37762C.1.pep
LHAVSGQQDATRPTPACDPLLTRHPEMDTDDDFYDSSPADYDDAGRSKVFGGGANQARTRTGWRERITRKN

SEQ ID NO: 301194 - protein, 76 aa, Zea mays
  Clone ID: MRT4577_37765C.1.pep
PAFNTNHNQVTRNLDNTRLVLLDDDHLTSILVLAPDEGGSSISITMRSNPRLGSTWLVFRITRLIIVPHGMHNAHV

SEQ ID NO: 301195 - protein, 606 aa, Zea mays
  Clone ID: MRT4577_37766C.1.pep
MAANLKWAPVLALLVVVAAMVGTTSAGNIAVYWGQNGNEGSLADACNSGLYAYVNIAFLTTFGNGQTPVLNLAGHCDPGSGSCTGQSRDIQTCQALGIKVLLSIGGASGTYIGSSRPAGLIVNPATSFAKTPLQPVLPLLESVPSEFHATVPYLLSFVMGDPLKMAAVSIENNLSPPETLQKLSDSLTSMLPLLSELSDIIPRDTLLWKLKLLKAGAAYANSRLHAVQAEVLLLASGKDNLLPSGEEADRLFKALKNCRVRYFKDNGHTLLLEDGVNLLTVIKGANMYRRGRQRDSVTDYLPPTLSEFRQTFDVDHRLFHLALSPVMMSTLKDGKIVRGLAGVPDKGPVLFVGYHALMGIELSPLYEEFLREKRTVVRGMAHPFLFGKKFESSRQETSRFDTVSMYGGLPVTPINMYRLFQRNQFVLLYPGGVREALHRKGEEYKLFWPDQPEFVRMAARFGVTIIPFGCVGEDDVLELVLDYNDQKNIPGLREWIQSINKEAERVRDSVKGEDGNQDMYLPALLPKVPGRFYYLFGQPIEMKGMGNLVRDRKSANEVYLRIKSQVEEIMSYLKRKREEDPYRSLPQRALYQATWGASAQVPTFEP

SEQ ID NO: 301196 - protein, 43 aa, Zea mays
  Clone ID: MRT4577_37767C.1.pep
IDNLVSRLHNVLDQAYVTAWEHSIRCLASSMARPKLTPPKKRG

SEQ ID NO: 301197 - protein, 174 aa, Zea mays
  unsure (1)..(174): unsure at all Xaa locations
  Clone ID: MRT4577_37768C.1.pep
MAANLKWAPVLALLVVVAAMVGTTSAGNIAVYWGQNGNEGSLADACNSGLYAYVNIAFLTTFGNGQTPVLNLAGHCDPGSGSCTGQSSDIQTCQSLGIKVLLPIGGASGSYGLSSTDDANSVADYLWDNFLGGSGSSRPLGAAVLDGIDFDIENGQSALQTGQFDNVWIQFYXN

SEQ ID NO: 301198 - protein, 188 aa, Zea mays
  unsure (1)..(188): unsure at all Xaa locations
  Clone ID: MRT4577_37769C.1.pep
MAIALLPSVRLLPQSLSRRPPPTSSPLSVRRPRQRALPLPRVHCRAGRTSDPLAAAREAAAFWAGKLAGAVPWKAAVSGVVALAVSFTCLVGLANARTGVNKPELLPKEFTTVIDVAGFLSSGQENRLRQEIEDLEKDTGYKLRVLAQNYPDTPGLAIKDFWQVDERTXIVFVADPTXWERTPQLKLL

SEQ ID NO: 301199 - protein, 101 aa, Zea mays
  Clone ID: MRT4577_3776C.1.pep
SEGALNLVRNLLGWSAPVHAGRIRAVVTPLCDLVTGEFMLFVSYLSCGLALPISSFFLLLLEELGLQLQHLTPHSILQASIFVHLSEMFVGVAPCTSLFRH

SEQ ID NO: 301200 - protein, 183 aa, Zea mays
  unsure (1)..(183): unsure at all Xaa locations
  Clone ID: MRT4577_37770C.1.pep
ELSDIIPRDTLLWKLKLLKAGAAYANSRLHAVQAEVLLLAXPWLQYLLSILHSFCSPIRRLLASCLGPEHRSIMLPVFSGKDNLLPSGEEADRLFKALKNCRVRYFKDNGHTLLLEDGVNLLTVIKGANMYRRGRQRDSVTDYLPPTLSEFRQTFDVDHRLFHLALXSPVMMSTLKDGKIVRG

SEQ ID NO: 301201 - protein, 244 aa, Zea mays
  Clone ID: MRT4577_37771C.1.pep
MAIALLPSVRLLPQSLSRRPPPTSSPLSVRRPRPRALPLPRVHCRAGRTPDPLTAAREAAAFWAGKLAGAVPWKAAVSGVVALAVSFTCLVGLANARTGVNKPELLPKEFTTVIDVAGFLSSGQENRLRQEIEDLEKDTGYKLRVLAQNYPDTPGLAIKDFWQVDERTIVFVADPTFGNIINFNIGPLVDLDVPRSFWSQVSGKYGNMFYWKEKGEDASIEAAVTAISRCLRNPAGTNNCSEVL

SEQ ID NO: 301202 - protein, 175 aa, Zea mays
  unsure (1)..(175): unsure at all Xaa locations
  Clone ID: MRT4577_37772C.1.pep
MAANLKRAPVLALVVGVAAMVGTTSAGNIAGYWGQNGNERILSDACNSGLYAYVNIVFLTTFGSGQTPVLNLGGHXDPGSGSCTGQSSDIQTCQSLGIKVLLSIGGASSRYSLSSTDDANSVGDYLWDNFLGGRGSSRPLGAGVLDGIDFHIEDGQSVHYDEPANALKGKGSVLL

SEQ ID NO: 301203 - protein, 89 aa, Zea mays
  Clone ID: MRT4577_37773C.1.pep
MTIRRSSQLKKKYAAMQTNMAPITIRNIETPNQLKQDFTNTTNITPMSNTTFHTPKFGSSSNSSTYPLDKSHSATQDTVTPKVNMLKDT

SEQ ID NO: 301204 - protein, 251 aa, Zea mays
  unsure (1)..(251): unsure at all Xaa locations
  Clone ID: MRT4577_37774C.1.pep
MAANLKWAPVLALLVVVAAMVGTTSAGNIAVYWGQNGNEGSLADACNSGLYAYVNIAFLTTFGNGQTPVLNLAGHCDPGSGSCTGQSSDIQTCQSLGIKVLLSIGGASGSYGLSSTDDANSVADYLWDNFLGXPQCPYPDASLGPALQTGQFDNVWIQFYNNPGCAYANGDDTNLVNAWNTWTSSITAGSFYLGVPASPQAAGSGXTSTPAXLTGTVIPAIRGIGNYGGIMVWDRFNDVQNNYSSQVKGSV

SEQ ID NO: 301205 - protein, 511 aa, Zea mays
  Clone ID: MRT4577_37775C.1.pep
IVEHEEMRRFVKSLNPMIHADAVSHNDIEGHCCALFEKEKAKLKDQLTLSSRRVSLSASIWTPEGAEPTVNYLCLTAHFIDKNWKVHRMIIKFGMFRSSPTDVERMVHHKEACVPESECGAYNVIWDAIRDWNLGQEVLSLTSVGEVRNALSSSKLKEILVEKKCLPIRGKLYDVACVDDVLNTIASKVQQNIIHLVGDMVTEFFVAHTSSSLNQQQLMEVISQMSLKCPQEDAKWWYKFYFRLEVFLHFNKPFPFEEAASPEHVIVAESICKILRTFYRVIEVISASSSPTANMYFNEIWKVRTVLQEEASSEHAEITAMVAEMQETFNEYWQHSYLWLCIPVILDPRFKFGFIEFRLKRAFGLKSASYLSGIRETLQELFNEYCSPVDQPNVRVPKSESFSLDDNDSFEDWDQHLNEQASSQKSTELDNYLADGLVPRKDDFDNLNWWMCHATKYPTLAAIVQDILAMPASAVPSEAAFTSSGPVIPKHHSMLSIKTIEALVCTRDWMR

SEQ ID NO: 301206 - protein, 67 aa, Zea mays
  unsure (1)..(67): unsure at all Xaa locations
  Clone ID: MRT4577_37776C.1.pep
PNPSPAXIPTAFGESTASDPAGWHNAASYGTAVRRRSAIAAAASGNAREASTAVAAAPGVLSPYATP

SEQ ID NO: 301207 - protein, 247 aa, Zea mays
  unsure (1)..(247): unsure at all Xaa locations
  Clone ID: MRT4577_37777C.1.pep
MAANLKWAPVLALVVVVAAMVGTTSAGNIAVYWGQNGNEGSLADACNSGLYAYVNIAFLTTFGNGQTPVLNLAGHCDPGSGSCTGQSSDIQTXAVLDGIDFDIENGQSAHYDDLANALKGKGSVLLTAAPQCPYPDASLGPALQTGQFDNVWIQFYNNPGCAYANGDDTNLVNAWNTWTSSITAGSFYLGVPASPQAAGSGXTSTPAXLTGTVIPAIRGIGNYGGIMVWDRFNDVQNNYSSQVKGSV

SEQ ID NO: 301208 - protein, 108 aa, Zea mays
  Clone ID: MRT4577_37778C.1.pep
NLSKASRTHLQLHRPTVHTWNQVRYTYQISEGLFRTQEFHRIHHPILAGDWIPLVGSQDHPLTKLHPIIGCSEFRVHNLGCQVFWASSSTSCIQFIGKDARNRSSRAI

SEQ ID NO: 301209 - protein, 84 aa, Zea mays
  unsure (1)..(84): unsure at all Xaa locations
  Clone ID: MRT4577_37779C.1.pep
VGVXXCLFCWGVGLPXRAPXCGSLLALLFPGRLXXXLGLFSGXVSFAAVAVSFAPSXAALGPFFGAAAXLSLPGGWGPCCPRCV

SEQ ID NO: 301210 - protein, 58 aa, Zea mays
  Clone ID: MRT4577_3777C.1.pep
FSFSFLGLQAEGPTSLFEFAYRPAAYYVVLYKALRSIKIRIFGAFSKKNVKPKNILIF

SEQ ID NO: 301211 - protein, 79 aa, Zea mays
  Clone ID: MRT4577_37780C.1.pep
MAAGPPSSVRAERVLRAACAAMAAAGALLLGFSAQTKTVLFIQKKAVPKDVQALWVLIVAAAAAAAYHVAQLARCLCME

SEQ ID NO: 301212 - protein, 119 aa, Zea mays
  unsure (1)..(119): unsure at all Xaa locations
  Clone ID: MRT4577_37781C.1.pep
MAASGEGAXLPTTTGGEDAHRPRLSYLYKPPIVNYYYSQGYPMKPELIQMDHSIVVXYDLQRLHKLXRSYPNSEAYIRRLHSDDYVSFVAYATGNAGVLDPRANNHFNVREDCTMFDGL

SEQ ID NO: 301213 - protein, 94 aa, Zea mays
  Clone ID: MRT4577_37782C.1.pep
MVAGRVKAAMGFQRSPATPKPGASSSSSSSRKAPPPPLQLPGSAALPETPRRRSSGSPAPPGSGSKGGAGAPARRGAGGAPGPGRGGGGGAPRA

SEQ ID NO: 301214 - protein, 59 aa, Zea mays
  Clone ID: MRT4577_37783C.1.pep
VVLSELSSSGAGGPFLTRRVAGGLAALYLARTHPQCVWYNRTDANWLSRSRSRAADDAI

SEQ ID NO: 301215 - protein, 149 aa, Zea mays
  Clone ID: MRT4577_37784C.1.pep
MVVAEMPQNGSAGKGPRARAPTLTHVSCYFVYSMRNSSLATQTLARIESSSSFFFFSFSENENNGAAAAATGEAEGFGFRSGGKTTSEHAEAGEAAGPEQLTKLGSRVLHALSCARRTTTGGSALDGCIEMPPCEACISHALRLTPPTC

SEQ ID NO: 301216 - protein, 117 aa, Zea mays
  unsure (1)..(117): unsure at all Xaa locations
  Clone ID: MRT4577_37785C.1.pep
GGFPGTGTGTPGHGAGGREGEAAXEXEDRXTXGGPAXATDDHXXHNAXSTDGEXXEXKNNXXRETQGARGXGXDTXXTEEAKRNAXEGKNGKEPDGRNNTRNEAQXRGGPGGGGGGG

SEQ ID NO: 301217 - protein, 69 aa, Zea mays
  Clone ID: MRT4577_37786C.1.pep
IQTPPLFGHFQSFPEGAPKDFFLWGGGIFSNSWGGRGDSKTNPFCVRLTWYIGRANQSNIIYFFLKKGS

SEQ ID NO: 301218 - protein, 36 aa, Zea mays
  Clone ID: MRT4577_37787C.1.pep
KMTTSFMSVSTTMKCDTCQLNLALWMKGTGCCFIQP

SEQ ID NO: 301219 - protein, 159 aa, Zea mays
  unsure (1)..(159): unsure at all Xaa locations
  Clone ID: MRT4577_37788C.1.pep
MRCSSLPVLLDFYHLIPHLAHXATTSSPHPPPDAGASPGTAFLKCIHQXVRSSTCPDIXLSTPGRMKAAIVHISTVILDGEAPETSPDPRVVYESLYAARAHXDLXDNNVPVLFIGDXIRFXPHLIHAFKPNPWSHVNEYWRVFDFLSHLPERLHTFFF

SEQ ID NO: 301220 - protein, 108 aa, Zea mays
  Clone ID: MRT4577_37789C.1.pep
MGRAPCCEKMGLKKGPWTPEEDKVLVAHIQSFGHSNWRALPKQAGLLRCGKSCRLRWINYLRPDIKRGNFSKEEEDAIISLHEQLGNRYFLLTPLFFPFVLALLSSRV

SEQ ID NO: 301221 - protein, 69 aa, Zea mays
  unsure (1)..(69): unsure at all Xaa locations
  Clone ID: MRT4577_3778C.1.pep
MGRGRLXAKLIGNNITLLHTLXKRRNVLLKKACELFVLCDAQALLIVYSNRGKLYEFCHGPILTRTLVR

SEQ ID NO: 301222 - protein, 63 aa, Zea mays
  Clone ID: MRT4577_37790C.1.pep
ECTLLSVDGPGVSPALLAGAAGPSRASQALLRMKVRVMGASPRMRQRAGRWRCPLLQCGAEFT

SEQ ID NO: 301223 - protein, 126 aa, Zea mays
  unsure (1)..(126): unsure at all Xaa locations
  Clone ID: MRT4577_37791C.1.pep
GELRALSNLWGAKNPREKSLLGGPSFRXVIGAQPRVGPIKKFGPXGPIPAKGRARILKEMAPPKKGPPRGGWAKSPQNWPFSKTQVPNLGTTPPFFFFKNSKPFVVVVFPPGSVFFSFGKKSSPPF

SEQ ID NO: 301224 - protein, 131 aa, Zea mays
  Clone ID: MRT4577_37792C.1.pep
GDPQIYVFTKIPRFACRTKYPAHYFDHYGWQNKNKSLFPLEKGGAHPGGGVKRQREVAQLEQKAQHVGGATNPFTHPLCGLVHNSQQCSTKLWRCKKGNFQPPPFKFKPAPGLGWPSKPKKKGPLEPAPSI

SEQ ID NO: 301225 - protein, 108 aa, Zea mays
  unsure (1)..(108): unsure at all Xaa locations
  Clone ID: MRT4577_37793C.1.pep
DSLCTATPAGSITASNAPPATSTPRPSPFTPPTQRQCPPSPRTTTTKXPCTITTTTKQHTTTPTTTTSRMWPMRQSALTYSMGPSVRILVGFPIPLFARNISTKTVFI

SEQ ID NO: 301226 - protein, 151 aa, Zea mays
  unsure (1)..(151): unsure at all Xaa locations
  Clone ID: MRT4577_37794C.1.pep
QEPGRVVCFKLAFVXKVRAIRLLGHASFLLGGLPPGPGEKGGKEFALYVGRTVNPGNXAWLLGLGAFXVSPGLFLWGLGPKPMLAFRGFMLGLLFFLDPPKRAGPGPGAGQQRAGPPRKESPVWSPSPSFQKSPLLKTRFPKPIIYKIRFG

SEQ ID NO: 301227 - protein, 95 aa, Zea mays
  unsure (1)..(95): unsure at all Xaa locations
  Clone ID: MRT4577_37795C.1.pep
MPPNFISLPLFLQHLSWXNPSXTQLNILAPHPFFSIFFNTQKAPTLRPSKQFPILNTHCYSPFIRPLTPPLLALSRNVTGTLPXALPPNPFTFFP

SEQ ID NO: 301228 - protein, 80 aa, Zea mays
  Clone ID: MRT4577_37796C.1.pep
RVSDHFSPLFRRKVFFPWSPGEGLAKLDFPQPKTTFNPLFLESPQYQDPPPPQEESQAQEGVPPLSFLGEGFFFFNPFGP

SEQ ID NO: 301229 - protein, 361 aa, Zea mays
  unsure (1)..(361): unsure at all Xaa locations
  Clone ID: MRT4577_37797C.1.pep
LKGHEVRLLSRKXLPSLDLPKVRKNKFIEILPINVGCLGACTYCKTKHARGHLGSYTIDSLVDRVKTVVSEGVREIWLSSEDTGAYGRDIGTNLPNLLNAIVAELPVDQSTMLRIGMTNPPFILEHLKEIAAVLCHPCVYSFLHVPVQSGSDSVLKAMNREYTVGEFRKVVDTLCELVPGMQIATDIICGFPGETDEDFSETVNLVKEYQFPQVHISQFYPRPGTPAARMKKVPSNEVKKRSRELTSVFESFSPYQGMEGKVEKIWITEIASDGVHLVGHTKGYIQVLVTAPDSMLGTSADAKITSVGRWSVFGVVVEGSVAVIEAPIQTSAELQEEHVQNQVEEAGCCCHRLLWRLRVLQ

SEQ ID NO: 301230 - protein, 712 aa, Zea mays
  unsure (1)..(712): unsure at all Xaa locations
  Clone ID: MRT4577_37798C.1.pep
MEDIEDVLGAAGLSGGGAPPGLRLPLAAVAVKPKRRSSRVAQAPPQPEAGIPGTQTIYVKTFGCSHNQSDSEYMSGQLSAFGYAITEDPEGADLWLINTCTVKNPSQSAMTTLISKCKNANKPLVVAGCVPQGSQGLKELEGISIIGVQQIDRVVEVVEETLKGHEVRLLSRKTLPSLDLPKVRKNKFIEILPINVGCLGACTYCKTKHARGHLGSYTIDSLVDRVKTVVSEGVREIWLSSEDTGAYGRDIGTNLPNLLNAIVAELPVDQSTMLRIGMTNPPFILEHLKEIAAVLCHPCVYSFLHVPVQSGSDSVLKXSLTRTLVLISFLAANAQHEXFVSNLYPVPSPRSNSVYDCTYKAMNREYTVGEFRKVVDTLCELVRGMQIAADIFCEFPXAKQVLSLAIRSELFFYEYIXNIXNXATKDVAANSLHXPTSHXGETDEDFSETVSLVKEYQFPQVHISQFYPRPGTPAARMKKVPSNEVKKRSRELTSVFESFSPYQGMEGKVEKIWITEIASDGVHLVGHTKGYIQVLVTAPDSMLGTSADAKITSVGRWSVFGVVVEGSVAVIEAPIQTSAELQEEHVQNQVEEAGCCATDSCGACACSNEAQPCGPDRCGDAPRAPQTCGGDVVTTRQEALQPTLVRRSVDGTTKGSDSTAAHSAGKEQRVEVVTRRGVDIDTVLWCGLAASFAVTVALLALLTSKILSTTSH

SEQ ID NO: 301231 - protein, 117 aa, Zea mays
  Clone ID: MRT4577_37799C.1.pep
MYVRAPRGLPRSSRACKSAMRGLDEEFLGGAHTAVVIRRGRQLGARGVEEVVGRPYSEAAAEAGRVQGLRRGGHVHGADPEGLALDDGPLYRPRAPVLNLDPQPSTCRCCLGVLLRS

SEQ ID NO: 301232 - protein, 95 aa, Zea mays
  Clone ID: MRT4577_3779C.1.pep
PTPGGEGRVRPPTKTKKPPRGKGGAPVDRKNTRKGEANPQILLPGTSTTKGTLTSFLFRPWRGVLTNPIPTTSKSGGIPGSPEKSSMAWPSPGAK

SEQ ID NO: 301233 - protein, 70 aa, Zea mays
  unsure (1)..(70): unsure at all Xaa locations
  Clone ID: MRT4577_377C.1.pep
RPTLPRWQHGKTGKXSTSPFLRVQVGGNLVFMEKGRSVSLPQSLEVRHSMFEEIHQIMKRLGSQAKHQVL

SEQ ID NO: 301234 - protein, 48 aa, Zea mays
  Clone ID: MRT4577_37800C.1.pep
PIRGPLALRLLQLFGKPVQWGLFGNKSSGQKGNFFNCALCWLPHGFSH

SEQ ID NO: 301235 - protein, 59 aa, Zea mays
  Clone ID: MRT4577_37801C.1.pep
VLKKQLNPGHSVKTTVVVLGVTFHLYILILESTYKTFLFTGYGEFGILRAFMLSNNLVA

SEQ ID NO: 301236 - protein, 55 aa, Zea mays
  Clone ID: MRT4577_37802C.1.pep
ATGTPKMPSAEARARGRGLQSSDRQLIRESVCLNSASTHTLTCSASTDRHIHPCV

SEQ ID NO: 301237 - protein, 79 aa, Zea mays
  Clone ID: MRT4577_37803C.1.pep
RVGANCTKRCIYRPSTGELMASSSSSSHRRLILADVVLLSVLAAASASAETYCVPWWAIPHNPLPSCRCYLTSLTCCIG

SEQ ID NO: 301238 - protein, 70 aa, Zea mays
  Clone ID: MRT4577_37804C.1.pep
KTFTAKNPPVIFYPPGVEKPTRILKRALHIFGVPFVPNTGVAPVIFGPVPGGGPTFLLGGFFKAWGKYGQ

SEQ ID NO: 301239 - protein, 77 aa, Zea mays
  Clone ID: MRT4577_37805C.1.pep
TASSAHPTPQRCHQRLREAVVAAPFTSHYRLRHRRSTAPLQSTYPYTHSPRSTPWPPSSASTLRLHRLSFLTAVRTS

SEQ ID NO: 301240 - protein, 108 aa, Zea mays
  Clone ID: MRT4577_37806C.1.pep
RGKGRAGRSSAPARAGPGLGRAGRITAKGLTSAAAAPSSKGLSYVDLPAMDLSFPPAGSLLCSAPLRGQQGGQDQPEEAAAYLDLGSLCTPPPPPPSTENLGRPASPV

SEQ ID NO: 301241 - protein, 266 aa, Zea mays
  Clone ID: MRT4577_37807C.1.pep
MDLLQSSYAPDDASSPEASAAASSPLRLPSKSAAPAVGDTALALSSAASAARPLDPSLHLVAFNPTADQLWAPILGPQHPHAPISSASGNRNHKLGHVEDAAVLPFLFDEQYNTFHRFGYAADPSGLHIVGDAQPQAPEPDTVYNLAPSEHKRRRLLAKADNEAELAPPEAKNPASEEWILHNKQSPWAGKKEAPPAELTDEQKQYAEAHAAKKAEKEARLEGKSERTEVVVKTTFHGKEEKDYQGRSWITPPKDARATNDHCYIP

SEQ ID NO: 301242 - protein, 66 aa, Zea mays
  Clone ID: MRT4577_37808C.1.pep
PLKPKLFFIKNFRFKMKPIEAPKAWFKNPKVLENCSLGFLFPSKHVETFEEKVIPLKSLPFYPPDG

SEQ ID NO: 301243 - protein, 53 aa, Zea mays
  Clone ID: MRT4577_37809C.1.pep
DIARDVEGHRHLQARPTSRRRRTGAGSRCGTPLPGARPPRSWRRQKEKRARRS

SEQ ID NO: 301244 - protein, 165 aa, Zea mays
  unsure (1)..(165): unsure at all Xaa locations
  Clone ID: MRT4577_3780C.1.pep
LFLLXALYLGGGGAATLITSAFHSLLLLLRLLLRYPRRAAPTDDGPAAAALLYQGXXLRGVLGPXXHTFXYPSLYXLXXLXLXPLPXHLSSYYXLLXXSTSXPXXPPLXXTLXLXXLPXPSXHLLXLLFXXTXXXXXXXNXHXLXHKHPXXXXXXXYLPTXLXSH

SEQ ID NO: 301245 - protein, 49 aa, Zea mays
  Clone ID: MRT4577_37810C.1.pep
SVAVGRMYFCWAMEPGFWCGSILLVCLALEVPGVNLSLPYAKKKKKKRP

SEQ ID NO: 301246 - protein, 92 aa, Zea mays
  Clone ID: MRT4577_37811C.1.pep
NTLCRPFFVRISYSSRIVIQHRTLVGSLSSTLTNTQQAVTPEPARVKKLGIRPYAWPSRLHRSDQLRKVFSNGSGLVPKELERQDALSCEPQ

SEQ ID NO: 301247 - protein, 89 aa, Zea mays
  unsure (1)..(89): unsure at all Xaa locations
  Clone ID: MRT4577_37812C.1.pep
SLLLFYQVISLXPMNTXKRYTPDVCPALGIXQLERIISMYGDDVNGTNTILAEFTSILKYAVLDESNMTMCFSIPLDADSRRLTLLLLS

SEQ ID NO: 301248 - protein, 74 aa, Zea mays
  Clone ID: MRT4577_37813C.1.pep
NKHVIVSVRACGKIRSAGSMIALHSLKLKLHFSSLCICSAFKRRLLSTYDLTRALSGQLVERDTLRKTWQVSCS

SEQ ID NO: 301249 - protein, 512 aa, Zea mays
  unsure (1)..(512): unsure at all Xaa locations
  Clone ID: MRT4577_37814C.1.pep
MSGRNFATTVAIAVVVVAALASASAAADDDEQGHLRREADRIVRLPGQPDDGVDFPMYSGYVTVDEGAGRALFYWLQEAAAEAQPAPLVLWLNGGPGCSSVAYGASEELGAFRIRPDGATLFLNAYRWNRXVRMYIRRWLALGCDRXNIYNGCAAANILFLDSPAGVGFSYTNTTSDLYDSGDRRTAHDSYKFLARWFERFPQYKYRDFYIAGESYAGHYVPQLSQIVYRKNKGVEKPIMNLKGFMVGNAVTDDYHDQVGTFESWWNHGLISDATYRLLDASCVHDSGEHPSPRCNAAYDKATAEQGDIDPYSIYTPTCNQTSSSSSTPRRMRLKGRYPWMRGSSYDPCTERHSTVYYNRPEVQRALHANVTAGAGGAMNYTWATCSDTINNNWGDSPKSVLHIYKELIAAGLRIWVFSGDTDAVVPLTATRYSIDALNLPTVVSWYPWYDAKEQKQQQEVGGWSQVYEGLTLVTVRGAGHEVPLHRPRQALILFRHFLRGKPMPPKNGTVV

SEQ ID NO: 301250 - protein, 186 aa, Zea mays
  Clone ID: MRT4577_37815C.1.pep
TLESPAYPARDPSGSRVHPATHQPLPPSQCLPSPSCAIPNLAGVSYPRVFFSSDYFLPCCAVSNPGRAFFIDSLHAELTLLGPATSSFSYHCWLFPGSKDDTGGRALPKFGEWDVNNPASADGFTVIFSKARDEKKAPPTQGHIRNNRSVLADSKDSRAEKMTSYNARTNASKKWFCCVSPSPTQF

SEQ ID NO: 301251 - protein, 190 aa, Zea mays
  unsure (1)..(190): unsure at all Xaa locations
  Clone ID: MRT4577_37816C.1.pep
TCAVHDLXHSNLSPSSQYKLVSXEAGVGVVASGXVKGHADHVLISGHDGDTGXASKWTXFNNAGLSWELELADTHQTLVSNGLLGRAVLQTHGQLKTGRDVAGACLLGAQEFGFSTDPLITLGCLMMRKCHMNTCPAGIATQDPVLREKFAGEPQHVINFFFMLAEELREIMANLGFRTITEMVGRSDML

SEQ ID NO: 301252 - protein, 141 aa, Zea mays
  Clone ID: MRT4577_37817C.1.pep
PREIQVSSISDPISATFCERVEKANSSHSFTAGLAQSVGLRNQPLRVYSMVKYAAIARGDAEIFMKFARAGYKEKIWDHAAGVVIIQEAGGVVTDAGGRPLDFSRGVYLEGLDRGIIACSGALLHQRILNAVDASWNSSTL

SEQ ID NO: 301253 - protein, 106 aa, Zea mays
  Clone ID: MRT4577_37818C.1.pep
MSAIDRSINKHGQNRIGKQDDTGGRALPKFGEWDVNNPASADGFTVIFSKARDEKKAPPTQGHIRNNRSVSADSKDSRAEKMTSYNARTNASKKWFCCVSPSPTQS

SEQ ID NO: 301254 - protein, 72 aa, Zea mays
  Clone ID: MRT4577_37819C.1.pep
KKGQVHGARRQRRRPERQAGGGREAGLAEPREGSPRVPAPLTITPCPDLDSGTNTSLTDLFEFILCYIYTCT

SEQ ID NO: 301255 - protein, 92 aa, Zea mays
  unsure (1)..(92): unsure at all Xaa locations
  Clone ID: MRT4577_3781C.1.pep
QGNRTTPSYVAFTDTERLIGDAAKNQVALNPQNTVFDAKRXIGRKFGDPVVQXDMKHWPFQVINDGDKPKVQVGYKGETKAFYPEEISSMVL

SEQ ID NO: 301256 - protein, 204 aa, Zea mays
  Clone ID: MRT4577_37820C.1.pep
PVIPVPHSRDVAPSPLLAGRTLVHRAQAVERYCHCHLCQLFGPIVLHVVVLFGPHAGTRHCSSICELTEDSVEARPCSYFFQDDVALLPVHRTQLACVAGATRLSLAFTENVEASVVKLCSAVDSRHREPIFPCVYLYRPRLIAYVRHRSRPVPSARCPILLFSLLRLARSCHLCASRHVPKAVVCSCWDKLLCFGVLAIDRRQ

SEQ ID NO: 301257 - protein, 65 aa, Zea mays
  Clone ID: MRT4577_37821C.1.pep
QKRARAKMGTRNRCYVRQRRDWGISPRANLRDGSARMHDGDRGSLHELLEEGERVFSLKRFFRVF

SEQ ID NO: 301258 - protein, 136 aa, Zea mays
  unsure (1)..(136): unsure at all Xaa locations
  Clone ID: MRT4577_37822C.1.pep
VGTYTGLQMMSPLEIPQTDCLLSDLTLGAASSELQIGSACKAHREVESTWAHLCHNHAVKXILDGSKXDXIAANTYHMYKTDVRVLKEMGMDAYRLSISRTRILXNGTKEGGFNPHSIXAYRDLINLEVQNVIEPY

SEQ ID NO: 301259 - protein, 59 aa, Zea mays
  Clone ID: MRT4577_37823C.1.pep
VHRRRFIVMLAQNVNNFTRRRSVKYDNTSLEPCYIYRTSQKKNILAEKLSTVRFFITFK

SEQ ID NO: 301260 - protein, 54 aa, Zea mays
  Clone ID: MRT4577_37824C.1.pep
QLFLAPTHIDFDDSICIVHLSLHTNISSNICTLLQHTSIVLSYIEVCTLLRVAM

SEQ ID NO: 301261 - protein, 44 aa, Zea mays
  Clone ID: MRT4577_37825C.1.pep
HCQLSVLRVSRHTPERQYVYLSNNTLLVMGQPGLSATQPNVWYV

SEQ ID NO: 301262 - protein, 265 aa, Zea mays
  Clone ID: MRT4577_37826C.1.pep
ARLERRDGNGGGTFGDDAVTWRRWNGFLSSYPDMVRDSDGGRAALRPLPAHGVASRRRTYADGELDVFSAERYFRGAMDYGNGDRKEGVFVTAPAVAGQVPQPLVETAAARPAAEAVVMAKPSWTRASTVSFTASSASSANSQAALFRGGPRRRRSSCRDSKCCVRVGVLMRTCSGKRSVSVDGCAAKEAPGAAEAAATGIDWYRELRMHKDALGLSGHGNRHDLVPAGLPPSLNLGTAKVAAIGSEVTAGEESAELAFSVRIDE

SEQ ID NO: 301263 - protein, 106 aa, Zea mays
  Clone ID: MRT4577_37827C.1.pep
GALGLMPQTPVLQPVPLMRGMDGHLAGALGLGGRTYPRDSATWLGWGYRCLIAARVPPSPPPRKAEIERPDLQWCCAHRHANRPSCAPRPAGYTETQIGGAPPNVE

SEQ ID NO: 301264 - protein, 177 aa, Zea mays
  Clone ID: MRT4577_37828C.1.pep
SLSPSSLLTHQLFLRATLLFRSVGIPPPFSRGLSQLPVCLVRGSKISPGFVFLLRLSCLPLGSSPLWSSNPARGFLISRRVEASAGDSRRHFTERALFLSLSLSISIYLLHHFSAPNPAPGFLSLLPPSAQPRVLLVSRKHPFRQSLGAFLFSETSSLGAGCAVIHIHPSHMESCCR

SEQ ID NO: 301265 - protein, 60 aa, Zea mays
  Clone ID: MRT4577_37829C.1.pep
VTAHTGRHALLGQCSLGHRLHRISFQCAWILLIPADSKDHSFAIDPFFRCLLCTYRSTLP

SEQ ID NO: 301266 - protein, 518 aa, Zea mays
  Clone ID: MRT4577_3782C.1.pep
HRCSGVAANRRYQAADWRLRPLPDEMIKYAREDTHYLLYIYDLMRLRLVNGSSCENDLLLEVCKRSKEAWVQLYEKEQLTDTSYLHIHGLKENELNATQLSVLSSLYRWRDGIARAEDESTGYILPNKTLLEIAKEMPVTSGKLKRMIKSRNSILERNLNHVINNIRDAIAASGAFESIVEQLKKGKLEELTLADVKNSSEDTEMIPAVDVDNIEDPSDESAVVPAVITNVGAAPCITREASLGNMHLEDLVPKTKDSGASSGFTGLTDNKKLSNDQQQAAKATVQVSKRPTAFGALFGKPAAGRRPDLFLGFSNVQGKTKVDKITSSVVLPFHHFSGGAKLPSAVLSAKESLHSEPDSIQHSDPACQLEEVIQLDMGTDEQQPPENGNEDDGHCETEDTEMSKSPSGDPSVTEQRFRSLNEERNVKQIQKTPREFEFSVPVVPFDYAEARKNLVSSLPKAERRKDDAVARAINTDSGDKQRGSKKPPGGGENEGNLQHPRRRQAFPPSGNRNATYHQ

SEQ ID NO: 301267 - protein, 76 aa, Zea mays
  Clone ID: MRT4577_37830C.1.pep
ILYTGRPSFFFIKILFSRIPTSILARGKYYLYMLLSPYKPITPPILPPYSNYTHALPPINLTKKKITHSPNHRKKN

SEQ ID NO: 301268 - protein, 106 aa, Zea mays
  Clone ID: MRT4577_37831C.1.pep
CFEQREMPMISLKECSEQREASVVLCDVAAAWCLACGQSAVLGQGAAGFQCGCSGRIMVLGLWVQRKGWWWSPRLTGGPPNVCLVWARWIWAPPKTFLKPRGNTRG

SEQ ID NO: 301269 - protein, 71 aa, Zea mays
  Clone ID: MRT4577_37832C.1.pep
PRVRAFLFNRFPAVYVTDERPQQEIDLPSFDRVAFESGGSVNEDVFKKTSGSSSVSHHVLPPPEIELVLPP

SEQ ID NO: 301270 - protein, 189 aa, Zea mays
  unsure (1)..(189): unsure at all Xaa locations
  Clone ID: MRT4577_37833C.1.pep
RRGTSAEPGASAAPRGGAREPRAHHRRAVAAYAXRAXXRTRMGQXRSSXXKKASSXRLXXRSXRGXXAXXWNGASPHERRXRRPTRHGXXXTHKLRVRRGGGRXSPEXATTXVAXAEAXMSTSGKWQPAHWSKKKXTXSXRXLCIEADXTGASGXRARVRAWQGEGRVGGTAPGRTHMAAARAKGGSXK

SEQ ID NO: 301271 - protein, 95 aa, Zea mays
  Clone ID: MRT4577_37834C.1.pep
KSPMSLVWSTSHGKWLKTSILLASGAMPSFVSMCTLSLSCSCVWSNRINFVARSRDAPPPGVVCGICAGSSPVYRRSGRSWSERAAQLVCKAQRT

SEQ ID NO: 301272 - protein, 107 aa, Zea mays
  Clone ID: MRT4577_37836C.1.pep
HASAKATGHKKNFTTLHHHDVHASCAFPSYITCHRLKNPYAITLIATLFHQQLSHSSDDYDTLSLSVPLQLVPYAYLSQPRYNYTLIRTVYAYNRHEPLSAESFLSY

SEQ ID NO: 301273 - protein, 41 aa, Zea mays
  Clone ID: MRT4577_37837C.1.pep
GGVDLGSLGQRQRAVNGNPVDLIVCTQLHPKSFQLIKFYIN

SEQ ID NO: 301274 - protein, 81 aa, Zea mays
  Clone ID: MRT4577_37838C.1.pep
GGVGCSPRACAWGEPSGGSLGSWSVSSALGWARALPLVFLGCLLCVGGAPPAPPAPQAPRCAWSPRRALSGAWVAPGILGG

SEQ ID NO: 301275 - protein, 38 aa, Zea mays
  Clone ID: MRT4577_37839C.1.pep
ASWPLRSYCFRSCSRSSQQQRDTCRCSHTDRGLRLTHR

SEQ ID NO: 301276 - protein, 75 aa, Zea mays
  unsure (1)..(75): unsure at all Xaa locations
  Clone ID: MRT4577_3783C.1.pep
MKYQPEVIIIVHPLMQHVPRRNLTAYGTLDNTPFATXITDLSTGHPTWLHKLVTRRYCPSTDEEKRALNAGLKAA

SEQ ID NO: 301277 - protein, 44 aa, Zea mays
  Clone ID: MRT4577_37840C.1.pep
QPMLYIPNAHQVIFPCQIITFNFSEFTPKLQTLDISYYYCANGP

SEQ ID NO: 301278 - protein, 47 aa, Zea mays
  Clone ID: MRT4577_37841C.1.pep
LPPGLDGSFNGSKRSSPQHNGLNTNGSTGSPGAPTAARTLVSEPAAD

SEQ ID NO: 301279 - protein, 138 aa, Zea mays
  Clone ID: MRT4577_37842C.1.pep
MQVAATAVRFSAVLPVKGRPAAKSTVVVRVPASRRSVRAAAVVAAEAAEIDYNSSFSVFPMEACDLLGGDACSAQMYPETKLASAAAAASRRVEEVERDYLSYDEPRTVFPGEACDDLGGEFCEAPYQAGVSRELAHA

SEQ ID NO: 301280 - protein, 68 aa, Zea mays
  Clone ID: MRT4577_37843C.1.pep
AASQGLLVCCTRKSSVLAWILGQPPLLFLFNALSYFYILYIFLFFLLLSYYAHLLFYSHIKIHPLISS

SEQ ID NO: 301281 - protein, 130 aa, Zea mays
  Clone ID: MRT4577_37844C.1.pep
KWDFGNSKNPLSEEADPSKKGFFKVIPTRTGGPPRISGRVPRGKPVFPLGGGVKLGGLEGQGLFLGEIASGLRVPQMSITLGKKCKRGGPIGGGLTSKLGRAMAAVFRSENLFCPLLFIISPPPGGESLK

SEQ ID NO: 301282 - protein, 40 aa, Zea mays
  Clone ID: MRT4577_37845C.1.pep
SCTIWIQKLALRMARERNRVSTSYRSQGNGSLYGPRTSIG

SEQ ID NO: 301283 - protein, 40 aa, Zea mays
  Clone ID: MRT4577_37846C.1.pep
SFANTSAQLFIYWLSYMHVSNQPNKFRIILADSDIQLDCR

SEQ ID NO: 301284 - protein, 234 aa, Zea mays
  Clone ID: MRT4577_37847C.1.pep
MAVPLLLLLLLSVFTASDAAFCVCKPGMSDQMMQSAIDYACSKGADCASTTKGAPCYGNGNKVAVCSYICNSYYQSRSGMGATCDFNGVATLTGTDPSSGTCKFASGPSSVGTGGGAGMGTGGAGAGVGGGTGAGAGTGAGTGAGMGAGAGTGAGTGMGAGTGTSTGAGAGTGTGAGITTPGALSPPFGGTGAYGPAGAGSTDYNDAAAPRVSRLHVVAALVLGLAAAAAPLLR

SEQ ID NO: 301285 - protein, 101 aa, Zea mays
  Clone ID: MRT4577_37848C.1.pep
CGTSSFACGSDGDADARRKWGPARRWLLRALGAGRAVPGGRRYGGMRSGWSWRFQWLGAPWCGSGIGCQMLAAMERRLGSRCSHVVFGSKGEVSLVAFEFL

SEQ ID NO: 301286 - protein, 55 aa, Zea mays
  Clone ID: MRT4577_37849C.1.pep
ERSRTVAGGCLYPREEHLGTTLSYTLLPRGHCAAETKGLCARARGTVQIQREGIC

SEQ ID NO: 301287 - protein, 56 aa, Zea mays
  Clone ID: MRT4577_3784C.1.pep
KMSYNHVLFILISGMQIVCLKFNLYVYLCATGVMNSLFSVYGKETKKTFPYYSMLE

SEQ ID NO: 301288 - protein, 63 aa, Zea mays
  unsure (1)..(63): unsure at all Xaa locations
  Clone ID: MRT4577_37850C.1.pep
ESSKFFSSYFEATPQXSAPALNFYWRTPDRIMGQPSYQNTPPRADSNIPALLGSTTQGCCHEI

SEQ ID NO: 301289 - protein, 125 aa, Zea mays
  unsure (1)..(125): unsure at all Xaa locations
  Clone ID: MRT4577_37851C.1.pep
SSAQRPEALRXVRPESGGFRLLVIVTGWFLVSLTFXLVSQPGSILCSLNGQLTADQAPTALLIQDKLTSPPDTDLILCHRTLLRGDPKEGDDXETDPPLTGXKGEEEERLMLSEPHATRAMTELT

SEQ ID NO: 301290 - protein, 76 aa, Zea mays
  Clone ID: MRT4577_37852C.1.pep
SLLICVTYTLNMLPNDNYRDTHLVLAPILLDHILTARAPLACPHKEYVSIQARYYTNTTSRMNTYGSSSIEQGLRP

SEQ ID NO: 301291 - protein, 115 aa, Zea mays
  Clone ID: MRT4577_37853C.1.pep
AAAEYWTGHKCMISYTISMALPTTTPCSLPVRWWWAAAPSLLPLPPPCWVLLLAVFMKQKQEQQGHWNKSFIMPRAQDRDRLRSSRPSQPASAMVWTGLCMYFCTLSTLNINLAG

SEQ ID NO: 301292 - protein, 40 aa, Zea mays
  Clone ID: MRT4577_37854C.1.pep
MFSWFRCLQRFPWFRVAYFFLWTALYVVFQWIVHAATPMW

SEQ ID NO: 301293 - protein, 129 aa, Zea mays
  Clone ID: MRT4577_37855C.1.pep
KAPRGPQPQVLPPIGPALTQPNVANPAAHLQQVVPFNQRGGAKFGGGPPQGPQFLYPLAGGNPLGGTLPQKQKKILPNNPFFFMNPPLQQPPVGGAPLLIPNERGPPKGPPNPHGVPKKNPKIGWDLSP

SEQ ID NO: 301294 - protein, 108 aa, Zea mays
  Clone ID: MRT4577_37856C.1.pep
YWTQMHGKLHHLHGLAYHYSSLQFTGALLVGCCSLLVAAAAVLGLAAGRLHEAEAGAAGTLEQELHHAQSSGSRSSSFLSAVSASAMIWTGLCMYLCTLSTLNINLAG

SEQ ID NO: 301295 - protein, 120 aa, Zea mays
  unsure (1)..(120): unsure at all Xaa locations
  Clone ID: MRT4577_37857C.1.pep
FSRGGGPKEEGHIKLKRTDQVXNRITGGRRCYRPLXSPLVDVEPRXNGLXXCVPFAICCRYXPLAAPVPKXXFDSCVXLLYRFAANNNLILNLSSRLPVAALPISXCYVLQFRRPYHCYD

SEQ ID NO: 301296 - protein, 94 aa, Zea mays
  Clone ID: MRT4577_37858C.1.pep
PKNVPSAQGSSKWFIVNKGANVKNPRFCISELGLNHATPYFFVAEQKQKANNGARPIEGCNVPQALHYKTLEIGWGQCLPPGPIRKKKKKKKAG

SEQ ID NO: 301297 - protein, 224 aa, Zea mays
  unsure (1)..(224): unsure at all Xaa locations
  Clone ID: MRT4577_37859C.1.pep
MKILVAVKRVVDYAVKVRVRPDGRGVETANVKMSMNPFCEIAVEEALRLREAGVAAEVVAATVGPAQSADTLRTALAMGADRAVHVLHDPDPARPLLPLAVAKILRAVALQEKPGLVILGKQAIDDDCNQTGQMLAGLLKWPQGTFASKXTDLRLNQPRYATLPNIMKAKSKVIKKVAAEDLGVDIRSDMEVIEVNEPPKRKAGVILSCVDELLDKLKNEARVL

SEQ ID NO: 301298 - protein, 53 aa, Zea mays
  Clone ID: MRT4577_3785C.1.pep
SAICCWACTLFQYESVTADRCMLLKWSCLCFKKMSLHIASLYFVHNIYIYIRV

SEQ ID NO: 301299 - protein, 255 aa, Zea mays
  Clone ID: MRT4577_37860C.1.pep
MKILVAVKRVVDYAVKVRVRPDGRGVETANVKMSMNPFCEIAVEEALRLREAGVAAEVVAATVGPAQSADTLRTALAMGADRAVHVLHDPDPARPLLPLAVAKILRAVALQEKPGLVILGKQAIDDDCNQTGQMLAGLLKWPQGTFASKVTLDTEKQKATVEREVDGGIETICLDLPAVITTDLRLNQPRYATLPNIMKAKSKVIKKVAAEDLGVDIRSDMEVIEVNEPPKRKAGVILSCVDELLDKLKNEARVL

SEQ ID NO: 301300 - protein, 40 aa, Zea mays
  Clone ID: MRT4577_37861C.1.pep
LLLITWSPKWEGPVAPAVGSHIGAAVPLLISFPSDSVCAD

SEQ ID NO: 301301 - protein, 46 aa, Zea mays
  Clone ID: MRT4577_37862C.1.pep
APMHRDDPCQRLDGPPLQHCAMLQSTLMVSLLRLTWIDGSVVDVYN

SEQ ID NO: 301302 - protein, 109 aa, Zea mays
  Clone ID: MRT4577_37863C.1.pep
RQYSIVLSKRRVSTTDTVAPSIGYPCTWMSVQERAMSRIYAGAAGPRVTRPEKSRAVHQQYPGHGDDEQSPHRGHRSGRRQHRPRTFHGWSGWTQDQGSGIPAGLEVPN

SEQ ID NO: 301303 - protein, 46 aa, Zea mays
  unsure (1)..(46): unsure at all Xaa locations
  Clone ID: MRT4577_37864C.1.pep
XCCTHGXTSLGSEFGSRRPSSVGDLGAGNHYSDIQVVDEIVNEYAA

SEQ ID NO: 301304 - protein, 51 aa, Zea mays
  Clone ID: MRT4577_37865C.1.pep
NRGIKKLGGSFKLKRRRHLHKMKRPSELRLSLLNLASIYIYLIWSSNTCLR

SEQ ID NO: 301305 - protein, 125 aa, Zea mays
  Clone ID: MRT4577_37866C.1.pep
LSSSVHLPQSGLKSCRRALPLPGGAPAPSLTRVAAVAVPCSSSAHPCCLSPVGNFGHWLPRCISPRRGENFRSQERSHEQSRGGLFVSGLRALHVLVDGEDNHQLVLYCWNPSNCAITSAFNHHG

SEQ ID NO: 301306 - protein, 74 aa, Zea mays
  Clone ID: MRT4577_37867C.1.pep
MGRRGSSDRLEALSLEIERKLHKVTHRFPYRAPAGARQFVFVALNRGPISVARTRSHRFARNSRAAAAARLQRP

SEQ ID NO: 301307 - protein, 44 aa, Zea mays
  Clone ID: MRT4577_37868C.1.pep
MVVHYSLEIQCCDECVIACQVNATCVMNFLERIRASTRHMGSAY

SEQ ID NO: 301308 - protein, 56 aa, Zea mays
  Clone ID: MRT4577_37869C.1.pep
ARDAMATDFSIEGNRLRHACVTCVDASPGNSGWDPPLSVPCIPCLIPLMPQSPSSR

SEQ ID NO: 301309 - protein, 42 aa, Zea mays
  unsure (1)..(42): unsure at all Xaa locations
  Clone ID: MRT4577_3786C.1.pep
DKXVSXSRFXSAFGSNACAPRXLQESEXFCIRXRNQKRDXWG

SEQ ID NO: 301310 - protein, 82 aa, Zea mays
  Clone ID: MRT4577_37870C.1.pep
LMRVRGAVSRICSRRHRYSLAWHGVEGCRSAEWHSASVVGLYGQTSACVISVMDTSSRGTMRWLVFVLMAHGAACVVSLSGC

SEQ ID NO: 301311 - protein, 56 aa, Zea mays
  unsure (1)..(56): unsure at all Xaa locations
  Clone ID: MRT4577_37873C.1.pep
INIKKPKIHQELIPHKGTVFKPSKKMNKDPFMTXYLAQSTLRSILFISQTEKRTSE

SEQ ID NO: 301312 - protein, 96 aa, Zea mays
  Clone ID: MRT4577_37874C.1.pep
RYVGGPPLKDGHAPFTLPGSDYRLGLSPPMFSPGGLFPPRSNRSQGLPPPHPLLCILGLRVASPGILGPPNSSPKGANWGAPPFLGPGPQNGLGGY

SEQ ID NO: 301313 - protein, 62 aa, Zea mays
  Clone ID: MRT4577_37875C.1.pep
VQYNIIQGQWNTIFHFYTHTLFINHLKLLNMHQTSKITNLIIHAPQFMKFLPVTEHHTEGLL

SEQ ID NO: 301314 - protein, 38 aa, Zea mays
  Clone ID: MRT4577_37876C.1.pep
KKKKKKKKKKKKTKKKKKKKGKKKKKKKKKPRRRRGKG

SEQ ID NO: 301315 - protein, 177 aa, Zea mays
  Clone ID: MRT4577_37877C.1.pep
EGKTGIVHMREKTKFCPQRAFGFCPKKSFQTQIIKIKLIKTGWGTNKGLAGGAQTGGSSPQKKTFGAIGGAPRYTLPAPNFGGPIQSKGAFFEKNFMTTGKGGIQGGIPLKRGPQGPLTKFPPLREQKLADRPKGAVLKENPSFPFFFLEPNMLPGFGGPGIPGSPMLPNPGAMGRI

SEQ ID NO: 301316 - protein, 112 aa, Zea mays
  unsure (1)..(112): unsure at all Xaa locations
  Clone ID: MRT4577_37878C.1.pep
SYLSLILYNPWGHFXSQAGYNDYPITSFNLXFTHLTILTMPVFYQDLSTRXCIKFPMIYQKDPQDLLSTXRTIISWMVNSVLTAFIIFFLCTSSLHNHTLLQHYKMSHMATL

SEQ ID NO: 301317 - protein, 142 aa, Zea mays
  unsure (1)..(142): unsure at all Xaa locations
  Clone ID: MRT4577_37879C.1.pep
SAARRSHHQEGGRKKTILASQTTYIPEGDTLTVATKLLTVDGPRRKLTRNFKXLPLLLXLKEGGRTLKAHAWLGTRRSMASIRTSISHIHNLMKGVTTAYPYKMRFTYIHLSINASITNSNTSIXITNLVREKKERKACLID

SEQ ID NO: 301318 - protein, 121 aa, Zea mays
  Clone ID: MRT4577_3787C.1.pep
GWGFFFWGWVFFFFFFFFFFFSGTPGGGKTWGGVLNPPFFLEPFFFPSFLKKTTFFGGAFPIFFNPGSGFTPFFFLPQAFFFGGKIGPISGTGVGLTFFHLLRGETPIFLRPYMSSPLFSP

SEQ ID NO: 301319 - protein, 163 aa, Zea mays
  unsure (1)..(163): unsure at all Xaa locations
  Clone ID: MRT4577_37880C.1.pep
GRNRGDTPTPLELTSTEKTEGGDIKDAPHXARRGAGSNNSGNNGEATPGQREDQGGPTAGMASGDQGGAARHRQERSTESAGEGETSDPKPSPGDWNGAGAHTNYSTEPRRKEGGDKENKAGTEKPKPRHREHNADHGEGNERQRTGRHETRRNNTNRGGAAN

SEQ ID NO: 301320 - protein, 400 aa, Zea mays
  Clone ID: MRT4577_37881C.1.pep
IDFFPNDEDETDGIVEVALGELEMMEQYGAFMSTFGMYYDATFFNKRSRREPQVTGYDWVVRTLNDPRECFNMFRMSKHIFESLHDVLASTYGLRSTCQMSSIEALAMFLWIIGAPQSIRQVANRFERSKETISRKFEEVLHCVYKMSAHIIKPKDPEFSIVHPRVQAPQFSPHFDKCIGAIDGTHVRVVVPSSKVLQHIGRHGYTTQNVLAICDFDMRFTFVVAGWPGSVHDMRVFNDALRKYGDKFPHPPPGKFYLVDSGYPNRDGYLAPYKGTKYHVPEFRQGPRPSGKKELFNFCHSSLRNVIERSFGVLKMKWRILLHLPSYPMVKQTKIILACMTLHNFIRESAMADVDFEMCDNDENYISIQSNNLFEEDGDEEQGMNAFRDNIANALFIMRG

SEQ ID NO: 301321 - protein, 63 aa, Zea mays
  Clone ID: MRT4577_37882C.1.pep
PWVVFFFFSQLRARVVHQHRLEGLSTAIASPTGLGLRPGRFLRFLLPRRIRSWGGGGGCPLQA

SEQ ID NO: 301322 - protein, 82 aa, Zea mays
  Clone ID: MRT4577_37883C.1.pep
LESLHCCSHRSIPTPLQLNKADPPHCCHRESDRKYCKKDDGSPGIPAIIHSDTTRRCDETHTHLLSQDDNEDGDLFQAQSEY

SEQ ID NO: 301323 - protein, 363 aa, Zea mays
  Clone ID: MRT4577_37884C.1.pep
MWWRAVRRRWVATARPASSAAAGAEKSCRAVVVPRFGGPEVLEVRQGMPVPDLKPQEVLVRARAVSINPLDLRMRCGYGRSIFEPLLPLIIGRDISGEVAATGTLASSFSIGQEVFGSLHPTALRGTYADYAILSLDELTLKPSTLSHVEASAIPFAALTAWRALHGTARISEGQRVLVIGGGGAVGLAAVQLAVAAGCVVSATCGTQSIERVMGVGAEQAIDYTAEDTEAAIKGKFDAVLDTIGVPETERIGINVLRRGGHYMTLQGEAAALADRYGLAVGLPAATAVLLKKQMQYRYSHGIEYWWTYMRADAEGLHEIQRLSGAGKLQIPVEKTFPISHVREAHAAKEKKLAPGKVVLEFD

SEQ ID NO: 301324 - protein, 134 aa, Zea mays
  Clone ID: MRT4577_37885C.1.pep
QTTRRARSGGKPCPSQGAPNNGWGATFWASWSGSSSAGASSARASSGPARSGSRKSAATPPALVATQQVPARRATGRALVRPASGGIGSSAGVVLNPPGVGPPCTVRVGGLQSLGLECRVQVRLIFPWEFFSPP

SEQ ID NO: 301325 - protein, 217 aa, Zea mays
  Clone ID: MRT4577_37886C.1.pep
MATVARTLVAACPARSLLRLRSRRLPSSSSIRPARQRAGVGSVRCMARRPDSSYSPLRSGQGGDRAPTEMAPLFPGCDYEHWLIVMDKPGGEGATKQQMIDCYIQTLAQVLGSEEEAKKKIYNVSCERYFGFGCEIDEETSNKLEGLPGVLFVLPDSYVDAENKDYGAELFVNGEIVQRSPERQRRVEPVPQRAQDRPRYSDRTRYVKRRENQSYQR

SEQ ID NO: 301326 - protein, 171 aa, Zea mays
  Clone ID: MRT4577_37887C.1.pep
MMSYLKQPPYAVNGLSLTTSGMDLLHPSVGYPGPWASCPAATPRKQRRERTTFTRAQLDVLEALFAKTRYPDIFMREEVALKINLPESRVQVWFKNRRAKCRQQQQQQQNGGQNKVRPAKKKSSPAREVSSESGTSGQFTPPSSTSVPTIASSSAPVSIWSPASISPLSDP

SEQ ID NO: 301327 - protein, 83 aa, Zea mays
  Clone ID: MRT4577_37888C.1.pep
SESLLDAIKHKSSPPGPVVFGRPPPRTEDFNYRPGPGVHPRDLHGQHPVGVPPQNAFHVHHPRKPKLPVESPPVRNGPPRAGA

SEQ ID NO: 301328 - protein, 221 aa, Zea mays
  Clone ID: MRT4577_37889C.1.pep
MATAARALVAARALVAARPARPLLPPRRLPSSSSIRPARQRAGVGCVRCMARRPDSTYSPLRSGQGGDRAPTEMAPLFPGCDYEHWLIVMDKPGGEGATKQQMIDCYIQTLAQVVGSEEEAKKRIYNVSCERYFGFGCEIDEETSNKLEGLPGVLFVLPDSYVDAENKDYGAELFVNGEIVQRSPERQRRVEPVPQRAQDRPRYSDRTRYVKRRENQSYQR

SEQ ID NO: 301329 - protein, 35 aa, Zea mays
  Clone ID: MRT4577_3788C.1.pep
LIMWHSVSQVMNHFKVVSDCIKPRTPLINLPRNPM

SEQ ID NO: 301330 - protein, 204 aa, Zea mays
  Clone ID: MRT4577_37890C.1.pep
MPLLSSLSNLGLGYSIAIALGFIILFASFLLAFYFCFGRGGDYWAGEAVTTASSSGHLSITVPRVLFVAEGSESPEDDAYPSSAAAAACSPVGLDAAAIASYPKVAFSSRAAEADAMCSICLSEYRDGETLRVMPECRHGFHVACLDAWLSRSASCPVCRSSPVPTPNSTPLATPLSELVPLSQYAADRRRRSFSGRLAQNHLT

SEQ ID NO: 301331 - protein, 215 aa, Zea mays
  Clone ID: MRT4577_37891C.1.pep
MATAARALVAARPARPLLPSRRLPSSSSIRPARQRAGVGCVRCMARRPDSTYSPLRSGQGGDRAPTEMAPLFPGCDYEHWLIVMDKPGGEGATKQQMIDCYIQTLAQVVGSEEEAKKRIYNVSCERYFGFGCEIDEETSNKLEGLPGVLFVLPDSYVDAENKDYGAELFVNGEIVQRSPERQRRVEPVPQRAQDRPRYSDRTRYVKRRENQSYQR

SEQ ID NO: 301332 - protein, 206 aa, Zea mays
  unsure (1)..(206): unsure at all Xaa locations
  Clone ID: MRT4577_37892C.1.pep
GSTSRPVRCMARRPDSSYSPLRSGQGGDRAPTEMAPLFPGCDYEHWLIVMDKPGGEGATKQQMIDCYIQTLAQVLGXNGYSSGLFVWRYEKQFLIIRYLLXSEEEAKKKIYNVSCERYFGFGCEIDEETSNKLEGLPGVLXVLXDSYVDAENKDYGAELFVNGEIVQRSPERQRRVEPVPQRAQDRPRYSDRTRYVKRRENQSYQR

SEQ ID NO: 301333 - protein, 33 aa, Zea mays
  Clone ID: MRT4577_37893C.1.pep
TWKLNYRQTDIGPSAGLLFGSINYRPLQMKRRI

SEQ ID NO: 301334 - protein, 256 aa, Zea mays
  Clone ID: MRT4577_37894C.1.pep
MATNTKLVALGLAVLVSVGFSDAARVVRLGSYASAGGGGGGGGGGSGSTGAAGYGGGSGGGGGYGIGKGGGDWWNNFVSSVAGGGGGGQGGGGGTNGGSGSGGGSGYGSGTSSTAASGPSSGNYANAEGKGAGGGMGGGADGAYGSGAGGGVGKGQGESGVALAPSSDGYYNGGAADATGGGSGAGGGHGGGAGAPSYGTGGGLAEARARRQRRSWGSGYAAGIGAGTGGGGGGGFQGASGGGGGSGSGSGSGGIH

SEQ ID NO: 301335 - protein, 225 aa, Zea mays
  Clone ID: MRT4577_37895C.1.pep
IFLCPKYTKKHRGVPLLNSQKENVAAPPKITRITEKSPCQLTYLHLNGQAQIILTFDLTHYIVVISAQLIPPDRQVSTRSIYSFVSLSIFGKFLSAFSPPEKTRDSVARWSLPSARCLAARCSTVLSACCSLLGSPAPYSEDAWWMAETGSAPDGGGCLQPCTADGQFGTLDLGGSLTLAARVRNWETRVFFFFFFFFFFFFFFFFFFKKRPKEGLNPAPQTPNY

SEQ ID NO: 301336 - protein, 436 aa, Zea mays
  Clone ID: MRT4577_37896C.1.pep
MSEKKRRAGASAAGAASSSKKPRASSAASYAESLRSKLRPDASILATLRSLASASASKSKADARSLADHDPCADPASSYIVVADQDSTSVTSRINRLVLAAARSILSGRGFSFAVPSRAASNQVYLPDLDRIVLVRRESARPFANVATARKATITARVLSLVHAVLGRGIHVTKRDLFYTDVKLFGDQTQSDAVLDDVSCMLGCTRSSLHVVASEKGVVVGRLVFADDGDRIDCTRMGVGGKAIPPNVDRVSGIESDALFILLVEKDAAFMRLAEDRFYNRFPCIILTAKGQPDVATRLFLRRLKVELKLPVLALVDSDPYGLKILSVYMCGSKNMSYDSANLTTPDIKWLGVRPSDLDKYRVPEQCRLPMTDHDIKVGKELLEEDFVKQNEGWVKELETMLRTKQKAEIQALSSFGFQYLTEVYLPLKLQEQDWI

SEQ ID NO: 301337 - protein, 205 aa, Zea mays
  unsure (1)..(205): unsure at all Xaa locations
  Clone ID: MRT4577_37897C.1.pep
MVTMVQTTGVVVAGASMAALVAQPAWRDGLLVALARWTGYNAPGGLWRIAAILLAAANLKNLPFVWHIRVFXPCFTTFTSXTPIPPHALFQPMISSTRTTLVETDYNLHKSNSTYFSDMDVSRTHLFTALMRNAIRKQSRRSGAKVAGAMGATEGTPGRHIIALGGISCLFKREIPPYQKFEMWTRLLCWDRKWFYLVTHLXRPA

SEQ ID NO: 301338 - protein, 305 aa, Zea mays
  unsure (1)..(305): unsure at all Xaa locations
  Clone ID: MRT4577_37898C.1.pep
MGCGASSQKDAGAPRRRPVSVGDVVIFLPGLRVPRAVDLAQALGGCLARSAVDRLSALRSRVVDMAMRESAAALKPRRRAAARHGSSTANLLQALEDYLPALLGLVKEGSVLRNKVHFTWSNQEDNXEETAMPDAWXYEVLSMLHLMAMVCLLQANALLXLPRSYGDGYXPRVSEESRRXTVDVFLKAAGYLXDWAVRLVLPKMPVNSRRELPVDLAEGNLKALSLQALGQGVDMQLGLAIDSPKATLAVKRRLACEMVKYWQQVQESIPELPISDGWGKKHRLFIKWKYVEAKVYNLCYYHHSF

SEQ ID NO: 301339 - protein, 413 aa, Zea mays
  Clone ID: MRT4577_37899C.1.pep
MGCGASSQKDAGAPRRRPVSVGDVVVFLPGLRVPRAVDLAQALGGCLARSAVDRLSALRSRVVDMAMRESAAALKPRRRAAARHGSSTANLLQALEDYLPALLGLVKEGSVLRNKVHFTWSNQEDNAEETAMPDAWYEVLSMLHLMAMVCLLQANALLLPRSYGDGYAPRVSEESRRATVDVFLKAAGYLDCAVRHVLPKMPLELRRQLPVDLAEGNLKALSLQALGQGVDMQLGLAIDSPKATLAVKRRLACEMVKYWQQVQESIPELPISDGWGKKHRLFIKWKYVEAKAAAYYFHGLILDEGNTEKSHGMAIAALQASEEFLKESKRVSEAFHATPPTSRSPNPFGTAKYLFDKIPRDASSKVRINQDLYTQEKVIGAPPPLPDFALALTPEEYDLPPLDPLWNKEDTSH

SEQ ID NO: 301340 - protein, 45 aa, Zea mays
  Clone ID: MRT4577_3789C.1.pep
VHLRPSPRKESIMNVGPIAATDGGIVIGKGSRPKWKLTTVLGLGT

SEQ ID NO: 301341 - protein, 538 aa, Zea mays
  Clone ID: MRT4577_378C.1.pep
MRECISIHIGQAGIQVGNACWELYCLEHGIQADGQMPGDKTIGGGDDAFNTFFSETGAGKHVPRAVFVDLEPTVIDEVRTGTYRQLFHPEQLISGKEDAANNFARGHYTIGKEIVDLCLDRIRKLADNCTGLQGFLVFNAVGGGTGSGLGSLLLERLSVDYGKKSKLGFTVYPSPQVSTSVVEPYNSVLSTHSLLEHTDVAILLDNEAIYDICRRSLDIERPTYTNLNRLVSQVISSLTASLRFDGALNVDVNEFQTNLVPYPRIHFMLSSYAPVISAEKAYHEQLSVAEITNSAFEPSSMMAKCDPRHGKYMACCLMYRGDVVPKDVNAAVATIKTKRTIQFVDWCPTGFKCGINYQPPSVVPGGDLAKVQRAVCMISNSTSVVEVFSRIDHKFDLMYAKRAFVHWYVGEGMEEGEFSEAREDLAALEKDYEEVGAEFDEGEEGVEAGRAGLPPLLQPPPPPPHPSLHHRFRLAAMGKVHGSLARAGKVRGQTPKVAKQDKKKKPRGRAHKRMQYNRRFVTAVVGFGKKRGPNSSEK

SEQ ID NO: 301342 - protein, 54 aa, Zea mays
  Clone ID: MRT4577_37900C.1.pep
RFYSFLLFFSRKKTTMPYIPAWGACSKKRTEWYTCLDKGANRGSDFNPRHHILA

SEQ ID NO: 301343 - protein, 128 aa, Zea mays
  unsure (1)..(128): unsure at all Xaa locations
  Clone ID: MRT4577_37901C.1.pep
MDKPXGEGATKQXMIDCYIQTLVKVLGSEEEAKKKIYNVSCERYFGFRCEIDDETSNKLEVLPGVLFVLPDWYVHPPXKDYGVEMIVNGEIVXRGNKRXRRVETEPQRVGDRPRHNDRTRYARRRENQ

SEQ ID NO: 301344 - protein, 45 aa, Zea mays
  Clone ID: MRT4577_37902C.1.pep
HIGRCLCPLPASIFGAVPCLFSIPSHSNSGGAMVTTEMHFDWSYC

SEQ ID NO: 301345 - protein, 71 aa, Zea mays
  unsure (1)..(71): unsure at all Xaa locations
  Clone ID: MRT4577_37903C.1.pep
MVHTEMLYSNKEILITWASLYTEAYTFKHLCDMGDHASKMIVFNLWINDDGDMXLIHNSRQKRYTHYWGPH

SEQ ID NO: 301346 - protein, 69 aa, Zea mays
  Clone ID: MRT4577_37904C.1.pep
TSNSKATTLSPVTSLSFKLSNTYRSSTLVDLTTFDYQNSFAMSVTRQPLSEILASDRAAMKHPKFMHRI

SEQ ID NO: 301347 - protein, 72 aa, Zea mays
  Clone ID: MRT4577_37905C.1.pep
KPPINQMEIFLYAPPHLSPIISPFIFLGVIFGEKIFQKKNNKKKKNKKDSKKVAPPPRPTKYGTKTQKKPPT

SEQ ID NO: 301348 - protein, 55 aa, Zea mays
  Clone ID: MRT4577_37906C.1.pep
TKLFKVNKLLFEELHVVRYSTVHQGHFRSSKELESNDLSTSLPFIMKLIQLSCQP

SEQ ID NO: 301349 - protein, 34 aa, Zea mays
  Clone ID: MRT4577_37907C.1.pep
YCVLCGTPDVLWMKSEHCIGHSKVQQFNTTQRAW

SEQ ID NO: 301350 - protein, 110 aa, Zea mays
  Clone ID: MRT4577_37908C.1.pep
FPRARHWFLPVARQVSPWGPFLDRKFCFLAPLFFFRQGLPRLVPGPKGSGPGKFLSLRFGPKGAPLRNGGFFVPLRGPRGRKKTPPGFFFFRWKGMGLRGFFSPGGPWFF

SEQ ID NO: 301351 - protein, 152 aa, Zea mays
  Clone ID: MRT4577_37909C.1.pep
YVLLSFPSFPVCPHSAPCHLVWCVTRKPQLPSWNCKEHMRLRVAHTHLLLRLTLFTSSCFTRLSIFIFLLTFLQRQIQTFISEAKPRATGRFSVACILEGKWRQFYENNVMVVGAHCVPICISNCSGDLAWCTNCTGSSCGRLAMIRQGCGS

SEQ ID NO: 301352 - protein, 95 aa, Zea mays
  unsure (1)..(95): unsure at all Xaa locations
  Clone ID: MRT4577_3790C.1.pep
RTHTFAKTLKLETITHQAQPGVTTHNHEDAIQEHEGMPPHQHHLILPGQALEVRRTLVDFNIHTEXTLHLLLRLRRGVQIFVNTLTGKTIILEAE

SEQ ID NO: 301353 - protein, 148 aa, Zea mays
  Clone ID: MRT4577_37910C.1.pep
IISTRLFHFPLKNFFFSSFPKLFAKKFKNFPPAFFPFKTFFSPRLKYSRPPNFFSGNLLRFLAPPKKTFVLNFKAPSRVIRLFPRFLPPRNLFSPFFFKPILPGGPLLPQLPKIFRPPFFFFPPPKPLTPRFFLTNFLKIFFFMFGVP

SEQ ID NO: 301354 - protein, 43 aa, Zea mays
  Clone ID: MRT4577_37911C.1.pep
TKKQYGIWWSLIQSWVMHEVWILFLLLVKVEELNHTNNTLASL

SEQ ID NO: 301355 - protein, 26 aa, Zea mays
  Clone ID: MRT4577_37912C.1.pep
MIIRRKFHGLNHGFNAVRKLTISLYI

SEQ ID NO: 301356 - protein, 49 aa, Zea mays
  Clone ID: MRT4577_37913C.1.pep
PGRPTRTIFFENIFSLTYCNCLAFLVAVILNSTASLLYLSTILLFLPTN

SEQ ID NO: 301357 - protein, 88 aa, Zea mays
  unsure (1)..(88): unsure at all Xaa locations
  Clone ID: MRT4577_37914C.1.pep
CSSSRCPGADWCGKTERNSHVGSVRGPQQSETRFVIYIKAGGYFENVEVGSEKTNLMFVGDGIGXTVIKASRNVVDNSTTFRSATIGQ

SEQ ID NO: 301358 - protein, 91 aa, Zea mays
  unsure (1)..(91): unsure at all Xaa locations
  Clone ID: MRT4577_37915C.1.pep
RYVRSVFIRDNSEELIPSXLTSVKGIDDCEDATLNIFRETVHPNRILTAIRNNQAKKCIXESPFEIADNNGDYNKFYEAFPKNLMLGIHED

SEQ ID NO: 301359 - protein, 81 aa, Zea mays
  unsure (1)..(81): unsure at all Xaa locations
  Clone ID: MRT4577_37916C.1.pep
GXGRLFQQDTFHSLPAGKTCIWRKDRTGLHIPTRHYYILGGAGYIYITHSITKGNLNGGGFILKPPPNKDNNPQTPAFIYI

SEQ ID NO: 301360 - protein, 197 aa, Zea mays
  unsure (1)..(197): unsure at all Xaa locations
  Clone ID: MRT4577_37917C.1.pep
QTKHGAEAAAAACAHLPACSPFGFGSXPDEATVIVKGSTRIAETDDNYVCATIDWWPPEECNYNQCPWGQASILNLDLDHPFLAQAIQXAIVTFGVNALYGRYNVRRSIWAGKWNSTNAYDFVKYTISKGYPVGSWEFGNELSGHGIGAKVDAKLYGKDVIEFKSILRQLHKAPLSQPLLLAPGGFFDQQWYSQLLE

SEQ ID NO: 301361 - protein, 544 aa, Zea mays
  unsure (1)..(544): unsure at all Xaa locations
  Clone ID: MRT4577_37918C.1.pep
QTKHGAEAAAAACAHLPACSPFGFGSXPDEATVIVKGSTRIAETDDNYVCATIDWWPPEKCNYNQCPWGQASILNLDLDHPFLAQAIQAFDHLRIRLGGSLQDRVVYDVGTESPCSPFTNVSNALFGFSVGCLGMDRWDKLNDLFERTGAIVTFGVNALYGRYNVRRSIWAGKWNSTNAYDFVKYTISKGYPVGSWEFGNELSGHGIGAKVDAKLYGKDVIEFKSILRQLYKAPLSQPLLLAPGGFFDQQWYSQLLETSGHGVVNALSHHVYNLGGGNDVHLIRKILDPKYLDRAEDTYRDMQLTIQRHGTWASAWVSESGGVFNNGGQLVSNTFINSIWYLDQLGMASKYNTKVFCRQTLIGGNYGLLDTQTFLPNPDYYSALLWHRLMGNGVLSVDINAPRQIRAYAHCRKQQQGITILLINLSNTTGYNVTLQNDINVSLGKRPDLEKRSSFTHRLRKAVSWLGRKPASNTRRREEYHLTAKDGDLQSKTMLLNGAPLELGDAGSIPAMDPVLVAVDLPVQLAPTSIAFVVLPKFEAKACS

SEQ ID NO: 301362 - protein, 107 aa, Zea mays
  unsure (1)..(107): unsure at all Xaa locations
  Clone ID: MRT4577_37919C.1.pep
NIVSMANPKGLGYAMYTTQHLKFVKDISAXTGIVLDTVHSGKAVYRLLKDMLCNPSTWKGRKVLFIHSGGHLELYDKAVQLSSVAGSWLIMAIXDCVPWIDGTGKMF

SEQ ID NO: 301363 - protein, 79 aa, Zea mays
  Clone ID: MRT4577_3791C.1.pep
CYFIVGYLAEQSKDKRSERDVLGMSIEECDYSSASTKPGYSLQLGDSKIERSMEDTSGRLLDGGSGREVWENRRSRLGK

SEQ ID NO: 301364 - protein, 90 aa, Zea mays
  Clone ID: MRT4577_37920C.1.pep
SSSYGCAKQYLVLVPNVNMIQHLQLPRCLLLPLLVHPPLCRRLPWLCLHTKMTLLVAPLRVTATPSVFTVSASCSSVSAPPPPLALHATG

SEQ ID NO: 301365 - protein, 84 aa, Zea mays
  unsure (1)..(84): unsure at all Xaa locations
  Clone ID: MRT4577_37921C.1.pep
WDVMSKXKVCEIAPKRIILWPKKKRQRFFLAPRVGGSADLTAQTGVESLLKLAFXKGSKNPPPLVGGDLKAQRKFKNKNFPCQG

SEQ ID NO: 301366 - protein, 135 aa, Zea mays
  Clone ID: MRT4577_37922C.1.pep
QVYDPRADRWEAMPAGMREGWTGLSVVVAGRLFVVSEYERMKVKVYDPETDSWDAVGGAPMPERIMKPFSVSCVDSRIVVVGRGLHVAIGHVREEPAGGGPGSRGAPGYSVCWQDVDAPKEFSDLTPSSSQILHA

SEQ ID NO: 301367 - protein, 46 aa, Zea mays
  Clone ID: MRT4577_37923C.1.pep
KRWDWANPRETQLTRLAAQDPTARWRRTHKARTDRPTQKLLSQNGQ

SEQ ID NO: 301368 - protein, 57 aa, Zea mays
  Clone ID: MRT4577_37924C.1.pep
LFSPILLSDGCKFLPFQPEPSRHPAPFLAVEDEEVAFTHVHPDLSHLSSISFCVLLP

SEQ ID NO: 301369 - protein, 243 aa, Zea mays
  unsure (1)..(243): unsure at all Xaa locations
  Clone ID: MRT4577_37925C.1.pep
MAAAARRGPGALLLVALLLLALVVSGHCLDAHHRGLKRRRRKHEIHSPIKTVVVVVMENRSFDHILGWLRRTRPDIDGLTGRESNRLNASDPSSPEIFVTDEAGYVDSDPGHGFEDIREQIFGSADTSAVPPPMSGFAQNARGMGLGMPQNVMSGFKPDAVPVYASLADEFAVFDRWFASVPTSTQPNRLFVHSATSHGLTFNARKDLIHGFPQKTIFDSLEENGLSFGIYYQNIPXTLFYQS

SEQ ID NO: 301370 - protein, 384 aa, Zea mays
  Clone ID: MRT4577_37926C.1.pep
MELPRSMAVLVLVFVVLCRVGEAATFTFVNRCTDTVWPGVLSNAGSPRLEPTGFELPPGAARAVPAPAGWSGRMWARTGCSQDGGTGRLVCATGDCGSGSAECAGAGAAPPATLAEFTLDGSGGLDFYDVSLVDGYNLPVLVETSGGGGSTGPASCAAAGCAADLNAMCPAELRAGGGGACRSACDAFARPEYCCSGAFASPAACRPTAYSQVFKTACPRSYSYAFDDPTSTFTCGGGPDYTVTFCPGATPSQKSTTMPSATPTTVPGGTTTTVPGATPTTVPGTMPMPGATPALPTGTMMPGTTFTDATPDSGMPMGGGGGLGIEGGEQGSVLLGASSGEGGVSWLANMATGDASAAGAPLVASARFVVATLLCGLHLRRLLL

SEQ ID NO: 301371 - protein, 131 aa, Zea mays
  unsure (1)..(131): unsure at all Xaa locations
  Clone ID: MRT4577_37927C.1.pep
FVSPEGVWEARPCVMLLASLSGDAXDDELVSXAKPVRTIRVKARHCQVTHEIYVRYDASFGELMKMMSYKTVLHQVHQMVLSKDKVRDSKGNLDVACIMDRSKVECVEDPXEXRALLLIEEGSICHLQKAV

SEQ ID NO: 301372 - protein, 74 aa, Zea mays
  unsure (1)..(74): unsure at all Xaa locations
  Clone ID: MRT4577_37928C.1.pep
MGKLAFGSVRDSFSATSINAXLAEFIARLLVIVAWVGSAIGXGRLXNGGTLDYEGLAGIGIAHALGLFVGVCVP

SEQ ID NO: 301373 - protein, 90 aa, Zea mays
  unsure (1)..(90): unsure at all Xaa locations
  Clone ID: MRT4577_37929C.1.pep
RAAAAARRDAAEVFLVSDPSGRMVKSSLQRILNSHCFAREKEGGKPSATIHASRTMPLLSLHSRGGSGSESSQXSLHCCSNPGPGPRWCS

SEQ ID NO: 301374 - protein, 102 aa, Zea mays
  Clone ID: MRT4577_3792C.1.pep
SGTPPSPQQVLRRHRRPLRRRTDPRRRTRASYCDPAAPAIDGESEWMMEDGELISRRRRGACVSPPEKTRRDCLAEFRPSSTDRSPPTTVLCAGDQTRVFFS

SEQ ID NO: 301375 - protein, 50 aa, Zea mays
  Clone ID: MRT4577_37930C.1.pep
EWPAQPTRPPHNPSLLFSSYTLSRAQESGKDLTIMVNPINMAMFTVVFPF

SEQ ID NO: 301376 - protein, 398 aa, Zea mays
  Clone ID: MRT4577_37931C.1.pep
MAPVCIKLVLWSVWILLGFSFPTSLIETTFSATFDRLMGPLMSMVPSCTADECTAHKFIEKFFTYRFVMGLKTDFEAIRTRLLHGSTSLTMTEALSDLLVEETRLSSLFVPHTPVFHNVLAASHKYGGKGGYFEPCKHCNKTTHRSDQCFLKYPEKLAEFRSHRTNQGHGPSKGSINLSWIHVQQSLMGLLFKWLMDRRSGTVIGTGHRHRDLPDSILWTLYVYLLSTLPVFHPMCPLHLLLNGIIVLATYGEAVSTPIYLINRQPSTKLANKCSGEGYNLRDRTTIAPLDRYHYPRSVAVIVEPTTYQEAASIHEWQLAMIEEFAALDRTVKTKSDGSVERYKACLVARGFQQSQGRDFDETFAPVAQMTTVRTMIVVAATRSWKIHQMDVKDAFLH

SEQ ID NO: 301377 - protein, 83 aa, Zea mays
  Clone ID: MRT4577_37932C.1.pep
ISLSWIHVQQSLMGLLFKWLMDRRSGTVIGTGHRHRDLPDSILWTLYVYLLSTLPVFHPMCPLHLLLNGIIVLATYVGLGYLL

SEQ ID NO: 301378 - protein, 54 aa, Zea mays
  Clone ID: MRT4577_37933C.1.pep
THASALPTRYPHSLSSFYQSHQEWIYTDALQPTHPSSSTEIMKLTTIKTTLRPI

SEQ ID NO: 301379 - protein, 61 aa, Zea mays
  unsure (1)..(61): unsure at all Xaa locations
  Clone ID: MRT4577_37934C.1.pep
QHQPAXRAGRGGRQPPQPQPRHATRRPGAKVRRRRGRWWGVVAGAEAREGPPFLASYAMPC

SEQ ID NO: 301380 - protein, 93 aa, Zea mays
  Clone ID: MRT4577_37935C.1.pep
FPSSLVGGGAGATYNRTCLPPNGLAHDPALWTSKATSPTCVPFIQGDETVPYRSEETYLYLRCPSARYLQGTPLSSSPWKDGSFLSCNIKGSP

SEQ ID NO: 301381 - protein, 242 aa, Zea mays
  Clone ID: MRT4577_37936C.1.pep
MAMGAASILLMMVSLETLLLAAGAGAGGTIRLSSDVGGVAADLVTAMARARARAKHQLRDEERPWGECCDLAVCVKTYPLTCSCFDRVERCSDACKECVETEDSRHVCVDRYRGDPGPRCHDEDGRSGGPADDDAGGQATPTAVMADDKKAGGGDDDKKKRPWKCCDVPICTRSWPPVCRCADTVERCASTCQHCEQVEEGGPRRYRCLDTHRGDPGPRCGDGEDDGGEWSPTPRLARGHRF

SEQ ID NO: 301382 - protein, 138 aa, Zea mays
  Clone ID: MRT4577_37937C.1.pep
KTTPTGGIESATTRPLLPSRSRRRRCRRRGGGGGGRGGRGTAARGCSCRAQRWAARNRRRRRAPPAPGWSPAWAPSGGTCRTRPAPRSPWRGVRPRGAARRAAAAAAARRPWRRPAGGSLRKTWSAGGPAPGGGAGTG

SEQ ID NO: 301383 - protein, 239 aa, Zea mays
  Clone ID: MRT4577_37938C.1.pep
MAMGAASILLMMVSLEALLLAAAAGGGTIRLPSDVGGVAADLVTAMARARARAKHQLRDEEERPWGKCCDLAVCVKTYPLTCSCFDRVERCSDACKECVETEDSRHVCVDRYRGDPGPRCHDEDGRSGGPADDDAGGQATPTADDKKAGGGDDDKKKRPWKCCDVPICTRSWPPVCRCADTVERCASTCQHCEQVEEGGPRRYRCLDTHRGDPGPRCGDGEDDGGEWSPARRLARGHRF

SEQ ID NO: 301384 - protein, 59 aa, Zea mays
  Clone ID: MRT4577_37939C.1.pep
MFHAAPVTASSSCAFSGGSTVNGCRPRKRLSTSRVWAVFEQVPGPLDKGKKVRFSSRRI

SEQ ID NO: 301385 - protein, 97 aa, Zea mays
  Clone ID: MRT4577_3793C.1.pep
YHLPRNVLETGKVESLSGPYMTVALDLPKKDKDIPSRSLACSSMACNRSFSSLFSVVKPEVSLCITSKLQHHNGINIRVVIDHIYIEGNGTNSCTRR

SEQ ID NO: 301386 - protein, 64 aa, Zea mays
  Clone ID: MRT4577_37940C.1.pep
MDCETCLLKELELELTKIRDAMRWILHTIFFHTTLRLSRPEDGDCDFLNITYVHKRTTGARYRS

SEQ ID NO: 301387 - protein, 134 aa, Zea mays
  unsure (1)..(134): unsure at all Xaa locations
  Clone ID: MRT4577_37941C.1.pep
MRVLLVALALLDLGASATSTHTSGGCGCQXPSPVHIPPPVHMPPPDDLPPTEHIPPAAQLPPTVHLTPASHEPPTANLPTAPCHYTTQPSRTKPNTQTHPCPGQQTYSSPCQLHGTXDVXTTPILIQCVEVLKP

SEQ ID NO: 301388 - protein, 81 aa, Zea mays
  Clone ID: MRT4577_37942C.1.pep
KHSHSRIFTVRVLEDVGLHLEESDGVHLGLREQVPLVVQASHCTRIVRDGHVYVLAVYGPLMLVPLALLIHHVRKSRTNLG

SEQ ID NO: 301389 - protein, 165 aa, Zea mays
  Clone ID: MRT4577_37943C.1.pep
LGTSRPAGVAAAASLLSAPRHLHDHPFAACVLYRVARARLFPLLPPLLAALRSLRVPLQPTAFAALIDHLGAASRPDAALLVFRAVPAFCSHSNATFHALLHSLVCNGRVDAARDMLPEAPKLGVRTNAVSYNIILKDVCHRDGFSGARVVLDEMLARGVRPTVV

SEQ ID NO: 301390 - protein, 112 aa, Zea mays
  unsure (1)..(112): unsure at all Xaa locations
  Clone ID: MRT4577_37944C.1.pep
KRVGLNXXXTXNGLTSGRSRREKKHVTYTFDDYERSINGAIKTIRENENAGEGGPSPLCKGFYGETPQKFDYKAKTNERKAETLHRSYRQRKRSQRYTKDYGEAISDIGLDF

SEQ ID NO: 301391 - protein, 55 aa, Zea mays
  Clone ID: MRT4577_37946C.1.pep
PPNSHKWLFTPTLTKLHWWRTPGPHLLQKLRNFIGAKSPLFVPRPVGCGKMKKLL

SEQ ID NO: 301392 - protein, 128 aa, Zea mays
  unsure (1)..(128): unsure at all Xaa locations
  Clone ID: MRT4577_37947C.1.pep
PPWPNPPGVAPPPQPPXPQLPPVFRGGPPFSPXGFFPGPPRPPLPPSTFGLSPPGGKTPPGPSFFFCFVKRAQNLAFERGCFFRVPGPLDFGPKISRPLWENVGPQSPAPGPPPPPNLAWLVLTPSWV

SEQ ID NO: 301393 - protein, 76 aa, Zea mays
  unsure (1)..(76): unsure at all Xaa locations
  Clone ID: MRT4577_37948C.1.pep
RPKTGKDDXRTRTAGPKHGEKXEGRGGNNGXTRTAGGRANREGXTGGGXDKXQQANHXXPXTQARTSRDGSHNGEE

SEQ ID NO: 301394 - protein, 60 aa, Zea mays
  Clone ID: MRT4577_37949C.1.pep
PMIILKWEAKSDWACLEGSFVCQGLFSVACALETPCHRCVCFNRTRVPDVLPVEIYALVN

SEQ ID NO: 301395 - protein, 65 aa, Zea mays
  Clone ID: MRT4577_3794C.1.pep
KGTFKQQTLASKDYTGTAQIPPLATPLSKLTGSCLLISRPPWSTIRRIPCSGVHPVDSRKIASVM

SEQ ID NO: 301396 - protein, 180 aa, Zea mays
  unsure (1)..(180): unsure at all Xaa locations
  Clone ID: MRT4577_37950C.1.pep
INTPHIDILDFSALPKGESVTSKLKEMCNNXGPDVSIECAAGEYAKGWAHYFEMMLGLETDTSEIVNEMISSTRNMGRCGITGVYVGYTNHFNIGSLMERGIRLIGNGQAPVHMYWESLLQMIQEKRIDPSKMVTHRVRLEDLDKVYYKFEKKEDGMQKVFVETKWSFPASKCSPELTRY

SEQ ID NO: 301397 - protein, 63 aa, Zea mays
  Clone ID: MRT4577_37951C.1.pep
NEILFHESKRDESKRDVTVIFACNHRIQEQSRISHMRTGFKSSGRLVPKKIPKIWFQANKNTL

SEQ ID NO: 301398 - protein, 292 aa, Zea mays
  unsure (1)..(292): unsure at all Xaa locations
  Clone ID: MRT4577_37952C.1.pep
SRPAGTALTLTDATVVCARNETRVRLLVLPTAVAELPKNGQQRGTSSLISSSSSSSFLVVKTLLRQAEAARPSFTVRAAADSDRPIWFPGSTPPPRLXGMLTGDFGFDPCGLGSDPESLPWNXDAELVXHCRSAMLGRVGXIFIPEFLTKIGDLNTPFWYTAGEXQQYFTDTTTLFIIELILIGWAEGRRWADIIKPGSVNTDPIFPSNKLTGTDVGYPGGLWFDPLGWGSGSPEKIKELRTKEIKNGRLAMLAVMGAWFQAEYTGTGPIDNLFAHLADPGHATIFQAFTPK

SEQ ID NO: 301399 - protein, 126 aa, Zea mays
  Clone ID: MRT4577_37953C.1.pep
FKKKKFFPFNQLFTMKPGGYLQQQLFPFSQVGVAYFQKKKIFPFKQLAALNPPGYFQQQKLLPFNQLGATNRGSFFKKKKLLPFYQQFGAKPPTLLKIQKMLPFVQLVLKKTRGSYQKKKIGGALF

SEQ ID NO: 301400 - protein, 122 aa, Zea mays
  Clone ID: MRT4577_37954C.1.pep
LMMAGRRRSWRRWFYSVGRGRRAGDGRHLPLMASNNGKDEREIRASGEGDGRSTSLRRRSRESRSRAADTKWRSALQLSHGVVVVIRFVHAGKGLEDKQSWEGPHVSELRGEGNASWKQLGL

SEQ ID NO: 301401 - protein, 42 aa, Zea mays
  Clone ID: MRT4577_37955C.1.pep
GRTFQADDCECFVVTVSGLAFFPLFSTGDTRNMDGSRATSDW

SEQ ID NO: 301402 - protein, 172 aa, Zea mays
  Clone ID: MRT4577_37956C.1.pep
VSQFPSPVPRHPLPVDSSHPSLADSSAHGPERPSGPEGAPHDRLSPTDALTHTSIANPSDAACTFIRGSASVSPPPSVGIEIRGGPFPASFRKGIFRDCRAIHTLGFLRAVFGGPSSTVELMYMLTSPSTRGGVRIQFAWIYWTREKPRRWRKPCSYIQSLGLLTKTRGGIQ

SEQ ID NO: 301403 - protein, 231 aa, Zea mays
  unsure (1)..(231): unsure at all Xaa locations
  Clone ID: MRT4577_37957C.1.pep
MFKKNVDAKALQRLSGADKKKLRRTAKQRFPQASDDDLDAILPPKVEITVAKYPSRTLVYGIEGELPMLFDIDGRGHELFPTVYALWKVPYLLPAFXLXGGEVSHFILGGADLMFPGISVPPEGLPSFQAGQPWSVKVPGNPAPIAVGTTTMSNTEALKAGLRGKAFADCTYYKDLLWASADGRYXPNEGFYDDXXIEDPNFASASQLIELFRRSFRRKADKAVNGLGVSY

SEQ ID NO: 301404 - protein, 158 aa, Zea mays
  Clone ID: MRT4577_37958C.1.pep
MFLMACAPNYIAIGLSNYGLYTGTRVLSPSYKNFPRKSSYKFLKVRALQGNDGRRRLIDIIRIIPELSRNYFKSGSRRALFGGIALLGGFYVAQTISLSFGALAVNDVIAAVVCVLLTEYVTKFYYSRPKVTFAVALLNNFKMGFTYGLFIDAFKLAS

SEQ ID NO: 301405 - protein, 105 aa, Zea mays
  unsure (1)..(105): unsure at all Xaa locations
  Clone ID: MRT4577_37959C.1.pep
XGGKTPGREFNTFYFYNCSGGLLYSNNKTINTPRIKTTFYLSAPGALSGTLLTKYSSSNITITPTYHSYYIKGWAGHHCVKTSLLACLSQERRKRKDVSKHRAQP

SEQ ID NO: 301406 - protein, 586 aa, Zea mays
  unsure (1)..(586): unsure at all Xaa locations
  Clone ID: MRT4577_3795C.1.pep
MATFAKPENALKRAEELIHVGQKQAALQALHDLITSKRYRSWQKPLEKIMMKYVELCVDLRKGRFAKDGLIQYRIVCQQVNVSSLEDVIKHFXQLSNEKADRHESQVEALEDALDVEDLEADKRPEDLMLSFVSGEKGKDRSDKEVVTPWFKFLWETYRTVLEILRNNSKLEALYAMTAHRAFQFCKQYKRTTEFRRLCEIIRNHLANLNKYRDQRDRPDLTAPESLQLYLDTRVEQLKVATELCLWQEAFRSVEDIHGLMSMVKKMPKPSILVVYYAKLTEIFWVSDSHLYHAYAWLKLFNLQKNYNKNLSQKDLQLIASSVLLAALSVAPYDKKYGASHLETENEKERNMRMANLVNFSLDSKRENREMPSRASLLSELASKGVLSCASQEVRDLYNLLEHEFLPLDLASKVQPLLSKISKMGGKLSSASSVPEVKLSQYISALEKLTALRVLQQASCIFQSMKIDMLSRMIPFFDFFVVEKISVVAVRRNFVAIKVNHLSGAVHFGTVDIESDGLSDHLSVVADSLNKAKIHICPPVKKPSKLGESFISLAGIVENEHXKRLLARKSIIEKRKEELERQILEK

SEQ ID NO: 301407 - protein, 125 aa, Zea mays
  unsure (1)..(125): unsure at all Xaa locations
  Clone ID: MRT4577_37960C.1.pep
YSASRGTPRPQDDRPPPMTRRRRPTVPGRWSAPSARPRSSSXYPIPAGWRATARPPPXPSPPEAAPPPPPMPAPARGPPPQQRCQANRPCQTSSTPSRRTGPCRAATPAVDPAADWGGGASTWRV

SEQ ID NO: 301408 - protein, 36 aa, Zea mays
  Clone ID: MRT4577_37961C.1.pep
GTQGLKFKVSGCKFCGNVKGKKFFKGKSYWHDLGKV

SEQ ID NO: 301409 - protein, 146 aa, Zea mays
  Clone ID: MRT4577_37962C.1.pep
MAAVRCAARRLGGSLLQRTQAAVAEEGRLLAPSRLMRSRQLSTKVSGERSQVAERHLLEPGSLMRSRQLSGEHARNIQKKEDDCWAGFNETLKRLDELQKKKKPSVFQQRMISIDRALKSLVYGSFKVTVVYVAAATAFSGSGLEA

SEQ ID NO: 301410 - protein, 56 aa, Zea mays
  Clone ID: MRT4577_37963C.1.pep
KGAYPLDYGLQVQSLKTGGHTTCQDYNRNTWHYMTRPLHGRAVQQSNHLSTDYWLG

SEQ ID NO: 301411 - protein, 87 aa, Zea mays
  Clone ID: MRT4577_37964C.1.pep
RCLGLPGGARGCAARRRVRVPRPGTLPSTSGGALPCTLMSLPDLSAASCNRGWCVDSETLKREAHWGGAADEMGHPHEKGPGRLEVP

SEQ ID NO: 301412 - protein, 108 aa, Zea mays
  unsure (1)..(108): unsure at all Xaa locations
  Clone ID: MRT4577_37966C.1.pep
RLRVPGRLYRVELAICCLPTHFLIFRQVXTLNSTVYLRTLPLLTFKQVAGVSRATFXTTPHLLEXVPRAAPNAGTLXQLQQLLTLNQLALXTNPTGLYRQPIIGGALF

SEQ ID NO: 301413 - protein, 102 aa, Zea mays
  Clone ID: MRT4577_37968C.1.pep
VGAVEEALPNFHGNTQFMKDQGASGPPCFSNITACSLIISQQYDGARELHLHIPRPLETGVDDTTAALYRCPKRLQGSDWLLTIRRMYQPLGIKNSIAIYAG

SEQ ID NO: 301414 - protein, 51 aa, Zea mays
  Clone ID: MRT4577_37969C.1.pep
NTSLMALVIPYYHHMTLLVEYWDPLVPSRQRYFIGNVEIVLVHKYCVLLLT

SEQ ID NO: 301415 - protein, 244 aa, Zea mays
  unsure (1)..(244): unsure at all Xaa locations
  Clone ID: MRT4577_3796C.1.pep
YISPQAVGGEAIRFSGDRATRESSENTSGDGDLPRSSSWSSADLHHGAEDGNREDMLSNLPDHILLTILDRLNVRDAARTCVLSRRWQQLPAMLSQIKIDVLDFLPEGTTACYQREIVRINGAAVEATKSIMSRRDPSRNTIHLLSMKFFLRDNDTISIGHALGQIMATHKVEIAQFAILTEAHYSRRGDDDLVYYGRNFMLFFEACPXAFGGLTCLKLQXLRFGKSDICNVLLICKQLKHLRM

SEQ ID NO: 301416 - protein, 44 aa, Zea mays
  Clone ID: MRT4577_37970C.1.pep
TTSSFSKYTRAMRNPLVSSKYSGFQRFNGKINSNGAFFFLSLDF

SEQ ID NO: 301417 - protein, 76 aa, Zea mays
  Clone ID: MRT4577_37971C.1.pep
IASGTPPGSLIPERGHGYSPSLPSTPSRGRRPRPCRRHGHAALSRGHCPLLCGLNPIPGVSDSHITGARHLGAWAS

SEQ ID NO: 301418 - protein, 78 aa, Zea mays
  unsure (1)..(78): unsure at all Xaa locations
  Clone ID: MRT4577_37972C.1.pep
SNMTTYSTEQATLMDQHLRPRSDAGTSCFAAPDATXSAAXSLSILLFTSINERLIVPMDARLTGRPDWLTTLSRIASN

SEQ ID NO: 301419 - protein, 98 aa, Zea mays
  unsure (1)..(98): unsure at all Xaa locations
  Clone ID: MRT4577_37973C.1.pep
VADVVYIATSRRYKARIQIPGERIARAVKAXERGELXGYAAPVYLAGDNECLWCEGLEXLAIHAARHNKNTRIGPRHIEIAGGHDEELTKVLGGDSIL

SEQ ID NO: 301420 - protein, 126 aa, Zea mays
  Clone ID: MRT4577_37974C.1.pep
MPFCSVALSLTLDPAVQRQVGMLGERAGLLARDQVSRVLTVAQRRAEVVLDLVRFPAASPLCRRRLFFFAYATCGAVAAASSRASTKSAADDTMLRLFDYFHDLAHVEFGGDGGDVCRFAVAFPAG

SEQ ID NO: 301421 - protein, 135 aa, Zea mays
  Clone ID: MRT4577_37975C.1.pep
GGLNFKMEATEATGFPGVLTFYKIFFFTKVTIGFGYMRNGIGFQKGHANSRWGDPLAFLWGLGGLAFSELAFFWLSLFFKFFWRSLFIFWKEKLFLGRFFLLRTPPFPFFRRGRPPFSRGGPGAPKPPGREVKAF

SEQ ID NO: 301422 - protein, 56 aa, Zea mays
  unsure (1)..(56): unsure at all Xaa locations
  Clone ID: MRT4577_37976C.1.pep
MALLSRLTWLYVSGQLWQDAQTRAILYGLLXKSSTSVPKVLSVEDKLMNLLCKAIL

SEQ ID NO: 301423 - protein, 54 aa, Zea mays
  Clone ID: MRT4577_37977C.1.pep
KNPGIFFAGVPKEILLYSHLKFTEPLAKHLWNTPGFYRLNRSHRFFLISRKGPV

SEQ ID NO: 301424 - protein, 138 aa, Zea mays
  unsure (1)..(138): unsure at all Xaa locations
  Clone ID: MRT4577_37978C.1.pep
RFHKCYDRFQLKVRLLDCFQTIASNNFKVFQILRCIFFDPSSFKXXXXXXXXXXXXXXXXXXXXXXXXXXXXXXXXXXXXXXXXXXXXXXXXXKLFHSIHNSNACCNREIILICISWXXXXXXXXXXXXXXXPFHHLN

SEQ ID NO: 301425 - protein, 52 aa, Zea mays
  Clone ID: MRT4577_37979C.1.pep
TPVYSGCYSILSSTRSHQAPCVGHISWQMFSHQCGSLASILPKAVNPLDLQG

SEQ ID NO: 301426 - protein, 971 aa, Zea mays
  Clone ID: MRT4577_3797C.1.pep
MATFAKPENALKRAEELIHVGQKQAALQALHDLITSKRYRSWQKPLEKIMMKYVELCVDLRKGRFAKDGLIQYRIVCQQVNVSSLEDVIKHFMQLSNEKAEQAKSQVEALEDALDVEDLEADKRPEDLMLSFVSGEKGKDRSDKEVVTPWFKFLWETYRTVLEILRNNSKLEALYAMAAHRAFQFCKQYKRTTEFRRLCEIIRNHLANLNKYRDQRDRPDLTARDRVGLTAPESLQLYLDTRVEQLKVATELSLWQEAFRSVEDIHGLMTMVKKMPKPSILVVYYAKLTEIFWISDSHLYHAYAWLKLFNLQKSYNKNLSQKDLQLIASSVLLAALSVSPYDKKYGAFETENEKERNMRLANLVNFSLDSKRENREMPSRPSLLSELASKGVLSCASQEVRDLYNLLEHEFLPLDLASKVQPLLSRISKMGGKLSSASSVPEVKLSQYISALEKLTALRVLQQASCIFQSMKIDMLSRMIPFFDFSVVEKISVVAARRNFVAIKVDHLSGVVQFGTVDIESDGLSDHLSVLADSLNKARIHICPPVKKPSKLGESLISLAAIVENEHKRLLARKSIIEKRKEELERQILEKEKEEEKKRMSSQKKTADEERVRLLNEQRQREQDRIRREIEEKNKAEAKKMLEDLNKAGKKHVVVEGELTKEAIMELARNEQLKERHEMEKKLQKFAKTMDYLERAKRQEEAPLIEQAFQKRLEEEKILHEQEQLREIELSKQHHASDLQEKNRLSRMLEHKNALQERIIQERAAEFGRLKKERDERMNRLISSRKHERETVRKLMFYLNLEEQRIEMLREEEEARKREAEERRKREEAERKAKLDAIAEKQRLREIELEEKAKATREKLLKGSEAVRAPDSAPVAQPPRESAAAPAAAAAAPAPAPSKYIPKFKRGGDSSSIPSGSRDEDRWGSRGPLRQDGPPARLDAPSSRQDTDRWRGSRFSSNSTSSSSTWSRSRN

SEQ ID NO: 301427 - protein, 42 aa, Zea mays
  unsure (1)..(42): unsure at all Xaa locations
  Clone ID: MRT4577_37980C.1.pep
ILPGXGGSVXTYLKITIITQQSLQTNENSYTSRLPIXHWHRP

SEQ ID NO: 301428 - protein, 87 aa, Zea mays
  Clone ID: MRT4577_37981C.1.pep
AVIVPLSLASSSSIVPPRAGIGGRRGDKLSGADADADPAPTRYGASRASHRYGGPLDITLCCNFDITQLQHGLSGRGKHILGISEWH

SEQ ID NO: 301429 - protein, 108 aa, Zea mays
  Clone ID: MRT4577_37982C.1.pep
CQASQIRQIRRKMTEIMSNQASTCDLKELVSKFIPEVIGKEIEKATSSIFPLQNVFIRKVKILKAPKFDIGKLMEVHGDYAKEDVGVKMDRPAEGDEAMGGQEVAAAE

SEQ ID NO: 301430 - protein, 44 aa, Zea mays
  Clone ID: MRT4577_37983C.1.pep
VYAFIVIPVQMCLYMFDSLLDRCFWDCHSLDHLTSVRCSLRVIS

SEQ ID NO: 301431 - protein, 128 aa, Zea mays
  Clone ID: MRT4577_37984C.1.pep
QPARTGIRMHRVQHSDIVVARSNLFSSPRYPQCFSSRRSLRAGPELAVTHEQSITRDVSPVIIFGRERPGPLVTGCVKGSGDLGLLARHGGAVAPAFQPWVRVPGRARTAPCQVEHGQIRHPSLGQSM

SEQ ID NO: 301432 - protein, 98 aa, Zea mays
  Clone ID: MRT4577_37985C.1.pep
TPHIRRPSKTGISNGNLITPRAINRSKNHAGNVVMHSTKKDFCPSQARVSVVSTTHSAASRRRRSGSLSGCPMGVLATRSMNAEFFASMDAAADAASS

SEQ ID NO: 301433 - protein, 244 aa, Zea mays
  unsure (1)..(244): unsure at all Xaa locations
  Clone ID: MRT4577_37986C.1.pep
MATYFVLNTGAKIPSVGLGTWQADNGLVGDAVYAAVKAGYRHIDCAQAYNNEKEVGFGLXQMIDXIWTWAAMEELYDAGKARAIGVSNFSSKKLEDLLAVARVRPAVDQVECHPVWRQGRLRAFCASQGIHLSAYSPLGSPGTATVKAGAVLEHPAIVSAAETMGKTPAQVALRWGVQMGHSVLPKSTDEGRIRANLDVYGWSLPEDLLAKFSEIEQERLIRAGFFVDPEXVFKSIEEFWDGEI

SEQ ID NO: 301434 - protein, 47 aa, Zea mays
  Clone ID: MRT4577_37987C.1.pep
DCLVLTDSDIHPVCRLTLFNYKGLFAFLSIHVISIHVDWVGLNEFKS

SEQ ID NO: 301435 - protein, 87 aa, Zea mays
  Clone ID: MRT4577_37988C.1.pep
FTRALQSMSRSVREPILPAAVGSRRSSEQGFVAVYICSLFLSRGAPFFFQRALPACCRTPPGHPSGPIVSETAQKFRAIPSYGPVKL

SEQ ID NO: 301436 - protein, 76 aa, Zea mays
  unsure (1)..(76): unsure at all Xaa locations
  Clone ID: MRT4577_37989C.1.pep
AQVALRWGVXXGHSVLXESTDEGRIRANLDVFGWSLPEDLLAKFSEIEQERLIRAGFFVDPDSVFKSIEEFWDGEI

SEQ ID NO: 301437 - protein, 961 aa, Zea mays
  unsure (1)..(961): unsure at all Xaa locations
  Clone ID: MRT4577_3798C.1.pep
MATFAKPENALKRAEELIHVGQKQSALQALHDLITSKRYRSWQKPLEKIMMKYVELCVDLRKGRFAKDGLIQYRIVCQQVNVSSLEDVIKHFMQLSNEKAEQAKSQVEALEDALDVEDLEADKRPEDLMLSFVSGEKGKDRSDKEVVTPWFKFLWETYRTDLEILWNNSLLEALYAMTASLEPFTELXSYAAGLFSSPCVXSVHNXIVPFQALHSMHIVAVLYFCSNTLQSMIIVLVXSNSVLTLHLXQEIPTYSQEMXGLXMTMVKKMPKPSILVVYYAKLTEIFWISDSHLYHAYAWLKLFNLQKSYNKNLSQKDLQLIASSVLLAALSVSPYDKKYGAFETENEKERNMRLSNLVNFSLDNKRENREMPSRPYLLSELASKGVLSCASQEVRDLYNLLEHEFLPLDLASKVQPLLLKISKIGGKLSSASSVPEVKLSQYISALEKLTTLRVLQQASCIFKSIKIDMLSRMIPFFDFSVVEKISVDAAKQNFVAIKVDHLSGVVQFGTVDIESDGLSDHLSVLADSLNKARIHICPPVKKPSKLGESLISLAAIVENEHKRLLARKSIIEKRKEELERQILEKEKEEEKKRMSSQKKTADEERVRLLNEQRQREQDRIRREIQGKKHVVVEGELTKEAIMELARNEQLKERHEMEKKLQKFAKTMDYLERAKRQEEAPLIEQAFQKRLEEEKILHEQEQLREIELSKQHHASDLQXEKNRLSRMLEHKNALQERIIQERAAAVWPSEEXEMDGFGRLKKERDERMNRLISSRKHERETVRKLMFYLNLEEQRIEMLREEEEARKREAEERRKREEAERKAKLDAIAEKQRLREIELEEKAKATREKLLKGSEAVRAPDSAPVAQPPRESAAAPAAAAAGXPAPAPSKYIPKFKRGGDSSSIPSGSRDEDRWGSRGPLRQDGPPARLDAPSSRQDTDRWRGSRFPSNSTSSSSTWSRSRN

SEQ ID NO: 301438 - protein, 145 aa, Zea mays
  Clone ID: MRT4577_37990C.1.pep
MATYYTSQGSEREPSQNMYSRDPGNGTASYPPLPSALGNLLYLNSPASGGPYTDFGGVQQDCIEMPEPGHPSVMSHDSSAREIEPDMLGQQRRSFGLARGMKDEVLMRMMDGSGSHSSAADAIHDDAPNGIQLDFGVLSSHGPPA

SEQ ID NO: 301439 - protein, 311 aa, Zea mays
  Clone ID: MRT4577_37991C.1.pep
MATYFVLNTGAKIPSVGLGTWQADNGLVGDAVYAAVKAGYRHIDCAQAYNNEKEVGFGLRRVLDEGIVKREDLFITSKLWNINHAAEDVPVALNGTLKDLQTDYVDLYLMHWPVRMKKGAGFGPHAVVPSDIPATWAAMEELYDAGKARAIGVSNFSSKKLADLLAVARVRPAVDQVECHPVWRQGRLRAFCASQGIHLSAYSPLGSPGTATVKAGAVLEHPAVVSAAETLGKTPAQVALRWGVQMGHSVLPKSTDEGRIRANLDVFGWSLPEDLLAKFSEIEQERLIRAGFFVDPDGVFKSIEEFWDGEI

SEQ ID NO: 301440 - protein, 127 aa, Zea mays
  Clone ID: MRT4577_37992C.1.pep
KKKKRWGPVKNFNLSQWGPRGGSPTNHLWHFFWFFNKGGLFFKDKQTNFNPIYLYPLNLANFFPILGAPLGGKGPCFSKPVFNALEMDGVPPQPVSKTRFFPEKKNPGKKTPAISFAQTFFHGRGGG

SEQ ID NO: 301441 - protein, 62 aa, Zea mays
  Clone ID: MRT4577_37993C.1.pep
PQCTIPCWMIYVNRMSTASSHNVVKQWTVSKIVDGALYDGDQIYVWVLNQSLSFPSINMYAW

SEQ ID NO: 301442 - protein, 98 aa, Zea mays
  unsure (1)..(98): unsure at all Xaa locations
  Clone ID: MRT4577_37994C.1.pep
ARDPLGTRCIDMEKILTRADSRKLIVLPFNKTDLVTNEEXHKXLKSLKEEMPTVQFKCKTQEQLTNLGXKSSKLDKTYITPQRGEXLTPDNLVQLLQE

SEQ ID NO: 301443 - protein, 114 aa, Zea mays
  Clone ID: MRT4577_37995C.1.pep
RSPPRARPLTRRTRGRPYRRSRQRMRQGTYRDGDCNLACLLLFSRLLPGWAGAPARAPTRRWGGGSSSPTSWPCSRRLSTRNKGADPAARPAPRADPLCAVFWVPASFCGLLRG

SEQ ID NO: 301444 - protein, 66 aa, Zea mays
  Clone ID: MRT4577_37996C.1.pep
FCMETFLWAPRGAHVKKHAEREHSKNNLSQCFPPPQDLLTPKAFCFVSPHPSFSFFYIPWGSIKGV

SEQ ID NO: 301445 - protein, 35 aa, Zea mays
  Clone ID: MRT4577_37997C.1.pep
KKKKKKKKKKKKKKKKKKKKKKKKKKNKKKKKKKK

SEQ ID NO: 301446 - protein, 96 aa, Zea mays
  Clone ID: MRT4577_37998C.1.pep
LPPRSPVVLKKFPLKGFGLFRRSHLKKAPPGRKKVPPAGSFPPRWVAPFFPPNFLCGVPCSFQFSKWPSGLVCSPPRLIWLSFFLSQGNGGRFFSY

SEQ ID NO: 301447 - protein, 147 aa, Zea mays
  Clone ID: MRT4577_37999C.1.pep
GLRPDDYVLVYGPACRLAGDIYKTSDEAAAYYAFYDLKKTLANADYPINYLGSRWGSHENSLGSDTFDGVNIPHDLYMKLHILVYNLDFTGEATSGTYTGTVHRAFFTGVMAAMQCMMRVLELVIQLIMLHIIHHDMGDDSPVFVPL

SEQ ID NO: 301448 - protein, 152 aa, Zea mays
  Clone ID: MRT4577_3799C.1.pep
MADEYDAEQAAELKRKRAFRKFSYRGIDLDQLLDLSSDQLRDVVHARARRRINRGLKRRPMGLIKKLRKAKQEAQPNEKPDLVKTHLRDMIVVPEMIGSVIGIYSGKEFNQVEIKPEMVGHYLAEFSISYKPVKHGRPGIGATHSSRFIPLK

SEQ ID NO: 301449 - protein, 48 aa, Zea mays
  Clone ID: MRT4577_379C.1.pep
PLVRGRVGLAESLQLSVLASSTKRLAVREEIDPDGFPQHGAAHLCLHL

SEQ ID NO: 301450 - protein, 63 aa, Zea mays
  Clone ID: MRT4577_37C.1.pep
TRVLSQSLGYYKKAFRKRLPPHMCSSFAGFFPYVDKMIFCSTLKSTRTVPLPHQPESLTSAYF

SEQ ID NO: 301451 - protein, 270 aa, Zea mays
  Clone ID: MRT4577_38000C.1.pep
MGLALSRLEEIRTQYRMAAEDGEADSPAPAPVPPTGAAAASGGGTEKKKQADDSSSSSKTTEWVPHKFSEIVGQRRPGEDMFRGIYLPRSDQQPKTKKYWVDGRNANCFMLFPKGFSITWGSDERYWSWRKLTQEEKRGIDDEEANMEVAYLKDVCWLEIRAKLEMSHLTPGFTYVVAFVAKLEPNGYGWSEPVDLQIKCPGDIDGKPRQQRKESLWKTVDGKKWTDLNVGEVKAEAGQKGEMEIAMLRLGGDWKRGLSLRYIKIAPQKP

SEQ ID NO: 301452 - protein, 59 aa, Zea mays
  Clone ID: MRT4577_38001C.1.pep
RSNHGLQVIRPPCAMKLPYTALPAHPLHAYPLSYTQSPSTMPYGHRLSSLRRIRSCLVG

SEQ ID NO: 301453 - protein, 244 aa, Zea mays
  Clone ID: MRT4577_38002C.1.pep
MGVAFSQYRMVADGEAASPAPAPVPPTGAAAASGGGTEKKKQADDSSSSSSTTTKWVPHKFSEIVGGASDAEPGEEVFRGIYLALPDQQQKTKKYWVDVSTKANCFMLFPRGFSITWSSDTRYWSWCNLTPEEKRGVDPEEAAMEVAYLKDVCWLEIRARLEMSHLTPGFTYVVAFVAKLEPNGYGWSEPVDRQIKCPGDIDGKPRQQRKESLWKTVDGKKWTDLNVGEVKAEAGQKGEMEIAM

SEQ ID NO: 301454 - protein, 212 aa, Zea mays
  Clone ID: MRT4577_38003C.1.pep
MGLALSRRMAAEDGEADSPAPAPVPPTGAAAASGGGTEKKKQADDSSSSSKTTEWVPHKFSEIVGQRRPGEDMFRGIYLPQSDQQPKTTKKYWVDGRNANCFMLFPKGFSITWGSDARYWSWRKLTQEEKREIDPEEAKMEMEVAYLKDVCWLEIRAKLEMSHLTPGFTYVVDFVAKLEQNGYGWSEPVDLQINCPRRRRQEAAEGESMEDG

SEQ ID NO: 301455 - protein, 145 aa, Zea mays
  unsure (1)..(145): unsure at all Xaa locations
  Clone ID: MRT4577_38004C.1.pep
PTRPPTRPDPRVRPRVRPRVRVDHAVELAHFALFFNQGQCCCAGSRTFVHERVYDEFVEKAKARALKRVVGDPFRKGVEQGPQIDDEQFKKILRYIRYGVDGGATLVTGGDRLGDKGFYIQPTIFSDVQDGMKIAXEEIFGPVQS

SEQ ID NO: 301456 - protein, 246 aa, Zea mays
  unsure (1)..(246): unsure at all Xaa locations
  Clone ID: MRT4577_38005C.1.pep
MLSTRTAPKKVVGLSRTAVRGLATVQDGAPKRTYGGLRDQDRIFQNLYNRYPVDLKSARKMGDWYKTKGIILKGHDWIISEVKASGLRGRGGAGFPSGLKWSFMNFKDWDKDNKPRYLVINADEGEPGTCKDREIMRKDPHKLIEGCLISGRAMNATAAYIYIRGEFVEEAAVLQRAINEAYAAGLIGKNACESXXXFDVYLARGAGAYVCGEETSLIESLEGKPGKPRLKPPFPGXXXLFGCPST

SEQ ID NO: 301457 - protein, 72 aa, Zea mays
  Clone ID: MRT4577_38006C.1.pep
LASQRHIVQHIVSSVGYTAGSSVGGMESACCSPLHRRQLLRYMHRLTAPQPGRFATAAPGWNKKTKKKSSLS

SEQ ID NO: 301458 - protein, 98 aa, Zea mays
  unsure (1)..(98): unsure at all Xaa locations
  Clone ID: MRT4577_38007C.1.pep
LFGASKKINAQGTSTTPQAQPVAFKATEDKKDESTSSKQPIDASKLDNKEITLIIKSFRQNLKQRRGKDYKPHSKKVCYKXRKPPHFIAKCPISNDND

SEQ ID NO: 301459 - protein, 49 aa, Zea mays
  Clone ID: MRT4577_38008C.1.pep
ALRVVLVAVNEIFSNYTNNTFLTEGDHNTRGNRECSGLFLASKGTTFNS

SEQ ID NO: 301460 - protein, 38 aa, Zea mays
  Clone ID: MRT4577_38009C.1.pep
LPSPSSLRCRPRLAMVLAVLRGMETILLSTPSMFFWSR

SEQ ID NO: 301461 - protein, 64 aa, Zea mays
  Clone ID: MRT4577_3800C.1.pep
IKSWNNYKEIHGKLRIQVPERHEAKNMYEFVNNNGDLALARRLDHKFLHESHTHTSTTSMPLRR

SEQ ID NO: 301462 - protein, 120 aa, Zea mays
  Clone ID: MRT4577_38010C.1.pep
REWGVASGCEVADGGRHAEVGADAVADAAAFVVWGGRRRSPQRYSAQHVGVELDAVGVVVAASAQDVGAPEEEADPLLGGEAREHRQFWSTGSLFSQMLTRPHVHERRRAWRNICYLRST

SEQ ID NO: 301463 - protein, 76 aa, Zea mays
  Clone ID: MRT4577_38011C.1.pep
QDCLLSAGKWSKLKFISASREPVGEKGVDRSDSVLVSAFLSSHRCCGVQTSQRLQAWRRDGFLKERKKWCFLLTIY

SEQ ID NO: 301464 - protein, 78 aa, Zea mays
  Clone ID: MRT4577_38012C.1.pep
RTTLTRGWGHYKPYHNTTWIPGDAQGIERGNHQTGLAFVNPGKKLPFWGGNIFFATTMEGNNAPTGVFLLVGVTTPLF

SEQ ID NO: 301465 - protein, 122 aa, Zea mays
  Clone ID: MRT4577_38013C.1.pep
LPRKGRPRCQVSLFHRKNVPGRVGPRPSGAESLKRDSSPEKPTGGNSPRPLQKVKKGLGKLAEAVFHRSPKKGIVAEPSPCVTPNQNIQPAGESRVSVPFVAVQNPGVDGSGSKPVYHHQSP

SEQ ID NO: 301466 - protein, 47 aa, Zea mays
  unsure (1)..(47): unsure at all Xaa locations
  Clone ID: MRT4577_38014C.1.pep
MNGPRVTHRQLLVLNLQIPXXTLRLMRQNMNLIVPNRFEKHMDGISQ

SEQ ID NO: 301467 - protein, 67 aa, Zea mays
  Clone ID: MRT4577_38015C.1.pep
HLFTYLWALKLETMQHISTNRIKHTIADLCCIVSSFKAIYLLIYDFYTRPNNLAKALIEWKIFFWEF

SEQ ID NO: 301468 - protein, 122 aa, Zea mays
  Clone ID: MRT4577_38016C.1.pep
FLAKCGKKVRIMCQIKCLAVNLRDEGLDRVIFRLSSPLNSTYHTINTAFKSLFRALLVSLRFSFVSSSLRYIFPSILHSELQCTQRCWKSYAEVMVRAMVASRSSREHPIVMPLVHPARHLA

SEQ ID NO: 301469 - protein, 94 aa, Zea mays
  Clone ID: MRT4577_38017C.1.pep
GENRRLNFLKAKKGLNFSTKGRDKTPSSAAKKQKKSWGQKFQKKKKFWLGAPYGPPPMGIGSAATPLLPFLFFPPPLFFVLGPKENQAFKFEMT

SEQ ID NO: 301470 - protein, 46 aa, Zea mays
  Clone ID: MRT4577_38018C.1.pep
MLLFTVRCLLNLNVSWNPKTPLKDLLKTTLTYQHKTYKEVVKSQMS

SEQ ID NO: 301471 - protein, 111 aa, Zea mays
  unsure (1)..(111): unsure at all Xaa locations
  Clone ID: MRT4577_38019C.1.pep
KGRQCCGYNQFFPFRDVEKGKAKYFFFFFHFRSFFGXFFIFFFMFFKIXFFMIHILLVTAHITMFFFFFSLLHFIYIYFIYFFFFFFFFFFFFFFFGNTNKSFTKIASGRS

SEQ ID NO: 301472 - protein, 87 aa, Zea mays
  Clone ID: MRT4577_3801C.1.pep
AIVINYQEGHKAAAVLPVLDLAQRQNGWLPISAMNKVAEVLQVPPMRVYEVATFYTMYIRKPVGKYHIQVCTTTPCMLRNSDSILEA

SEQ ID NO: 301473 - protein, 57 aa, Zea mays
  Clone ID: MRT4577_38020C.1.pep
EGKGINSPAGSFYKFFVVRKQPVILELMRGICRPCLLHNWANNLYWGFLKNKALFVL

SEQ ID NO: 301474 - protein, 99 aa, Zea mays
  Clone ID: MRT4577_38021C.1.pep
SVLQAVDPTKATTLPLVYHPIMLVHGYKIMHNPRSSMYITIGQSLCILSCTCTLMYMFVLYMHVYITCPYVCIYDVYNLVRISSYIYTVAVHVQMMIVQ

SEQ ID NO: 301475 - protein, 117 aa, Zea mays
  Clone ID: MRT4577_38022C.1.pep
QNRGRAPRAPRKTGLSGPIQKALVTGAQKLNRAELEVACEDFSNIINTIPTCTVFKGILPSGVEIGVVSTTISSSKDWSMSAESCFKNKIDRLSRVNHKNFINLLGYRLENEPFTRM

SEQ ID NO: 301476 - protein, 145 aa, Zea mays
  unsure (1)..(145): unsure at all Xaa locations
  Clone ID: MRT4577_38023C.1.pep
SVLRGAPPGAPASRRSAPRPPPSGQPSATSPSKINQGPPGPFQRPLPRTKSAPGNNLFEDLKTKWDPVEDNPTVLLYGRXAVVALWLTSVVVGAINAVPLLPKILELVGLRYTGWFVYRYLLFXKESXKEFGADIEXLKKKINWN

SEQ ID NO: 301477 - protein, 99 aa, Zea mays
  Clone ID: MRT4577_38024C.1.pep
PPVSGFAPRQGARGLFILVFPSFCLPGFYAFCFWPPGCVVSLMVTHFPLSPFMTMFSPRFNAPPFSQFWYGAGLRFPFLGFPPPVPPGVSFFFSRPRPP

SEQ ID NO: 301478 - protein, 132 aa, Zea mays
  Clone ID: MRT4577_38025C.1.pep
IRSFFLPKARSAMGGAPPAQPQRLLHTRFIRQVVPAPAQLHSAGRSAPGQLLAPLSQPTGRPSAPRENRSPACLIRLAGFSPFVRPFAQKHPLLSCIRFSLTKNSLCVAAPPRCVGPSNMIGGTIKKINEKK

SEQ ID NO: 301479 - protein, 113 aa, Zea mays
  Clone ID: MRT4577_38026C.1.pep
ECIYARIPCTLCHDDTSCHTIENQRLAISLSRTVYHLTSNLARARAHTHMPASALIDPYYSAPHSTCQHYTFLSVCMYLRQIIKGELKRYGAYAHIRNIYYVRTRIQAARVPG

SEQ ID NO: 301480 - protein, 225 aa, Zea mays
  unsure (1)..(225): unsure at all Xaa locations
  Clone ID: MRT4577_38027C.1.pep
MDGNKDEALRSVKLAKSAFASGDRQRAEKLIKIAQRLDPGLPLDDLLSPVEKVGILNISTCKDKTERGQALLYPKTTKESVGPLNVDKAYTEENIRVVQDIRKKKDYYAVLGVERRCTVEEIRKAYRRLSLKVHPDKNKVPGAEDAFKMVSKAFKCLSNDQSRRTYDQTGTTEDHEFNEQHPNVMRRGSCXRRRPARSGFXYEEDFDPNEIFRSFYGTHDNMFHP

SEQ ID NO: 301481 - protein, 161 aa, Zea mays
  Clone ID: MRT4577_38028C.1.pep
MATARAVLLSLCSPRPLRSLGVSRPGHGHRYRRAHPEFPGLTDFLCSLVPGQLPAPVSPASASYAQSSSVAARTNPCSPACSGFNHEASPASPRRDLPSPAESLAQAASSLCSTSAPSVYSLPQSSCVCEFFGGRALAVLHFAHRSASAPARCALYRFAQL

SEQ ID NO: 301482 - protein, 93 aa, Zea mays
  Clone ID: MRT4577_38029C.1.pep
HLPTTSPLISLTPSLWCCSSPPPLLTISSLVPMVPSPSWWLTPLPPWSSPLLCVHAATLSFLLPFPQDPCVLSLSLSPLGDDWVAGAQVFLGP

SEQ ID NO: 301483 - protein, 105 aa, Zea mays
  Clone ID: MRT4577_3802C.1.pep
PVGAGPLLALAPGFAAVAVGASQPRQEVNFQLQPAKLPPKLQQRPGRPRPGPGRGRLCLCPRQQQPPTVNRGPTIRCQKPNGVFFPCSGPRWLFSTLLGSGFFDK

SEQ ID NO: 301484 - protein, 191 aa, Zea mays
  unsure (1)..(191): unsure at all Xaa locations
  Clone ID: MRT4577_38030C.1.pep
MREAQLGSHTIQTHGVRLARKHTHDWVVLILLAALVVAVHHAPPFSRFVGKDMMTDIRYPVKPSTVPAWAVPMISILCPWLVFISIYVARRDVYDLHHAALGVLFAVLITAVFTDVIKTAVGRPRPDFFWRCFPDGKQSYDQVIGDVICHGDKNFLKDGRKSFPSGPLSWSFAGLGFWSLYLSGXIKPSSP

SEQ ID NO: 301485 - protein, 41 aa, Zea mays
  Clone ID: MRT4577_38031C.1.pep
GVVICALLGIWPLFSGFLFLVTQCSSKGVGGFWTHTFGFFP

SEQ ID NO: 301486 - protein, 105 aa, Zea mays
  unsure (1)..(105): unsure at all Xaa locations
  Clone ID: MRT4577_38032C.1.pep
NRHFVKFDSSIIKVPYRDFXIPARSQLVTLSTVERIIMRSVYDLHSLQHELNKVYPHNAXSIYQFLLNFTSLGSRYSSFTFILDYPSXHLYLXNPHSPLLYPILS

SEQ ID NO: 301487 - protein, 101 aa, Zea mays
  Clone ID: MRT4577_38033C.1.pep
LRLGCSQARGADEESSRAKQLISGRVLSGGGDKDCTRLRKNQRAGAWGRGRRGWRSSTRACAGTSREDTSSMLEKSSARKMAGKKNPREGDEIQGWGGALL

SEQ ID NO: 301488 - protein, 111 aa, Zea mays
  Clone ID: MRT4577_38035C.1.pep
QGSTGASRYKWLCYRTFHLQLLGKSFLQMLLGRKRFMTLPKCTLTNIMWLRLRYLWKTHTGSTHGLLRHMSKQLARKAEPLLDHMVHGSLSLVAVGANTVAGRGVPHPLRG

SEQ ID NO: 301489 - protein, 93 aa, Zea mays
  Clone ID: MRT4577_38036C.1.pep
DSYGNGDCRARYDRFFAERTNITIEHWRKGAQWFEMDRALALEVVADEPYIQMFRDFCVGRWRCLTDEHYLPTLLNLLGWARNANRSLTYADW

SEQ ID NO: 301490 - protein, 143 aa, Zea mays
  unsure (1)..(143): unsure at all Xaa locations
  Clone ID: MRT4577_38037C.1.pep
RTPARNPRRREHEKATRTAQPSPPGRRRAXAPPAAPGGRRLPSDGKGRGPSQEERAKESTHTQKMERERQEKLKKRLEQEKADPDKAKPADAAKKAEGSTQLGKARRCCPPPPFRRTRTRGPAGEEKKGKTPPARDTRCRLAS

SEQ ID NO: 301491 - protein, 130 aa, Zea mays
  unsure (1)..(130): unsure at all Xaa locations
  Clone ID: MRT4577_38038C.1.pep
PPPSQSPPPRCQSLPLGSSSSWCESSIVLVEGRREEGKGENPRWWTSGSYLGICPNFRXKDLTPYLGENDTFESRTTLLQEGEDDEDITIIDTTTPVTPTPFVANQGPMTRARARFWEVNHLGVEKTTKQ

SEQ ID NO: 301492 - protein, 105 aa, Zea mays
  unsure (1)..(105): unsure at all Xaa locations
  Clone ID: MRT4577_38039C.1.pep
MAHHKEELSVMDKIFEKYHGGDSSASSDSDDEKKKGSSLASSTEAMRAKIYRLFGRERPVHSVLGGGKPADLGLWRNKKIXGGVLVEDTCIWLLSEGMEYDLLTL

SEQ ID NO: 301493 - protein, 44 aa, Zea mays
  Clone ID: MRT4577_3803C.1.pep
VLKSLCSAVVVRGPGYDHRGISGPRHQTRPSGSAHPRSRTPENP

SEQ ID NO: 301494 - protein, 84 aa, Zea mays
  Clone ID: MRT4577_38040C.1.pep
SFYIFTKSAAVAMAYYSMNAMGIQSTHREATQIVYHSAPWSITYAGLVTNNDGLNVRLTGAAAIAIKDGMSFHKKEDQCMYHAN

SEQ ID NO: 301495 - protein, 207 aa, Zea mays
  unsure (1)..(207): unsure at all Xaa locations
  Clone ID: MRT4577_38041C.1.pep
MDLPRPQAPCCRRPADLRPAPCCIDAPRPSDLRGCAPAAGALWKPSASYPRAAVPPASVRLHDISVRGEEDEQKEMLQQMTDGVRAMLGSIGDGAINISAYDTAWVALVKSLEGGNGPQFPSSLRWIVENQLPDGSWGDEEFFLVYDRMINTLACVIALESWEIHADMCEKGLSFIRENLWRLEHRGSDDWMVGXFEITFPQLLEMA

SEQ ID NO: 301496 - protein, 69 aa, Zea mays
  Clone ID: MRT4577_38042C.1.pep
LFSYANLLFVILNSTQEYHILEWKKMEESESSVEQLSFQVIVDSEQLLPPIVMHSRCANQTWRPVSKRN

SEQ ID NO: 301497 - protein, 74 aa, Zea mays
  Clone ID: MRT4577_38043C.1.pep
VAMNPINIVFYATRIIGRRLVDYYVRSDIKLWPFKVIPAPDLKPIIDLQNNGQEKLLAFYQIPFTVLINMRYIS

SEQ ID NO: 301498 - protein, 162 aa, Zea mays
  unsure (1)..(162): unsure at all Xaa locations
  Clone ID: MRT4577_38044C.1.pep
METLGFVSPCCRAASLREGLVVGVSYNNEAPEAPPSIKQNGVTAVQGEKLHDISVRGGEDEQKEMLQQMTDGVRAMLGSIGDGAINISAYDTAWVALVRAXGGNGPQFPSSLRWIVENQLPDGSWGDEEFFLVYDRMINTLACVIALKSWEIMLNARKVCHH

SEQ ID NO: 301499 - protein, 46 aa, Zea mays
  unsure (1)..(46): unsure at all Xaa locations
  Clone ID: MRT4577_38045C.1.pep
SYIKTHPLCNRVMTNLAIKYQPNWSSSPLQEKKTPPPKKKKKKKKX

SEQ ID NO: 301500 - protein, 79 aa, Zea mays
  Clone ID: MRT4577_38046C.1.pep
VQHLELVLVHVDAAHVAVVICVSRSALQIAGSSRIQRIHGPFFLVVAPESFVPLRRHLKVACEALPMLVGALALIRPPR

SEQ ID NO: 301501 - protein, 72 aa, Zea mays
  Clone ID: MRT4577_38047C.1.pep
RRPGKLPRKTPASEGYTCTGKRRRTRAAIAMADARVGFPGGRSGETVKTAGRSAPGVWETVEARPEARAPES

SEQ ID NO: 301502 - protein, 123 aa, Zea mays
  unsure (1)..(123): unsure at all Xaa locations
  Clone ID: MRT4577_38048C.1.pep
AWHPETWPLETGTQDKACRIWDSRILDTSHLVTRRTIGAIRCRRFSCDGGFSEVREPADFDHVDSVHADSKNRQENDLQGQVFGIPVSRVPESLFVGXCGSVYXANLVQYSMIQAFMFLASYV

SEQ ID NO: 301503 - protein, 274 aa, Zea mays
  Clone ID: MRT4577_38049C.1.pep
MATYFYVALSGPTRTWLMNLAPRSIYSWEELCARFTANFASAYQQHGVEAHLHAVRQKPGETLRMFISRFTKVRGTIPRISDASIITAFRQGVRDEKMLEKLATHDVETVSTLFALADKCARAAKGRAWHSAPQTGVVQTGGSGVVPWDGKKKKKGRGHEKLQSTALVVAAATRGRGDHNKRPRQQRGNSGSCPVHPNSHHSAAECREIIDLTKRVSEQRKQSSRDGSPPRRRPGKERVDDGEVAASERDLGYHSPEGVLKDVITGDSYSGGDS

SEQ ID NO: 301504 - protein, 303 aa, Zea mays
  Clone ID: MRT4577_3804C.1.pep
MVTPRLFARLYRHCVGAAAASSAAGRHRGALAAAAVEQFAGSSLPVGVPNILNHHFRYSTSIFQKIGFSSVSPQQSDDDVNELKDHERALDGSSEDCPSGSIEGLDLSRDDLVKLVREKDGLLKSKDGEIKDMKDKVLRSYAEMENIIARTKRESENSKKYAVQNFSKSLLDVADNLARASSVVKESFSKIDTSKDSAGAVPLLKTLLEGVDMTEKQLAEVFKKFGVEKFDPLNEEFDPNRHCAVFQIPDPSKPPGTVASVVKVGYMLHDRVLRPAEVGVTATEGGAHATEEAEKPEEKTARD

SEQ ID NO: 301505 - protein, 128 aa, Zea mays
  Clone ID: MRT4577_38050C.1.pep
TKLGIRLEKTGAVYLATNGVRRASKAMTEREARQTPGHSEKSTREESVQKHHTMPERTNKDGGIYSQAKGHRAKECLEPRQQKPDAQNREIANALTREGSRKPKGAIQERAQRATHRTLNGAPTRPEN

SEQ ID NO: 301506 - protein, 130 aa, Zea mays
  Clone ID: MRT4577_38051C.1.pep
WTFGLIYVLVYVLGMRWLMMSWCLRRWRCISLRLLLLRLVVCILSLILRGLLLVGVGWSRIMVLWWLVMGLLWMVLSIGRLRICGVLSGVRRGILVRCVMRLLRRDIVVLLRRYLIVLRFRLILRLMLLL

SEQ ID NO: 301507 - protein, 168 aa, Zea mays
  unsure (1)..(168): unsure at all Xaa locations
  Clone ID: MRT4577_38052C.1.pep
FGSSYGQELPGVESAPDALRKTGLADKIKSLGFRVEDAGNVDIPXCSYEKSWRAPYEPRGVHHRMQENPRRIYKHARDRDNFVTIIGGDHSIALGSISGIMKARPDTCVIWVDAHADINTPETSGSGHIHGMPVAGLVGEFDAKSVPGLSWLEPCLKPDSIVFIGLRD

SEQ ID NO: 301508 - protein, 153 aa, Zea mays
  Clone ID: MRT4577_38053C.1.pep
EFKRFKFLQTETEVDGRVLAEAKAHLNRCLEELRTELDRYLAEEYELGLSKKEKAFQEWKESHQPFHWFVEFYGIIHSGGFDVIIGNPPYVEYSKIKKEYTIKGYQTESCGNLYAYSMERASSILKLSGHIGFIIPVASVCTDGYLPLRNILV

SEQ ID NO: 301509 - protein, 33 aa, Zea mays
  Clone ID: MRT4577_38054C.1.pep
APCVCTKRQKYLNAETLLAWKIVHPRRAMKISS

SEQ ID NO: 301510 - protein, 83 aa, Zea mays
  unsure (1)..(83): unsure at all Xaa locations
  Clone ID: MRT4577_38055C.1.pep
MGLAAADRAVLLLLAVAGVLLRSAAAXIKQESFRXDSRGSILFEKFGFGPHGMVSIXVTGAKASSALAKPDPGQLXGIFLLLR

SEQ ID NO: 301511 - protein, 78 aa, Zea mays
  Clone ID: MRT4577_38056C.1.pep
APRVPDQKTILTWPKSTIWAWQGRKFFLKGFFFPVKKGGFFLNCPPLLFFFGPVVIYLLGGLFPRPKIGRGFTPFFFP

SEQ ID NO: 301512 - protein, 82 aa, Zea mays
  Clone ID: MRT4577_38057C.1.pep
VASKVYCCSLPNNFFNSISKLHVPCVPLKWVVYYPKLYVASKIFSFKNHIFSCVVNTGKGVRVFLVLICDVELLLVQKNLNK

SEQ ID NO: 301513 - protein, 167 aa, Zea mays
  Clone ID: MRT4577_38058C.1.pep
GRWRRPEQPAPRYSYSLLFFDPLSLSVLRFIRLLQHSPQAYTAHSGPNTFTLRRFTLCGRTAASSSDSPSTSLSARPTPWLLELTLGWVQLLARLQGRAGGKAECQGGRSELGRHGDELDWLEVVNRPGDPHQELSAGGAEVEDEERAARRDAGWARSFHGRWPRSA

SEQ ID NO: 301514 - protein, 104 aa, Zea mays
  Clone ID: MRT4577_38059C.1.pep
SAALGTGPNSSTTLTPARDAVTGDTDPDGDVRPLTSGVDVSCAADGVDGRRRTPPQWGPPQYSPAAAWHGRRQGGAGARPAGTWMAARRMRARGAGFPVSGGTS

SEQ ID NO: 301515 - protein, 60 aa, Zea mays
  Clone ID: MRT4577_3805C.1.pep
MYVLKFQLQSLAKKNDVSHPEAPRKQRKITFADEAGGMLCHVKVFKDGQASLLSECQSDL

SEQ ID NO: 301516 - protein, 79 aa, Zea mays
  Clone ID: MRT4577_38060C.1.pep
LAFGGKPPLAQFREPGCLLRTKELRKILRTVRCPPVFFKPALPPKLFKVVMGWPSPSPLFKDFWGLGGLFVKTLEKNFV

SEQ ID NO: 301517 - protein, 149 aa, Zea mays
  Clone ID: MRT4577_38061C.1.pep
LEARPGCRRPLPTQILALGTLHPAAVLLQRALLELCRSFNFLARSRDTWPCAPPKRSSRPPLLHSANPAAATTELYHGALLPRDQDARRLHLAEALASRPPLSLPSEQGVGALPPMAWAPCFFLHVRCLSQVVSDPLLLSPALSSMFLA

SEQ ID NO: 301518 - protein, 56 aa, Zea mays
  Clone ID: MRT4577_38062C.1.pep
RKFDKPLHKCLVACWLNPTCSVQSGRPLTRWRITLCTIKLLCFCCFRVMKFGSSMV

SEQ ID NO: 301519 - protein, 53 aa, Zea mays
  Clone ID: MRT4577_38063C.1.pep
TNPFQLVLSVNVLVPSLRAQQANCNGYHCNLNTTGSGSRGNSNHNRYYRRRHT

SEQ ID NO: 301520 - protein, 112 aa, Zea mays
  Clone ID: MRT4577_38064C.1.pep
VLGSSSKLDADVTLQAERKALPDYSNHALDFPPCASGVCMDRPLCLTVARRTLSIPARADSARLCTAERSGVVVALSQAVRSINIRISSMITVGSPSIFDHLQVCVNSYQAK

SEQ ID NO: 301521 - protein, 94 aa, Zea mays
  Clone ID: MRT4577_38065C.1.pep
MAPAAACLWACAAGSIPRAPFLIRRPRLLPISLYHARRDRSRRLNLCGVCANTRRTPTLRQNAFTETVLPYLPDSGKYIFSGLPPEEGVSRGGA

SEQ ID NO: 301522 - protein, 86 aa, Zea mays
  Clone ID: MRT4577_38066C.1.pep
FGSRRIVRYSPAWTPSQISGIKCYSSARATTILHDHHHQLGLLPHLGSGDTWLLHHHAPAPCYSSRRGRPRHHGLHRHPARHRKRT

SEQ ID NO: 301523 - protein, 74 aa, Zea mays
  Clone ID: MRT4577_38067C.1.pep
STGAQEACSSGLTERAMVDINKGNLTVQVYKEHRTTDCLNRGQSGTHMQGIRVTVHRRTSGDRKICNECSWELT

SEQ ID NO: 301524 - protein, 71 aa, Zea mays
  Clone ID: MRT4577_38068C.1.pep
KGPVESTKSVAPSLAGSAEERVTFMGSIQANGFCFLLLLSNWSHVTLVVGFGPRQQKTVQLIVLFLASCHK

SEQ ID NO: 301525 - protein, 43 aa, Zea mays
  Clone ID: MRT4577_38069C.1.pep
RAAARAGVRIGGLGVSLVPAEGVGAAGVWVDRSVRAEFVVGHL

SEQ ID NO: 301526 - protein, 52 aa, Zea mays
  Clone ID: MRT4577_3806C.1.pep
KSPISSADLKPRSLKLAHHRHQYHVVSTMKTLNKCFICLPYIMASTYIWHTN

SEQ ID NO: 301527 - protein, 67 aa, Zea mays
  Clone ID: MRT4577_38070C.1.pep
SLNRAVTKPSCSLYQVGSDHLSSLMARLFLSANIVNDRDSNDGSEGPDDNHQPRVRFTVHTRASIRM

SEQ ID NO: 301528 - protein, 96 aa, Zea mays
  unsure (1)..(96): unsure at all Xaa locations
  Clone ID: MRT4577_38071C.1.pep
LSLRPRVRQQATYKVGFSCNNRATLATNIFSLLMLLAFFACVANATIFPXCLQAPIAFLLSPYLSLMIALVCENPAFQSYWVQQAFAASNIPLSPF

SEQ ID NO: 301529 - protein, 92 aa, Zea mays
  Clone ID: MRT4577_38072C.1.pep
GRVGRDWGVAGDYDEALRLMLQQEQPRDYAPATEESHTAHEHLPAFFGYAGLTWKDHEVIDKTYFRPAKLHSLKGDATHARKVLKWKPKVGL

SEQ ID NO: 301530 - protein, 119 aa, Zea mays
  Clone ID: MRT4577_38073C.1.pep
APSPPRRASDETPVPHKSETCTGPVWSGGSVCTTMIQNSCNFPFNKISSFHPFLDLAGRAAARNEAANAWLPQWWCYELMMEEANPRSWSCCLIATAGEASSSMKFTAFSFSTRGSQGR

SEQ ID NO: 301531 - protein, 153 aa, Zea mays
  Clone ID: MRT4577_38074C.1.pep
EVGMSIGMSLPYFIGSAFHCRIHRWLEKWPKKAAFVRLAGEGDWHHQFKAVALLRISPFPYLVFNYASVATNVKYYPYIAGSMAGTIHETFLAIYSGKLLQSLAVATSQGSFLSVDQIIYNGIGFTVAAASTAAIPIYAKKALQRLQAKEEIL

SEQ ID NO: 301532 - protein, 249 aa, Zea mays
  unsure (1)..(249): unsure at all Xaa locations
  Clone ID: MRT4577_38075C.1.pep
MLFCIGSPRSMGSPGSANGRRGDYVRIPEEAEVASGDAAAAFGRVLRCSAIRWWAKVAVLGIFLAGAGAAAVVFLGPLVIKKVVAPILHWESITFSRPAIALICFGTIALFPSVLLPSSPFMWLAGMTFGYLYGXXIITVGMSIGMSLPYFIGFAFHCRXXXXXXXXXXKAAFVRLAGEGDWHHQFKAVALLRISPFPYLXXNYASVATNVKYYPYIAGSMAGTIHETFLAIYTGKLLQTLAVATSQQL

SEQ ID NO: 301533 - protein, 87 aa, Zea mays
  Clone ID: MRT4577_38076C.1.pep
IPLPLLPNKPFMYNTPERKLALWVLILGLDLMRSQYFLLCLEPLKCFLCINSDRGSRSCSNCKSDSIVDDLIHRQEGPLASCYSQAL

SEQ ID NO: 301534 - protein, 292 aa, Zea mays
  Clone ID: MRT4577_38077C.1.pep
MGSPGSANGRRGEYVRIPEEVEVASKGEADAAAAIKAAVAAECPRVLRCRAIRWWAKVAVLGIFLAGAGAAAVVFLGPLVIKKVVAPILYWESITFSRPAIALICFGTIALFPSVLLPSSPFMWLAGMTFGYLYGFLIITVGMSIGMSLPYFIGSAFHCRIHRWLEKWPKKAAFVRLAGEGDWHHQFKAVALLRISPFPYLVFNYASVATNVKYYPYIAGSMAGTIHETFLAIYSGKLLQSLAVATSQGSFLSVDQIIYNGIGFTIAATSTAAITIYAKKALQKLQAEDEIF

SEQ ID NO: 301535 - protein, 75 aa, Zea mays
  unsure (1)..(75): unsure at all Xaa locations
  Clone ID: MRT4577_38078C.1.pep
MVKVRDDVNLPIYQGENINDKTFDEKSHVLDPYKMLXEYTQFIVMLNLLYAFSTGSYSNIQRVTPWKLDVTEHSK

SEQ ID NO: 301536 - protein, 65 aa, Zea mays
  unsure (1)..(65): unsure at all Xaa locations
  Clone ID: MRT4577_38079C.1.pep
CIQPHISFIATPXFFSLATYLQLTDWEIPSFTQLNPFASHPHFPSCPSTFQPLTYLPSHQFRSLF

SEQ ID NO: 301537 - protein, 208 aa, Zea mays
  unsure (1)..(208): unsure at all Xaa locations
  Clone ID: MRT4577_3807C.1.pep
MATTEKKLHAVLVPFPAQGHVTPMMKLAKVLHCKGFHVTFVNTEYNQRRLVRSRGPDAVASLPGFRFATIPDGIPTSGADADADSTQDPPSLCYYTMTTCLPHLKNLLRDLNGVVGAPPVSCVVGDGVMSFCVDAAAELGVPCALFWTASACGFMGYRNFRFLLNEGLTPLEDEEQVKNGYLDTPVTQAHGMSEDMRLREFXSFVRTT

SEQ ID NO: 301538 - protein, 462 aa, Zea mays
  Clone ID: MRT4577_38080C.1.pep
METPSSTCDEGSELDARSQSDYADFDDLDLPPRGRHRRDPSSDASSECSGEPGSPYASSPYPRWPVCTLPARVPPPAAPLLKRLGTTRRGARVGACDGKAGDGELQLIKERFSKLLLGEDMSGSGKGVSTSVAISNAITNLYATVFGSCHRLEPLPPEKKSMWRREMDCLLSVCDYIVEFFPSKEILPDGSIREVMATRPRSDIYVNLPALEKLDDMLLEILYSFQKTEFWYVNDKGQKDDSVATPCRPVSHRGEEKWWLPVPCVAKPGLTETARRDLQQKRDCASQIHKAAMAINNAVLAEIRIPDLYKEALPKCGRASVGDLIYRHMSFPGKFSPEYLLDCLEISSEHEALEAADRVEAAMHVWRRKASQRSPWIAVKDLMESDKNVMLARRAEDVLLCLKQRFPGLSQTTLDASKIQYNKDVGQAILESYSRVLESLAYNIVTCVDDVLFADEAARKIA

SEQ ID NO: 301539 - protein, 168 aa, Zea mays
  unsure (1)..(168): unsure at all Xaa locations
  Clone ID: MRT4577_38081C.1.pep
LGHTTHRRLSRTASASPSALRLARGLRVHRHKRDKQNKQPLAALQAQEHHFMCERDELCRPNIWNTTRHHKGADHGTTKNTCHEGDATYNSLYKIXIRHSXHIKGKKEPTYTPNAYMSACCIAPNADNVGDYDIKRXRKLYRRHSERAGCMKDYTLDQLQSIIPERII

SEQ ID NO: 301540 - protein, 61 aa, Zea mays
  Clone ID: MRT4577_38082C.1.pep
EWRGVQASVFPIRACSQRTDYMLLRPHSIKMSCHVSGSLPNPTVYRQTSSMTFPLNVVLSM

SEQ ID NO: 301541 - protein, 80 aa, Zea mays
  unsure (1)..(80): unsure at all Xaa locations
  Clone ID: MRT4577_38083C.1.pep
MASLKCSIVVCVICLEKPKYRCLACRVAYCSVVCFRKHKEQCNPETRPVEXKIRSALPTKTVKPVENKDDDDSIADFLNS

SEQ ID NO: 301542 - protein, 153 aa, Zea mays
  Clone ID: MRT4577_38084C.1.pep
MADEEKLPPGWEKRMSRSSGRVYYFNHITNASQWERPSGNSSSGGKNGQGEPARVRCSHLLVKHSQSRRPSSWRQEKITRTKEEALELINGYIQKIKSGEEDFESLASQFSDCSSAKARGDLGAFSRGHTVLEADSRAELFLVRPRSSVQSQR

SEQ ID NO: 301543 - protein, 83 aa, Zea mays
  unsure (1)..(83): unsure at all Xaa locations
  Clone ID: MRT4577_38085C.1.pep
MLGVPTPGVFEKAYFNNLRYKKGLLASDQGFFTDRGSGPPVNLFAAKAPAFXEAFVPPMAKLGRMGLKTGAEGEKPRVCPPVK

SEQ ID NO: 301544 - protein, 61 aa, Zea mays
  unsure (1)..(61): unsure at all Xaa locations
  Clone ID: MRT4577_38086C.1.pep
APVGALCLILLGFVPAFPFISSLSSRLLFSRRRILGSPVGPWLLMQCPPPPLGXRVRGRVD

SEQ ID NO: 301545 - protein, 143 aa, Zea mays
  Clone ID: MRT4577_38087C.1.pep
MPRGTMELEIVEVGPSSRPLQYVSRPPFPPPPPPPPPPSLQQQQQGEAGDAHAAPPLVQHFDSEKLPQTLVSEIRPFLRAANDIEAENPRVAYLCRFHAFEKAHTMDKLSAGRGVRQFKTALLRRLEQDESSTKSKMTQRGDA

SEQ ID NO: 301546 - protein, 148 aa, Zea mays
  Clone ID: MRT4577_38088C.1.pep
MAATAYSVALLGGARLPAAPRSALLPRRSVCQLRFQDAPRLSLLRAKAASEDTSASGDELIEDLKAKWDAVEDKPTVLLYGGGAVVALWLTSVVVGAINAVPLLPKILELVGLGYTGWFVYRYLLFKESRKELAADIETLKKKIAGTE

SEQ ID NO: 301547 - protein, 109 aa, Zea mays
  unsure (1)..(109): unsure at all Xaa locations
  Clone ID: MRT4577_38089C.1.pep
MHDLHIQIPTAFDPFADANAGDNGARSDSKDYIYVRIQHCNGHKSLTTAHGXQNDFSYNLILKDIMIEHCCNGTLLHDPELVQVIQLHCDQRNELSNLLAQAVIVQNDH

SEQ ID NO: 301548 - protein, 56 aa, Zea mays
  Clone ID: MRT4577_3808C.1.pep
RAANRLHSILHFFRSPPQSTFAPVTKASDRGHAVAGALLFLPGSHQYRGQKVRDNR

SEQ ID NO: 301549 - protein, 86 aa, Zea mays
  Clone ID: MRT4577_38090C.1.pep
GNQPRFPQVKSISPSPLVEIHLCPGKKKVPIALEHAPRLRIPPPPCIVKKCSSWYVSCMCFVYPPHVACKTPVRGIPPVSHPPGGI

SEQ ID NO: 301550 - protein, 86 aa, Zea mays
  Clone ID: MRT4577_38091C.1.pep
YMYLSGLPPRLSDAVAVSSVFDPLLARRLAIAHFPKHRARIEGGRRKEQCRCKQSTRRPRPRAALLASTSPRPRMRSLAIRGPTDV

SEQ ID NO: 301551 - protein, 63 aa, Zea mays
  Clone ID: MRT4577_38092C.1.pep
IGWLRLVLYCGTQQSFFVLRKRIILGTLGSILCTGNGGESHLGIMEDGWKVVLLISPPELRLS

SEQ ID NO: 301552 - protein, 155 aa, Zea mays
  Clone ID: MRT4577_38093C.1.pep
MAGSFANLITDAGLKKLDEYLVTRIFITGYQAGEDDLAVYTSVYSASSSKSLNVARRVNHIVALVRALGITAEGHSVKAESSAVSSAPTSDVAEAHAPTPAADDDDDVDLFGEDDRDENKAAEEGAADANASGKDNESGEASRLLYVLTWGDETD

SEQ ID NO: 301553 - protein, 69 aa, Zea mays
  unsure (1)..(69): unsure at all Xaa locations
  Clone ID: MRT4577_38094C.1.pep
WPALFAKLLETRSVQDLGLWVRSGGGAAPLAASRPAGGAAAAAAPAAQENKEQPNEESXDDHMGLNLFY

SEQ ID NO: 301554 - protein, 75 aa, Zea mays
  Clone ID: MRT4577_38095C.1.pep
LHSYSEILTHNTTHLTTENTTLTHTDKIQRRVYSLTFEHTLTRFHSELVIFLNGNQHGWGALTHTETCPLGMETI

SEQ ID NO: 301555 - protein, 608 aa, Zea mays
  unsure (1)..(608): unsure at all Xaa locations
  Clone ID: MRT4577_38096C.1.pep
MPPPLPPDPIDPCAPAPAMDVALPAAVVATILSRLDVRSLLLAAAACRGLRACASHALVFLPSFHLLEVALTHELLRPLLPPNPSLRSLRLDCARLEDAAIACLARAGLHELLLLNCDNISGRLLCELGTTCRDLRVLSLNSLGARRGLVVNFSDLQELLNGCSQLENLRLALDFSTFDDPNFGRVWASASERLSSLEIGYIPMTMLLELLVAVTEGQQCMDYVKTPVFFPSLQKLCLXVDFLTDHLIGSISAALPSLKHLDLQDAPIVEPNSSSDLTNAGLQQINPHXCSNLESVCLGGFSRVTDTGFRAIIHSCSGLHKLRVSHGSHLTDLVFHDIIATSLCLTHVSLRWCKLLTNVGIERLSCNKDLNVLDLRDCRSLGDEAVRALSCLPKLQTLTLDATDISDQSLKYLGLGTCPLTSLSLRGCRKLTNDCITLLFAGHVKQSLQMLDLSRIPSITDDGIMLLARSRTPLIELRMRENPKIGDASVMALASMQIDGGTYGSTLQLLDLFDCGGITPLAARWFKKPYFPRLRWLGITGSLNRVMVDALSRSRPFLHMACRGEELGTMLWDTSSDWYRHNDDDLDELEQWLLEGEPVSDDDTIMEE

SEQ ID NO: 301556 - protein, 71 aa, Zea mays
  Clone ID: MRT4577_38097C.1.pep
TRDACVRHPVGCCTYMWTDYFCLVTGHKGAYALLTASGDPLKGIYKVDAPKEIRTKDPMCHEIRFMEPVWY

SEQ ID NO: 301557 - protein, 64 aa, Zea mays
  Clone ID: MRT4577_38098C.1.pep
KWMVNNTPIAELCIGALLDEEGDLASECGTPYRTLPRRASPSVNLGLIFLGLENDIVLTLLGPT

SEQ ID NO: 301558 - protein, 82 aa, Zea mays
  Clone ID: MRT4577_38099C.1.pep
HGIHLHAGVSHYSASFSYSSRTMQTSTACPFSRTFLASLSESTASVLAAAPVPTVQSRTSRVLGVALTGQGLADGVLGEGQH

SEQ ID NO: 301559 - protein, 85 aa, Zea mays
  Clone ID: MRT4577_3809C.1.pep
KPFLFQGQKVLGVFGHFFGGFKFPVQNFPIQFKGEMHFPKNHKSSPHLGKGQITRGSLFCPQGPQKKPPNPKPGLGIFKFPQNPM

SEQ ID NO: 301560 - protein, 451 aa, Zea mays; identical to SEQ ID NO: 297948
  Clone ID: MRT4577_380C.1.pep

SEQ ID NO: 301561 - protein, 265 aa, Zea mays
  unsure (1)..(265): unsure at all Xaa locations
  Clone ID: MRT4577_38100C.1.pep
MAAAQPKPAKRLGGMAEALAIAADLGFPASTTQEDQTSSDKSDDLVKVLRELTVVQRNIANLQVELQGRKDDKNIAHLTHVSEMEKKCESLARMTAILKDVIQNKDRIIARLQQPYSLDCIPVEAEYQKQFSELLLKAASDYGALTASVGDFQWSQNFRESPAVWGXEMLRPIPAALASCTRFFEAMSAMRESFSTLQKLRVGHSSLSITPSDSSDDSKFLTPPQWRDGSILDSWKQMDDINLESSGIDAMNQRRLSWPSIKRDP

SEQ ID NO: 301562 - protein, 114 aa, Zea mays
  Clone ID: MRT4577_38101C.1.pep
YAPSPSHHPLLRSPHGPSIWSFLTPTLLTLCRLSPSAIMTRIALFTLLLVVILALFSQADAQSRSTVKPHCAPLHTLFNDAVAVFNHNGYNIPNSDSELRCNACICTDGVITLA

SEQ ID NO: 301563 - protein, 69 aa, Zea mays
  unsure (1)..(69): unsure at all Xaa locations
  Clone ID: MRT4577_38102C.1.pep
SSRWSPRCPPCLIVCAVGIFWAVFLFDSRSVDGCVRKCPQLPRGLGTLCXLTKIIKICIKKKKKKKERP

SEQ ID NO: 301564 - protein, 92 aa, Zea mays
  Clone ID: MRT4577_38103C.1.pep
AMANKNFKGYINSHSAKWPRVLWISIQKGVQFLSTRRNTGLICPPVEALTKEQDTYMHCEDDMRTELYDMSLGLYGRHNEFSQKETFPANRV

SEQ ID NO: 301565 - protein, 64 aa, Zea mays
  Clone ID: MRT4577_38104C.1.pep
KDLARAQEDLSTPKRDPPPLIGTRTSVGAGGEASKRPNFAGRPKFFISFNLPSSSVTTIDFQLV

SEQ ID NO: 301566 - protein, 63 aa, Zea mays
  Clone ID: MRT4577_38105C.1.pep
SFVKNGSASAAAQVIVNARSEKDYNVVKQGFRLPQKLKHAGVRPHCSISGIQLNANALHEYML

SEQ ID NO: 301567 - protein, 61 aa, Zea mays
  unsure (1)..(61): unsure at all Xaa locations
  Clone ID: MRT4577_38106C.1.pep
EYAGTGDLDVSHTMRXWCRGRXYVEEKRXXETQREYKHEERFSYEXXREXSLRNRGDEQRR

SEQ ID NO: 301568 - protein, 38 aa, Zea mays
  Clone ID: MRT4577_38107C.1.pep
NGRSSRVSPVRSIESTVLASNCMYQISIQVRIEWVHRP

SEQ ID NO: 301569 - protein, 86 aa, Zea mays
  unsure (1)..(86): unsure at all Xaa locations
  Clone ID: MRT4577_38108C.1.pep
PPPWKAASPRMLKWGPTIXKDKPPKANPNNPPLKNTPGKTKMEEVPKSEWKSGLILGGGVFFGSLQXSYVYCRFKSVGVEPALPSH

SEQ ID NO: 301570 - protein, 300 aa, Zea mays
  Clone ID: MRT4577_38109C.1.pep
RPGGYYIIQRTYDVRACPIEIDVWNAVVSRTKSNSWFIVVRSRNIYKIGVVIYLKPTSNSCSLVRDTNEPPLCSESDGSRFPWYKPLDSCLFPAVPSSGEGNSWAVSWPERLNIKHSATSNNSSIQFPQEKIDSDTSYWKDLVSEIYLNEFAVNWSSVRNVMDMNAGFGGFAASIINRPLWVMNVVPVDQPDTLHIIFNRGLIGVYHDWCESFNTYPRTYDLIHMSYLLGPLTKRCHIIEVAAEIDRILRPGRWFVLQDTIDMIRKMDPVLRSLHYKTTIVKHQFLLATKGFWRPGSIGS

SEQ ID NO: 301571 - protein, 192 aa, Zea mays
  Clone ID: MRT4577_3810C.1.pep
MLMEEGIKEGASKAAGAAATEAGEANKSTTAMSDVTFKSIGDVLKLLPTATVIVYEVLNPIATNAGDCGGAAAGYKVATGVLLGLSAFFCAFSTFTDSYVGADGKVKYGLVTPRGLLPFNVAVFAAVSLLADANTVACFYPSLRDQQKKVVMALPVVVGAVASVVFALFPSTRHGIGYPPSKPEASALVASQ

SEQ ID NO: 301572 - protein, 168 aa, Zea mays
  Clone ID: MRT4577_38110C.1.pep
MGAYKYVSELWRRKQSDVMRFVQRVRCWEYRQQPAIVRLTRPTRPDKARRLGYKAKQGYVVYRVRVKRGGRKRPVPKGIVYGKPKHQDSTYKYFEIILVDVAHTAIRNDPRINWLCNPVHKHRELRGLTSAGKKFRGLRGKGHTHHKNRPSRRATWKRNQTLSLRRYR

SEQ ID NO: 301573 - protein, 66 aa, Zea mays
  Clone ID: MRT4577_38111C.1.pep
AQIFPIFFPVYPFLYFFQAPGVASGILFPFFVMEFLLVACWHFANNLLKNTPPLFGMSSGFNKNVL

SEQ ID NO: 301574 - protein, 65 aa, Zea mays
  Clone ID: MRT4577_38112C.1.pep
HSGVVATRETRPSPRGQEGIWPAVQFEGDLTLQTRTTQCSYTAQLCQNLRASLASQPSPAPCVPA

SEQ ID NO: 301575 - protein, 92 aa, Zea mays
  Clone ID: MRT4577_38113C.1.pep
NGPLDPQGWGFPPKIFFFKAPKWGFKRGQPLLLGGKLKGGKPLGPRREKGKKTGFPGGKTWGPGPMGENVVLAIFRGGGRPPLEKMGGGLKF

SEQ ID NO: 301576 - protein, 204 aa, Zea mays
  Clone ID: MRT4577_38114C.1.pep
MGAYKYVSELWRRKQSDVMRFVQRVRCWEYRQQPAIVRLTRPTRPDKARRLGYKAKQGYVVYRVRVKRGGRKRPVPKGIVYGKPKHQGITQLKFQRNKRSVAEERAGRKLGGLRVLNSYWVNEDSTYKYFEIILVDVAHTAIRNDPRINWLCNPVHKHRELRGLTSAGKKFRGLRGKGHTHHKNRPSRRATWKRNQTLSLRRYR

SEQ ID NO: 301577 - protein, 230 aa, Zea mays
  Clone ID: MRT4577_38115C.1.pep
MSPLAVSRASPSPPRRRHRTPAAASAMGAYKYVSELWRRKQSDVMRFVQRVRCWEYRQQPAIVRLTRPTRPDKARRLGYKAKQGYVVYRVRVRRGGRKRPVPKGIVYGKPKHQGITQLKFQRNKRSVAEERAGRKLGGLRVLNSYWVNEDSTYKYFEIILVDVAHTTIRNDPRINWLCNPVHKHRELRGLTSAGKKFRGLRGKGHTHHKNRPSRRATWKRNQTLSLRRYR

SEQ ID NO: 301578 - protein, 110 aa, Zea mays
  Clone ID: MRT4577_38116C.1.pep
SVKVSWRNTLTHGIVKITCVSTARMPYIKKHDRTFKLTDPFPEHCPPGEFVREIPLATRIPEDAKIEAYYDETGTGLEIMVPKHRVGPEEHEVQVCMRPPHLGDNDLVLS

SEQ ID NO: 301579 - protein, 70 aa, Zea mays
  Clone ID: MRT4577_38117C.1.pep
GSGPLKGIMGYVEKDLVFTDFLGDSRWSIFYAKAGIVLKDHFVKLVLWYDNEWGYSNRVVALIPPMFKTQ

SEQ ID NO: 301580 - protein, 62 aa, Zea mays
  unsure (1)..(62): unsure at all Xaa locations
  Clone ID: MRT4577_38118C.1.pep
GTITGEHNPSRFCMLHIIGATVATQAIYPQCSHAAIAYIHAPYLXPAVSLMSETPIVQPYRI

SEQ ID NO: 301581 - protein, 52 aa, Zea mays
  Clone ID: MRT4577_38119C.1.pep
VQSIPGSSEFAHIPDFDLKIVFLCARNEGLSPVIMLVNKPPPFYPEVNVGTG

SEQ ID NO: 301582 - protein, 134 aa, Zea mays
  unsure (1)..(134): unsure at all Xaa locations
  Clone ID: MRT4577_3811C.1.pep
SKGHGIDESLMREVRNVTREFFQLPYEEKLKIKMTPQSGYRGYQRIGENITKGKPDMHEAIDCYTPIRPGKYGDLAKPMEGSNXEYPSNFEVLLENYIKLCREYPSFGTDYINYISRKIMRGIALALGGAIDAF

SEQ ID NO: 301583 - protein, 45 aa, Zea mays
  Clone ID: MRT4577_38120C.1.pep
QYSIARASVIRALSGSPNKESCHTAPHCRSARALLLYLLSMRSMP

SEQ ID NO: 301584 - protein, 37 aa, Zea mays
  Clone ID: MRT4577_38121C.1.pep
LDYSGLHYLLPFNGSHRLASFISPSRKRVPLLICSQI

SEQ ID NO: 301585 - protein, 80 aa, Zea mays
  Clone ID: MRT4577_38122C.1.pep
VCFYSRPFLCLLLCRRYLIQTWVQVVYGYYATLGFCRLLFASNLFSSCFCLRSSTGLRPISGVMDPPMGAFCHVSLYIKR

SEQ ID NO: 301586 - protein, 169 aa, Zea mays
  Clone ID: MRT4577_38123C.1.pep
MAAPPSQASLLLQKQLRDLAKNPVDGFSAGLVDDGNVFEWQVTIIGPPETLYDGGYFNAVMTFPQDYPNSPPSVRFTSEMWHPNVYPDGRVCISILHPPGDDPNGYELASERWTPVHTVESIVLSIISMLSSPNDESPANIEAAKDWREKRAEFKKKVRSLVRKSQEML

SEQ ID NO: 301587 - protein, 90 aa, Zea mays
  unsure (1)..(90): unsure at all Xaa locations
  Clone ID: MRT4577_38124C.1.pep
MFPPVDAASPGXNEHLTLSPEFANEIKQAEAQIKRSLGIGTQISKRRLINDLTRMGINKSIVKKXLLIMHKRDKVEYKKKPHVFVPKGLR

SEQ ID NO: 301588 - protein, 47 aa, Zea mays
  Clone ID: MRT4577_38125C.1.pep
GAFVGSGIADLEVVGAIGMRVVDYEEEVGRYFSMVMQCDVGLVLAML

SEQ ID NO: 301589 - protein, 85 aa, Zea mays
  Clone ID: MRT4577_38126C.1.pep
VRTPRVAQRPRVGCGGRIGIREQGREKWMGWVGFARLVEEKEARNESFPLSFTFFSFLVVSSFSLHYYLLRFLQLLFRVFNCLCI

SEQ ID NO: 301590 - protein, 65 aa, Zea mays
  Clone ID: MRT4577_38127C.1.pep
RGRGGKKKGNHFELPHIFGWLNPPKKAWVPIIGRAILWDLFGELFGPCPWGALKLTFGKNACYTP

SEQ ID NO: 301591 - protein, 67 aa, Zea mays
  Clone ID: MRT4577_38128C.1.pep
LARPALSLVGGLPYFMVVDVSQLRWQLQERPLQLLITSIDHHGYDYYLSSLGGRLNNNKPGRAGCHT

SEQ ID NO: 301592 - protein, 36 aa, Zea mays
  Clone ID: MRT4577_38129C.1.pep
FGCDTAMHVLSHEGGIRTQGARDCRSHPTRHRSGRY

SEQ ID NO: 301593 - protein, 228 aa, Zea mays
  unsure (1)..(228): unsure at all Xaa locations
  Clone ID: MRT4577_3812C.1.pep
MGSDFKSIPLIDIGPLVEKIDDPSMANDKDLLQVVRLLDDACKEAGFFYVKGHGIDESLMREVRNVTREFFQLPYEEKLKIKMTPQSGYRGYQRIGENITKGKPDMHEAIDCYTPIRPGKYGDLAKPMEGSNXYVKGAIDISRKIIRGIALALGGAIDASEGDTAGDPFYVLRLIHYHEDIPKEHRTDAGCGAHTDYGRSGEWIYATPIPGTFVCNIGECTSYTGLPG

SEQ ID NO: 301594 - protein, 82 aa, Zea mays
  Clone ID: MRT4577_38130C.1.pep
SSSGRSIRYTLTHPYMRRISSPIVKPMANSLHRRVQRNHCETHLNTQVNHLALHSCFNSWQDSKDGPTEQPCKLNGKRDAHW

SEQ ID NO: 301595 - protein, 51 aa, Zea mays
  Clone ID: MRT4577_38131C.1.pep
FFFFFSGISLLQNDYKLQHLQVITRLQYISSEFITKEIDSKRLQFECIKHL

SEQ ID NO: 301596 - protein, 71 aa, Zea mays
  Clone ID: MRT4577_38132C.1.pep
LYGLEYTIKGLTSFLALMNNPLLTSIKSYGAKLISTYRSKILLCITGTSILNFTPQSFGINIMLITIRRPN

SEQ ID NO: 301597 - protein, 62 aa, Zea mays
  Clone ID: MRT4577_38133C.1.pep
CVIFFFCTVRFVNASRQLAKNLEHHTLNEHGLSKRYVRCLQVVRITLVSIYNSSTYTCNAAC

SEQ ID NO: 301598 - protein, 321 aa, Zea mays
  Clone ID: MRT4577_38134C.1.pep
SGAKLILEKGYTGAKVMNVIFAVLTGSLALGQASPSMKAFAGGQAAAYKMFETINRAPEIDAYSTTGRKLEDIRGEIEFRDVHFSYPTRPDEPIFRGFSLAIPSGTTIALVGQSGSGKSTVISLIERFYDPDVGHILLDGVDLRKFQLRWLRQQMGLVSQEPALFNDTIRANIAYGKDGQATESEIVSAAQLANAHKFISSALQGYDTMVGERGAQLSGGQKQRVAIARAIVKDPRILLLDEATSALDAESERIVQDALDRVMVNRTTVVVAHRLSTIQNADLIAVVRNGVIIEKGKHDALVNVKDGAYASLVALHSAASS

SEQ ID NO: 301599 - protein, 109 aa, Zea mays
  Clone ID: MRT4577_38135C.1.pep
PCLCWNSRALLNRLSVNPVVPLRAARRPSSLQEPLPWRLVFFPWRARPRNHPHRSSPCLRSPDSDDVHPVRCSRCSTKWENHEIVVVSHPRPRQSCMQSTYCVPHRYTN

SEQ ID NO: 301600 - protein, 56 aa, Zea mays
  Clone ID: MRT4577_38136C.1.pep
VLICRGLARVRVRRSQVCTLARVRREQRQCVPYAVCLLGIYIVKSEALPTSLERHS

SEQ ID NO: 301601 - protein, 117 aa, Zea mays
  Clone ID: MRT4577_38137C.1.pep
SSPLAHVSPHQALVGGDPVIRGPPIYIKGGGWGPPFSPAGGPWELVSRSLVCSSRAGHQFLWVLPPPPPGGGMFPGSNVFRPPPVSAGRCPGFKKKKKKKKKKKKKKKKKKKKTPHP

SEQ ID NO: 301602 - protein, 86 aa, Zea mays
  Clone ID: MRT4577_38138C.1.pep
EPEPVDARVPLQPVPGKRHAVHPPFPLQVPAHQGLRRRHPAALCEACGERRAVGQGGAGEAGDGRGGGGHVVRTRGRTRGRMRGRT

SEQ ID NO: 301603 - protein, 72 aa, Zea mays
  unsure (1)..(72): unsure at all Xaa locations
  Clone ID: MRT4577_38139C.1.pep
YLQQAMXLPFSXLVAASSVSLLTQQQLLPFYKQFPANPSTLXAIXQMLPFVKLALTNKSASCXQHIIGGALF

SEQ ID NO: 301604 - protein, 344 aa, Zea mays
  unsure (1)..(344): unsure at all Xaa locations
  Clone ID: MRT4577_3813C.1.pep
MGSDFKSIPLIDIGPLVEKIDDPSMANDKDLLQVVRLLDDACKEAGFFYVKGHGIDESLMREVRNVTREFFQLPYEEKLKIKMTPQSGYRIGENITKGKPDMHEAIDCYTPIRPGKYGDLAKPMEGSNLWPKYPSNFEVLLENYIKLCRDISRKIMRGIALALGGAIDAFEGDTAGDPFWVLRLIGYPVDIPEEQRTDTGCGAHTDYXVDLSKEFLLRKKNSICETVDDGLLTLVNQDDDICALEVQNRSGEWIYATPIPGTFVCNIGDMLKVWTNGIYQPTLHRVVNNSQHYRVSVAFFYESNFDAAVGPREFCREKTGGAAKYEKVVYGEHLVQKVLTNFVM

SEQ ID NO: 301605 - protein, 65 aa, Zea mays
  Clone ID: MRT4577_38140C.1.pep
GRRGGTHGAACADLTALVVRDHRHTGRFHRVYRALYHYGLPPSYEAHHAQTTSPPTPATVTLLNT

SEQ ID NO: 301606 - protein, 102 aa, Zea mays
  unsure (1)..(102): unsure at all Xaa locations
  Clone ID: MRT4577_38141C.1.pep
PARSSFRKQPPVGTPSSSSAWDWENFYPPSPPDSEFFDRRKAEVEHASRLRELDEEEKARAYLQHHTQYNLKEEDEAAEDDDGEVDHEPXVMHCGGWEDDEH

SEQ ID NO: 301607 - protein, 69 aa, Zea mays
  Clone ID: MRT4577_38143C.1.pep
NPPFSGPLTAGVVVFTPRVTFSFASSLAPVLLVFFLSFPAPLAVFPRQFLNGGFLLGFLFFVLRPLPPK

SEQ ID NO: 301608 - protein, 113 aa, Zea mays
  unsure (1)..(113): unsure at all Xaa locations
  Clone ID: MRT4577_38144C.1.pep
LSPERETASASASRPVSAPPPDRPEPSAGRRGRPGRVRRSDLRRVASEEHADAGXGGGAADSPGAAAAAGAEAPRPSRYESQKRRDWHTFGQYLRNHRPPLELARCSGAHVLI

SEQ ID NO: 301609 - protein, 159 aa, Zea mays
  Clone ID: MRT4577_38145C.1.pep
RPEANPFGARAVRLYLREVRDSQAKARGIAYEKKRRKRPSASSQSSPQAATTPPLQAPPVSTPALSDAAAERADVRAHVPDAGHGHQHQHHFFMPHPQFLHGFRLLPGNPEAVAGNGNGDGSSSSASVAAGSGDEIALAMAAAAEAHAAGCMLPLSVFN

SEQ ID NO: 301610 - protein, 77 aa, Zea mays
  Clone ID: MRT4577_38146C.1.pep
PLGQHAPLLQVGLASGLGQYTQVVRDAQKGIKLRNVRFVDAMGLPLQDGHLHLSTQAQVQLGRMLAQSYLNYGTSQL

SEQ ID NO: 301611 - protein, 275 aa, Zea mays
  unsure (1)..(275): unsure at all Xaa locations
  Clone ID: MRT4577_38147C.1.pep
LSPERETASASASRPVSAPPPDRPEPSAGRRGRPGRVRRSDLRRVASEEHADAGXGGGAADSPGAAAAAGAEAPRPSRYESQKRRDWHTFGQYLRNHRPPLELARCSGAHVLEFLRYLDQFGKTKVHAPGCPFFGHPSPPAPCPCPLRQAWGSLDALIGRLRAAFEEHGGRPEXHPFGARAVRLYLREVRDSQAKARGIAYEKKRRKRPXPRPSXVAAGRDDPAVAGPSRLRRAGARPRRRARAPAPAPLLHATPAVPARVPTAARQPRSGGWQW

SEQ ID NO: 301612 - protein, 233 aa, Zea mays
  Clone ID: MRT4577_38148C.1.pep
MKFRSNKAGRGGVVANRWDGVVPGDCAPSPAVLRLSPDLRWEEAREPLHAGIDAANHAVGVGPGMAFANALLRSGRAGGAVVGLVPCAVGGTRMAEWGRGTELYAEMLRRARVAVETGGRIGALLWYQGESDTVRWSDATEYGRRMGMLVRDLRADLGIPHLLVIQVGLASGLGQYTQVVRDAQKGIKLRNVRFVDAMGLPLQDGHLHLSTQAQVQLGRMLAQSYLNYGTSQL

SEQ ID NO: 301613 - protein, 185 aa, Zea mays
  Clone ID: MRT4577_38149C.1.pep
MASLPVPHTLPRASPAIVGAARGRAAVRVRTATAALGGRCGGGGGMEQRHGEAPHSPVKEKPVMSNIGKSTNILWHNCLIGQSDRQKLLGQKGCVVWITGLSGSGKSTLACALSRELHCRGHLTYVLDGDNLRHGLNRDLSFKAEDRAENIRRVGEVAKLFSDAGVICIASLILTYRRDHQLMVR

SEQ ID NO: 301614 - protein, 162 aa, Zea mays
  Clone ID: MRT4577_3814C.1.pep
MLEQDDLQILGKKPSIRCLVFLDTFTDQTELAFKENEFLNLDLLIVECSKKAKISFAAGSCPKLEKLVTNIESLSGIGNLVRLKELELKVEGDSVPAEVKVAVNRLKDRLHFTHYKSENQDKEEQGLVPMWFALRVRLITCCCTCVLELDGNGWLCRCVYCV

SEQ ID NO: 301615 - protein, 34 aa, Zea mays
  Clone ID: MRT4577_38150C.1.pep
EGARSPCRAPEDVWCGCFSRGDGRGGTVEERTSG

SEQ ID NO: 301616 - protein, 270 aa, Zea mays
  Clone ID: MRT4577_38151C.1.pep
MASLPVPHTLPRASPAIVGAARGRAAVRVRTATAALGGGCGGGGGMEQRHGEAPHSPVKEKPVMSNIGKSTNILWHNCLIGQSDRQKLLGQKGCVVWITGLSGSGKSTLACALSRELHCRGHLTYVLDGDNLRHGLNRDLSFKAEDRAENIRRVGEVAKLFSDAGVICIASLLSPYRRDRDACRALLPHSNFIEVFIDLPLKICEARDPKGLYKLARTGKIKGFTGIDDPYEPPINGEIVIKMKDGECPSPKAMAKQVLCYLEENGYLQA

SEQ ID NO: 301617 - protein, 92 aa, Zea mays
  unsure (1)..(92): unsure at all Xaa locations
  Clone ID: MRT4577_38152C.1.pep
DVLVPXFIFCDKVLMDAWERYMLSLGLGFNKIGEXVFWICHLGIFNELTLLRCLSGVETVLKDVGNQMKLGSGVEAVAVFLSNIKPGIPYRI

SEQ ID NO: 301618 - protein, 67 aa, Zea mays
  Clone ID: MRT4577_38153C.1.pep
KCQKVRGSRTHTVMVLKTLLHLPIQEEGYVLAVTCIYQLLLQISNSNPYFPFRPFKELHNGQLYLFK

SEQ ID NO: 301619 - protein, 64 aa, Zea mays
  Clone ID: MRT4577_38154C.1.pep
VSGPTVRKALIPLMSPPVLEGKPNANYVRARNSHDFGSQTHVHSNCIKKQNHTLLKVNSGKRTR

SEQ ID NO: 301620 - protein, 172 aa, Zea mays
  Clone ID: MRT4577_38155C.1.pep
QQPAPPVDHRRHAAAACAWVARRQVQHQRSCSEGVTKLQGLKVGDERVDRHHGDDADDAIAAHRLVEDEARDDHAGSGGGFQQRRPSPNNTSGSGSGGGDTVSSSEWLHQQHCSGVMSVRVLGLPPATPPSLEMSLGRQGWQMDQQCGGEFEFDFEPSPPSAAKELTLLRCL

SEQ ID NO: 301621 - protein, 143 aa, Zea mays
  unsure (1)..(143): unsure at all Xaa locations
  Clone ID: MRT4577_38156C.1.pep
LRTPAPIESYLDLSLSLSLSLSLSSGVGQIINGTSGHGVEEEERQRQRVARTRGRRRLRGGGEXVPRGHVPMLVAGGDDDGDGGQRVLVPVRLLSDPSIAELLDMAAQRYGYGQPGVLRVPCDAGHFRQVLDGAMHRCGISLA

SEQ ID NO: 301622 - protein, 95 aa, Zea mays
  Clone ID: MRT4577_38157C.1.pep
GFVKKKKKKKKKKKKKKKGEHYNREKKLTHSYIATFSFFYIGPYTNFLGLRYTTFGSGNTLTFPTLIPSRHTPISRGCIIRKRPSPISFENFCFP

SEQ ID NO: 301623 - protein, 91 aa, Zea mays
  unsure (1)..(91): unsure at all Xaa locations
  Clone ID: MRT4577_38158C.1.pep
MKHNTVPTMAVKIFWLAMLLGLSASAATXASIFPQCSQASIASLLPLCLXPLLSSGCDYPILXPYGSRLAFASSVLPLXRLFLRQSSFLIQ

SEQ ID NO: 301624 - protein, 83 aa, Zea mays
  Clone ID: MRT4577_38159C.1.pep
TSRLWQPPQGLPLDWASLTKMVSPSICLPVNAGHGVRDHLIRGKGYEHHAPERLRLQIQHILHGGSLQDFSVFGGSNRPWPRR

SEQ ID NO: 301625 - protein, 205 aa, Zea mays
  unsure (1)..(205): unsure at all Xaa locations
  Clone ID: MRT4577_3815C.1.pep
ACRXAGFFYVKGHGGDESLMREVRNVTREFFQLPYEEKLKIKMTPQSGYRGYQRIGENITKGKPDMHEAVDCYTFIRPGKYGDLAKPMEGSNXYDISRKIMRGIALALGGAIDAFEGDTAGDPFWVLRLIGYPVDIPEEQRTDTGCGAHTDYXVDLSKEFLLRKKNSICETVDDGLLTLVNQDDDICALEGQNRSGEWIYATPIP

SEQ ID NO: 301626 - protein, 124 aa, Zea mays
  unsure (1)..(124): unsure at all Xaa locations
  Clone ID: MRT4577_38160C.1.pep
QGSVAGRKANNEGRRDKAARPTNKYLLRPAKAGLHLPAGRIGRYLKNVRHSKRVVTVAPVYLAGVLEYSXRSEELDLGANAAKDNKKTRIVPRHLLLSIRNDVEIGXLMTGVTIAHGDCPPQHQ

SEQ ID NO: 301627 - protein, 361 aa, Zea mays
  Clone ID: MRT4577_38161C.1.pep
MKALILVGGFGTRLRPLTLSVPKPLVDFGNKPMILHQIEALKEVGVTEVVLAINYQPEVMLNFLKDFESKLGIKITCSQETEPLGTAGPLALARDKLADGSGDPFFVLNSDVISEYPFAELIEFHRAHGGEATIMVTKVDEPSKYGVVVMEEGTGKVERFVEKPKAFVGNKINAGIYLLNPSVLGRIELKPTSIEKEVFPRVAADGALFAMVLPGFWMDIGQPRDYITGLRLYLDSLRKKAPARLASGAHVLGNVLVHETAVIGDGCLIGPDVAVGPGCVVEAGVRLSRCTVMRAARVKQHACVSSSIIGWHSTVGKWARVENMTILGEDVHVCDEIYSNGGVVLPHKEIKSSILKPEIVM

SEQ ID NO: 301628 - protein, 187 aa, Zea mays
  Clone ID: MRT4577_38162C.1.pep
MKALILVGGFGTRLRPLTLSVPKPLVDFGNKPMILHQIEALKEVGVTEVVLAINYQPEVMLNFLKDFESKLGIKITCSQETEPLGTAGPLALARDKLADGSGDPFFVLNSDVISEYPFAELIEFHRAHGGEATIMLTKVDEPSKYGVVVMEEGTGKVERFVEKPKAFVGNKINAGIYLLNPSVLGRI

SEQ ID NO: 301629 - protein, 32 aa, Zea mays
  Clone ID: MRT4577_38163C.1.pep
APPPAEARAAVSHVAEFVSNIPVDAAAAFSAA

SEQ ID NO: 301630 - protein, 58 aa, Zea mays
  Clone ID: MRT4577_38164C.1.pep
MKALILVGGFGTRLRPLTLSVPKPLVDFGNKPMILHQIEALKEVGVTEVVLAINYQPE

SEQ ID NO: 301631 - protein, 52 aa, Zea mays
  Clone ID: MRT4577_38165C.1.pep
PWHHITRATVAASSFTRFDFPSSVVPTVPHDVPSVHLRVDIVQSFRSLYVGR

SEQ ID NO: 301632 - protein, 88 aa, Zea mays
  Clone ID: MRT4577_38166C.1.pep
KKRFILPRRPGVFFFFLGGPPPGWANTDNWWKKRRCPQKEGPRFPPLEIKQTDLLTRFHARNPFLMMVLKKKKKKKKKKKKKKKKKKK

SEQ ID NO: 301633 - protein, 119 aa, Zea mays
  unsure (1)..(119): unsure at all Xaa locations
  Clone ID: MRT4577_38167C.1.pep
XXCXGXFFLVLFXYTKRNCYFHPSYKPLIPIYKHGAKLENSLYSPQNKHSTTGYTCRQTTRQKIKQQKFEAYPDGMGCHAMQCNAMQGPLVIWIWPPKFTPGSHDKLGLEDAGFDLLVR

SEQ ID NO: 301634 - protein, 361 aa, Zea mays; identical to SEQ ID NO: 301627
  Clone ID: MRT4577_38168C.1.pep

SEQ ID NO: 301635 - protein, 227 aa, Zea mays
  Clone ID: MRT4577_38169C.1.pep
MKALILVGGFGTRLRPLTLSVPKPLVDFGNKPMILHQIEALKEVGVTEVVLAINYQPEVMLNFLKDFESKLGIKITCSQETEPLGTAGPLALARDKLADGSGDPFFVLNSDVISEYPFAELIEFHRAHGGEATIMLTKVDEPSKYGVVVMEEGTGKVERFVEKPKAFVGNKINAGIYLLNPSVLGRIELKPTSIEKEVFPRVAADGGLFAMVLPGFWMDIGQPRDYI

SEQ ID NO: 301636 - protein, 57 aa, Zea mays
  unsure (1)..(57): unsure at all Xaa locations
  Clone ID: MRT4577_3816C.1.pep
DSIEPTLGVNTTRTGCTVRKTAYRIKTVPARXWRFTSNCKHARQMPLCAIDIFKGKA

SEQ ID NO: 301637 - protein, 43 aa, Zea mays
  Clone ID: MRT4577_38170C.1.pep
NSYCITIWFPINVVFILLNAHLLVKRCNNTIYRFVIMLKLTSN

SEQ ID NO: 301638 - protein, 180 aa, Zea mays
  Clone ID: MRT4577_38171C.1.pep
GRAPPDPPGAHPAGPYGPNQHGGRGLQIPFWPKKKNLPPWVGGAPPPRWVNFFPMYRGIRGPRSPPPGFPLPKGRCYVFFPPVFRGLFCKNPLWGVPPLQISRGFCWVLTILPWFWAAPSAFFSGPLIIKASRSPAPFLGPCGVIFTGFPFFKAGPCFLGGGPLGVWGSKKKRAGPLPFW

SEQ ID NO: 301639 - protein, 59 aa, Zea mays
  Clone ID: MRT4577_38172C.1.pep
QQESRGGLVCYCLVNSVSHLSRNNRGFTTLPERYDLPTSDRRDDDGLDQVKLPVVDLAG

SEQ ID NO: 301640 - protein, 71 aa, Zea mays
  unsure (1)..(71): unsure at all Xaa locations
  Clone ID: MRT4577_38173C.1.pep
IAMLPWLLPXHNNSNFIPIKXDNLXIHQFGRRLISXDSDRVLTTRVGMLTPRFSTRPDKXRDSASAXDXRQ

SEQ ID NO: 301641 - protein, 43 aa, Zea mays
  Clone ID: MRT4577_38174C.1.pep
WPYKDETTRTLPTPDIRLVTPYIKGVVLFLAHRTHMHMHFKVT

SEQ ID NO: 301642 - protein, 119 aa, Zea mays
  Clone ID: MRT4577_38175C.1.pep
MVQRLTYRKRHSYATKSNQTRVVKTPGGKLVYQYTKKRASGPKCPVTGKKIQGIPHLRPAEYKRSRLSRNRRTVNRPYGGVLSGIAVRERIIRAFLVEEQKIVKKVLKIQKTKDKTAAK

SEQ ID NO: 301643 - protein, 102 aa, Zea mays
  Clone ID: MRT4577_38176C.1.pep
LSCSVLGLQCFAVLEIRKKGIHTGMFEQWKQRFMCKAFFLHVSYCISKDPAPFFTKRTLFCATVDTINGALKSMTSTFQKDFFQCYFNRVNKVDRGIKLYIL

SEQ ID NO: 301644 - protein, 119 aa, Zea mays
  Clone ID: MRT4577_38177C.1.pep
MVQRLTYRKRHSYATKSNQTRVVKTPGGKLVYQYTKKRASGPKCPVTGKKIQGIPHLRPAEYKRSRLPRSRRTVNRPYGGVLSGIAVRERIIRAFLVEEQKIVKKVLKIQKTKDKTAAK

SEQ ID NO: 301645 - protein, 116 aa, Zea mays
  Clone ID: MRT4577_38178C.1.pep
PGGSNPPVLTLIALWKHWPKFSGFFQNSAGGPLSHIVYNGRALLFFFPVQFVFSRVGFCFPPKPFIPDKSRLYRGTIKNPESLSKKGCPRPKRPPSFCIPPLDFICASSGRSFFSP

SEQ ID NO: 301646 - protein, 176 aa, Zea mays
  Clone ID: MRT4577_38179C.1.pep
MSEEKHHHFFNHHKKDEEQPAGEYGYSETVVTATGEGEYERYKKEEKEHKHKQHLGEMVQRLTYRKRHSYATKSNQTRVVKTPGGKLVYQYTKKRASGPKCPVTGKKIQGIPHLRPAEYKRSRLPRSRRTVNRPYGGVLSGIAVRERIIRAFLVEEQKIVKKVLKIQKTKDKTAAK

SEQ ID NO: 301647 - protein, 312 aa, Zea mays
  unsure (1)..(312): unsure at all Xaa locations
  Clone ID: MRT4577_3817C.1.pep
MGSDFKSIPLIDIGPLVEKIDDPSMANDKDLLQVVRLLDDACKEAGFFYVKGHGIDESLMREVRNVTREFFQLPYEEKLKIKMTPQSGYRGYQRIGENITKGKPDMHEAIDCYTPIRPGKYGDLAKPMEGSNLWPXLCRDISRKIMRGIALALGGAIDAFEGDTAGDPFWVLRLIGYPVDIPEEQRTDTGCGAHTDYGLLTLVNQDDDICALEVQNRSGEWIYATPIPGTFVCNIGDMLKVWTNGIYQPTLHRVVNNSQHYRVSVAFFYESNFDAAVEPVEFCREKTGGAAKYEKVVYGEHLVQKVLTNFVM

SEQ ID NO: 301648 - protein, 53 aa, Zea mays
  Clone ID: MRT4577_38180C.1.pep
FSAIDAHQCYCQRLCSMTCRRLLQLSIHHKQLGLLRFPRCTKVRFLLVERKLD

SEQ ID NO: 301649 - protein, 139 aa, Zea mays
  unsure (1)..(139): unsure at all Xaa locations
  Clone ID: MRT4577_38181C.1.pep
WLPPARAALLPAVVSAAXARLVLWGGETRAARHGKLAGQVMMDVAGTVVCRADAFYLGRPAPVLAIEDRLLGGATYLVLPVDRLPQGYDALTAASLAALSYGSRRPGGGSGSASSPSIAGGARSPFEYVKGDDGRTVIK

SEQ ID NO: 301650 - protein, 100 aa, Zea mays
  Clone ID: MRT4577_38182C.1.pep
PAGPGNALPCMVSDLLSLSLTHSLTPARTCWKKKHQLQLGYSFDKLHTHTHGQQSAAAETRRRSHVSSASSGPCMPRYRAGLTTPPHFTLRRFCKNFLRI

SEQ ID NO: 301651 - protein, 71 aa, Zea mays
  unsure (1)..(71): unsure at all Xaa locations
  Clone ID: MRT4577_38183C.1.pep
LCFLSSLSCATYYHSLHNSFITYCXVLESNIILDLHTHISHFFFFFTFSTYDAILNSIYCMNFNDLYFLNI

SEQ ID NO: 301652 - protein, 171 aa, Zea mays
  Clone ID: MRT4577_38184C.1.pep
MPATPLVLALLLLLLAAGPRPVAPASTDRAALLAFRASLSPPSRAALSSWHGPLSASWLGVSLHPPAAAAVAAPPSVASLALQGLNLSGPLPAPSLALLRRLRELDLSANALFGELPCSLPRSLVDLDLSRNALSGAIPTCLPASLPALRTLNLSSNSLGFPLSPWISFSS

SEQ ID NO: 301653 - protein, 147 aa, Zea mays
  Clone ID: MRT4577_38185C.1.pep
RLVPGQVTKKKKKKKKKKKKKKKKKKKKKKKKKKKKKFKKKKKKKKKFFSFGRAPLRGDFCNFPSPWGPFCLSFGGPISPFGGFFYISLAGFFHRWAWKTLGFPHFIPFGELPLFPSWVITKRARPVPLSKNFPRLMGNWPPLLPAL

SEQ ID NO: 301654 - protein, 161 aa, Zea mays
  Clone ID: MRT4577_38186C.1.pep
TFKQNQNAAIATKLSPSSYFLSSSSFSRHNPGSTTPLLTFWYQICRSLAPVWSRPPATTTSPVFSDGTGQWIPTRRLFGRSWRRNSQPWISNGSNNSPNPPVTRRGVWRPWSRLRPISSSVGLKGMPPWKTRKLSKQGEGAALEPSSTEPGLPSKPEFSLV

SEQ ID NO: 301655 - protein, 61 aa, Zea mays
  Clone ID: MRT4577_38187C.1.pep
MASCMPSSTLFRRLLLVLQLAVAALTTLGAQAHCSTGTTTRRSRACSDLVRYGLLSKFADD

SEQ ID NO: 301656 - protein, 257 aa, Zea mays
  Clone ID: MRT4577_38188C.1.pep
MEALRKAEAELTVYVHPSNAKRVRHAVSRQLSALLFTYVDRFDGVLLMHEVSFLIGKDKEGKPIYERSDRNDQIAEPVSYGKIMNGLVPYFSVQVHATLLLFSPQPDMILEGMVEMLGKESIHAIVLGVFSVAIMSEDIKFKFKWKSDGGKFVSLTDKKHVIERGTMIRFSVKRVDTEMSCHITGSLIPPHTGCMRWLSVHDPKYASELKSGESRSRDTSIKIEQNEQEHRILKNEDGMVKSERPYKSRKRVRHIEK

SEQ ID NO: 301657 - protein, 257 aa, Zea mays
  Clone ID: MRT4577_38189C.1.pep
MEALRKAEAELTVYVHPSNAKRVRHAVSRQLSALLFTYVDRFDGVLLMHEVSFLIGKDKEGKPIYERSDRNDQIAEPVSYGKIMNGLVPYFSVQVHATLLLFSPQPDMILEGMVEMLGKESIHAIVLGVFSVAIMSEDIKFKFKWKSDGGKFVSLTDKKHVIERGTMIRFSVKRVDTEMSCHITGSLIPPHTGCMRWLSVHDPKYASELKSGESRSRDTSIKIEQNEQEHRILKNEDGMVKSERPYKSRKRGRHIEK

SEQ ID NO: 301658 - protein, 414 aa, Zea mays
  unsure (1)..(414): unsure at all Xaa locations
  Clone ID: MRT4577_3818C.1.pep
EPAAPVSCSPPAAAAAVPVTSASEGTQLLKDLIHIFDSGFSRYSFCDSPSLCASISRFYNERTCLFPPLPDIGPLVEKIDDPSMANDKDLLQVVRLLDDACKEAGFFYVKGHGIDESLMREVRNVTREFFQLPYEEKLKIKMTPQSGYRGYQRIGENITKGKPDMHEAIDCYTPIRPGKYGDLAKPMEGSNLWPKYPSNFEVLLENYIKLCRDISRKIMRGIALALGGAIDAFEGDTAGDPFWVLRLIGYPVDIPEEQRTDTGCGAHTDYGLLTLVNQDDDICALEVQNRSGEWIYATPIPGTFVCNIGDMLKVXFPGFFARSLASDCSTTSGFLYVILLGSXWTNGIYQPTLHRVVNNSQHYRVSVAFFYESNFDAAVEPVEFCREKTGGAAKYEKVVYGEHLVQKVLTNFVM

SEQ ID NO: 301659 - protein, 53 aa, Zea mays
  Clone ID: MRT4577_38190C.1.pep
AYVSRRVSVYGKAQICIALLMLPALWHSFTRSNSPKSGRNDSKLRNEPCAIMF

SEQ ID NO: 301660 - protein, 143 aa, Zea mays
  Clone ID: MRT4577_38191C.1.pep
GTLEAGRYPPSIQLCRSALHCASFHPVQISVPILPIVQCSSNIPVSSSDRSHRVLDFTHGVSEATQHSAEPQERHKTMLIMSRLVMINEAYNRCIHLFLKVYRQHPRLRWIYYHILMRVRTCTLDYRTRPLNARHVRLHIDLT

SEQ ID NO: 301661 - protein, 85 aa, Zea mays
  Clone ID: MRT4577_38192C.1.pep
AWQGHLFAPQYTKTIRRLYLRAPQYTHSEQLPDNYLRVGQAFAKWEGSPQLKQQPSTGSPGAETNIPPSGLRALAFRASPFRPGD

SEQ ID NO: 301662 - protein, 48 aa, Zea mays
  Clone ID: MRT4577_38193C.1.pep
ERPPGQVKKKKKKKKKKKKKKKKKKKKKKKKKKKNLDPKTETTLKGNF

SEQ ID NO: 301663 - protein, 43 aa, Zea mays
  Clone ID: MRT4577_38194C.1.pep
AVRGCIFLHGRGDKATKDGYGHDYIRSTDTNMLRGDNSISGTH

SEQ ID NO: 301664 - protein, 132 aa, Zea mays
  Clone ID: MRT4577_38195C.1.pep
QKKEGFLISFPFLCLGGGGIGRSKSLLFLLGFQLINQPTNRAKRGQAQKEAGLGGGGEPRQREHRPLFCSANWQTHFAGSKRERALVEVYGSSRFLFEAEVFGAAPGVGALIAPAVFYGEQGGAIDPGGVVS

SEQ ID NO: 301665 - protein, 119 aa, Zea mays
  unsure (1)..(119): unsure at all Xaa locations
  Clone ID: MRT4577_38196C.1.pep
PTYSPTHSFECLTYHHVAVKPPLGQEHWPPQRAPXTALEELQCHCVRGSWCCRYTLSKLPVRYKGGTVLDGSLYGALAWIQAFKTDGGPAWSHLDPATYEADQSTGIKHHSVPVIRRTV

SEQ ID NO: 301666 - protein, 78 aa, Zea mays
  unsure (1)..(78): unsure at all Xaa locations
  Clone ID: MRT4577_38197C.1.pep
MDDTGTGAGGKAKKGAAGRKVGGPRKKSVTRSVKAELPFPVGRIGRYLKKGRYAQAYGSGAHVXLADVLEILAAEVLE

SEQ ID NO: 301667 - protein, 74 aa, Zea mays
  unsure (1)..(74): unsure at all Xaa locations
  Clone ID: MRT4577_38198C.1.pep
MGAKGAGLLALLAVSSIAAPSTFIPQGADDYLSPVTXTGXFLYCTIQSXYIVQEAIQASVLPSLAXTVQQPDAL

SEQ ID NO: 301668 - protein, 226 aa, Zea mays
  Clone ID: MRT4577_38199C.1.pep
MIMMHRATIIALICCLVAGGGARAQPFDYPAARLATTWANTDAALPHHVVYTDGSVARAALLRLNPAGLGPSYAFGFFCTASRPRGDGPAAPCTEFLLGVAVVYCNSGAGMTFVTAGVPQVVWSANRGSPVCEGATAELTPEGDLVLRSGPGGAVLWSTGTKGRSVAGARIGSDGNLVLYDGRNATVWQSFDHPTNALLVGQSLKHGARLIANVSAANWRDGRFYL

SEQ ID NO: 301669 - protein, 45 aa, Zea mays
  Clone ID: MRT4577_3819C.1.pep
NPSSTNKPYFFQTRKFISPANRDFHAKASLASKLEVGQKGLPGTK

SEQ ID NO: 301670 - protein, 68 aa, Zea mays
  Clone ID: MRT4577_381C.1.pep
LRSFSRLLAPARLPSCSSTRSKFYVREPVNAKPNWVKVGLTLGTSIFMWIYLIHQHNGDVLEYKRRNG

SEQ ID NO: 301671 - protein, 469 aa, Zea mays
  Clone ID: MRT4577_38200C.1.pep
MPYFIRSFAFNTFSRRPIQQTAVVTASPKNLGGTPLLCKLKGKSGIRRSLFTYTDYSNDGVTKFLDYAFSRSGDGGKIRCPCIKCCNTYNMSRDVVYSHLTAYGIIRSYTFWYHHGEVFGETENELEVEDDDDSHDGMQELMEDLFPSTNHPGNDTMTEPTPSVIFEDQPIGEVVKFYNLLNDLNLPLYHGSNSTKLSALVKLLNVKNMGKWSNKSFADLLDILLKDFLPQNNIKGKTKDNNNSRLDLKEMNLKPHLHPVKDGDKLVMPQAPYVLPPEAKRYLDDVQTVHNRPGRINDESDYGKFSLPIFSYVGRSLGARKTRDLELLELEQAHIYVLRNCDEVQPFISEYSNGEEVSSLPQYTSTWAKNFIPWFRNKIHNLYDHDKSYDMNGFRFRIESRDKNRCTQNSGVVVLADGSTISENAEYYGILTEIIELQFLGGRRVPLFRCKWVDIFNKKRGIKKDVYGL

SEQ ID NO: 301672 - protein, 576 aa, Zea mays
  Clone ID: MRT4577_38201C.1.pep
MPYFIRSFAFNTFSRRPIQQTAVVTASPKNLGGTPLLCKLKGKSGIRRSLFTYTDYSNDGVTKFLDYAFSRSGDGGKIRCPCIKCCNTYNMSRDVVYSHLTAYGIIRSYTFWYHHGEVFGETENELEVEDDDDSHDGMQELMEDLFPSTNHPGNDTMTEPTPSVIFEDQPIGEVVKFYNLLNDLNLPLYHGSNSTKLSALVKLLNVKNMGKWSNKSFADLLDILLKDFLPQNNIKGKTKDNNNSRLDLKEMNLKPHLHPVKDGDKLVMPQAPYVLPPEAKRYLDDVQTVHNRPGRINDESDYGKFSLPIFSYVGRSLGARKTRDLELLELEQAHIYVLRNCDEVQPFISEYSNGEEVSSLPQYTSTWAKNFIPWFRNKIHNLYDHDKSEQMEDLLSLSRGPLQNSTCFAGYDMNGFRFRIESRDKNRCTQNSGVVVLADGSTISENAEYYGILTEIIELQFLGGRRVPLFRCKWVDIFNKKRGIKKDVYGLVSVNFKCLLRTNEPFVLASQASQVFFVKDNLIKGWHLVVKMQPRDTYNVPPGNSDDEDNEDEDYDDEEDIAIDDPPTTSFGGKRK

SEQ ID NO: 301673 - protein, 313 aa, Zea mays
  unsure (1)..(313): unsure at all Xaa locations
  Clone ID: MRT4577_38202C.1.pep
RPPTLIRYVFPSERLPDWLRLALASPPSTDLASPLLSRRVASELHLSVFEYYLFWFAYYPVSSASSAAPAASASNPRLTSRARLETWVSTLATTAIRKSGQKPENSLYLRLLYAYLREFVPTRTPPVNMSGGGTLLHRAPSHGVDAIDSFARAEFFLHTLVHFWLVGDDFSPLPKQTCHALGLRLPSRAHADLSERPPSPGLGDAVKLLVMYLNCCDGRALADACVPSPQGLSVSNGLCDTQVGFWNPLIQRPLYRFVLRTFLFCPIGTAIKNASQVFSGXWLAYMEPWXSXQQELDRYGKQQAGDEKEPQTT

SEQ ID NO: 301674 - protein, 52 aa, Zea mays
  Clone ID: MRT4577_38203C.1.pep
PKNMNNKAPLPKPSGELPDTLRLNKGVNVNGPKKGKKGNDYIQFEDKDIPKI

SEQ ID NO: 301675 - protein, 65 aa, Zea mays
  Clone ID: MRT4577_38204C.1.pep
DRCRDILVAVGACCFAETIFLHDNCIGLFTSNDRTSQEYTIFHVESLPCSLNIDVIFPCIHLSYT

SEQ ID NO: 301676 - protein, 221 aa, Zea mays
  Clone ID: MRT4577_38205C.1.pep
MWNCSAPRSSLLLQYGDDYVHWLRSGVLGVLPGHSRRVSLPSNWNLFLRAHYSMKWTAAGETATGDGGSRLRGSKRLKTKTPATAQGPQHHGQRCSPKPTTSQSIKAPPCKRSQKLGDKITALQQLVSPYGKTDTASVLHEAATCIKHLHEQIQILTASYPELSSQASQQDTGDEEGGATGLRRRGLCVASLSPAVVQLVSAEAALGNRDTEDHWRWLGTL

SEQ ID NO: 301677 - protein, 94 aa, Zea mays
  Clone ID: MRT4577_38206C.1.pep
CSRASHSIAEPILFSNEHSNVSISHPTNYDPRSLVCTTSSNPNLLIRIYVLLYHLHPFPINLKDIVFIKNLLTHINDLSECHMFDNLIHAIPHL

SEQ ID NO: 301678 - protein, 76 aa, Zea mays
  Clone ID: MRT4577_38207C.1.pep
GAGIGPGVFTIPSPRIPSVGEIPARIAKMLGVLDPNILWVNPDWGLKTRKYPGVKPALTNMVSAVKFIRTQVARAK

SEQ ID NO: 301679 - protein, 62 aa, Zea mays
  Clone ID: MRT4577_38208C.1.pep
ASIICMSCSFWASVRTGHPLVEATMFDIYAKYWGCKRKERGPQASPHLGSRTRSQCQGVPNE

SEQ ID NO: 301680 - protein, 92 aa, Zea mays
  Clone ID: MRT4577_38209C.1.pep
MAKPCGVRLSGEARKQVEVFRQNLFQEAEEFLYRFLPQKIIYLNQLLQEDSLNVADLTSLRAPLDIPIPDPPPKDDEMETDKQDETEVPKCG

SEQ ID NO: 301681 - protein, 128 aa, Zea mays
  unsure (1)..(128): unsure at all Xaa locations
  Clone ID: MRT4577_3820C.1.pep
MKSNPRVKNSRRKGRKAHFTNPSSDHRVLMSDALTTELRHKYXVSSIPIRKDXXVQVVRGNYHAREGKAQQMYRHRWDIHDQRNYRHKGEGSMXNGRIHPSNAINSKLXLDKDRKALLERKGWRSAAD

SEQ ID NO: 301682 - protein, 74 aa, Zea mays
  Clone ID: MRT4577_38210C.1.pep
SFPILKGPPGGNWVKQGPLFLGYFLEKKTRKLGPLLGKKAVSPLKKKKKKKKKKKKKKKKKKKKKKKKKKKKNS

SEQ ID NO: 301683 - protein, 57 aa, Zea mays
  Clone ID: MRT4577_38211C.1.pep
AASIHLNGLVLVGDHTSNTTCCEEAPILELDCKEHSAHSTTTAANFKLCLLNEDVPW

SEQ ID NO: 301684 - protein, 100 aa, Zea mays
  Clone ID: MRT4577_38212C.1.pep
KWGFQGILTDYSLAGYAFDFYKMISRTPVRVKKAHIQIKPPPVCGSNTQLFGLAENVVNPQENTKSPPPGNFSPNMPFLLGVHQPPYFLGTPVCSPNNMY

SEQ ID NO: 301685 - protein, 168 aa, Zea mays
  unsure (1)..(168): unsure at all Xaa locations
  Clone ID: MRT4577_38213C.1.pep
MPANANANATTGAPAPVPPAVGSLPXTPRRPXPVTIPNTATGSPAAVPPAXPGRXENTPATNVPVNMPANANQPANVVPPQVVVSKLPPEVLAKLQPGAAPALPADIPQIPKMPDLSGLANISFPAMPSEPRMPQLPPDFSLYGYEVPIPKFITKMVDGNGAGGGQQN

SEQ ID NO: 301686 - protein, 166 aa, Zea mays
  Clone ID: MRT4577_38214C.1.pep
MPRTRGQPANVVPPQVVVSKLPPEVLAKLPPDVLASIPPETLANIAASQGQLQTSEILATIPAAQAQGQLPADLPPEVLAKLPAVQSQLPANITPEMMTSLAAVQQPAAAGQPGAAPALPADIPQIPKMPDLSGLANISFPAMPSEPMMPHLPPGLLVVRVRCPHP

SEQ ID NO: 301687 - protein, 136 aa, Zea mays
  unsure (1)..(136): unsure at all Xaa locations
  Clone ID: MRT4577_38215C.1.pep
DKSDNTIRXLAIFKVLNAYYNHPGLLMGCSPINHILYYKVMHYNPNNPYWFNHDRFVLSDSHSCMLHYALLHLACYDSVNEEDLKQIRQYRTKTPGHPENFXTPGVEVTTGPLGQSIPNAGGLALAEKHLAAXFNK

SEQ ID NO: 301688 - protein, 110 aa, Zea mays
  unsure (1)..(110): unsure at all Xaa locations
  Clone ID: MRT4577_38216C.1.pep
GGGFSGEHRGRILAPKPFFEGLVGHLFPAPGGPQFWRGKRGVPPGPKIMGAPTPRAFEPGPPRGGFPVALGGNVFLGGAPLXGANKEIPLGFPRGPFFWQSSPPPGVSGR

SEQ ID NO: 301689 - protein, 80 aa, Zea mays
  Clone ID: MRT4577_38217C.1.pep
SHRDIYSDQISTGHKLPIHDHLHRDLPARTDARGCVRITVSKRHQQMYEQQKDVPSQEHHFLFSVSFHASDFPLRLQMQR

SEQ ID NO: 301690 - protein, 260 aa, Zea mays
  Clone ID: MRT4577_38218C.1.pep
MAPAAAVTGAGDSDRLAREVARVLDECRTSHAVQPRKLRELAALRSSSGGGGRLFIAAFHVAVTPLFALARRSAESDRVARFISAFASASASSADGGGNGFLEEFLRFLVTASKAAHRPARFRACQIISEIIMRLPDDAEVSDEIWDEVIDGMKVRVQDKNAAIRTYAVRALSRFAVEGEDGGILDLFLETLDNEPNAEVRKTIVFSLQPSNNTLESVVESMLDISESVRRAAYSVLATKFPLQTLSIKQRTTVLQGAYL

SEQ ID NO: 301691 - protein, 82 aa, Zea mays
  unsure (1)..(82): unsure at all Xaa locations
  Clone ID: MRT4577_38219C.1.pep
KCLYHLYLHYQVGAYAVYMWRHRRFFGNSRESLEHIVRVVVLNMVLLHXFSAYFILPSFQKLSLFYLQHFLFHRVWASFQGD

SEQ ID NO: 301692 - protein, 123 aa, Zea mays
  Clone ID: MRT4577_3821C.1.pep
GHGVPRTGGKEHFQARVRGFQPYGGSLFGLWPFYQLLLGGPSNFVPSKFFSIPRGRSPIKGGILSLFPKGPRPTVPKRGVFGLKPQRLEITYMTTFSASLVGKKDHSFLVVGGFPLFEIYGPH

SEQ ID NO: 301693 - protein, 112 aa, Zea mays
  Clone ID: MRT4577_38220C.1.pep
LLELVWRLHGAGRLLEAVDPRLAAGGYGYDGEEAERLLLLGLACSHPNPRQRPKAQAILQNLQTRSVPPLPVPMSKPVFMWPAPLADGEGEEEEDATHASFMSVQGGHTAWA

SEQ ID NO: 301694 - protein, 72 aa, Zea mays
  unsure (1)..(72): unsure at all Xaa locations
  Clone ID: MRT4577_38221C.1.pep
QHAIRTVHLQLAXVIVKVAYIIRYAALRAIAKSDVQLICILHISPMQHHVCKPPKQRHLQDIIIPHLHKLRH

SEQ ID NO: 301695 - protein, 129 aa, Zea mays
  Clone ID: MRT4577_38222C.1.pep
TQHKHSSSNGATEYTDQERKLVDLENENRGAESRTLTRDVPVGETVRGSWPWDTWTDMLAGSRILMLAQTPLLPCVDACRIHDCITAVQSRSRGGVVNSPRAPPPTSRRSRNCCRTSVQNPSTLRPTRP

SEQ ID NO: 301696 - protein, 35 aa, Zea mays
  Clone ID: MRT4577_38223C.1.pep
DRCMSLDVLSNEMYHYLLHSKASLNNNYNFPFKHL

SEQ ID NO: 301697 - protein, 55 aa, Zea mays
  Clone ID: MRT4577_38224C.1.pep
TTGVIKPKILKTQASLDIKFPEPKDERTWPSSTIIYSTWGQMESYKNKVLHFHTF

SEQ ID NO: 301698 - protein, 295 aa, Zea mays
  unsure (1)..(295): unsure at all Xaa locations
  Clone ID: MRT4577_38225C.1.pep
MELALGAMASLAPKLGDLLMEEYVVQKGLKPDIESLSRELVMMNAALVDASRVPPDQLTEVEKLWARKVRDLSYDMEDAVDDFILRVAGGDDSAADSKFFKKTLAMVKDVMSMKKFKDRRQISDKVKDIKKLSNELAELRAKYTVRGVGADLAASTGIDPRVINLYKKETDLVGIEESRDKVIRMLSIGTKDDDAHESHQDLKIVSIVGVGGLGKTTLAKTVHDMLKKQFDCSAFISIGRTPNLNRTFEKMLLELDREYKQIDMARWDLEQFKNKLDEFLKDXKRYLIVVDXIWD

SEQ ID NO: 301699 - protein, 204 aa, Zea mays
  unsure (1)..(204): unsure at all Xaa locations
  Clone ID: MRT4577_38226C.1.pep
MELALGAMASLAPKLGDLLMDEYVVHKGLKPDIESLSRELVMMNAALVDASRVPHDQLTEVEKLWARQVRELSYDMEDAVDDFIVRVAGGGTTTTTDDNDTKVFKKILGKVSAVMSMKKFKDRRQISDKVKDIKKLSNELAELRAKYTVRGAGADLAASTGIDPRVINLYXEESDLVGIQESRDKVIKMLSIGTKMGDVQASDQ

SEQ ID NO: 301700 - protein, 99 aa, Zea mays
  unsure (1)..(99): unsure at all Xaa locations
  Clone ID: MRT4577_38227C.1.pep
FPGFSPGSPLVFLGIQPVLSGFAVVFGCQAFVAXLLLGFSFVVGVPLGVFLGFSLVLGAKGVWTPLVLGGPFPQALVLLWVPVRPDWAKEVENPKAGLF

SEQ ID NO: 301701 - protein, 135 aa, Zea mays
  Clone ID: MRT4577_38228C.1.pep
READDLVAGRNADDRRTRMKALQRLYSDHMDSGTAQFAVYYKEWLQSGAAAPPPVPSVPLPSTPRSFDGREKSSASVHRTSINRDLWVNREPSHPTDCIARAQEFLRVYLNSASRYNAVFGTALALGQEDVKDTK

SEQ ID NO: 301702 - protein, 75 aa, Zea mays
  Clone ID: MRT4577_38229C.1.pep
EKYQGLMPDSQLSTFIIVMCQNTEAISYMITYGFAAVISTRVSNELGARNIANARKALTMSLALSLMLGVGVLLL

SEQ ID NO: 301703 - protein, 480 aa, Zea mays
  Clone ID: MRT4577_3822C.1.pep
MEWLRGKCIGKGAFGTVHLAVDTATGRAFAVKSVDSKSAPAAAMACLESEIRILRRLSSPHVVAYLGDDGATATTRNLHMELVPGGSATEAARGGLAERGARGVLRSVAAALRYLHEEAGVVHGDVKGRNVLLGCRDGDAAQCCGAKLADFGAARLVSDAAPARGPRGTPAWMAPEVARGGAATPASDVWALGCTALELLTGSRPWSELGGAADVGELLLLVGFGGQRPAIPAWLPDACRDFLDKCLRRDAGQRWSCAQLLRHPFLSADAGETWPSPSPSPRAVLDWAPSDSDSEPMSSAEAESMHEVMARAKGRLAELASNGPRTSWDWHWDEVEWGSGPTRAADTWAPPPSYEAQRNGDASAPVPSTAAFSGGRDRDVLVLGSGSGSGLPCGHGRPGYHSHCCRYKCGFGRQWPRGRIEGDDADAREGSGDRCEKGSWGGSSAPTDSIQRRWSSGSFPNPRLAEPWALAFHVLKVARG

SEQ ID NO: 301704 - protein, 80 aa, Zea mays
  Clone ID: MRT4577_38230C.1.pep
PTEVEPLMASQVLLQQALFAPKLSFPSSSRNVALISRVPSTPISWRCTPLIAKPSFAVRADSNVEGAGEATEDVPSYNVD

SEQ ID NO: 301705 - protein, 115 aa, Zea mays
  Clone ID: MRT4577_38231C.1.pep
LLLSSPGALLSSTLGPVAGFFNGVSSGRPHAFSFARLRRKTYSASRNHGGMREDEEEVLSYPQKVINYQLNTWVWVNLLLVLGLISTSRQCKMGILTKLRVGMVGLRRNSFSRKM

SEQ ID NO: 301706 - protein, 61 aa, Zea mays
  Clone ID: MRT4577_38232C.1.pep
VLNLSVLAAQLLRSALLSLGKQFQINHGHCWTDGCFEPTGAPVLNCVEKCVLMRHFTMPVD

SEQ ID NO: 301707 - protein, 70 aa, Zea mays
  Clone ID: MRT4577_38233C.1.pep
RKKGFKKKKSFLKIWVSPCSIKTPLPVYSFSPEWSPKIPWFPPNKIVKSYTGLMLFCLLCPSVPFPKFLS

SEQ ID NO: 301708 - protein, 74 aa, Zea mays
  Clone ID: MRT4577_38234C.1.pep
KLVLKANPSRCAGSLMSRAASDTNVGYGRLLPRGLSTLTAHTKAPQSTSWIGCGSSYRALAPPLANVQHGYTKE

SEQ ID NO: 301709 - protein, 161 aa, Zea mays
  unsure (1)..(161): unsure at all Xaa locations
  Clone ID: MRT4577_38235C.1.pep
MAGSSDPDKLMNKADKLTKLSFTRWNADWKSATSLYEQAAIAYRFRKDNEKAKDAFEKASKGQEMISSPWDAAKHMESAAALAKELGRWNEVSDFYHRASELYXVECGRPQPASDALAKGASXALEEKSPEEAIKMYDEACSXLEEDGKEQMAFDLYRAAA

SEQ ID NO: 301710 - protein, 85 aa, Zea mays
  Clone ID: MRT4577_38236C.1.pep
RPGVEGSCASSTARIRRRGNLGRAPRRRGGPALYVRHGGLFRPRQAHEQSRQTVIRLARKLPTGDLQAIKKADDGEESLDEDDLT

SEQ ID NO: 301711 - protein, 87 aa, Zea mays
  Clone ID: MRT4577_38237C.1.pep
YSSPDMITESILLLFFANDYFTKCIISDEAKSTRLKSCVRSRQGVAAFVENVHRVAEERDVGVDTAVAGERRHDEYGALHGRVARHE

SEQ ID NO: 301712 - protein, 86 aa, Zea mays
  Clone ID: MRT4577_38238C.1.pep
AHFGALFFFFFSKFITCWVIYTIWLTLAIYNAVIDNCMNEYKKGLTWLNNAKKIHFTDQKLNKIAGRNFDLGLHESLGLQTRIKHW

SEQ ID NO: 301713 - protein, 93 aa, Zea mays
  Clone ID: MRT4577_38239C.1.pep
GRGTASSRPHPVEGGRATSTARISRCGNLGRAPRRRGGPALYVRHGGLFRPRQAHEQSRQTVIRLARKLPTGDLQAIKKADDGEESLDENDLT

SEQ ID NO: 301714 - protein, 186 aa, Zea mays
  Clone ID: MRT4577_3823C.1.pep
PQDKQHCGVLSILNNNGNNCARARASISGSNKFPFRTRTNPSARAKARCRVPAAARPKRVAAGRGRPQNRGTARLHSTPLAEPNRTERFRRLYTLVAVGQRVPRRERPDPRRRPIGRLFRRGRTGRSSFPARHHLVRPGVSPVKIRRVPRGRWVSFHAKGHCIVRWESFHEEAQPLGSANGRRSRP

SEQ ID NO: 301715 - protein, 178 aa, Zea mays
  unsure (1)..(178): unsure at all Xaa locations
  Clone ID: MRT4577_38240C.1.pep
MSKEKHHRDWILRRCCGSIAACILTLAVVVGFIVLVIYLALRPSKPSFYLQDVQLRSIDLSDPALSLXLGTYDLARDDDGVCRRTTCQLIDARARVHAYALXGTHTAHTQVTIASRNPNERVGVYYKTLDAFTTYRDEAGTVPVSMPGIYQGHKDVSVWSPVLSGDAVPVAQYVADAM

SEQ ID NO: 301716 - protein, 102 aa, Zea mays
  Clone ID: MRT4577_38241C.1.pep
PPFCFGFTPPFKGPPLLLAPFGWLLPIYLGPDPILFQIAWGFFRCSKPKNPFRCFPRPPFFFFPGTGLGPLSPLPFGCPPLGSPLVFLFLGPPFFFFPNFGL

SEQ ID NO: 301717 - protein, 163 aa, Zea mays
  unsure (1)..(163): unsure at all Xaa locations
  Clone ID: MRT4577_38242C.1.pep
SASADAWAGAWVRVCIQDGSLLPFKRITITSGMGRLIKEEIVEMVQEAVIFFFLDXEVGERGGAYNTPRHYAYYMRNTILVDXIASYLSAGDEVLIVDAVVCATSWLVRIQLVVVVEFVDVLMELAGVCSPIICFMFHRAGSVLVYAAGLVEVASSGGCGAGP

SEQ ID NO: 301718 - protein, 300 aa, Zea mays
  unsure (1)..(300): unsure at all Xaa locations
  Clone ID: MRT4577_38243C.1.pep
MAGSSDPDKLMSKADKLTKLSFTRWNADWKSATSLYEQAAIAYRFRKDNEKAKDAFEKASKGQEMISSPWDAAKHMESAAALAKELGRWNEVSDFYHRASELYRECGRPQPASDALAKGASALEEKSPEEAIKMYDEACSVLEEDGKEQMAFDLYRAAAALYIKMEKYSDAAALFLRLGSAADKCNAINSQCKAYLSAIIIYLYAHDFQQAQKCYNDCSXKSLNRVQAFLNSDQNRCATKLLSAYEEGDAEEIKRIAQSSAFNHLDHVVIRLARKLPTGDLQAIKKADDGEESLDEDDLT

SEQ ID NO: 301719 - protein, 226 aa, Zea mays
  unsure (1)..(226): unsure at all Xaa locations
  Clone ID: MRT4577_38244C.1.pep
MSKEKHHRDWILRRCCGSLAACILTLAAVVGFIVLVIYLALRPSKPSFYLQDVQLRSIDLSDPALSLDLQVTIASRNPNERVGVYYKTLDAFTTYRDEAVTVPVSMPAIYQGHKDVSVWSPVMSGXAVPVAQYVADAMKQDIEAGYVLLHVRVDGRVKWKVGSWVSGSYHLFVNCPALLATSGSAAVAAGGGVFAASAASGVVPAGVNTTVVSLKFTHPADCTVDV

SEQ ID NO: 301720 - protein, 225 aa, Zea mays
  unsure (1)..(225): unsure at all Xaa locations
  Clone ID: MRT4577_38245C.1.pep
MSKEKHHRDWILRRCCGSLAACILTLAAVVGFIVLVIFLALXPSKPSFYLQDVQLRSIDLSDPALSLDLQVTIASRNPNERVGVYYKTLDAFTTYRDEAVTVPVSMPAIYQGHKDVSVWSPVMSGDAVPVAQYVADAMKQDIEAGYVLLHVRVDGRVKWKVGSWVSGSYHLFVNCPALLATSGSXAPPPGGGVFAASAASGVVPAGVNTTVSLKFTHPADCTVDV

SEQ ID NO: 301721 - protein, 264 aa, Zea mays
  unsure (1)..(264): unsure at all Xaa locations
  Clone ID: MRT4577_38246C.1.pep
MSKEKHHRDWILRRCCGSLAACILTLAAVVGFIVLVIYLALRPSKPSFYLQDVQLRSIDLSDPALSLDLQVXDLARDDDGVCRRTTCQLIDARARVHAYALIWDAHGTHAXTIASRNPNERVGVYYKTLDAFTTYRDEAVTVPVSMPAIYQGHKDVSVWSPVMSGDAVPVAQYVADAMKQDIEAGYVLLHVRVDGRVKWKVGSWVSGSYHLFVNCPALLATSGSAGAAGGGVFAASAASGVVPAGVNTTVSLKFTHPADCTVDV

SEQ ID NO: 301722 - protein, 187 aa, Zea mays
  unsure (1)..(187): unsure at all Xaa locations
  Clone ID: MRT4577_38247C.1.pep
MSKEKHHRDWILRRCCGSIAACILTLAAVVGFIVLVIFLALRPSKPSFYLQDVQLRSIDLSDPALSLDLQVXHVRSRARATTTAVRACICIDLGRTRHTRXTIASRNPNERVGVYYKTLDAFTTYRDEAVTVPVSMPAIYQGHKDVSVWSPVMSGDAVPVAQYVADAMKQDIEAGYVLLHVRVDGRV

SEQ ID NO: 301723 - protein, 122 aa, Zea mays
  Clone ID: MRT4577_38248C.1.pep
GAQPPPGPRGVGGQVQGPGHRPHPTELPGVRAPLVLSRRQPLFCPAGAFCLRIKIFLPVKLYTTSQCHIMVGVGTFLFKEVLLSLSSFRERCFSKMEGGPFVNVFNGVFLSLSVDHEGSEWK

SEQ ID NO: 301724 - protein, 228 aa, Zea mays
  unsure (1)..(228): unsure at all Xaa locations
  Clone ID: MRT4577_38249C.1.pep
MGDSSVAGALVPSVPKPETAPSGDNSTAALAXAGRGGDARGVGVAAGTCGXEGPADRDLLCPICMAIIKDAFLTACGHSFCYMCVVTHLSNKSDCPCCGHYLTKAQLYPNFLLDKVLKKISARQIAKTASPVDQFRCALQQGNEMGVKELDSLMTLIAEKKRQMEQQESETNMQILLVFLHCLRKQKLEELNEIQSDLQYIXEDISAVERHRGRIYRTKEKYSMKLHM

SEQ ID NO: 301725 - protein, 62 aa, Zea mays
  Clone ID: MRT4577_3824C.1.pep
NGTKGTGLLIHKHTTLIIQIHAQLPIIVKLFIRENHSIYIFIFLHYKAYNTNTFNMNNIIIP

SEQ ID NO: 301726 - protein, 178 aa, Zea mays
  unsure (1)..(178): unsure at all Xaa locations
  Clone ID: MRT4577_38250C.1.pep
MSKEKHHRDWILRRCCGSIAACILTLAAVVGFIVLVIYLALRPSKPSFYLQDVQLRSIDLSDPALSLDLQVXRSRARRRRRRRNTSSICIDLGRRTRYTRXTIASRNPNERVGVYYKTLDAFTTYRDEAVTVPVSMPAIYQGHKDVSVWSPVMSGDAVPVAQYVADAMKQDIEAGYVL

SEQ ID NO: 301727 - protein, 224 aa, Zea mays
  Clone ID: MRT4577_38251C.1.pep
MSKEKHHRDWILRRCCGSIAACILTLAAVVGFIVLVIFLALRPSKPSFYLQDVQLRSIDLSDPALSLDLQVTIASRNPNERVGVYYKTLDAFTTYRDEAVTVPVSMPAIYQGHKDVSVWSPVMSGDAVPVAQYVADAMKQDIEAGYVLLHVRVDGRVKWKVGSWVSGSYHLFVNCPALLATSGSAGAAGGGVFAASAASGVVPAGVNTTVSLKFTHPADCTVDV

SEQ ID NO: 301728 - protein, 96 aa, Zea mays
  Clone ID: MRT4577_38252C.1.pep
TRMPPPPPPAARLTQYSARAGQPNPRPSRSWKPWAARAPGGSRAPELGTRSPGYRHGEAPPAHLTRPCSTSPRQRQAQGRGRGRRCDVAYHLPHHR

SEQ ID NO: 301729 - protein, 255 aa, Zea mays
  unsure (1)..(255): unsure at all Xaa locations
  Clone ID: MRT4577_38253C.1.pep
MSKEKHHRDWILRRCCGSLAACILTLAAVVGFIVLVIFLALRPSKPSFYLQDVQLRSIDLSDPALSLDLQVXRSRARRRRRRRNTSSICIDLGRRTRYTRXTIASRNPNERVGVYYKTLDAFTTYRDEAVTVPVSMPAIYQGHKDVSVWSPVMSGDAVPVAQYVADAMKQDIEAGYVLLHVRVDGRVKWKVGSWVSGSYHLFVNCPALLATSGSAGAAAGGGVFAASAASGVVPAGVNTTVSLKFTHPADCTVDV

SEQ ID NO: 301730 - protein, 110 aa, Zea mays
  Clone ID: MRT4577_38254C.1.pep
YRFHEQKALISCQMNPGPVTRVTLRNQVRNTGRTQATKNPKPRTDARRAHGQSSPSLAGQESWRPTTQALMKKGQARGKTKKNRGPPPVNRVHPKNPNVENRASGHPPSP

SEQ ID NO: 301731 - protein, 146 aa, Zea mays
  Clone ID: MRT4577_38255C.1.pep
SVPEQAPGSGRAAFLGVGERTCATVCSNGDLSFSSQDSVVPAAAQSPRAPTGLPLLQCSASASAAGQGSSGGTVGDELEFLNRCKDAGVVHILGNTIVRARRDSGVVKKLAVDYMYAFMRRVCRENSVIFNVPHESLLNVGQIFYI

SEQ ID NO: 301732 - protein, 294 aa, Zea mays
  Clone ID: MRT4577_38256C.1.pep
MSKEKHHRDWILRRCCGSIAACILTLAVVVGFIVLVIYLALRPSKPSFYLQDVQLRSIDLSDPALSLDLQVTIASRNPNERVGVYYKTLDAFTTYRDEAVTVPVSMPAIYQGHKDVSVWSPVMSGDAVPVAQYVADAMKQDIEAGYVLLHVRVDGRVKWKVGSWVSGSYHLFVNCPALLATSGSAGAAAGGGVFAASAASGVVPAGVNTTVVSLKFTHPADCTVDGVSRRCATSPRRRPARASFVRFRSYWLVRRGGSTSPPRSRGYRAISFSFVANVRSHIFSLPKLSCAEIS

SEQ ID NO: 301733 - protein, 108 aa, Zea mays
  Clone ID: MRT4577_38257C.1.pep
GIRDRVSVAISNQTRPNRREGRIRARPPAALPMPRALTYGDTWGASSREPAVPLRHEATCRPGYRHAAAVGVSSGCCWLVDLSRLPIQALSTVPAGLEEPNRPKESIR

SEQ ID NO: 301734 - protein, 95 aa, Zea mays
  Clone ID: MRT4577_38258C.1.pep
ILIDSSTNVHLFAAAGCLGLLSEFGTHKAVSPFFRDLGQSTTHTFFFCFCLVIVSMAREYACAVSPAWQTRVTQSSNKKRNISRTDGKTDRLTDE

SEQ ID NO: 301735 - protein, 83 aa, Zea mays
  unsure (1)..(83): unsure at all Xaa locations
  Clone ID: MRT4577_38259C.1.pep
CCTHVTDMPKYSWCPLLRREPNVDVSFARSSSMVCXSVSAXLCSXVSTWFFXAVVTXXKKKNKKRGPGCFLEDSXXLTYPRAF

SEQ ID NO: 301736 - protein, 95 aa, Zea mays
  unsure (1)..(95): unsure at all Xaa locations
  Clone ID: MRT4577_3825C.1.pep
FLSGWRLLLSXACVRFSSSFAAVSSSLSSSPPSAAGLSPLSASPGPWVARFPSPSPGPPFSGSSSVGVSAGGSSPVRRSWGPGVSPPAACRLLVG

SEQ ID NO: 301737 - protein, 120 aa, Zea mays
  unsure (1)..(120): unsure at all Xaa locations
  Clone ID: MRT4577_38260C.1.pep
GRVGGRVGGRVXKKKKKKKKKKKKKTKHKKKKKPTGPYFKFQSGRSLWMPRFCAPLLGPLISFFGSPFFNLLTGISHQFPWEIPWFPLLVFLGGVPLFCPCRIVLIPPCALFLKMLAPLI

SEQ ID NO: 301738 - protein, 195 aa, Zea mays
  unsure (1)..(195): unsure at all Xaa locations
  Clone ID: MRT4577_38261C.1.pep
TLLHPPLPGFRSSPYVFATIGTKEVFHTTPLFYILLYLLAXLPGHVLVCPKREVKRFADLSSDEISDLWVTAKEVGARLEQYHKASSLTFAIQDGPQAGQTVAHVHIHLIPRKKGDFEKNDEIYDAVRGIFSTNLVISLVITTGNEIKLXLFLAIYNXDVKEKELKEKLDLDIERKDRSMEEMANEANEYRALFS

SEQ ID NO: 301739 - protein, 80 aa, Zea mays
  unsure (1)..(80): unsure at all Xaa locations
  Clone ID: MRT4577_38262C.1.pep
ALLQHLPLGHLLAQNIRAQHFFLFGLANLAVYWEQQHFLPFNQLGXWNFAFYLQQQQRPYIRFSAADPTSFLAFILLTAV

SEQ ID NO: 301740 - protein, 80 aa, Zea mays
  Clone ID: MRT4577_38263C.1.pep
TPSCFSILSAQEGSPLVTYLWTLSMHVGRTVPMPWQRSCCMCGPIVCLRGLDLYKNTKKGRPPTSVPSTRQYNSGPAPCR

SEQ ID NO: 301741 - protein, 126 aa, Zea mays
  Clone ID: MRT4577_38264C.1.pep
MKLESYWTDSAPLYISPTRDLPAQVDVAIVGGGFTGLSAALALARRGASVVVLEAGPHVAAEASGRNGGHVNNGLAVDYAELAAKVGVECARAWYHAYDDAVDTVARLVQEEQIDCDFLRHGKEIT

SEQ ID NO: 301742 - protein, 91 aa, Zea mays
  unsure (1)..(91): unsure at all Xaa locations
  Clone ID: MRT4577_38265C.1.pep
MAAVETVALRVAMXCKDCAEPAKRWFSKMEGVETFHINLKEQKATDKGNAKPXEDAFQTVSRXGKRTSILERERHSGPDTSAASSRGRGQS

SEQ ID NO: 301743 - protein, 186 aa, Zea mays
  unsure (1)..(186): unsure at all Xaa locations
  Clone ID: MRT4577_38266C.1.pep
DPHYLLWRVLHPDSWGMSLTIFHRVHIICVNLCSYTIHITSSGELFIDNMRSFVLRAVKLFCAFIGASEQGLYGNTLYKGDRLVMFLYKEQRCSYIPPLLSKXVEHLSAARSIGSLSPNPERRTKYRSDRTPRIVGLXWALWRNYDQPIAKGGVSWLSTIRRFCLHQGVLRPGPRKGQIPAPAAGS

SEQ ID NO: 301744 - protein, 163 aa, Zea mays
  unsure (1)..(163): unsure at all Xaa locations
  Clone ID: MRT4577_38267C.1.pep
AFKTGDPFAPRAGPKKNTDPRGGKTKQTLLPEKVWAGTNKKINYPGRDLNRPEKTTREHYITGPGPGVPDGKRHKGLLPKQTLGAPRGGGTRGRGQPGPPPCRGGPPKTPGGPPWRGGGFPTPRPPLGPRPNSPKRRGGNRXFPGGKFPPPSKKNTRLLGANL

SEQ ID NO: 301745 - protein, 47 aa, Zea mays
  Clone ID: MRT4577_38268C.1.pep
MYYCEKATALLLHSIFYIILAHNSHLGQSLSYLKLDNRLHFLQLNLD

SEQ ID NO: 301746 - protein, 42 aa, Zea mays
  Clone ID: MRT4577_38269C.1.pep
MHFARVVSYQCSCRAVCTGFCLTSCYRGLHFNNCSFGFLTSL

SEQ ID NO: 301747 - protein, 737 aa, Zea mays
  Clone ID: MRT4577_3826C.1.pep
HASERLVIQLGKKMVEMTGDFTPDLMALLSADIIISTPEKWDGISRNWHSRSYVMKVGLMILDEIHLLGADRGPILEVIVSRMRYISSQTERSIRFVGLSTALANARDLADWLGVTDDGLFNFKPSVRPVPLEVHIQGYPGKFYCPRMNSMNKPAYAAICTHSPNKPVLIFVSSRRQTRLTALDIIQLAASDEKPRQFLSIEDNSLDMVLSQVSDSNLRHTLQFGIGLHHAGLNDRDRSLVEELFSNNKIQVLVCTSTLAWGVNLPAHLVIIKGTEYYDGKTKRYIDYDITDILQMMGRAGRPQYDQHGKAVILVHEPKKSFYKKFLYEPFPVESNLREHLHDHINAEIVSGTISNKEEAIIYLTWTYLYRRLVVNPAYYGLEDTETNTLNSYLSRLVETTFEDLEDSGCIKVDDHSVKYLILGKIASQYYLSYLTVSMFGSNIGPNTTLEVFLHILSAASEFDELPVRHNEDNLNRILSGNVPYPVDQHHLDDPHVKANLLFQAHFSRAELPISDYVTDLKSVLDQSIRIIQAMIDVCANSGWLTSALTCMHLLQMIIQGLWFERDYESLWMLPSMNDDILDHLKSRGVSTVPSLLDLSREELRRVLQPFSASELYQDLQHFPHVDVKVKLHNEQERSKPPTLNIRLQLKNSRRSASRAFAPRFPKAKQEAWWLVLGNATSSELYGLKRISFADRVINTRMELPQTFNVQETKLILVSDCYLGFDLEYSLEHLTKG

SEQ ID NO: 301748 - protein, 90 aa, Zea mays
  unsure (1)..(90): unsure at all Xaa locations
  Clone ID: MRT4577_38270C.1.pep
XXXGGPGXXCXFXLGSXXXXCPPRPGPLWXCSGCCCXXVLXPXXXXAXXXSXXPXXLXSXSPLLVXPXLRPPPPPAWPXAGLGRXLGXPG

SEQ ID NO: 301749 - protein, 173 aa, Zea mays
  Clone ID: MRT4577_38271C.1.pep
MADTKTNPMRDLRIEKLVINISVGESGDRLTRASKVLEQLTGQTPVTSKARYTVRHFGIRRNEKIACHVTIRGPKAEEILERGLKVKEYELRKRNFSETGNFGFGITEHIDFGIKYDPGIGIFGMDFFVVMGRPGFRVARRKHATNRVGYKHRVKKEETMTWFRSRFDGILAR

SEQ ID NO: 301750 - protein, 103 aa, Zea mays
  Clone ID: MRT4577_38272C.1.pep
SGGDNRAGRGGRPSVRREGEGGLGLLGGWQGAIGMKMIVLRGEGPERLCTPVMSGLGSQTLRPLGSVVTEAPLACRAPPSIISVVCRVAWRLWLRDARYFRAK

SEQ ID NO: 301751 - protein, 112 aa, Zea mays
  Clone ID: MRT4577_38273C.1.pep
MSHLDAASLLAPSPPLAKPHPRSRFLCLISSMLAVLGASLAGLLLFALHPAPNPVPNYASLFLSLGSNDTAASHLRALTLHPHVAGTKANALTDRYVFDALYALFFPTHITP

SEQ ID NO: 301752 - protein, 64 aa, Zea mays
  Clone ID: MRT4577_38274C.1.pep
CLRTPAFRLDSIRRPHSLALFTLTSSASRVSIGMSSNSTCPGSSTFSFQVFRHMHCPHPSNLHP

SEQ ID NO: 301753 - protein, 99 aa, Zea mays
  Clone ID: MRT4577_38275C.1.pep
PLAPGDVAKCCPRAPGAGGSAIRGDGLASRWAFAFECLVKEMALAPRIFARHFENGPGGFGHRAPGGLISFSPVNPPFPLYPGRGGKSLSPPLFGFWPP

SEQ ID NO: 301754 - protein, 172 aa, Zea mays
  unsure (1)..(172): unsure at all Xaa locations
  Clone ID: MRT4577_38276C.1.pep
RSPGLRYAHFYRTYGKTFXKPRRPYENERLDAELKLDCHDDVMRNRELRTVQYALSRIRNAARNLLTLDENNPRRILDGDALLHRMDRYELLAEAHNQLDYALALTAENFLARRLLTLVFYAVVNETIHHGRDLIKQRDIQVCWAPWLPPSFMWRVRELRXTDFSLPRPFGG

SEQ ID NO: 301755 - protein, 111 aa, Zea mays
  unsure (1)..(111): unsure at all Xaa locations
  Clone ID: MRT4577_38277C.1.pep
TGPRRLGPRVYEETIWLKLFMQQRVLELGYSFLFTDADILRLRIPLQGICXYADMNXSVDNSKMVPALLDCENTVGFYYMKTTNRIVXMVRYWRAAWARFDSNLIEQVVFN

SEQ ID NO: 301756 - protein, 84 aa, Zea mays
  Clone ID: MRT4577_38278C.1.pep
RPGLLTSPSARSPVALDPTVSTVLTNPLRRISADLAEFGTLIEMATPLIPGLAVDATRSCWPLCCTRLTRFIRNAYSFQDAQIL

SEQ ID NO: 301757 - protein, 155 aa, Zea mays
  Clone ID: MRT4577_38279C.1.pep
LHRLLHRPCRRRPAAPSDLEDDAAKRSVEEQQQRTAIDAHDSDVALVMAQAKQASEEAERLATARAKVGMQMAEKQGRIATLDIECATLKQTLELLRQETASTFVKLCEKRLFYTKRTETLTVKLQEQQEWFSMKNKITRQEPHVAKSQSKQNFI

SEQ ID NO: 301758 - protein, 94 aa, Zea mays
  Clone ID: MRT4577_3827C.1.pep
LSLPSSLSPQLSSFSAGCSSRPILLTRRCKCNVRGRQQATAASSSPHSPSPWCARPRRPRPPRTYARLEYSQSQCRRTSNPPAAAAAQGRHQQQ

SEQ ID NO: 301759 - protein, 107 aa, Zea mays
  unsure (1)..(107): unsure at all Xaa locations
  Clone ID: MRT4577_38280C.1.pep
TPPRQQLQRPRRPPRPPPSPSRPRRRQXGAPRGGRRAPQRPPPSGADDELPLPPGGPAVLAPHPAHPPPGGPRRRPPPGPGSREAHPGHPRVQRLAAAPPLSAEPHA

SEQ ID NO: 301760 - protein, 148 aa, Zea mays
  Clone ID: MRT4577_38281C.1.pep
MEVAGACCHAGEERKVAVPIGNDAEVEPCVIAVDDSSVDRAIVTALLRRSKYRVTAVDSGKRALEILGSEPNVSMIITDYWMPEMTGYDLLKKVKESSKLKRIPVVIMSSENVPTRITRCLEEGAEDFLLKPVRPSDISRITTRMLLH

SEQ ID NO: 301761 - protein, 286 aa, Zea mays
  Clone ID: MRT4577_38282C.1.pep
MEEYLESMKSLRSYMNDLEDDAAKRSVEEQQQRTAIDAHDSDVALVMAQAKQASEEAERLATARAKVGMQMAEKQGRIATLDIECATLKQTLELLRQETASTFVKLCEKRLFYTKRTETLTVKLQEQQEWFSMKNKITRQEPHVAKSQSKQNFIEGEKHVIFNSEGSLDKFNKPGKLYTQLVSAQLKIQDIKSQRSALLLEISRIKQILEQEKNIIPGFPAALQQMDMKSLEEEYKALQGDKSGEVEYFQSLDETINGMKGILDPVKCQCGLEYNLKLDGEAMDIS

SEQ ID NO: 301762 - protein, 130 aa, Zea mays
  Clone ID: MRT4577_38283C.1.pep
QSAQCPSRRAARVVQSIGAAGFPGFQRAERAVRATRVRSVSSLPRLPRLCTRCVRRVMMCGGVRVHPVHTDDRYDHELGKQWWRAPDPPSHGAAVCPNLSPPDRPAGAGSSFFFFLDSLKPKLYYDHAYI

SEQ ID NO: 301763 - protein, 115 aa, Zea mays
  Clone ID: MRT4577_38284C.1.pep
PSVGAIVASVCVQLISYLLQVLHAGYMLSVAGILDPIRMTINILLIVVCILLLDRSLLSPGNSITFCLDVWFVLDGLVCISKNWVIWLVVYMLFGLWAAPQDQQKQQRRPWPRSC

SEQ ID NO: 301764 - protein, 92 aa, Zea mays
  unsure (1)..(92): unsure at all Xaa locations
  Clone ID: MRT4577_38285C.1.pep
EVTSHPRTWSDPQHAARTSLRQGPPQRSYTISEEXARGCFGVVRAXLENATSRTFVTKIVPYAADGERLVLQEYEVLRSLQHXRLMSLHEDY

SEQ ID NO: 301765 - protein, 74 aa, Zea mays
  Clone ID: MRT4577_38286C.1.pep
PRFLTGTNRLKYKRTERIARNIRVHKGRAHIQLRQNHSYMKASSKASTCLFWDIYIKTAPDYYNTGWNYSEIAA

SEQ ID NO: 301766 - protein, 60 aa, Zea mays
  Clone ID: MRT4577_38287C.1.pep
FLKKKKKKKKKKKKKKKKKKKKKKKKKNRKKEGEKKKKKKKKVFPFPGGPFKKGNFSKFP

SEQ ID NO: 301767 - protein, 87 aa, Zea mays
  Clone ID: MRT4577_38288C.1.pep
PLPSTRSPSRLAPSRRPSPRSSPALLARPLPSPTSTRTSPSSTSSSPLSLTSSRMLSRSTSLSLTSRSLLALSSSLSTSSLLSPRTS

SEQ ID NO: 301768 - protein, 75 aa, Zea mays
  unsure (1)..(75): unsure at all Xaa locations
  Clone ID: MRT4577_38289C.1.pep
SPNPPPQSPTLAPPQASARNPRAHPRVRDDLRLPXDETLVAQIKEGFESGKDLVVXVQSAMGEEQICALKDIGPK

SEQ ID NO: 301769 - protein, 217 aa, Zea mays; identical to SEQ ID NO: 246521
  Clone ID: MRT4577_3828C.1.pep

SEQ ID NO: 301770 - protein, 75 aa, Zea mays
  unsure (1)..(75): unsure at all Xaa locations
  Clone ID: MRT4577_38290C.1.pep
MALEKSLVRLLLLVLILLVLGWVQPSLGKESRXKKFQRQHMDSDSSPSSSSTYCNQMMRRRNMTQGRCKPVNTFV

SEQ ID NO: 301771 - protein, 186 aa, Zea mays
  Clone ID: MRT4577_38291C.1.pep
SAPALERQRCKQLARLVAVPQETSDRLLNALWIQVQTRCVSPATILILPDRMTISSNALDQTSRVKCCAGFKEFFDRLLSECTNGIHPHDGVKMAVIITQKIFKPGRSSDLWCKKRWRSFNMAYHGRKLLCVSYGHNKFRPLRDDYVKSFDWLLLCRPHSVLLSCHILAVAFQMRSKPREKPALSF

SEQ ID NO: 301772 - protein, 61 aa, Zea mays
  Clone ID: MRT4577_38292C.1.pep
LTTRRLTTRSNDVMYDFMSGFCLHTHAVQHHVVNEKFQEVDTVQRSHYQPPPPPWSPLWPP

SEQ ID NO: 301773 - protein, 49 aa, Zea mays
  Clone ID: MRT4577_38293C.1.pep
FSLFILQAVVSGHSPSCGKCPDIGCSYKICICIVLGATRDRLLHNWFFG

SEQ ID NO: 301774 - protein, 49 aa, Zea mays
  Clone ID: MRT4577_38294C.1.pep
ELMTIDLWGEAYSVHREEPLFGLTSTFLRVLCFSVSLWDQFHVFAHVLK

SEQ ID NO: 301775 - protein, 126 aa, Zea mays
  unsure (1)..(126): unsure at all Xaa locations
  Clone ID: MRT4577_38295C.1.pep
DPADRRRLPRGAGPQNATPAAPAAAARRRPERADGGRKPNRRAAEHSPDQRQNAHNPERRGARGEEASQKARATDGPXXPXRGXSTSHRXQGREEADRENEEXAEEQKXGXASNAXAPEERPEAEK

SEQ ID NO: 301776 - protein, 35 aa, Zea mays
  Clone ID: MRT4577_38296C.1.pep
ERRREGKVKAGTRQRGALSVRRRGGKGEKLPHGWP

SEQ ID NO: 301777 - protein, 105 aa, Zea mays
  Clone ID: MRT4577_38297C.1.pep
KAQYQNTKADVRTMQVKEQNEALHETMEDLMASKQELADALRSAHIEMKRFEAASDVQHSHEVHDRVKYLRQQAKNYQEKVEKALEVVADKLVSLVEGITLGFYS

SEQ ID NO: 301778 - protein, 90 aa, Zea mays
  unsure (1)..(90): unsure at all Xaa locations
  Clone ID: MRT4577_38298C.1.pep
HIFEFLDKTRKKRMKKRGRAKRKEEEKKLAGTSLGQSNVCGLVCXXXNFSSSTNHRALLRTMDERERTFLTFGGDXXIIRAGMCMHDNAG

SEQ ID NO: 301779 - protein, 58 aa, Zea mays
  Clone ID: MRT4577_3829C.1.pep
SSQRHADGYHALTMRFWGRSGEELSRRTPPWSKVASAGTLVKSRYHRMRRFEDAMMCS

SEQ ID NO: 301780 - protein, 56 aa, Zea mays
  Clone ID: MRT4577_382C.1.pep
MVSARIVVLLAVLLCAAAAVASFWEDDNHHLHGGHMSGRCLRRSVVRPWHQCSLVP

SEQ ID NO: 301781 - protein, 66 aa, Zea mays
  Clone ID: MRT4577_38300C.1.pep
FGLSKPPTPKTKVPWSPIFYPQNKLPPFFFSFFFGTQDGLSFQTFKVTFFFNNRLLNFLGAPLSVG

SEQ ID NO: 301782 - protein, 56 aa, Zea mays
  Clone ID: MRT4577_38301C.1.pep
EVTFPDSNVKKKKKKKKKKKKKKKKKKKKKKKKKKKKKKKLKKKKKKKVFPSRGGP

SEQ ID NO: 301783 - protein, 79 aa, Zea mays
  unsure (1)..(79): unsure at all Xaa locations
  Clone ID: MRT4577_38302C.1.pep
MMTWPSSARVGKEVCFAGRDLLLPYRAIEPGQLEKPFDKLTQEGAIDHNDSYHDAQKQLVLAFXYRADFPSDLHKQGVF

SEQ ID NO: 301784 - protein, 58 aa, Zea mays
  unsure (1)..(58): unsure at all Xaa locations
  Clone ID: MRT4577_38303C.1.pep
RXSARGRRRLRSSRALMLPRRAHFDTGPAVNNSQHNILITYSRPMWFIMLANMMVIIY

SEQ ID NO: 301785 - protein, 149 aa, Zea mays
  Clone ID: MRT4577_38304C.1.pep
GRLRGRPGSVGISCNHPKSSPSSAWRLTSTETYTGKTGMGAPRRVERELLSESSLSTDHPDYRQRARVRDTDERSRDRIAASQSTRECRLLRLDVLYEKERVTMHPSQYDARRISGKLRLLLHHGSLLLSWESNVFYCSLSTRSCEGEK

SEQ ID NO: 301786 - protein, 64 aa, Zea mays
  Clone ID: MRT4577_38305C.1.pep
QDIGAINEACPQKVSWFICSREKKLYGSASFGMKKLLQCISCCAVGLCGCINDRAYKACPLTSH

SEQ ID NO: 301787 - protein, 94 aa, Zea mays
  Clone ID: MRT4577_38306C.1.pep
TPTYPARFAYCFICAFPPFSHGPIGLTSMGPFLEMPLWFLLVNKGPVAGPKCPLRAHHVESCAIRSASLLYQIKGHIGCAVSISLHVLEKKKQK

SEQ ID NO: 301788 - protein, 105 aa, Zea mays
  unsure (1)..(105): unsure at all Xaa locations
  Clone ID: MRT4577_38307C.1.pep
SSGNNAEYAGVLATSVVVYSTVSNANHPQQLVFHVVTDRIHFGAMSTLFLINDFKGCTVEVXCIDEFLWLNASSSPLVRQLSEVETQGYYYSTGSKNARECFGSL

SEQ ID NO: 301789 - protein, 155 aa, Zea mays
  Clone ID: MRT4577_38308C.1.pep
APGFSVLGAGGVFPPMGFLQFFFAPLPPGMKTLGPAPGRLPVGAGPFFPFAGFAPVAPVPPPPGGAGWFPAVLVRGPLDFFFWFMVVLGVVALGPFPPCPVGSRAPGPPRPSFFWVFPRFVPGFCPRAPQESCASNLFPGLAHQDAPLFHLGFPQ

SEQ ID NO: 301790 - protein, 307 aa, Zea mays
  Clone ID: MRT4577_38309C.1.pep
MDLGTHMMVRTLQTTWVNTSYAPPPRQIPVYPVVVEEVSVDLPYIRVENGVILEDSSEEQLPTPTPLAESLAFAARSWTSAPLAPDIQAPAPGGDDSDDSGDDDDDGNEDEEEQVNEEANYAQQDYFMGFGPVIEHYTSMFETGHFPNLLQEVLHALGTYVRPLYETRQVSEPPRACYYITRIHARVMDAGDRGFKTLSAHESLTPLSTYTASFSDATRRTLWSLSHTYRQQLHDTRFRHLPLCLSGGSQTSIVPGGASEECLNTLAGVVAGLNTDLDSATLDLSRVHLELEDAHARIAALEAQLQG

SEQ ID NO: 301791 - protein, 73 aa, Zea mays
  Clone ID: MRT4577_3830C.1.pep
GRAVFTYHHHHHLDSDLDCRAALCVCHLGTQNPYYSLPIRCVDSLTTICFEIHAVSIRFSISIFNPLARFSAF

SEQ ID NO: 301792 - protein, 134 aa, Zea mays
  unsure (1)..(134): unsure at all Xaa locations
  Clone ID: MRT4577_38310C.1.pep
NXXKGFEYIRTKAKVXYYNIFXNTFPNIVFLXNKVWLDSYHFXVLKNIKQHSPYITQDVHDHFTNLPLNIVSGYHIHMFCYSTDDTPDLIPLSHVLSTNLVARLTEVFKNITFPLLKPYVKTSFTFYYLNQGNS

SEQ ID NO: 301793 - protein, 119 aa, Zea mays
  Clone ID: MRT4577_38311C.1.pep
MARTSFKMEHDLEKRQSESARIRDKYPDRIPVIVEKAGKTDVPEIDKKKYLVPADLTVGQFVYVVRKRIKLSPEKAIFVFVKNTLPPTASLMSAIYEENKDEDGFLYMTYSGENTFGSA

SEQ ID NO: 301794 - protein, 197 aa, Zea mays
  unsure (1)..(197): unsure at all Xaa locations
  Clone ID: MRT4577_38312C.1.pep
MADHHRGATGGGGGYGDLQRGGGMHGEAQQQQKQGAMMTALKAATAATFGGSMLVLSGLILAGTVIALTVATPVLVIFSPVLXVPAAIALALMAAGFVTSGGLGVAALSVFSWMFQCLTGKHPPGAVLLVHATARLASLARVVLVAALFRFVPALGSCVFDLSCADRARVLLVPLPARRSLALSGGGCLLRRCRCVS

SEQ ID NO: 301795 - protein, 129 aa, Zea mays
  Clone ID: MRT4577_38313C.1.pep
FPFTPLFPLNPVGFLRQPLFPFGQVGLAFFHQQKFFPFTQWAALTPAVFLPQQIFFPFSQLVAATGVSFLTQQRLGPFSQRFGGNPAPLFKLQQLLPFVHLVLTNPAASSQQHILGGALLLDGFLGGPQ

SEQ ID NO: 301796 - protein, 53 aa, Zea mays
  Clone ID: MRT4577_38314C.1.pep
RCVCVNQSGKPNGSPTYRNTKGEKLNRKFKTRCSAGRNYTIILSPQECQLLTK

SEQ ID NO: 301797 - protein, 156 aa, Zea mays
  Clone ID: MRT4577_38315C.1.pep
MADHHRGATGGGGGYGDLQRGGGMHGEAQQQQKQGAMMTALKAATAATFGGSMLVLSGLILAGTVIALTVATPVLVIFSPVLVPAAIALALMAAGFVTSGGLGVAALSVFSWMYKYLTGKHPPGADQLDHAKARLASKARDIKDAAQHRIDQAQGS

SEQ ID NO: 301798 - protein, 78 aa, Zea mays
  unsure (1)..(78): unsure at all Xaa locations
  Clone ID: MRT4577_38316C.1.pep
LELAXAEAEMRYAFPPDLRAVLAAGLPLGPGFPDRRSRAGLXSAFDLPIAAMSXQIARGXXPTXPXHXLRLXRXLSAP

SEQ ID NO: 301799 - protein, 77 aa, Zea mays
  Clone ID: MRT4577_38317C.1.pep
MEGEIPTRGNARACGLGTGRNMGIVLEVCRQMACNGVTVGLTDRDHTRGARAVENLRGLEVSDELLHRLEMADAASI

SEQ ID NO: 301800 - protein, 210 aa, Zea mays
  Clone ID: MRT4577_38318C.1.pep
MLHAKETLRKMYSVAKGYYCGGLAAPNPFPAAWDLRHSLNPSRKAPGFVNPCRARSYAHIAESSAGQEIVIALGSNVGDRISSFDRALRLMKDSGIKITRHACLYETAPEYVTDQPRFLNSAVRGTTKLGPHDLLKKLKEIERDIGRTAGIRYGPRPIDLDILLYGDSQISTETLTVPHERIHERQFVLAPLVDLLGSSADDHMEKSWDS

SEQ ID NO: 301801 - protein, 84 aa, Zea mays
  Clone ID: MRT4577_38319C.1.pep
TNKKNTQRTLVHPPDTKHGGKPTRRAAPKDTPSAPIQQMPTHHQGQGPHGTHGGHQRTTHKPRQPTTQQRPKAQTAQKERKRQT

SEQ ID NO: 301802 - protein, 76 aa, Zea mays
  Clone ID: MRT4577_3831C.1.pep
PYPMLTPVSGKNSFFKNFPAPVFPSLYPFSMKKISNFKNVRKHNLALFTPAGSGSYQKGQVGRAQHYPQPQNYLPK

SEQ ID NO: 301803 - protein, 70 aa, Zea mays
  Clone ID: MRT4577_38320C.1.pep
KIPPVSAGAKKTLRRPPHHPTKEGPPRGLGGVLITTPRWKKGCIIKEGRPSSLFLIWKKGGARLLPVEII

SEQ ID NO: 301804 - protein, 101 aa, Zea mays
  Clone ID: MRT4577_38321C.1.pep
MDRVGGGEKQLEDCTVANALGTWFFSVAGALVAIPVGIKKKSLAPLVFFGTTGTMLDIIMGITQCEREHAEREMKILEAQKFSVDASAQNESSDSFGSADK

SEQ ID NO: 301805 - protein, 82 aa, Zea mays
  Clone ID: MRT4577_38322C.1.pep
PIKSCRGKPAHLVGKPREKTQRAGPKAPAKKKGQMGGTPPPPGAKRPLKGGAQSPSKWPKFWKGKKGGDLFVKSPIGKRGSF

SEQ ID NO: 301806 - protein, 410 aa, Zea mays
  unsure (1)..(410): unsure at all Xaa locations
  Clone ID: MRT4577_38323C.1.pep
MGKGSVGASWWAFLLLAGVLLVVAATAGAEDGVVERDRKEDLRWCKQACEWQYGKDTPRKRECESECRERHQQADAGEDGDSGVDAYVSRSGRGECRRQCLRRHEGQPWETQECMRRCRXRTGRRHXEQEYGRGSESAGKCRERCERHHRGDWWERQRCLMDCKSREREEEGGSGGRRGEEEEDSGDRCPCEKQCEGHHDRESRQQCVQACERRRQQRGGSRDSNVDEDDSDRRCQMKCRRHSDRQARQWCVQRCERKQQEEDAAADDDNSGRCQKRCQHHSDRQARQWCVQRCERKQXRRTPPPTTTRTATGARKDASSTATGXKGCGACNGAGDRRRAAHATTLTTTPATATGARRSASSTTATTTSSSSACATAAAAVAGKRWPAPSLRWCDDRRRAWRGAELIIKG

SEQ ID NO: 301807 - protein, 347 aa, Zea mays
  unsure (1)..(347): unsure at all Xaa locations
  Clone ID: MRT4577_38324C.1.pep
MGKGSVGASWWAFLLLAGVLLVVAATAGAEDGVVERDRKEDLRWCKQACEWQYGKDTPRKRGESECRERHQQADAGEDGDSGVDAYVSRSGRGECRRQCLRRHEGQPWETQECMRRCRXRTGRRHXEQEYGRGSESAGKCRERCERHHRGDWWERQRCLMDCKSREREEGGSGEEEEEDSGDRCPCEKQCEGHHDRESRQQCVQACERRRQERGGSRDSDVDEDDSDRRCQMKCRRHSDRQARQWCVQRCERKQQEDAAADDDENSDRCQKRCQHHSDWMKRLRCMQRCGRXRRRAAHATTLTTRPATATGARRSASSTTATTTRSSSACANCRRGRGWETVGRRHP

SEQ ID NO: 301808 - protein, 112 aa, Zea mays
  Clone ID: MRT4577_38325C.1.pep
HAATTAAAPGASAKGRKMAPGTIYGSSHTYMLGTQDPSSLPKGGICLIIKTHTRQTAPYNPNNWMPCMMFLASNFEESRTEDKLLNQNEDFTDMDDTYCSQKEQEAREGRQD

SEQ ID NO: 301809 - protein, 115 aa, Zea mays
  unsure (1)..(115): unsure at all Xaa locations
  Clone ID: MRT4577_38326C.1.pep
SEHSQTHPAKLTTISLTTLATMMLCVLALLALYASATHACIIAPCSLAPSSIITHALLPVARMGLQHPGVQASMLQQAFEDSVSHQPIFQLRHLSLQHITTQXTYATLLLAQFLP

SEQ ID NO: 301810 - protein, 132 aa, Zea mays
  Clone ID: MRT4577_38327C.1.pep
PPRLHLKKNRGWRFRKGAIFCWGTPRSLGPFPRIERSWCLWRPPAFVARGNHVFGKGNPRVPLPFLFHVFLDSQLNTPSPVRLLLSPRPPWKRFVFWSIVPLLVSECFPPLPPPIYSKPPRRIVFPWKIKYM

SEQ ID NO: 301811 - protein, 230 aa, Zea mays
  Clone ID: MRT4577_38328C.1.pep
RRDSVSAREKYHASETVSVPRASSLPSPPYRATGMYGTSRYVTDQSVLLQKSEALHHRGFTRAEDGENMNHVGKGNVDRWLHMLMDNQQEDHAVYHSSDEHDNDEENASDEQRTQSRVDEESCRNGVTECSDEIVEVEDEIVSDQGAERGRNSFGIKDREEKKIWFPRSDSTRGFRSLPSSPSMIMGMRKGVERMAVDDDRKYGYEDSVSRSSTKFLSRCKQAIKKAVNK

SEQ ID NO: 301812 - protein, 173 aa, Zea mays
  unsure (1)..(173): unsure at all Xaa locations
  Clone ID: MRT4577_38329C.1.pep
MEPRVPCVDGGGDGLELRAARRHRREGGRIHVLDAQILEPQRQRSNPFRNIFHLLTQREVLPRTKHHAKRIWNNSPKYDPHLIELRFSDADAKLGILSWAESLSLHRWSAKYCPLLPPPRSTIAAAFSPDGKSLASTHGDHTVKIMDWHTGKCGKVLSGHRRLXWVGRAMLYL

SEQ ID NO: 301813 - protein, 96 aa, Zea mays
  unsure (1)..(96): unsure at all Xaa locations
  Clone ID: MRT4577_3832C.1.pep
MADKIFCILMLLALYACVANATIFTQYXQATIAALLAPYLTSMTASVCENPALQPYRLEQAIATSNLPLSPLLLXQSPVLSLAQALVQTIKAQELQ

SEQ ID NO: 301814 - protein, 70 aa, Zea mays
  unsure (1)..(70): unsure at all Xaa locations
  Clone ID: MRT4577_38330C.1.pep
GMAPFPGKGLPASFSYKSVNKGLGIKFLVQKGGSILSPQTCQSLHSMERPTSRSKGSASGVIFGCPNLXM

SEQ ID NO: 301815 - protein, 86 aa, Zea mays
  unsure (1)..(86): unsure at all Xaa locations
  Clone ID: MRT4577_38331C.1.pep
YCNCVRFSPVILVSTTFRFLQRIYGRSSSPSAALLRRSSSPRRALLLDDRSSSTALLSKVVVGPSPRPWRNXQDPFLSDLELLGPT

SEQ ID NO: 301816 - protein, 125 aa, Zea mays
  unsure (1)..(125): unsure at all Xaa locations
  Clone ID: MRT4577_38332C.1.pep
GRGRXPQPGARQRPQRPPGDHXAPDHGGRAEPAGARXQQGPPRPXQPDQRXGPAXQNGGRGAPAPXGXQXQGGQQPXPPRRPXXHEHDXTXADXNXPXAPGXPXGXXXGGPGNXATAPGEQEKKG

SEQ ID NO: 301817 - protein, 163 aa, Zea mays
  Clone ID: MRT4577_38333C.1.pep
MMSSSSSSSSSAACCFPLDHLAPSPTEQLCYVHCNCCDTILADELALQQAPSFLMEQASANLSSTMTGRSSNSSCASNLPPPPPMPAAQPVQQEPELPKTAPSVNRPPEKRQRVPSAYSRFIKDEIQRIKGGNPDITHREAFSAAAKNWGHFPHIHFGLMPDQ

SEQ ID NO: 301818 - protein, 221 aa, Zea mays
  unsure (1)..(221): unsure at all Xaa locations
  Clone ID: MRT4577_38334C.1.pep
MMSSSSSSSAACCFPLDHLAPSPTEQLCYVHCNCCDTILAVGVPCSSLFKTVTVRCGHCANLLSVNLRGLLLPPAAPAPPNHLNFAHSLLSPTSPHGLLDELALQQAPSFLMEQASANLSSTMTGRSSNSSCASNLPPPAPMPAAQPVQQEAELPKTAPSVNRPPEKRQRVPSAYNRFIKXDEIQRIKGGNPDITHXEAFSAAXAKNWAHFPHIHFGLMPD

SEQ ID NO: 301819 - protein, 176 aa, Zea mays
  unsure (1)..(176): unsure at all Xaa locations
  Clone ID: MRT4577_38335C.1.pep
MMSSSSSSSSSAACCFPLDHLAPSPTEQLCYVHCNCCDTILAVGVPCSSLFKTVTVRCGHCANLLSVNLRGLLLPPAAPAPPNHLNFAHSLLSPTSPHGLLDELALQQAPSFLMEQASANLSSTMTGRSSNSSCASNLPPPAPMPAAQPVQQEPEXCQDRPVGNRPPEKRQRVPSA

SEQ ID NO: 301820 - protein, 124 aa, Zea mays
  Clone ID: MRT4577_38336C.1.pep
LFRPELDAIQGGSVWGWELRHTPALHPIDPREEVMSTGAGVPIGAEQTTNPLRRLSLEGLDGSDPDEKSSVMPYGRSPHVGHEQRAATQADWPRTPATTGWHGSYLLLPVQCLCLFRILLPYWG

SEQ ID NO: 301821 - protein, 261 aa, Zea mays
  Clone ID: MRT4577_38337C.1.pep
MMSSSSSSSSSAACCFPLDHLAPSPTEQLCYVHCNCCDTILAVGVPCSSLFKTVTVRCGHCANLLSVNLRGLLLPPAAPAPPNHLNFAHSLLSPTSPHGLLDELALQQAPSFLMEQASANLSSTMTGRSSNSSCASNLPPPAPMPAAQPVQQEAELPKTAPSVNRPPEKRQRVPSAYNRFIKDEIQRIKAGNPDITHREAFSAAAKNWAHFPHIHFGLMPDQGLKKTFKTHQDGAEDMLLKDDLYAAAAAAAAANMGITPF

SEQ ID NO: 301822 - protein, 86 aa, Zea mays
  Clone ID: MRT4577_38338C.1.pep
QFFFWPRQATNPVPLFPQPTEAGKQVPLRHGPPPKKTMAPKGQYYPNWSDPNLTRSSNRNSGSYLNMVNPPPGSPVVNQFFGSPAK

SEQ ID NO: 301823 - protein, 147 aa, Zea mays
  Clone ID: MRT4577_38339C.1.pep
RARRESSSSAPSPPAPGDSLDCVGTGSDVECFVDAGAEDAAPLLPALSAGASKDDGKSEGDAAVSASPTGRELLEWASLVSPFFFWGTAMVAMKGVIPRTGPFFVAAIRLLPAGALLVAFAAARGRKQPSGWEAWLAIAAFGLIDAA

SEQ ID NO: 301824 - protein, 104 aa, Zea mays
  Clone ID: MRT4577_3833C.1.pep
RRRLLDVWLPPLMDDYRWLQHGCRWFDRAAVEDGIGQAVLTLPLEEQQAVLLAWLGRFLRAGGDGCPNLQRAFEVWWRRTFVRPYAEQPGSGSSSWSSSSSRRH

SEQ ID NO: 301825 - protein, 116 aa, Zea mays
  Clone ID: MRT4577_38340C.1.pep
ENINKYFRKAKESGKKRPAHAKTCPYFDELDRLYSRSADGGGGEARQLGSSELLDAVIKYPDVRYGPPVFGGGNANNEGGEDDDSDGEEEEEEEEDGIGKGRAGDDQDDEVDNDDE

SEQ ID NO: 301826 - protein, 121 aa, Zea mays
  Clone ID: MRT4577_38341C.1.pep
MSLRHAVLMQSRMLLRSRRPFSTISATDEANILKELDELKTKTKKAIIEDVEKVKRLENEDRNALNRLLTSCGMPRGAFRDKLVFGCHVVELFAAFSAVGIWKAGRDAPHKDAKFATDASI

SEQ ID NO: 301827 - protein, 54 aa, Zea mays
  Clone ID: MRT4577_38342C.1.pep
KKITTCSALEKINISFPWCKKKKKKKKKKKKKKKKKKEKKKKKKKKKKKKKKRG

SEQ ID NO: 301828 - protein, 358 aa, Zea mays
  unsure (1)..(358): unsure at all Xaa locations
  Clone ID: MRT4577_38343C.1.pep
KEAENRKPSEMTXGAAVAPLTTIGHPNAPITQWTSGKKLVFFGSAAAVAPFDLEDLLRASAEVLGKGAFGTTYKAVLESGATVAVKRLKDVTLSAAEFRERISEIGELQHEFIVPLRAYYYSKDEKLLVYDFMPMGSLSAVLHGNVSSGGTPLNWDLRSSIALAAARGVEYIHSTTSTASHGNIKSSNVLLGKSYQARVSENGLTTLVGPSSSSSRTTGYRAPEVIDSRRVSQKADVYSFGVLLLELVTGKAPSQAALNDEGVDLPRWVQSVNRSEWGSLVFDMELMRHQTGEEPMAQLVLLAMDCTAQVPEARPSMAHVVMRIEEIKKSSVTPNIEQVDDQSSKAESEAAPTNPFAT

SEQ ID NO: 301829 - protein, 61 aa, Zea mays
  Clone ID: MRT4577_38344C.1.pep
TGPHIELNERDVIIRTTFHETRVRADPAQPVQYKDPASVMALYRVSHPMDMVYYTLICSSS

SEQ ID NO: 301830 - protein, 102 aa, Zea mays
  unsure (1)..(102): unsure at all Xaa locations
  Clone ID: MRT4577_38345C.1.pep
QKEGAYNFGGAAIGIDLGTTYSCVGVWHHDRVEIIVNDQRNRTTPSYVTFTNSERLIRYACKNQVAMNTINTSFDAKRLIGRTFIAASVHNDIKQXPFKVIS

SEQ ID NO: 301831 - protein, 152 aa, Zea mays
  unsure (1)..(152): unsure at all Xaa locations
  Clone ID: MRT4577_38346C.1.pep
SCDGYAGSTREIQPHLLAFAQAFPAGHNSGTIHIYIWDKGLPKGKGLLLLAEMSSAGNLAXDYTTAVVKIIEQHPXFVIGCISVNPASWSPAPSSPAFIHATLGVXMAAGGYALGKQYNTPIFVSVFLPFGSCWMAHLLLVDWGLGVLGCGH

SEQ ID NO: 301832 - protein, 111 aa, Zea mays
  Clone ID: MRT4577_38347C.1.pep
DTAVRTHDSFRFSLPIFPQATYCTIPISGPSYYNEHLFYNSLFYHTKYYLNAALLHSCLHHTLRFFNAYIDCSYDFKARAVLSFDVFTLLSTFIMKISLNATFSGHFLGVP

SEQ ID NO: 301833 - protein, 641 aa, Zea mays
  Clone ID: MRT4577_38348C.1.pep
MELYLNQQTIVEPYTVPIQMAPFPKHIFLNLADIVGLPNKTLVVLSHDWLPLDYICTQGDLALIDFIKEIPCEPRVEVVLIDDAFVERKWMECLFQPNTYLGDEVIDCYINLIKAQKHLKCRSGGHVHIENAFQFNFLKRNGDVEIKTEELYPVKDMAQICSAERRVLLYLDHDMYHADFDICHDLYGLIIGEHVPHMLEEISSYIVSHQTRTTIRSCLNKKNNPRVIDVGDNHEASLLNDGQRGAAALDRVQVVASRELVVHSGACDHVGLLLEVELTAAKLLLVIDERHQHECLLLMVFIPINIRETHWYLTVIHARNMEIQVLDSLGTSHDRKDLTDSIKGLQRQIDIISQRKELKDHRWPDLQVASWPLREIDMGYAKQTDSSSCGLFLLNYIEYWTGDELSDSFTQDDMSHFTKKMAAILLSSDLNKRRGCLLYKNEKKVDSGSPSDVEILENPIDSKKRKLLHVLDDNEVVYEDEEGPITQADLQRWFVDDWDKRAPVKVSNDGCTNDFLMVGLSTKDMPVTKADSIYVLCDYIMAIEDDTTLEYVLMPWKFNGCHALFVIDHVKKHVYSIGLIPATRSTSYGHVGNDRRMKFVGDAKIVRRNFVIDLLSYEDNSCRYAIPANIQQRLIDIAKKN

SEQ ID NO: 301834 - protein, 143 aa, Zea mays
  Clone ID: MRT4577_38349C.1.pep
MEVFGKSVIAEPSNVIFLSAILNTEGSNPSHKCDKRCQNENIFGNMYRCKLTGTTHICDKNCNQRILYDNHNSLCRVSGQFFPLSPLEQQAVRGIRRKHEVDSNEGCSFKRRRGAQLHPSPFERSYSAVSPIPSQVGDGMDLS

SEQ ID NO: 301835 - protein, 42 aa, Zea mays
  Clone ID: MRT4577_3834C.1.pep
RSHQHAIYLIHTHLSTLNFTDINLGACIMRFTCFYFPHCSVK

SEQ ID NO: 301836 - protein, 1377 aa, Zea mays
  Clone ID: MRT4577_38350C.1.pep
MPKLPCAQLRLCSILRSLCVSSYSNFDLSEGFVSEGFCPARMESLFVGLSHNKPKKSVATAIVREVLSHDWLLLDYICTQGDLALIDFIKEIPCEPRVEVMLIDDAFVERKWMECLFQPNAYLGDEVFIPINIREMHWYLVVIHARNMEIQVLDSIGTSQDRKDLTDFIKGLQRQIDMISQRKELKDHRWPDLQVASWLLREIDMGYAKQTDSSSCGLFLLNYIEYWTGDELSDSFTQDGMSYFRKKMAAILLSSDLNKRRGCLLYKNEKEVDSGSPSDVEILENPTYSNKRKLLHVLDDSEVVYEDEKGPIIQADLQRWFVDDWDKKAHVKVSTDGCTNDFLMVGLSTKDMSVIKADSIDVLCDYIMAIEDDTTLDLDFCNVVARPDPTRPLCPEGVRPFARVRERLAATLPGAFLGDAIQSRAKNSRPLYELSVRRLSSQLKISAFVSPRSQNKSTPPFLVHGTSSSSMDWLSSMLGDRPLKSVFTALGLPDKIGGAVIDALCYRGVRLWNVEEEADKLRRTKERIRAVLEDAEQRRFIDHDSVRLWLRELRAVAFDVDALLDRLGTITAVSRLAAAEQSRKRKRLWPSVELGPRQRWELDEKIAKINERLDEINTGRKWYRLQAGDGTRAASQPTQRPRFLESAAHRDERPIGRNEEKEQIVRALVSDSADMAVISIWGTTGIGKTALAQSVYKDPEVQNFFTDKIWVWLSDRCDIRKATKMIIEAATNQKCELLSLDILQQRLHDHLHKKQFLLVIDNLWAESFQFWEFLRPSLTGGAEGSKVLITTQHEKVSRMISTNLNIHLKGLEDEECWQILKLYAFSGWGSRDQHDLEPIGRSIASNCQGSPLAAKSLGLLLSDTHGDKEQWENILGEMQILGDGENTNSILPSLQISYQHLPYHLKQCFAFCSILPPGVEFEKDELVRLWIADGLVKSNGRERVEMEAGRCFDELLWRSFFETSRSFPDQKFRVPSLMLELAQLVSKHESLTLRPEDSPVVDHPEWIRYTTILCPKDEPLAFDKIYRYENSRLLKLCPAMKLPLNQVPTTLFSKLTCLRALDLSYTELDLLPDSVGSCIHLRYLNLRNTLIKTLPETVCGLFNLQTLDLRDCYWLTDLPAGMSRLVNLRHLSLHIDWDRVTALRSMPSGIDRLQSLQTLSRFVVVSRDGGRCNINELRNLKIRGELCILNLEAATSDGATEANLRGKEYLRELMLKWSEDACKDEQQQQQQQGIENSEAVIEALCPHTGLKRLRVENYPGRRFPPCFENLPSLESLEIVSCPRLTQFSVRTMRSLRNLRIRQCADLAVLPGGLCGLESLRCLETVGAPNLRIGAVDILPRNVSRLAVSGCDALERWCLEEGAERVQQIPDVRMRLKN

SEQ ID NO: 301837 - protein, 53 aa, Zea mays
  Clone ID: MRT4577_38351C.1.pep
VIKIKPGTQPGHKVVLTVKGLKTRISLYHGDQYVLFNVTITLILLYKHRELIQ

SEQ ID NO: 301838 - protein, 113 aa, Zea mays
  Clone ID: MRT4577_38352C.1.pep
MPYKRFAEAIIMASKKYKIAYSKKRSGWTEDIFKWEHTIQTGVPIDLRGFNTSYLVLQAMAMWGNDRRLKFVGDAKTLRRNFVIDLLSYEDNSCRYAIPANIQQRLVDIARKD

SEQ ID NO: 301839 - protein, 74 aa, Zea mays
  Clone ID: MRT4577_38353C.1.pep
SRLGVRAKERHAPSTRTPCSCQLPLETGQSVDRSANVSGRRLLAPQTHVWQLCACAAPRPRGRRRCQCHPVPSC

SEQ ID NO: 301840 - protein, 101 aa, Zea mays
  Clone ID: MRT4577_38354C.1.pep
AHASSIYASNQKLSRMSQAKLIQATKRRDIACSQPGYQESGSLDTSQDHLSRQLNRPVVHVLNQGCVIIVCGLIGSWWDWAVRYYIFGLADPFTHVYVQLS

SEQ ID NO: 301841 - protein, 34 aa, Zea mays
  Clone ID: MRT4577_38355C.1.pep
LSSRSSIRHSSTGQVPIAAGLAPPLPRPAGASPP

SEQ ID NO: 301842 - protein, 62 aa, Zea mays
  Clone ID: MRT4577_38356C.1.pep
PSSMIMSWSMHYKSRFFVYECLVVSCCSVWCHRSTSSARAVRPTASTSGSTSARAPRTSDAG

SEQ ID NO: 301843 - protein, 108 aa, Zea mays
  unsure (1)..(108): unsure at all Xaa locations
  Clone ID: MRT4577_38357C.1.pep
TALTTKKDFXRKKREAHGATVQRTLKGLHPPKASSNTLLNARSSSRWLXKSPSXAKKHAYIAXRLREPNTLKVHLKSGVKPKGLYIVPIQHTYPVWEPFFLNVDDYTF

SEQ ID NO: 301844 - protein, 89 aa, Zea mays
  Clone ID: MRT4577_38358C.1.pep
MVRVSVLNDALKSMYNAEKIVVELNGRLNKCGVISPRFDVGVKEIEGWTARLLPSRQFGYIVLTTSAGIMDHEEARRKNVGGKVLGFFY

SEQ ID NO: 301845 - protein, 130 aa, Zea mays
  Clone ID: MRT4577_38359C.1.pep
MVRVSVLNDALKSMYNAEKIGKRQVMIRPSSKVIIKFLTVMQRHGYIGEFEYVDDHRAGKIVVELNGRLNKCGVISPRFDVGVKEIEGWTARLLPSRQFGYIVLSTSAGIMDHEEARRKNVGGKVLGFFY

SEQ ID NO: 301846 - protein, 106 aa, Zea mays
  Clone ID: MRT4577_3835C.1.pep
AGSAVGTTEVVEQNLVRRHGSACNGTSLPSSADLPSDPTAPPPAPPSSSPPSPAVPSSLLLAGHVTFHPNAIITQRRYITQGMTSSGPVVTFGGPKRKSIWRPYTN

SEQ ID NO: 301847 - protein, 54 aa, Zea mays
  Clone ID: MRT4577_38360C.1.pep
RPNEDPHGKGLFLHHDGRTGDIKEKLAFVALDYEQELETATHDRRGEVQMPRFP

SEQ ID NO: 301848 - protein, 130 aa, Zea mays
  Clone ID: MRT4577_38361C.1.pep
MVRVSVLNDALKSMYNAEKIGKRQVMIRPSSKVIIKFLTVMQRHGYIGEFEYVDDHRAGKIVVELNGRLNKCGVISPRFDVGVKEIEGWTARLLPSRQFGYIVLTTSAGIMDHEEARRKNVGGKVLGFFY

SEQ ID NO: 301849 - protein, 38 aa, Zea mays
  unsure (1)..(38): unsure at all Xaa locations
  Clone ID: MRT4577_38362C.1.pep
ALGSRSQLHFGIVIGVSSLSRGXIVXAGYYFGGYFKSP

SEQ ID NO: 301850 - protein, 236 aa, Zea mays
  unsure (1)..(236): unsure at all Xaa locations
  Clone ID: MRT4577_38363C.1.pep
PVDPASPRRSFSGAVAAPVPAPAGGSGRRRAADEAAGRAAAXAPVPARAGVSKLYRGVRQRHWGKWVAEIRLPRNRTRLWLGTFDTAEEIALAYDGAAFRLRGDSAKLNFPELRRGGQHLGPPLHAAVDAKLXPSAAARTSARRCRRAXQSHAPAAATTATPXPSPRXPHVKSEPGCSVSESSFSADGDVSSTGSSDVVPEMQLLDFSEAPWDESDSFHLRKYPSLEIDWDSILIS

SEQ ID NO: 301851 - protein, 122 aa, Zea mays
  unsure (1)..(122): unsure at all Xaa locations
  Clone ID: MRT4577_38364C.1.pep
LSLGGAAAKRKQQQQAWEGKEXDVRLRANKFSERQPIGTVAQGTDDKDYKEPPPGRVFQPGELKSWSFYRAGIGEFCATLLLLYISILTGMGVSKSTCKCATEGIHGMGWAFGGLFFXLPYC

SEQ ID NO: 301852 - protein, 496 aa, Zea mays
  Clone ID: MRT4577_38365C.1.pep
QSIDMYSSVHSPNLSFLGTPSLSRLSNSFLTNSFRGKPPEIISSLIKPLLPTSIASASDDQQQQQHEDVRKSSHYLPPSRKASSLQRIPEDQRPMVGGHEVGPYRQCSYTQGVMNGVNVLCGVGILSTPYAVKQGGWLGLVILAVLGALAWYTGILLRRCLDSKDGLETYPDIGHAAFGTAGRIIISIILYMELYACCIEYLILESDNLSKLFPNAHLTMGNLTLDSHMLFAILTALVVMPTTWLRDLSCLSFISAGGVIASIVIVSCLFWVGLVDHVGTVESEGTALNLPGIPIAIGLYGYCYSGHGVFPNIYSSLKKSNQFPAVLFTCIALSTVLFAAAAIMGYIMFGESTESQFTLNLPPNLVASKIAVWTTVTNPITKYALTMTPLALSLEELLPPNKQTYPNIMILRSALVVSSLIIALSVPFFGLVMSLVGSFLTMFVAYILPCACFLSILRSKVTWYQVVLCVFIIVVGLCCVGVGTYSSLSKIIQKYQ

SEQ ID NO: 301853 - protein, 545 aa, Zea mays
  unsure (1)..(545): unsure at all Xaa locations
  Clone ID: MRT4577_38366C.1.pep
MRNSVSERSFLIESDDDDDAAVEDGKRRGLGGGGGGDDDDDGSDSSSPCDSPRVVAARCSQPSSYTQQWPQSYRQSIDMYSSVHSPNLSFLGTPSLSRLSNSFLTNSFRGKPPEIISSLIKPLLPTSIASASDDQQQQQHEDVRKSSHYLPPSRKASSLQRIPEDQRPMVGGHEVGPYRQCSYTQGVMNGVNVLCGVGILSTPYAVKQGGWLGLVILAVLGALAWYTGILLRRCLDSKDGLETYPDIGHAAFGTAGRIIISXIFCTSKLTSCQFCMQIILYMELYACCIEYLILESDNLSKLFPNAHLTMGNLTLDSHMLFAILTALVVMPTTWLRDLSCLSFISAGGVIASIVIVSCLFWVGLVDHVGTVESEGTALNLPGIPIAIGLYGYCYSGHGVFPNIYSSLKKSNQFPAVLFTCIALSTVLFAAAAIMGYIMFGESTESQFTLNLPPNLVASKIAVWTTVTNPITKYXALTMTPLALSFXELLPNHIQTYPWIMIXLLSLAFXSHLIQALSVPFFLSLILFMSTCPSFSLHVKRLYSID

SEQ ID NO: 301854 - protein, 66 aa, Zea mays
  Clone ID: MRT4577_38367C.1.pep
HRREICLRITLARPLGCGVLGYLCGQPVSKLARLKEFRPEVLASNLGTRLNKIMVTQAKEPGTPPT

SEQ ID NO: 301855 - protein, 116 aa, Zea mays
  Clone ID: MRT4577_38368C.1.pep
RIHPSHISLSSPTHNLISSNSNIDAGGYLNHLHICQSSTLLPLLFLISSSYYLMHDKIVYFNGQFTFSCIPCCVITHIHSYYSYLSSNFVNIFLILFLFCFCLYIYFFTFLNSLLF

SEQ ID NO: 301856 - protein, 69 aa, Zea mays
  Clone ID: MRT4577_38369C.1.pep
FQRLVREIAQDFKTDLGFQSHAVLVLQEAAKAYLVGFFEETNLWGIHAKGVTIMPKDIQLAKRIRGKRG

SEQ ID NO: 301857 - protein, 59 aa, Zea mays
  Clone ID: MRT4577_3836C.1.pep
GLFSRLPPFSFFRARARIVDCFRPPLGRGPSHCFFPWAPSCSRQGEMLVTVKSGPVWFC

SEQ ID NO: 301858 - protein, 259 aa, Zea mays
  Clone ID: MRT4577_38370C.1.pep
MARVRSTARVTRDREETEAAETAPISEVMRQSGLVVTEGACDEGTPATEAEQADIEEGDAGEEEIDYNTTMPSKPSHLDFGKSTVFEADMPMMTTLGYFEETEKKLIRFGGEETIPKPENDKVALRSQGVEPLAEAFCRVHELHYQTKAREDGLHENFGFYNFAYRKDMKTPVVSYRTKWPTGWKTEWFYVKIDEKKEKLVQSPLVLTLGLTRPQCNMTTGASCPDAVGEFRVVSEHIGTRDLVQEYLANRVFPTLKEW

SEQ ID NO: 301859 - protein, 66 aa, Zea mays
  Clone ID: MRT4577_38371C.1.pep
TKFDLLFKGKNPDSRVEMLPMDLSAGEESLKEVVHVAESFFSNAGVDYMVHNAAFERPVNITLILS

SEQ ID NO: 301860 - protein, 129 aa, Zea mays
  unsure (1)..(129): unsure at all Xaa locations
  Clone ID: MRT4577_38372C.1.pep
MAMSWTRALKHGVITRDAAQLVGIRGFAAQAKGKKGGKGGAADAKPVLSKEMKSTTVFGANILKEGSDPKIXPDSEYPDWLWHLVDKRPVLSELRRKDAKTLPYEDLKRFVKLDNRARIKENNALTAKN

SEQ ID NO: 301861 - protein, 135 aa, Zea mays
  unsure (1)..(135): unsure at all Xaa locations
  Clone ID: MRT4577_38373C.1.pep
KKNTSAEXQTXTLPXAEGGGXXXEGESARXKRTPEEGXXPXXXXAEDXXQQNXGRXEADPRDXARAGGGGXRXAXXXRAARPPPRXXRAPPAEHXPAPTPDGAPEARAAHNKPTGRSPGPQRAGGRPEPTDEXGP

SEQ ID NO: 301862 - protein, 85 aa, Zea mays
  Clone ID: MRT4577_38374C.1.pep
YHFNYYHRLDRRLILNLQNALERIQPGEHVHIIHYMTHEATAQRSYKGHDPPLIATMIKRTCNPIADTLSPWRAQKDRRHTYKPR

SEQ ID NO: 301863 - protein, 149 aa, Zea mays
  Clone ID: MRT4577_38375C.1.pep
LVASITKLRPAGLPSPHSSASAKQRETPKNSGLSAVSSPTSKHLTSSNQQHPRDNCMESEVVPRNQAGESGIRAFSLPRGAVSAAGEEVEREGGPARRTDLEGGRPAAGGRRRVKRRSRRRGRDGSAEREEEKKLGAAGLSEGRERGDR

SEQ ID NO: 301864 - protein, 102 aa, Zea mays
  Clone ID: MRT4577_38376C.1.pep
EFGIKCRLQPDLKASHELQPAAAPHATIVWNRRWCQGIRRERAGLGLSAYHGGSVCGRGEGRKGGRARLAYGFGGGRPAAGAAGSGGAEDGVGTAAEREKKL

SEQ ID NO: 301865 - protein, 129 aa, Zea mays
  Clone ID: MRT4577_38377C.1.pep
GGPGAPFCVPPGKTPPAGGRPPPFFFSKRKTLFFPRANHPGFLGYGRAAPTPIFPPGPHVGVFNPSPQRVFSAGGPLLCFFSPPGFSPRLAPPFWFVPPGGLAPNLPGFGFLISPLWGKDLGAFFFGFG

SEQ ID NO: 301866 - protein, 85 aa, Zea mays
  Clone ID: MRT4577_38378C.1.pep
LEPHGRQIFRNFKKITGNFGLRSSWIQERKVHSIGKLEKSQVNSASHHDSIPKDLLHTERMELSESVLGKRGIGKKCLRLQWKKI

SEQ ID NO: 301867 - protein, 71 aa, Zea mays
  Clone ID: MRT4577_38379C.1.pep
ISRSSCRMWKTGAPQREVRVLWGSNQGTMDDVFLPGTFWEQQGYKSLGSGNMSMQTQRSQHPTMSQTTPES

SEQ ID NO: 301868 - protein, 108 aa, Zea mays
  Clone ID: MRT4577_3837C.1.pep
AYCMQGILFLGPPPYMCMPDPWGSYICNYKCPRKLNACQAKKLLGIKTTTPGDMGGYKLGGDGPKPPHVFVAPFQNGQCVFPVCFWIPPPRCWIPPPQRAHPPCFGRV

SEQ ID NO: 301869 - protein, 325 aa, Zea mays
  Clone ID: MRT4577_38380C.1.pep
KDLQERSAFILDIFLQMIYFLCMSGNIDKAVSRIIGILPTAMPDNSGDKLLADVISCLTMSDSCIFWISCLYVLIYRNLPEEIIDQLEFQKALPRALIWPSIDPSVDNRDKITDLLNFAACKMAEDISECVKNGDPSYLMLSQFLAANHTLLSAAIGGLKSSVDMLVTYMKEYPMCPQILLISARLDRKHGTCPGLKSFDELILNWPKEAQGIQYMWNQYVEHALATDAELAEKVLTCWFEEHGKDCDIQSNAAICIELSSEEPGTSSLVSPQAVGSGPSISEDLVFRLLNLSLYKILENNLQEAQMAASKALKLAHGGWRQHRI

SEQ ID NO: 301870 - protein, 126 aa, Zea mays
  Clone ID: MRT4577_38381C.1.pep
EGFGEKGFTNFQNLQSLQVCKGVERGQHFQDRPTSVISQVRVSIKQITHLMSVANERIISRRPFFGLSRPPRTYERNLRPLKLLNSNVPNAGNIFNMSARPALLAKIPFAILCLKRLLQFSALSAV

SEQ ID NO: 301871 - protein, 33 aa, Zea mays
  Clone ID: MRT4577_38382C.1.pep
IPGALRSSQRIMSSLLCDLADMTLARSAGTLAS

SEQ ID NO: 301872 - protein, 107 aa, Zea mays
  Clone ID: MRT4577_38383C.1.pep
GGSGRGTRARVVLKGVPPRPFLKDGGPFWEWFPPFLGEGVPGVFFFPGIFRFRGRGGGPGIFFFFFPAPWGEGPPSLFGFFPPPVSVALFFPLSSPVPRLNIKPFFF

SEQ ID NO: 301873 - protein, 56 aa, Zea mays
  Clone ID: MRT4577_38384C.1.pep
ERKPIFPNTMREQVAKLDFYIYLTPKKEREINGPRQRRIILGYTCLQNLKLNVERC

SEQ ID NO: 301874 - protein, 85 aa, Zea mays
  Clone ID: MRT4577_38385C.1.pep
MYRGEQVMRHAGRHNNHYNSAKHLQSHMKEGPRGREKSYYKEGGKRRNEEIMGHSVTSTHHISNNARRPDGIIADRTAGSLLEHR

SEQ ID NO: 301875 - protein, 48 aa, Zea mays
  Clone ID: MRT4577_38386C.1.pep
PCRNSARGWTYSLLTSPVPSCLFKQSFLRLPKLPLFIGLLRGVPVPSY

SEQ ID NO: 301876 - protein, 67 aa, Zea mays
  unsure (1)..(67): unsure at all Xaa locations
  Clone ID: MRT4577_38387C.1.pep
VALNYDAYSRKKILLPYIQLAAANRASLLTSXQMMPFYQELAANPTTLLQIQHSLPLGQNALTDPGY

SEQ ID NO: 301877 - protein, 91 aa, Zea mays
  unsure (1)..(91): unsure at all Xaa locations
  Clone ID: MRT4577_38388C.1.pep
KSKEQELQDLNKDLRKKLQETSPENVLHVSSWEEGGHSGASGNVLDPYXGLLQHPESDPSLQIGYHQQAYMDQLNNEDMAGPNEHGRSGWI

SEQ ID NO: 301878 - protein, 163 aa, Zea mays
  unsure (1)..(163): unsure at all Xaa locations
  Clone ID: MRT4577_38389C.1.pep
GLSPGPQSLSRSLRVRGPPGSPRSPWLLLLRPNASLSGGPGKRGCQRAAGRCGAXALSPEMRETLDKVVGSSKVLLFMKGTKDFPQCGFSHTVVQILRSLDVPFETLDVLANEALRQGLKEYSSWPTFPQLYIDGEFFGGCDITVEAYKSGELQETLEKAMCS

SEQ ID NO: 301879 - protein, 72 aa, Zea mays
  Clone ID: MRT4577_3838C.1.pep
GFLGPRRLERVLSRLTGGARILLDDDDETPSSSRRSVNFKLKTSFLLCLIDGVVSSPSSDYGLGYFTFHCAL

SEQ ID NO: 301880 - protein, 36 aa, Zea mays
  Clone ID: MRT4577_38390C.1.pep
LVLVRYWLPTIAFVESLIVSGPVTVGVRADPTVCRI

SEQ ID NO: 301881 - protein, 81 aa, Zea mays
  Clone ID: MRT4577_38391C.1.pep
FVDFSRICPFKPPPGQVPGVWPWPPSCFCPRPTLVRLRPRTSQRGVVLNLGGEKGLNEEIKPRVSPSPPGGAIKKRPRFPP

SEQ ID NO: 301882 - protein, 42 aa, Zea mays
  Clone ID: MRT4577_38392C.1.pep
FSQIDYKGYGSKSECKEIVEVTPNYTYDPESFTAALGLYMKF

SEQ ID NO: 301883 - protein, 81 aa, Zea mays
  unsure (1)..(81): unsure at all Xaa locations
  Clone ID: MRT4577_38393C.1.pep
MATALSXFKGLTLGALLSMGEVTGAGAEQQYKRKTTTDXEDRFLLFYSSGWMSTKATWYGAKTDFWGGENXGACGDKVLNQ

SEQ ID NO: 301884 - protein, 89 aa, Zea mays
  Clone ID: MRT4577_38394C.1.pep
EVNVQKFFPVLLIHSDPEPSLVSFLIPNMLLIQLVFPLSQSWGLLKSMANPRECQVRAKASSFAFKWVNHLWFRSLRWLIRHAFPPFFF

SEQ ID NO: 301885 - protein, 82 aa, Zea mays
  Clone ID: MRT4577_38395C.1.pep
LKTVALRLSSARTRSTGPDRNVGRTLSSGFKLHDSKYSPLLGGVLKLLESILCLSVINRRGIICSCSHCKNKLVKEGGEVKS

SEQ ID NO: 301886 - protein, 571 aa, Zea mays
  Clone ID: MRT4577_38396C.1.pep
KGKTSDALSKLTELAPETACLLTLDKDGNAISETEISTQLLQRNDVIKIVPGTKVPVDGVVIKGQSHVNESMITGEARPIAKKPGDRVIGGTVNDNGCIIVKATHVGSETALSQIVQLVEAAQLARAPVQKLAGKISRFFVPTVVVAAFLTWLGWFIPGQLHLYPQQWIPKAMDSFELALQFGISVLVVACPCALGLATPTAVMVATGKGASQGVLIKGGNALEKAHKIKAIIFDKTGTLTVGKPSVVQTKVFSKIPLLELCDLAAGAEANSEHPLSKAIVEHTKKLKEQYGSHSDHMMESRDFEVHPGAGVSAHIEGRLVLVGNKRLMQEFEVPLSPEVEAYMSETEELARTCVLVAIDKIICGALAVSDPLKPKAGQVISYLKSMGISSIMVTGDNWATAKSIAKEVGISQVCTRIDPVGKAEKIKDLQMQGLTVAMVGDGVNDSPALAAADVGMAIGAGTDVAIEAADIVLMKSNLEDVITAIDLSRKTLSRIRLNYVWALGYNVLGMPIAAGVLFPFTGIRLPPWLAGACMAASSVSVVCSSLLLQLYKKPLHVEDAPRPREDSDLV

SEQ ID NO: 301887 - protein, 171 aa, Zea mays
  Clone ID: MRT4577_38397C.1.pep
HACMHARTSCQRRVALRLSSARTRSTGPDRNVGRTLSSGFKLHDSKYSPLLGGVLKLLESILCLSVINRRGIICSCSHCKNKLVKEGGEVKSHLISGTGAPSDGCKSWRTSNRKSTAKCFHRRQITGQGLIIWGKRPLSSGTRGSHTVGATFVDDLPLNRHLKLLLCSLHQ

SEQ ID NO: 301888 - protein, 38 aa, Zea mays
  Clone ID: MRT4577_38398C.1.pep
LSILLNPLIYPECCSVKLVDEIGSLWVINLVWICQFCV

SEQ ID NO: 301889 - protein, 194 aa, Zea mays
  unsure (1)..(194): unsure at all Xaa locations
  Clone ID: MRT4577_38399C.1.pep
MEHKRLRLLMLLVLSASAATATIMPQXSQNAISFLLPPYLTPLAAFTXETQIFNPYRXIQQEITGWILPLSPXQLQQPNNLSQHIQLDDXLRQNINXRQLQQRVIXKNVVHSLIHIRVXFDQMHVLNSADYLQQQLPFYHIVGDYSQKYLXFNLLATXNSDDYLHQQQLLPFMQLHDGNHDCCLTQQQLLLNYL

SEQ ID NO: 301890 - protein, 64 aa, Zea mays
  Clone ID: MRT4577_3839C.1.pep
EERSRAFFMLSRSFFDDNIDFLRFPYARSTLWIFCVQSGRDGYAVWNTSTLELLLVFWSKANVP

SEQ ID NO: 301891 - protein, 137 aa, Zea mays
  Clone ID: MRT4577_383C.1.pep
QNHINHIKIKKTLGLKGDRVARKGSQHPNRNRKGDCAYTRKKTPPGWERHRKTTATGIFKIALLVMGGVSLSGAGLGSLFGEPSYRFFRLCPLVLGPRGSQERANLTKGDLGDPPHLWGVIGLLRPATKGRGWRLIC

SEQ ID NO: 301892 - protein, 79 aa, Zea mays
  Clone ID: MRT4577_38400C.1.pep
RPGRTLGRRPPAHLLLSQFLQPPNPISPPQSPPPKVPILAARIIVSWCESPIVLVEGRREEGKGENPRHLISALGNRGM

SEQ ID NO: 301893 - protein, 96 aa, Zea mays
  Clone ID: MRT4577_38401C.1.pep
PWPPPSPAHLLLSQFLQPHHHTLAAPPPQSPPPKVPTLAARIIVTWCESSIVLVEGRREEGKGENSRWWTSGSFLGILPKLPVKTSKTVMVIPSVR

SEQ ID NO: 301894 - protein, 95 aa, Zea mays
  Clone ID: MRT4577_38402C.1.pep
SRGRPGPFGRRPPAHLLLSQFLQPPNPSRPPQSPPPKVPILAARIIVAWCESSIVLVEGRREEGKGENPRWWTSGSFLGIWPKLPVKAPNFCFGE

SEQ ID NO: 301895 - protein, 106 aa, Zea mays
  Clone ID: MRT4577_38403C.1.pep
MTKKRRNNGRAKKGRGHVQPIRCTNCARCVPKDKAIKKFVIRNIVEAAAVRDISEASVFDAYVLPKLYVKLHYCVSCAIHSKVVRNRSREARKDRTPRTRFRPAGA

SEQ ID NO: 301896 - protein, 172 aa, Zea mays
  Clone ID: MRT4577_38404C.1.pep
VEHDLLPPSGDVDVHDECKGIGVLDETCKSAVPSVADPIMNSEGGEEEKAIQRPDAEESVTADGNFAQEEQEEEEDIKKDGDDKVGALIGALCSFGVAAATACVFLIGGRLHHHHTQQHKIQLQFFGDDKRIQQVVRQTSRLNQKAMSFATGAGASRHFGRAPVKRSKNINY

SEQ ID NO: 301897 - protein, 97 aa, Zea mays
  Clone ID: MRT4577_38405C.1.pep
VVTLATIGTQVEGPTIYSGARVQPHNHISSSPAQAPGDCLHLLTSAKLKHDTCNSNISVQFFRILQKTNLDEEWGSWYFFFPGTYPMEHLLPIKRPG

SEQ ID NO: 301898 - protein, 103 aa, Zea mays
  Clone ID: MRT4577_38406C.1.pep
RPGCRYRLVNTSYPYIAFLYPSSRFPISYDVDIDWQEAHTDDAHASILVPTTRNATWIGDHVLLMRELRQLLSGFPEINAENIVRRTDRLSRELPGQTTWCPL

SEQ ID NO: 301899 - protein, 62 aa, Zea mays
  unsure (1)..(62): unsure at all Xaa locations
  Clone ID: MRT4577_38407C.1.pep
RFYFWHASTTRQCIAWDLRPRRLMITAYQSTATHPNRXSLPANKHAHIGKQIGWFSLHASLA

SEQ ID NO: 301900 - protein, 50 aa, Zea mays
  Clone ID: MRT4577_38408C.1.pep
PTPSTTRLQTSVQIPNLHLHSSTQNTLRPISLKIPAIKAQISYFIYSIYT

SEQ ID NO: 301901 - protein, 81 aa, Zea mays
  unsure (1)..(81): unsure at all Xaa locations
  Clone ID: MRT4577_38409C.1.pep
VIFNTGVMVLELSRWCRCXYTGQMEEWMELQKRMRIYKLGXLPPFLGTSAGRIRFIDHRWNQHDLSGDNYASLCRGLNSCI

SEQ ID NO: 301902 - protein, 207 aa, Zea mays
  Clone ID: MRT4577_3840C.1.pep
MEEERCFNNWDLDAVVRLGCRRRLSPPRQPDPFASLLPPTLPSPSPSPPQKEKPVVPALAKGPEPEPYAGWRFPNLGAGGGQDGDELMRAMLAVQPSLPQPLPTTTPTPTPTLPPAAGEHRQSTVTAVDVPLPQVRPAPAARAQPSGRQVPGSVPRSKRRKNQVKKVVCHVPADGSSSDMWAWRKYGQKPIKGSPYPRGYYRCSSSQ

SEQ ID NO: 301903 - protein, 100 aa, Zea mays
  Clone ID: MRT4577_38410C.1.pep
HRNSTYSLIPIYRLTQGIFDKYMAPMEICNVRRVLLGAISASRNSPELGSLHLARQHPPKDLVTEQIRDLRRTDRAGSPGGRLRRTPSDSYGARRLEVPM

SEQ ID NO: 301904 - protein, 64 aa, Zea mays
  Clone ID: MRT4577_38411C.1.pep
CQEDMVTHGNEVVEHTVTEVHHLQLHLVQRDSSFTHNLKDLLHLVVRNLEVYPENFCIDPNLLL

SEQ ID NO: 301905 - protein, 86 aa, Zea mays
  unsure (1)..(86): unsure at all Xaa locations
  Clone ID: MRT4577_38412C.1.pep
VPXEXLAGAITHHSGSSAPSSLYSTXSPHKNRSETMRVMLVALALLSLAASATSTHTRRRHAADSHRRRFIHRRQCMCQLRRTCHA

SEQ ID NO: 301906 - protein, 53 aa, Zea mays
  Clone ID: MRT4577_38413C.1.pep
LGTPPAHFNRPITVGMFYLLFAKRYHRYEKCALHHPCSDTPHAIFVRKAPPST

SEQ ID NO: 301907 - protein, 254 aa, Zea mays
  unsure (1)..(254): unsure at all Xaa locations
  Clone ID: MRT4577_38414C.1.pep
MSAYCGKYKDELIKNAAYIGTPGKGILAADESTGTIGKRFASINVENVEDNRRALRELLFCTPGALQYLSGVILFEETLYQSTKGGKPFVDILKEGNVLPGIKVDKGTVELAGTNGETTTQGFDDLGKRCAKYYEAGARFAKWRAVLKIGPTEPSQLSINQNAQGLARYAIICQENGLVPIVEPEILVDGPHDIDRCAYVTEMVLAACYKALNDQHVXLLEGTLLKPNMVTPGSDAKKVAPEVIAEYTXRTLQR

SEQ ID NO: 301908 - protein, 82 aa, Zea mays
  Clone ID: MRT4577_38415C.1.pep
SYPCKGSDPWHRMSCPSSVSKCTYVDLCLILRLFLFSQRYFFFFHMACIESAQLVRALVLHAHIIEQSSYQRLILGHLRKKA

SEQ ID NO: 301909 - protein, 355 aa, Zea mays
  Clone ID: MRT4577_38416C.1.pep
MSAYCGKYKDELIKNAAYIGTPGKGILAADESTGTIGKRFASINVENVEDNRRALRELLFCTPGALQYLSGVILFEETLYQSTKGGKPFVDILKAGNVLPGIKVDKGTIELAGTNGETTTQGFDDLGKRCAKYYEAGARFAKWRAVLKIGATEPSQLSIDQNAQGLARYAIICQENGLVPIVEPEILVDGPHDIDRCAYVTEIVLAACYKALNDQHVLLEGTLLKPNMVTPGSDSKKGAPEVIAEYTARTLQRTVPAAVPAVVFLSGGQSEEEATRNLNAMNKLSTKKPWSLSFSFGRALQASTLKAWAGKVENLEKARAAFLARCKANSEATLGTYKGDAAADTESLHVKDYKY

SEQ ID NO: 301910 - protein, 90 aa, Zea mays
  unsure (1)..(90): unsure at all Xaa locations
  Clone ID: MRT4577_38417C.1.pep
AKTPSRGRPPPGGSKNAVGGGAPPPGSMWGGPPPPRXVVGPPGGGGPPQPPPGAGPPPPVACPPGGVAPPLIGLPAGLGRAINGGGGHRF

SEQ ID NO: 301911 - protein, 254 aa, Zea mays
  unsure (1)..(254): unsure at all Xaa locations
  Clone ID: MRT4577_38418C.1.pep
MSAYCGKYKDELIKNAAYIGTPGKGILAADESTGTIGKRFASINVENVEDNRRALRELLFCTPGALQYLSGVILFEETLYQSTKGGKPFVDILKAGNVLPGIKVDKGTIELAGTNGETTTQGFDDLGKRCAKYYEAGARFAKWRAVLKIGATEPSQLSIDQNAQGLARYAIICQENGLVPIVEPEILVDGPHDIDRCAYVTEIVLAACYKALNDQHVLLEGTLLKPNMVTPGSDSKKVAPXVIAEYTVRTLPET

SEQ ID NO: 301912 - protein, 38 aa, Zea mays
  Clone ID: MRT4577_38419C.1.pep
FFFFFFKKKKKKKKKKKKKKKKKKKKKKKKKKKKKLEG

SEQ ID NO: 301913 - protein, 78 aa, Zea mays
  Clone ID: MRT4577_3841C.1.pep
HACAHASAEANQAGEYQPEERPQSETDYIRAQEAMRVMIYVHARMMIVDDEYMMIGFGKINHRFMDGATDSEIAMGAY

SEQ ID NO: 301914 - protein, 232 aa, Zea mays
  unsure (1)..(232): unsure at all Xaa locations
  Clone ID: MRT4577_38420C.1.pep
MSAYCGKYKDELIKNAAYIGTPGKVILAADESTATIGKRLSSINAENVEQNRRVLRELLFCCPGALQYIRGVILFEETLYHKTKDVKPFVDVLKEGGVLPAIKVDKVTIEVVDTDNDTTTQGHDDLGKRCAKYYXAGARFAKXHAVLKIGPNETSQLAIDLNAHGLDRYAIIXQENGLVPIDEPEILVDDPHDIDRCAYVTETVLAACYKVLNEHXSLLEGTLLXXNMVTPG

SEQ ID NO: 301915 - protein, 143 aa, Zea mays
  Clone ID: MRT4577_38421C.1.pep
MACFTFGTIITDCWPRYIEERTVTPTTPVGNRYILLLVDDATRFMWAVLLPSKDAAAEAIKKIKAAAEVESGRKLKVLRTDNGGEFTVAEFAAYCANEGVNQQKIESFKAKMKQTFEMSDLGLLSFYLGIEVVIQPLHLWKKG

SEQ ID NO: 301916 - protein, 91 aa, Zea mays
  unsure (1)..(91): unsure at all Xaa locations
  Clone ID: MRT4577_38422C.1.pep
MSGYCGKYKDELIKNAAYIGTPGKGILAADESTGTIGKRLSSINVENVEENRRALREALFCCPGALQYIXRVNLFQETLYQNTKDGEPFVD

SEQ ID NO: 301917 - protein, 161 aa, Zea mays
  unsure (1)..(161): unsure at all Xaa locations
  Clone ID: MRT4577_38423C.1.pep
MLAYCGKXKDELIKNAGYIGTPGKGILAADEPTGTIGKRLSSINVENVEENRRALRELLFCWPGALQNISGVILFEETLYQKTKDGKPFVDVLKEGGVLPGINVDKGTIDVAGTDNGTTTQGHDDLGKRCAKYYKAXARSAKWRAXLKNGPNEPSQIAIDL

SEQ ID NO: 301918 - protein, 289 aa, Zea mays
  unsure (1)..(289): unsure at all Xaa locations
  Clone ID: MRT4577_38424C.1.pep
AAYXGTPGEGILAADESTGTXGKRLSSINVENVEENRRALRELLFCCPGALQYISGVILFEETLYQKTKDGKPFVDVLKEGGVLPGIKQGRSQGVLLGSADPYKILKILYKYTVSXYLDDDQXIDPNNFVFWLRPWHXVDKGTIEVVGTDKETTTQGHDDLGKRCAKYYEAGARFAKWRAVLKIGPNEPSQLAIGLNAHGLARYAIICQENGLVPIVEPEILVDGPHDIDRCAYVTETVLGCLXYKGLNGHNVPLEGTLLKPNIVXPASNSKRGTPKGMVXYTPRNLQK

SEQ ID NO: 301919 - protein, 236 aa, Zea mays
  Clone ID: MRT4577_38425C.1.pep
RLVGANLENSTPLGKAGTGLVVLSAALAEVIVALGGGLLVGANNLNGALVDLDAREDGLVPIVEPEILVDGPHDIDRCAYVTETVLAACYKALNEHHVLLEGTLLKPNMVTPGSDSKKVTPEVIAQYTVRTLQRTVPAAVPAVVFLSGGQSEEEATLNLNAMNKLSTKKPWALSFSFGRALQASTLKAWAGKVENVEKARAAFLARCKANSEATLGTYKGDAAADTESLHVKDYKY

SEQ ID NO: 301920 - protein, 359 aa, Zea mays
  unsure (1)..(359): unsure at all Xaa locations
  Clone ID: MRT4577_38426C.1.pep
MSAYCGKYKDELIKNAAYIGTPGKGILAADESTGTIGKRFASINVENVEDNRRALRELLFCTPGALQYLSGVILFEETLYQSTKGGKPFVDILKAGNVLPGIKVDKGTIELAGTNGETTTQGFDDLGKRCAKYYEAGARFAKWRAVLKIGATEPSQLSIDQNAQGLARYAIICQENGLVPIVEPEILVDGPHDIDRCAYVTEIVLAACYKAXLNDQHVLLEGTLLKPNMVTPGSDAKKVAPEVIAEYTVRTLQRTVPAAVPAIVFLSGGQSEEEATLNLNAMNKLQTKKPWNLSFSFGRALQQSTLKAWSGKTENEEKARTAFLVRCKANSEATLGTYKGDATLGEGASESLHVKDYKY

SEQ ID NO: 301921 - protein, 204 aa, Zea mays
  unsure (1)..(204): unsure at all Xaa locations
  Clone ID: MRT4577_38427C.1.pep
MSAYCGKYADELIKNAAYIGTPGKGILAADESTGTIGKRLSSINVENVEENRRALRELLFCCPGALQYISGVILFEETLYQKTKDGKPFVDVLKEGGVLPGIKVDKGXEVVGTDKETTTQGHDDLGKRCAKYYEAGARFAXWRAVLKXGPNEPSQLAIDLNAQGLARYAIICHLPRLDMLIAALTVALLSTGRAGSPHRSPAAG

SEQ ID NO: 301922 - protein, 262 aa, Zea mays
  unsure (1)..(262): unsure at all Xaa locations
  Clone ID: MRT4577_38428C.1.pep
MNKPSLLPASSSSNGPFPLATDQVNRDYGQPAHPIVQQNSVQSPTQSAPRMPAQMFGAKFSNSSKISPAQPTTILGDDTEISSPSGSNKYDSRLTIKGQPDDQGTEHSSFLRGGAHVLGATGAMGIKLGDQNFHGTPALLPVMQFGGPRPVGRGVPSIGMALPGFVSQQQLGLNNNSEMTWLPILTGASGALGAPYGSPYIAMDGSYYSRQSEQASSSVSIREPSANNASSXEVPRNXEVASDEITQRQNKPRRYSEMNFGQ

SEQ ID NO: 301923 - protein, 35 aa, Zea mays
  Clone ID: MRT4577_38429C.1.pep
FTGPVRPFLLSSSTFFSRACTKLRSLLMRGLNAWT

SEQ ID NO: 301924 - protein, 61 aa, Zea mays
  Clone ID: MRT4577_3842C.1.pep
KRVEYELYPESPTYNLYMAISGDIKLISSSSTALKFSSRTSFTINSIITPWHTNRFPAYIY

SEQ ID NO: 301925 - protein, 32 aa, Zea mays
  Clone ID: MRT4577_38430C.1.pep
FFFFFEHSKKDGLIFYKKTWTSLKLTLFKPDK

SEQ ID NO: 301926 - protein, 52 aa, Zea mays
  Clone ID: MRT4577_38431C.1.pep
NRNGGGQGGGRQEQGQANRGQHKGKPQGGGGGNQKQGQGVRAPGLFKLERGS

SEQ ID NO: 301927 - protein, 174 aa, Zea mays
  unsure (1)..(174): unsure at all Xaa locations
  Clone ID: MRT4577_38432C.1.pep
MEVMTGKGGAKPVPNYLRPSTGSCHDACKHGGHHAFVEKQEAPRTQPKPRKKQQPSASDDQNQKRRLVKVRSVSRRRVVDFSKPDKADTPAGGSEIVVEWKDIVAYDAVPAPAPADGPSHQQPDGRKKKRDVMKXETPFVKTTHPETPGQXPNESLNKRLAKNVRSTLTGKGSI

SEQ ID NO: 301928 - protein, 204 aa, Zea mays
  Clone ID: MRT4577_38433C.1.pep
LFPVLIQPEIILYSIFFVLRKSTDDGISSWDWKLKGDRSTYHALFPRAWTVYDGEPDPELKVSCRQISPFIPHDYQESSLPTSVFVYTLVNTGKERAKVSLLMTWANSIGGLSHHSGDHVNEPFVGKNGVSGVLLHHKTANNNPPVTFAIAACENQNVNVTVLPVFGLSGESSVTARGMWGTMVQVILLFSFLCFSLHVIPCFR

SEQ ID NO: 301929 - protein, 99 aa, Zea mays
  Clone ID: MRT4577_38434C.1.pep
PGAVFRGEGFNGPEAVPRLEQWLIKNPSSHPQYGVWELNQKDFWGMFDGSPYEPPPPKYGGGGPFMRVYPKSQKGPHPEKEVQEAEAPLLEPAPPGEGA

SEQ ID NO: 301930 - protein, 865 aa, Zea mays
  Clone ID: MRT4577_38435C.1.pep
MKSMWKQSGGLVCADAGPLSPLGGRSRRRTRLTLYAVAFAFAAFTAYVAFASPPSAGAGASWFGGVYASTAPYRSQISSLFSSILPADSPAPSPEPLRVTFGGSGGGGGQVTRDASTVQVGSAAESISSAKAGSSKQLGTGGGAPIGNAGARSVPPAVHLPGTGIGGGAAPTNSSASGVGAPNDAVDLNKRSDGGVSTEGGSGSPASSSAVHGTAAEVRENSVNGSNKQSGNGSGALSNAATGHGSTVRAEAKVASDVSTNSSAGSGSLGKVDLSTGSSNNLAGSGSVVSGSGSDAGNRSTVKPHPGDAVGAGSRGSSGNGTGTMVDLNKGSDAQPGNRNGDASHQSDVSSGFEKSKGAKVVTTDAQPDSGSGDASHKSPGSSSPAKSIAGDGEVEGSKRNVSVVPTVNQTGSPASVGQKDVGSPRNNNTVGASPPVKNPEQTWSQVAPGGSSGTVNNPKGNAAAQGSAGSSENHSAQVNSSKSGNNSKGSRSSITQDGGSGGNKKGDWYKEMASCDMFSGNWVRDDSYPLYPEGSCPHIDEPFDCYLNGRRDLAYQKLRWQPSGCSIPRLNPTDMLERLRGKRLVFVGDSLNRNMWESLVCILRNSVKDKRKVFEASGRREFKTEGSYSFLFTDYNCSVEFFRSPFLVQEWEMQVSSGKKKETLRLDLVEQSSLKYKDADFIIFNTGHWWTHEKTALGKDYYQEGNHVYNELNVMDAFHKALLTWSKWIDANVNPRKTLVLFRGYSASHFSGGQWNSGGGCDKESKPITNDQYLSTYPPKMSILEDVIHKMKTPVVYLNITRMADYRKDAHPSIYRKQNLTDEERRSPERFQDCSHWCLPGVPDSWNELVYAQLLIKQHQMRQQ

SEQ ID NO: 301931 - protein, 54 aa, Zea mays
  Clone ID: MRT4577_38436C.1.pep
FPHPSIVEQRCSTCLLYSLRQPWRALKNVKLPTKQSLRCAYEQRPLGVVPGSSY

SEQ ID NO: 301932 - protein, 101 aa, Zea mays
  Clone ID: MRT4577_38437C.1.pep
ESKDARSPPHGSGLLLLERHVAACLGGCDPPLPSVEGSAGHLILPPMCNISDGNRETGARLLFTSRGPTGPGSRHQARSSPPLHPLCCKPVPTASLTSDPR

SEQ ID NO: 301933 - protein, 100 aa, Zea mays
  unsure (1)..(100): unsure at all Xaa locations
  Clone ID: MRT4577_38438C.1.pep
XNKFTAXDGLQTLTNNLCYTYARCTRSVSIVPPAYYAHLAAFRARFYMEPDTTDSGSMASGATTSRAPGGARNTRAGVGNVAVRPLPALKENVKRVMFYC

SEQ ID NO: 301934 - protein, 79 aa, Zea mays
  unsure (1)..(79): unsure at all Xaa locations
  Clone ID: MRT4577_38439C.1.pep
ADQLPNRDKIWARNVRELSYDIEVSIDAFMVQSKGRKLVKQYGLQKVIGMCLDWLLQPKIRHKMATEIXDDQKRIVEVH

SEQ ID NO: 301935 - protein, 180 aa, Zea mays
  unsure (1)..(180): unsure at all Xaa locations
  Clone ID: MRT4577_3843C.1.pep
RVFSRPGSMATHGNIRSSXIPLSRNVGGRVSDHGLARLVGVVGYRAPEVVTDPRRTSQKADLYGFGVLLLELLTGKAPTHAVLQHDEGVDLPWWXRSVVRGEWTSEVFDAELLSHLGAEEEMVEVLRLAMDCTEPTTNQRPAMPEVVQWRASRGSAARRPRRPRGPPGVRPWTRQTTGRS

SEQ ID NO: 301936 - protein, 40 aa, Zea mays
  Clone ID: MRT4577_38440C.1.pep
LVTATSYKAVVVSMYQFHLKTVGLALGTRRRGRGGGLAGA

SEQ ID NO: 301937 - protein, 114 aa, Zea mays
  Clone ID: MRT4577_38441C.1.pep
ARIPLLSPKSPSRKPSPRSLPTPLPAPLLPGELALPLYGALLAPLHTIAHDPPWISPSPFPSPPHLLDARRPVPARPAPSLLVAGHLCCSHGDLIPPLLSVSSSDGRQQQPTAT

SEQ ID NO: 301938 - protein, 53 aa, Zea mays
  Clone ID: MRT4577_38442C.1.pep
APSTIAKLIAHPLAMTLPHNPTETPGNSRASYSNSTCSYDHSSSQAYSRKTSP

SEQ ID NO: 301939 - protein, 64 aa, Zea mays
  Clone ID: MRT4577_38443C.1.pep
AQWRSNAINRGWRSIRGKDYCWCPARDFFEHFGSGAPGLPQILLVTFPAIDWKGVLVHFVGLFG

SEQ ID NO: 301940 - protein, 45 aa, Zea mays
  Clone ID: MRT4577_38444C.1.pep
YCGSESCFVLVGMAATLASVCSVPLTSVLLLFELTKDYRILLPLM

SEQ ID NO: 301941 - protein, 115 aa, Zea mays
  unsure (1)..(115): unsure at all Xaa locations
  Clone ID: MRT4577_38445C.1.pep
MASTGTTAAAAAVAVPEVTLRSGNGKPMPMVGMGTASFPVVHEAVRDAVLAAIEVGFRHFDTAFLYGTEKPLGDAVAEALRRGLLRSREELFVTSKLWCSQTHADXVLACLGETL

SEQ ID NO: 301942 - protein, 106 aa, Zea mays
  Clone ID: MRT4577_38446C.1.pep
SLFNRSKLNVSTRNNVRAYTKDGVNLPTPKYNCSILEDMFLEENADFISGTFANWKALQEALVLVKVWARQRTSIYTHDCLNGYLISAILVFLTVDSGGSMITRSM

SEQ ID NO: 301943 - protein, 355 aa, Zea mays
  Clone ID: MRT4577_38447C.1.pep
MSAYCGKYKDELIKNAAYIGTPGKGILAADESTGTIGKRLSSINVENVEENRRALRELLFCCPGALQYISGVILFEETLYQKTKDGKPFVDVLKEGGVLPGIKVDKGTIEVVGTDKETTTQGHDDLGKRCAKYYEAGARFAKWRAVLKIGPNEPSQLAIDLNAQGLARYAIICQENGLVPIVEPEILVDGPHDIDRCAYVTETVLAACYKALNEHHVLLEGTLLKPNMVTPGSDSKKVTPEVIAEYTVRTLQRTVPAAVPAVVFLSGGQSEEEATRNLNAMNKLSTKKPWSLSFSFGRALQASTLKAWAGKVENLEKARAAFLARCKANSEATLGTYKGDAAADTESLHVKDYKY

SEQ ID NO: 301944 - protein, 193 aa, Zea mays
  unsure (1)..(193): unsure at all Xaa locations
  Clone ID: MRT4577_38448C.1.pep
GLVNTCSALEGAFVEGYAAELGRKVWAVGPLCLIDTDADTMAGRGNRAAMDAEHIVSWLDARPAASVPYINFGSIARLSATQVAELAAGLEASHRPFIWSTKETAGLDAEFEARVKDYGLVIRGWAPQMTILSHTAVGGFLTHCGWNSTLEAISNGVPLLTWPHFADQFLNEALXXVTXLGVGVRVRRADPAS

SEQ ID NO: 301945 - protein, 111 aa, Zea mays
  Clone ID: MRT4577_38449C.1.pep
LIDRQRGVAHARAANRWGSDPSSARVVLQQKMSARYSAATTRKRVSSPSSAPISLSHGLSDAAVATTGGRSKYPTRSYLLDIAAEPSGHGLLSERKGPRRGQQPTRPRTRG

SEQ ID NO: 301946 - protein, 37 aa, Zea mays
  Clone ID: MRT4577_3844C.1.pep
IRLEQPVYSSRQWQRCSRSALLPQQDGQSPEEIIFSS

SEQ ID NO: 301947 - protein, 356 aa, Zea mays
  unsure (1)..(356): unsure at all Xaa locations
  Clone ID: MRT4577_38450C.1.pep
MSAYCGKYKDELIKNAAYIGTPGKGILAADESTGTIGKRLSSINVENVEENRRALRELLFCCPGALQYISGVILFEETLYQKTKDGKPFVDVLKEGGVLPGIKVDKGTIEVVGTDKETTTQGHDDLGKRCAKYYEAGARFAKWRAVLKIGPNEPSQLAIDLNAQGLARYAIICQENGLVPIVEPEILVDGPHDIDRCAYVTETVLAACYKALNEHHVLLEGTXLLKPNMVTPGSDSKKVTPEVIAEYTVRTLQRTVPAAVPAVVFLSGGQSEEEATRNLNAMNKLSTKKPWSLSFSFGRALQASTLKAWAGKVENLEKARAAFLARCKANSEATLGTYKGDAAADTESLHVKDYKY

SEQ ID NO: 301948 - protein, 141 aa, Zea mays
  Clone ID: MRT4577_38451C.1.pep
ANPVVATAAANQRHSSSGHSAQFVDHAPHPMPTSSSGSDQPYPIRAGAYPCHLLFPLHSHAPVAGEEGGSKGKGACHAAGEEGNLILLNRAGLDQAVKGCLLLGGSNQQQQSLHLFSHACSPSPDVIWEPFCRKPAYRSRR

SEQ ID NO: 301949 - protein, 86 aa, Zea mays
  Clone ID: MRT4577_38452C.1.pep
RFGIPGSTHACADAWVFYFFFFFFIFLRGWLANYSIQTWGALKHRIINMHAAGALSWPWSRLDYRNSFPYVVRGLTHAFASLHSNS

SEQ ID NO: 301950 - protein, 127 aa, Zea mays
  unsure (1)..(127): unsure at all Xaa locations
  Clone ID: MRT4577_38453C.1.pep
IDSELYHAQSPIATDLCREDFDLYHLSESSLHIYPLNIVIKTCGTPDLLLTIPRILQLAEDLSMPLADVKYFCGTLMFYVTHPFPYKYFCDEVAVLNRYYSCLKYRDHAXYQLXDSAILGPIWYVFY

SEQ ID NO: 301951 - protein, 92 aa, Zea mays
  unsure (1)..(92): unsure at all Xaa locations
  Clone ID: MRT4577_38454C.1.pep
STFSPEPATMXGFKFGDKIRYYPQTDLGTTETIAFRGTVIGKTRSAPGEAAFFSRGPNYRSPGILKPVRQCPGVNIXLSAWTGTASDTELEI

SEQ ID NO: 301952 - protein, 144 aa, Zea mays
  unsure (1)..(144): unsure at all Xaa locations
  Clone ID: MRT4577_38455C.1.pep
MKMTSGPPEAAGMGGGGLFFGGGATVTGQALVPAVIIFGNSGVDPGNNNRLATLGRPNFPPYGRNFPGTHAPTGRFXNGKLATDYTGESLGLTSYPPXYLSEEAQSNNKSLLHGANFGSGAAGYLNATAALYGAMXLTRQGGNF

SEQ ID NO: 301953 - protein, 80 aa, Zea mays
  Clone ID: MRT4577_38456C.1.pep
AKLQASLGDSSKTMVKDDLLESGPDGGEAVDQGLHGPSPGTADRRAVAGGLGAAPRRDRRAHSPLPCLAPPAAPGPDTST

SEQ ID NO: 301954 - protein, 54 aa, Zea mays
  Clone ID: MRT4577_38457C.1.pep
PSFTSLVIYQVFIETRCHGMCTWSHKIAPSWIMVYETRPLFLPISPRVSQGSSQ

SEQ ID NO: 301955 - protein, 236 aa, Zea mays
  unsure (1)..(236): unsure at all Xaa locations
  Clone ID: MRT4577_38458C.1.pep
MNRTVHAWRGREEDVRLRANKLSESQPIGTEEHGTHDKDYKEPPPVPLFEAGELKDCAFYRDDIGELVATFLFLYISILTXMGVSKSTSKXSTGGIXGIDWPFDEMIFALXYCTAGISGGHINPAVTVRLXLSRKLSLTREVFYIIMQCLGASCGAGVAKGFQQELXWXNGGGANXVVEPGYTKGDGLXAEIVGTFILVYTVFSAYDAKRNDRDSHVTILAXFPSGFAVFLVHLYT

SEQ ID NO: 301956 - protein, 60 aa, Zea mays
  Clone ID: MRT4577_38459C.1.pep
QCNRSLVTILDLLDLHTHAIRLVPRFHTCAPPIKDTNITKGHIYSMGICPCIFLALESLT

SEQ ID NO: 301957 - protein, 66 aa, Zea mays
  Clone ID: MRT4577_3845C.1.pep
HIPNHRRHRIATQGLPGFLHQSISRHQRQQYIDLSILPPPSSAWPSDLLHPSSSTSYSSQPLVNDV

SEQ ID NO: 301958 - protein, 107 aa, Zea mays
  unsure (1)..(107): unsure at all Xaa locations
  Clone ID: MRT4577_38460C.1.pep
MXQINRDECIFFVMPPNQYTTRCEEKLTITQAAILRXAGPTFYCPRXNFFHDNSSITSFXHSVIMAPSSNSRLVVPPVYTPLEHLCNXTLLNTSYDLIPFTSPSTIS

SEQ ID NO: 301959 - protein, 77 aa, Zea mays
  Clone ID: MRT4577_38461C.1.pep
KWWGHGFCTHDEVWPSSLVLLCCRAIIRCRWSHHQLRFMCCCIFHAILFDNFALCVLKLNLSCLKKKKQYNMCIEKL

SEQ ID NO: 301960 - protein, 125 aa, Zea mays
  unsure (1)..(125): unsure at all Xaa locations
  Clone ID: MRT4577_38462C.1.pep
AIGYLEAGRAQGGRSGFFNSXSCRISAGEFCGEELLTWALDPRPAAKLPLSTRTVRAVSESEVEAFALMADDLRFVASQFRHLHSARIRHSXRFRFYSDQWRMWAACFIQAAWPLQENVEGASVI

SEQ ID NO: 301961 - protein, 97 aa, Zea mays
  Clone ID: MRT4577_38463C.1.pep
ADAWANKGGLVHPRTSVEDLDELSTLLQVPMVAGTVNRGSEVVSAGMAVNDWTAFCGADTTATEVSVIESVFRLRDPRPVALGSDVKDYTVQDFFTS

SEQ ID NO: 301962 - protein, 46 aa, Zea mays
  Clone ID: MRT4577_38464C.1.pep
PSTITSCQGANDVVLIHRGRRPLTAGRSQLSDSWSGAWRWRHRLEA

SEQ ID NO: 301963 - protein, 98 aa, Zea mays
  Clone ID: MRT4577_38465C.1.pep
MTRGAFSGAHARSKLNGGTTSKNLMAERRRRKRLNDRLSMLRSIVPKITKMDRTSILGDTIDYVNELTERIKPFEGEIGATPGGSEPAHHEEFLQRVQ

SEQ ID NO: 301964 - protein, 255 aa, Zea mays
  Clone ID: MRT4577_38466C.1.pep
MAGATVTVEEVRKAQRATGPATVLAIGTVLRVAKDLAENNRGARVLVVCSEITAVTFRGPSESHLDSLVGQALFGDGAAAVVVGADPDDRVERPLFQLVSAAQTILPDSEGAIDGHLREVGLTFHLLKDVPGLISKNIGRALDDAFKPLGISDWNSIFWVAHPGGPAILDQVEAKVGLDKARMRATRHVLSEYGNMSSACVLFILDEMRKRSAEDGQATTGEGLDWGVLFGFGPGLTVETVVLHSVPITTGAATA

SEQ ID NO: 301965 - protein, 243 aa, Zea mays
  Clone ID: MRT4577_38467C.1.pep
MAGATVTVEEVRKAQRATGPATVLAIGTATPANCVYQADYPDYYFRITKSEHLTDLKEKFKRMCDKSMIRKRYMHLTEEFLAENPSMCAYMAPSLDARQDVVVVEVPKLGKAAAQKAIKEWGQPKSRITHLVFCTTSGVDMPGADYQLTKALGLRPSVNRLMMYQQGCFAGGTVLRVAKDLAESARDSPSRPSCSTASPSPPERPPPDSSSTIQFVVVSFVIILRRPSANNNVLSAIIVVCSK

SEQ ID NO: 301966 - protein, 58 aa, Zea mays
  unsure (1)..(58): unsure at all Xaa locations
  Clone ID: MRT4577_38468C.1.pep
FHVRFLYCDRDTQGTCEASTGLHKAFNRLNVYIKTPDTAEXINSIRELIVNSISVNAT

SEQ ID NO: 301967 - protein, 220 aa, Zea mays
  unsure (1)..(220): unsure at all Xaa locations
  Clone ID: MRT4577_38469C.1.pep
MAGATVTVEEVVCSEITAVTFRGPSESHLDSLVGQALFGDGAAPXXVVGADPDDRVERPLFQLVSAAQTILPDSEGAIDGHLREVGLTFHLLKDVPGLISKNIGRALDDAFKPLGISDWNSIFWVARSGGPAILDQVEAKVGLDKARMRATPPRLSEYGNMSSACVLFILDEMRKRSAEDGQATTGEGLDWGVLFGFGPGLTVETVVLHSVPITTGAATA

SEQ ID NO: 301968 - protein, 498 aa, Zea mays
  Clone ID: MRT4577_3846C.1.pep
MEEEKQQMEPPAPALVREAGAEPRAPRQTQQQPNTAVQVQPSMPVLRPWPMEITLSMKPVVEMKSGTPAKKKKHCNCKNSQCLKLYCECFAAGDYCDGCNCKQCGNTVENEKGRQEAINNTKLRNPNAFQPKIENGPIPSSVWKDAGALPSHPKHNKGCHCKKSGCLKKYCECFQANILCSKNCKCMDCKNYEGSEELRSTTQGDNSCDRNNIQQAANVALNGAIGSSGYRFSPVRRKRPPEDPHCQTLNVEGSMMQTQFRETNNVDVSQMTSSTGRDGSTVNFQGTSKLVYRSPLANTIHITDVNDLANHLVIACRKAAERFTTIVDNKVEMETDKEICTNTDQKFDENKKGVQKAALSQLGKVTDIDQQIVDDSRLHCSDTQDDARPASPGTQALLCDEQDLTFGTVHRSSIPVAMHDQVISELHAAQESAVLKELRNNLRLIIARGKLNEGKSASGTRMELDALRHHESSTSLAPVRAEEKSNTTDGPEITHELK

SEQ ID NO: 301969 - protein, 131 aa, Zea mays
  Clone ID: MRT4577_38470C.1.pep
LPALPRRRRQATPAAPMLHPVHRLPATPSRPAVHPHVSPAPPSLHLRRVAGTRPTTPVVCCSGFVGSLPVANQGSEFEPRSRSIYGGRGSVAIDPRFMASKNSTRGRGKHLASPSASLNHAPSPRFRHRRG

SEQ ID NO: 301970 - protein, 126 aa, Zea mays
  unsure (1)..(126): unsure at all Xaa locations
  Clone ID: MRT4577_38471C.1.pep
KKNLKTKILILIARFAGFFDLAPPCALCSRLGIGSLFGTHRXLVDAGDMCEDCVAAAAPEKVLLSSMGWCDLDERDLACACCSVALESGFYWSSHARHGSDCGHKQEEKAPRPNGRRPRAELDPGY

SEQ ID NO: 301971 - protein, 400 aa, Zea mays
  Clone ID: MRT4577_38472C.1.pep
MAGATVTVEEVRKAQRATGPATVLAIGTATPANCVYQADYPDYYFRITKSEHLTDLKEKFKRMCDKSMIRKRYMHLTEEFLAENPSMCAYMAPSLDARQDVVVVEVPKLGKAAAQKAIKEWGQPKSRITHLVFCTTSGVDMPGADYQLTKALGLRPSVNRLMMYQQGCFAGGTVLRVAKDLAENNRGARVLVVCSEITAVTFRGPSESHLDSLVGQALFGDGAAAVVVGADPDDRVERPLFQLVSAAQTILPDSEGAIDGHLREVGLTFHLLKDVPGLISKNIGRALDDAFKPLGISDWNSIFWVAHPGGPAILDQVEAKVGLDKARMRATRHVLSEYGNMSSACVLFILDEMRKRSAEDGQATTGEGLDWGVLFGFGPGLTVETVVLHSVPITTGAATA

SEQ ID NO: 301972 - protein, 89 aa, Zea mays
  Clone ID: MRT4577_38473C.1.pep
DDKEKPLEELHIVVDAGNGAGGFFVGGVLKPWGAVTTGNQFLEPYGLFTNHITNLMDKTSVKFIAQAVFGNIADLGILLDTVDFSLSCF

SEQ ID NO: 301973 - protein, 401 aa, Zea mays
  unsure (1)..(401): unsure at all Xaa locations
  Clone ID: MRT4577_38474C.1.pep
MAGATVTVEEVRKAQRATGPATVLAIXTATPANWYLEAGRPGYYLXTPSARHXTPLXDFVDLTGDKSMIRKRYMHLTEEFLAENPSMCAYMAPSLDARQDVVVVEAPKLGKAAAQKAIKEWGQPKSRITHLVFCTTSGVDMPGADYQLTKALGLRPSVNRLMMYQQGCFAGGTVLRVAKDLAENNRGARVLVVCSEITAVTFRGPSESHLDSLVGQALFGDGAAVVVVGADPDDRVERPLFQLVSAAQTILPDSEGAIDGHLXREVGLTFHLLKDVPGLISKNIGRALDDAFKPLGISDWNSIFWVAHPGGPAILDQVEAKVGLDKARMRATRHVLSEYGNMSSACVLFILDEMRKRSAEDGQATTGEGLDWGVLFGFGPGLTVETVVLHSVPITTGAATA

SEQ ID NO: 301974 - protein, 120 aa, Zea mays
  Clone ID: MRT4577_38475C.1.pep
IPHTKPSHSTSHHPTKFPAKFNLKTFWPINSSLPTNTSIISSSFLFYLNHISFLLLYFSPYKHIIPYLNLHNHIPFQNTTLKTSIYYNYSFFYKFINYFINISSSIHTSFPNFILLLFYP

SEQ ID NO: 301975 - protein, 55 aa, Zea mays
  Clone ID: MRT4577_38476C.1.pep
SKVYLELTCDLSQQALEGQPSDQKLVPSMPTYGSPPAPRLRECAVAIFSGGLTSV

SEQ ID NO: 301976 - protein, 110 aa, Zea mays
  Clone ID: MRT4577_38477C.1.pep
GGGAGDPNMAKTKNHHHPKLIIINIKTKGKNTQKGGSFSDFLVYFPLTYACILFYSSPKIKSTCRFLTTFLLENPWHNPTYSLLNPLPFHPLVYNQNRSPPIPLPTIFPP

SEQ ID NO: 301977 - protein, 61 aa, Zea mays
  Clone ID: MRT4577_38478C.1.pep
TVQPFFFVYPFFFLNLVLPPVFFISLPPYFFPSRGFKVVKKPELRFGIFLCYWPFDFISRF

SEQ ID NO: 301978 - protein, 120 aa, Zea mays
  unsure (1)..(120): unsure at all Xaa locations
  Clone ID: MRT4577_38479C.1.pep
HACVGSEFGSRPNNARTFLLSPFTALLRGGXLDGKRGEPTLLFHKMTESSLVPNEVTFNATKKGIAVXGNIRKAFQPSEQMLDRGLTPDNNTYRSLISVVGWTLCTMNATEFVVDLENNW

SEQ ID NO: 301979 - protein, 43 aa, Zea mays
  Clone ID: MRT4577_3847C.1.pep
IEGAIRLHDRRQHAQQWAEERNQLRSYMTMDYAPWHRRVPKHN

SEQ ID NO: 301980 - protein, 68 aa, Zea mays
  Clone ID: MRT4577_38480C.1.pep
IQLTGRRFQLRAWETPAVPHLNGLVYHSPFCQWAYNQKGLNLSPFLTIVLPDWQLEPPLYWPIIPCRF

SEQ ID NO: 301981 - protein, 385 aa, Zea mays
  unsure (1)..(385): unsure at all Xaa locations
  Clone ID: MRT4577_38481C.1.pep
ASPEACDVSSGKVEDAKTRNEGIKKVRRGEDACNTLKSFKDGEKPHESIFKSLTPVCTPRHANTVPPLAVASPRGQKKKSAVVRLSFKRQSFDGEXXTEICSSRRYLIRPRAGLLVPQAGEKISEGCWSVLEPSAFKLRGESFFKDKKKSPAPACSPYTSFGVDIFMSPRKIHHIAQHIELPSVKPNDKIPSLLIVNIQMPTYPAAMFLGDSDGEGINLVLYFKLNDNFEKEISPQFHDSIKRLVSDETEKVKGFPLDSTVPFRERLKILAGLVNPDDMNLSSAERKLVQAYNEKPVLSRPQHNFYVGSNYLEIDLDVHRFSFISRKGLEAFRERLKHGMIDLGLTIQAQKQEELPEHVLCCVRLNKIDFVDNGQIPTLLPCDDD

SEQ ID NO: 301982 - protein, 146 aa, Zea mays
  Clone ID: MRT4577_38482C.1.pep
IASVRYLSPAAGAASLRPHYRDDFLFQFQYSDLLLAPAHPSLYQDVADHLVLGASFPAAGDNRSSSEESDAYLQRSLAEERRKRRMVSNRESARRSRVRKQKQLSELWAQVVHLRGTNRQLLDQLKCSTVSRRIRSQPTRPLVLDR

SEQ ID NO: 301983 - protein, 317 aa, Zea mays
  unsure (1)..(317): unsure at all Xaa locations
  Clone ID: MRT4577_38483C.1.pep
MAWIFHRTVGRHSDVDGAGDDEQVLLLITARCLLGKEVRERMLDKVDEVREKITDLTSLLFLYTPTPVLRQCDSVRAALASIFAEVIRSRRRSSXSEPETTTCXSLMEARYRDGRDTTEPEVMGLVVAIIFSGKHTSSATSTWTGAQLLRHAECMEAALDEQWRVVAEHVDEAGLVGGSGGGFVPVVGDLRIGSVITIEESAPVVGGDGLLVAQLIGVVAAVEEVDRCVGLDSRTPRLQRADASYRSSLHGVDLEASISARKDGIDTTTTDVSKAWVGAAWRATSNSSEAQRASCAESRSQISRRSCEANDRLGPTN

SEQ ID NO: 301984 - protein, 506 aa, Zea mays
  Clone ID: MRT4577_38484C.1.pep
MVSGQKGTGFSVPVAVVTPLSAPAEERCARRETREGEGRRRGGVVVKSMPPPSPLLRSSAFVVLLLLVCRPLLVANGRATPPSPGWPPAAQPALQPAPTASGGVASVLPSAVAPPPLGVVVAERHHHLSRELVAAIILSSVASVVIPIAALYAFLLWRRSRRALVDSKDTQSIDTARIAFAPMLNSFGSYKTTKKSAAAMMDYTSLEAATENFSESNVLGFGGFGSVYKANFDGRFAAAVKRLDGGAHDCKKEFENELDLLGKIRHPNIVSLVGFCIHEENRFVVYELMESGSLDSQLHGPSHGSALSWHIRMKIALDTARGLEYLHEHCNPPVIHRDLKSSNILLDSDFSAKISDFGLAVTSGNHSKGNLKLSGTMGYVAPEYLLDGKLTEKSDVYAFGVVLLELLLGRKPVEKMAQSQCRSIVTWAMPQLTDRSKLPNIIDPMIKNTMDLKHLYQVAAVAVLCVQPEPSYRPLITDVLHSLVPLVPTELGGTLRIGPESPYLRY

SEQ ID NO: 301985 - protein, 205 aa, Zea mays
  Clone ID: MRT4577_38485C.1.pep
IKKLAEKRQRIITVIDAIEETPSPASASKTPAAKDTAATEAAPAEGVTAEAETAEDTNLEGTFSDIDKMILNMAAEEAATAAEETLAPAPGKEEIAEDTSEEKYFNFQDILGQKLSKAEKEELRDYAISCGYQPGALLFGGFAEESLGCLRDQVGAKVVSTLSKSVGFLKLEADLSRYQRQHIADILFYSNFKVKFLPYLFIVFD

SEQ ID NO: 301986 - protein, 77 aa, Zea mays
  Clone ID: MRT4577_38486C.1.pep
SNLGYIMLNESTCHLENILYEIQHEGVKGSLLNAWSDTDDAACFITTCILDFLQNVFHIAGAFIQHDQTLVTSRNSS

SEQ ID NO: 301987 - protein, 56 aa, Zea mays
  Clone ID: MRT4577_38487C.1.pep
ASMAFALAGAFKGLSLAPTTTTSSFPRCDRASLSVGGARSVPVTVPARRLTIQMAH

SEQ ID NO: 301988 - protein, 40 aa, Zea mays
  Clone ID: MRT4577_38488C.1.pep
KYSPGLKKKKKKKKKKKKKKKKKKKKKKKKKKKKKKKKKK

SEQ ID NO: 301989 - protein, 68 aa, Zea mays
  Clone ID: MRT4577_38489C.1.pep
RRTSYSSIMSINNVMVVVSSTCTYSKDHKHEKYLDFHCHCWDAPVLSMLRVGNNSSRIPSLGRVHQGH

SEQ ID NO: 301990 - protein, 123 aa, Zea mays
  Clone ID: MRT4577_3848C.1.pep
SCNSISSSSYHVLDLCKTNKGSWSGSESSASKRSLPFLAQDFESDIDTRLLKLVNKIASGSCGDMFLGTYSGEEVAVKVLNPQNLNKNVWSEFKQEINMLREVDHPNIVRFIGSCTKAPQFYI

SEQ ID NO: 301991 - protein, 50 aa, Zea mays
  Clone ID: MRT4577_38490C.1.pep
LFFVTIVQYSKKNSTSGGQTTKHNKKIVAKQNATSSKRQTFFLSSSDRFT

SEQ ID NO: 301992 - protein, 115 aa, Zea mays
  unsure (1)..(115): unsure at all Xaa locations
  Clone ID: MRT4577_38491C.1.pep
RTIKLLPALKXVYPYNVHLRLRNHXASGLNSLFVLPIACIERMGEQDAICTSHHVNRLFTWPSLPALIQKKIISMHGGITRSINHIKXIXNLYRPFTIKSCSLVLIELIWTDPTE

SEQ ID NO: 301993 - protein, 60 aa, Zea mays
  Clone ID: MRT4577_38492C.1.pep
SSIISSIIGCIGSIYLSVSLILVVGSLCVTVHYGIDLCTGLAIPSCTVVSVSSTPRSLKR

SEQ ID NO: 301994 - protein, 174 aa, Zea mays
  unsure (1)..(174): unsure at all Xaa locations
  Clone ID: MRT4577_38493C.1.pep
MYVCMYVCICCFPRKNISENMRLSLGLGQTCRIWGPVLFGGPGSXLGSFLLARLGAQFGPIFNHVLTVSSSPQVLTXSSTEPYNXVLSTHSLLEHTDLSILLDNEAIYDICWRSLDIERPNYSNFNHLQPHLISYMTASLRPDAALNGDVNELQTNLVPYPXIHFMLSSYTPVI

SEQ ID NO: 301995 - protein, 54 aa, Zea mays
  Clone ID: MRT4577_38494C.1.pep
QTYYSSNSVLQRLKASQTAHQTRGIHAACTPTTGSPSPSTPPNSPKPNFLAATA

SEQ ID NO: 301996 - protein, 136 aa, Zea mays
  Clone ID: MRT4577_38495C.1.pep
VSRGRPGSYPARRPVSASHISRAARDLNAPVAPCPCASTAPSRRDPADGTPGGKGGAVTAAPACGGGGRDALCDGGHGEGSLCSVPGTSLRRLRRSAHEAAGHERGRSQGAIITTLCKRFRIVCGNLGCVLARFNG

SEQ ID NO: 301997 - protein, 64 aa, Zea mays
  unsure (1)..(64): unsure at all Xaa locations
  Clone ID: MRT4577_38496C.1.pep
SILPQSPSNPSTSTCQTIAQQXTPASRTGTQGGGTMMRPAVALARHFSEGALVPHATAACVSRP

SEQ ID NO: 301998 - protein, 153 aa, Zea mays
  Clone ID: MRT4577_38497C.1.pep
MASKQQQKQFLDEAMIKQPTPEEDREGAWPSVLTIIGFGFLTFNSFMAVYRSNGDVGSISFVVFSYLVLVLLFYCLRRFETTPPESPSREHIKMAVWVLTTMLTAAFSYKVAAIMPLPVQVLVWAMAGATVFGGFYAFFIHQEKTAQLEPPKP

SEQ ID NO: 301999 - protein, 111 aa, Zea mays
  Clone ID: MRT4577_38498C.1.pep
MAAKGATEMEVGGDGVAVITICNPPVNSLSIDVLLSLKESYEEALQRKDVKAIVVTGKGGKFSGGFDISSFGDLHSGKIEQPKVGYISIDILTELLEGATKPSVAAIDGLC

SEQ ID NO: 302000 - protein, 55 aa, Zea mays
  Clone ID: MRT4577_38499C.1.pep
VRYMTWLGNESLASFIGASNAYALLSLLEWLFDRIAMVASTKWDAAPGRGVGVLL

SEQ ID NO: 302001 - protein, 406 aa, Zea mays
  Clone ID: MRT4577_3849C.1.pep
MMDLRKSRPLHSDKLKPGSLHMKDEVIQLYLNNSAAVAAPREVCLLGALRCHGIGMIVGALGVSKEQLKDALLEGNVHGLGVEALQMLTQMVLSNEEELKIKYFKDDSLNRLCPVDVFLKAMLDVPFVFKRVDAMLYIASFYLEINRLRMSYATLEGACQEMRSSRLFHKVLEAVVNFGNFMSTNSGSPSSKGLEPNTVLKIADVKGADGKAALMQFIVQEIVKPEGYDVMQHGSGACKMSTNTLQCDAECRKHGLEVVAKLAAQLSNTKKAASIDIKRLSQSVSELGMGLGKVHDVVRLNSMVTSVDSARRFHNSMSTFLRHAEEEILKLQSQESICLSSVKEMAEWFIGESVNDEAHMFRIFAGVKEFLAMLDHICKEAGEVSSNNWVGATTASWMAAPMGMMP

SEQ ID NO: 302002 - protein, 80 aa, Zea mays
  Clone ID: MRT4577_384C.1.pep
MADQWGDSANKGSIKKVTKGLNQGMGVLFGVEGFLLIFFGGNYALIVFAQKTLPPKKKNPFLKKNFKKEKLKQGFFALED

SEQ ID NO: 302003 - protein, 59 aa, Zea mays
  Clone ID: MRT4577_38500C.1.pep
LQIIIIICAIDGLPSQMECSCCVYIYIFFVQSLVIAEKKSSGKCMPSRRSVSSEYATLI

SEQ ID NO: 302004 - protein, 299 aa, Zea mays
  Clone ID: MRT4577_38501C.1.pep
MARPRPHGRIVHVAFAFAFASAVLLPPAAEGVQEGDVLVAFRDTLRGLDGAPPGPLRNWGTPGPCRGNSSSWYGVSCHGNGSVQGLQLERLGLSGGAPDLSVLAVLPGLRALSLSDNALTGAFPNVSALAVLKMLYLSRNRLSGAIPEGTFRPMRGLRKLHLSSNEFSGPVPESITSPRLLELSLANNHFEGPLPDFSQPELRFVDVSNNNLSGPIPVGLSRFNASMFAGNKLLCGKPLEVECDSSGSPRTGMSTMMKIAIALIILGVLLCVAGITTGALGSRKRKPRRAASLGLQAFS

SEQ ID NO: 302005 - protein, 60 aa, Zea mays
  Clone ID: MRT4577_38502C.1.pep
WCIMNRHQRSNRSRIHSSRRFKVILSQQPLVINSHGFSVSKYKSQHISSLQWPAMLCSKR

SEQ ID NO: 302006 - protein, 101 aa, Zea mays
  Clone ID: MRT4577_38503C.1.pep
FVRTSLYQKWVMCESCPSDNGVEPYSVLHGVLRRTITTFDSRHGGRRVAIAVGHESANICGLLWPRRRGAQHTKECSDVKRKPPRVHAGSTRTRGSSREFG

SEQ ID NO: 302007 - protein, 153 aa, Zea mays
  Clone ID: MRT4577_38504C.1.pep
KYRRFSSWSPCASRSRSRGKRTRNRAQAGRTTTARRVSGTGRAPGRSCSRGGRGSRGEGGDSGSSSSSKWEIKPSSLTDKKPTHSNSHGRHYEITGDECPHLRLLDMDVGLANIARGSMMAPSYNTRANKIAIVLKGQGYFEMACPHVSGGRS

SEQ ID NO: 302008 - protein, 93 aa, Zea mays
  Clone ID: MRT4577_38505C.1.pep
AAHVPAAQPLRRRRGDVREGRRGRHRAAPRREEEQIRELSRSCSRGGRGSRGEGGDSGSSSSSKWEIKPSSLTDKKPTHSNSHGRHYEITGDE

SEQ ID NO: 302009 - protein, 111 aa, Zea mays
  Clone ID: MRT4577_38507C.1.pep
SMWMFETINLHGDVTSASPRMSYLTEQSSSQCFTAKIAIVSNSPSNYVPVVDLFGAGNLSLDLLEFSATGSFFNGLYAKESRSITDCWQMLLASLRVLEICPFDGSDWTSK

SEQ ID NO: 302010 - protein, 99 aa, Zea mays
  unsure (1)..(99): unsure at all Xaa locations
  Clone ID: MRT4577_38508C.1.pep
AVGNYRVAELEAAPRTFLCFSLALAXQTDTESGSGRPYHYGEESFRHWTRSRQGRFRVLERFTHELLEVMFVKEGEGVIVLLRGGKTESFCVREGDVMV

SEQ ID NO: 302011 - protein, 88 aa, Zea mays
  Clone ID: MRT4577_38509C.1.pep
APSRTHRTLAGGVNKCSSGPSKLTLLVVLFLLSRAPLANQPPNTARNGPCTYLLRTLHGLSEQYPHAPNATVHLCRGLLRPLLCRYNA

SEQ ID NO: 302012 - protein, 234 aa, Zea mays
  unsure (1)..(234): unsure at all Xaa locations
  Clone ID: MRT4577_3850C.1.pep
MASSFLSLRLPTPSPPTATSSPFFPNPLVRSGRCSPLSSTLVARVAGPAAGAPSPLFNPRGDPFLSTLAAASPEQLAAXRVANAXEDHLPFLEIFQNAKLMSSPAQVERSSSSYSQHSPRRPPPDLPSLLLHGRIVYIGMPLVPAVTELIVAQLMYLDWMNSSEPAYIYINSTGTARDDGEPVGMETEGFAIYDAMMRMKTEVHTLCIGAAAGHACLVLAAXKEGKRYMFPHAK

SEQ ID NO: 302013 - protein, 451 aa, Zea mays
  Clone ID: MRT4577_38510C.1.pep
MKVPVLLLLVSLCFSLALAWQTDTESGSGRPYHYGEESFRHWTRSRQGRFRVLERFTHELLEDAVGNYRVAELEAAPRTFLQPSHYDADEVMFVKEGEGVIVLLRGGKRESFCVREGDVMVIPAGAVVYSANTHQSEWFRVVMLLSPVVSTSGRFEEFFPIGGESPESFLSVFSDDVIQASFNTRREEWEKVFEKQSKGEITTASEEQIRELSRSCSRGGRGSRGEGGDSGSSSSSKWEIKPSSLTDKKPTHSNSHGRHYEITGDECPHLRLLDMDVGLANIARGSMMAPSYNTRANKIAIVLKGQGYFEMACPHVSGGRSSPRRERGHGREEEEEREEEQGGGGGQKARSYRQVKSRIREGSVIVIPAGHPTALVAGEDKNLAVLCFEVNASFDDKVFLAGTNSALQKMDRPAKLLAFGADEEQQVDRVIGAQKDAVFLRGPQSHRVSSV

SEQ ID NO: 302014 - protein, 262 aa, Zea mays
  Clone ID: MRT4577_38511C.1.pep
MPRGGKPAASSKPNPFDSDSDSESSNKPANKSGASSYQAPADAKKRYKDGFRDSGGLENQSVQELEHYAAYKAEETTDALAGCLRIAEDIRQDASDTLITLHKQGEQISRTHEKAVEIDQDLAKSETLLGSLGGFFSKTWKPKKTRQIKGPAQVSRDDSFKKKASRMEQRDKLGLSPRGKRDPRHYAEATDAMDKVQIEKKKQDDALDDLSGVLGQLKGMAVDMGSELDRQNEALDHLQGDVEELNSRVKGANQRARKLVAK

SEQ ID NO: 302015 - protein, 453 aa, Zea mays
  unsure (1)..(453): unsure at all Xaa locations
  Clone ID: MRT4577_38512C.1.pep
MKVPVLLLLVSLCFSLALAWQTDTDSGSGRPYHYGEESFRHWTRSRQGRFRVLERFTHELLEDAVGNYRVAELEAAPRAFLQPSHYDADEVMFVKEGEGVIVLLSGGKRESFCVREGDVMVIPAGAVVYSANTHQSEWFRVVMLLSPVVSTSGRFEEFFPIGGESPESFLSVFSDDVIQASFNTRREEWEKVFEKQSKGEITTXASEEQIRELSRSCSRGGRSSRSEGGDSGSSSSKWEIKPSSLTDKKPTHSNSHGRHYEITGDECPHLRLLDMDVGLANIARGSMMAPSYNTRANKIAIVLKGQGYFEMACPHVSGGRSSPRRERGHGXREEEEEREEEQGGGGGQKSRSYRQVKSRIREGSVIVIPAGHPTALVAGEDKNLAVLCFEVNASFDDKVFLAGTNSALQKMDRPAKLLAFGADEEQQVDRVIGAQKDAVFLXRGPQSHRVSSV

SEQ ID NO: 302016 - protein, 133 aa, Zea mays
  Clone ID: MRT4577_38513C.1.pep
IYLLAGHNIFPFDSSSRFMTRRCSLCYGPLKRGGVHRAIARQVAADVGHPLSMRCPLVYGGGGDRSPSFRERSGLDRREESNSCTRHRRRTRTGRRAPCLTLDFLECGSALGGGAVRTVVPHSTIISSRPASR

SEQ ID NO: 302017 - protein, 560 aa, Zea mays
  unsure (1)..(560): unsure at all Xaa locations
  Clone ID: MRT4577_38514C.1.pep
MPPKVVAVAAGEAHTLALTGDGQVYSWGRGPFGRLGNGREDDKLVPTAVAPAVSASGTPRPRFVAVAAGAYHSLALDDEGSLWSWGYNLYGQLGYGDQNSLFPCFVEQFQDLGSPETLNDEDQNTRGRTCLKLSSVTAGGMMSLAIDSLGSLWMWGSCPQQTDAGEFCISSSSIPLPVWDFHGHTVVKVACGNEHVVAAVSAGETYTGGDLVCYAWGNNNHGQLGLGDKESRSRPVLISAFSEGSSWEVYEIACGASHTAVLANKKSTDQIESRCWTFGLGDKGQLGHGTTATICSPQPVDGLPTGSFLISLDCGLFHTTVVSSDGEVWCWGMERGLGLCPDASFSGVDEGDALYPIRVQSPETNGFKFLGPVQIACGAAHTVLVAGDGYRMWAWGRGRSGVLGRGQTADSYIPCVVMWPPLDENFHEDQMGGSTSRVNDHTSTELEQKLSAASEELQFLRSKLTLMERYANILHISIFRKPLDERALPRSLQESSVFDIRKEFENILDAADTDELNRLEIFYRSMLSGVKDKLLKRRVREMVQQCIISLSXGRPNPKDK

SEQ ID NO: 302018 - protein, 177 aa, Zea mays
  Clone ID: MRT4577_38515C.1.pep
HWVPRGRPGSSRRSCLQPPLLPCIAWPHARTAPLQRRIELTAQRLMLGCSPAPAQLPFSPLQRNACSPAASAALLRARGSRLATGQAQATPLQAALPGTAQPHRRLAAQPGTQRSALDGSSPYLDRRWACRRATILSSFLILQFLYRQLVVFFVLSFMGREPYNQDLLSLVCTSIFV

SEQ ID NO: 302019 - protein, 68 aa, Zea mays
  unsure (1)..(68): unsure at all Xaa locations
  Clone ID: MRT4577_38516C.1.pep
YNPPIIHFLLPHFNIIIHSYITSFHYKTLYTYKIGTSALTNYTFTIPYTRXNVSVVLHVLLLCCNARM

SEQ ID NO: 302020 - protein, 147 aa, Zea mays
  Clone ID: MRT4577_38517C.1.pep
ERAGSNRVVTGLFLYRSGWPSPFMSDISSLLLLVGCEFPSILFPLAACIVFAFHSWSVYFVRVALGAKHVSCPVCYRTLFVQVRSVRALVYFPVLSEQRVFVPFSTVFLVIYIHAAPFRFMRSCVGEETEIELYRSLKWFLLVAEAN

SEQ ID NO: 302021 - protein, 99 aa, Zea mays
  Clone ID: MRT4577_38518C.1.pep
KPQTILGVYVPKKNFKPPDSPFHWGTRGGPPHSGSGEFLEQKFVAHWSPLVLFLPLFPFPPGNFLPPFFKPNPKLRGGKTYFWEKKKKKKVKIMAPFVF

SEQ ID NO: 302022 - protein, 139 aa, Zea mays
  Clone ID: MRT4577_38519C.1.pep
TPTFFPVPPSHADVVPPPACLDVAARSISVSSFFFPLGVLFNFPGPTIDSLCTTTPIIMHWLLWNPGRRGGWWLMFCPRVSTPPPMYFFRPTFWFYKKRICVHFRALFLWPLNKKKKKKKKKKKKKKKKKRKKKKKKRP

SEQ ID NO: 302023 - protein, 347 aa, Zea mays
  Clone ID: MRT4577_3851C.1.pep
MQQHSQPPPPPPGRLVPSRRLLSQAKTSLSLSSQILLRNPPLRSVMQAFARLSSAASRKVIAGVSSATTRSCYRTSRGLAHAASLPAQEPPPKGQKRITKQERRTRIMEFIENYRASNDGKFPTIKNIRQQVGGSHYTAREIIQEMEYNNAKLPLSNAKAAPLQGTVEVIEHSMPKDEAIVVESHGILEVSEHSMTKDGDEAAQIQGTIEVSEHSFPKDECKLAQCQGPFRFPEHSRPKDDSGNVAKHDMDTPETCKTADFPALSDQTESEIMEDLTDKPDPGNQQREIEAIKFNLKHYEKPLNANDSNAKTHAREDNPKLEESANTGLLGSLKSFAYGIRNFWKNL

SEQ ID NO: 302024 - protein, 87 aa, Zea mays
  Clone ID: MRT4577_38520C.1.pep
EIGLFPPMLWVLLWGRTREKNKFSVGPKPMNGWMEHACPVIVCANESSICPDLFSLKKKMFFFLQRGAGDLVNLSNNHYMHQCFNLL

SEQ ID NO: 302025 - protein, 195 aa, Zea mays
  unsure (1)..(195): unsure at all Xaa locations
  Clone ID: MRT4577_38521C.1.pep
AGRSLGSDYVVARYRLPRPLALTATLLLAFFGHLLVAAGLRDGVYAASLIMGFCLGSLWTVLFAVVSEVFGLKHFSTLYNLSTLASPVGSYVLSVQVAGRMYDREAQRQGHRRQDELACVGXQCFRASFEIIAGVTLLGVAVSMVMAWRTRAFYHDRTRFLFSAAADTAATTDSSSSRQEDENKTIAASQSIGIC

SEQ ID NO: 302026 - protein, 53 aa, Zea mays
  Clone ID: MRT4577_38522C.1.pep
PLNMVTTLGQYGRKSEDCDGVRAKSSSVISRNHYIIYNNEMTKLCEEKNRRHC

SEQ ID NO: 302027 - protein, 90 aa, Zea mays
  Clone ID: MRT4577_38523C.1.pep
FLVKLLFPLLLPFGEPDGWAIVGIMMEFIIKFIKLSINYISNNLSANQHAVYSKVLSAVLGTCVIKSVTCTFPCLSCSLLSRRGPFWGHL

SEQ ID NO: 302028 - protein, 64 aa, Zea mays
  Clone ID: MRT4577_38524C.1.pep
RANNYFKKGGTHCWGLPHEWDMRDGLNQKQTGPYQTRKTIILLGCPQQRYYTTPIMVVIQNRTQ

SEQ ID NO: 302029 - protein, 46 aa, Zea mays
  Clone ID: MRT4577_38525C.1.pep
NPGPLRRGNLSLGRHNRLQGRVRRPAGAAGVGGGETTSLRACHASK

SEQ ID NO: 302030 - protein, 58 aa, Zea mays
  Clone ID: MRT4577_38526C.1.pep
PSLYSHLNLNKLAGDLKRMDWKNCGFTQLTHLAKDPHLASLRTSEQAGTHRDANSSAA

SEQ ID NO: 302031 - protein, 52 aa, Zea mays
  Clone ID: MRT4577_38527C.1.pep
DDNVCSYSKNLSVLMFIHPFSLKAVDARTSPSSDPALTRRVKFRLHPSLVRP

SEQ ID NO: 302032 - protein, 99 aa, Zea mays
  Clone ID: MRT4577_38528C.1.pep
ARRTGGWPPRWTPYSPTAPPRERCPRRRRPGALRWPPRSRRGPRSGRMCARAEPYDADTNHLRDCYQWRKYGQKVTRDNPHPRSYFRWAYAPSCPVKKK

SEQ ID NO: 302033 - protein, 55 aa, Zea mays
  Clone ID: MRT4577_38529C.1.pep
MSATGTDEAGAEERLQELKGRLGKKQHYEEAANKLAGGGRDRYLGASAGLRKGMH

SEQ ID NO: 302034 - protein, 63 aa, Zea mays
  Clone ID: MRT4577_3852C.1.pep
RSGRTPGRPRVRTGSSVSLCVTHTNNTYVWQGRGLLTEAGSPMAWAAPYRKGARRYDLGLERY

SEQ ID NO: 302035 - protein, 300 aa, Zea mays
  Clone ID: MRT4577_38530C.1.pep
MVDAGPPRSSQAHATVDADLPRSSTAPAMVDTARPQSSPLHAMVDANSPRSCTCDAMVDADLPRSSTCDAMVDVDLPQTSIAPWVLTPSSTTTWIPSAGTTHLISPFGTPEKNTVMSPLMYATHVPEVHESMKPFVGQIFERLQDAEEFYRRYAKEARFGVRIGPHTDLNGVRRWQRWLCSKQGYRSKKKVDSKPKRIQKISRCGCEAVLAVKLIEDNKFRVEIFVESHTHSLVSPDKVHLIRSNREVNEKAKRALVACHKGGIGTSGAYRSSPLLVVQFLTMLLYSHLMKSNLWVGANE

SEQ ID NO: 302036 - protein, 94 aa, Zea mays
  unsure (1)..(94): unsure at all Xaa locations
  Clone ID: MRT4577_38531C.1.pep
TSXPEXISRXEDKLCGSTNRXASDDAKINQEGLIGGADFGSSPTHGESTSDQQDDGNKSGQNHKDNGAWSRPGGGEPGGAGLGGERCLGGAGLG

SEQ ID NO: 302037 - protein, 293 aa, Zea mays
  Clone ID: MRT4577_38532C.1.pep
MAEEKVGRIFVGGLSWNTTERTLERTFGQYGKVIEAQVVVERETGRSRGFGFVTFSEPRAVDAAIRGMHNGELDGRNISVNKAEPRNSDGYGYGGGGGGGYSSGGRGGYRSGADVVPAASDDCFKCGRPGHWARECPYSDGSGRTGRYSPGSRYGGGTGGRGDRFGGSDRFARYDDDRYDGGRYVDSRDTYYGSGRDRYAPAAERYSGDRYSGADRYASSGFARERSYERDGGRSNGGYYRDEPRGTGGYGRGGSRGGGGGGPARFGGSYRDRPAPYDRPSRGGAARAYDDRY

SEQ ID NO: 302038 - protein, 159 aa, Zea mays
  unsure (1)..(159): unsure at all Xaa locations
  Clone ID: MRT4577_38533C.1.pep
MAEEKVGRIFVGGLSWNTTERTLERTFGQYGKVIEAQLLIQRLQSVQFLHVRKLAKLQEKKFTNHLSSLVVVERETGRSRGFGFVTFSEPRAVDAAIRGMHNGELDGRNISVNKAEPRNSDGYGYGGGGXXGGGGYSSGGXGGYSGADVVAASDDCKCG

SEQ ID NO: 302039 - protein, 99 aa, Zea mays
  Clone ID: MRT4577_38534C.1.pep
GRDRYAPAAERYSGDRYSGADRYASSGFARERSYERDGGRSNGGYYRTSSSGTGGYGRGGSRGGGGGGPARFGGSYRDRPAPYDRPSRGGAARAYDDRY

SEQ ID NO: 302040 - protein, 348 aa, Zea mays
  Clone ID: MRT4577_38535C.1.pep
SPSSSQTPPPTAAAAHRLPRRHRLSAVVAASTRRDGYRSRTTAPGRRGDGGVGSIWVNPSAPPRPGVASRTLRRLVELDNLDAALRLLLGGPSSTPATSDSAPEPPAVISCNILIKKLCARRRLADAERVLEALKVSGAADAVSHNTLVAGYCRDGSLGDAERVVEAARASGTANVVTYTALIDGYCRSGRLADALRLIASMPVAPDTYTYNTVLKGLRCAKQWEQAEELMREMIRNSCHPNEVTFATQIRAFCQNGLLDRAVELLEQMPKYGCTPDVIIYSTLVNGFSEHGRVDEALKLLNTMLCRPNTVCYNAALKGLCIAGRWEEVGELIAEMVRKDCPPNDATF

SEQ ID NO: 302041 - protein, 74 aa, Zea mays
  Clone ID: MRT4577_38536C.1.pep
HFVALFSVKEVLLYATKRPKRELTEISCPFLQAQNFRNLCRLIIILITRPMIDQITRPNSAFHRGRVLGCEQST

SEQ ID NO: 302042 - protein, 80 aa, Zea mays
  Clone ID: MRT4577_38537C.1.pep
MAPGDDSNPAASYIHTVQHLIERCMTFGMSMEECMEALAKRADVLPVVTSTVWKELEKENKEFFDKYQEWISEKRSAGTS

SEQ ID NO: 302043 - protein, 93 aa, Zea mays
  Clone ID: MRT4577_38538C.1.pep
DMNIRLSFVRTSVRREESEEYSVEAGDELTCHIAMLLETLVSARACLTNCAAGTCVHDQLQERHERMPVHHHHRGRKQVLSAHFRAYIQALEK

SEQ ID NO: 302044 - protein, 157 aa, Zea mays
  unsure (1)..(157): unsure at all Xaa locations
  Clone ID: MRT4577_38539C.1.pep
HXALXXSALGARRVSGAPSAVAPEAPSRRRRPGSAGHPAPPAVPDPVHLRSETCGADPRQITAAPPDSDERRRRPVDPGCSASVILANLAARPRIRRRRAPRLSSLFLPISLSTTAWRSPRFSSAVQGSALPFTTPASLFRQRAACPLLALWSERRL

SEQ ID NO: 302045 - protein, 212 aa, Zea mays
  unsure (1)..(212): unsure at all Xaa locations
  Clone ID: MRT4577_3853C.1.pep
MEEAAAAAAEVRYGIVGVGMMGREHLHNLAHLATEVEREQSVRVRVTGLADPHQESLRLGLQLAAELGLPPPQTFPGHRELLDSGLCDAIIVSSPNMTHYEILMDIIHHREPQHILVEKPLCTTVQDCKKVIEAAKQRPEIVVQVGLEYRYMPPVAKLIDIVKSGTLGQVRMVAIREHRFPFLVRXHWNRFXYSXGTLVEXCCHXLDLMILF

SEQ ID NO: 302046 - protein, 40 aa, Zea mays
  Clone ID: MRT4577_38540C.1.pep
IFTYICIFVNIFFFFILPKNKKKINVFFLDLSPIYNAWKV

SEQ ID NO: 302047 - protein, 90 aa, Zea mays
  Clone ID: MRT4577_38541C.1.pep
MILDMFRHFFKTASTKHSEQVTHCMEIIMMFVIQESDDVHAELASFLLQNLTKEAQETLPASFGLAERVLGLCRDKLKPVFHELLKATLL

SEQ ID NO: 302048 - protein, 88 aa, Zea mays
  Clone ID: MRT4577_38542C.1.pep
PSNQPPTSSLPWICALEPGDPSSPIFSSSIPPHAAAWISLFGCHLARSIWLARRPAGGGGERNGSVTMVLARLTQKLKPNLNGSCRRF

SEQ ID NO: 302049 - protein, 42 aa, Zea mays
  Clone ID: MRT4577_38543C.1.pep
YLSHYIPPHAKPNELFFPSTTIKINLGGGGPSPLRRPPYQPP

SEQ ID NO: 302050 - protein, 400 aa, Zea mays
  unsure (1)..(400): unsure at all Xaa locations
  Clone ID: MRT4577_38544C.1.pep
IEGVALDCEMCITEAGFELTRVTLIDIKGSVVLDRLVKPANPIIDYNTRFSGITAEMLADVSTSLHEIQEEFVGLVYTETILVGHSLENDLMALQISHGLIIDTAVLYKYNRGSRCKIALRVLTKRFLGXDPEXGSGHDSVEDARAALELAILKIRHGKNXRHFCYHFCLAFGSSXIANVDRETTWHKHIILLVLSTNLLTXPDFGSQPSLSRRKLTSILHESGKKCSLIDDMSILDRYSDTSCNSIAVFSDDDALSRSMKEVKNDKVAFIWTQFSGLISYFRRRAEDPEKLKSCVAEAIALKTCDTKTASKKAKSQICPELKEILCELDKKIKQLYGALPDNSMLIVCTGHGDTPLVRRLRKMLHHEEETIDSRENIVQALGDLQAQAEVALCFCCVKH

SEQ ID NO: 302051 - protein, 159 aa, Zea mays
  unsure (1)..(159): unsure at all Xaa locations
  Clone ID: MRT4577_38546C.1.pep
YLSGTVDCDLGGQRKKQMLSEIQAAVEEAEXMIRKMDLEARSLQASMKAGLLAKLREYKNDLNNFKSEFMRISAPNARQATREELLESAMAETIAETTEQRRTLMITTERLNQFTDRIKDSLRTMVVTEELXLXILQDLHQLMQALLHAHATLDRVDDN

SEQ ID NO: 302052 - protein, 66 aa, Zea mays
  Clone ID: MRT4577_38547C.1.pep
HKLQLHRGGGRSRTRGSPGLQDFGTRHSCRLYPKHMLVKNVGITKKHIMVFCRNLVEVYSTKHFNV

SEQ ID NO: 302053 - protein, 245 aa, Zea mays
  Clone ID: MRT4577_38548C.1.pep
MSSMATKLFNTAEVESSDAQALVADMRKAIGTMKSLAVDFERDGKSDKVKKLEETVLELVASYEDCAAMAQAIKAVPGVYQSSDQPTDFKTLIGVEASKIREASSASQQNHPLFRQFRESVWNVHHAGQPMPGEEQEDIVMTSTQMSILNVTCPLTGKPVIELMNPVRCVDCKHIYEKDPVMQYIRTKKPPQCPIAGCPRVLERGKVICDPFLLIEIEELRSSETAAPNATNIDDWTDLNDEDEE

SEQ ID NO: 302054 - protein, 216 aa, Zea mays
  unsure (1)..(216): unsure at all Xaa locations
  Clone ID: MRT4577_38549C.1.pep
MPMSSMATKLFNTAEVESSDAQALVADMRKAIGTMKSLAVDFERDGKSDKVKKLEETVLELVASYEDCAAMAQAIKAVPGVYQSSDQXGAARRGDRSNLGRLDWSDXLXLLALLFWFGLHSKPTDFKTLIGVEASKIREASSASQQNHPLFRQFRESVWNVHHAGQPMPGEEQEDIVMTSTQMSILNVTCPLTGKPVIELMNPVRWYAYNSVLYSL

SEQ ID NO: 302055 - protein, 98 aa, Zea mays
  Clone ID: MRT4577_3854C.1.pep
SGVLVAKFLSGVPFGGGGFLPKFSPVFLPKLLAQKGSRGGRQEAPSPKKAPQSPKKAPQSPKKVSKLGLSQAPLCSMFVFKFLEFICSTLFSPSPFGP

SEQ ID NO: 302056 - protein, 53 aa, Zea mays
  Clone ID: MRT4577_38550C.1.pep
VFNDAANTFYYMFGTLVCSLTLSVEKVSFQALFEEKQKREETNGKEVTFRTKS

SEQ ID NO: 302057 - protein, 378 aa, Zea mays
  Clone ID: MRT4577_38551C.1.pep
MVDVDRRPSHPHGLPRPPSHAAGLRRLSTRASAPSSPAPPSPSASAPSPTALLAHLAAAGVAVLPGLSATEFALAEAALGGVQLPPDLRELLALGLPSGDGFPDYRTPAGLRLLRFAAQEVPAAVAATLPLAPGRRAGRAAPPPLVPLCGRHYVPATPCLAGNPVFYVSDSGVTFAGANAADFLLRAFAAEPPPGAPLRRQLSAPVPPPSGAPPSTARRSLDSVTGRAPRWIEFWTDAAAAGDRFLEVPTGATSAAASSAAPEWLRPSLEEAASMLRRGGWGLCEVEEMVTGEGPSGAGEVNVVALALTVDRCCRDLKSGGWGAEEVVEMLGALLGPRKPRRAVAALPPDVAARMGRLAEAVSRAVGSHAKAKPPRPS

SEQ ID NO: 302058 - protein, 196 aa, Zea mays
  Clone ID: MRT4577_38552C.1.pep
MDEPEFPSTPNALFHSGTAGSSKKVSGEAAATLGSDKAPVEKIVTPVPCNVNPLNTTSATVSGIDQLPSNNLVKKEPEEISQQHIIDGAKKPNPLERQSVGQVIGCAESEKTDSAPQGARKIGFDLNSDIFANSSIHNESDVAAVDAPIPAKTLPDTCHDTSMPAVPEVDKFVKHERSTSATLSPVVETGNGHTTP

SEQ ID NO: 302059 - protein, 43 aa, Zea mays
  Clone ID: MRT4577_38553C.1.pep
MFGRAPKKSDNTQYYRILGVPKSGSQDDLKKAYRKAAIKNHPD

SEQ ID NO: 302060 - protein, 231 aa, Zea mays
  unsure (1)..(231): unsure at all Xaa locations
  Clone ID: MRT4577_38554C.1.pep
ASFGRSRRQAAHQGRSTGSTRTRSASMLQPGFSSSNRHHSATPERPSLPATPDAQVFFGPFAGDERHQDASETKLMKQPTWVFFEKESVTDLREQILQLIQHDCKDQEEKSRAELLEKLNRCKRDTLIELCRSFDLIGSRANRKEELVLFLMEFIKDHCSGSDVINSDKKYKKRKRVREEENLSTGKPSKVIGSLKETQSLENXQSKPSKDELEEAVFSYLGYCRLCHDDL

SEQ ID NO: 302061 - protein, 254 aa, Zea mays
  Clone ID: MRT4577_38555C.1.pep
MDSKKKRNKKKKGNQGKNAADVTSIAGEAASQNHNHELAPIDHHKGSDADDVMSSVGEELPQYKNHQPNIQADYNGTSAYDTTSSIGECIACYQNNEPMMTQENHKASNAVPADQRSVGLSESSVELDMHRLHEAKLDKLHETIKQLENEKSLWLQKVITMEGELEKLHNEVGCHAQNEVLLEEKLNSLQSGYDVLIKKEEVVDNKVRCIDNINDTLTHQESLLKERLSGLEETNKSLLVQSGEGAGGSFKQYF

SEQ ID NO: 302062 - protein, 214 aa, Zea mays
  Clone ID: MRT4577_38556C.1.pep
MSSVPDWADAIVPNSKRRRHRSPPAASSSSSHSSSTTQKEELEDEEEDMAKCLILLAQGPAAIEAARVMPAPRSRPKSTGSRRFLAAAEARGGVCVSYECKTCNRCFPSFQALGGHRTSHNKHPRRPAEEVLAAMAITTTLSLAATRPAHECSSCGSVFTSGQALGGHMRRHRPLTTTSSSPATGTEDQQDSSSKLLQESRINLELDLNLLPST

SEQ ID NO: 302063 - protein, 74 aa, Zea mays
  Clone ID: MRT4577_38557C.1.pep
KLASGLPSPECLLETVQLLQSTMSQRALKRGPRKWQPTLVGNLELKQPLFRERWKKLALRRRLSKRLWKGLTPT

SEQ ID NO: 302064 - protein, 429 aa, Zea mays
  Clone ID: MRT4577_38558C.1.pep
MMGRSRKCIQDLGIKDIDLHGRKFTWAGAHDVLDKFKATAKGLQRWSDKKVGNFKLQLELAREVMLQLESARDGRSLTDLKCWLLQRLKKHSLVLASLLMTVARTRSRLSWLKDGDANTKLFHTCSRFRKRKNFIGAVRDGDQLITSHDGKAEVFWDFYMNLIGSEHTTRFLHAKNKPRILLKLDISKAFDSVSWPFLLEVLEKLGFGPMWRDVISGILMTSSTQVLLNGVPGSFISHKRGLRQGDPLSPLLFILVMDVLNVLMVKAEEHGLLQAISSNSIHHRISLYADDVALFLKPEPSDLNTDVMILDLFGEASGLRTNIAKSSIAPIRCTHVDLNLVQQLLPCRFEAFSIKYLGLPLSLKLSKAQLQPLIDKVVDLLPAWKADLMTRAGRATQVQFVFTATVIYHMMALDLPKWAINVMNQYDIK

SEQ ID NO: 302065 - protein, 95 aa, Zea mays
  unsure (1)..(95): unsure at all Xaa locations
  Clone ID: MRT4577_38559C.1.pep
QFIGAIMGARDLNIHIXHGPLGMPQYIGCVDVEYLHGGALKSFLIKNKRRKLAFIVVDQIXLDIASGLCFLHSXTIGHRDVITENMLLDKTRTVK

SEQ ID NO: 302066 - protein, 87 aa, Zea mays
  Clone ID: MRT4577_3855C.1.pep
GRGQSTLNPCTECKETWSYYQFVFDISLFEGGKLAKCLTFTIHGLFCCWAQSNRRHLMLGGAGRQQQTAKAFFCPPKLLWRNEFVGG

SEQ ID NO: 302067 - protein, 107 aa, Zea mays
  unsure (1)..(107): unsure at all Xaa locations
  Clone ID: MRT4577_38560C.1.pep
ISTWLFFTVGNACRSCPTTTPTVKSSPTSPATTPSPSXSSCVKCSLNWLLSTCAPMRSACTKAQMTRLPVDPCCDILQGLADLEAAVCLCTGIKGTPASVAIICSYI

SEQ ID NO: 302068 - protein, 71 aa, Zea mays
  Clone ID: MRT4577_38561C.1.pep
HTTNVVGTLNMLGLAKRINARFLLTSTSEVYGDPLQHPQVETYWRNVNTIDVRSCYDEGKRTAETVTMDYH

SEQ ID NO: 302069 - protein, 72 aa, Zea mays
  Clone ID: MRT4577_38562C.1.pep
RQEGGSFTLLVDMLCQLRDLSMGSIFVSFFHYSLESIFSSAMQVDKNQVAVFFGLKPAVRTATTAIYREKIL

SEQ ID NO: 302070 - protein, 50 aa, Zea mays
  Clone ID: MRT4577_38563C.1.pep
GPHSCEVRHACILVYALRELARYRLAICMRKPLTSRSTYVVDLVLTDSII

SEQ ID NO: 302071 - protein, 53 aa, Zea mays
  Clone ID: MRT4577_38564C.1.pep
GCSCYLTREKASCTSSRYAVPTASRRWTAWMSGTWLCSPPSSRRTSGSRTVVL

SEQ ID NO: 302072 - protein, 83 aa, Zea mays
  unsure (1)..(83): unsure at all Xaa locations
  Clone ID: MRT4577_38565C.1.pep
VHLVECEXXXLSSGSFTVEETSLCTSQVSSDAAEGEGDSXTESSGSFTIALGYQSATDPETHPGLEAHRIESADDEMGGSGMG

SEQ ID NO: 302073 - protein, 151 aa, Zea mays
  Clone ID: MRT4577_38566C.1.pep
MGKGHKRKREPTPPSEDFGDSEYSEEFSSESEKSPAPASPPASSDDSDDSQGIAAEVWTYIRAVERSGLEGSDESEFSSDEEDSDGSEDEDDDDDGGDDDDDDGVGSNGGGGSGGKGSTRGGGSTGSTRGGSSTGSTRGGGGKGNSSKASG

SEQ ID NO: 302074 - protein, 155 aa, Zea mays
  Clone ID: MRT4577_38567C.1.pep
MGKGTKRKREPTPPSEDFGDSEYSEEEFSSESEGSPAPVSPPASSDDSDDSQGIAAEVWTYIRAVERSGLEGSDESEFSSDEEDSDGGEDEDDDDDDGDDGDGGDGNGDGSNGGRDSSGKGSTRGGSSTGSTRGGSGKGSTKGGGGKGSSSKASG

SEQ ID NO: 302075 - protein, 149 aa, Zea mays
  Clone ID: MRT4577_38568C.1.pep
MGKGNKRKREPTPPSEDFGDSEYSEEEFSSESEGSSAPVSPPASSDDSDDSQGIAAEVWTYIRTVERSGLEGSDESEFSSEEEDSDGGEGEDDDDGGDDDGDGSGGGSGGGDGSKGSTRGGSSTGSTRGGSNKGSTRGGGGGSSSKASG

SEQ ID NO: 302076 - protein, 156 aa, Zea mays
  Clone ID: MRT4577_38569C.1.pep
GSSSLRTTLDKVCARKRVRCAEDLLSNKSAVKPKPRFLRVNTLKVTTESVIEELNKMHMVDKDEMVPDMLVLPPGTDLHNHPLVTDGKVFLQGRASCMVAVALCPKPGWKVIDACAAPGNKTVHLAALMNGEGSIIACELNKERAKTLQHTVRRSG

SEQ ID NO: 302077 - protein, 136 aa, Zea mays
  unsure (1)..(136): unsure at all Xaa locations
  Clone ID: MRT4577_3856C.1.pep
HPKGFKTFPGHRELLDSGLCDAIIVSSPNMTHYEILMDIIHHREPQHVLVEKPLCTTVQDCKKVIEAAKQRPEIVVQVGLEYRYMPPVAKLIDIVKSGTLGQVRMVAIREHXFPFLXKVLLAGFCYLQVISWTSWL

SEQ ID NO: 302078 - protein, 153 aa, Zea mays
  Clone ID: MRT4577_38570C.1.pep
MGKSNKRKREPTPPSENFGDSEYSEEEFSSESEGSPAPVSPPASSDDSDDSQGIVAEVWTYIRAIERSGLEGSDEEDSDGGEDEDDDDDDGDDDDGGDGDGDGSGSGGGSGGGDGSKGSTRGGSSTGSTRGGSSKGSTRGGGGGGGSSSKASG

SEQ ID NO: 302079 - protein, 377 aa, Zea mays
  Clone ID: MRT4577_38571C.1.pep
MLLFASNLCRHFSFAEIKAATNNFDESLILGVGGFGKVYRGEVDGGTTKVAIKRGNPLSEQGVHEFQTEIEMLSKLRHRHLVSLIGYCEEKNEMILVYDYMAHGTLREHLYKTQKPPLTWRQRLDICIGAARGLHYLHTGAKHTIIHRDVKTTNILLDEKWVAKVSDFGLSKTGPSMDHTHVSTVVKGSFGYLDPEYFRRQQLTEKSDVYSFGVVLFEVLCARPALNPTLPKEEVSLAEWALHCQKKGVLDQIVDPYLKGKIAPQCFKKFAETAEKCVSDQSIDRPSMGDVLWNLEFALQMQESAEESGSLGCGMSDEGTPLVMVGKKDPNDPSIESSTTTTTTTSLSMGDQSVASMDSDGLTPSAVFSQIMNPKGR

SEQ ID NO: 302080 - protein, 193 aa, Zea mays
  Clone ID: MRT4577_38572C.1.pep
MNKIDKGKVKAALEKRRKTKGDITTKVDVMDDDDLLERELEHGVELAIEDEKIKQDKMHNLSHIKDKKITQDNMQNLSHIKDEQDNMQNLSDIEDEKIKQDERQNMSHAPVDLQTTDQVMENGHHVEPSVPTTVEDTGFPLDNKEHPPFDKQNDVPEHESQQLEHTLKHDLPQLVGGPEQDDGTDCKRPKLEE

SEQ ID NO: 302081 - protein, 64 aa, Zea mays
  Clone ID: MRT4577_38573C.1.pep
ATNPQQRIRHPHKIPHRTRRRQNTTLLNSRNSRLTPNLIRDLTMLNTRNQMILHRNYSVPRERL

SEQ ID NO: 302082 - protein, 149 aa, Zea mays
  Clone ID: MRT4577_38574C.1.pep
MGKSNKRKREPTPPSEDFGDSEYSEEEFSSESEGSPAPVSPLASSNDSDDSQGIAAEVWTYIRAVERSGLEGSDESEFSSDEEDSDDGEETDDDDDDDGGDGDGSGSGGGSGDKGSTRGGSSTGSTRGGSSKGSTRGGGGNGSSSKASG

SEQ ID NO: 302083 - protein, 570 aa, Zea mays
  Clone ID: MRT4577_38575C.1.pep
MYLIRMHFCEIQYPITKINQRVFNIYINNQTAVKGADVNAWAAVSGATTLIGTPVYQDYVVSTSGLGAMDLWVALHPNPDSKPQIYDAILNGMEVFKLQLTNGSLAGLNPVPSVALVPDGTTKKKSSVGPIVGGVVGGLVVLALGYCCFVICKRRRNAGKDAGMSDGHSGWLPLSLYGNSHTSSSAKSHTTGSYASSLPSNLCRHFSFAEIKAATNNFDESLILGVGGFGKVYRGEVDGGTTKVAIKRGNPLSEQGVHEFQTEIEMLSKLRHRHLVSLIGYCEEKNEMILVYDYMAHGTLREHLYKTQKPPLTWRQRLDICIGAARGLHYLHTGAKHTIIHRDVKTTNILLDEKWVAKVSDFGLSKTGPSMDHTHVSTVVKGSFGYLDPEYFRRQQLTEKSDVYSFGVVLFEVLCARPALNPTLPKEEVSLAEWALHCQKKGILDQIVDPYLKGKIAPQCFKKFAETAEKCVSDQGIDRPSMGDVLWNLEFALQMQEGAEESGSLGCGMSDEGAPLMVGKKDPNDPSIESSTTTTTTTSISMGDQSVASIDSDGLTPSAVFSQIMNPKGR

SEQ ID NO: 302084 - protein, 81 aa, Zea mays
  Clone ID: MRT4577_38576C.1.pep
SKICHFVWVHSSRGESLCGGRLGRPVAGDVNHPVLMNSLYVVCRDTSRCTGKSCTPHSCPSVRSWTSRRRSTSPRGSTAPS

SEQ ID NO: 302085 - protein, 148 aa, Zea mays
  Clone ID: MRT4577_38577C.1.pep
MGKSNKRKRELTPPSEDFGDSEYSEEEFSSESEGSPAPVSPPASSDDSDDSQGIAAEVWTYIRAVEHSGLEGSDESEFSSDEEDSDGGEDEDDDDDDGDDDDGGDGDGSGSGGGSGGGDGSKGGTRGGSSKGSSRGDGGGSSSKASGV

SEQ ID NO: 302086 - protein, 96 aa, Zea mays
  Clone ID: MRT4577_38579C.1.pep
CHEMTPRRQTPSWASLVVRGRSHPPSMRSAPRTAYPRVMAFMGSPGTVGLGCRGFQGRDHWGRRNLAVVRPLQRDHHVSWSALISASNFRARLRVI

SEQ ID NO: 302087 - protein, 204 aa, Zea mays
  Clone ID: MRT4577_3857C.1.pep
MYYYKSINLNGIGFELCKHVVHPTGLVSNTRARRMALTTSTGFDGVADGAAHNTMFSHRHSVEQPMGDGELTARAGAAGKSGCEELCCREREPSRYVASRGGDSRAAGRHGDRLPRCLLGLQAAGGVENQQGAARLGNRGAMLKKGKVQGGLDHGRKKVWAARGVELPATLPEGGAKGRDGVVPCASSMGKKQRGATEGGSHGC

SEQ ID NO: 302088 - protein, 147 aa, Zea mays
  Clone ID: MRT4577_38580C.1.pep
MGKSNKRKREPTPPSEDFGDSEYSEEEFSSESEGSPAPVSPPASSDDSDDSQGIAAEVWTYIRAVERSGLEGSDESEFSSEEEDSDGGEGEDDDDDDDDGGGDGDGDGSGSGGGGGGGDGSKGSTRGGSSTGSTRGGGGGSGSKASG

SEQ ID NO: 302089 - protein, 151 aa, Zea mays
  Clone ID: MRT4577_38581C.1.pep
MGKCNKRKREPTPPSEDFGDSEYSEEEFSSESDGSPAPVSPPASSDDSDDSQGIAAEVWTYIRAVERSGLEGSDESEFSSDEEDSDGGEDEDDDYDDGDDDDGGDGDGGNGDGDGSGSGGGSGGKGSTRGGSSTGSTRGGGGNGSSSKASG

SEQ ID NO: 302090 - protein, 634 aa, Zea mays
  unsure (1)..(634): unsure at all Xaa locations
  Clone ID: MRT4577_38582C.1.pep
METERSAHNKVHIQSGNASRKTEGFIQQSINANRQKNGTSVQHSESFTTSARRTAGGFPPAPTTEDKFKAARLSSSNEAAPRKEGVGQRISNISISLQKRTENTNKDVAKKEVGTSSPLPPNPANAMHKGNGKVGRPMDNTQGSMQRFGSPSTSSATWGMDRGAPRSSIPSPSITIRRPNGMVRPAENLSVSAKKPDAGGLSPAMGKEKEQGGRLLQANISTDQKLAAESRSASAKKPDAGGLSPAMGKEKEQGGRLLQANISTDQKLAAESRSVSAKKPDAGGLSPAMGKEKEQGGRLLQGNISTDQKLGAENRSVSAKKPDAGGLSPAMGKEKEQGGRLLQANISTDQKLVMSKPPAVEKAADGRAERMEKVRDGAPDIAKKEDKKSDRHEKKKRKEKDKHKEKKKDKEAKKEKREHNHKQHNKTRENSISYPIDSLNLKHSVPPXPHQLMMENLXPDENLKKRKNHETNGYLQNNLDMRPTKLPRPALPSNRVENGTASHVAAPLSSVKQEAINIEKAERLHKEEKVNGNQQGQQRGPVDPVAAYENGTSSRKPPHPDCKYLSQIYSIPEAPQMMELPGQEGEDWLFDKGGTQPRKPASSAPEADGVPQVWAQALKIDHADVIALPYVIPF

SEQ ID NO: 302091 - protein, 58 aa, Zea mays
  Clone ID: MRT4577_38583C.1.pep
FYPSILFSLITNSYTNYNFSINLIKPFSKLYNIYIIHSPFYQYINIYNSIYKFITIHP

SEQ ID NO: 302092 - protein, 103 aa, Zea mays
  unsure (1)..(103): unsure at all Xaa locations
  Clone ID: MRT4577_38584C.1.pep
MFPFHHNPPYKRNRSLLYNNILLXNSNIFYPNNTLYXFDTFKLNLSFTXYYPNKPPTFLFYSKIFYPNIYSYINNLFDILQNHFNPIYDFSPILTFYFILFFY

SEQ ID NO: 302093 - protein, 40 aa, Zea mays
  Clone ID: MRT4577_38585C.1.pep
TYACAYAFADARCDLNLNLTRSTARDKLKRSATEFWVTYS

SEQ ID NO: 302094 - protein, 105 aa, Zea mays
  Clone ID: MRT4577_38586C.1.pep
CRAGSLADAFEFVLAMPVAPDPVIWRALAGACRDHGDAGLARRVMDHVIAMEPHHAGNYLLASNLCAADEDWGRVVDVRLEMGARKATISRTASGAVSSVQVNGE

SEQ ID NO: 302095 - protein, 74 aa, Zea mays
  Clone ID: MRT4577_38587C.1.pep
RAGIYIELCMHISIDGMISCFSPSSRSTRACAGARPASCDLPACSCSVPLVLLCVASMSSWGTHVWSRSSQGSC

SEQ ID NO: 302096 - protein, 41 aa, Zea mays
  Clone ID: MRT4577_38588C.1.pep
PRRATKRPKKKKKKKKKKKKKKKKKKKKKKKKKKKKKHKTP

SEQ ID NO: 302097 - protein, 53 aa, Zea mays
  Clone ID: MRT4577_38589C.1.pep
SSFFYGSWIMGKTKLMGGVIYRTDQKTDLTRSNNLTVITEYMLTMGWLVDSVY

SEQ ID NO: 302098 - protein, 85 aa, Zea mays
  Clone ID: MRT4577_3858C.1.pep
AERKSFFFSNACRGSCVGVCRSGSGLVLLFQTLGAACWCVWCRHHWLACLTLRLVRLGRLVRVRQLRCAGLERGRGPGAWHPSPR

SEQ ID NO: 302099 - protein, 304 aa, Zea mays
  Clone ID: MRT4577_38590C.1.pep
MATHHLAQGHPQAWPWGMAMYTNLHYHHHHHHQQYYEREHLFEKPLTPSDVGKLNRLVIPKQHAERHFPLGGGDGDGNEKGLLLEFDDEAGRPWRFRYSYWVSSQSYVLTKGWSRYVKEKRLDAGDVVRFDRVRGVGPPVRLFLCSPAARRSGPRRVIPTPPGARRASSSSSSRGAPPCATARRGRRTRPAPLAPLTPTTSTRHTQAQARRTPRAAAARLLQEQRRRGSSGCSASTSTAARSRSRRRRRRQCTATDTCTRVPTQQCPQFPATGNEQARSEGTTPRSFSRITRTVLLLAEADRAN

SEQ ID NO: 302100 - protein, 43 aa, Zea mays
  Clone ID: MRT4577_38591C.1.pep
CGSISSHRSIVLVERVICLLSIQSQRRCQRHTVFCHAGSIDGS

SEQ ID NO: 302101 - protein, 63 aa, Zea mays
  unsure (1)..(63): unsure at all Xaa locations
  Clone ID: MRT4577_38592C.1.pep
ACHXRRLAPCPSCGGPRGAAPGHTPAPTRERRPRTLSWMSPSRFAKGPGRGVPDGVSDPIARV

SEQ ID NO: 302102 - protein, 61 aa, Zea mays
  Clone ID: MRT4577_38593C.1.pep
RLSVPHSAFPSFPVSFSLHHNIIMRYHRNRQHLQICTMPLQVRDRHSMQQLRNILTQLRSL

SEQ ID NO: 302103 - protein, 267 aa, Zea mays
  Clone ID: MRT4577_38594C.1.pep
SEFGSSDVVVSFRGTVTGSEWVANMMSSLEQARFDPADPRPDVKVESGFLSVYTSDDATCRFTYGSCRNQLLSEVTRLISKYKHEEMSITLAGHSMGSSLALLLGYDLAELGLNCDGCGDTVPITVYSFAGPRVGNTGFKNRCDELGVKVLRVVNVNDPITKLPGIFLNENFFGAGRLELPWSCACYTHVGVELALDFFKARDPACVHDLEAYIGLLKCPNKVAVVKNDGEHVLSKAMKFVLQHSFDTWRWQMAAIQVGELVQAIGL

SEQ ID NO: 302104 - protein, 104 aa, Zea mays
  Clone ID: MRT4577_38595C.1.pep
LSTMRLSPRLLLIILVVCCYETTAGNVCDAVLRESAAFVLGSKDNLRKELEQYSVPAEAVKAELEVKRCVDQMRYGDRLKVAGALVQILFRCGVRRWLDEYFPG

SEQ ID NO: 302105 - protein, 56 aa, Zea mays
  Clone ID: MRT4577_38596C.1.pep
YHSIAQYYSIASILQKNFVLKRPLNCRCYRPGNETQTALDVTVSNSLIQMVYEIHF

SEQ ID NO: 302106 - protein, 118 aa, Zea mays
  unsure (1)..(118): unsure at all Xaa locations
  Clone ID: MRT4577_38597C.1.pep
AASAFTVQMPFPCAGLQGLYXANSSLTTMMGAGRLYPYAXYLRHAQCIPVEATPYYAGCGXPIAMWHAILEQHYLLLMMIKDLLSQAHHLQMMMHLERADVDIMSLYQPALIHHLLQL

SEQ ID NO: 302107 - protein, 83 aa, Zea mays
  Clone ID: MRT4577_38598C.1.pep
RHDNSSSGSNDHIGDLEAEVSRLQAELRRRTAIWVVDGDRINELRRDVRPISFACMGQGAKSSSSRQSRSLAWDKEQKAQARG

SEQ ID NO: 302108 - protein, 112 aa, Zea mays
  unsure (1)..(112): unsure at all Xaa locations
  Clone ID: MRT4577_38599C.1.pep
MLKGELEAGMVKRYRSADLTGSLLNDWDIXENDSSEAFNGSDPRHASADQDQSSMLNVIXNQKDRFHAHLRXTDDELTRLLDKHQMLTSELEKTIADDAQLVRKIQSYQNYN

SEQ ID NO: 302109 - protein, 197 aa, Zea mays
  Clone ID: MRT4577_3859C.1.pep
MLRAAASRCARGAVRRLSSSAAVEASPVAVGSRRKPLLDEGDWSFHREWWGEEDGPGEGAQTVFRRHSECGNGVVSVSAYPASRPASEHWPATERWLQERNARLYPESASSDQFKAATGQNTMKILCIGHGGGTLPLFLASKFRGATIHIVEIDPVVVSASIESMGFPMSSVKGLSPGSMLPADADDLLWGGLHNRI

SEQ ID NO: 302110 - protein, 90 aa, Zea mays
  Clone ID: MRT4577_385C.1.pep
APFPLPRNQKGGSHQCNMPPGQVQPSEKPQYPWKLKSINPVCLPKQICFNFCSVANVTPAPDKGKFLYQKNVLIKSVFFQSYPKGWQNVG

SEQ ID NO: 302111 - protein, 266 aa, Zea mays
  unsure (1)..(266): unsure at all Xaa locations
  Clone ID: MRT4577_38600C.1.pep
DIIPHSPPDAQLNSLSGLNLPESVTKLLQSYHTLFEEPTTLPPSRSCDHTIPLVPGARPVNVRPYRFSPAMKDEIESQVSKMLETGVIQHSTSSFSSPVLLVKKKDHSWRFCIDYRHLNALTIKSKYPVPVIDELLDELYGASWFSILDLRAGFHQILLRNGEEYKTAFQTHLGHYEFRVMAFGLTGAPGTFQKAMNHTLAPALRKYALVFFDDILVYSSSMELHLHHLAHVFDLLNRDQWKIKLSKCSFAVNKVSYLXHVVSQAG

SEQ ID NO: 302112 - protein, 38 aa, Zea mays
  Clone ID: MRT4577_38601C.1.pep
SLLASLSLPKLFNYYHNPTPTENFTITNCIFPSTPNTT

SEQ ID NO: 302113 - protein, 98 aa, Zea mays
  Clone ID: MRT4577_38602C.1.pep
CSRIFSVTVSSLGLFIILNGLVGTILIVRHYSRRSHYPCRHSSSRCLFHCRPSSITQEPPPPFSLSALLSPPSALLSFSLSISFFSSAPPPPPPSFFF

SEQ ID NO: 302114 - protein, 94 aa, Zea mays
  unsure (1)..(94): unsure at all Xaa locations
  Clone ID: MRT4577_38603C.1.pep
MTEQNVEGHGLLGVCGSASCETLFTGDSLPVMAFGTMDPCMQHCMKQHGLARLMACPFLMLEQLLDLPFXTMPVMMPQXLMTPNMMVPLMNPSI

SEQ ID NO: 302115 - protein, 376 aa, Zea mays
  unsure (1)..(376): unsure at all Xaa locations
  Clone ID: MRT4577_38604C.1.pep
MAKNGDFLKTLASLSPFPPSHDLSSTANPDCRLRLGIRALAAMDGGGGGAGGAEGELTAQETALYDRQIRVWGVDAQKRLSKAHVLVCGMNGTTIEFCKNIVLAGVGSLSLMDDNVVTEEDLNANFLIPPDESIYGGRSRAQVCCESLIDFNPMVRVFVEKGDPSLIDGEFLDKFDIVVLSRASLKTKLLINENCRKRSKHIAFYTIDCKDSCGEIFVDLQKHSYVQKKXLEEQLNXELTYSSLQEAISVPWNSLPKKTAKLYFAMRVLEDYELSEGRSPGETTLSDIDAVLARRKDMCDKMSLNESRIPTTLVERLLAAGKKEHPPVCAILGGILGQEVIKSISCKGDPVKNFFYFDVADGKGVIEDIPPPPPAK

SEQ ID NO: 302116 - protein, 294 aa, Zea mays
  Clone ID: MRT4577_38605C.1.pep
MDGGGGAGGAEGELTAQETALYDRQIRVWGVDAQKRLSKAHVLVCGMNGTTIEFCKNIVLAGVGSLSLMDDNVVTEEDLNANFLIPPDESIYGGRSRAQVCCESLIDFNPMVRVFVEKGDPSLIDGEFLDKFDIVVLSRASLKTKKKPGGATEQQELTYSSLQEAISVPWNSLPKKTAKLYFAMRVLEDYELSEGRSPGETTLSDIDAVLARRKDMCDKMSLNESRIPTTLVERLLAAGKKEHPPVCAILGGILGQEVIKSISCKGDPVKNFFYFDVADGKGVIEDIPPPPPAK

SEQ ID NO: 302117 - protein, 126 aa, Zea mays
  unsure (1)..(126): unsure at all Xaa locations
  Clone ID: MRT4577_38606C.1.pep
DQEAGESTSAAHVPASNTPVDASEEPIPTSAVLMAKANHMANRRRPDNAAFLKCKIMDXKPDKGLEKDRHASRRXDHSLLTELSPKXPTEMHEYAGCMHDYTNXFDCCRTEPHVCDVSLPAFPSRS

SEQ ID NO: 302118 - protein, 141 aa, Zea mays
  Clone ID: MRT4577_38607C.1.pep
TQLHSILFIQEAISVPWNSLPKKTAKLYFAMRVLEDYELSEGRSPGETTLSDIDAVLARRKDMCDKMSLNESRIPTTLVERLLAAGKKEHPPVCAILGGILGQEVIKSISCKGDPVKNFFYFDVADGKGVIEDIPPPPPAK

SEQ ID NO: 302119 - protein, 215 aa, Zea mays
  Clone ID: MRT4577_38608C.1.pep
MSDNLMEKVNALGERLKITGSEVSKQMQAGMSSMSFKMKELFQAQTPADKIVEDATAETLEGPDWAANLEICDLINTEKVNSVDLIRGIKKRIMLKEARVQFLALFLLETIVKNCEKAFSEVAAERILDEMVRLIDDPQTVVNNRNKALTLIEAWGESGDELRYLPVYEQTYKSLKSRGIRFPGRDNESLAPIFTPPRSVAEAEVAAISPADIRR

SEQ ID NO: 302120 - protein, 202 aa, Zea mays
  Clone ID: MRT4577_38609C.1.pep
MAILGALRLAPSPPALAGAAPPATSPSAAVRSSVHFHLANAGAAALVAASLLAADPAVAFIGGGPYGKQVTRGQDLTGKDFSGQTLIKQDFKTSILRQANFKGANLLGASFFDADLTSADLSDADLRGADLSLANLTKANLSNANLEGALATGNTSFKGADITGADFTDVPLRDDQREYLCKIADGVNSTTGNPTKETLFCS

SEQ ID NO: 302121 - protein, 52 aa, Zea mays
  unsure (1)..(52): unsure at all Xaa locations
  Clone ID: MRT4577_3860C.1.pep
MGGGDLIQSGACRGEFASKDYTDPSPAPLIDPAXLGSWSLYPALIPQFIATL

SEQ ID NO: 302122 - protein, 104 aa, Zea mays
  Clone ID: MRT4577_38610C.1.pep
RTTLSSDTPAPVSWRSLPASRCFHPRATASPPYFLRVGAIVFGRLTAQTKLGSTEWECPNVRAGFHTEVNRKIYLRVPKKKVDQEQRIYMMTYWYCRCALPNTW

SEQ ID NO: 302123 - protein, 115 aa, Zea mays
  unsure (1)..(115): unsure at all Xaa locations
  Clone ID: MRT4577_38611C.1.pep
EKPKKTQKGEKLCFYFLRGQGVGSWDKKKQGKKGGFGGLWEXXXXXXXXPFXKXFKXXXXGPPPCTGNFENFLLGKMVETWGKGPLGNSRGLRGNIGFLRLHNLSGGPYRGTFVV

SEQ ID NO: 302124 - protein, 31 aa, Zea mays
  Clone ID: MRT4577_38612C.1.pep
RKQMPPIGPGTELAQRIELLPSHQLRSHSIY

SEQ ID NO: 302125 - protein, 92 aa, Zea mays
  unsure (1)..(92): unsure at all Xaa locations
  Clone ID: MRT4577_38613C.1.pep
RPGLPIWWGWFYWCNPVSWTIYGVTGSQFGKVAPNVTATGNPGPVVVKEFLEQNLGMKHAFLGXVGLGHLGYTLLLVFLLGGGPKALNFQNR

SEQ ID NO: 302126 - protein, 242 aa, Zea mays
  Clone ID: MRT4577_38614C.1.pep
MAAEPPSSSSWSSSSGVARALAHHHQAVLGFLLGLLVSLVLYTTVSGQFRSTSTIVVLQSTPAERTGQIDMTSPPPVSSVSSTLNNSTQEYGQTDEAIKTTGKEDLEDENVVHATDMNNKTGNAQTDKTDHLGQPTNDASDKGYLTRQNGGDGNNESNVKHGAPGKPICDLSDPRYDICEISGDVRAIGVNRTVLYVPPAEERDNDSQEWAIKDQSRKGLVDIIEVNVKTLSAAQSLVAPEC

SEQ ID NO: 302127 - protein, 128 aa, Zea mays
  unsure (1)..(128): unsure at all Xaa locations
  Clone ID: MRT4577_38615C.1.pep
MGAADASSLPTSAMTCRAAAAWGPGQPLVMEEVEVAPPGPMGMRGKGAYTSVCRSXDAPGWRSKAHLGLLPRVFGHXASGVVPSVGEGVTALRVRDHGLPVFIGECHSGQLCVPGVSTMXQRLPLDRK

SEQ ID NO: 302128 - protein, 297 aa, Zea mays
  unsure (1)..(297): unsure at all Xaa locations
  Clone ID: MRT4577_38616C.1.pep
HASDLEGCQPHVVSYNTLISASCKAGCLKDAKLILTRLSAEGLEPNGTTYCILLHSLCDKRRWSEVGDLLAHMKQANHKPDVTAYNIFINYFCRYGHLDQAIDVLEMMVSEKCFPDIVTYNTLLNAISKXGMVQEALGIFHSIRENGCQVVRITYNTLIDALAKRGDIINAMTLFDEMIVDGINPDDVTYGSLIMGFCKKNMAKEALELLNQMLALGFEVKATTFSMMIQALCKGCKAEAAAEILRVMVSRXCQPQECIXYLSIVTRVAKSGRLKEAQILHQELYRARSLKRILNLF

SEQ ID NO: 302129 - protein, 87 aa, Zea mays
  Clone ID: MRT4577_38617C.1.pep
VSFKANIKTIPLFQNFKGGMKNLKELWASQSLNIPGGAYFLPFKQEKGKKKGGKTRVKYAVKPGDPTHYAIGGGTKWQLFLQVRAVF

SEQ ID NO: 302130 - protein, 302 aa, Zea mays
  Clone ID: MRT4577_38618C.1.pep
MGGNNDGVSGAACLKPLNGVSPTYVPSAGAGALYFLIGSGLGVVAVLHASGLAEVSGEWASAARWTEVSREWPSAARWAAQLAGSVGAQRLLLATSLLFLAVSVWRLARRCAAVEGRVGSTDSAVRALHVGGVVCAVCGSKIRALKRGCRGVERTRSVDSSKPVSRSLAAEFDQEADGEEEDNAGETSDPDDGSVQYLRRRLKEEMLLKEVALEELEKERHAAASAADEAMSKIACLRSEKALVEREARQFQEMMQQKQMYDRQVIESLQWVIMKSGMQGWEPEAITDRALSETSEDDRDKK

SEQ ID NO: 302131 - protein, 154 aa, Zea mays
  Clone ID: MRT4577_38619C.1.pep
FQIKEEGNAQFGMEDLLYYIKRAEEFKVDLDVGEIKQYFPVGLVISGMLKIFQDLFALRFDEIKDVDVWHDTVRVFSVWDASSSDLLGYFFLDIFSREGKYAHTCVVTLQNGCLCSNGTRKVPAAVILSQCPKEFDGNSALLRFPEVVRLFHEF

SEQ ID NO: 302132 - protein, 444 aa, Zea mays
  Clone ID: MRT4577_3861C.1.pep
ENTKESGIVMELEMNWDANPSIILAVKTRLVGTRPIQVKDIGFTGVFRLIFKPLIEELPCFGAVCFSLRQKKKLDFRLKVIGGEISAVPGISDALEDTIKNAIEDSITWPVRKVIPIIPGDYSDLELKPVGTLEVKLVQARDLTNKDLIGKSDPFAIVYVRPLPDKMKRSKTINNDLNPIWNEHFEFTVEDADTQSVTVKIYDDDGIQESELIGCAQVRLKDLQPGKVKDVWLKLVKDLEIQRDRKDRGQVHLELLYCPFDMKDEVPNPFSQQFSMTSLERTLTSMENGSGGSSFDRLSSRKKREIIIRGVLSVTVISGEDLPAMDMNGKSDPYVILSLKKTKTKYKTRVVTESLNPVWNQTFDFVVEDGLHDMLMLEVYDHDTFRRDYMGRCILTLTKVLLEEEYKESFNLEGAKSGKLNLHLKWAPQPIMRDSREAGSLRSR

SEQ ID NO: 302133 - protein, 198 aa, Zea mays
  unsure (1)..(198): unsure at all Xaa locations
  Clone ID: MRT4577_38620C.1.pep
LIRMANMLGELMRLKXVKNLDSRHSTLVENAYYLCKPPERSARISKVRPPLHQYIRKLLLGGVDKSSVEHVLRQLRKLPWAECQQYLLKCFLKVHKGKYSQVHLIALLTASLSRYHDDFAVSVVDEVLEEIRVGLELNDYGMQQRRLAHMRFLGELYSYKHIDSSVVFDTLYLIIVFGHGTPEQDVLDPPEDCFRIRL

SEQ ID NO: 302134 - protein, 177 aa, Zea mays
  unsure (1)..(177): unsure at all Xaa locations
  Clone ID: MRT4577_38621C.1.pep
YPXRSGRGLLLYVSKAKRSFSMPLSLLSVSVVEHQQSTSSPLAERFPRGAQDPSQTRSAPWSVCHLADASSAPPPVARPYLLLSPWRLPLDPSLREPSPAARQCRPQSPMAQELPILLLLGRRRWARPVSRFLCSSSNRLKVFQFGSSSNRYSSSAPWRSQPXMPCPCNXXXXARPP

SEQ ID NO: 302135 - protein, 101 aa, Zea mays
  Clone ID: MRT4577_38622C.1.pep
EALGYAAVPALIHIERDVKGVHPQLDLLNAGAVGASFLDDQSSTSDPAVLGIPSANWVRSENRVCTANSPPSPYQSSHELPRPPLSLSISALYICYRSVAW

SEQ ID NO: 302136 - protein, 131 aa, Zea mays
  unsure (1)..(131): unsure at all Xaa locations
  Clone ID: MRT4577_38623C.1.pep
FFQACGTVHRVPFFSAKFGHPKGFAYVEFLEQKPVQEVLNLNEWELHGRQIKVAPKRTNVPGMKQGPPPGFNPSHGSPYSSYGAPFFPPXGFGGAPKFPPPLGSSPFFLRTGGGIMFNANPPMVCGRFQEN

SEQ ID NO: 302137 - protein, 111 aa, Zea mays
  Clone ID: MRT4577_38624C.1.pep
RVAKDWKEMIDSPESCYVLGSLASWGLLYFLISYNIVTEFDMKEIFRLFGNIPFKQKKKSAMLLKGLGLSNRIPELMDYLIGNGQQMDVLCLARVLNMVDKYPPLSLLKGY

SEQ ID NO: 302138 - protein, 141 aa, Zea mays
  unsure (1)..(141): unsure at all Xaa locations
  Clone ID: MRT4577_38625C.1.pep
EGPVVPLVTPFPGRANDFFGPLGARVFHNRVPRWVKKTGFXNFPREFVPPQGGPPPFFPPQITFEKLFGGGPLLGGGQENLKGVPLFSKAPPRGFFCLPPGGPLKAGPFFQEKTPLSFSPRGRGPPGGRGGENYFFPGGFW

SEQ ID NO: 302139 - protein, 78 aa, Zea mays
  Clone ID: MRT4577_38626C.1.pep
MSYQAPPPGTSAYPPPGTAYPPPGQPQAYPPPAYGAPPPMAAGGYPPPPQQDSKGGNDGFLKGCLAALCCCCMLDMCF

SEQ ID NO: 302140 - protein, 86 aa, Zea mays
  Clone ID: MRT4577_38627C.1.pep
MQPLLLLQPAPDRFCLACAAYPPPGTAYPPPGQPQAYPPPAYGAPPPMAAGGYPPPPQQDSKGGNDGFLKGCLAALCCCCMLDMCF

SEQ ID NO: 302141 - protein, 72 aa, Zea mays
  Clone ID: MRT4577_38628C.1.pep
MQPLLLLQPAPDRFCLGCAAYPPPGTAYPPPGQPQAYPPPAYGAPPPMAAGGYPPPPQQDSKGGNDGFLKGW

SEQ ID NO: 302142 - protein, 309 aa, Zea mays
  Clone ID: MRT4577_38629C.1.pep
MENNHKDCSTLLRPVDAEDSLRLHNMFLPFTFWSSLFTGMLQIGVKYSQETIRTDALSIMILIVRTTDPIEERQKFGFTSVMTRLHLLLQKENGLLVKKHSVRLLFLLLNCPVMLKLLCSGGKDGSKQMGSEACESDRSQEVISSVLVDLSDCLTCGETCSLGIELCRLVIILLAYIASSGKLGYEVLLVPVSARGASFLEMIMEVLASQMQYETRELLKERCLVMREALILLNRLASHANYSKPTLEVLTRSKLCATWTIDVANRLPHTRMANDLAELAQKFRSRVYAFIEEKPLTSDGTNLGASNKR

SEQ ID NO: 302143 - protein, 61 aa, Zea mays
  Clone ID: MRT4577_3862C.1.pep
PPSAALKCRAQGGPIRHSGCANFGKAGRVPPFFQSAHLLKRDIVQGPFSLVPPGFYPSCRC

SEQ ID NO: 302144 - protein, 67 aa, Zea mays
  unsure (1)..(67): unsure at all Xaa locations
  Clone ID: MRT4577_38630C.1.pep
MAMVLVMVLGKIPVDTPKHDVLHTVAGYLIRMFPSSILLXLTYDPNEKRGDPDGGFTVLANYIRVLG

SEQ ID NO: 302145 - protein, 156 aa, Zea mays
  unsure (1)..(156): unsure at all Xaa locations
  Clone ID: MRT4577_38631C.1.pep
SALAGAGAAXAXAXCSCFGLWXXAXACPVXXARASXAAGFSGVPPGXXXXXLVXXXXGSXXXSCXXXWLXSSARXPAXAFSGGRRVSXSGGRLXVPRFXAXSSLSLSDVGPXRXRAWPRPRRAGKRAXXXWXPPPPLLSLXSXAXAAVRXRGRLRG

SEQ ID NO: 302146 - protein, 55 aa, Zea mays
  Clone ID: MRT4577_38632C.1.pep
YAIIILGFSEDEGATHRERAVNATHLLKDICCMIKSFELVNRIKVHRDANHLNVL

SEQ ID NO: 302147 - protein, 88 aa, Zea mays
  unsure (1)..(88): unsure at all Xaa locations
  Clone ID: MRT4577_38633C.1.pep
DRAIIPPRAVPTKSHPPTTTSPAASLSLPLRWSPLPISSSLSLSLSLSLAVGVAPGARSAGFAGRLXRXDLXXWYERGHPRGANHKRP

SEQ ID NO: 302148 - protein, 97 aa, Zea mays
  unsure (1)..(97): unsure at all Xaa locations
  Clone ID: MRT4577_38634C.1.pep
GKSPFGLGGPGLPVFPGVPALVFGPKQLPEMGPPLGKPLKSFPGAVKGFQSYLKKNPGEGGVXPPPAPPPATGVGGPEKGLWAPSTQGGPWGSPQGC

SEQ ID NO: 302149 - protein, 116 aa, Zea mays
  Clone ID: MRT4577_38635C.1.pep
QTDIYREESTPAAAWSSFEARSVRKFTLLCPSALWYYRVADQQQQSGRCISICSRRFLSRWSICNSRWSTCSGSAADVGASPVPMRYLRELGATDALTARIILIVGKRSEGRGEEV

SEQ ID NO: 302150 - protein, 215 aa, Zea mays
  unsure (1)..(215): unsure at all Xaa locations
  Clone ID: MRT4577_38636C.1.pep
MNAFRFLGDMTHLFSVIVLLLKIYANKSCSGVSRKTQELYLAVFVARYLDLFTDYISLYNSVMKIVFITTSAAIVWYMRRHPQVRRTYDRDQDTFRHVFLVAAAFALALIFNERFTLREICWAFSIYLEAVAILPQLVLLQRSRNVDNLTGQYVLFLGAYRAFYILNWIYRYFTEGHQSRWIPWIAGLVQTGLYADFFYYYXLXWKDNVKLELPA

SEQ ID NO: 302151 - protein, 52 aa, Zea mays
  Clone ID: MRT4577_38637C.1.pep
ISFPPFFGRVVDLKGLIFPPFFFRKPKISKKLGEGFSPKKNVSRKKRKTPLK

SEQ ID NO: 302152 - protein, 233 aa, Zea mays
  Clone ID: MRT4577_38638C.1.pep
MPPRRKRRAPPAKSQRQTEPDPQPQVPPGADAPLEERLIWGSQQESERRITAIKAIKDAEAGNIHYQLQLARSYYSEEQLEGNAMQYFQENLHNLSVVPNEEYDVLELKWNNGDEWMIGDFADDRTLRASIASFTAADGLQFPRDSDFYTRTSNFSDFAWSEQPEGQMAGASEAFQTPGAVSNRLSCGMTPKTVRLPKNGEMLLSVHGSPLGVYKEENLAAIEESGNGSEDAP

SEQ ID NO: 302153 - protein, 80 aa, Zea mays
  Clone ID: MRT4577_38639C.1.pep
IKLPAIHDKLRPPLISPPSYSDPNERTHGESTITEGGRANRPNQRDLRELSAVKDLDHLGGGALEGAHLLEGLDDVHALD

SEQ ID NO: 302154 - protein, 58 aa, Zea mays
  Clone ID: MRT4577_3863C.1.pep
RALASKVPSTRYRLECRPARCGRRCHPSSSYSPAQTAVRDTSEETKTGVKVDRWPEWG

SEQ ID NO: 302155 - protein, 81 aa, Zea mays
  Clone ID: MRT4577_38640C.1.pep
TTAPEKRQRVPSAYNRFIKEEIRRIKACNPDISHREAFSTAAKNWAHFPNIHFGLGPCESSNNLDEATGAMCHPQKVQDLY

SEQ ID NO: 302156 - protein, 266 aa, Zea mays
  Clone ID: MRT4577_38641C.1.pep
MALLLLRGCAAPPAVHAAPAGSRLLPPALPRRRLVAVASSASSAPSGEVASSSQDGRGYGTVGGPNGHAIAPATDTKSTAVETTVERVIFDFRFLALLAVAGSLAGSVLCFLNGCVFIKEAYQVYWSSCVKGVHTGQMVLKVVEAIDVYLAGTVMLIFGMGLYGLFISNAPAGVPPESDRALSGSSLFGMFALKERPKWMNITSLDELKTKVGHVIVMILLVKMFEKSKMVTIATGLDLLSYSICIFLSSASLYILHNLHKGDHEE

SEQ ID NO: 302157 - protein, 171 aa, Zea mays
  Clone ID: MRT4577_38642C.1.pep
MAAHTLPPHETEPPYPAREATEGPEDTGSCRAAGAEMHKSKGKFSGVLHKGFKPDKCKTSLRMAVGRIKLLRNRKEVQVRQMRREVAQLLEANQDMTARIRVEHVIREEKFMQAYDLIEVYCELIVARLSIIDSQNLFVSNASADVRSEYKRALSGSSLFGMFALKSKYER

SEQ ID NO: 302158 - protein, 61 aa, Zea mays
  unsure (1)..(61): unsure at all Xaa locations
  Clone ID: MRT4577_38643C.1.pep
LEGLAGKKKKKKTLQGTRIEETXPTAXXRGEGXSRASASRLLXGRPXXRRXAVXXATXXAP

SEQ ID NO: 302159 - protein, 174 aa, Zea mays
  unsure (1)..(174): unsure at all Xaa locations
  Clone ID: MRT4577_38645C.1.pep
PLFSQLASSVNCSAGTLVHARSSADVYLAGTVMLIFGMGLYGLFISNAPAGVPPESDRALSGSSLFGMFALKXSQEFEISITSLQVTFXSFSNTIDLLFIMQERPKWMNITSLDELKTKVGHVIVMILLVKMFEKSKMVTIATGLDLLSYSICIFLSSASLYILHNLHKGDHEE

SEQ ID NO: 302160 - protein, 79 aa, Zea mays
  Clone ID: MRT4577_38646C.1.pep
DPDGLAQELKEMGFADVHIWYQPMYSTFRDAEDFFTYMFGDATFQSKFKALDEEKQAGFKKEAEAYFLEKFGPSVVDPK

SEQ ID NO: 302161 - protein, 46 aa, Zea mays
  Clone ID: MRT4577_38647C.1.pep
QYSIYVHDQLLDSQSSYPVLTDVLCVSSNTVNLLRVLLELSPLERR

SEQ ID NO: 302162 - protein, 161 aa, Zea mays
  unsure (1)..(161): unsure at all Xaa locations
  Clone ID: MRT4577_38648C.1.pep
FYNPFFFIFINSWFFFFFWGGGDPIFFLGEGGTEAKKARQRKQNKNVAIPFPIQKQRSGAFLFMGGQFFLGGGGFSPFFSXGGDPPTTTHRGYIPHPPPFYSLXLAREGKKMPALMGTGPPPSWGGPAVGSFVRLSGGGRTTDPFSGYWRXANRDRWPKSP

SEQ ID NO: 302163 - protein, 118 aa, Zea mays
  Clone ID: MRT4577_38649C.1.pep
SASILHRLVAEGSSPCAGCNNCPCLLTRSSTRERQCYDLSVNGCHPECMNCVKVDALTRTRHGPRSPSTPTAVMQVLTNFCQNTCPRAKLLSRSRPPLSTCDATSLLLSMSVREEIDI

SEQ ID NO: 302164 - protein, 50 aa, Zea mays
  Clone ID: MRT4577_3864C.1.pep
RRRHYMETSFSGKSPARSRLYHLYSQSLVPGRGTSCPMLNPSRPSPSEAS

SEQ ID NO: 302165 - protein, 125 aa, Zea mays
  unsure (1)..(125): unsure at all Xaa locations
  Clone ID: MRT4577_38650C.1.pep
DLLRKLWAIDRTPEAPGQFKARLGRFAPQFSGFNQHDSQELLAFLLDGLHEDWCRVKCKPYSDANDSDGRSDEEVADEYCNNHLALNDCIIVYIFQGQFXKSTLXVWPICNKVFVTYDPFYYFFL

SEQ ID NO: 302166 - protein, 119 aa, Zea mays
  Clone ID: MRT4577_38651C.1.pep
TRHCNHKEKGYIKRPGVQPTPSNRKTQIGYRLEHKQTGQEYYTNRLPFLKPHNPYLLEILPTTLHDHLSGQRQVEVQVEPKARTAPTAATGSNNLGSPSLTTSPPAPGSRTGTAGWPPS

SEQ ID NO: 302167 - protein, 114 aa, Zea mays
  Clone ID: MRT4577_38652C.1.pep
IRGWFFFFLVESFYLNKNAIQAITHWQNMPMPKTDLKKPQTNNTTSPIYKNKHPNSNTTHNKHQTQTTRTPPGPEQQFKNTRLCLQRATHKKTPGQQTKHQGPGHQALLPATHH

SEQ ID NO: 302168 - protein, 170 aa, Zea mays
  Clone ID: MRT4577_38653C.1.pep
CRAVLCLQLPWHAPLLGVLPPSISGVRHLSHGRLDLHPYVCFGSPIEFGGLDLLQAPPCLGAGATTGLDPAVAFFFQRQSQFTALDLWSPSSRSLAHVFSIRARPSLLPGAACAPLARHQPFFPVHASLPAHRFSLLLAALDWSRAGRCPVPVFADPAEELTAPIPPVTF

SEQ ID NO: 302169 - protein, 56 aa, Zea mays
  Clone ID: MRT4577_38654C.1.pep
RTQRYVRLHTRVYQSYIATKIKNTGRHLTTLLLGKPLLNPTKIHGNTSPFLQLSNY

SEQ ID NO: 302170 - protein, 206 aa, Zea mays
  Clone ID: MRT4577_38655C.1.pep
MVERANRPSALNAPAATGPSPQVDIVGEAGSQKVVARLPSGESVEVLLYGATVTSWKSNGGQTENLWLSEAADLTGKKPVRGGIPVVFPVFGPPPKEGHPTSTLPQHGFARGSRWEFMGKSTAEDALDSNSVKLDFGLDRQALSEESRKAWPLDFGLVYSVTLSKDSLQAVLTVRNEGEESFEFQFLLHTYFKIQDISKGVITGLA

SEQ ID NO: 302171 - protein, 76 aa, Zea mays
  Clone ID: MRT4577_38656C.1.pep
LGCHRRRTTESGSHRRPAAGSASSRRSCVRRLSSRASQATTAFCSRDPPPPHALGEPSPARAWVSIVTPDAWADAW

SEQ ID NO: 302172 - protein, 213 aa, Zea mays
  unsure (1)..(213): unsure at all Xaa locations
  Clone ID: MRT4577_38657C.1.pep
MRISTSALILASCLSTASAVPHNSKXQSIDVDVVVIGGGSSGIHAAINLKDAGAKVAVIEKKNQIGGHAETYVNPKTKAFANIGVVVFENTKTVQTYFERLGVESIVGSPFDTKTVTKQYDFSLGIPIPTPDKAKAAENQNAIASAMQAYSQNVFSKYPWIDQGYTFVPNPVPEELLQPFGLVAQQNNFTALLPLISQXNWYPGNITTIPALY

SEQ ID NO: 302173 - protein, 128 aa, Zea mays
  unsure (1)..(128): unsure at all Xaa locations
  Clone ID: MRT4577_38658C.1.pep
MKECISIHIGQIXIQVGNARWELNCLKNGIXAEGNXMSGDNTSAAAEDACNTTFSDTGAGKYVXPRAVXIDVEASAIYEVRSGTXRQFFDDVTIIRAKEDEANNIARDDYTIGESTDDLWMDPNKKLA

SEQ ID NO: 302174 - protein, 100 aa, Zea mays
  Clone ID: MRT4577_38659C.1.pep
FSEKKKNTRMSIKKTGGSDKPKNHAAIYIYICRSQKIFFLSVGPPIKKMVINCKGAPLKTLSLGVKGLKPPVLIQVQAPLAALVQKPHREGPPPPPVNHH

SEQ ID NO: 302175 - protein, 85 aa, Zea mays
  Clone ID: MRT4577_3865C.1.pep
RKITGSTPPGSWVPSGRLFALVFNPPLGHPSKVLKRVQCVVFVWGPPKNCWFFPKENSPKKLFFFCNTMFFQFIIGSTYNPPKKN

SEQ ID NO: 302176 - protein, 41 aa, Zea mays
  Clone ID: MRT4577_38660C.1.pep
QILTANHILDLLRLKGKVVVVSGASGPRGMGIEVARRATEM

SEQ ID NO: 302177 - protein, 57 aa, Zea mays
  Clone ID: MRT4577_38661C.1.pep
SITQTIMTGHFNQDQEISYQQCYDCATQIQNKSQSLFTKATNQESTDGMQFERKSIK

SEQ ID NO: 302178 - protein, 97 aa, Zea mays
  Clone ID: MRT4577_38662C.1.pep
EKSKMRSKKTLILLALKKKRCLNKKWAGMCERSCKDNTGFSPKKKRCRVIKELKLRSLVDQQGLEHEKIERQASHKRWRKGLAPSPFPSSVLPCKIN

SEQ ID NO: 302179 - protein, 54 aa, Zea mays
  Clone ID: MRT4577_38663C.1.pep
LQTHGTYAILQQEQYADNGTTMSTLEIDQTACVTFHVFRVLYPNNNRCCLEKNG

SEQ ID NO: 302180 - protein, 69 aa, Zea mays
  Clone ID: MRT4577_38664C.1.pep
IKMVPGCAQKNSSKWRGNPLHGHREKGGSKKRYGEVCGFFKKCPAAVCVAAAWVAVAGVGLLKTLKPTH

SEQ ID NO: 302181 - protein, 199 aa, Zea mays
  unsure (1)..(199): unsure at all Xaa locations
  Clone ID: MRT4577_38665C.1.pep
MGGEKENLDLSDLNTSLPAAAAALSAEDRVGLVNALKDKLQSLAGQHADVLESLSPNVRTRVEFLRGIQSQHDEIETKFFEERAALEAKYQKLYEPLYAKRYDIVNGVVEVDGVAKEPTTENAAEGGDSDAKGVPDFWLTALKTNDVLTEEIQERDEPVLKYLKDIKWSRIDDPKGFKLEFFFDTNPFFKNSVLTXSYH

SEQ ID NO: 302182 - protein, 98 aa, Zea mays
  unsure (1)..(98): unsure at all Xaa locations
  Clone ID: MRT4577_38666C.1.pep
MHGKGLFAEIGMKEEDIATMLVWEKSSEAFXDAFDGSKEDRQIFKGVICLTNVDGGLNDHYHGGIGHTVHAGKVVPSSRVPSSSADSYKAEHCRIVES

SEQ ID NO: 302183 - protein, 69 aa, Zea mays
  Clone ID: MRT4577_38667C.1.pep
DSGVACHFFITTIMPFNTSTRRSSFSMKSIWQYTTRAVHCYSQHSLRHTFFRWNLLHHADAIMLAPQRL

SEQ ID NO: 302184 - protein, 168 aa, Zea mays
  unsure (1)..(168): unsure at all Xaa locations
  Clone ID: MRT4577_38668C.1.pep
GPLAAPIANPRTPSPVPQASLASPRPDPIPXPSPSTPRISAPXADPLAGRDLXRPPSRPPLPPLRPPSSPXPEPXSWISRRHRSVAAPTARTPCLRRQPRTPPPASAPSRPGTPSSPARTASSSPPRIVLVVVVLVIVVIASDVCLPLVAHDLRFDLLLVLVLRIVWL

SEQ ID NO: 302185 - protein, 123 aa, Zea mays
  Clone ID: MRT4577_38669C.1.pep
WRRLITHGEPDQHERTPLPCCWEATRAVTSHSPENLTPGLNQPAGDGLATKGLGSMIDEMRLCHTRIPISTGISTRVINVLALNTLLAATAFLLLHIHPRDYNSLHSITWLRSISFEKKASFF

SEQ ID NO: 302186 - protein, 61 aa, Zea mays
  Clone ID: MRT4577_3866C.1.pep
RVKSQLYLYPRTKTQWPRFSYEQYTSRPLVGSFSYSYFTKTNYNILDANFEIQPTRPPTVR

SEQ ID NO: 302187 - protein, 138 aa, Zea mays
  unsure (1)..(138): unsure at all Xaa locations
  Clone ID: MRT4577_38670C.1.pep
AVVTTQQYAGEFGGDVHSAFLLVLNKLNAQDILFCSIPAQEFKAKHCTFFKKKKKKRGGGFSFFKKKKKKKRTLGWFPRLRGDSGDFPYTWGRFGLPFKGPILPFGGGFSIXWAVVSTGGLGKPRGFPILLCWXAFPF

SEQ ID NO: 302188 - protein, 41 aa, Zea mays
  Clone ID: MRT4577_38671C.1.pep
VTDQKISSIRGISPLLDQITQLGAPILIVAEAVSGEALTTL

SEQ ID NO: 302189 - protein, 75 aa, Zea mays
  Clone ID: MRT4577_38672C.1.pep
YKRKNDSSFGDWEQTHIFWFLLQYMDLIVPQSLGPIYDLFPFSCKVQVFKQHWSYWSIQVLLKPFFLSIVMYQLV

SEQ ID NO: 302190 - protein, 196 aa, Zea mays
  Clone ID: MRT4577_38673C.1.pep
LSSRIATAGPHRRGGMSSGAKAGIGAVVAILVLISFVGAAFWYRKKRRRVHGYHAGFLMPSPASTTTQVLAKTNFSAGSPESKDSMPEFSMGNCRFFTYEELYQVTNGFSAQNLLGEGGFGSVYKGCLADGEFAVKKLKDGGGQGEREFHAEVDIISRVHHRHLVSLVGYCISDEQRLLVYDFVPNNTLHYHLHGL

SEQ ID NO: 302191 - protein, 60 aa, Zea mays
  Clone ID: MRT4577_38674C.1.pep
VNSRKQGTLEMVSVNPVYMHADIANTTGVVTSIEPSKADDSYDIRFQTSEEFVQISLRFD

SEQ ID NO: 302192 - protein, 150 aa, Zea mays
  Clone ID: MRT4577_38675C.1.pep
MAVNWELRGCCDHDQRIFIAAVGVSTVVILLLWRTFLLTPFKLITVFLHETSHALACKLTCGDVEGMQVHANEGGVTQTRGGIYWIILPAGYLGSSFWGMVFILASTNILTTRIAAGCFILALFIVLFVAENWFLRWLCLGMHQHDLVSI

SEQ ID NO: 302193 - protein, 78 aa, Zea mays
  unsure (1)..(78): unsure at all Xaa locations
  Clone ID: MRT4577_38676C.1.pep
MTQSISVEIGQSGIRASNSSWXLYCLHDGIQSDGQEPGHKTDXHQDDDFSTFFTHTGAGKHLRLTNFVDLQPTVTREV

SEQ ID NO: 302194 - protein, 111 aa, Zea mays
  Clone ID: MRT4577_38677C.1.pep
SRCGCCHRPRHLDGAARGTRSRIPSSSGCPFSCATCLHACTAAGPPGGLVRPVCPPHRPCLRRPAARRRAEGTAVHDAATRPCTMCRRQRPDQWSSNPPNHELLKEWRTVW

SEQ ID NO: 302195 - protein, 176 aa, Zea mays
  Clone ID: MRT4577_38678C.1.pep
RLGDTIEGMQVHANEGGVTQTRGGIYWIILPAGYLGSSFWGMVFILASTNLLTTRIAAGCFILALFIVLFVAENWFLRWLCLGFIVFIAVVWVIQEFTSFHVLKYVILFIGVMNSLFPVYDIYDDLISRRVNTSDAEKFAEICPCPCNGFAWGVIWGFISFIFLCASIYLGLVILS

SEQ ID NO: 302196 - protein, 234 aa, Zea mays
  Clone ID: MRT4577_38679C.1.pep
MAVNWELQGCCHRDQRIFIAAVGVSTVVILLLWRTFLLTPFKLITVFLHETSHALACKLTCGDVEGMQVHANEGGVTQTRGGIYWIILPAGYLGSSFWGMVFILASTNLLTTRIAAGCFILALFIVLFVADNWFLRWLCLGFIVFIAVVWVIQEFTSFHILKYVILFIGVMNSLFSVYDIYDDLISRRVNTSDAEKFAEICPCPCNGFAWGVIWGFISFIFLCASIYLGLVILS

SEQ ID NO: 302197 - protein, 604 aa, Zea mays
  Clone ID: MRT4577_3867C.1.pep
MQGLAPPTSVSIHRHLPARSRARASNSVRFSPRAVSSVPPAECLQAPFHKPVADLPAPSRKPAAIAVPGHSAAPRKADGGKKQLNLFQRAAAAALDAFEEGFVANVLERPHGLPSTADPAVQIAGNFAPVGERPPVHELPVSGRIPPFIDGVYARNGANPCFDPVAGHHLFDGDGMVHALRIRNGAAESYACRFTETARLRQERAIGRPVFPKAIGELHGHSGIARLALFYARAACGLVDPSAGTGVANAGLVYFNGRLLAMSEDDLPYHVRVADDGDLETVGRYDFDGQLGCAMIAHPKLDPATGELHALSYDVIKRPYLKYFYFRPDGTKSDDVEIPLEQPTMIHDFAITENFVVVPDHQVVFKLQEMLRGGSPVVLDKEKTSRFGVLPKHAADASEMAWVDVPDCFCFHLWNAWEDEATGEVVVIGSCMTPADSIFNESDERLESVLTEIRLDARTGRSTRRAVLPPSQQVNLEVGMVNRNLLGRETRYAYLAVAEPWPKVSGFAKVDLSTGELTKFEYGEGRFGGEPCFVPMDPAAAHPRGEDDGYVLTFVHDERAGTSELLVVNAADMRLEATVQLPSRVPFGFHGTFITGQELEAQAA

SEQ ID NO: 302198 - protein, 168 aa, Zea mays
  unsure (1)..(168): unsure at all Xaa locations
  Clone ID: MRT4577_38680C.1.pep
MQVQGHLRRVLRAPPPRILLYRAISSPPPGGGSGVAVKQVTRGNMEEALEKLRGRVREAAFVGVDLEMSGVTSAPWRDTFELDRADVRYLKLRDSAERFAALQLGVCPFRWDPAKSAFVAHPHNFFIFPRXELPSDCSSHEFLCQTTSIEFLXKYQFDFNTCFREGIS

SEQ ID NO: 302199 - protein, 172 aa, Zea mays
  Clone ID: MRT4577_38681C.1.pep
QVEGMQVHANEGGVTQTRGGIYWIILPAGYLGSSFWGMVFILASTNLLTTRIAAGCFILALFIVLFVADNWFLRWLCLGFIVFIAVVWVIQEFTSFHILKYVILFIGVMNSLFSVYDIYDDLISRRVNTSDAEKFAEICPCPCNGFAWGVIWGFISFIFLCASIYLGLVILS

SEQ ID NO: 302200 - protein, 121 aa, Zea mays
  unsure (1)..(121): unsure at all Xaa locations
  Clone ID: MRT4577_38682C.1.pep
CAPTTKPPNINFXFLFYFYYHNYYLTCYXFLTFFNTFIDYLFLLXPIYFPFSIINIYFFLFIKFLYFFLLILFYLIFFFSLFYLFYLIXFFFILFYSFFYYNILILFFYYIFXIYIIFFLF

SEQ ID NO: 302201 - protein, 49 aa, Zea mays
  Clone ID: MRT4577_38683C.1.pep
PMRPSTRPETRGIKHILQAPGPTDSKDIYWGCEHTDTCLHHCITDLNPA

SEQ ID NO: 302202 - protein, 52 aa, Zea mays
  Clone ID: MRT4577_38684C.1.pep
SNTHTFCFHQTATNTHLYLHFTIFKSTTIKLDQHSIYLYKLPQQHPNYTHTL

SEQ ID NO: 302203 - protein, 90 aa, Zea mays
  unsure (1)..(90): unsure at all Xaa locations
  Clone ID: MRT4577_38685C.1.pep
KIYFYWASXSQDAYVCSSLGSSNGPLCKHEHDDYSERPECPFLIRFGYCKIASSCQFYHPKDIFFFSFHPEYKSQRRPQLTYKSCGHSCK

SEQ ID NO: 302204 - protein, 249 aa, Zea mays
  Clone ID: MRT4577_38686C.1.pep
SGRAAWPGGRGGGRGAREAGGAAGRAAGRKPARHRRARLPGRRGGGGFTGGGAGSGASGGGGGNKMLDPGINTAIVLGASTYALTKLLTVDQDYWHGWTIFEILRYMPEHNWSAYEEALKANPVLAKMMISGVVYSLGDWIAQCYEGKPIFDFDRARMFRSGLVGFTLHGSLSHYYYHICEALFPFKDFYGSTVWSLSGSQYCRLIQTKSQRQGILIVPPHQRLQRTTPHSNPKDLGKLLRPSLTSGVM

SEQ ID NO: 302205 - protein, 46 aa, Zea mays
  Clone ID: MRT4577_38687C.1.pep
NRMNSITNSSTTTEVLDLPASTLRRVISSLGQHSGSASRHAHMPPP

SEQ ID NO: 302206 - protein, 72 aa, Zea mays
  Clone ID: MRT4577_38688C.1.pep
QNKYKGGIPKAFLFPPPNKMEVRTWSGFRLKFCFKREKFAKAVSLPPGSAYIPRPINSSPSIYLTLCPQKIK

SEQ ID NO: 302207 - protein, 326 aa, Zea mays
  Clone ID: MRT4577_38689C.1.pep
RPTRPPTRPPTRPRALRFAAAGDEADVLPGPGAEGEAVVPGRLEEQRDEPLGGSQLDIGGLAFQGDVGGGFTGGGAGSGASGGGGGNKMLDRGINTAIVLGASTYALTKLLTVDQDYWHGWTIFEILRYMPEHNWSAYEEALKANPVLAKMMISGVVYSLGDWIAQCYEGKPIFDFDRARMFRSGLVGFTLHGSLSHYYYHICEALFPFKDWWVVPAKVAFDQTIWSAVWNSIYFVVLGFLRLESPTTIYNELKSTFWPMLTAGWKLWPFAHLVTYGVVPVEQRLLWVDCVELVWVTILSTYSNEKSEARNSDSTSTPAASKDNST

SEQ ID NO: 302208 - protein, 89 aa, Zea mays
  Clone ID: MRT4577_3868C.1.pep
GRETSHSAPTADETNIVLSTSSYTDVHTADCPCYSDGSIQAKQGFHALKPSDASHVHEQCRVRRFRGLLVRHRGHLHQDPQLRRRHLLG

SEQ ID NO: 302209 - protein, 355 aa, Zea mays
  Clone ID: MRT4577_38690C.1.pep
MAAAVASSPSPSPASTRLLRGHHPPPSCSAPSLLRLTRSSRRLRLRAAAAAEEADVLPGPGAEGEMATGGRLEEQPEGPIGGSQVDIGGLAFQGDMGGGGFAGGSGGAGAGGGDGNKMLDRGINTAIVLGASTYALTKLLTVDHDYWHGWTIFEILRYMPEHNWSAYEEALKTNPVLAKMMISGVVYSLGDWIAQCYEGKPIFEFDRARMFRSGLVGFTLHGSLSHYYYHICEALFPFKDWWVVPAKVAFDQTIWSAIWNSIYFVVLGFLRLESPTTIYNELKSTFWPMLTAGWKLWPFAHLVTYGVVPVEQRLLWVDCVELVWVTILSTYSNEKSEARNSDSTSTPAASKDNST

SEQ ID NO: 302210 - protein, 159 aa, Zea mays
  Clone ID: MRT4577_38691C.1.pep
GRAGVAYLHGLSKVVIHRDLKPSNVLLDGNWRAKIADFGTAKVFVDGQTNPTLVQTEGYRAPEYTARGPSLTLKCDVYSFGVVLIEIVSGQRNSSNQTLISDARESWSQNKIKEDLLDSAVGQPGPEILLRLERCVQVGLLCVQQSPADRPSMAEVSRC

SEQ ID NO: 302211 - protein, 351 aa, Zea mays
  Clone ID: MRT4577_38692C.1.pep
MAAAAVATVASPSPASRRLFPSAGPSLLRLPRPTTRLRRALRFAAAGDEADVLPGPGAEGEAVVPGRLEEQRDEQLGGSQLDIGGLAFQGDVGGGFTGGGAGSGASGGGGGNKMLDRGINTAIVLGASTYALTKLLTVDQDYWHGWTIFEILRYMPEHNWSAYEEALKANPVLAKMMISGVVYSLGDWIAQCYEGKPIFDFDRARMFRSGLVGFTLHGSLSHYYYHICEALFPFKDWWVVPAKVAFDQTVWSAIWNSIYFVVLGFLRLESPTTIYSELKSTFWPMLTAGWKLWPFAHLITYGVVPVEQRLLWVDCVELVWVTILSTYSNEKSEARNSDSTSTPDASKDNSR

SEQ ID NO: 302212 - protein, 472 aa, Zea mays
  Clone ID: MRT4577_38693C.1.pep
WDPRGRRGFFLLCYAGVNLSCFLLDLLDAPSWRPRWKFHHWSLSLVGALLCVVIMFLISWSFTVVSLALASLIYYYVSIKGKAGDWGDGFKSAYFQLALRSLRSLGANQVHPKNWYPIPLVFCRPWGKLPENVPCHPKLADFANCMKKKGRGMSIFVSIIDGDYHELAEDAKTACRQLDAYIDYKRCEGVAEIIVAPNMSDGFRSIVQTMGLGNLKPNIVVMRYPEIWRRENLTQIPSTFVSIINDCIIANKAVVIVKGLDEWPNEYQRQYGTIDLYWIVRDGGLMLLLSQLLLTKESFESCKIQVFCISEEDTDAEELKADVKKFLYDLRMQAEVIVVTMKSWESHMESSSSGVQQDNSHEAYTSAQQRIETYLDEMKETAQRERQPLKENGRQVVVNEQKVDKFLYTMLKLNSTILRYSRMAAVVLVSLPPPPLNHPAYFYMEYMDLLVENVPRMLIVRGYTRDVVTFFT

SEQ ID NO: 302213 - protein, 255 aa, Zea mays
  Clone ID: MRT4577_38694C.1.pep
MKILVAVKRVVDYAVKVRVRPDRTGVETANVKMSMNPFCEIAVEEALRLREAGAAAEVVAATVGPAQSAETLRTALANGADRAIHVLHDPDPARPLLPLTVAKILRAVALQEKPGLVILGKQAIDDDCNQTGQMLAGLLQWPQGTFASKVILDTEKQKATVEREVDGGIETICLDLPAVITTDLRLNQPRYATLPNIMKAKSKVIKKVVPKDLGVDIRSDMEVIEVNEPPKRKAGVILSSVDELIDRLKNEARVL

SEQ ID NO: 302214 - protein, 81 aa, Zea mays
  Clone ID: MRT4577_38695C.1.pep
SSRARVLTTHTQKERDVRTLMTDDIFAVDQLFRKKRAKNGGRGTSTFLSCPVEIPSRCCNPSPMCSRCPFSLLYYYFCIPS

SEQ ID NO: 302215 - protein, 69 aa, Zea mays
  Clone ID: MRT4577_38696C.1.pep
LRGDLNKHGLTFSVPHHSSPSRYKFVKQTAPNFLICFGRYKTPLHNRFTTFFFKIAAFPAPQMGGFQIT

SEQ ID NO: 302216 - protein, 83 aa, Zea mays
  Clone ID: MRT4577_38697C.1.pep
VEQEKLLSKEFKAKSPNLEAQVFRDTQKAKLWRLPNSNGDLKVKQEKKLVSAPGKLAECQKTIVNLGPQLKSLTDFDGVGADP

SEQ ID NO: 302217 - protein, 62 aa, Zea mays
  Clone ID: MRT4577_38698C.1.pep
SCACVTNYLHWQLQSGRVCSRQECCPENIHQSQTHSQMVPCLLAVLEVHSLDPPAHNAQGRD

SEQ ID NO: 302218 - protein, 95 aa, Zea mays
  Clone ID: MRT4577_38699C.1.pep
VPKKSDFFARCLKLMASPSPTKKFTREAARQFLIAISESTPETLSPQTVRTPPFSSPKNGKPGNGGDKFRLKFMSITNLFFNAQPGQCPPKDVAV

SEQ ID NO: 302219 - protein, 151 aa, Zea mays
  unsure (1)..(151): unsure at all Xaa locations
  Clone ID: MRT4577_3869C.1.pep
SEHQQNCLPYLHCCLIIFRGDSVFVSIALTRVHRARGLAPAPLRVFXVLNRARPPFCVRGPGTTTPYSQSGRRVPAAEDCPCHSVSSRGSRSLTWRPKRAPLTSTRRKSPAVKLKPGPAWPGCPHRNKGPGPWLTRGVAGTRRELQATXGS

SEQ ID NO: 302220 - protein, 114 aa, Zea mays
  Clone ID: MRT4577_386C.1.pep
NPPFFIPGNGIGDVDSKGPPFPLGDPLNGSKRFVSLQPPLVFFKETINLGSNVQGFFPWFFLANFKWFPGFPQRFGLFFVAPTNNSPRSMKGFPKGLKQFPPGKKPPKKIFSPP

SEQ ID NO: 302221 - protein, 50 aa, Zea mays
  Clone ID: MRT4577_38700C.1.pep
LQTQNIGLAIGYLFPREWTSCINSTLRRCEANCDSGCTDGWYLLPVIDMW

SEQ ID NO: 302222 - protein, 72 aa, Zea mays
  Clone ID: MRT4577_38701C.1.pep
TVEWRARSESAQELMLSGVGGFMLGLLFLGAELFIYFRNQKGHSELQPTGFLSCNADDQIHGRTFCRSFADC

SEQ ID NO: 302223 - protein, 86 aa, Zea mays
  unsure (1)..(86): unsure at all Xaa locations
  Clone ID: MRT4577_38704C.1.pep
PRYPSIYMHVCLVSHSFSFLPIFXGFMFYSCATAAELHPRSTSLTAAATSSFVSVGGALPRLLLPLQNSLPAGRFVAVAASRDVDL

SEQ ID NO: 302224 - protein, 143 aa, Zea mays
  unsure (1)..(143): unsure at all Xaa locations
  Clone ID: MRT4577_38705C.1.pep
PIVXTXIMFXXIXXXSSXRLISXRXXXXXQXXLIKLIIKQIMLIHTPKGRTXALIIVSLIIFIGSTNLLGLLPHTFTPTTQLSINLSIAIPLXAGAVILGFRHKLKNSLAHFLPQGTPISLIPILIIIETISLXIQXIVLAVX

SEQ ID NO: 302225 - protein, 137 aa, Zea mays
  Clone ID: MRT4577_38706C.1.pep
MADAKATTAVTLRTRKFMTNRLLARKQFVLEVIHPGRANVSKAELKERLAKVYEVKDPNCIFVFKFRTHFGGGKSSGFGLIYDNLESAKKFEPKYRLIRNGLATKVEKSRKQIKERKNRTKKIRGVKKTKAGDAKKK

SEQ ID NO: 302226 - protein, 83 aa, Zea mays
  unsure (1)..(83): unsure at all Xaa locations
  Clone ID: MRT4577_38707C.1.pep
FHAGLSWATDNHSLHNALTTYREVLXSKIILYRKTHTSRTIXIPTFSTKHAMPNTINGMNGTELYVRNITVNVAQSRCTRGSG

SEQ ID NO: 302227 - protein, 70 aa, Zea mays
  unsure (1)..(70): unsure at all Xaa locations
  Clone ID: MRT4577_38708C.1.pep
MSPVKVFGHPMLTNVARVLLFLEEVGAEYELVPMDFVAGEHKRPQHVQXLNPFRKKKIVGPPPFLWGGGG

SEQ ID NO: 302228 - protein, 80 aa, Zea mays
  Clone ID: MRT4577_38709C.1.pep
NRLPGHINLTNVQHRDSPLLKHEQLHESHRSCLRPKSTDPHQQAILGQQDARGFHSPTSVGSHLIYTNDHNALACTTTRG

SEQ ID NO: 302229 - protein, 52 aa, Zea mays
  Clone ID: MRT4577_3870C.1.pep
PIANVSTAGTRAIDQRSCERTAALFASLHYWHGGFCLSCLVWPVFFTILTLG

SEQ ID NO: 302230 - protein, 114 aa, Zea mays
  Clone ID: MRT4577_38710C.1.pep
ADAWADACSDSWADAWADAWGDAWAWMRILPVQLVEQERNEHATLVLQQSPMLKIMRGMWGTLQSNSATAKMVLQGKLRTESIKNAMNLVKKCGAPEGSVEHYMATKLFMKAEN

SEQ ID NO: 302231 - protein, 59 aa, Zea mays
  Clone ID: MRT4577_38711C.1.pep
RYTYAVSLYTIDRNHQSALPLDNAVSTMHVYALLRFMMIRPFFAWQPSTLFFFSPCFSY

SEQ ID NO: 302232 - protein, 95 aa, Zea mays
  Clone ID: MRT4577_38712C.1.pep
IFEVQLKKKDRKKILLTAGVEMSKPGKHPSNPADARRQDEPEADEMRRQRRLGKKRAKGEERTWEGNGRAVLTSVRVRVFFWSPRILDMEEYSFF

SEQ ID NO: 302233 - protein, 154 aa, Zea mays
  Clone ID: MRT4577_38713C.1.pep
MSPARSSSSNVFDPLSLDFWASFADPFGVVRPLAEQCPVLTNVRVDWKETPEAHVFRADLPGVRKEAAKVEVEDGNVLVISGERAREEEEAGKDEAWRWRLAERSSGRFKRRFRLPRGARLDQVHASMENGVLTVTVPKEEAKKPQVRAVEISG

SEQ ID NO: 302234 - protein, 85 aa, Zea mays
  unsure (1)..(85): unsure at all Xaa locations
  Clone ID: MRT4577_38714C.1.pep
XFFFXGTKIILSTLKRCYMHNPKGKRLTVYRSIQILSIMATLSYTWHTQYWTTSYIHATMDMQAYVHTQTDFILPCLAFDKKHSH

SEQ ID NO: 302235 - protein, 40 aa, Zea mays
  unsure (1)..(40): unsure at all Xaa locations
  Clone ID: MRT4577_38715C.1.pep
WIQRTPXPFNIHTRRIHARPXRGLMSLASLGXPRVAXXWX

SEQ ID NO: 302236 - protein, 54 aa, Zea mays
  unsure (1)..(54): unsure at all Xaa locations
  Clone ID: MRT4577_38716C.1.pep
FXFFLRIGKNVIYLQSNGVQMIPARKYIRSMYSSAAENPLSVYSEPARILLXGV

SEQ ID NO: 302237 - protein, 160 aa, Zea mays
  Clone ID: MRT4577_38717C.1.pep
MSFLSSLSSLGLGYSIAIALGFLVLLASLLLAFYFCFGRGGDYWAGEAATTASSSGHLSITVPRVLFVAEGSESPDADAAYSSAAVAACSPVGLDAAAIASYPKVPFSSSGATDADAMCSICLSEYRDGETLRVMPECRHGFHVACLDAWLRRSASCPVC

SEQ ID NO: 302238 - protein, 105 aa, Zea mays
  Clone ID: MRT4577_38718C.1.pep
GGPPLVWVGILRPPAVFLLGRPAGFSPPLRHWSVGHAPPSVVGFCSLPVCGRLSGGHPWPCLRVPPPAWGVCLLSPFCRLFVLPVCCCKTKKMFSGVFDEKTPRP

SEQ ID NO: 302239 - protein, 87 aa, Zea mays
  Clone ID: MRT4577_38719C.1.pep
YYYTYQGRHKLLPISFKQKILCGGPSPPALQSCFSSWGNHLSTEATEICYFLTTTIVFARTWAGMTRGRAGLSMSSVCGGVLLATAR

SEQ ID NO: 302240 - protein, 59 aa, Zea mays
  Clone ID: MRT4577_3871C.1.pep
MNVLIVAGALLALAASADSSTSGGCGCQTPPFHLPPSFYMPPPFYLPPQYQPQPWQYPT

SEQ ID NO: 302241 - protein, 109 aa, Zea mays
  Clone ID: MRT4577_38720C.1.pep
PCSTPRHPRPGSCEHYCREREEEVEVTEEKTSPPLESQAETWLYFDICESEPDSPTNKENDLVEEPEELAGEAPEQQSVGGGCQHCNHCSGEDEAVEGDFQEFQDYEEF

SEQ ID NO: 302242 - protein, 371 aa, Zea mays
  Clone ID: MRT4577_38721C.1.pep
MVLAAHDPPPLVFDAARLSGLSDIPQQFIWPADESPTPDSAEELAVPLIDLSGDAAEVVRQVRRACDLHGFFQVVGHGIDAALTAEAHRCMDAFFTLPLPDKQRAQRRQGDSCGYASSFTGRFASKLPWKETLSFRYTDDDDGDKSKDVVASYFVDKLGEGYRHHGEVYGRYCSEMSRLSLELMEVLGESLGVGRRHFRRFFQGNDSIMRLNYYPPCQRPYDTLGTGPHCDPTSLTILHQDDVGGLQVFDAATLAWRSIRPRPGAFVVNIGDTFMALSNGRYRSCLHRAVVNSRVARRSLAFFLCPEMDKVVRPPKELVDDANPRAYPDFTWRTLLDFTMRHYRSDMRTLEAFSNWLSTSSNGGQHLLEKK

SEQ ID NO: 302243 - protein, 88 aa, Zea mays
  Clone ID: MRT4577_38722C.1.pep
EKPAWDAHDSLTDGVHAVTLHGTKLSHITFRMTKKVTKKMRADTAPSPTEYVCALIIASGTTPNELNGVVSMSDYERNLVLRPAASQR

SEQ ID NO: 302244 - protein, 54 aa, Zea mays
  Clone ID: MRT4577_38723C.1.pep
LMVVLKISLLSSLYRIIDPLGLAGRARFCNSLSAFPKKVSTVKHLYPCICMWAR

SEQ ID NO: 302245 - protein, 122 aa, Zea mays
  Clone ID: MRT4577_38724C.1.pep
MDDRQYAGLTKAGLGVLAFNSGLAIYNSWGDASSVAFVLSADSILVLLFLCLRELELQGRPGAAGRGRDVGIIRAAVWTLTTLLSAMFASRVAPLMPPVVGALVWATAVATAAGGFWAVFLS

SEQ ID NO: 302246 - protein, 81 aa, Zea mays
  Clone ID: MRT4577_38725C.1.pep
VCSQRRTHGVLLSVFYKEAFMIARPFLSAVLTAMEGAITCATAMVMSRSVQSIHSCDHPASICEGRSLHAHYGHPATCVCG

SEQ ID NO: 302247 - protein, 72 aa, Zea mays
  Clone ID: MRT4577_38726C.1.pep
MALLPLFLRPVVRFAARVAEGGPAVAVATILHRAGALPRNRGLKNLVRDDALHGRGQDCIASFVVGVMRCLC

SEQ ID NO: 302248 - protein, 85 aa, Zea mays
  Clone ID: MRT4577_38727C.1.pep
IGRVELEFPICCTPWTAGCAMLAAGIFWAPSMGVAAVVGEERDELEREELRELLLGHTIGAEEEGRHGVGACCCAMGEGAELPAA

SEQ ID NO: 302249 - protein, 71 aa, Zea mays
  Clone ID: MRT4577_38728C.1.pep
GRVGGRVGFFFFFFFFFFFFILGGVFFYVSFLFTLSCYPTADLYNTRTKYTGPRITTTRRGKTVAKPKLIA

SEQ ID NO: 302250 - protein, 78 aa, Zea mays
  Clone ID: MRT4577_38729C.1.pep
VVLEGGDKRFDKQPTVCPCFCFWGSGKTGQGRFTRSFFKKTYGGGGGNTQKGGRVFLPVKRFTPFGQGSFLPVKCPWP

SEQ ID NO: 302251 - protein, 96 aa, Zea mays
  Clone ID: MRT4577_3872C.1.pep
RAYQSIHRFQYERSGSDPILGGVVVSSDETESSDDDDDSGGGGGYSTRESTPEVDENEVDKKAEGFIARFREQIRRQSSGNNAEYAGSRGVKHHGK

SEQ ID NO: 302252 - protein, 186 aa, Zea mays
  unsure (1)..(186): unsure at all Xaa locations
  Clone ID: MRT4577_38730C.1.pep
FRGLPSKSNQALKSVKNTLVFSPRIDKTHIHIARIEHGVSAKSTPTVHLIYKLXGNDKRVIXRXDKDAAEIKKPAFKYAWAPALLKADRQRGITIDIALRKFATTTHYCTVTDAPGHRDYIKNMITATSQADCADLIIDSTTGGFEAGISKDGQTREHARLAFTLGETQTICCCHKMAATSPKYSK

SEQ ID NO: 302253 - protein, 179 aa, Zea mays
  unsure (1)..(179): unsure at all Xaa locations
  Clone ID: MRT4577_38731C.1.pep
GFFFFFFFFFFFFFFFFFFFFFFLILHIPPKSIHYDPKKKRKKPRKKKEGGGGGRKTPPPQRQKNRXGPRSPPCKQWGGRPPHPGNGRPPGAGXEPPGPPGGGGKPPEGXPRPPGNPXGKRPPGPGGQPWPVGPXKPPXPPGEGGRNPPGXRPPPPRGQLSKGPNRAAGGEPQGGTRGT

SEQ ID NO: 302254 - protein, 72 aa, Zea mays
  Clone ID: MRT4577_38732C.1.pep
TFLHHHSYVQVDDSETHPLVAHQHKSLACFLFLWTTRKILQRAPRSGHRTLELRSGIDRRPIAGREPGLLLS

SEQ ID NO: 302255 - protein, 82 aa, Zea mays
  unsure (1)..(82): unsure at all Xaa locations
  Clone ID: MRT4577_38733C.1.pep
MSEEDKTAASAEQPNRAPKVNERILSSLXRRSGAAHPLYDLEIGPDADAVCNGVVDTPXGSTVKYELDQKTGLIKEDKNLYW

SEQ ID NO: 302256 - protein, 72 aa, Zea mays
  Clone ID: MRT4577_38734C.1.pep
DPDRITAKSERPSNRIIPAIVRATRYTQTIHKSAVDVYKPGKGTESLSVSSGTVGTNSSNTPSGSDSSKVPI

SEQ ID NO: 302257 - protein, 102 aa, Zea mays
  Clone ID: MRT4577_38735C.1.pep
RHRRELKFLWVTRAAADLGSLQGKGRLPLLDRIHPHVPDHEGPRARCKKLSYGTKPASSTTRRWPTGSSQSPTASAPGGWSNPAKPRARRSWPGAGTRLIAH

SEQ ID NO: 302258 - protein, 187 aa, Zea mays
  Clone ID: MRT4577_38736C.1.pep
DPGPRAGLAPPSLGGRGFLPAQIKQALVFACGPGSYSSPLRQGGGCFLPGGGLFFSSPPFGRFFLPPRPGKRGGGFSGPGVVFCQQAPVGSCVSPPRLVNGFFGGAPKTSPVGGGSLFSAPPPPPNRGGVFFGSPKKKHQKKRKNKKKKKHQQKKKKKTKKPKKKKKKKKKKKKKKKKKKKKKKKLE

SEQ ID NO: 302259 - protein, 80 aa, Zea mays
  Clone ID: MRT4577_38737C.1.pep
RADEFPKSNSTFPNTRFLKGLFKLLTFRGYGLYWRAGAKRLVGKLKRPRLNTARFTLCSTKTLGGPISETWFHIHGIPIH

SEQ ID NO: 302260 - protein, 88 aa, Zea mays
  Clone ID: MRT4577_38738C.1.pep
AVVTTQSTFFFFFFFFFGFFFFFFFFFGKNNCTLLVYYDIMGGGQRGNSTCRNLQIGGGEGYNFLHRGLLSHCARWVPPASSALLPLV

SEQ ID NO: 302261 - protein, 112 aa, Zea mays
  unsure (1)..(112): unsure at all Xaa locations
  Clone ID: MRT4577_38739C.1.pep
EGVPNDEIVSDLKVLVIKPVIPDRVRGXTTVVHLNPSGRFVICGPHGDSCLTGRKIIIDTYGSWGAHLVGAFFGKDPTKVDRNGAYVARHDVKSIVASGLFRRLLVQVYYAI

SEQ ID NO: 302262 - protein, 128 aa, Zea mays
  unsure (1)..(128): unsure at all Xaa locations
  Clone ID: MRT4577_3873C.1.pep
LQFFFIIFFLVVFLENSGGSKQXGGLTKKGPTLKPKRSLENRTTTCQENNKGGDTKTRLPKKLMEKPYHPINGEKPTQERQQPHRPRGGPDRERTLLWKESTCGPPGAGGALTKTPEEELAPPQGAPL

SEQ ID NO: 302263 - protein, 86 aa, Zea mays
  Clone ID: MRT4577_38740C.1.pep
VVDRANLTSHLTAALQSSCYAISSHGFLDLLRRSESERQRMKKVFVYTFERERERGSKKLYGPSKREKKKKFKKAVERHGMDLKSC

SEQ ID NO: 302264 - protein, 86 aa, Zea mays
  Clone ID: MRT4577_38741C.1.pep
VVDRANLTSHLTAALQSSCYAIFSPGFFALFRRSKSERQRIKKVFVSPFEREKERGSKKLYGPSKREKKKKFKKAVERHGMALKSC

SEQ ID NO: 302265 - protein, 148 aa, Zea mays
  unsure (1)..(148): unsure at all Xaa locations
  Clone ID: MRT4577_38742C.1.pep
MAFAEEETTRYLGTNLIESCGDXGGRAXAGWAPSGSCTLSAHADEDASLPXWQPHCPPPPAATTXDDSDEDEFQQRAPRPSGRYVLAARRASDKDGLCRAVSRAPIRPNVTYRVAGWVXLGAAXDGSHAVHXEVRXDGGGRPGGGGVA

SEQ ID NO: 302266 - protein, 70 aa, Zea mays
  unsure (1)..(70): unsure at all Xaa locations
  Clone ID: MRT4577_38743C.1.pep
QKQKIVPFNNRDAASRDSFFTQQQVLPFSNRCAXSPXTLFALQQWLPFGQPALANPGTSYQQHIIGGALF

SEQ ID NO: 302267 - protein, 129 aa, Zea mays
  Clone ID: MRT4577_38744C.1.pep
RIPRTIEFLNASGTRILLKVGDGRLGLTHVLEESWLHLPRRLTLRMVMITGLSTTCPSGSKCRRPLLFRAACAHDAPGPLMSSKLLTPVHLQRRAQRPRVLSISRLRGPTSLLCSPSGRTRRLVSCLRE

SEQ ID NO: 302268 - protein, 45 aa, Zea mays
  Clone ID: MRT4577_38745C.1.pep
YLKKLQLNLLVVSSSSSTPSRNILLPARRRQLMRRRQINKCSGWS

SEQ ID NO: 302269 - protein, 122 aa, Zea mays
  unsure (1)..(122): unsure at all Xaa locations
  Clone ID: MRT4577_38746C.1.pep
KKKKGPRGFFFGPKSRKNLGGKGSPPPPKNFFCPPPSPPKKRAPPPPKPPFPXPPGAPGGLQGPHPAWGSGPVPPPGVFSRGAITPAPGNFVPGFFTPWAPTFRPFWEPLLFLKTGGEPRGG

SEQ ID NO: 302270 - protein, 103 aa, Zea mays
  unsure (1)..(103): unsure at all Xaa locations
  Clone ID: MRT4577_38747C.1.pep
HKTGPSLLMMTSHTTRRQGAQALFFSSRHRYGGPEGAIATTCFPTFLPKNNPIKECWRALNTLDDVLHDGYLPVLGGARPFLLEPXVRVGGAFNVEPPPRAVL

SEQ ID NO: 302271 - protein, 208 aa, Zea mays
  unsure (1)..(208): unsure at all Xaa locations
  Clone ID: MRT4577_38748C.1.pep
MPSTSGPVAVASASASAKAAPSPDVGISPDLYPSEDDLAYEEEILREPFKLKGWWRYLVARAAAPFAKRAVIYERALKALPGSYKLWHAYLRDRLDHARPHPIDHPAYSSLNNTFERALATMHKMPRVWVLYLTSLLDQRLLTRARRAFDRALRALPVTQHDRIWPLYLRLASLPACPXVETSLRVFRRYPPFDPXHAEDFIXFLISA

SEQ ID NO: 302272 - protein, 157 aa, Zea mays
  Clone ID: MRT4577_38749C.1.pep
MANCTAQYAPLRPSRHQLLPGQGESDTHWNVFLLELEEHSSRTLTSPPYCPIAVEAAQFLRGVEDGYEALRSLPESTETELSILRRGVKLARQLEEMECDRCWKVLADFWSEMLLYIAPSENVKEHIEALANGGEFITHWWALLTHAGILDRNVHSA

SEQ ID NO: 302273 - protein, 79 aa, Zea mays
  Clone ID: MRT4577_3874C.1.pep
SRVLIPVALRDSISAVSSCPQDIGSTESEVDQAEIERLEEHASALRKEIESKNKQVKLLMDQLRDLITDVAMWQSPCSV

SEQ ID NO: 302274 - protein, 92 aa, Zea mays
  Clone ID: MRT4577_38750C.1.pep
SYFSTVDRMIDRTNDADGASFTEHTASSAACRTVRRPASSSSSPLSCHRSESSSCSAARCCNYHIGCRFLTSLLQCTANRQITVVAYSHAAG

SEQ ID NO: 302275 - protein, 76 aa, Zea mays
  Clone ID: MRT4577_38751C.1.pep
GLQTLTNNLCFTYAKCTPPISIGPPAYYSHLAAFRARFYIGPDSNDNGSLASGASTRRGPSPGARHTKACASNFSL

SEQ ID NO: 302276 - protein, 96 aa, Zea mays
  unsure (1)..(96): unsure at all Xaa locations
  Clone ID: MRT4577_38752C.1.pep
LTHYLPIPITNIPHFLHTNTSIIFXHPLMQTYNLHQTLSPNILXQPLPLTLHQSXSHLTIQTISTQHHLTLNHLTIFNPISYLQQQXLFSFNPLIF

SEQ ID NO: 302277 - protein, 234 aa, Zea mays
  unsure (1)..(234): unsure at all Xaa locations
  Clone ID: MRT4577_38753C.1.pep
FGPSLSSRSASSAHPAGRAGCSWPQPRTTWADLPTPPPPPPXHLAIAAAXWHPVLVLPSNQHQGVVYDLTEDLATPPSPSPSPTRQHLRPASRRRAGKPRRPRPSRKLPTTYISADAASFRRMVHQVTGXPAPAPTRCTRPRSSCSAARHRPPAXLSTATTTLVPTLDTSAFLLDAGGGGRPGAACFHGSAAAAEAEACGGGGGGGIGGGGGEYSCSNGGGFPSLESWDDHALF

SEQ ID NO: 302278 - protein, 59 aa, Zea mays
  Clone ID: MRT4577_38754C.1.pep
MGLGGRGVVGDRWSQRILWICALGSAVSLYFVAVERQAQNRARAVAEGLKALDGAGDDV

SEQ ID NO: 302279 - protein, 152 aa, Zea mays
  Clone ID: MRT4577_38755C.1.pep
MKERAPVYREGLALRSSLHLIPFPCSPSHDVRRCEDRPWHQRPRCLEQCREEEREKRQERSRHEADDRSGEGSSEDEREREQEKEEKQKDRRLYVFDRRSFRRVVRSEQGSLRVLRPFDKVSRLFRGIRDYRVAVLEANPRSFVVPIHTDAH

SEQ ID NO: 302280 - protein, 53 aa, Zea mays
  Clone ID: MRT4577_38756C.1.pep
MTLSLSTSFLPIPADARTTCRTLRSVSPSQVRTFVHTGPPSRHSCTDLRRRRR

SEQ ID NO: 302281 - protein, 572 aa, Zea mays
  Clone ID: MRT4577_38757C.1.pep
MVSARIVVLLATLLCAAAAVASSWEDDNHHHHGGHKSGQCVRRCEDRPWHQRPRCLEQCREEEREKRQERSRHEADDRSGEGSSEDEREQEKEKQKDRRPYVFDRRSFRRVVRSEQGSLRVLRPFDEVSRLLRGIRDYRVAVLEANPRSFVVPSHTDAHCICYVAEGEGVVTTIENGERRSYTIKQGHVFVAPAGAVTYLANTDGRKKLVIAKILHTISVPGEFQFFFGPGGRNPESFLSSFSKSIQRAAYKTSSDRLERLFGRHGQDKGIIVRATEEQTRELRRHASEGGHGPHWPLPPFGESRGPYSLLDQRPSIANQHGQLYEADARSFHDLAEHDVSVSFANITAGSMSAPLFNTRSFKIAYVPNGKGYAEIVCPHRQSQGGESERERDKGRRSEEEEEESSEEQEEAGQGYHTIRARLSPGTAFVVPAGHPFVAVASRDSNLQIVCFEVHADRNEKVFLAGADNVLQKLDRVAKALSFASKAEEVDEVLGSRREKGFLPGPKESGGHEEREQEEEEEREERHGGRGERERHGREEREKEEEEREGRHGRGRREEVAETLMRMVTARM

SEQ ID NO: 302282 - protein, 97 aa, Zea mays
  unsure (1)..(97): unsure at all Xaa locations
  Clone ID: MRT4577_38758C.1.pep
NNNNKLTLXXIXXNYTXPKLGVXXXFWYWVXWTFRGCLGIHETVFXKRQXLKSWLXKXXKRIIXKGCCKRXLQEXVSLRLXXPMGLVXRKPWKQFRX

SEQ ID NO: 302283 - protein, 122 aa, Zea mays
  unsure (1)..(122): unsure at all Xaa locations
  Clone ID: MRT4577_38759C.1.pep
PRVRGRVGGRVGDHVIVAQPTRVDKAYNEKTCIALLXKVNQIWFVTESFXCYDVQARLXWGVLASHRSVVTXDTFIAVLLFCLFSVQIKTXASCMXMRLFKYNLFFIIFVVFSLCRRSFSVC

SEQ ID NO: 302284 - protein, 203 aa, Zea mays
  unsure (1)..(203): unsure at all Xaa locations
  Clone ID: MRT4577_3875C.1.pep
MPTLGIARLLDASFRRRFAAAGLVEASVPLDGGATTVHCWRFPPSADDGGGEDARPVLVLLHGFGPPATWQWRRQVGPLSRRFRLIVPDLLFFGGSSTSSAPGVSEAQQAEAVAKVVAAVAPAPARVSVAGTSYGGFVAYHVARLLGPDAVERVXVASSDLLKADADDQALLRRAGAERVEDVMLPRSPDRLRRLVQLAYHRP

SEQ ID NO: 302285 - protein, 280 aa, Zea mays
  unsure (1)..(280): unsure at all Xaa locations
  Clone ID: MRT4577_38760C.1.pep
MIQEKAMDHLLFFSFKSVMHSKSAFLLIVVAVSTTAMVHGHPAASTPAARFWEQALSGTPMPEVLADFVQKGIDLSPLVEHYSAQPSIGMCTLFNTICDARMVAETGIFFHEAELHPGSTMTLSFPAEAETAILPHDVAGKVPFENLSDVLSTFHISPGSAEAAQVEDTLRKCQQPPTAGEMKACTMSLESTVKAAMEMLGTTXSRVVVVVNVWAATSTLPRGGLLPRREYIVEEVTKLEGTGYVACHKVPFPYAVFHCHIAHTGYIGTRSPSTAATRGA

SEQ ID NO: 302286 - protein, 153 aa, Zea mays
  Clone ID: MRT4577_38761C.1.pep
PPVRYEFLADGDPLPLGHYAPWLCSTTYVQLSLIDLGGCAAHTDVRRSFAWVDSFSARLEFLTDVSSPPPKRHRTSQSMGTTLDGDLAHQGVSSCTRGIGGNTGSCLGGIARRRPHLGAVVRPDECSQEIGGSRCQGAPTRHRSAGRHQTPCA

SEQ ID NO: 302287 - protein, 130 aa, Zea mays
  Clone ID: MRT4577_38762C.1.pep
KKKKMGPLPISQPFTLRGVPKKKGPSKEPRAPKKRKKRGRGTQFFPKGRLFLNPGQTNLENFFFPGVRTHPALKIQRALRGGLGSHFPLGHKTPKWGGGLGPPPPRGGLPRPTFLGPSLSTRGGAWPPSP

SEQ ID NO: 302288 - protein, 91 aa, Zea mays
  unsure (1)..(91): unsure at all Xaa locations
  Clone ID: MRT4577_38763C.1.pep
QGECIYSCHFLLDFNLYXFFYYLFYFLFYFYIFFYYYFSXIFFLIIFFIYLFFFFFIFFFILYYLLFYFYFYVIFYIIYIFFNDYIFIYYY

SEQ ID NO: 302289 - protein, 51 aa, Zea mays
  Clone ID: MRT4577_38764C.1.pep
ICSRSGSGFAFFGFALVFFFFFHHVVFRFLSNCKLHHSLFFVGFNIKIKPF

SEQ ID NO: 302290 - protein, 84 aa, Zea mays
  unsure (1)..(84): unsure at all Xaa locations
  Clone ID: MRT4577_38765C.1.pep
FNRAQKWDEEIMKDLYRIIMLSARATMVPAIDKRMSKEITAXAPGSIKIKVTTPTERKLSVCTGSPTLTXLSTVQQMWISKDEC

SEQ ID NO: 302291 - protein, 93 aa, Zea mays
  Clone ID: MRT4577_38766C.1.pep
ALLRCWSSCLSLSSRAFVVGALLCSAPLLSALPRRRRCALCPLLCGWLWPFGSGSPSSRFSFPSWVFLRSRCLGLVFPICPPFVWLVWVFKTG

SEQ ID NO: 302292 - protein, 74 aa, Zea mays
  Clone ID: MRT4577_38767C.1.pep
KNMHADTAPGYFFLPHNSPLPFPAYNVQRTNGTFVSRHNIYTCIYHSRLLESHKELLESIPLKAQTNQTTHDMI

SEQ ID NO: 302293 - protein, 71 aa, Zea mays
  Clone ID: MRT4577_38768C.1.pep
TKGVRMGTNTLWQTLRKRQTTPLFAIDNDPWELQDGGPLPQFPLAATTNWGGSFPFNAGDTPFPFRVPWQP

SEQ ID NO: 302294 - protein, 164 aa, Zea mays
  unsure (1)..(164): unsure at all Xaa locations
  Clone ID: MRT4577_38769C.1.pep
MDLVLLEKALLGLFAAAVVAIAVVKLSGKRYRLPPGPPGAPVVGNXLQVGDDLNHRILMAMAKRFGDIFLLRMGVRNLVVLSTQXLYKEGLHTQVVEIGXRTSNEGYVIFTSMGKDILFPAYCDHWRKMRSIMSVXLFTYKEVGQIRALCEDEGRLLLIYLNIH

SEQ ID NO: 302295 - protein, 65 aa, Zea mays
  Clone ID: MRT4577_3876C.1.pep
DPVETSLHVLDFSLHIHDRLRRRRRSYTHKHNVLEEFIARQIRRNKINLSREREKKCSGNSPYDS

SEQ ID NO: 302296 - protein, 123 aa, Zea mays
  Clone ID: MRT4577_38770C.1.pep
VRSVPVFLLGRRKKLCFVDNSLTPKYNRLRVLDNATYHGMRIGGRGGAAPQRRRNMGTHAHRYGSTNTTNREHENDGGALWRHPRAQVRVSKRFEAPALRLGRPHADGSKDGGPGRLPHDVEG

SEQ ID NO: 302297 - protein, 92 aa, Zea mays
  Clone ID: MRT4577_38771C.1.pep
SPHLRIDGPPCLNSAPLGTGVVGWGIRITTHHTYTTLNLHCKKNILSWTAKYFTLYHISTHSCLLYIPTLYQLSYIISFCNSISLAGVGEAY

SEQ ID NO: 302298 - protein, 205 aa, Zea mays
  Clone ID: MRT4577_38772C.1.pep
HASAHASAHASAHASGGRAIVDGRSARNAAAEQPAPVRVDEDKEAEVPEAVFDSGRPATEEALFSEDEEEEEEDAPPVAPPPPPPPVIAVPVSEKPEASRQQQSAEQAGTSKDTQPEQSSERDAPAQQGGQKRPRTVEGAGEGTADLESKLVEILDRNSRLVAAQLEAQNQNCELDREQRKDQANSLVVVLGRLADALGRIADKL

SEQ ID NO: 302299 - protein, 367 aa, Zea mays
  Clone ID: MRT4577_38773C.1.pep
MALQLAVLLLLPLLAGASADDKFIRQVTTQGTRAGAGPGLLPEAQFAAFVRRHGRRYSGPKEYARRLRVFAANLARAAAHQALDPTARHGVTPFSDLTREEFEARLTGLRAGGDVQRLMSGVPAAPPASQEEVARLPASFDWRDKGAVTGVKTQGACGSCWAFSTTGAVEGANFVATGELVDLSEQQLVDCDHTCSAVAQNECNNGCAGGLMTNAYSYLMESGGLMEQSAYPYTGAAGPCRFDPTQVAVRVANFTAVPAGDEAQIRAALVRRGPLAVGLNAAFMQTYVGGVSCPLICPRAWVNHGVLLVGYGARGFAALRLGYRPYWIIKNSWGKQWGEQGYYRLCRGSNVCGVDSMVSAVAVAPAL

SEQ ID NO: 302300 - protein, 118 aa, Zea mays
  unsure (1)..(118): unsure at all Xaa locations
  Clone ID: MRT4577_38774C.1.pep
IQVEFPAALNELVQKFQVYYLGNVPVARLVGVDVINGXLESVVSSSSREQSDPSHVSVAPATLTIWHHHAGAVLEECRVRFLSFLAVGRDVHTFAFIMADGPASFCCHMYXCELNAAS

SEQ ID NO: 302301 - protein, 112 aa, Zea mays
  Clone ID: MRT4577_38775C.1.pep
GFVEELIAGFGRKGHPVGDIPGGRLRGCEGAGGFPCAPSSGRGRATRGLVPLVPPARNKSWNGLPVRALHVGSRAIVFSIVSVLQDWGICIVTAGPACQGVFVCQQRVERIS

SEQ ID NO: 302302 - protein, 330 aa, Zea mays
  Clone ID: MRT4577_38776C.1.pep
WVPRLRRKRVCGRAAEEEEDDDDDDVFPQAWSDGGKRCPEGTVPIRRTTARDVLRASSARRFGMKGRASHHARRDSTSSGHEHAVGYVTGDQFYGAKASLNVWSAKVASAAEFSLSQIWVISGSFGNDLNTVEAGWQVSPELYGDSSPRFFTYWTTDAYQETGCYNLHCSGFVQTNNRIAIGAAISPTSVYNGRQFDISLLIWKDPHQGNWWLQLGSTGQLVGYWPSFLFTHLGGHANMVQFGGEVVNSRPSGSHTPTQMGSGHFPREGSNRAAYFRNVQVVDGDNSLVPAAALRLVADHPACYDIQGGYNRAWGNYFYYGGPGRNVHCP

SEQ ID NO: 302303 - protein, 82 aa, Zea mays
  Clone ID: MRT4577_38777C.1.pep
QRPPTRPAYPTPKCEKKCKEQNQVWQEKKHFSIDAYRINSDPHDIMAEVYKNGPVEVAFTVYEVMSSCFVSSSPCILSTDFV

SEQ ID NO: 302304 - protein, 51 aa, Zea mays
  Clone ID: MRT4577_38778C.1.pep
SMSSATTCFNAKYQSLGGRLTMSEPTPELMTARYLHAYQPCLSRVISELGV

SEQ ID NO: 302305 - protein, 79 aa, Zea mays
  Clone ID: MRT4577_38779C.1.pep
SRYSTSPLCLDLTYSLYYKTYLYPPATSSTLVDSSDIDLTQISRTTSLLHSIATFLSIVYFFKSYFDGRLCSPVWSASP

SEQ ID NO: 302306 - protein, 64 aa, Zea mays
  Clone ID: MRT4577_3877C.1.pep
WVLQGPGAIVRVNRISLSVINYPNFGSFGAYSERTIFSSNYKWPGRFLPPMCIYNPEMFWAPCG

SEQ ID NO: 302307 - protein, 58 aa, Zea mays
  Clone ID: MRT4577_38780C.1.pep
LACCSRRGAELTQRLGRSLGGTRLRYGVQSRRFHRGNASHRRSSPHPEPPPKANRAPP

SEQ ID NO: 302308 - protein, 44 aa, Zea mays
  Clone ID: MRT4577_38781C.1.pep
AHTTPHFSPYKSTQYTRCRCKFSSGLLSSSSCLPFGKHFSEKTT

SEQ ID NO: 302309 - protein, 89 aa, Zea mays
  unsure (1)..(89): unsure at all Xaa locations
  Clone ID: MRT4577_38782C.1.pep
DHLVRRYFGGSRSIMPLAPCVAIQCRSVDPIIELVWPVLPCCFSCMCGLLLSLSSFLWPPFSLWGLFSGVFGSFLPLCTQVVLRVQXRG

SEQ ID NO: 302310 - protein, 244 aa, Zea mays
  Clone ID: MRT4577_38783C.1.pep
EAVSLIAHRLGRMDPPLRRECIEHLCEAHSHRWSMRRSKAHFFRLMAALAPLFTGLRWFVDVCHWKNPSTTVAVHIIYAMLVCCPNLIMPTFFMYKFLIGLWNYRRRPRHPWHVDTKVSHAEMAHLDELDEEFDDFPTARRPEVIRMRYDRLRSLGARIQEMVGDVAAHAERARCAMTWRDPRATAMYLLACLFLAVTTLLAPFQAVALLTGFYVMRHPTLRQRLPDVPANFFRRLPCKVDCLL

SEQ ID NO: 302311 - protein, 512 aa, Zea mays
  Clone ID: MRT4577_38784C.1.pep
MHKLLPRAASFLDAAAAAAPLLLSFPRMPTLRLSGSPFVAMRPGGNPSRIRAPPWLHCDAGWRRGLCSAEAARRGGDTEEMEKDGGGRSAPERKQRCRNDALVGRGELLTIPGVGPRNLRKLVDKGFDDVAQLKQLYRDKFFGKSNEKMIEFLQNSVGIIHKNHAESITLFIKESVDEELKGTDTSKLPKNRRLTFCIEGNISVGKTTFLQRIANETIELRDLVEIVPEPIAKWQDVGPEHFNVLDAFYAEPQRYAYTFQNYVFVTRVMQEKESACGIKPLRLMERSVFSDRMVFVRAVHEANWMNEMEISIYDSWFDPVVSSLPGLVPDGFIYLRASPDTCHKRMMVRKRSEEAGVTLDYLRGLHEKHESWLLPSKGGGSGVLSISQLPVHMEGSLHADIRDRVFYLEGDHMHSSIQKVPALILDCEHDIDFNKDIEAKRQYARQVAEFFDFVKKKKESLTAESETADGDKSINKQIVLPHGGGLWVPGSSPLPESALKSFDFRRTMSSST

SEQ ID NO: 302312 - protein, 57 aa, Zea mays
  unsure (1)..(57): unsure at all Xaa locations
  Clone ID: MRT4577_38785C.1.pep
RRFFIHLRPKFHRSYSLLKSSFHYFCLTLPNYFLYNTLILNFTFIMFFSYTXIIFKL

SEQ ID NO: 302313 - protein, 191 aa, Zea mays
  unsure (1)..(191): unsure at all Xaa locations
  Clone ID: MRT4577_38786C.1.pep
ELGKLPSLEISLNLSCNRLSGEIPAQFGELDKLGSLDISYNQLSGSLAPLARLENLVMLNISYNTFSGDLPDTPFFQKLPLSDIAGNHLLVVGXPAVTRPPGTRPXSALRLAMTILVVVSALLLLTATYVLARSRRRNGAIHGHGADETWEVTLYQKLDFSVDEVVRALTSANVIGTGSSGVVYRVALPNG

SEQ ID NO: 302314 - protein, 68 aa, Zea mays
  Clone ID: MRT4577_38787C.1.pep
ETLLKRTRERKTEYLLEVIIIKKSLNRAQHQKKSFMDISDLPIQYRISVMEHHNRSDWVLSLSEFHIV

SEQ ID NO: 302315 - protein, 62 aa, Zea mays
  Clone ID: MRT4577_38788C.1.pep
LVYSMDAVGSFDPIDRRRPMLPKCFAQKDLFLVAIRQMRSAHATSLFLYQECSSPEVARVRR

SEQ ID NO: 302316 - protein, 108 aa, Zea mays
  Clone ID: MRT4577_38789C.1.pep
GLFFYFFIYNGGLFKNKRGSKQTTRPRGGHTLYRRTNQAPPDLTGPTIPDEHRPEGRVWNPPRLSLLTNSLVGLHLTEGAWRPEIAREPGRPPETGHWKDAPLGRGTG

SEQ ID NO: 302317 - protein, 82 aa, Zea mays
  Clone ID: MRT4577_3878C.1.pep
TPPRRPSQGRRHQGIRDGLALVVTWFGLRAHAPSPPLLRAINLGNLLTGRGTRNGGRRWVSEHSRQGIGEPHAVAGRVGGPG

SEQ ID NO: 302318 - protein, 63 aa, Zea mays
  Clone ID: MRT4577_38790C.1.pep
YFFWFGFMFVAVVFVTHNKNTHRPRKTRFDQNGTQFFIYLTQYRGYIRHLFWGYLNCAPRPLE

SEQ ID NO: 302319 - protein, 112 aa, Zea mays
  Clone ID: MRT4577_38791C.1.pep
MRAGGMLCRSQAATAVCVPGDARSMVVARRAADRTRDSDDARALHDVRYARLGAGAGDGGRRTSASRRFSAPSRARAPPPTGTVVTACCKPRVVRPRRAPVAGTLAVGTKSP

SEQ ID NO: 302320 - protein, 379 aa, Zea mays
  unsure (1)..(379): unsure at all Xaa locations
  Clone ID: MRT4577_38792C.1.pep
MLAGAPTGDAGPSSGAGSNPPTRPRRFPGAAQPEIMRAAEKDDSYAAHVTEACRDAFRHLFGTRVAVAYQNEIKLLGQSLYYLLTTGSGQQTLGEEYCDISQVATLHGLPPTPARRILFILYQTTVPYLAERISSRIVARSIVLNESQFDDHPESDNSSSDIAQSTTNSDIPSRSLSVSALSGFRGRVHALWQWVLQKWPSMLPYAQDFIQLAIRTNLMFFYFEGLYYHLPKRAAGIRYVFIGKPMNQRPRYQILGIFLLIQLCILGAERLRRSNISSIASSINQISSGGYPSTTGRGIPVLNEDGNIISDIRSGKAADIASHSETXPMARANAPFVSASGKILLPQPVDMFSAGIAXWSGAMRSLSAPYAELRLPIRV

SEQ ID NO: 302321 - protein, 102 aa, Zea mays
  Clone ID: MRT4577_38793C.1.pep
GVSTINRGGGRAPPLGQTGGILGAKAHLKFGLAYAREREKKNTQAFGGIKKTRGGPPFRAKKKGRGKTKPGSLIAGDKRGGEGPSLVVDGATEGDKGGLEGA

SEQ ID NO: 302322 - protein, 187 aa, Zea mays
  Clone ID: MRT4577_38794C.1.pep
HASASLFSKGFKNTSSQITAAYTSDGRYAVCASEDSHVYLWRTTRVPPAAAIGIGMKPKAWCTIRSYENFYCKDVSAAVPWTQSPSPPGAGDGSPTGGSPASADKPPQVASCNDESCSVAAKPEGGDPSSCSAAAAEPSSSARQGGAKGDGGNAWGLVVVTASLGGEIRVYQNFGMPFRIKGQANFF

SEQ ID NO: 302323 - protein, 80 aa, Zea mays
  Clone ID: MRT4577_38795C.1.pep
IPTSHAPLNPTAAAQAYDLRVQRFAAMSGPLHSSSDHNASAGAVVKIIVVMYQTKTQLEHILLVAWHLHWLSGEAYPDAL

SEQ ID NO: 302324 - protein, 78 aa, Zea mays
  Clone ID: MRT4577_38796C.1.pep
HMFLHQMNYSYADFCCVSSFCNVDPNDELCPCIPLQPAPCRLPQRQCDHPCSTKCSYWLLPIYNQTFYNVWISPSQQH

SEQ ID NO: 302325 - protein, 54 aa, Zea mays
  Clone ID: MRT4577_38797C.1.pep
ALAASATLPGSPTRSSVPTSTSATSHRSAASERRAAGWLAWRGGRRRLGHLHGS

SEQ ID NO: 302326 - protein, 55 aa, Zea mays
  Clone ID: MRT4577_38798C.1.pep
SVSSLALRVSGSLLSAAVLVSLHLRRGCWRLTSSFKLANVMLHGCAGHPQGPECG

SEQ ID NO: 302327 - protein, 62 aa, Zea mays
  Clone ID: MRT4577_38799C.1.pep
SFRGGQEKAKPLLPQTPPSMDRMWMLTTFLLIFPVNGTKNKIKCCKLNKQSCMFPNKPLFRW

SEQ ID NO: 302328 - protein, 65 aa, Zea mays
  Clone ID: MRT4577_3879C.1.pep
AASSFGGTNSQAVSAASSSYIICSRRPKAVSVPLCPSSSSPKHHPAASFVSCVEGTLYKITMFWQ

SEQ ID NO: 302329 - protein, 216 aa, Zea mays
  Clone ID: MRT4577_387C.1.pep
MASTSSLSAVLLLCLAMAASAQLSPTFYQTTCPNALATIKAAVTAAVNKENRMGASLLRLHFHDCFVQGCDASVLLSGMEQNAIPNVMSLRGFEVIDSIKAQLETMCKQTVSCADILTVAARDSVVALGGPSWTVPLGRRDSTNANEAAANNELPPPFFDLVNLTQSFGAKGFTVTDMVALSGAHTIGQAQCQNFRDRLYNETNINSGFATSLKAN

SEQ ID NO: 302330 - protein, 52 aa, Zea mays
  Clone ID: MRT4577_38800C.1.pep
HSFILQKLNITSGDSLYRVELNNSWRLFHHFIILYTNSQKKLILYLLTQFTN

SEQ ID NO: 302331 - protein, 72 aa, Zea mays
  Clone ID: MRT4577_38801C.1.pep
KKIGFFLTKFKFTPHLVFLKIKGPQKLAGFLNNPPGFSKNWRCSELFSNFLSASVYKKNLILFYERLNHVSS

SEQ ID NO: 302332 - protein, 101 aa, Zea mays
  Clone ID: MRT4577_38802C.1.pep
PPGRTPTAPRRRRSGLWVPRIPVAVVPPVNYPVLRAYVSHVPASFVSFPPPLGTPPPWLCLLYALVCGPPPPLFAGWPGGSSWAPPCVFRKDQKKKKNHRV

SEQ ID NO: 302333 - protein, 262 aa, Zea mays
  Clone ID: MRT4577_38803C.1.pep
MANLFLKQAKHYAAARPDYPAELFHFIASKTARHDLAWDVGTGSGQAAVSLAKLYKNVVGTDTSAQQLAYAPALPNVRYAHTPADLPLEGIHAAVAPPGSVDLVTVAQAFHWLDLPRFYAQVRSVLRPGHGVLAAWCYTEPRVDAAVDAVFWRLYHGSQGFWAPNRRMVDDEYRSADFPFDPVEGENHTGPFQFSTHRRMDLDDYLMYITSWSAYQTAKDNGVELLDAPTVQEFAAAWGGDAKEVKTVTYPIFLRIGKVRSE

SEQ ID NO: 302334 - protein, 76 aa, Zea mays
  Clone ID: MRT4577_38804C.1.pep
VLDKTKFLVPDHVNMSELVKIIRRRLQLNPTQAFFLLVNQHSMVSVPTPIADIYEQEKDEDGFLYMVYASQETFGF

SEQ ID NO: 302335 - protein, 72 aa, Zea mays
  Clone ID: MRT4577_38805C.1.pep
GTTPTKHLDLPLQGNRKQKKNKHFGKLMNPRSFTLFKPKKNEAEYKTHGSYFPGTKGGGFAHTFFFAGEPSA

SEQ ID NO: 302336 - protein, 253 aa, Zea mays
  unsure (1)..(253): unsure at all Xaa locations
  Clone ID: MRT4577_38806C.1.pep
MANLFLKQAKQYVATRPVYPPELFDFIASKTPRRDMAWDVGTGNGQAAASLAKLYKHVVGTDTSAQQLAYATRLSNTRYVHTPADLPLEGIHATVAPPASVDLVTVAQAFHWLDLPRFYAQARSVLRPGHGVLAAWCYTEPRVDAAVDAVFWRLYHGSHEILGXPSGDFRRRVAERGQHAGPFQFSTHRRMDLDDYLMYITSWSAYQTAKDNGVELLDAPTVQEFAAAWGGDAKEVKTVTYPIFLRIGKVRSE

SEQ ID NO: 302337 - protein, 106 aa, Zea mays
  Clone ID: MRT4577_38807C.1.pep
MITRAKLVEQLREHQIRSAQSYSAALAVFSPNPHIASRRDLKVAVIYAVLFCFLMVSCYAALYLKWFRLSAMFVTFGILLPVSLKISRHRRLKRKRERRLLLPLSM

SEQ ID NO: 302338 - protein, 88 aa, Zea mays
  unsure (1)..(88): unsure at all Xaa locations
  Clone ID: MRT4577_38808C.1.pep
MRKAKLQTEGILDDGGGARSCDDWMEHWKKMAEDALYAEVGATCGYPYMXGGKRTAPSKAQKLVDHHVGIENDAWVKSQGHPSELDGE

SEQ ID NO: 302339 - protein, 129 aa, Zea mays
  unsure (1)..(129): unsure at all Xaa locations
  Clone ID: MRT4577_38809C.1.pep
GVVSRFLSCPPCSHGPVLACLFFPSGSGVPVCAGELAPRPVGGHGGPPPHRARLIPAPEGALVPPALFSLCGGFSAWSFSLFGVFVLGAAPPLFLWGVRRAQVMPATRGSFLQSAPLGAGVLSGIIXGG

SEQ ID NO: 302340 - protein, 80 aa, Zea mays
  Clone ID: MRT4577_3880C.1.pep
GKQYQEDKIQIKEVVKSGKIPMTTSWTLEEFQTATLEDDALKGISTINIKLVYDDQLERQKERKSVRRKRRRKRKRKKGR

SEQ ID NO: 302341 - protein, 57 aa, Zea mays
  Clone ID: MRT4577_38810C.1.pep
QLRGVKSENLPLFIVQHSFCFSLGPLRILKQFARPGSLRLPINKEAVALNRSSYLLN

SEQ ID NO: 302342 - protein, 53 aa, Zea mays
  Clone ID: MRT4577_38811C.1.pep
PCRGARRAHVARSPGDGPGSCSPPEKWIAWCLHLTVALGTTPARHFRTSFTKR

SEQ ID NO: 302343 - protein, 186 aa, Zea mays
  unsure (1)..(186): unsure at all Xaa locations
  Clone ID: MRT4577_38812C.1.pep
AHGTWSALRAPAALFSLGLAPLPSVAAGRGAALRHPQEFLPLSKVGGVGVRACLLDPGTADCEVELADFRXPXGCTSLDLLAMCAASLPNSEERGTNFFCERMPADDEIRCCSGGCGCFGVRXRVVWWVRIPIRGGDLVLAPARFYHRAALVGAXHVXLLRLFIGEPVWTGLHRPFEDPRLGMRLL

SEQ ID NO: 302344 - protein, 151 aa, Zea mays
  unsure (1)..(151): unsure at all Xaa locations
  Clone ID: MRT4577_38813C.1.pep
KKHQSTDRWRATLFSTACSCWTVLSSIIVSRSWARKDPFDERVSYSHADKQGAGRHLWFSSKQCLSYLDRTLHCDYGLHPLGLXDPEGTGGFIEPKWLAYGRGRYNGXRYAMLGTVGTIAQEILSKIGIIHPETALPWLKTDIIPADGTYN

SEQ ID NO: 302345 - protein, 76 aa, Zea mays
  Clone ID: MRT4577_38814C.1.pep
SPPKKTQDRPVKLVFLVLRVVFYAGPPLFGLWNPPPRGHIFQFWFWGDKTALGPFFLWGPPALVVTPPPLFKFSPK

SEQ ID NO: 302346 - protein, 341 aa, Zea mays
  Clone ID: MRT4577_38815C.1.pep
MEQPAAPDRSDFPAGECEWREELRQQQSQVDALRERLVEAKVGLRCSEGDSRKELEHLCRRVKTIATLLAYLKSKARIMAIPHLAHTSCGIRQQDGVGYVDRHGVPLADWPKGADPAPCGGASVDGTVAEGGARPEHGDAVGGDVDVDDILKSIRVVTDVMESLVKRVIVAESEAANEKEKVRMGLEEIRRKTLQVETMSAKVEEMEKFAVGTNGMLNEMRQRVEDMVLETTRQRQRAAENEVELSRVKHDFESLRTYVSTLVSVRETLLSSEKQFEILEKLFDRLVAKTNQLESEKAQKEAEVHKVMEENVRLRAMLDKKEAQLQAMSEQCKFMALNHDN

SEQ ID NO: 302347 - protein, 40 aa, Zea mays
  Clone ID: MRT4577_38816C.1.pep
MQQHEEEQERPPTVRAVTIPFADLRVPDRDLGDKIEEGLG

SEQ ID NO: 302348 - protein, 87 aa, Zea mays
  Clone ID: MRT4577_38817C.1.pep
TPGGTPHCSPKAQFFGHKFSPPLSRGDPHPRAPGFLGWVPRAILKKNPKKGQFWGFFGAQKTHHLRAFWGLKKPTPCPYLFPGGVPP

SEQ ID NO: 302349 - protein, 57 aa, Zea mays
  Clone ID: MRT4577_38818C.1.pep
LQKRRNNLANQLCHLQRHGLSIPPHSDQDLELFRPRYRIDIFDFPPLNHQFKLVLQK

SEQ ID NO: 302350 - protein, 100 aa, Zea mays
  unsure (1)..(100): unsure at all Xaa locations
  Clone ID: MRT4577_38819C.1.pep
PSRHAPLRQSASSTTVSLSPVXGRRDKSTIRKPDEFKQPGERSRSWDAQRQARLVRLFPDSLGLPKVRQEVRSIWIGLLGKXDESLGIKIAXRLNMKANM

SEQ ID NO: 302351 - protein, 45 aa, Zea mays
  Clone ID: MRT4577_3881C.1.pep
NLVAAQRGTPPKKFPIQKWSNFYKAPFPLRDYGVPGGMGLKFYYN

SEQ ID NO: 302352 - protein, 51 aa, Zea mays
  Clone ID: MRT4577_38820C.1.pep
KGGVQQVEQSGELHAILEDAGNVDVGLGCPRRGRVRGSSKIRVKVVGSRYQ

SEQ ID NO: 302353 - protein, 83 aa, Zea mays
  Clone ID: MRT4577_38821C.1.pep
VKLVPTHVAFNDRDQKSADSTLSYADNITLKCANTLACQFLQLNKDGLKASRYRHKTIEERRNATVLYNVHKRSPSHLNQLTN

SEQ ID NO: 302354 - protein, 70 aa, Zea mays
  Clone ID: MRT4577_38822C.1.pep
ACFCFFFSPSRSSPPYSPRYGHPMRAPSSWTVSVMPSVAYVAGASLLLSSYLRQCLPGGGAHRFQYKCFY

SEQ ID NO: 302355 - protein, 28 aa, Zea mays
  Clone ID: MRT4577_38823C.1.pep
PEILLERQAPRSRTSGRVGRGNSVRGRV

SEQ ID NO: 302356 - protein, 70 aa, Zea mays
  Clone ID: MRT4577_38824C.1.pep
DYTGSLDLAPLVICFVSSVTLDRIVLGDCLPLYFGYDFCIVLVCIALLLVVSCISYPRLFNSPPGLSMCF

SEQ ID NO: 302357 - protein, 723 aa, Zea mays
  Clone ID: MRT4577_38825C.1.pep
MGKGQILAVLQIGGEFNTDEDGHMSYSGGEAHAMHVQSDWTFSAFKQEISSTLNNLKLDQFAFKYFLPKNDKTLISISNDKDLRRMVEFHAESDSTYIYVMKKADNRSKNIVAVLDTPTDAFAIVPTTQDGSKRQKVCASWKNVITGVGQVFEGPKDFRDALHKYAIAHRFHYRFIKNDSSRVTAECTGEGCPWRIHASKSPAKKEFMVKKISESHTCESETVKSNRLASQRWVASVIKEKLRDSPNYRPRDIANDLQREYGLCLNYSQAWRGRSIAQKELYSTHSAACSQLPWFCERIVETNPGSVATVVALEDSKFRFFVAFHASLHGFEHGCRPLLFLEAITAKPNKHWKLLAAASVDGEGDVFPVAFGVVDDESRENWHWFLEQLKSSLGTSRTITFISNGEHGLWDVLSSVFQECHHGYCVESLIEEFKMQLDDAWTEELKDSMVEHLKKAINSCTADEFNQYIELIKSGSDKLADWLLEIKPERWSDAFFKGSRHGQYSCNIFGTVSEWIPTRYELSVVQLVDTIRCKLMEMMYTRRESSNAWTEVLTPAANQKLQEEVNKAHTLNVLPAENGENGNVFKVCDDSVNVVNLDTWECTCQRWHISGLPCMHVIAVLERTGQYAYDYCVKYFTTECYRLTYSLSINPIPDVIVPPTLIDLAQSPATYPCPLRTRRRVGRPKEKPADPRIAIKRAVRCSRCKGYGHNKATCKVPISSFST

SEQ ID NO: 302358 - protein, 107 aa, Zea mays
  Clone ID: MRT4577_38826C.1.pep
FPPGLFPLGLLMGLIKKICPLLLYFYPIKTVSPNSFSMPMVWYQKLAFNLPDPIIAPPLFFFGNVIPIYPLIGFPTQKKKKKKTKKKKKKKKKKKKKKKKKKKTPPP

SEQ ID NO: 302359 - protein, 40 aa, Zea mays
  Clone ID: MRT4577_38827C.1.pep
EDATPSAKLTIGHHAPGLEGGLMDGGRVPPYNPHHPNTFD

SEQ ID NO: 302360 - protein, 59 aa, Zea mays
  Clone ID: MRT4577_38828C.1.pep
IGLMDLYRFLLSCRARPILIKQELKLAQKNSVNGPLWAWSNGAMTGRDQRLMRIIDDRI

SEQ ID NO: 302361 - protein, 96 aa, Zea mays
  Clone ID: MRT4577_38829C.1.pep
IVGLVARPRTSCAINYDRNLADDLKMADICMLQLTTGHVIATAGAKASIAHADNMTTVHRLLAADHARSHSDRTSNVPLHLHDSPSSHVGLQSTAN

SEQ ID NO: 302362 - protein, 160 aa, Zea mays
  unsure (1)..(160): unsure at all Xaa locations
  Clone ID: MRT4577_3882C.1.pep
PKPEKPLPPXASPPSLPGFVPKXKRPPPGRKXMKFCPPPPPPSSPLNPGALVRAGPAPPPPXSSPPPGQTPPGPXEGPFPLASGGWGFFPQPGGPACXPFLKKKPGREGGGFLPXPPNGPWAPFFFPEPVPPPKXKKPFGGVFFPPGAGPPRGSKNFFFF

SEQ ID NO: 302363 - protein, 67 aa, Zea mays
  Clone ID: MRT4577_38830C.1.pep
LLTRQMKFVLNQRSLAMTHDGAMGGVSRTLTIYASDCVTRILPWRDATPFTILLATPKLPHMIFLWF

SEQ ID NO: 302364 - protein, 156 aa, Zea mays
  unsure (1)..(156): unsure at all Xaa locations
  Clone ID: MRT4577_38831C.1.pep
RPRAPXPLLGRRPLGGAALXARLLLAPRGXFXRRVGXXRRPXASXPPWRPGSRXRLCVPGVXWXAAALSPGLLAAVLXXFRRRXXXRAPARRXXVCGXPXXXXCXXFXGCSXCGLRXXLXXRVXCXXACWLAWVXXXAPRVCGPXFLLXXLXXRPG

SEQ ID NO: 302365 - protein, 65 aa, Zea mays
  Clone ID: MRT4577_38832C.1.pep
HQKWSLALQTVGYHHYTEIHNWFHAHGWTDRLTTTRVIRSISIETELNIYLTAIKGRVGLHRGSW

SEQ ID NO: 302366 - protein, 143 aa, Zea mays
  Clone ID: MRT4577_38833C.1.pep
FKKTKFSRTPFFFLFSPRVFNPAPPFFVVGFGNPPGAFSFFNPLWKGLPLKLGAPKPPQFGGVFSSGAPLSGVIGKASPPLGFWSKFLSPGLFWAPGFGTMLVPDPFLVWGPEYGGQTPGGGGCKLPPGLNLNIFFFCFVAFS

SEQ ID NO: 302367 - protein, 46 aa, Zea mays
  Clone ID: MRT4577_38834C.1.pep
NMPSTRRDLPCGRILQRGEFLPDSSPPFDHCQHDDEPVKVTERSRP

SEQ ID NO: 302368 - protein, 119 aa, Zea mays
  Clone ID: MRT4577_38835C.1.pep
IGAAYVYGRNVTRIAHASQSEILHATPDPNRPLPDITFTEEYSLRVGNQTLELSYQGLNHQPGNIFIWAPAQAVLMIVDVVYPGWAPFAYLGQAEFVPGVIRAHEQALDYPFRYFVLEP

SEQ ID NO: 302369 - protein, 78 aa, Zea mays
  Clone ID: MRT4577_38836C.1.pep
GPCLLCEGAPSAFPLDLPCKLVCPHRLTTKLFIIRITFTSSDISCTNFQAVHFMSINQGTSGTTFGKSINAKRPHMHH

SEQ ID NO: 302370 - protein, 68 aa, Zea mays
  unsure (1)..(68): unsure at all Xaa locations
  Clone ID: MRT4577_38837C.1.pep
IGPXQARGRWGLTGDCLAGANRGPSCLLAPCPPIPRRLSFPFLGGGGGGLFRFFLFLFFLLLFLFGAL

SEQ ID NO: 302371 - protein, 100 aa, Zea mays
  Clone ID: MRT4577_38838C.1.pep
ALTTQGALTSSHSGFPPVATSFLVPRPHTCSEGYFYLTATLQRFSLMPTNKALRAFLVLSGSLRALPPWHDRPPHALAHHRHNGNVSGGDFVLGPPSCCL

SEQ ID NO: 302372 - protein, 42 aa, Zea mays
  Clone ID: MRT4577_38839C.1.pep
FIHYDCKTHEGFISDKTGEPINLYNHNPEDLSLSILFNRIYC

SEQ ID NO: 302373 - protein, 107 aa, Zea mays
  Clone ID: MRT4577_3883C.1.pep
LALAVPRETKHYFLLPCSKSAKTGGGGRTIARFTSYTGFKGWQMTRHSDGLLFLTGRPLTLGLSWQGTEFIKGGKPGAFTVAPPSGKPWVCSLFASFAQLAASTEPS

SEQ ID NO: 302374 - protein, 78 aa, Zea mays
  Clone ID: MRT4577_38840C.1.pep
GTIRELSASLSHCHSKLWTFTLLRITHRSHSLAMVLHGSHIIPKPYPDMVLYGITLSHYTDAIAQLWSYTESHYHIEP

SEQ ID NO: 302375 - protein, 67 aa, Zea mays
  Clone ID: MRT4577_38841C.1.pep
SYGRLGPSRPAGHRLVAASYIHAAPVLAYTACMHACMTGAAELELACSSVPGDNFFFFFFFCKISEL

SEQ ID NO: 302376 - protein, 71 aa, Zea mays
  Clone ID: MRT4577_38842C.1.pep
TYERIDRLVTYRGETLHGCASHKYRNDAASDIYYIVRPGPYSLSGFHEQRAYICICTCCMYEATILMTHRY

SEQ ID NO: 302377 - protein, 55 aa, Zea mays
  Clone ID: MRT4577_38843C.1.pep
NRPTQHTFYISIYTIHYQTTYPFIRRLIFLYSHLNIIHFLSYYNLITFKTLPIPN

SEQ ID NO: 302378 - protein, 177 aa, Zea mays
  unsure (1)..(177): unsure at all Xaa locations
  Clone ID: MRT4577_38844C.1.pep
WVPRGRPGLVDRQTINPRYCRADTTSHFRSPPAEEQECEQWSHSKGTSDVTIRTSKFMTNRLLPRKQFVLEVIHPGRCNVSNXELKEMLANAYNVXDPNTIFVFKNLTHFGXRKSNGFMLIYNNLXAAKNIETKYRLIRNGLDTNDNKNRNKMKELNNRFNNILDDNNTKAGDTEKK

SEQ ID NO: 302379 - protein, 83 aa, Zea mays
  Clone ID: MRT4577_38845C.1.pep
TLTPWIAWTLPGCPRRIYHIDGWKNAYYTAHAASLISTQSNETPKKITGFNHQYTLGPYSPSHTAVVSSWWADDETSSRAVLR

SEQ ID NO: 302380 - protein, 58 aa, Zea mays
  Clone ID: MRT4577_38846C.1.pep
FHTYGINYRYHFVMKLKECYEQNLDQNDVAESNVRLEGHDRLSISLCIIFHNYENAIG

SEQ ID NO: 302381 - protein, 72 aa, Zea mays
  Clone ID: MRT4577_38847C.1.pep
IESYIYRCTHVSKPRYTIMMRLLGSMPISLVGSLHHLQALLLQPGHEIRLPLGPHSRVSAGCVWRVAWSCVC

SEQ ID NO: 302382 - protein, 50 aa, Zea mays
  Clone ID: MRT4577_38848C.1.pep
FLQHSLFRTLATSSILVTVHEASPCIINCPFLSGSKSPLYVNPREGRLRL

SEQ ID NO: 302383 - protein, 138 aa, Zea mays
  unsure (1)..(138): unsure at all Xaa locations
  Clone ID: MRT4577_38849C.1.pep
TNGKGDCQLIGIATKTKYYCMGLEPLHRGQIIADDDGNRTTPWGQRFTHSQRLTGDADHNQRDMNPITXVCEPKTSWGDKQHDALVQNALKVPALQAITXARETPKTGLXHRGDEKPPAXEESSSMAVTKKRESGETY

SEQ ID NO: 302384 - protein, 95 aa, Zea mays
  Clone ID: MRT4577_3884C.1.pep
MARSPFVPMDQGKEQGAGRGAAGNNKERQEEEVLLVHSQVRRIKKEDEEAFRERLLKLRLLETQRHHPGPGERVTSSEHPSTRGSLGCPRARRRL

SEQ ID NO: 302385 - protein, 75 aa, Zea mays
  Clone ID: MRT4577_38850C.1.pep
ISSTQISRRWLVTSSPQNGNGDRSRESDLSDCEEEPLLPAVTPCRRECQVLLTKEPGQLDELRAYDYYGLSYNRT

SEQ ID NO: 302386 - protein, 128 aa, Zea mays
  unsure (1)..(128): unsure at all Xaa locations
  Clone ID: MRT4577_38851C.1.pep
FRYRSLSQKYRPRSFLEIVGQNFVVQSLSNAIARERIAPAYLFHGPRGTGKTSSARILSAALSCTATGETKPCGVCTECSDFFTGNGTNLIEVDATNRXGVNRVRHLVENIPASATSLRSPVFGVAEC

SEQ ID NO: 302387 - protein, 91 aa, Zea mays
  Clone ID: MRT4577_38852C.1.pep
NSLRGNIFNLKNKLNPQVGTHRILKAASIVHRHQDVAREATTYRSRRRWQMLVPRTRSVPRTTFGVQCFGSPLVWSLGFSPAKSPSPPPYE

SEQ ID NO: 302388 - protein, 160 aa, Zea mays
  unsure (1)..(160): unsure at all Xaa locations
  Clone ID: MRT4577_38853C.1.pep
FIFSSVEIYSACKPPLSLEFNNRNKNDWLHIEVKNVLLKWKQLFTTIENVIQDLRSRYSSQAMGEDTNVSVDEDEGLLLEVSRMLTQEKNKVEVSLREFSRIAIPESFAHGILGLNWLYQQLLLGFYIWDLRLLHILQYTKVNTASSDNSIHESTAXNEP

SEQ ID NO: 302389 - protein, 94 aa, Zea mays
  Clone ID: MRT4577_38854C.1.pep
RLLVCFPPHLTFQPGWVGFTWLGHFSARFLRLKKKTTSPMGRLFFFFFFSISGKRPPNSCFGLSLLKKDPFWLGSTLLYPWPFPMSEFIPPSLG

SEQ ID NO: 302390 - protein, 559 aa, Zea mays
  Clone ID: MRT4577_38855C.1.pep
APVSSDCELPSGDCPSARRGREAVVGTHSCRWFIVGMGVITVLVNWLQHFYFGIMGEKMTERIRRMMFSAMLRNEIGWFDKEENNADTLSLRLANDATFVRAAFSNRLSIFIQDTAAVSVALLIGILLGWRVALVALATLPVLVISAIAQKLWLAGFSRGIQEMHRKASLVLEDAVRNIYTVVAFCAGDKIMELYRLHLGKILKQSLVQGLAIGFGFGLSQFLLFACNALLLWYTAISVDRQRLTIATGLKEYILFSFASFALVEPFGLAPYILKRRKSLTSVFEIIDREPRIDPDDTTGLKPPNVYGSIEFKSVDFSYPVRPDILVLSNFNLKVSGGQTVAVVGVSGSGKSTIISLIERFYDPVSGQVLLDGRDLKSFNLRWLRSHMGLIQQDPVIFSTTIRENIIYARHNATEAEMKEAARIANAHHFISSLPHGYDTHVGMRGVDLTPGQKQRIAIARVVLKNAPILLLDEASSAIESESSRVVQEALDTLVMGNKTTILIAHRAAMMKHVDNIVVLNGGRIVEQGTHDSLMDQNGLYVRLMQPHFGKGLRQHRLM

SEQ ID NO: 302391 - protein, 35 aa, Zea mays
  Clone ID: MRT4577_38856C.1.pep
RAGTFLSARGYIRTINGQLHSYTRTLRHRWGGLAT

SEQ ID NO: 302392 - protein, 48 aa, Zea mays
  unsure (1)..(48): unsure at all Xaa locations
  Clone ID: MRT4577_38857C.1.pep
CQLQYFRTSFISSDTVKNLXVHAFVLRVSGSHKXQLPSTEPVQNHEXX

SEQ ID NO: 302393 - protein, 71 aa, Zea mays
  Clone ID: MRT4577_38858C.1.pep
CADDACNQVLIIVECRDTQLHVESSLHITVPVVSKASLISVTDCTFDEVSVCLHSSFLNTVTIEYYISVNC

SEQ ID NO: 302394 - protein, 88 aa, Zea mays
  Clone ID: MRT4577_38859C.1.pep
SAHASAAIESESSRVVQEALDTLVMGNKTTILIAHRAAMMKHVDNIVVLNGGRIVEQGTHDSLMDQNGLYVRLMQPHFGKGLRQHRLV

SEQ ID NO: 302395 - protein, 262 aa, Zea mays
  Clone ID: MRT4577_3885C.1.pep
TYIYIYIHTPPTPRRRAQQDTETEHAMLLYHEPRTHGDAAYYTPSPSTKLRSHVRARRRRARAGSLTSVPPNKTLVTLATYAPSDIYNRRRARGQPREPRVDGCSDTPRTPASERGTLLLLASHSLTGTGMMALPARRSGDRERGARQATPPPAPAALGRVSSRRSFRRRSLKASSSSFLIRRTWLCTSSTSSSSSRSLPLLIIAGRSSPGALLFPLIHRNNRRPRHIYRHTSEAKTIEAWLNRSHVRTLATTDGSDYYSCW

SEQ ID NO: 302396 - protein, 79 aa, Zea mays
  unsure (1)..(79): unsure at all Xaa locations
  Clone ID: MRT4577_38860C.1.pep
XXXFFFFYNLVWGFFFFGLGALESASLYNFKTFKLLNKKEEGPFFCFNGQKKNTVDIWFLFTTKNFNNNNNKKSGVICP

SEQ ID NO: 302397 - protein, 148 aa, Zea mays
  unsure (1)..(148): unsure at all Xaa locations
  Clone ID: MRT4577_38861C.1.pep
WPNHLFPKIETLGVGRGHSGHGPPGPQGGGGTPRAAPPQKEGTTCGGGPGGGXNIITPXPPPGGAPKGGKPRPGAGGKEGTRARTQAGGNKGQKGVPGGKGXPSQCQTKNQPEKKRVKPGGPKGGANPHXGGGKGPAXPAGKPGWPIE

SEQ ID NO: 302398 - protein, 43 aa, Zea mays
  unsure (1)..(43): unsure at all Xaa locations
  Clone ID: MRT4577_38862C.1.pep
NKNININLKIIKIINIFQXPXKINKIPXSLISCQDPRPLQYTG

SEQ ID NO: 302399 - protein, 191 aa, Zea mays
  Clone ID: MRT4577_38863C.1.pep
MRPSPPLLLLVLLHFALLSTNANGNGDLRGDAMALLALKAALSCRPGALRSWSVANAGSVCAWAGVRCAAGRVVAVDIANMNVSDGTPVSARVTGLGALETISLAGNGIVGAVAASALPALRHVNVSGNQLGGGLDDGWDFASLPGLEVLDAYDNNFSAPLPLGVAALPRLRYLDLGGNYFTGEIPAAYGA

SEQ ID NO: 302400 - protein, 44 aa, Zea mays
  Clone ID: MRT4577_38864C.1.pep
GGGGLFLVVNCKNQKYWSQKTMITLEGRARTHFGVYIASMGLIE

SEQ ID NO: 302401 - protein, 48 aa, Zea mays
  Clone ID: MRT4577_38865C.1.pep
WVFLAPLLEIWTPLLESPSSLDDQQWLTYWVLYSLIALFELSCWKVLQ

SEQ ID NO: 302402 - protein, 129 aa, Zea mays
  Clone ID: MRT4577_38866C.1.pep
VQFTRHPLGSIIIIHQQPLRCSPQSPRRRLLRRTDTGHPWPAAAAAVCIPVKHGCCRCLPQESPRLWNPTLSGPPAFVTLTAYTLAPCPPCFHSVHVSLGRPVDVERDRSRQQAGSGVPDMDSLMVMPL

SEQ ID NO: 302403 - protein, 102 aa, Zea mays
  Clone ID: MRT4577_38867C.1.pep
RKLILLLLLLRRILVTRRLLIIVRERRLLLLIRRLVRLFFLRLFLRLSRFLYKYFRFIILLLLSLRLRLRLRFGFIIIRFRILFRLRIRIIFRFRFILRFVS

SEQ ID NO: 302404 - protein, 47 aa, Zea mays
  Clone ID: MRT4577_38868C.1.pep
SYRRRRPTLGAEVRVVLDLPQERACKIGYNRHRCGRRSSSSSSRRTN

SEQ ID NO: 302405 - protein, 295 aa, Zea mays
  unsure (1)..(295): unsure at all Xaa locations
  Clone ID: MRT4577_38869C.1.pep
MGYSKRIALVLVAAVVALHVHVPMATAANSNLFRDYIGAIFNGVKFTDVPINPRVRFDYILAFVIDYTTATEPPTPTNGQFNIFWQDSVLTASAVAAIKQSNPNVRVAVSIGGATVNDRPVFFNITSVDSWVQNAVSSLTTIIQKYNLDGIDIDYEQFQADPATFAECIGRLVTTLKSNGVIRFASIAPFDNADVQRHYQALWATYGSVIDYVNFQFYAYGASTTDAQYVNFLXFTTAPTTTSVPINTSLSACQTLQSQGKLYGIFIWAADHSRSQGFKYDTQAQALLANAPAGY

SEQ ID NO: 302406 - protein, 100 aa, Zea mays
  Clone ID: MRT4577_3886C.1.pep
MARSPFVPMDQGKEQGAGRGAAGNNKERQQQEQEQEEVLLVHSQVRRIKKEDEEAFRERLLKLRLLETRPSAGGVAWRAPRSLSPLRRAGSAIIPVPVSE

SEQ ID NO: 302407 - protein, 87 aa, Zea mays
  Clone ID: MRT4577_38870C.1.pep
PVDLFQDPIMLAVLNLNGHSGIFRIKGSARVQVGRHHRTNGFEDLLRAGQLVIVPQGLLVPNKGQGGGFQYIGFENNPYNIVKHLGG

SEQ ID NO: 302408 - protein, 59 aa, Zea mays
  Clone ID: MRT4577_38871C.1.pep
CIQMFDVFSQHHVQKGTTNMADVFIQAMTKLNRHYSRQRHMPVPTPKYCNANMLRNANA

SEQ ID NO: 302409 - protein, 130 aa, Zea mays
  unsure (1)..(130): unsure at all Xaa locations
  Clone ID: MRT4577_38872C.1.pep
REILIRRSPTDPRGGRPTCPRGRLSIFVQLLFSIINTSRGGSARGGQSYMTYVSRSGEPAKPAVAPAASAPPDAKPSAAKTDAAKQAAAGVTSHTNKLHRGAGPNTGNFHTDRSXPKGHAAPGGGYYLGY

SEQ ID NO: 302410 - protein, 89 aa, Zea mays
  Clone ID: MRT4577_38873C.1.pep
AVVTTQSTFFFFFFFLEKPFLSSKSPNLSSLGRATKLSPIFKGRTPHTYQKETGPYPNPFFGWGAINPLTPFGPELGIKVPLVGWGGWV

SEQ ID NO: 302411 - protein, 188 aa, Zea mays
  Clone ID: MRT4577_38874C.1.pep
IRHERICLLEPHHAKGSDGSSCKRIAEELTTSISSMLLEFCTRSENLLSFLSLRIREFPDMLDALLLSDRLLDKKVARKLHEFLLKLISDPAFKYEFAKVFIHYYPITFGEVIKGCNDSLLEDYALMTTFSVQILTVPTLTPRLVREVDLVDELLECLTDLVVSCLGEDGRVTDNKWGDLFGCLYWDT

SEQ ID NO: 302412 - protein, 179 aa, Zea mays
  Clone ID: MRT4577_38875C.1.pep
ELDKKGENGFGESVKPFYHLNALSDLLMLPKDVLMDTSSSRKELCPTFSSSIIKNILDVFLPDEFCPDPIQGSLLQALELEDHLEVNKGIRSIPCSASPILYNAPVSGAILSVIGDPRKSGSAILHKSNTSDDELDELSSPLTFISNTSSDPLAKLKRISNSTTARYRLLHEVWKLDDQ

SEQ ID NO: 302413 - protein, 63 aa, Zea mays
  Clone ID: MRT4577_38876C.1.pep
TTTTSGCNSKSQADDYGRGYGGYNKSVGDDDYCRSGGYGYGRFGGDDYSSGTGGGGYNKSGGC

SEQ ID NO: 302414 - protein, 89 aa, Zea mays
  Clone ID: MRT4577_38877C.1.pep
TSDPKVLPISSGKYSFGAGVQLKNAIGSWSRCLTDLFGMDMDDYQELDNEGGENGFGESVKPFYHLNALSDLLMLPKDVLMDTSSRKEA

SEQ ID NO: 302415 - protein, 161 aa, Zea mays
  unsure (1)..(161): unsure at all Xaa locations
  Clone ID: MRT4577_38878C.1.pep
MAVGNGGAKKVVAPMEVSVEAGNAGDAAWMDDDGRPRRSGTFWTASAHIITAVIGSGVLSLAWAIAQLGWVAGPAVMLLFAAVIYYTSTLLAECYRTGDPATGKRNYTYMDAVRSNLGGPKVIFCGVIQHANLVGVAIGYTIDSSISMRAXIRRAELFHRH

SEQ ID NO: 302416 - protein, 200 aa, Zea mays
  Clone ID: MRT4577_38879C.1.pep
MPYTAPRPSPQQHSRVLSGGGAKAASHGASCAAVPAEVARHHEHAARAGQCCSAVVQAIAAPVGAVWSVVRRFDRPQAYKHFIRSCRLVGGGDVAVGSVREVRVVSGLPATSSRERLEILDDERRVLSFRVVGGEHRLANYRSVTTVHEAGAGAGTGTVVVESYVVDVPHGNTADETRVFVDTIVRCNLQSLARTAERLA

SEQ ID NO: 302417 - protein, 160 aa, Zea mays
  unsure (1)..(160): unsure at all Xaa locations
  Clone ID: MRT4577_3887C.1.pep
MAVSTMTMSSLLHRPSPAIQAGTXFCEGRXIPMRKTEDEPNGAECRSPWYGPDRVKHLRPFSGEAPSDLTGEYPADYGCHTGVLFADPETVAKNRELQEKHSRXGMLVALGCAVRDLLSRNGVELPEGVWFKGGSQIFSQVALDYLGNPRLTHEQRILPI

SEQ ID NO: 302418 - protein, 55 aa, Zea mays
  Clone ID: MRT4577_38880C.1.pep
GAHGQATRRDILITAVAVVSSPRRIVARDLAVNVFHPPRTLLRPPPVWQHGRCQR

SEQ ID NO: 302419 - protein, 50 aa, Zea mays
  Clone ID: MRT4577_38881C.1.pep
MLNEAIHYVKFLKSQVQSLERAAHRAAALGAAAYPAFHAPWQYALPHGDM

SEQ ID NO: 302420 - protein, 130 aa, Zea mays
  Clone ID: MRT4577_38882C.1.pep
KPRAFSGVKGKEAKKRPPPHFPHVGFFCQAPLPGEGPLKKPRGPNCGPRKKKGWGLPPKFFPRKKRKAPPVPFRCPKKCKPPRVFGLPQNVKNCSIPKKKRGSWPKFFPPLFGSPRFYLKQGFYKRHDWF

SEQ ID NO: 302421 - protein, 53 aa, Zea mays
  Clone ID: MRT4577_38883C.1.pep
YYYWSVSCLEYVRRASGSCLCSATKGTVLQVCSFGLPFIYIGYVARRIYGLAS

SEQ ID NO: 302422 - protein, 76 aa, Zea mays
  Clone ID: MRT4577_38884C.1.pep
MDLWERARSFAGEAAKRSQELSLEAAKRSSVLVSETAKKSKEIFSETAIKSREMAAEATKQADLLAGQIMHLASDI

SEQ ID NO: 302423 - protein, 90 aa, Zea mays
  Clone ID: MRT4577_38885C.1.pep
SLAPCSSVHPSTSCICDQWRTVISSSLVVGNGLCKIAVVPWPPAHSPSMEVASLRGPDVPHPQSSRRLRFCRGRATTHAGGHRSLGRATF

SEQ ID NO: 302424 - protein, 82 aa, Zea mays
  unsure (1)..(82): unsure at all Xaa locations
  Clone ID: MRT4577_38886C.1.pep
GSPGVRIEGERSEMTQSDAEYRSFLXGLTCATDYHSVHIAYITYGEDLESKIMLDPDTQRYRCFGCVTIFTDDAMLHAIQGM

SEQ ID NO: 302425 - protein, 198 aa, Zea mays
  unsure (1)..(198): unsure at all Xaa locations
  Clone ID: MRT4577_38887C.1.pep
SWLAPSHGGPAELSTLTVALKPQAGAPLLHMARSSNTTSGLAVGSPSAEPLHLPHHHLLDASDGRRWCYTYFPDCRTCACSTCVEHPLELTGADPAPDWTTKYPSCDPTTSSTQLAPSPTESPSTRACYMRARRYVPVTCSTQPSTVCPSVTRPLAAGSSSALDAILCXSPRPTPVRLPSPILSSITPNRRGARAYKQ

SEQ ID NO: 302426 - protein, 113 aa, Zea mays
  Clone ID: MRT4577_38888C.1.pep
KNYLLLSMKNSSILLLFCFAFFYQTFATHLVIVGQLAYYEGTEEEWVWWSHAAEEAAEEALEWNTEELEEDGWVDVDLDVAASDPQIQQAQNFGIQAVLQKSLTEGLITDVNF

SEQ ID NO: 302427 - protein, 83 aa, Zea mays
  Clone ID: MRT4577_38889C.1.pep
CSTVPLIPVRPRAFVKKPFVGSSHAKGIVLENIGGGAKHPNCAIRLCARVQLVKNGKRIVAFVPIDGWLIYIEEIDEVLIGGF

SEQ ID NO: 302428 - protein, 85 aa, Zea mays
  Clone ID: MRT4577_3888C.1.pep
HISKEDQGNVFAIGPADPRPRDDLYTVLDHENHDETIAVYTTKMVAELLGCSIEDLNRDLTYRHMKVHNETLTHKLTLANATDTL

SEQ ID NO: 302429 - protein, 38 aa, Zea mays
  Clone ID: MRT4577_38890C.1.pep
HVFLWQFSSFVCVRARHPLFRPFSISKSVVTLLISILG

SEQ ID NO: 302430 - protein, 90 aa, Zea mays
  Clone ID: MRT4577_38891C.1.pep
DPNHHIWGDRLISSGYTMQPKRPLRASPPMSQKSPPKLKYGALPRKIYSTSPLFHKFLFKNYRAPSQVTQIYYTVVGWALLLERGVLFMP

SEQ ID NO: 302431 - protein, 197 aa, Zea mays
  Clone ID: MRT4577_38892C.1.pep
MDVKCRRLEGKVAVVTASTQGIGLAIAERLGLEGAAAVVSSRKQKNVDEAVEGLKAKGITVVGAVCHVSDAQQRKNIIETAVKDAAPHLRAGSSVILISSIAGYNPEQGLTMYGVTKTALFGLTKALAGEMGPDIRVNCIAPGFVPTRFASFFIDNETIRKKLNERTMLKRLGSVEDMAAAAAFLASDDASFITAET

SEQ ID NO: 302432 - protein, 186 aa, Zea mays
  Clone ID: MRT4577_38893C.1.pep
GCEDSCSSNQLIIWLQNFGHIDILVSNAAANPTVNVILEMKEVVLDKLWDINVKASILLIQDAAPHLRAGSSVILISSIAGYNPEQGLTMYGVTKTALFGLTKALAGEMGPDIRVNCIAPGFVPTRFASFFIDNETIRKKLNERTMLKRLGSVEDMAAAAAFLASDDASFITAETIVVAGGVPSRL

SEQ ID NO: 302433 - protein, 111 aa, Zea mays
  unsure (1)..(111): unsure at all Xaa locations
  Clone ID: MRT4577_38894C.1.pep
ISIGKGWSPSASDSTLNFSSYKXSPITTSTTCGIKFESSTATFSLALSNFRVNSISTSFEMPSIEPTAQITEYSLSSLGKPVNCTQALGISYFISSPSPSSLTSICAPNFV

SEQ ID NO: 302434 - protein, 60 aa, Zea mays
  Clone ID: MRT4577_38895C.1.pep
ETLADRAHRYRGIVLVILAPLALVSLVLLLMPRSPAGTMGSARDRQRDRALRPGTHSPAR

SEQ ID NO: 302435 - protein, 292 aa, Zea mays
  unsure (1)..(292): unsure at all Xaa locations
  Clone ID: MRT4577_38896C.1.pep
RRSAARLLTCLPLSHLPGPLDFPPTVPPCPPAFPTTSPLPPXPPSLPPSPPXPPDEVTSXPLIPFDYARPQSLPHPPSWPHPRSPSRSGRASPSSPPPRPCRPPRRCASHRRRPSSMRPGPPPQAPATPXPNPXAPSTSPLSRPCWPPRPQSLPRPPAWPHPRSPSRSGRASPSSPPSRPCRPPRCCASHRHRPSSMRPGPPRPPPLRPPXPVXPSTSPLSRPCWPPRPQSLPRPPAWPHPRSPSRSGRASPSSPPPRPCRPPRCCASHRHRPSSMRPGPPRPPPLRPXQSG

SEQ ID NO: 302436 - protein, 115 aa, Zea mays
  Clone ID: MRT4577_38897C.1.pep
TKENPVFDCSNLYICSYLSIASQSSFLFLCDKIAFIFGTRNIGFNWNLYKTETVIFGYQESFSKFYRNLGLNGNGYSKYGNKIDIKNRNQKRKRFSPLPTISRNYRFYSIFYRLQ

SEQ ID NO: 302437 - protein, 147 aa, Zea mays
  Clone ID: MRT4577_38898C.1.pep
TLSSLPALPATTQQQIHHRRARRAPRRGTLDPAQQEAANQSPSPPAPTPPAAASGVRYRTPSSPDLLLPADAAKMRRYSALPNGGRQETLADRAHRYRGVVLVILAPLAPVSLVLLLMPRSPAGTMGSARDRQRDRALRPGTHSPAR

SEQ ID NO: 302438 - protein, 103 aa, Zea mays
  Clone ID: MRT4577_38899C.1.pep
MNFRPIVLIFLLLVLIVTSQFEWKQHIGEAEANPTATRRRQQALGREDAVKEKVILAQEKNIQQLNELIQSLQLQLLHCRGSNSSAQTASSHSEVEGHEMIGD

SEQ ID NO: 302439 - protein, 118 aa, Zea mays
  unsure (1)..(118): unsure at all Xaa locations
  Clone ID: MRT4577_3889C.1.pep
SHPLMALIVTTFDPFQXLKYTAXVPIAHHSSRILGNIINGRTIPLIHVXPAYRNKKFETLSYLPPLSTDDLLNHSHYLLLNDWIHLTXLKQVGFVYRENSTYPCYYNRQYWTMSESAH

SEQ ID NO: 302440 - protein, 51 aa, Zea mays
  Clone ID: MRT4577_388C.1.pep
TCASLARSSSCTRDIAVGDGLCNDSHFTTAIAIGIDGSNVSTVELHSDHVH

SEQ ID NO: 302441 - protein, 102 aa, Zea mays
  Clone ID: MRT4577_38900C.1.pep
MFVASHEIRKYISKKKKKKKKKKKKKKKKKKKKKKKKKKRKTKPPSLATSQYRWPDLPFKGPKLDKTVAHPNKLALHKTPLSRKNPDVNKPKRLALHKLCTS

SEQ ID NO: 302442 - protein, 252 aa, Zea mays
  unsure (1)..(252): unsure at all Xaa locations
  Clone ID: MRT4577_38901C.1.pep
MEEDYVEPNPFPFHFANHPRRDPDPDRSTIRLRHLNPPSVPRRPPLIPAAMGSVDLVLKSACEGCGSTSDLYGTGCKHTTLCSSCGKSMALSRARCLVCSAPITNLIREYNVRANASTDKAFSIGRFVTGLPPFSKKKNAENKWSLHKEGLQGRQLTDKMLEKYNRKPWILEDETGQYQFQGHMEGSQSATATYYLLMLHGKEFHAFPAGSWYNFSKVAQYKQLTLEEAEEKMNKRKTSAXGYERWMMKAAT

SEQ ID NO: 302443 - protein, 93 aa, Zea mays
  Clone ID: MRT4577_38902C.1.pep
PRVRAELQNMSIIHTSIAVGEGSVNAARSKNRVLATMIKRCTDGSAFTKCDACNKDVQDLLIHMHTFNRQEKIRMTLEAHVVQKTDHVPSADR

SEQ ID NO: 302444 - protein, 75 aa, Zea mays
  Clone ID: MRT4577_38903C.1.pep
TRSEASLPDQSFPWGTDNVGGLTMLQPILSHTIHVVFVCPSYISVSIFGCQYERIVPAPGVDLLYWESPLPAVFT

SEQ ID NO: 302445 - protein, 43 aa, Zea mays
  Clone ID: MRT4577_38904C.1.pep
GKAPFYYSGISSKLKNFFHVLEKAEPPFIMSYKKKAWDWFQYL

SEQ ID NO: 302446 - protein, 103 aa, Zea mays
  Clone ID: MRT4577_38905C.1.pep
PHGGAPSFAPSFQGVGVERIGARRSGFIPRAESEQVGASSKICGENPGRGFGFRRGDLEYGRRGTQQRKKDPANGAHRSATRVRARARDDQILAEGARTAPAG

SEQ ID NO: 302447 - protein, 149 aa, Zea mays
  unsure (1)..(149): unsure at all Xaa locations
  Clone ID: MRT4577_38906C.1.pep
ASPGVSEGTPRGRARHRSRAGPRPHPHRRPPPPPRGTRRRRARRRRGCRHHRTQRGREARLSRRQRGAVEGASRRRCRXAAEAGARGLRRLXRRSEQPARRHGSAGSRPLKRRRRRQRVPRGRAAACRTRRRRSPRSPSAPGCLPAGLV

SEQ ID NO: 302448 - protein, 170 aa, Zea mays
  unsure (1)..(170): unsure at all Xaa locations
  Clone ID: MRT4577_38907C.1.pep
HRRRPKYSLANPCGIRRNSXRGPARHSSRTGPRPHPHRRPPPPPRGTRRRRARRPHGCRHHRTQRGREAXLSRRQRGAVEGASRRRRRRRXRRRRGRGASGGSWRRSEQPARRHGSAGSSPLKRRRRHQRVPRGRAAACRTRRSPRSPSAPGCLPACRARGFKRMIRRGV

SEQ ID NO: 302449 - protein, 631 aa, Zea mays
  Clone ID: MRT4577_38908C.1.pep
PRAGGNQTQAAAGRPPPASTEPAPAGCWPAMRKRLEPRLVRALATATTSAAPSSSSKPVRPAAPFLAVLLRRGRADAAALLNRRLRAAPVTEACSLLSALPDVRDAVSYNIVLAALCRRGGDLRQALSLLADMSREAHPAARPNAVSYTMVMRGLCASRRTDEAVALLRSMQASGVRADVVTYGTLIRGLCDAAELDGALELLGEMCGSGVHPNVIVYSCLLRGYCRSGRWQDVSKVFEEMSRLGVEPDVIMFTGFIDDLCKKGRIGKAVKVKDIMVQRGLEPNVVTYNVLINCLCKEGSVREALALRNEMDDKGVAPDVVTYNTLIAGLSGVLEMDGAMGLLEEMIQGDTLVEPDVVTFNSVIHGLCKIGRMRQAISVREMMAERGCMCNLVTYNYLIGGFLRVHKVNMAMNLMSELISSGLEPDSFTYSILINGFSKLWEVDRAEMFLRTMTQRGIRAELFHYIPLLAALCQLGMMEQAMVLFNEMDMNCGLDAVAYSTMMYGACKSGDIKAAKQLLQDMLDEGLAPDAVTYSILINMFAKLGDLEEAERVLKQMAASGFVPDVAVFDSLIKGYSAEGQINKILDLIHEMRAKNVAIDPKFICTLVRLPQQMPLLWSATTALVARSHQS

SEQ ID NO: 302450 - protein, 80 aa, Zea mays
  unsure (1)..(80): unsure at all Xaa locations
  Clone ID: MRT4577_38909C.1.pep
SNIEAHSVPTMAAKIFASLCSLVFLQVLLRRPFCRMLXAPIASFFPTSHQRVSDVKTILTSDHRSMDYLYLSPYSYPSWL

SEQ ID NO: 302451 - protein, 103 aa, Zea mays
  Clone ID: MRT4577_38910C.1.pep
NTDKTDRMSSGRWRVIHAYWSGLAKFASRLWHNCHKKISWGQEEHMPEAAAPLPVIRRGSLRTPSGRALHGRVDGSLRSCRLCTGVGSHPLHRARLGSATSSS

SEQ ID NO: 302452 - protein, 175 aa, Zea mays
  unsure (1)..(175): unsure at all Xaa locations
  Clone ID: MRT4577_38911C.1.pep
AFQTLALPXEVAVLEEEVVRLEEQVVSFRQGIYQEATVFSSAKNTQLPGGDAPVPAQLTPPNPVLNSDISPATESHHPPNARPSSPHNGVANGKQTPTKPVVNTTSPSQDDRSGAGKENQSCSNSSSTSGRRTPKSRPAATPPDRRSRATPSQLNLKKQTAEACILEKKKKKRPL

SEQ ID NO: 302453 - protein, 167 aa, Zea mays
  Clone ID: MRT4577_38912C.1.pep
FSPLFQILPRFPLALLNFRLGPRGRFFFIVPSLRGTPSFLWLLLRGPTRLFRDALLSRPLVPCSCLAASSPLSLFLAEFSASLPPPCFPPQPGVFSPPFPRQSSASTRCFFFPGILPRCFPFFFFVSPPTPNLLVSHVPPRFRLWAGGSPPPGFAPLDDPPLWFCFL

SEQ ID NO: 302454 - protein, 55 aa, Zea mays
  Clone ID: MRT4577_38913C.1.pep
QLGLPLSSLIPSTCAGHGRIPLSSCQSKVLNRHHQRQIYSKLGFLTLFAKYLDYT

SEQ ID NO: 302455 - protein, 49 aa, Zea mays
  Clone ID: MRT4577_38914C.1.pep
KRHWDGMSDHVRLGLAHVIGFVSRFIDIPFTEMISINISVKSCRYLCVS

SEQ ID NO: 302456 - protein, 60 aa, Zea mays
  Clone ID: MRT4577_38915C.1.pep
GFARAIISVRVSMVNCSCQPRGANGRPGLLLLPVQDPTIVYGGASNAGLGHLLSARRGCE

SEQ ID NO: 302457 - protein, 92 aa, Zea mays
  Clone ID: MRT4577_38916C.1.pep
YHGTQTVEHRVHQNHPWPYQCHSRRQEAACPHHQPFLNTRSRPAPPRGPRPARQPPRQRQRRRCQLLQGTVLAQAAAAAAVSPSRRDEKRNL

SEQ ID NO: 302458 - protein, 68 aa, Zea mays
  Clone ID: MRT4577_38917C.1.pep
PALFFYMFAATIVLLDITVRGAHLYSPPKEFRPRNVAGSKIYWNVGNVVKAQLRVASLRRELGLPVTK

SEQ ID NO: 302459 - protein, 106 aa, Zea mays
  Clone ID: MRT4577_38918C.1.pep
RRRSSAGRHVRNQRRRRKSWPASFFTISPSPEHAAGGPRRCEDGGGEVSQLFSPVLLSVLASCLRQLGRFPGEADIVVAVAGGEVVWPDGGPAAAPASNWCAMAGS

SEQ ID NO: 302460 - protein, 173 aa, Zea mays
  Clone ID: MRT4577_38919C.1.pep
MLSDGTYYDRIVRHIRKVMPQFEDFVLDALPGNELFVRLNWSDNYRPDHLFGPEQISGGSLRFMALTVLLLQPPELLPKVIVLDEPELGLHPEAITELAGMIKRASKNTQIVVATQSTRLVDEFDAEQLIIVERDNQTGASTFKKLKHESLSEWLQRYSLSELWEKNVLGGQP

SEQ ID NO: 302461 - protein, 95 aa, Zea mays
  unsure (1)..(95): unsure at all Xaa locations
  Clone ID: MRT4577_3891C.1.pep
VAGAYEIRGDLKKNVGSNATGSTNCLAGLAMVDDEESGXLVDLVTSVDATTCSQKTADGASMKDWTGGRXGALHNIVPSFTGASKVDGKVVLDLI

SEQ ID NO: 302462 - protein, 45 aa, Zea mays
  Clone ID: MRT4577_38920C.1.pep
LCMQIMNSHNNDLTIVYVCNITVIIAQWKPRYSAALSMHVLYISS

SEQ ID NO: 302463 - protein, 168 aa, Zea mays
  Clone ID: MRT4577_38921C.1.pep
QLQRIGTGIVLSIVTMLVAAAVERHRRRIGDSASCFLLVPQQLEAGLSEAFGIIGQVDFYYKQFPENMRSVAGAMLFLAFAIASYASGLMVSVVHRTTGGPDGRPDWLAQDLNQGHVDLYYLLIAAMAAVNLVYFVACARWYRFKNPAAADVEQLELELEGKAAAPPV

SEQ ID NO: 302464 - protein, 93 aa, Zea mays
  Clone ID: MRT4577_38922C.1.pep
MVNFTIDQIRALMDKVANVRNMSVIAHVDHGKSTLTDSLVSMAGIISQARAGEARFTDTRQDEQDRGITIKSTAISLFFEMTEDDLRGRQAKD

SEQ ID NO: 302465 - protein, 124 aa, Zea mays
  unsure (1)..(124): unsure at all Xaa locations
  Clone ID: MRT4577_38923C.1.pep
GLVPRTRETFDIEPYSMQVIHSRWAMMRCAPYSDFPXLLVRDRVXHARACXINGGSQIFTDGGLYYLRNPRLIHAQRILSICAXHVQLMCAIEVYRINIVPLGEVIDPIYPDGSFDPVELGDDP

SEQ ID NO: 302466 - protein, 73 aa, Zea mays
  Clone ID: MRT4577_38924C.1.pep
INKPELCMSREWGVRLSIFKSSSSSGPDDRRYCMRSRGHVMWAGAGAAGGILFGLAGVCVYIFPLPMRGIPHP

SEQ ID NO: 302467 - protein, 64 aa, Zea mays
  Clone ID: MRT4577_38925C.1.pep
SSARYGIIGCTQADPACDFAKIRSAQLMILLDHDMLGPESLVYPGPPRNIVCVCGSLIQKPSNI

SEQ ID NO: 302468 - protein, 38 aa, Zea mays
  Clone ID: MRT4577_38926C.1.pep
MRPLNPSTLSLVHSLFRVSLFDNGAQVPDKISPTFGLL

SEQ ID NO: 302469 - protein, 47 aa, Zea mays
  Clone ID: MRT4577_38927C.1.pep
SIDKITNVNVYRGLSKALLDTPIRFSFRSKAFNSLFLYPYLRQSQYQ

SEQ ID NO: 302470 - protein, 141 aa, Zea mays
  Clone ID: MRT4577_38928C.1.pep
PTTLISLCLSSPCSCSRPAMAHPLPGSPTRASAPLCSSRACSLELAPARFSALRASHLSGASPSRTSNSDSIQFAYLPVLGSWLELSDAAPVQAPMAGAWSQLAAYCLPHSLALALMPRSAASGPQQRSCFFPSRRSSSRL

SEQ ID NO: 302471 - protein, 70 aa, Zea mays
  unsure (1)..(70): unsure at all Xaa locations
  Clone ID: MRT4577_38929C.1.pep
SSRRNVTGWAPKSSQDKVVRTLIDTXDTEISQKQKSALREAYKMKNLLPXLDLRPKKTRAIRRRLTKHQI

SEQ ID NO: 302472 - protein, 47 aa, Zea mays
  Clone ID: MRT4577_3892C.1.pep
TVPRGMRNVISFFLIVVTLKFHIHWARSFLQTVVDLGKNLWRLPQLY

SEQ ID NO: 302473 - protein, 474 aa, Zea mays
  unsure (1)..(474): unsure at all Xaa locations
  Clone ID: MRT4577_38930C.1.pep
SQQRSAVDVLSNIIKECLHDHLYITRSNFASHLQFCFDGSSCCYLSEEWEGENIVLFYGLVVLFNLLKSDNFICFHCKRKLDAGIVCHECRDHYNEGLVGVLKQALCQNMSPGPKSYIAHILSMFGLCGFPSKLGGNMRNVLCDSELVDLELLLADGESLSAHAAILSARCPKLLPSEKTFVRDGSVTYEWGRRSCYHVRMSDRVDSHALKKILEYAYTGLVTVDDATVKPVKTLAKYCHLRSLHLMLQKEQPRWHSCPIYDLTTALEPAKHSFSDIILEAQSNDKMECHHGSCQLSTPHIHSHKVILSVSCEYLRALFQSGMHEXSFAETIRVPVGWEALRKLVQWFYSGELPRVPPDCRWKAMSTEEKLSILKSYAELSSLADFWFVDGMKEESLQVLTSCLNSSSTDASLAFIGFAANLGQWELVEAAISSVAHLYPRLRDSGRLEQLDEDVLNMLRTEHVRYLQHRSASN

SEQ ID NO: 302474 - protein, 437 aa, Zea mays
  unsure (1)..(437): unsure at all Xaa locations
  Clone ID: MRT4577_38931C.1.pep
MGMFASAAKRYSNGKNFLRSAGVCCCSPSASAQLGGVRGKEETSTSAPAFAPDSNKKRWRKRRFWRKKMKARKEIGGLVDLVNDISAKSEESLGVSNQNMPSRALTFSQLSAATDGFSSQNLLGEGGFGRVYKGLLEDTGEVIAVKQLNRDGLQGNGEFLVEVLMLSLLHHPNLVKLLGYSTDSNQRILVYEYMPRGSLEDHLLDLPPSWKPLPWHTRMRIAVGAAKGIQYLHEVANPPVIYRDLKASNILLDADFNAKLSDFGLAKLGPMGDQSHVSTRVMGTYGYCAPEYAMTGKLTKMSDIYSFGVVLLELITGRRAIDMARPSEEQVLLNWASPLLRDKRRFVKLADPLLGNRYPVKALYQALXAVASMCLQEDAASRPGISDVVAALSFLADPQYYPPGGTEAEHKSTXRDRQXSSPPRAEMVRADDDMKHR

SEQ ID NO: 302475 - protein, 88 aa, Zea mays
  Clone ID: MRT4577_38932C.1.pep
IFKKNPPKKFKQEIQPDKNNIKPSNQKKMSTPNVFLRKRGGANAKTYQLCQIRAVLVPNPTKFGPQLSLQKITNKPRVRKGWSTGSGP

SEQ ID NO: 302476 - protein, 95 aa, Zea mays
  Clone ID: MRT4577_38933C.1.pep
THSCDTSSRTRQKLFKALKFYNSLRGHGHLQEGGRPSASHGRHRPRPHRQCQLDSLTPRHSTTSLSPDSKPSSPTSSVSVHYVYPVLATISSPVR

SEQ ID NO: 302477 - protein, 94 aa, Zea mays
  unsure (1)..(94): unsure at all Xaa locations
  Clone ID: MRT4577_38934C.1.pep
IAIRCIVPVHVHTSLAYIDRIXTTQASMXSVAAGQTDGLLLTELDTPDRQASVYAQEFGLVKKILISSLEQRYHDAASWNDQLMRLTSKRNNRA

SEQ ID NO: 302478 - protein, 461 aa, Zea mays
  Clone ID: MRT4577_38935C.1.pep
MGLFSSAAKRCRKCKKFLRSAGACCCSPSASSAPAGGVRGNEEASTSALASAPDGKKKKRWRKRKFWRKKKKAKKESDDGSGELVDLVNSFSAKSDVCKNVNAAEEILRGCNQNMPSRALTFSQLGAATDGFSEQNLLGEGGFGRVYKGLLQDTREVIAVKQLDRNGFQGNREFLVEVLMLSLLHHPNLVKLLGYSTDSNQRILVYEYMPRGSLEDHLLDLPPSWKPLPWHTRMRVAVGAAKGIEYLHEVANPPVIYRDLKASNILLDRDFNAKLSDFGLAKLGPMGDQSHVSTRVMGTYGYCAPEYAMTGKLTKMSDIYSFGVVLLELITGRRAIDVTRPSEEQVLVHWATPLLRDRRRFMKLADPLLGKRYPVKGLFQALAVASMCLQEDAASRPGISDVVSALSFLADPQYYPPQGTGAEQKATATGRESKPKEDTTDKDSSPHKAEMIRADDETKHR

SEQ ID NO: 302479 - protein, 104 aa, Zea mays
  unsure (1)..(104): unsure at all Xaa locations
  Clone ID: MRT4577_38936C.1.pep
MTHHSYLLLSLASASAVVFTIYSLNPFNQQLLXAGYYNDLXLNSKFHLLSFVQTITKFYTDPHKHSYRLYGSKVNLLRARRNQMMDPSEEHGVTKIYYLTPAEF

SEQ ID NO: 302480 - protein, 47 aa, Zea mays
  Clone ID: MRT4577_38937C.1.pep
SNGALLSCYIQGLVAHPISTICSLGEHPCNNDMNSKGECPFNCFSLL

SEQ ID NO: 302481 - protein, 86 aa, Zea mays
  Clone ID: MRT4577_38938C.1.pep
DSDAVPASLCAAMGSIASEVSPTQLVTVHRSMAHVSCFCVNSNESWTYGIKSGYKLLIVHFRGLNLLEQPDFEVVPCMQTRGNLVP

SEQ ID NO: 302482 - protein, 41 aa, Zea mays
  Clone ID: MRT4577_38939C.1.pep
ASKFKTYLKCTIRENSAWMQILYIYLLLIYFAKISICMHEI

SEQ ID NO: 302483 - protein, 70 aa, Zea mays
  Clone ID: MRT4577_3893C.1.pep
IGPTVCTSKAKGFCSTVGKGARRVWVNRLFQPEKVEKLCGDSLNKKSCMYSPFEFYSNMVVFDGNGAWVG

SEQ ID NO: 302484 - protein, 110 aa, Zea mays
  unsure (1)..(110): unsure at all Xaa locations
  Clone ID: MRT4577_38940C.1.pep
MLGPMDHSLSRREGLLSSARRDVRAWSGDPRCESMFGRPXRVGASRTQRAAVAAAACISSVSPPSKERNRPLPIPGEHPGRAVVGVTSRRTRSAIAGATCAVGRAWHRGR

SEQ ID NO: 302485 - protein, 73 aa, Zea mays
  Clone ID: MRT4577_38941C.1.pep
DYYSYYNLYPTFTSFPTNQIIHPLLSTQSFTLTLLAFFTPIYYYLNITITINTSNIYIIPHILPTINSTSLLI

SEQ ID NO: 302486 - protein, 73 aa, Zea mays
  Clone ID: MRT4577_38942C.1.pep
FFFFFFYGLKLNEHRKRHIVLNFKTIFSSLPYRHLYMVVFYTATSCQMITSPNKCRDFFFLYQVYNNIKTYIH

SEQ ID NO: 302487 - protein, 230 aa, Zea mays
  Clone ID: MRT4577_38943C.1.pep
MEFVLHYSSVYQELKAITVDNGTQFDAKTFKDFCDQIGTKIHFASVRHLESNGLVERANDVIMTGIMKLIFNQPRGKWPDELIKVVWSHNTTISRSTGFTPFKLLFGDEAITPEEAKAGSIRTAASAEDEADYHVAKDTIEENRLQAVENINLPGPLVLGKGPLNALTPTPDMDRTVSRRSEPSSRTALMGEQPNPWNHLQLQVAKSRHRGTKPSRRCGLLGKISLLSLE

SEQ ID NO: 302488 - protein, 61 aa, Zea mays
  unsure (1)..(61): unsure at all Xaa locations
  Clone ID: MRT4577_38944C.1.pep
EEGPLAVLGDRRLDEAPLWXLSDRPVSXSPSPCATRACESNQERPPCCARVRLYALRVTHP

SEQ ID NO: 302489 - protein, 101 aa, Zea mays
  Clone ID: MRT4577_38945C.1.pep
MGNACCVATRDKMVVPNTSAVENFQRNNVRYSPNWSFRWDNRGGRVAREETSVSLLSDRISRNDVSDVKSETALVSSQGSPLDNFQTQSWQKSPASDQSFS

SEQ ID NO: 302490 - protein, 58 aa, Zea mays
  Clone ID: MRT4577_38946C.1.pep
DKSVPRAGWAGGPSFPSLSYRKGQIPKHITERILLVEEFTTPFAKRIRVHKSTKSKKP

SEQ ID NO: 302491 - protein, 168 aa, Zea mays
  Clone ID: MRT4577_38947C.1.pep
KKGIDSGSIAKNLDPKIFAIFCKEKWREEKKFKKKILRPFFFFRRPPLFFFDHPPPGFFYLPGFFPCARRGRLQFFLPAVCSTSLPRAGKVWVSLLGFRPPSEAPKIPAPFKFCRPPGPLFFFCSAPLPLFARFLPWPARRGCPAPAGFSSLSLSSFQAAPFFFFVFG

SEQ ID NO: 302492 - protein, 85 aa, Zea mays
  Clone ID: MRT4577_38948C.1.pep
ISIPTNFIQKKVFLLPKILKIIFLFYKKKPIFLPLFFVFFSKIFVIPNLSLLSKPLNYFLFIGFTKLVVSSCLPYFVSKMIKVNG

SEQ ID NO: 302493 - protein, 49 aa, Zea mays
  unsure (1)..(49): unsure at all Xaa locations
  Clone ID: MRT4577_38949C.1.pep
EDIETQRMTHILVXRNRRRQMKEYLSVLRSLKKPSYAHRVCTCAHSNPS

SEQ ID NO: 302494 - protein, 33 aa, Zea mays
  Clone ID: MRT4577_3894C.1.pep
LRHMRSHDSCVLVTQNYRRSAYGLIMNKFKQHL

SEQ ID NO: 302495 - protein, 123 aa, Zea mays
  Clone ID: MRT4577_38950C.1.pep
PGGTPPRVLTRPATRPGGRPSQQETEGQRRESTERATRPAAQTHEPRRWTTNQQDEGRTVTPSGRGGGTRAQHARRRAAGGGGPYKTRQQQRTNHDGAADGQTPRRPTRRHEPAIHREGEREG

SEQ ID NO: 302496 - protein, 115 aa, Zea mays
  Clone ID: MRT4577_38951C.1.pep
MKLVRFLMKLNNETVTIELKNGTVVHGTITGVDISMNTHLKTVKLTLKGKNPVTLDHLSVRGNNIRYYILPDSLNLETLLVEETPRVKPKKPTTGKPLGRGRGRGRGRGRGRGPR

SEQ ID NO: 302497 - protein, 116 aa, Zea mays
  Clone ID: MRT4577_38952C.1.pep
MKLVRFLMKLNNETVTIELKNGTVVHGTITGVDISMNTHLKTVKLTLKGKNPVTLDHLSVRGNNIRYYILPDSLNLETLLVEETPRVKPKKPTTGKPLGRGRGRGRGRGRGRGPPR

SEQ ID NO: 302498 - protein, 55 aa, Zea mays
  Clone ID: MRT4577_38953C.1.pep
AEVLHRWWALGCLIRVPEYNRPLIASCTYIYFKRVREYMGERDISDIDGVSKGTT

SEQ ID NO: 302499 - protein, 78 aa, Zea mays
  Clone ID: MRT4577_38954C.1.pep
DKTCLSTWLMWPPGPEGISVKGCLQNYKPPEVKARDLSTVNFEVRSWILQPHRILKAMTWTRDPKPVGVKHPGCHRGC

SEQ ID NO: 302500 - protein, 116 aa, Zea mays; identical to SEQ ID NO: 302497
  Clone ID: MRT4577_38955C.1.pep

SEQ ID NO: 302501 - protein, 129 aa, Zea mays
  unsure (1)..(129): unsure at all Xaa locations
  Clone ID: MRT4577_38956C.1.pep
RAKTDVQLSDGCMIPXATELLIPIMAIHHDARFWGPDAAQFNPARFAGGTARAAKHPLAFIPFGLGSRMCIGQNLARLEAKLTMAILLQRFEMKASPNYIHAPTVLMLLYPQYGAPVIFRPRSAHPAAS

SEQ ID NO: 302502 - protein, 454 aa, Zea mays
  unsure (1)..(454): unsure at all Xaa locations
  Clone ID: MRT4577_38957C.1.pep
MAMMSRTRDLLMEGFEGLVRDGSFKWGLPRRGDTAMDDGGDDDGSLSVQRSSIAGLSFKANAVVARCSRILGVSTNDLQNNFDKQASDSIKQPKSYARNFLEYCCFLALAQISQVTGYLADKSFRRLSFDMMLAWEVPYSSSQLTVKAEVDSTVSSEAFTRIAPAIPTIADVVTCANLFDVLSCSSGGRLSFSVYEKYLSELDRAVKKMKTQSESSLLSNFRSQRGERILEVDGTLTTQPVLEHVGISTWPGRLILTDHALYFEALRVVTYDKPKVYELAEDLKQVVKPELTGPWGSRLFDKAVMYKSTTLTEPVIIEFPELAGHSRRDYWLAIISEVLYAHRFVRKFDISGIDKEETILKAVLGIMRLQAIEELHFEVPNRYESLLLFSQCDKLPXGGDVILETLASSIASRTSDRTNXPGTVENACCPVNLXMVSQLXSGERLFVXEFVVGK

SEQ ID NO: 302503 - protein, 87 aa, Zea mays
  unsure (1)..(87): unsure at all Xaa locations
  Clone ID: MRT4577_38958C.1.pep
LNPGGGKNFTQKAGGGRAAPARGGGNPPRGGPQWGPLTPGPFGNPPPKRGKRGSPGGGGPPLPGXGGHPKRKAVPAGPKGXAGAPPR

SEQ ID NO: 302504 - protein, 120 aa, Zea mays
  unsure (1)..(120): unsure at all Xaa locations
  Clone ID: MRT4577_38959C.1.pep
GNKRDQQQRGGESQKNKALRGYRTQFPQKQSSALLKNQQHLTTTQGEHQHKKPPQRGSGQPKRRGTWGRPWGPKKRGAWGARRGAPGAPGAGTPGTGGGAYWCAAQPWGPXGPASAKAAG

SEQ ID NO: 302505 - protein, 71 aa, Zea mays
  Clone ID: MRT4577_3895C.1.pep
INPLPPSNTYLIPSTLFTPTSCAELRSSGASTPPSTAAPHSITRSYSTLVSPQTLQTIASRTPLSHNLYIT

SEQ ID NO: 302506 - protein, 45 aa, Zea mays
  Clone ID: MRT4577_38960C.1.pep
NCRVDEFLVGGRPQILHETPGALDPGERRYIEDDILLIQLYVYAR

SEQ ID NO: 302507 - protein, 150 aa, Zea mays
  Clone ID: MRT4577_38961C.1.pep
IRFYVNASAHHCWPDTRPSRAAHSGYMTKRSRRRSTGHSRPGPGDHQWCPRSLLLTSGVRMHLLWPSNEHARCSYAKVPAPVSTKALRASTPSRLGAPTESAVPALALENKTLSHNEDGCLVCSSVTTLWGESSWGYSYSYELSTTIYTL

SEQ ID NO: 302508 - protein, 165 aa, Zea mays
  unsure (1)..(165): unsure at all Xaa locations
  Clone ID: MRT4577_38962C.1.pep
LFSPNPRRHAARLPPPFRFPCRAIVACATAATSTSTSSYADALQAFRAAPHRTARGRSLLHHVQRHRGIPLLLHRLSTAPTTMSRRSPCRYSNCSPLRSLSDPSVPTCLTSSRFSCRKTFLECAIYQVTKSTALQELNFEFTCLTVAEIHFSPVGVLLNLFXSVT

SEQ ID NO: 302509 - protein, 101 aa, Zea mays
  unsure (1)..(101): unsure at all Xaa locations
  Clone ID: MRT4577_38963C.1.pep
LGLSLFFFFVFSSCCFKLPNSRCHXSNPVKCPTWGGGSAPASRPKNLGIPRLPRSTRLPPSPGGTKKGEGPHMGKLKLLFAIYLGLSPGGNKLPIHLPFFL

SEQ ID NO: 302510 - protein, 207 aa, Zea mays
  unsure (1)..(207): unsure at all Xaa locations
  Clone ID: MRT4577_38964C.1.pep
MAPHPQEDKSDRHSSGAGASREQERRPSKAWGILIFGLIGVTTASFAITQVRKSMDWFYTQLNKVQSTSSWTWRYTSNNSSRGSFSEEAKKRYYQRMQQEYEEEQERVQRIRHMQSVFNRERNKFGRGYESWRENGPPRGYNYXSLGMIXSRATPYTDAEVKTAFRTKAMEVHPDQNQNDRDAAEEKFKEVVKSYEAIKSERKNGVS

SEQ ID NO: 302511 - protein, 244 aa, Zea mays
  Clone ID: MRT4577_38965C.1.pep
MAPHPQEDKSDRHSSGAGASREQERRPSKAWGILIFGLIGVTTASFAITQVRKSMDWFYTQLNKVQSTSSWTWRYTSNNSSRGSFSEEAKKRYYQRMQQEYEEEQERVQRIRHMQSVFNRERNKFGRGYESWRENGPPRGYNYIPRDDWYWQTDTSHSEHKNRRTYTPAGPRVYPMSHHYAVLGLDRSRATPYTDAEVKTAFRTKAMEVHPDQNQNDRDAAEEKFKEVVKSYEAIKSERKNGVS

SEQ ID NO: 302512 - protein, 339 aa, Zea mays
  unsure (1)..(339): unsure at all Xaa locations
  Clone ID: MRT4577_38966C.1.pep
KEAGPSSRAVLVTGGAGYIGSHAVLQLLTAGFRVVVVDSLANSSELVIRRLRSLAGEHAKNLAFHKVDIRDTDGLKKVFASTRFDAVIHFAGLKAVGESVQKPLLYYDHNVVGTINLLEVMAAHGCKKLVFSSSAAVYGSPNNPPCTEDFPLTPHNPYGRTKXYFNPVGAHPSGYLGEDPCGTPNNLMPFVQQIAVGRRPSLTIFGNNYATKDGTGVRDYIHVVDLAEGHLFALKKLFESSSNIGCEAYNLGTGKGTSVLEIVNAFEKASGKKIPLVMGQRRPGDAEVLFSSPAKAERELHWKAKYGITEMCRDLWNWASKSPYGYAASESPKLNGSSR

SEQ ID NO: 302513 - protein, 79 aa, Zea mays
  Clone ID: MRT4577_38967C.1.pep
YTPAGPRVYPMSHHYAVLGLDRSRATPYTDAEVKTAFRTKAMEVHPDQNQNDRDAAEEKFKEVVKSYEAIKSERNNGVS

SEQ ID NO: 302514 - protein, 367 aa, Zea mays
  unsure (1)..(367): unsure at all Xaa locations
  Clone ID: MRT4577_38968C.1.pep
MSVAKEAGPSSRAVLVTGGAGYIGSHAVLQLLTAGFRVVVVDSLANSSELVIRRLRSLAVEHAKNLAFHKVDIRDKDGLEKVFASTRFDAVIHFAGLKAVGESVQKPLLYYDHNVVGTINLLEVMAAHGCKKLVFSSSAAVYGSPKNSPCTEDFPLTPHNPYGRTKLMAEEICRDIYHSDPEWNIILLRYFNPVGXAHPSGXYLGEDPCGTPNNLMPFVQQIAVGRRPSLTIFGNNYATKDGTGVRDYIHVVDLAEGHLFALKKLFESSSNIGCEAYNLGTGKGTSVLEIVNAFEKASGKKIPLVMGQRRPGDAEILFSSPAKAERELHWKAKYGITEMCGDLWNWASKSPYGYAASESPKLNGSSR

SEQ ID NO: 302515 - protein, 321 aa, Zea mays
  Clone ID: MRT4577_38969C.1.pep
HEVTGATVVFFAYVGFDAVANSAEEAKRPQRDLPIGILGSLIACVLLYVAVCLVITGMVPYTLLGEDAPLAEAFAAKGLKFITVLISIGAVAGLTTTLLVGLYVQSRLYFGLGRDGLLPSVFAEVHPTRHTPVQSQIWVGCVAAVMAGLFNVRVLSHILSVGTLTGYSVVSACVITLRWNDKGTSRRSLGSMSIWQEGVLSLVIVALCGFIVGLCYRFNYAIAFMVVAFLIAVAASFALQFRQVYVDPPGFSCPGVPLVPIISVFFNMVLFAQLHEEAWYRFVILSLIAVGVYAGYGQYNAVPSSSEHSTIGYHGIPSEAA

SEQ ID NO: 302516 - protein, 147 aa, Zea mays
  Clone ID: MRT4577_3896C.1.pep
MLHAAAGSGEAEHAVQQHSERISEDNPVGRLKVFIYDLPRKYNKKMVTKDSRCLSHMFAAEIFMHRFLLSSAVRTLNPKEADWFYTPVYTTCDLTNAGLPLPFKSPRVMRSAIQYISNKWPFWNRTDGADHFFVVPHDFAACFHYQE

SEQ ID NO: 302517 - protein, 127 aa, Zea mays
  unsure (1)..(127): unsure at all Xaa locations
  Clone ID: MRT4577_38970C.1.pep
NKFGRGYKSXRENGPLRGYNYIPRDDWYWQTDTSHSEHKNRRTYTPAGPRVYPMSHHYAVLGLDRSRATPYTDVXCLTSXLQTAFRAKAMEVHPDQNQNDRDAAEEKFKEVVKSYEAIKSERKNGVS

SEQ ID NO: 302518 - protein, 116 aa, Zea mays
  Clone ID: MRT4577_38971C.1.pep
SDQLQDHIVPTHASNAEAVTISHVMLAEMICGESTLLVNRTSTSVRGRLVLVEVLANQPYAAPVVCFASAAFSGASAGNAGSTHCSCGSCTNPPMSVYCGAYEHYNGDGFTVRAEG

SEQ ID NO: 302519 - protein, 641 aa, Zea mays
  unsure (1)..(641): unsure at all Xaa locations
  Clone ID: MRT4577_38972C.1.pep
GRDASPHDARADVADPWVGADANDATAQVATPPAPHPLGRHGGSSXHRLSSTAGRPFLSGFCAAALRRKPLGARASAAAAATGEGLVRQLGVLDLVLLGIGASIGAGIFVVTGTVARDAGPGVTISFVLAGAACVLNALCYAELASRFPAVVGGAYLYTYAAFNEITAFLVFTQLMLDYHIGAASIARSLASYFIEFLELIPLLKGQIPSWVGHGEEFFGGVVSINILAPVLLIILTAILCYGVKESSAVNTFMTTLKIIIVIVIVFAGVFEVDVSNWSPFMPNGFKSVVTGATVVFFAYVGFDAVANSAEEAKRPQRDLPIGILGSLIACVLLYVAVCLVITGMVPYTLLGEDAPLAEAFAAKGLKFITVLISIGAVAGLTTTLLVGLYVQSRLYFGLGRDGLLPSVFAEVHPTRHTPVQSQIWVGCVAAVMAGLFNVRMLSHILSVGTLXETSVNISITLSNSHHRTIACNCYFFPLFLSGXTGYSVVSACVITLRWNDKGTSRRSLGSMSIWQEGVLSLVIVALCGFIVGLCYRFNYAIAFMVVAFLIAVAASFALQFRQVYVDPPGFSCPGVPLVPIISVFFNMVLFAQLHEEAWYRFVILSLIAVGVYAGYGQYNAVPSSSEHSTIGYHGIPSEAA

SEQ ID NO: 302520 - protein, 98 aa, Zea mays
  unsure (1)..(98): unsure at all Xaa locations
  Clone ID: MRT4577_38973C.1.pep
MAMQQHAASASSSSLGLHLLASPSSIREATHTKVFVGGLAWETSSDRLRRFYERFGDILEAVVITDRHSGRSKGYGFVXTFREAESASKACEDPTPVI

SEQ ID NO: 302521 - protein, 132 aa, Zea mays
  unsure (1)..(132): unsure at all Xaa locations
  Clone ID: MRT4577_38974C.1.pep
LYPYVEYLGQPQCSPLAVAPYYAGCEQTSAMYQPIGHQCCQQQIRMMHVQSVAQQLQMMMQLERSGAAISSLYEPALMQQQQQLLAAQGLNPMAMMMAQNISAMGGLYQYQYQLPSCRSNPCGVSXPFAPYY

SEQ ID NO: 302522 - protein, 102 aa, Zea mays
  Clone ID: MRT4577_38975C.1.pep
PAWKRTRGGDELQQPTPTLVARRWSTVGGWLRHRQWSDAKRVGLGGATHGARRSGMVVDWSSPVRAASRDASLLGQGRAAHLGAVVVTADGSRHRAIARGGG

SEQ ID NO: 302523 - protein, 96 aa, Zea mays
  unsure (1)..(96): unsure at all Xaa locations
  Clone ID: MRT4577_38976C.1.pep
ICVCYHGSXRTKREFVCVPALIKRVREGINELGLDDQVAVSACSHPGXHKHAGDVIIDSSDAKGEVTGHWYSHVVTDDKPALLHIHIGQGEGVDHL

SEQ ID NO: 302524 - protein, 111 aa, Zea mays
  unsure (1)..(111): unsure at all Xaa locations
  Clone ID: MRT4577_38977C.1.pep
VLWYGLSGGSWRCLXRXSWLWYVGIGVVSSVLGHVCGRSPGSPLGALRWSPRRWGSGLLFMRHGSHAXRVRAARSEWLGLTSSARARSRYMDHRCCKSERSDAVRECLVPN

SEQ ID NO: 302525 - protein, 70 aa, Zea mays
  unsure (1)..(70): unsure at all Xaa locations
  Clone ID: MRT4577_38978C.1.pep
WWSPTALWNTVQVTCXQDDIIVHVKKLVAAQTGTRTEKIRIHMWYNIYKDHITLKDYXVHYGMGHELYYN

SEQ ID NO: 302526 - protein, 91 aa, Zea mays
  Clone ID: MRT4577_38979C.1.pep
AKPITFLLAFHPTVHTCLLAYNHKPYTWITNRHCTHTLLGITIITGYQHFSSSRRRLWTRTIPCNVRPTCWEQWNPCLSCCITCSPQVCSQ

SEQ ID NO: 302527 - protein, 427 aa, Zea mays
  Clone ID: MRT4577_3897C.1.pep
MGSRKGWFPVALLLLAASALWPPVAAAAAGGGEAEHAVQQHSERISGSAGDVLEDNPVGRLKVFIYDLPRKYNKKMVTKDSRCLSHMFAAEIFMHRFLLSSAVRTLNPKEADWFYTPVYTTCDLTNAGLPLPFKSPRVMRSAIQYISNKWPFWNRTDGADHFFVVPHDFAACFHYQEEKAIERGILPLLRRATLVQTFGQENHVCLKEGSIIIPPYAPPQKMQAHLISPDTPRSIFVYFRGLFYDTGNDPEGGYYARGARASLWENFKSNPLFDISTDHPATYYEDMQRAVFCLCPLGWAPWSPRLVEAVVFGCIPVIIADDIVLPFADAIPWEEIGVFVEEKDVPKLDTILTSMPIDDILRKQRLLANPSMKQAMLFPQPAQPRDAFHQILNGLARKLPHPEGTFLQPGDQRLNWTAGPVGDLKPW

SEQ ID NO: 302528 - protein, 187 aa, Zea mays
  Clone ID: MRT4577_38980C.1.pep
PHHTHPHPVTAANSGRRVATSGRVPARHRSQPPPSRRAVLHPCRSCRLVACEAWPPPALLVEELAFEAYLLAPRCSPRSEALAQQPTSRPPLPPLVRDGDADMQSLLTRDLGPHGPARLYRHQRRLYTSGTPPRHQHRLGARLCLVTSVWQCSRPYASSRAPCINVAALATVDEPKSSPSPAALLHG

SEQ ID NO: 302529 - protein, 128 aa, Zea mays
  unsure (1)..(128): unsure at all Xaa locations
  Clone ID: MRT4577_38981C.1.pep
SRCTPGCRILSKRGMGGSRDQHVRMSLALPVLHTPVHCADKTAREXLYIISLKGITGRLNRLPDACVSDMPMDTDKNEEPHLLNKEMAADSHLQRNPRRLNDDDYMYFXYNDGEFVNPKGEMKCSAIT

SEQ ID NO: 302530 - protein, 72 aa, Zea mays
  Clone ID: MRT4577_38982C.1.pep
CLIYLYCEKGPTNIRFRCCWISGEETCSSPKALRSIIFCSFVVTFFLLPCRVSHQGCGHNTKLMRMQLWRTL

SEQ ID NO: 302531 - protein, 259 aa, Zea mays
  Clone ID: MRT4577_38983C.1.pep
DSHVPEVGNHQPSVPRMKQLARTITNSSSSSGNLGLNHTVFGRVKQISLSSYLRHSLHTGGGSDAPSPAPMHHHGHHGDHHHHHSHDDNRHLAPAPAPVHFAMPQPRYGAPPPSGCPYSKNKPNKRGPVTITPAAEPAANDHRSTSIALPPHPSSTSSASRSRHGPSMQGGAPVSHPPALPEPPLPTVSFAHPHLPSEHGTGISPAPSEEAATLADPAGMSQVAPAPHASYAARMQGDAPCRWILFLLALCTITSLLVR

SEQ ID NO: 302532 - protein, 45 aa, Zea mays
  Clone ID: MRT4577_38984C.1.pep
PRVRPRVRPRVRPRVRRRVRPRVRIFSLMFQVKGPYFIAFCSSLF

SEQ ID NO: 302533 - protein, 46 aa, Zea mays
  Clone ID: MRT4577_38985C.1.pep
NLKLKIADQSLQLPLHLPACRLSSPDTHPEHLSETTCYFKTYTGAP

SEQ ID NO: 302534 - protein, 143 aa, Zea mays
  Clone ID: MRT4577_38986C.1.pep
VYGKCSGYPARPPRLMRGYWAGTLPVHSPLRLGSRLEGGLFGTSSLVEKRMKCKCIKLGISWVFPVFYAVKQLSVNCHSTVNRLNLALFGPARCTLSLMDIVHEYAHSLSRAGSVQRIPTAQLVVKCPEIISVLYVAPVIGGS

SEQ ID NO: 302535 - protein, 62 aa, Zea mays
  Clone ID: MRT4577_38987C.1.pep
FHVVDILNHRKLLRASDHLYDLLDLRAESGLLRTRLEGQEKEIGQLRKQIKNLEEKEKVANE

SEQ ID NO: 302536 - protein, 62 aa, Zea mays
  Clone ID: MRT4577_38988C.1.pep
LLASPPGHLVCIKQKQFCCRSPPPPDKETVYFSVCEFWAYKKEVWPHKSRFSPVRGYQNSKA

SEQ ID NO: 302537 - protein, 136 aa, Zea mays
  unsure (1)..(136): unsure at all Xaa locations
  Clone ID: MRT4577_38989C.1.pep
QSEARTNKGEKVHPPTGNERREQTDERQERLTRPKTAPRQKGNLEREEPGKHAKGHRAGRKARGAKQPPPPKKTERRXXRNQASNRRHXAPPAPTHVRAFAPQGXXPSAQPARPTRRGGPPQSTXPNGQKNEARKR

SEQ ID NO: 302538 - protein, 174 aa, Zea mays
  unsure (1)..(174): unsure at all Xaa locations
  Clone ID: MRT4577_3898C.1.pep
MLQELYDRAVTDTIFKKGSNADMVAVITLFLSPKEVGXWQNQLLKPXRSQHAVKGGILTVSTLVVSQXINVLHQLPXVRIYRRRCXIQQLQQRWLADQCNKFQEQDSMSLNQLAALNSAIXMQQQQLXPLMQVIDCYPXQFVALNHLTRLNSPAYLQQRQLLXFRAIAGVSPAT

SEQ ID NO: 302539 - protein, 130 aa, Zea mays
  Clone ID: MRT4577_38990C.1.pep
NPPNPKTKTGVYLNLKFGPPETNYWKRGKTPIFFKKPYPHRFFLTELGRGGDFMPFLTGRRVQTFSTQRALDFIRALIFLKAGPGSSERGGHFPGDPSKGSLFFWGIFFSYRAGLAYLRRRSARKKSRAQ

SEQ ID NO: 302540 - protein, 85 aa, Zea mays
  Clone ID: MRT4577_38991C.1.pep
PLSAARASLLSSCPSFPQPTQPGGKLVYQYTKKRASGPKCPVTGKKIQGIPHLRPAEYKRSRLSRNHRTVNRPYGGVLSGIAVRE

SEQ ID NO: 302541 - protein, 531 aa, Zea mays
  unsure (1)..(531): unsure at all Xaa locations
  Clone ID: MRT4577_38992C.1.pep
MPEPSTTEGQRIQGKLKGLLENAAVQQAESSASRRRGDPSEHRATPSRRVREASVHTERTRDRTPAAPDRLGDEQHRRDRRARLGEGVRRGYHSRRGGLYDNYQLACQLGGTDDDNLIIRNLPLFLSDAARAWMEHLPPAQISDWDDLXQAASGRTEGRRPRGXSVQRGSKKKAKKRAQAKRDAVDVDLVAATEHRNPRKPPGGANAFDKMLKESCPYHKGPVKHTLEECDMLQRYFNKAGPSAEGGKDQGNNKKGGDKDEEFPEVHNCFMIYGGQVANASARHRKQERREVCSVKVAAPVYLDWSDKPITFDQGDHPDCVPSPGRYPLVIDPVIGNARLTKVLMDGGSSLNIIYAETLGLLGVDLSVIRASAAPFHGIVPGKRVLPLGQLDLPVCFGTPSNFRRKTLTFEVVGFRGTYHAVLGRPCYAKFMVVPNYTYLKLKMSGPNGTITVGSSYRHAYECDVECVEYAEALAESEALIADLECLSKEAPDAKRRAGNFEPAEAVKSVPLYPSNDAGKKVRIGSELDPK

SEQ ID NO: 302542 - protein, 98 aa, Zea mays
  Clone ID: MRT4577_38993C.1.pep
NFPRFSPKAGAAKPTARERGSATDSTKRVGLASSCGAGEQRATLRSISPLNGQQEVPPVGGQTGHTTPIGTSNCLLQCLLTDRWKDSLRGLLLHYLLC

SEQ ID NO: 302543 - protein, 308 aa, Zea mays
  Clone ID: MRT4577_38994C.1.pep
VASIRVPKTQRARRELLKHAPKLVETSKKTLILHGTKTSAVLNSVLSDIYHLKRDNAVKYTKKNDNIRPFESGGESSLEFFSLKADCSLIVYGSHSKKRPNNLILARTYDHHIYDLVEVGVENYKSMESYVYDKKLAPLLGSKPFFAFIGEHFESSEELKHLKEVLLDLFRGEVVENLNLAGVDRIYVCTAISPTTVYMMHCALRLKRSGTSIPRMELVEVGPSMDLVVRRHRLPAESLKKEAMKTAEHAKKMKNVTKDPVQGKLGKVYMPDQQVGKLTLSNDVKGLKRERREAKKNQDSKKQKVNPE

SEQ ID NO: 302544 - protein, 149 aa, Zea mays
  unsure (1)..(149): unsure at all Xaa locations
  Clone ID: MRT4577_38995C.1.pep
MVQRLTYRKRHSYATKSNQTRVVKTPGXPSGGKLVYQYTKKRASGPKCPVTGKKIQGIPHLRPAEYKRSRLSRNRRTVNRPYGGVLSGIAVREXSKXAGILCCESPGSVILXLMSYYSXRIIRAFLVEEQKIVKKVLKIQKTKDKTAAK

SEQ ID NO: 302545 - protein, 284 aa, Zea mays
  unsure (1)..(284): unsure at all Xaa locations
  Clone ID: MRT4577_38996C.1.pep
MVASIRVPKTQRARRELLKHAPKLVETSKKTLILHGTKTSAVLNSVLSDIYHLKRDNAVKYTKKNDNIRPFESGGESSLEFFSLKADCSLIVYGSHSKKRPNNLILGRTYDHHIYDLVEVGVENYKSMESYVYDKKLAPLLGSKPFFAFIGEHFESAEELKHLKEVLLDLFRGEVVENLNLAGVDRIYVCTTAISPTTVYMMHCALRLKRSGTSIPRMELVEVGPSMDLVVRRHRLPAESLKKEAMXDQQVGKLTLSNDIKGLKRERREAKKNQDSKKQKVNPE

SEQ ID NO: 302546 - protein, 309 aa, Zea mays
  Clone ID: MRT4577_38997C.1.pep
MVASIRVPKTQRARRELLKHAPKLVETSKKTLILHGTKTSAVLNSVLSDIYHLKRDNAVKYTKKNDNIRPFESGGESSLEFFSLKADCSLIVYGSHSKKRPNNLILARTYDHHIYDLVEVGVENYKSMESYVYDKKLAPLLGSKPFFAFIGEHFESSEELKHLKEVLLDLFRGEVVENLNLAGVDRIYVCTAISPTTVYMMHCALRLKRSGTSIPRMELVEVGPSMDLVVRRHRLPAESLKKEAMKTAEHAKKMKNVTKDPVQGKLGKVYMPDQQVGKLTLSNDVKGLKRERREAKKNQDSKKQKVNPE

SEQ ID NO: 302547 - protein, 93 aa, Zea mays
  Clone ID: MRT4577_38998C.1.pep
RHLLVQLPLHVVVVGVQYPDLPGEQGGARRGGEGRGDRLTEKKTVSSSACCRRQDGSLTVVHVEPGGRASRQSGCALSSGVKRGLWQRGSRSN

SEQ ID NO: 302548 - protein, 289 aa, Zea mays
  unsure (1)..(289): unsure at all Xaa locations
  Clone ID: MRT4577_38999C.1.pep
MVASIRVPKTQRARRELLKHAPKLVETSKKTLILHGTKTSAVLNSVLSDIYHLKRDNAVKYTKKNDNIRPFESGGESSLEFFSLKADCSLIVYGSHSKKRPNNLILGRTYDHHIYDLVEVGVENYKSMESYVYDKKLAPLLGSKPFFAFIGEHFESAEELKHLKEVLLDLFRGEVVENLNLAGVDRIYVCTAISPTTVYMMHCALRLKRSGTSIPRMELVEVGPSMDLVVRRHRLPADQXRVQGKLGKVYMPDQQVGKLTLSNDIKGLKRERREAKKNQDSKKQKVNPE

SEQ ID NO: 302549 - protein, 38 aa, Zea mays
  Clone ID: MRT4577_3899C.1.pep
RKCYARLPPRATNCRKKKCGHSNELRSKKRFMSKIGGK

SEQ ID NO: 302550 - protein, 84 aa, Zea mays
  unsure (1)..(84): unsure at all Xaa locations
  Clone ID: MRT4577_389C.1.pep
RVIGWIYPAVIALLEVSCCNIFPKSNRLPLRAWQASKNGLPPTDEDIVRTWYAQVLHFRDEIGRTRGSXGEXDGTAPLLXXKRS

SEQ ID NO: 302551 - protein, 120 aa, Zea mays
  Clone ID: MRT4577_38C.1.pep
GKREGRRERETGKALFLLLLLWNSVICPCSARTGCHVIRERKEDEHDTDGEGPEEPDVGGRAGYQKQKRLRQNTHKEQTSTAGLRLQRPKTGSKQGRTTKTDWPYRELYYRLHPTSGGTV

SEQ ID NO: 302552 - protein, 104 aa, Zea mays
  Clone ID: MRT4577_39000C.1.pep
MKGYDRLKPPQSIKSSLLIVFTLRIGSSSSLASLYLKLLQYQTKKDNSRTSMIYHLLQYISVLQCTLFFKNSGFLLGLWSILECILPLRKKNFLITFQAFLVPN

SEQ ID NO: 302553 - protein, 65 aa, Zea mays
  Clone ID: MRT4577_39001C.1.pep
FFFFFFFFFFFCEEMDILITREGNNIVCLAITLLVRNIVQTNEPILKFYMLEPQFSPRTLRCYHC

SEQ ID NO: 302554 - protein, 102 aa, Zea mays
  Clone ID: MRT4577_39002C.1.pep
VCCHSWHKAWWHGFSICCHSWHEHSLRYTWGFTRRALGINQALVMLPTADTSDDLVERDGGRPSQVAAPLLAPSHREQSLQRGSMRERWCDPFSSTGYKARG

SEQ ID NO: 302555 - protein, 65 aa, Zea mays
  Clone ID: MRT4577_39003C.1.pep
FYILQNITTFFITHSPQKLFFMATTQPNSTKRTLSLGDYLVFSGCLGLVILTFESAACMLLCFKL

SEQ ID NO: 302556 - protein, 107 aa, Zea mays
  unsure (1)..(107): unsure at all Xaa locations
  Clone ID: MRT4577_39004C.1.pep
MTGLTSNAMRASNTDAXLLCMAHSEXKMSKGXNAIAYAPGGSINVTXLITYGPGRTHSALAVQLAXSXECGSTSNVTNLIXRXDCSVRPLNSTCPCWDDLTIHVHAH

SEQ ID NO: 302557 - protein, 93 aa, Zea mays
  Clone ID: MRT4577_39005C.1.pep
SPTPPPARASTAPPATTSKVAPPLRTPMRRGRGGVRRRPPRRGGRRTRGLPPPPPPRRLCSRTRPARRPSLSTPRRRARGRPTAAMAALMMPR

SEQ ID NO: 302558 - protein, 63 aa, Zea mays
  unsure (1)..(63): unsure at all Xaa locations
  Clone ID: MRT4577_39006C.1.pep
MASGVAVSDGVIKVFNDVKVRKASTPXELNNRKKAVLFXLIDDYKIIILEIGEEILSGYVVHT

SEQ ID NO: 302559 - protein, 67 aa, Zea mays
  Clone ID: MRT4577_39007C.1.pep
EYTKFCRWQGELGLWMNKFMRMISDRQSSFQVVCAWHSNISLTLKWSIYPLKAMPLKRSFMLEPPQC

SEQ ID NO: 302560 - protein, 127 aa, Zea mays
  Clone ID: MRT4577_39008C.1.pep
GHGGISRELQHLLLEYGVESISEVLVEVLSIVKRCTDEGRALMSLDLQVLINGLQHIVASNVRPKLQTVDTFIKAYYLPETEYVHWARSHPEFSTSQVVGLVNLVATMKGWRRKTRLETVEKIEAGP

SEQ ID NO: 302561 - protein, 461 aa, Zea mays
  Clone ID: MRT4577_39009C.1.pep
MAAPSHLHLHLPGCPQTLALPLPSPGGFSAWPGLRSCSRSRQPRIRPVAALGPADAGDLLGRVEAFLYTVADAAVNAEPVAAAADTGTKEAAAGDWLSGITNSMETVLKVLKDGLSALHVPYSYGFAIILLTVLVKAATFPLTKKQVESALAMRSLQPQVKTIQQRYAGDQERIQLETARLYKLSGVDPLAGCLPTLVTIPVWIGLYRALSNVANEGLLTEGFFWIPSLAGPTTIAARQNGQGISWLFPFTDGHPPLGWSDTLAYIVLPVLLVISQYISTQVMQPPQSNDPNQQGAQAVTKFLPLLIGYFALSVPSGLSLYWLTNNILSTAQQVWLQKLGGAKNPVKEYIDKLSREETTTVQKNDSTLQSEPLSKHSKPQPSQEPKPSGPQRGERFRKLKEEESMRKEVMGQGKQSEQSSSESRVADGTQNSDVSSGDQKDQQGSHENGPVVASIKWWSQP

SEQ ID NO: 302562 - protein, 68 aa, Zea mays
  Clone ID: MRT4577_3900C.1.pep
HGNPRPPKGGLLGTSKNSQLDATEPLSLYPNPYTWDMEKIFTKLNFCKKKIWPSLRGKNRLFYLIQAK

SEQ ID NO: 302563 - protein, 50 aa, Zea mays
  Clone ID: MRT4577_39010C.1.pep
QVMQPPQSNDPSQQGAQAVTKFLPLLIGYFALSVPSGLGLYWRPVYHYIK

SEQ ID NO: 302564 - protein, 88 aa, Zea mays
  Clone ID: MRT4577_39011C.1.pep
RSPCGVHARNGETRQGGRSQRARAGAGCGCRSRCACGRYGAGYGRRSQCGRRGAGCGRRSQCGRRGAGCGRRSRCGCRGEGYGRRSRC

SEQ ID NO: 302565 - protein, 119 aa, Zea mays
  Clone ID: MRT4577_39012C.1.pep
PGRPSVRLGVLRWLLQRGRSPCCESPWQLRRPGFCSPWRTLCSPSQAATLSSSPTCVCVLGSRVFLRSPSCDIVYFVRCALSVRRNVNQRPPSFSALLSAPARPVGPLAIVIQATTKLH

SEQ ID NO: 302566 - protein, 113 aa, Zea mays
  Clone ID: MRT4577_39013C.1.pep
KKIYISQRPQKKTGELTTLFYRRGGGIQITFLQKNPHNIFAQKKHFGQPKNQKKLPRGPPLPKGSQNLNQGASGANQPGLGMDKSRPSTRVPTMGGNPSPRNLSRGSRPPLMV

SEQ ID NO: 302567 - protein, 155 aa, Zea mays
  unsure (1)..(155): unsure at all Xaa locations
  Clone ID: MRT4577_39014C.1.pep
MSVPVTTAEDIRNNSHSAAVRRSTADRPPFTVRYIKMVIPSHCFQSSRLTSFSYLLHDLVVPAALLYLGVAAIPEVPSGALRRFSVCSLYWRAQVSVLTRVWGIRYEXGHHDFSDYPLLNDVACFLLHSALLXPFFAWKXSHRRHCGNSAYMQNY

SEQ ID NO: 302568 - protein, 131 aa, Zea mays
  Clone ID: MRT4577_39015C.1.pep
KKKKSSVVAASLQPVLTAGEKKHEDDLGRTSPVVAAVLVALAVVAAAVGPAPKRRGQEIHLFEATVRFPDDGVDELDYNYRLLAKVLGSVEAARRATYDSELGVFSALITNNQARRLSKVPGVLKVTRLED

SEQ ID NO: 302569 - protein, 321 aa, Zea mays
  Clone ID: MRT4577_39016C.1.pep
ATMTKAVQKLIDEEFEGIVHLRTSSFQKRVSTARHDLIKLSGAENKLEALLQVLEPSLAKGNKVMVFCNTLNSSRAVDHFLTENHISTVNYHGEVPAEERVENLNKFRNEEGDCPTLVCTDLAARGLDLDVDHVIMFDFPSNSIDYLHRTGRTARMGAKGKVTSIVAKKDVALATRIEEAMKKNESLEALTTNNVRRPTSSQSVNTKGRPSRLVKTSNALKVVSQKGRRGVSLSSRSSRAPKDTTSTRRRSPPKSQAKATKSSAPRKAKPVKPTQSSAKVSKSKAKPEGRRSKSDTLNKLGTKLSVVGFRGRSSGKSAQSS

SEQ ID NO: 302570 - protein, 252 aa, Zea mays
  unsure (1)..(252): unsure at all Xaa locations
  Clone ID: MRT4577_39017C.1.pep
MATAREHNDVERGASFEKSVNGTSAVDHAGARPKQRTPYDYGGNPLAHVATNDPDLRLAAFGGEFQPGLYRPPNRKFANPAPLGLSAFALTTFVLSLINVKTRSIGHPNIVVALAYGYGGLVQLLAGMWEMAVGNTFGATALSSYGGFWIAFGIVLTPGVFEIEEILVKSGDFYNSFGLFLMGWFIFTFLLFLCTLRSTVAFCFLFFTLDMAFMLLGIGYLXPTPTALKSRALLLGGAFGLMAAFTAWYMRL

SEQ ID NO: 302571 - protein, 145 aa, Zea mays
  unsure (1)..(145): unsure at all Xaa locations
  Clone ID: MRT4577_39018C.1.pep
MGWSAGLWWLVAALWVVAAAAAAAEGEVVVGSAPRRHAYASMMYMGTPRDYEFYVATRVMMQSLRRLSADADRVVIASLDVPPLWVQALKDDGVKVVSVENLKNPYERQENXSTCQSKLTLNKLYACRAISRWAWQIHDSDNIFR

SEQ ID NO: 302572 - protein, 231 aa, Zea mays
  Clone ID: MRT4577_39019C.1.pep
MSIMECLTLQKKSAAAAGLAMSSDVEGGRIDYVFKIVVIGDDAVGKSQLLSGFARNEFSLDSKGTIGVEFATRSIRFEDKVVKAQIWDTAGQERYLAITSAYYRGAAGALLVYDVTRHATFETVGRWLKELRDHTDSNIVIMLVGNKADLRHLRAVSTEDAKAFAEKESIFFMETSAQDTNVKTSFETLLTDIYRILSKKSLVADTYVDSLTVARLLGGTKISVGPGGCCS

SEQ ID NO: 302573 - protein, 85 aa, Zea mays
  Clone ID: MRT4577_3901C.1.pep
GSSSPYSALEPPPQPLRLRLLALHLPEMQERRSLLMEETVPDPEAKAGCLFSDSYYGLVEPGMSVFTEGSNGDGRFLRRHWLAGK

SEQ ID NO: 302574 - protein, 86 aa, Zea mays
  unsure (1)..(86): unsure at all Xaa locations
  Clone ID: MRT4577_39020C.1.pep
RVAQRVDNDMLIKDATVTTHGDRYNTDGMHMDHXPNITINHTFIDVDNDCICICADSSNVNNTGMTXNPGHRICIDNLCQYTDKID

SEQ ID NO: 302575 - protein, 529 aa, Zea mays
  unsure (1)..(529): unsure at all Xaa locations
  Clone ID: MRT4577_39021C.1.pep
MGDVAHHHVHDPASFSPLSSDAGLSPHFPPALADGGAGALDLSFTSTASASTSSFTTATTFSARSSLSLPSFSSSTSLSPRPHSSSASPHWAHLAAARAATPDGVLRLAHLHLVRELGHGHLARVFLCRLKSSPPASPLFALKVVDLRDDDPSRVSHVLAESRVLSCLDHPFVPTLYARLDAGRYACFLMDYCSGGDLHAVLRRRPGGRLPVAAARFYAAEVLLAIEYLHALGFVYRDLKPENVLLRGDGHVVLSDFDLALPASVEPAVRLRQVRKQSXAGGSPSSCRXSGPSNGGGEDEEEIDGKERFEFVAEPTAASSKDCVGTHEYLAPELVSGSGHGNGVDWWAFGVFLYELVYGRTPFKGHTKEATLKNILSKQATYPQLDGEADASQLRDLVGRLLERDPRRRMGATRGAAEIKRHPFFSGVDWALIRCVAPPVVPDRDAAAPVGGGDRKAAKLGSWSSMSSNRGSKKRKSSSFGRRSTVRHIHLRGKAGGLPHAHELEPGEPVQQQDQDDDEQRKMNETKCS

SEQ ID NO: 302576 - protein, 104 aa, Zea mays
  Clone ID: MRT4577_39023C.1.pep
SNPRSYSAHLKSARGHQTTLTFPTPCFGTTRQKPLLRSTRTHSTTSTTKKKPIKNKRVAFSKELNPCISVPYSTVSSQRYSYLTYRYVPHNPPIAKISLPFNPT

SEQ ID NO: 302577 - protein, 96 aa, Zea mays
  Clone ID: MRT4577_39024C.1.pep
SVFWRTTNIPGHTASTAGVEYKTTPIAARWSRGATHKCSFITTPKGTVHVSTLQNTTETCKYNTRPTPACSCNYDESRCCIIYTPDDGRSHHSGRK

SEQ ID NO: 302578 - protein, 126 aa, Zea mays
  unsure (1)..(126): unsure at all Xaa locations
  Clone ID: MRT4577_39025C.1.pep
IKDAIETVGLMIENPARANGHIFNVGNPNNXVSVRELAPIMTKVYANVSGKAPLDEPIIYVSSSQFFGEGFHYSPKRIPPMAIIHKQVGWDPKTPLKDLLETTLAYQPQTYKKTVKRPMLQGLGLT

SEQ ID NO: 302579 - protein, 108 aa, Zea mays
  Clone ID: MRT4577_39026C.1.pep
PGTRLATSYQLLPRTEHGRNARAFVRATCCDVDHRDSSEAPGPPLNGTGGVGGARAAAPGVVDATFDTNTVILLAALFLALVLAIALNSLARFALWCGGRAPRVRPRV

SEQ ID NO: 302580 - protein, 70 aa, Zea mays
  Clone ID: MRT4577_39027C.1.pep
MELYALSYEHSVLFILFDSLKQEPKELNLSGTEQRTVGLAQDRPTSDSDLRYSIRHYYLYVFSSDTRCLS

SEQ ID NO: 302581 - protein, 79 aa, Zea mays
  Clone ID: MRT4577_39028C.1.pep
KCRHDVERICGVLTTMSLKSLASLRERDDLMSTTVSTAAARTSTARQGRARKEGCGVTRRKVRRGGCSSRMRSFTTRSS

SEQ ID NO: 302582 - protein, 53 aa, Zea mays
  Clone ID: MRT4577_39029C.1.pep
NSPRQVNFRFVSNHDFHKDKLKAWWFPPNKGEWKPPSKEKLGVKLKKKKLLRA

SEQ ID NO: 302583 - protein, 144 aa, Zea mays
  Clone ID: MRT4577_3902C.1.pep
STEEPRCTRAAPPLPASNHQQDEYRNVRDRFANKVEEPSSNTSDFPAMLLWRQEVEMRPTDLRADRTNEQRKARLLLNCRRPYSLLCCNFRARHPGALVSLTSQLDCPACWALRWPSLASLNIFLIKKKPSSRSRAAARDLELV

SEQ ID NO: 302584 - protein, 254 aa, Zea mays
  unsure (1)..(254): unsure at all Xaa locations
  Clone ID: MRT4577_39030C.1.pep
HWVPRGRPGRVVFLPAILPLPTPSXPPAIPPPPAPSSFPASNMPDARQPSPSGIPPASPRTRQPLCPPRSRIRSIYGRPPHAMPSHPRIPPPPPPPRPHAASXIPRPCAPRSXFAPSXRPPRAVHPXYVPLPRTPCPRIPPXMPVSSLPPAPAPSTRLLPPPKRRAHLSSQPPRASSSPQGPPHPSPLPTRLRDSRCCPPXTPLAMTPSIPGSSRPTARRSTPRTEDSSMXPPSPSGESPPPQGPDARHPQGQT

SEQ ID NO: 302585 - protein, 100 aa, Zea mays
  Clone ID: MRT4577_39031C.1.pep
LCNFLWHYASFRCSSNMECACSPCDSCISDIAPFCAVLLFCVGFWLIEITIDAVLLLQDGNPTNGGEETHSPCSHERTANTAEEQLLLIIVRAHRALKFG

SEQ ID NO: 302586 - protein, 93 aa, Zea mays
  Clone ID: MRT4577_39032C.1.pep
GHAFAHAFAHAFRLIDLHTYIVSFTTRRPTLGKPCEDTEKWGGYPRRSSGSEGFFRPADPGERHRGQQQLHSVHFLYLTWNPLPTGPRRALGV

SEQ ID NO: 302587 - protein, 96 aa, Zea mays
  Clone ID: MRT4577_39033C.1.pep
KTVLLLDKILKTFLSCCLQGGGKTIQISRFFLGDKKNPIFSHSYLFPGAFFFLQRIGEPFFFNLGGGTCSILTTTGKGKKLGLVFFWCTGDLTIAI

SEQ ID NO: 302588 - protein, 154 aa, Zea mays
  Clone ID: MRT4577_39034C.1.pep
PPPFSVFFFLFFFFFFFFFFFFFFFFFKTEGGFTEINISGDISPYPLPGEPQGKREILQQPFPSFMTQKPLSFKKRFCFSTKYLKLFYPAAGKGGEKQYKFPGFSWGTRKTPSFPIFINSQRLSFFYKGLGSLFFLTSGGGLAQNKRLREREKS

SEQ ID NO: 302589 - protein, 119 aa, Zea mays
  Clone ID: MRT4577_39035C.1.pep
NRPPFFKEFCPPFFYIFWPKKLGWTFFCLPTSNSWLLVQSKPLINQPSSLQFTVVHHQAVNCGKLIGVRNRANSTKFFPGHQFYFLVGIPCFWKQPQITFGFGLGERPTPGSTTRGWRA

SEQ ID NO: 302590 - protein, 38 aa, Zea mays
  Clone ID: MRT4577_39036C.1.pep
KTPTRMKTLLQHTWGEGQFTSPELYYTVPYLGGLGRHL

SEQ ID NO: 302591 - protein, 75 aa, Zea mays
  unsure (1)..(75): unsure at all Xaa locations
  Clone ID: MRT4577_39037C.1.pep
PTRPPTRPRTLGRTRGLHRGCAPFLRAWFLKSCVQGLIGSAMYSADQSVDSAKQIQHIWHXLAXMFFRDELQSRS

SEQ ID NO: 302592 - protein, 102 aa, Zea mays
  Clone ID: MRT4577_39038C.1.pep
IMRSMSSSVTVVTSALSAGTLSLPELRLALQQLRHVAVGHPVSRTIPDKVFTYTSFAAISRRTTAAFSALAAMSNLRNSDPSALAVSLGCPPLCSVNKPGVT

SEQ ID NO: 302593 - protein, 97 aa, Zea mays
  Clone ID: MRT4577_3903C.1.pep
FSACIREDATGLYHPQINMGNVRRMLKTRLPRRRILAKRYIKTHEHTLRRFSGLRSRTDRNPRRSSPYRTGRHKRGLRRLNILPPSREVRSTGRRRP

SEQ ID NO: 302594 - protein, 77 aa, Zea mays
  Clone ID: MRT4577_39040C.1.pep
SACFCSGDLCNSISLPGCLSATSSRAPLPSKRCEAWPVPYINLIGSGCFSTLSKTQSPCCLCYNSPPLHPNLLVQPQ

SEQ ID NO: 302595 - protein, 96 aa, Zea mays
  unsure (1)..(96): unsure at all Xaa locations
  Clone ID: MRT4577_39041C.1.pep
LCFNFFNRGVYDLKVLSLCLRMMGSTRFRATSYWRVRIIGIYKKCSIKQIICYVGYIISQQAPFAAPIRHINDPMLEAVKTGSKRKLLLFVFXTCI

SEQ ID NO: 302596 - protein, 48 aa, Zea mays
  Clone ID: MRT4577_39042C.1.pep
ILVPFVGGFLKKKKKKKKKKKKKKKKKKKKKKKKKKKKKKKYSALLPL

SEQ ID NO: 302597 - protein, 117 aa, Zea mays
  Clone ID: MRT4577_39043C.1.pep
GRQFLFPVSGWCGNVWVVSLRVYPFNVSGGSNLGEACSEVLHPLGNTGGGGVLSAAGWPGSICSSHEVVWRCTRRGPGLGHHGGCDCWFCMGAGFCYVPAVFIAGFFSSVNLYMLIF

SEQ ID NO: 302598 - protein, 136 aa, Zea mays
  unsure (1)..(136): unsure at all Xaa locations
  Clone ID: MRT4577_39044C.1.pep
SGAAPAPPQSIARRHRVRRPHVSPLSLQSWTDADAEPEVAARAPKNRTSRKYRYRGVHLDALLDMPTXNIVQLFPARARMKVXRALRRKPMALIXKLRKAKKHAPAGQKPEPVQSPLRNMIIAPXMIGSIAGWLQR

SEQ ID NO: 302599 - protein, 246 aa, Zea mays
  Clone ID: MRT4577_39045C.1.pep
MEVEQAAEVSAPETADLNVPAKTPAHDDDKEKVPNGNTNLQVKETHNDEDDGTGSDGFELIDVKENFDSAKVGEEIAASRSTTVDTSPVTEQSETQEEKITAPEEQSVAANTRHVESSMLNQQTEQLEKLTRRIEELESEKDKLVKDLTEAENKQSMHYSSLQEAQSSLSMKDKELAEATESLKELGSELETSKKRIQEIEAELDSSADKLRKLEELKDERSLHAAQEAKRASELDKMLELAQSNT

SEQ ID NO: 302600 - protein, 69 aa, Zea mays
  Clone ID: MRT4577_39046C.1.pep
LKPKVSKIASQKTHKDYPPERKGNPKRRTPRPGPVLPGVWSQVKSLRISPPGCPQSELTQKGAQKANPS

SEQ ID NO: 302601 - protein, 71 aa, Zea mays
  Clone ID: MRT4577_39047C.1.pep
ICFVANVAWHGLACSFEYWSFEILVLFAGLMPDSHLSTSIIAMCQNTETISYMITYGFAAVISTRVSNELG

SEQ ID NO: 302602 - protein, 49 aa, Zea mays
  Clone ID: MRT4577_39048C.1.pep
RKYNILNIIFYYPIDILGPDFWLSFLLQQNILTNEKISFLCLRNEAATH

SEQ ID NO: 302603 - protein, 56 aa, Zea mays
  Clone ID: MRT4577_39049C.1.pep
GPGGGLQNGIRQHGHVLALEEQRRLPLCHRRPRYLWICRLGMFVKVSIKAQPHIIC

SEQ ID NO: 302604 - protein, 102 aa, Zea mays
  Clone ID: MRT4577_3904C.1.pep
HIMLPFRFKLGIAGVFQFRTEFFYELYFAGVYSTFKKANLVKLRFPARNPSVVPGVSPAFGPGFPERLGPECFHGILMVGLGQFLQKKKKKKKKKKKKKKKE

SEQ ID NO: 302605 - protein, 99 aa, Zea mays
  Clone ID: MRT4577_39050C.1.pep
VPYTQPKNPNQKKKKNMPRKKHLTKNLLKTLKRIHWLNNLTHLTQKFMGEPTTELQINQTQLYSHPNFWLVLHTTTYTTCPTKSPNGYNLPGIPPKKVP

SEQ ID NO: 302606 - protein, 49 aa, Zea mays
  Clone ID: MRT4577_39051C.1.pep
RLYGLLITSYRQGGFVHVPKKGVTWNDPKSLYERLYDAIYDKWAEPKGP

SEQ ID NO: 302607 - protein, 80 aa, Zea mays
  Clone ID: MRT4577_39052C.1.pep
GSWTTTSKQSLKCRIPLCKGPTHQLPCERFRVGVAVARVCLGLSCVWSFMPCCCEGFMYRGVLLVNGIKQTSNIISVDSS

SEQ ID NO: 302608 - protein, 131 aa, Zea mays
  unsure (1)..(131): unsure at all Xaa locations
  Clone ID: MRT4577_39053C.1.pep
MQIFVKTLTGKTITLEVEPSDTIENVKAKIQDKEGIPPDQQRLIFAGKQLEDGRTLSDYNIQKESTLHLVLRLRGGAKKRKKKSYTTPKKNKHKRKKVKLAVLKYYKVDENGKISRLRRECXSDECGAGVF

SEQ ID NO: 302609 - protein, 94 aa, Zea mays
  Clone ID: MRT4577_39054C.1.pep
RGKNPTQFLVFFWEPPAGGGAPFWGPWAGTPLGGISTPRGGVTRGSGAGPKVGENRAKGVSGGKLFSAQNSTKNRSGKLKGESRGGLRGGLTPI

SEQ ID NO: 302610 - protein, 103 aa, Zea mays
  Clone ID: MRT4577_39055C.1.pep
MSASSSMTKKASSFVVAASMSAVEALKDQAGLCRWDYALRSLYNRAAAANKVVAGRAVPLSLSSSQTAGGSGSAAAAGRSARPRRSEEEKMHKAYHLVCWGPN

SEQ ID NO: 302611 - protein, 56 aa, Zea mays
  Clone ID: MRT4577_39056C.1.pep
RLLRHQSHAVRALQEAAEAYQAGLHEDTNLSAIHAKRVTIMPKDMQLVRRIRGERA

SEQ ID NO: 302612 - protein, 90 aa, Zea mays
  Clone ID: MRT4577_39057C.1.pep
GPTHAYDCSLVSDDSLYASMITMPIPATARNADLPDIHLMQQQHDSSAAGADALTTADLCDAAALSLTKTHAFRQRLLKMRLREGQGLGW

SEQ ID NO: 302613 - protein, 153 aa, Zea mays
  unsure (1)..(153): unsure at all Xaa locations
  Clone ID: MRT4577_39058C.1.pep
HQGNPQRPPAGAEAPAHPGAGSGGGKTXAARXAEAXGGSXXEAEGGEAEANKAXESAGXPXXDADRAPXXEXXRDAXRGRXDGGEDXAXSGXAXRXGXRXXXRAADRAXEPGRPAAXXGRGXXXXAPAEGXAXRGXRGAGEGEHXXPASRRRG

SEQ ID NO: 302614 - protein, 135 aa, Zea mays
  unsure (1)..(135): unsure at all Xaa locations
  Clone ID: MRT4577_39059C.1.pep
SGRGGPSPPVGRWRVPPGQRGGPRDAGGQRQDAARPASQGEXGHPPTQGFFPWXQGAAGNPRGRWRQQNWPPVSRQGAATRASFMTPQRGRPFAPRLGATPAPLSQPPRLLPLGHPALANPAAPPPRPVLGGALF

SEQ ID NO: 302615 - protein, 71 aa, Zea mays
  Clone ID: MRT4577_3905C.1.pep
THPPTHSPTLSLIPNSLHTLGIRIITKGAAFLKPFKYSHFIIILLHFIYIRYVVIYTYSNTSLNIIFFYLF

SEQ ID NO: 302616 - protein, 90 aa, Zea mays
  Clone ID: MRT4577_39060C.1.pep
SSEIYNSQTLRLLSLASMSGCCQVSIPLGTHDKCPISVSFIARHGGDRFLLDTQTMYTTIQEQGEILAKSSVSSKQKLNEEAAEAAKDKS

SEQ ID NO: 302617 - protein, 70 aa, Zea mays
  Clone ID: MRT4577_39061C.1.pep
PRGGGPPILVESFRVLNQISPNPGPTKNPTPLICPGPPFEPNPGANPGSCGLLQGWQPLICQPPGPHQFL

SEQ ID NO: 302618 - protein, 76 aa, Zea mays
  Clone ID: MRT4577_39062C.1.pep
VSCLLLHYRWSIGCTHLDEEKEAIFSFKQHNITGCPDRQFGQHLQRYVSVKHCSFTTNYLVMESQICKGDMNGMGM

SEQ ID NO: 302619 - protein, 67 aa, Zea mays
  Clone ID: MRT4577_39063C.1.pep
RTRGGMSDGKYHLGIVKRTLIRSRKVMDDTYQKISRHAKMFNMRWTTSLKSHLTYAESCELVVWQIF

SEQ ID NO: 302620 - protein, 56 aa, Zea mays
  Clone ID: MRT4577_39064C.1.pep
NLKTLGPSKYRAFIKKREPWGAPLNFCPGPLLPNFLKGVLSPALPKVYLETLFYAL

SEQ ID NO: 302621 - protein, 198 aa, Zea mays
  Clone ID: MRT4577_39065C.1.pep
YQEIATAYKIADVNLITVGQKLWIPLPCSCDPVDGAAAVFHLAYIVDGGETTSGIAATFGVTEDTLLKLNKIADPKTLQKDQVLDVPLPVCSSSISNTSDDHDLRLPNGTYTLTAQDCIQCRCSSNTFQLNCTAVQGKKGMPSSAAVQRRAQSWADKWCRLRLQDVRLQWLFQQLFTQHTDHSFQKPDSTSLRESRIF

SEQ ID NO: 302622 - protein, 182 aa, Zea mays
  Clone ID: MRT4577_39066C.1.pep
MAAETENILQKVDSLTEEHKDGAAKKGHRRVSSMAADVYRIEDLEKEGKHIDISIETQKLNWKLNKAPTTGEDPSVLKLPLTEPKLKSITLHFPLGLEVVARNMKGVTIKDALDAIHKQFKKRADDEFEKPYLMGFEWDPSQCYTALHRPPDGQPYRPPTPSLLAERRKSQQGRGRRRILGE

SEQ ID NO: 302623 - protein, 57 aa, Zea mays
  Clone ID: MRT4577_39067C.1.pep
VPLKERDVRFAYKAGPILVPFKSMESVSAIHNRGKVLPSLNFVAKEGAKFGIVPDPL

SEQ ID NO: 302624 - protein, 203 aa, Zea mays
  Clone ID: MRT4577_39068C.1.pep
MAAVRAALRLQRQCLAANPFLFSGHGLRYRKLEVILTTTIDKLGKAGEVVKVAPGHFRNHLMPKMLAVPNLDKFAILIREQRKLYQREEEVAVKQVTEKDDDARLQEERMKQYQTAAKRLDNALLVLRRFISTGNELRTPVTKDEIVSEVARQLNINIHPENLHLHSPLASLGEFELPLRLPQNIPCPEGKLQWTLKVKIRRK

SEQ ID NO: 302625 - protein, 83 aa, Zea mays
  unsure (1)..(83): unsure at all Xaa locations
  Clone ID: MRT4577_39069C.1.pep
PSRPYNAQEGHVGGAYFKQPLFLYPAHFRGHALFFGYEGRCLLLTNFDSKSCFCSNXCAGALLHSSSLSLISSVGNLATFLCI

SEQ ID NO: 302626 - protein, 53 aa, Zea mays
  Clone ID: MRT4577_3906C.1.pep
RRRGASCSRRRIEGFVGHRRQEPVQPRAQPPDARAREGGDAQAREVAQLGRHL

SEQ ID NO: 302627 - protein, 61 aa, Zea mays
  Clone ID: MRT4577_39070C.1.pep
PASLHLQVARQLNINIHPENLHLHSPLASLGEFELPLRLPQNIPCPEGKLQWTLKVKIRRK

SEQ ID NO: 302628 - protein, 67 aa, Zea mays
  unsure (1)..(67): unsure at all Xaa locations
  Clone ID: MRT4577_39071C.1.pep
QVIGIKKKIDYSMQLNASRIKVLQAQDDLVTDMLKSASKELLRISRDHLTYKKLLKTLIVXSLLRLK

SEQ ID NO: 302629 - protein, 149 aa, Zea mays
  Clone ID: MRT4577_39072C.1.pep
LSIFRCHGCPQQYLASTIIVTVAVTSSSSSSLMNMLTVLAVKIMLPGHIIPAVLARPHHDSACVECGRPSRCVLRGVNGLVMLFIDAPELLLIFLHTSKPQNGNFKPVTMNNRYTSSCSHRVNISVGFSFRLYAPTPEEQNNYSLPSSR

SEQ ID NO: 302630 - protein, 31 aa, Zea mays
  Clone ID: MRT4577_39073C.1.pep
LVILVFLYLAISVASARFNEVYRQLEARTRG

SEQ ID NO: 302631 - protein, 59 aa, Zea mays
  Clone ID: MRT4577_39074C.1.pep
MVKFTAEELRGIMDKKNNIRNMSVIAHVDHGKSTLTDSLVAAAGIIAQEVAGDVRMTDT

SEQ ID NO: 302632 - protein, 72 aa, Zea mays
  Clone ID: MRT4577_39075C.1.pep
DLKADERHTINIEIHNTPREGTSNDLTTMATKILDTTLNFLHFLRTKQMKSLLHNDHLNPKAIIPKDLPPYT

SEQ ID NO: 302633 - protein, 69 aa, Zea mays
  Clone ID: MRT4577_39076C.1.pep
HKSVPALCTWVSCSLQQRQATWTVHYSSPFMASLLIIISTYDLYPGLFPRGSSKALSTLTCIPQFIQLW

SEQ ID NO: 302634 - protein, 155 aa, Zea mays
  unsure (1)..(155): unsure at all Xaa locations
  Clone ID: MRT4577_39077C.1.pep
YMLSFFEVPNKVLKKLDQFRSRFFWQSGQERIKYRSTKCKVICRPVEQGGLGVKDLKVQNKSLLSKWWYRLINEDGQWQQLLRNKYLRDQPFSLIKKRSAXSHFWSGIMGVRDDFLKFIRFNVENGVRVQFWQDKWMANIPLKIQFPNLFSICYN

SEQ ID NO: 302635 - protein, 67 aa, Zea mays
  Clone ID: MRT4577_39078C.1.pep
VAGHVVVLDGDRVPDLILHAFFMLTPVLLVVLAIILLVVIVVPLVVVLILRVVAPHVKLLECSRTRG

SEQ ID NO: 302636 - protein, 110 aa, Zea mays
  Clone ID: MRT4577_39079C.1.pep
KLNIYFSPPNEKKEVKGKKTRVKTPFLQALLLFPFFGGLCGTKTSLTFFPWKGGGPQKPGGGSKTPFLRGKIYVGGMYFNKFFPPPPFFFQLKIFVGVAPPPNPGWGGTF

SEQ ID NO: 302637 - protein, 84 aa, Zea mays
  Clone ID: MRT4577_3907C.1.pep
NGTSIQTRSRPPSAISWEPPPVHRGPFLVPYWDPAQNVYPNINPLSTPTIAVARPRCEQRRQGLDGPTLAPDHRLPSKVPEAHP

SEQ ID NO: 302638 - protein, 42 aa, Zea mays
  Clone ID: MRT4577_39080C.1.pep
YIYIYIYITNPHVYITIHIYITHETYRSPQISQIHIDMTNLT

SEQ ID NO: 302639 - protein, 110 aa, Zea mays
  unsure (1)..(110): unsure at all Xaa locations
  Clone ID: MRT4577_39081C.1.pep
MSEESYHHHLLQHRKVKEEEGASGEVDYEKKEKHHKHMXEKLRQLDDIAGEAYALHGKHNDKKDPENEHGHRXRRQEAAVAAVGSAGFAFHEHHEKKDAKKHARNGAVSG

SEQ ID NO: 302640 - protein, 54 aa, Zea mays
  unsure (1)..(54): unsure at all Xaa locations
  Clone ID: MRT4577_39082C.1.pep
NVVVLLVVDVVQKLATFRVETTFRFVENAHVSVAVASRHVTRVSGQDGIIDSDX

SEQ ID NO: 302641 - protein, 58 aa, Zea mays
  Clone ID: MRT4577_39083C.1.pep
TQTQMLVSRGQVVAFLPLSMCITHTWTCEVWGSLAQLEHQKKKKKKKKKSTLRCYHCL

SEQ ID NO: 302642 - protein, 95 aa, Zea mays
  Clone ID: MRT4577_39084C.1.pep
YRPRPRSSWRSVISSSKPVFSSTKSSSYRNVSDLTRISSSLPPSSSKAGPDLRKWKPDHGLCQKALGVPTRSLSWTWTSYHMGPAKKGKGSDSIG

SEQ ID NO: 302643 - protein, 137 aa, Zea mays
  unsure (1)..(137): unsure at all Xaa locations
  Clone ID: MRT4577_39085C.1.pep
FRRGAVRAEPRPDGGRSAQARVKKPDVKCPAGVGIQLWYMPAXAELLGHDSVSXSGGGTLGXAWXGNGPGAKINGEVLEVCVGAPPQGGYVGVEGKVKELNEIYKCICXNYLAACXIWMKIEFDGWRSMYLILNKTK

SEQ ID NO: 302644 - protein, 78 aa, Zea mays
  Clone ID: MRT4577_39087C.1.pep
IIVYPACGGGFPIMGESGLPPTHRYCVVCVPKKKNRVFRFPISLCMFGVSLCAQVRAPPRMLVDPIAFSVPIILIGPQ

SEQ ID NO: 302645 - protein, 110 aa, Zea mays
  Clone ID: MRT4577_39088C.1.pep
PQFAPLLTGKQHCSPRSGYCANHQGKIESRSPTSSASGATGSSASPDLRPRPQPRPREKVSALPDPRPRPREESQPRPTSASASGEASALPDLSLGPTTLQGIHHYPTPS

SEQ ID NO: 302646 - protein, 71 aa, Zea mays
  Clone ID: MRT4577_39089C.1.pep
RLYEQHVNRARGTYSYIQSDQSVAAVAAGKRRRLGGSGTTAMAGAGGGMDRGSRRCASAMRDFNSGVFLNR

SEQ ID NO: 302647 - protein, 51 aa, Zea mays
  Clone ID: MRT4577_3908C.1.pep
NFFFFLTMVLPYCIITYKHRRKKGPVEPAYWGRPNKHRGNALTHILRRIKG

SEQ ID NO: 302648 - protein, 59 aa, Zea mays
  unsure (1)..(59): unsure at all Xaa locations
  Clone ID: MRT4577_39090C.1.pep
MAXIAAATQAAATVLLLAALVLAAGPGGARTHTAWSTSQCTAALDSLPLLLRYNRVNAG

SEQ ID NO: 302649 - protein, 127 aa, Zea mays
  Clone ID: MRT4577_39091C.1.pep
MAMTMTLGSMLIAAAAVVGLCSVAPAASAREEPLQPQIVGGWKPIKNVNDPHVQEIGRWAVSEHIKTANDGLGFGRVVSGEEQIVAGKNYRLRIQATKVGGQKAMYRAVVYEQLTNTRQLLSFDPAN

SEQ ID NO: 302650 - protein, 111 aa, Zea mays
  unsure (1)..(111): unsure at all Xaa locations
  Clone ID: MRT4577_39092C.1.pep
GGAHITDTAHAITYALLSEEGVDXGLRRITGRTGXHVSQHYYDTGYESNTIYLNDLNGXAFVGKKIASIKSGLDASAIPAARKADLRGKGSKVEXDETRKAQKXMGEQNKQ

SEQ ID NO: 302651 - protein, 111 aa, Zea mays
  unsure (1)..(111): unsure at all Xaa locations
  Clone ID: MRT4577_39093C.1.pep
FGSRPDIMILVLSEACNLISEIESYYKESPDHMRRVADTLAFCNLALDAYHRGSLATIVHRTTWSELNWLPXDLNMDRLDLLYCTISGIGGFNLIYFGICARRHTFMGTSI

SEQ ID NO: 302652 - protein, 83 aa, Zea mays
  unsure (1)..(83): unsure at all Xaa locations
  Clone ID: MRT4577_39094C.1.pep
TPYGLSQCQALQHQFSPQIRQVETLPRYQATYGVVLQSFLXHHSQVELTELMGAQVQQQLMAMSGLHVQKPGSFPLKPQAGGV

SEQ ID NO: 302653 - protein, 38 aa, Zea mays
  Clone ID: MRT4577_39095C.1.pep
PVQPSNRSLSLILHRGRVIWDKSGVPVWLIGTVEPCKG

SEQ ID NO: 302654 - protein, 114 aa, Zea mays
  Clone ID: MRT4577_39096C.1.pep
GGLVPFDTCWNGRQFYGFLQNSPLNSGNNAKDLFFFFFLFFLFFFFFFFFFFFIPPLFFFFFFFAWSDFVVYLCIFLRQYNECVTMFDEKEKKCTYYTYLVFTVARVLCVVTTA

SEQ ID NO: 302655 - protein, 97 aa, Zea mays
  unsure (1)..(97): unsure at all Xaa locations
  Clone ID: MRT4577_39097C.1.pep
QQPGSHGGKAYLISSGYAMAHKNKGRAHFTGYNPEDKPGAYKNPADYSLLRENTALAXEGHGPHYTPRNGDIHRNCIMRVGGNKNHGRNRIAHGAIN

SEQ ID NO: 302656 - protein, 98 aa, Zea mays
  Clone ID: MRT4577_39098C.1.pep
KEKRRIESTLAGSPSSLRRYRRRRCYWVSATGRGRNTFTYLAPAPAAGWIDKKLPDASCSSRLLARRSSTLVCTGRRPDVQQLEFYTLCVYLSRNRPA

SEQ ID NO: 302657 - protein, 121 aa, Zea mays
  unsure (1)..(121): unsure at all Xaa locations
  Clone ID: MRT4577_39099C.1.pep
DADAFDIARRQLLSLPEGDGDLPDDFGSHPVDVPSTXRLSRAYXSLQAWRRAMYSDPKNFTGGWVGAEXSTWHTSVPALDDANTTDGEGIDLNGGDIGGYLPEELGKLTDSAFHHINSNRC

SEQ ID NO: 302658 - protein, 226 aa, Zea mays
  Clone ID: MRT4577_3909C.1.pep
MASAVASNLPVATPAAVPVPYGRLSPRVSFSRDAPTDLVDPVAMAVATPEPAISKDFIDFEFSLGSSATMLPADELFADGKLLPLRKAATLPDPEAAAPPPAQPEEAMPATSTEPIKPLRAAASDGTDPYAFSPKAPSCSSRWRELLGLRRASAAQSPSTKASASASPAAAKTPASAARATNSAAARSLKLLLQRNAGRASGAAASEHASAPLPRDSSTRKGRCRW

SEQ ID NO: 302659 - protein, 63 aa, Zea mays
  Clone ID: MRT4577_390C.1.pep
QRERDGEHFEALTTRLAHILGRTIRAYLSVHEHIICEGRTTQITIWLYQVVALFTFGRAPLSL

SEQ ID NO: 302660 - protein, 137 aa, Zea mays
  Clone ID: MRT4577_39100C.1.pep
PKRACMRKDGQKGTGTNQHRGGEGGAGGGMGHRATDTGPHHHYHPRQTLFSPSNLKPGPDTSTRKELVATYRATYETHTHTGGDASKNRSVLKKKNPGKTAMYAREGIPRQGRTPIPWALAAAAGCARANSVAFWGS

SEQ ID NO: 302661 - protein, 187 aa, Zea mays
  Clone ID: MRT4577_39101C.1.pep
LFAQRASGGGAGLPPATADDGGGSEGSVSSRTAGPARPPSRSSPARRRHPDRRTVGPGPARSRAASARFCSGGGGDAMAAGGNQITRGANRGGVLDALGWEGGIGGRSWVGVRSAAARFACMESESERAVEPGRVELVMRCDFARAVPGEARRGETDDGARACGAVASKFQIRLRLAVATVHGRLAV

SEQ ID NO: 302662 - protein, 56 aa, Zea mays
  Clone ID: MRT4577_39102C.1.pep
LVSSERVVIRMPRALVSLEYDLIVHRIQCRRGCSCVVVAPAVFLLPFRFSKKHIVC

SEQ ID NO: 302663 - protein, 599 aa, Zea mays
  Clone ID: MRT4577_39103C.1.pep
MAVAASPYFLLLFLFHSLAALASLAPPPSQPPPPRVPQKVQVWPKPVSISWPLPAYAPISPSFNIRASPSHPSLRHAIAYYTRLIRTERYTPIMPPVNYTVSGVPIRLLALSVSDPDVPLGPGVDESYTLSVPPNSSSADISAATPWGIIRGLETFSQLAWSSGAADASGQPIVPSEIEISDHPLFTHRGILLDTARNYYPVRDILRTIRAMASNKLNVFHWHITDSQSFPIVLPSVPNLANFGSYSPVMRYTDQDVRRIVRYAGAFGIRVIPEIDMPGHTGSWAGAYPEIVTCANKFWAPTAKPALAAEPCTGQLNPLNPKTYRVAEDVLRDLAALFPDPYLHAGADEVNTACWEDDPVVRGFLADGGSHDRLLELFVNATRPFLVHELNRTSVYWEDVLLGPKVSVGQTVLPHDTTVLQTWNNGAENTKRIVAAGYRAIVSSASYYYLDCGHGGWVGNDSRYDVQEKEHDGMPLFNDPGGTGGSWCAPFKTWQRIYDYDILHGLTEDEARRVLGGEVALWSEQSDAAVLDGRLWPRASAAAETLWSGNKGSNGRKRYANATVRLNEWRYRMVARGIRAEPIQPLWCPMHPRMCNLSQ

SEQ ID NO: 302664 - protein, 77 aa, Zea mays
  Clone ID: MRT4577_39104C.1.pep
PNSNSYHNNNMDSFYISPFSIHFYYILDIHTLFLSLGGGGGESNSNHIHFLISMNNLHPPYCPIFPLRPLDQVHLAV

SEQ ID NO: 302665 - protein, 122 aa, Zea mays
  Clone ID: MRT4577_39105C.1.pep
HHLGPSDHYTLSYVTETARSSPHRATSGVGVLRLPLGFSVCDALAMPPHFTRSTDGGVLRACARQPASLTCTASLPAWPHSRHPSWPHSRQHPGRTARHQPARTLGASLVHAGTSAPMCRHR

SEQ ID NO: 302666 - protein, 144 aa, Zea mays
  unsure (1)..(144): unsure at all Xaa locations
  Clone ID: MRT4577_39106C.1.pep
NSARGLLVLPPSPANQLTSACHFSWCLLCWLSTLEEDIRYHYCAYPGSDQPLSYANIVEGRNNICPHVSHRAESSVVCRWLLARAPVGAPPAAPCRLSMTRPADGMHMLLPGVLHMMLTDLSGNDXLSPNVPEIYSQFLIIGYF

SEQ ID NO: 302667 - protein, 295 aa, Zea mays
  unsure (1)..(295): unsure at all Xaa locations
  Clone ID: MRT4577_39107C.1.pep
MSYSYPATTPRQHKPLSAPSQPSSDLNPGAPSLPPSSPRDSERRRPPSMEHDAEARRGFARMGFGCKHYRRRCRIRAPCCGDVFHCRHCHNESTKDGHELDRHDVQSVICLVCDTEQPIAQVCCNCGVCMGEYFCAACNFLDDDVDKEQFHCDDCGICRVGGKENFFHCQKCGSCYSTTLRDRHCCIENSMKNNCPICYEXYLFDSLRETSVLRCGHTMHLQCFHEMLKHDKFSCPICATPIFDMDKFFKALDAEMEASYLYTGKVSAPYCQPDAVLYDPMQPTFPVLVYSSLLL

SEQ ID NO: 302668 - protein, 67 aa, Zea mays
  Clone ID: MRT4577_39108C.1.pep
AQENLIAGKSLCFITNFQDPNNHHLKTFLKQRGWSLYFLEGLNTTGERKKKLPNEPYSFCPLIIGKP

SEQ ID NO: 302669 - protein, 114 aa, Zea mays
  unsure (1)..(114): unsure at all Xaa locations
  Clone ID: MRT4577_39109C.1.pep
PSVTQHATHKSRGITEKPEASTRNPEPATKXPQNAQPNEPERTGLARVAEDKQNNRVLEEPSADEGNETRIRAAALNPNEQEELSPNDMMARARERDENANGYRLANTDQATNN

SEQ ID NO: 302670 - protein, 99 aa, Zea mays
  Clone ID: MRT4577_3910C.1.pep
GPCLVPGLPRYPKKVFPRASPKKIGKNSRVKCFIKLVNFPPLRPPRYPLGVVFKDFPPGGPEPLFTPEKKVPPCKRAKGALGEGFKPGKNRWFFTKPRF

SEQ ID NO: 302671 - protein, 37 aa, Zea mays
  Clone ID: MRT4577_39110C.1.pep
SLYPKTAFTLCHVAISVMYGHYVEFCFCKSLCMVPSL

SEQ ID NO: 302672 - protein, 105 aa, Zea mays
  Clone ID: MRT4577_39111C.1.pep
LAKNKNIGPLSLKKQHGPPGRTDMRPKVKASIKPPAPERNKAAETSKRVSTLLQTNKQENRDSQKKIYPVKTGRNQLASGDRLLVHLPGPGKQWDCRARHAKGGL

SEQ ID NO: 302673 - protein, 189 aa, Zea mays
  unsure (1)..(189): unsure at all Xaa locations
  Clone ID: MRT4577_39112C.1.pep
LSYQKSYVVYLGGHAHGRAGAALASCRARARSSHRALLGSVLRSEARARDAIFYSYTRYINGFAATLEEDEAAEVSRHPRVVSVFPNRGHPLHTTRSWEFLGMEEXKVXVRPGSIWAKARFGEGVVIGNLDTGVWPEAGSFRDDGMGPAPPGWRGICQDQQASDDAQVRCNRKLIXARFFNKGYLATVG

SEQ ID NO: 302674 - protein, 125 aa, Zea mays
  Clone ID: MRT4577_39113C.1.pep
FGTRGEPSPLSHSLCFVLRSDLSPRPSLIPCPFVAIAAGRAVSRTRRPRGKKHLNSVTLLFKLPYYTQWGQSLLIAGSEPALGSRNVKQGVSLSPGHEDSELYRRGGLVRVLGCSPGGGGCGGGD

SEQ ID NO: 302675 - protein, 99 aa, Zea mays
  Clone ID: MRT4577_39114C.1.pep
SFVAPPVARSGPHPLRPGSCGSSAALGLRAVAPAGGAVSSAIPDLALLLSPPTPSLCGRLGLFIHVGPRRSPPPPADLLLRVAWVCDQLSRHSQRFLAP

SEQ ID NO: 302676 - protein, 97 aa, Zea mays
  Clone ID: MRT4577_39115C.1.pep
EGENELTGHKFSYTERFPRMGERRTIHHSSLPLLGRLSCGKGVGSYWWRTCDYALTHWRGTRTCALFLGRNQIAALGCLIRILLNFIRQTNFFISFL

SEQ ID NO: 302677 - protein, 76 aa, Zea mays
  unsure (1)..(76): unsure at all Xaa locations
  Clone ID: MRT4577_39116C.1.pep
AHHLAGVFPSTFLTQPQGLAFYQLVAPNCWRLLXQLHQLLXFNQLCLTNSSTIDQQPIIGGALFYILMRIVIMSLI

SEQ ID NO: 302678 - protein, 49 aa, Zea mays
  Clone ID: MRT4577_39117C.1.pep
VGNKGHLLIMGALFLCVSVLLKSMKDHLICHPLLRTANDRCCRLLGTIL

SEQ ID NO: 302679 - protein, 89 aa, Zea mays
  unsure (1)..(89): unsure at all Xaa locations
  Clone ID: MRT4577_39118C.1.pep
VFYHQGQCCIAASRIFVEESIYDEFVRRSVERAKKYILGNPLXTPGVTQGPQIDKEQYDKILDLIESGKKEGAKLECGGGPWGNKGYFV

SEQ ID NO: 302680 - protein, 272 aa, Zea mays
  unsure (1)..(272): unsure at all Xaa locations
  Clone ID: MRT4577_39119C.1.pep
TYDXMVDDPTTNAVVSWSAANNSFVVWDPHIFGTVLLPRYFKHNNFSSFVRQLNTYXPFFRVCFCGCGTMHGGMMRPCXGFRKVDPDRWEFANEEFLRGQRHLLKNIRRRKPPHSSPNQQSLGSYLEVGHFGYEEEIDQLKRDKQLLMAEVVKLRQEHQNTRSDLQAMEEKLQDTEQKQQQMMAFMARVMQNPDFMRQLISQRKMRKELEDAISKKRRRRIDQGHEAGSMGTGSSLEQGPQGVFEPQEPVESLANGVPSDLESSSVEAKGLE

SEQ ID NO: 302681 - protein, 127 aa, Zea mays
  unsure (1)..(127): unsure at all Xaa locations
  Clone ID: MRT4577_3911C.1.pep
PRCRSCRGRVCRRPGSGPCLPVFGGFLLSLVALRRCLWSRFSCFASRCACRLLFLLWALLWAGRGPGCLWLCVVFAGCLLSSLWGLXWWCLPPSLLVFSPRWFVCXFCFCALGAAVLCARPPGPXFR

SEQ ID NO: 302682 - protein, 359 aa, Zea mays
  unsure (1)..(359): unsure at all Xaa locations
  Clone ID: MRT4577_39120C.1.pep
MSHGNGMLNSVKVERWPAAVAANGQPRPMDVLHDGSSPPFLTKTYDMVDDPTTNAVVSWSAANNSFVXWDPHIFGTVLLPRYFKHNNFSSFVRQLNTYGFRKVDPDRWEFANEEFLRGQRHLLKNIRRRKPPHSSPNQQSLGSYLEVGHFGYEEEIDQLKRDKQLLMAEVVKLRQEHQNTRSDLQAMEEKLQDTEQKQQQMMAFMARVMQNPDFMRQLISQREMRKELEDAISKKRRRRIDQGHEAGSMGTGSSLEQGPQGVFEPQEPVESVANGVPSDLESSSVEAKGLEVRQGVSSGGSEHLNGRPSGELNDDFWEDLLHEGGLGADAGNAVGQDDMNMDMDPDVSLPQLKQHGPRH

SEQ ID NO: 302683 - protein, 55 aa, Zea mays
  Clone ID: MRT4577_39121C.1.pep
PAWWIVFCPWVSPCTFPAVPFGSIENGFVYTLVDYIYALLTTISLQINSKKNNTT

SEQ ID NO: 302684 - protein, 74 aa, Zea mays
  Clone ID: MRT4577_39122C.1.pep
EQMSGLELELGLSLGVLIDVVDEQWMRDTLPADDIPVPPAMAVKTEDAEDPAPANQESQPAQGDVWRDFALENL

SEQ ID NO: 302685 - protein, 101 aa, Zea mays
  Clone ID: MRT4577_39123C.1.pep
MNHGNGMLNSVKVERWPAAVAANGQPRPMDVLHDGSSPPFLTKTYDMVDDPTTNAVVSWSAANNSFVVWDPHIFGTVLLPRYFKHNNFSSFVRQLNTYVSC

SEQ ID NO: 302686 - protein, 125 aa, Zea mays
  Clone ID: MRT4577_39124C.1.pep
PAASRGPPSPDRPCTMPLSPPRLNMARLCYSGGGKRRLSLVEWCWARVRATPGVAPRRRGDVAFSWAGRPSSSRKIFSLPPSRIMNNAVALGYRCIVCDPTISSMNNVAVLYCMSASQQIQLAFF

SEQ ID NO: 302687 - protein, 43 aa, Zea mays
  Clone ID: MRT4577_39125C.1.pep
PCKKKKKKKKKKKKKKKKKKKKKKKKKKKKKKKKKKKKRGRPF

SEQ ID NO: 302688 - protein, 225 aa, Zea mays
  unsure (1)..(225): unsure at all Xaa locations
  Clone ID: MRT4577_39126C.1.pep
MLAVFDRAVAPSPEGLRQPGAAGGGSAAGLADRFREARPDAVTVNLGGSGVLAYSSSNQNPLLPRLFGAVDGVFCMFQGTIANVAVLKQQYGLSKGANEVSIIIEAYRTLRDRGPYPADQVVRDISGKFAFVLYDCSTKSVFMAAMQLFSYSEDIYLIKGYCYDVQWYPLVLTGQLIGXRVHKPHXDPDGNVPFYWGVDTGGRLVVSDDAELVKSACGKSCAPFP

SEQ ID NO: 302689 - protein, 99 aa, Zea mays
  Clone ID: MRT4577_39127C.1.pep
GAGTSNRVTWPGLQVIARKSAEQFTAGPFVYDAVVAQVSRHPAHATGSSSKVRMHGMVYHARPREVVHTCLYIRCGRTEGLTFEPIPFISFLEETGGCF

SEQ ID NO: 302690 - protein, 247 aa, Zea mays
  Clone ID: MRT4577_39128C.1.pep
MLAVFDRAVAPSPEGLRQPGAAGGGSAAGLADRFREARPDAVTVNLGGSGALAFSSSNQNPLLPRLFGAVDGVFCMFQGTIANVAVLKQQYGLSKGANEVSIIIEAYRTLRDRGPYPADQVVRDISGKFAFVLYDCSTKSVFMAADPDGNVPFYWGVDTDGRLVVSDDAELVKSACGKSCAPFPKGFFFTTSGGLRSYEHPMHEVKPVPRVDSKGEVCGTTYTVDATARKETSIPRVGSAADWSSQY

SEQ ID NO: 302691 - protein, 104 aa, Zea mays
  Clone ID: MRT4577_39129C.1.pep
PKYLNQRAEQTVLTTGDCSRRDIWSKTIETGTPQGYNEHNCKDTHRVTAIVITQERLMSGTMLFQLRQANIWVHVHVHIVLTNSIACICTESPLMQKVLPEIII

SEQ ID NO: 302692 - protein, 34 aa, Zea mays
  unsure (1)..(34): unsure at all Xaa locations
  Clone ID: MRT4577_3912C.1.pep
ASSCLVXYLPSRSRLASRVQVEWNAWCTANQIKL

SEQ ID NO: 302693 - protein, 44 aa, Zea mays
  Clone ID: MRT4577_39130C.1.pep
PIVFPTVGPNFCSIRWEFQSFVGGAPLFCNCPRLVDSFHPLKNC

SEQ ID NO: 302694 - protein, 48 aa, Zea mays
  Clone ID: MRT4577_39131C.1.pep
TGTAAASASAIWWMWNGDRFRSVVGTWADLFYARTRSVTTDQCCVPHS

SEQ ID NO: 302695 - protein, 100 aa, Zea mays
  Clone ID: MRT4577_39132C.1.pep
VINVEVPELRATACAVSAGVTVLATSRDDDLSVVRRHQRLFQDLLGLTRFCTAQWPLSGPHSRDDHLNLSDHTGDHRADHMEHGTMERAVLCRWTSPDCD

SEQ ID NO: 302696 - protein, 65 aa, Zea mays
  Clone ID: MRT4577_39133C.1.pep
TTHVCYEELIERQIFYGAQTGKSSVDSDFQYEYGTEKAPPIEPLDFRGGGSRALSMSTIWSYFNF

SEQ ID NO: 302697 - protein, 54 aa, Zea mays
  Clone ID: MRT4577_39134C.1.pep
ACSNRNVATERPRGWSGVASRRCLFPRVVHASSQDSTHSQVPTCRTSTAVAAAL

SEQ ID NO: 302698 - protein, 212 aa, Zea mays
  unsure (1)..(212): unsure at all Xaa locations
  Clone ID: MRT4577_39135C.1.pep
MSLMSPFPRMDLSKMDPATLTLLGAAGCVMLTMHFTVQLVSQHLFYWKNPKEQKARLIIVLMAPLYIISSFVGLLDIQGSKTFFTFLDAVKECYEALVIAKFMALMYSYLNISISKNIVPDEIKGRVLLHSFPVSVFXYLSYSLRTIRSKSPRNSQEKPLSSSRLVEPRNVRLEHKTLKLLKYWTXQFVIVRPVCSILFFFSNNQKSCVSLY

SEQ ID NO: 302699 - protein, 52 aa, Zea mays
  Clone ID: MRT4577_39136C.1.pep
SVVAGETRYADYLAVAVACIYRALVALFGVVLQLTGSGFTGKTLVLPWLFPF

SEQ ID NO: 302700 - protein, 322 aa, Zea mays
  Clone ID: MRT4577_39137C.1.pep
MLPSMSSSNESFENNHKFSRFAPTEELTSGFYDSFLSALKDLHHEIDLNNEKIALRSKYTVICIYAKQFHDLRKMCCPSELAYISSISRCKNWNAQGGKSKAFFAKSMDDRFIIKQIKKTEFDSFLKFGLEYFKHFGASEVSSNPTCLAKILGIYQVKETRNGKETRVNFMVMENLLFGHNILRRYDLKGALFSRYIPDSENSEKVLLDQNFIEDMRTMPIYIQGKTKNLMERAIWNDTSFLSNMNVMDYSLLVGVDKEKKELVFGIIDYLRQYTWDKQLESWVKTSLVVPKNLSPTVILPREYKMRFRAFMSQYFLSVPDA

SEQ ID NO: 302701 - protein, 273 aa, Zea mays
  unsure (1)..(273): unsure at all Xaa locations
  Clone ID: MRT4577_39138C.1.pep
ERPHLLRIKYYGNFDRPLGRFLRDQLFDQSKLCQSCELPPEAHVYCYVHPQGSLTISPRKLSIKLPGNGENDGRIWMWHRCLRCPRVNGLPPATKRVVMSDAAWGLSFGKFLELSFSNHAAASRVASCGHSLHRDCLRFYGFGEMVACFRYASIRVHSVYLPPPKLDFTSEHQEWVEEEAKEVDDSAELLFSEVLNALHKIXEEGXTGSFDGNLKILELRRNIGELEEILVAEKTDFMESLKNLLKTDMRKEQPFIDILDVNKLRRHLLFLCY

SEQ ID NO: 302702 - protein, 86 aa, Zea mays
  Clone ID: MRT4577_39139C.1.pep
KACLKQGAPKNFFPKPFKSPGVFKNQNYVLLRANGVGDPKGKLLPPPGQRGFLKNFFPPTKKPLKRKKGGLIPKKGLAPNLGSKNV

SEQ ID NO: 302703 - protein, 171 aa, Zea mays
  Clone ID: MRT4577_3913C.1.pep
MANPRVFFDMTVGGAPAGRIVMELYANEVPRTAENFRALCTGEKGVGKSGKPLHYKGSTFHRVIPDFMCQGGDFTRGNGTGGESIYGEKFPDEKFVRKHTGPGVLSMANAGPNTNGSQFFICTVPTPWLDGKHVVFGQVVEGMDVVKAIEKVGSRSGSTAKEVKIANCGQI

SEQ ID NO: 302704 - protein, 59 aa, Zea mays
  Clone ID: MRT4577_39140C.1.pep
NCFHWIWMTLSVAASRGEEQSREVWCIHQSLLISFFLSRVIASWKTDKARSAWLSLTVN

SEQ ID NO: 302705 - protein, 82 aa, Zea mays
  unsure (1)..(82): unsure at all Xaa locations
  Clone ID: MRT4577_39141C.1.pep
KESPKRDPTRIFHGHDSTVEDIQICPSSAHEFCNVGDHACLILRDTRTDTAPAVNVEKAHSGDVHXVDCNPLDVNYNLTVSA

SEQ ID NO: 302706 - protein, 71 aa, Zea mays
  Clone ID: MRT4577_39142C.1.pep
ITLASPCRLSFSLSQVSQLASVQLGVIQSVSVQPEVVRAERITRRRVGVVWVVRMDTAVIVALMYLCVLFS

SEQ ID NO: 302707 - protein, 88 aa, Zea mays
  Clone ID: MRT4577_39143C.1.pep
KNGALVQDPKKKGPGGQGPNPKPPVGGPAPKNSLGEPGRKKQFKKLGKDGNFLKTFLPGKLQKTPSLGDPGEEPDQGGLGGGLGRFQP

SEQ ID NO: 302708 - protein, 225 aa, Zea mays
  Clone ID: MRT4577_39144C.1.pep
MDGQRRQQWPRSRSGAAAARLLLLLLLAVSLGGHGDHGAAAAGVAPAAGNGMTELQKHVAFFDRNHDGIITFDETYQGLQDVGVGAVTAKASAAFINGALGPKTRPDNSNSSSMDIYVENIQKGKHGSDTGAYDAQGRFVPAKLDEMFTKHAKTVPNALTKDELDEMLKDNREKMDVAGWLGAKSEWEMLYKLAKDKDGRLPKDTVRTVYDGSLFYQLAAQGKKG

SEQ ID NO: 302709 - protein, 48 aa, Zea mays
  Clone ID: MRT4577_39145C.1.pep
QPGWNLNDIYPFFSCLTYTYLVSEANRFAFLYLYLISLALSVLSHTSV

SEQ ID NO: 302710 - protein, 74 aa, Zea mays
  Clone ID: MRT4577_39146C.1.pep
MKMVIGLVVCLALSAGSAFAMQMPCPCAGLQGLYRACARLTTIIGARGLYPYPEVLRQSQCNPLAVGPYYSWCW

SEQ ID NO: 302711 - protein, 86 aa, Zea mays
  unsure (1)..(86): unsure at all Xaa locations
  Clone ID: MRT4577_39147C.1.pep
MATTGAXSLLKSFFAGSRLHWVTRTTTPSSEAGATPRSGSGPIRTSICSXHPALXLTFFRLSPITAYIVFPXMTLRYMTDMITHAN

SEQ ID NO: 302712 - protein, 113 aa, Zea mays
  unsure (1)..(113): unsure at all Xaa locations
  Clone ID: MRT4577_39148C.1.pep
GMIKPVQIDEIFYMPDEMPVFMGVGHEIPEPFGXSSPLPYSVSEEELMGELNALGFDMEFDSAAVPSYFQPDFGFDVAPNFPVAPSPPPMVPPGGLPEDXLGFPPVPRASLSR

SEQ ID NO: 302713 - protein, 34 aa, Zea mays
  Clone ID: MRT4577_39149C.1.pep
KAAVRSEFRVTTVRTSSVAEEVGSRIVLSIRSRR

SEQ ID NO: 302714 - protein, 47 aa, Zea mays
  Clone ID: MRT4577_3914C.1.pep
IFPNNKAFFSKKKKKKKKKKKKKKKKKKKKKKKKKKKKKKKKNQQHR

SEQ ID NO: 302715 - protein, 158 aa, Zea mays
  unsure (1)..(158): unsure at all Xaa locations
  Clone ID: MRT4577_39150C.1.pep
SPPGQPANRNWRRNGPRPPKKKRGQGQRAWKNQGGAPPRTRTRPPHHGEGKGPGEGPPPIQHGTEKKRKETGKKFPKLGPPPGNMVILESNRRKVKPTPQXGGANGXGTPPKAXPKGGNEGAAKAHNWGEERNKGRTGQILIFFLFYNFFFFFFFFFF

SEQ ID NO: 302716 - protein, 52 aa, Zea mays
  Clone ID: MRT4577_39151C.1.pep
NCPAPSHSTPYFFPQLMSTSRTCIVSLMWCTGVESLSNPRNETDERQPTRSP

SEQ ID NO: 302717 - protein, 98 aa, Zea mays
  unsure (1)..(98): unsure at all Xaa locations
  Clone ID: MRT4577_39152C.1.pep
VDVHIDSLKLWVGQSKAKAEKNQAIXHSENENSCQLCRVEKLTFEPPPMYCSPCGARIKRNAPYYAVGTGDTRHYLCIPCYNESRGETIEVEGQTFPK

SEQ ID NO: 302718 - protein, 60 aa, Zea mays
  Clone ID: MRT4577_39153C.1.pep
PLLLSGPLTPDKFFFYQKTGNLEFAIVLVPFPTYLAGNPPRALGIRTQTSKCVPLQVTLN

SEQ ID NO: 302719 - protein, 107 aa, Zea mays
  Clone ID: MRT4577_39154C.1.pep
ICPVGGGEASALVSWRCFFCIRTPMFQSREQHVLFRLWFCKRFGGLEFTFKRVARLCWYRMGNLLVLSGGIIAGPMYYSYEGSFFSFGSSPRLGSNEGYSSFFLKEA

SEQ ID NO: 302720 - protein, 262 aa, Zea mays
  Clone ID: MRT4577_39155C.1.pep
MRSAAPPCQLPSPNPDASPPPSPMTPRAPQLRHHPPHLLLAEAVASWHPFHKKPCLTDRSTAPPSSARLPDAETPTPAPSGGGSGGSFRWFGLRKRRRRGPGSRSVSGRSSDRRRSGTCSDFHFTCGAGGGGGGGATDSSGEMWASDVGEVRMRDVPMATEFGPSPVGGVGVWSGGVGAAAEAAVTDSEYGSEPGYRGDVELGYGDEIDEEEEDGRQQLFWGGVIGDMNKMKIDGDNNFGEQKSHHRCRRKKHDVRILDSLS

SEQ ID NO: 302721 - protein, 70 aa, Zea mays
  Clone ID: MRT4577_39156C.1.pep
HKLLGLVWNAMIQPMASYVCITFMVFKGTKPAILRYGHNTNCQPVYVSHKHRCRTEQEPFCFCCPSPNCD

SEQ ID NO: 302722 - protein, 59 aa, Zea mays
  Clone ID: MRT4577_39157C.1.pep
TIKVAVEAITHYGMRFKPATFHDLREPLLAKVVKEIDGAKKKNEDAWSQYGLLVTCSNS

SEQ ID NO: 302723 - protein, 130 aa, Zea mays
  unsure (1)..(130): unsure at all Xaa locations
  Clone ID: MRT4577_39158C.1.pep
NQKKGPTQQFFRPGIKPGGGEPKGNQTKRNQWLKGGPFGSKPTGGNGGGKNPPPKTQRGPVYPFFRLSPHPWPXKPKGPPGKNXAPTLFFSQRKYGGDLRAPPPPGPPPVGGEQSEPPPPQEKKKRGGFK

SEQ ID NO: 302724 - protein, 91 aa, Zea mays
  unsure (1)..(91): unsure at all Xaa locations
  Clone ID: MRT4577_39159C.1.pep
RQQQQHRPAXSQQEXXNPGAXQQQQGQASNPQAQANGAADQQQQQEQQXRPAXRQXAXENXAADRQQQQQXXXSPHEEGKAXTYXQQQGXQ

SEQ ID NO: 302725 - protein, 59 aa, Zea mays
  Clone ID: MRT4577_3915C.1.pep
ERCIYVETPCHYKPKIAYLLTKSCYIVPLQLLMTVVRDRNSMLRSVNHVLSRLIHYWIN

SEQ ID NO: 302726 - protein, 86 aa, Zea mays
  Clone ID: MRT4577_39160C.1.pep
FHSVWEVTTTKLCANTTQAMPCMCARTTQDKQIVNLAWNQGARNQSCRVIHLVSKNDIRSSPTSFDKKETNMQDSRSNESCTSSVT

SEQ ID NO: 302727 - protein, 56 aa, Zea mays
  Clone ID: MRT4577_39161C.1.pep
FGPKSHDHNVNLTILNFQRHLLRPPNNVTPPGYITQRKTKGVGRELSRLVGVGFFW

SEQ ID NO: 302728 - protein, 120 aa, Zea mays
  Clone ID: MRT4577_39162C.1.pep
REDTGEREREREDGRREAPARRGPRCFCCCGGGGHRIARAPRRASEGWGAGGRAAGRARFAGGASGSSGDFSFISRRGRGVSRRRDRERREGSVGAVESSSEYPPSGRASTRARGGGRRG

SEQ ID NO: 302729 - protein, 443 aa, Zea mays
  Clone ID: MRT4577_39163C.1.pep
MPVGELAARPGGAMAAAAVGGDDAVVMQLAAAEGEETVITVNCPDQAGLGCDLCRTILEFGLRITRGDVSTDGHWCFVVFWVVPRSSSIRIRWASLKNRLMSMCPSSYSIPFYPDMSQPGPSQFYLLKLLSPDRKGLLHDVTHILSDLELITHRVKVSTTPDGRVVDLFFITDGMELLHKKERQEETCSTLIAALGPSISCEVLSAEGFQQGFSSLAPKIAEELFRVELAGDGEMCSSSLISAELKKVQTATINFDNSLSPAHTLVQIICADQKGLIYDILRTMKDCNIQIFYGRFRSDKKGGRPGSKGCREVDLFVKQVDGKKVTDPEKQDALRARLRSEMLHPLRVMVVSRGPDTELLVANPVELCGKGRPRVFYDATLALKALGVCIFSAEIGRQAASERQWEVYRFLLDDSREFPLTNSLANRNRVVDRVRKTLMGCYN

SEQ ID NO: 302730 - protein, 516 aa, Zea mays
  Clone ID: MRT4577_39164C.1.pep
MRDEKPPPAAAAAAPAPPRVTHRARIVRPQPQNPVFKRCGTLVERRGQSRGPPPDRAGAGGVAAPARPSGGEGAGMVLGGGMAAAAVGGDDAVVMQLGAAEGEETVVTVNCPDQTGLGCDLCRTILEFGLRITRADVSTDGHWCFVVFWVVPRSSSIKVRWASLKNRLMSMCPSSYSIPFFYRDVSQPEPGPLQFYLLKLMSPDRKGLLHDVTHILSDLELIIHRVKVSTTPDGRVVDLFFITDGMELLHRKERQEETCSALTATLGPSISCEVVPAEGFQQGFSSLPPEIAEELFRAELADTDSEVCSSPLSAELRKVRTTATVNFDNSLSPAHTLVQIVCADQKGLIYDILRTMKDCNIQIFYGRFRSDKKGSASKGSSGCREVDLFVKQVDGKKVTDPAKQDALRSRLRSETLHPLRVMVVGRGPDTELLVANPVEASGKGRPRVFYDATLALKALGICIFSAEIGRQAASERHWEVYRFLLDDSKEFPLASSLANRNCVVDRARKTLMGCYN

SEQ ID NO: 302731 - protein, 255 aa, Zea mays
  unsure (1)..(255): unsure at all Xaa locations
  Clone ID: MRT4577_39165C.1.pep
IRHEAVALWDLSKRALVTRVKSPEKCLLYSMRMWGDSVREFLVASGTILNEILIWXIGTASSGILHVHLGRLKEHEGSIFRIAWSSDGSKFMSVSDDRSARVWTLSFKSQGFANHTASHDNVEIIPKLTLFGHSARIWDCYVSDSMVITAGEDCTCCIWGMDGKLIKMFKEHIGRGIWRCLFDPRSLLVVTAGFDSAIKVHHLCNSIFHDIVDDKKVSGLNYDSEIFVVSSPSVSGQYGPLDRCDVLLYGFTNYM

SEQ ID NO: 302732 - protein, 38 aa, Zea mays
  Clone ID: MRT4577_39166C.1.pep
HSQHAPRQLPDAAILVLIEKRLSLRERRCMVTVGSTAR

SEQ ID NO: 302733 - protein, 977 aa, Zea mays
  unsure (1)..(977): unsure at all Xaa locations
  Clone ID: MRT4577_39167C.1.pep
METIAVAGSLSLEAVALALASAIVAHGEVGQLISSDELPDNYPNLELDDVAGKKILRLRVPAKKSSWPDTSLQAAGLPFVLPHKMKSVDRPPANPKRITIESSQEFFSVEIPRPASIGVPPNTKHSDQCPAPVEKPSVIYEANEQTGSGNDDDDFMTPTKKRNAAGSHMNILRKTCTKRPKVLETPRQKLNVRCNPQDVIITIKILNERQRQAVARKGFSNILDMTLDALGSRSHLRWLMDKLDHKDMTIRPGVGKELKITKETVHLILGLPNAGGGKPLGIDEAVAGNNLRAELGLSKDEFVVASLQDRLRKGNDDDLSIRCFFLILFNRLLFPTSSWGISNHEVLLTEEMDRFHEIDWCHLIYNDLCEAAQKWHTRSTSNVSTTIYGCSVVILLYYLDHLHDAAAPPNKRGTPRIKFFDKNIIQALTKADKRKPRQSGEPFGHCEFRSFSETCYSAVPSVQFQSEHRDRTNIFDVPRPDPCGHHTIHIQLPLIKDMLSSKIKQLQPRDRPKFIEKFVEYDSEVGKACSVIKSTLTKMVVKQYELADTFAELIDDVLRAXLATQTXAEAPQTDKPPDISQHMSXRNRPMRVPRIPXMTMPSQPNTELTGTQFEEIHEKQQQMRRAFEGCPDDLETNITANAEDQGGDIGPSHDTPTFTGPLFDQTPSGHAADGEETHSLHTTHDHSVPPLTELDCARSLRDFLCSSKADPNRNIIEFDECIGNCLDIQQSFADGMCLDTVFMQCFIMGFRHDKNNICSSIDKDRLVLDVNVGILLNFEEHERYSKSPQIFDQTVLDAYLDKTLPQLDNFGDYKTIMVPILHMGHWTLYVINIQLRCIHILDSNPYGPELGGTSWKMFHYSLKDIGTRKLPWARVIMNRLNKSLQQVRPNSRIPKFGNFPIDMPPMCPTMIAGSNDCGFFVMRYIQYYDHTDGSIKQFIKRENSGDLRSLALHYLTFHSKNKCLPLPLEIQKFKFGR

SEQ ID NO: 302734 - protein, 124 aa, Zea mays
  Clone ID: MRT4577_39168C.1.pep
MQGVIASKATAKIASRTQKMHLTMDRMRQVKANTLQRKFDSHRFNNGSRQCPLTQGDDRATEEMTSIEENKTWAHVDHPPSHHPIDMKWVYKLKRNEQASSSSTRPRLSACRQGVDPAVGNRKR

SEQ ID NO: 302735 - protein, 102 aa, Zea mays
  Clone ID: MRT4577_39169C.1.pep
MSKMAEEKAAAVGGLGGAGAADAAQQQQLAAGEAAAARVRPVETLLRAAPLGLCVAAMTVMLRNQQSNEYGAVGARQQGRRDRRLPALKPLEEGLVANLCYA

SEQ ID NO: 302736 - protein, 139 aa, Zea mays
  unsure (1)..(139): unsure at all Xaa locations
  Clone ID: MRT4577_39170C.1.pep
RRRPALADTAPPAAKRPXKRXXESGRAAXXNXGKEXGRXXXNXDXXDQNRXXXXAPDXXXXQRSXGGXXXXDXKXDXKXXPKKXTXXKAXEEXXXKSKXEXSIXGKKXXXQKRRAXXKDXDRXKXXXAKNKRGXAXRQE

SEQ ID NO: 302737 - protein, 57 aa, Zea mays
  Clone ID: MRT4577_39171C.1.pep
LGNYIVCIKKKKKKKKKKKKKKKKKKKKKKKKKKKKKKKKKKKKKKKKKKKKGGGVF

SEQ ID NO: 302738 - protein, 274 aa, Zea mays
  Clone ID: MRT4577_39172C.1.pep
MTATRRDLTAGLICSPLPINALYHPCLPASSPERAGRTWLSALSASTSSSSWREKAEDNTKMSKMAEEKAAAVGGLGGAGAADAAQQQQLAAGEAAAARVRPVETLLRAAPLGLCVAAMTVMLRNQQSNEYGAVAYSDLGGFKYLVYANGLCAAYSLVSAFYTAVPRPATVSRSWLVFLLDQVFTYLILAAGAAAAELLYLAYNGDKEVTWSEACGVFGSFCRQARTSVAITFGTVLCFILLSLISSYRLFSAYEAPPSSALGSKGVEIAAYPR

SEQ ID NO: 302739 - protein, 60 aa, Zea mays
  Clone ID: MRT4577_39174C.1.pep
YPLILDILTIKYHIFNPTFHIYNTWQFQDFYTTPLHYQTFIQCKNTNSCNNFLLILFIYY

SEQ ID NO: 302740 - protein, 73 aa, Zea mays
  Clone ID: MRT4577_39175C.1.pep
PLMRLPIIAIMHWFLLTLWWVVHGAREEPMGIYAYSSWPPGSLNLNKPASTGNAEPYTTNAVHSRMSIALHTH

SEQ ID NO: 302741 - protein, 198 aa, Zea mays
  Clone ID: MRT4577_39176C.1.pep
TPACAHASVKSAFTNIFVNGLGEVDRVSIDRSSDPGAVLIQLARDTEHLALFERRNFSPVLRRWHPAPVAVAAVTLHGCFGVVLRQYLAKVTILTEELVRVLHSASRLEKALAQMTAEDAADCADGRAKGIVGDMEPFEVESVVMGLLKAWMDDKLGLGRDCLLRARDTESWIPKSKEETVRRVGMELMKLAKLTIDE

SEQ ID NO: 302742 - protein, 40 aa, Zea mays
  Clone ID: MRT4577_39177C.1.pep
CVSYVRAKMLFKLSGGFGACIVCVLHSNINNYPWLVKDKA

SEQ ID NO: 302743 - protein, 103 aa, Zea mays
  Clone ID: MRT4577_39178C.1.pep
TGNIRRGVFENRRLGLRVPPRWPRVKHGGAKTAAEFRCFPCFQRRLVSSDPGTLLGKRTQLQHTSPPKIDLLATTSSALTLATRPMERTISSRWRCFGVTSGV

SEQ ID NO: 302744 - protein, 80 aa, Zea mays
  Clone ID: MRT4577_39179C.1.pep
MCLCCLLSSAHIAGSPTPDVSGEFELLQTLKELLGDASTLGARQRAAKDAFSIMSDGVVNRVWDLVCRLGIDSQTNTLSS

SEQ ID NO: 302745 - protein, 35 aa, Zea mays
  Clone ID: MRT4577_3917C.1.pep
ALSAPPSRPRCQCAPFVGCGFCGRPLPVGETKRMR

SEQ ID NO: 302746 - protein, 71 aa, Zea mays
  Clone ID: MRT4577_39180C.1.pep
INDCRYHSPRNLPDLISTLSCSDYDKADAQFASQPISSPASQPSLSRQTIISKPMFMRGGHEFRPAQATAS

SEQ ID NO: 302747 - protein, 104 aa, Zea mays
  Clone ID: MRT4577_39181C.1.pep
KLQSERLSLLFSSINTPSDKAPSHMCHVFSPTMMENYEENFTIKLKQPYNFSGRIRYTFASFWSRNRTFRALEAALQSYEATLEAEKQVPYIFELYLSLSSRSN

SEQ ID NO: 302748 - protein, 87 aa, Zea mays
  Clone ID: MRT4577_39182C.1.pep
AGLPYHPAHARTTRAAAYSAGETSTEEQHRDGRLPRGRAGGPELPQTTTAPIALRAPPPLSLPASVRRVGRGNAGMDSGLDDELEDA

SEQ ID NO: 302749 - protein, 187 aa, Zea mays
  Clone ID: MRT4577_39183C.1.pep
VAGGVGAAVGNPADVAMVRMQADGRLPLAERRNYRGVGDAIGRMARDEGVRSLWRGSSLTVNRAMIVTASQLATYDQAKEAILARRGPGADGLATHVAASFTAGIVAAAASNPVDVVKTRMMNMKVAPGAPPPYAGAVDCALKTVRSEGPMALYKGFIPTVMRQGPFTVVLFVTLEQVRKVFKGVEF

SEQ ID NO: 302750 - protein, 290 aa, Zea mays
  unsure (1)..(290): unsure at all Xaa locations
  Clone ID: MRT4577_39184C.1.pep
PPWRRSRRCARRSPSTPGATPSRSRTTTTTTXAPPRKPGPLAVGAQILRSEGAAGLFSGVSATMLRQTLYSTTRMGLYDILKTRWARENGGVLPLHRKILAGLVAGGVGAAVGNPADVAMVRMQADGRLPLAERRNYRGVGDAIGRMARDEGVRSLWRGSSLTVNRAMIVTASQLATYDQAKEAILARRGPGADGLATHVAASFTAGIVAAAASNPVDVVKTRMMNMKVAPGAPPPYAGAVDCALKTVRSEGPMALYKGFIPTVMRQGPFTVVLFVTLEQVRKVFKGVEF

SEQ ID NO: 302751 - protein, 151 aa, Zea mays
  unsure (1)..(151): unsure at all Xaa locations
  Clone ID: MRT4577_39185C.1.pep
ARVRNVLNGGSHVFFRXAFQDSGLXPCEAPTFYQAMRQGAEVYQKLKALAKKTYGQSAGNVFDEGGVAPDIQTAEEALDLITKAIEEAGYTGKINIGIDVASSEFYKADEKKCDLDFNNPDSDKSKWITSEQLIDMYKSLPEKYPIVNIDD

SEQ ID NO: 302752 - protein, 35 aa, Zea mays
  Clone ID: MRT4577_39186C.1.pep
MGVHVTPPVHLPPPSSPYPSQPPRPQPHPQPHPAR

SEQ ID NO: 302753 - protein, 115 aa, Zea mays
  Clone ID: MRT4577_39187C.1.pep
STPSCPPHHLRRPLQWRRPGSSSVLPPTGDRQIGRLLTAAERRASASSGWRSRSLRSRGNARMGGVRATTCGRTENLYQVGQKEGEQSQHIDGGLLGLSRRALPNNWLKEFGEGL

SEQ ID NO: 302754 - protein, 53 aa, Zea mays
  Clone ID: MRT4577_39188C.1.pep
LKFSFPFSIPNSKFNYSNSNLYSCFKFQIFQMSQLRSKCEYTPYYFKYYYFIL

SEQ ID NO: 302755 - protein, 69 aa, Zea mays
  Clone ID: MRT4577_39189C.1.pep
PPGSALHYGQLSCHRGCLSPSCTCCCALSILFPHYCVTLAIPSERGPVLCAMDVLLSPLKGLILDRLLP

SEQ ID NO: 302756 - protein, 160 aa, Zea mays
  unsure (1)..(160): unsure at all Xaa locations
  Clone ID: MRT4577_3918C.1.pep
RTRGRLAMEVRLLASARPITGLNGSGGQSGNFSSLLVPAATVGALGYGYMWWKGLSFSDLMYVTKQNMSNAVSSMTKHLDQVSAALAATKKHLTQRIENLDGKMDEQKAISSEIKNEVIDARDKLTDIGYNLNSLQQLAWGLDGRXNAIETKQDFACAGV

SEQ ID NO: 302757 - protein, 71 aa, Zea mays
  Clone ID: MRT4577_39190C.1.pep
FYTSFSSLLDNIQVVTSRVTSLFSKEIWKTTKTVAVIVFFFFACDRFNVFVRRVYVSKCFEWCFRLLGLIW

SEQ ID NO: 302758 - protein, 66 aa, Zea mays
  Clone ID: MRT4577_39191C.1.pep
YKSNPCITPVVARLNIQDALVLMSPRLAPVITTSDLTWNKADTRSLHYDHLTSTTRFWVKTSISDT

SEQ ID NO: 302759 - protein, 133 aa, Zea mays
  Clone ID: MRT4577_39192C.1.pep
LRNPQNTSALCTTQCSPAKRITAGLLSVVLVALMLCQLCTTASANQKDIHVLQQSRRIHRRQQPRNREPRGLAEHEAYDNPVSCLRTRERDEGEHTPSRTLITWPHEQLQPKPLTLHLPPSHTLTPTQKQTTP

SEQ ID NO: 302760 - protein, 191 aa, Zea mays
  Clone ID: MRT4577_39193C.1.pep
MRISKSAPDLLKKAVTSVKSKTVALRTKLIILASMRRRLAMVGAMSRQIHELVATDSREKPARVEHRSKALTTPKAMTKGEDSAGDHDATAPPGLFDVAMFEEGYHGYPDWIDSLFEDGYCHRDEEDDDDDDDDHDDLDILDTPEEPSVIDIIRSKREVEGLEFNMDHDIDEACDMFIRRFRSRINMNRSV

SEQ ID NO: 302761 - protein, 531 aa, Zea mays
  Clone ID: MRT4577_39194C.1.pep
IRHEAPAPVEAEQRTSLVVEADQAAQGRLPPSSSKALVFPARPGYGTLGRRCRVRANHLFVQVADKEIYHYDVVISPESQSRKRNRWILNELVKLHKDYLNGRLPVYDGRKGLFTAGPLPFKTKEFVLELTNPERANQGAKEYSVTIKDAAKLDLYSLRQFLAGRQRELPQDTVQALDIAMRECPTEKYVSISRSFFSQSFGHGGDIGSGVECWRGYYQSLRATQMGLSLNIDISATAFYKAQPILEFAIEYLNIRDTSRRLSDQDRLKLKKVLKGVRVVATHRRDIAIHYKITGITSLPLNSLTFNQDGASVSVVQYFQHQYNYSLKHINWPCLQSGNDSRPTYLPMEVCSILDGQRYSRKLNERQVTSILKMACERPTQREGSILEVVNRNNYGNDHCAKEFGIKVTNELALVDARVLPAPTLKYHDSGREKVCSPSVGQWNMNNKRLIDGVSIQYWACVTFASRLHPNDVRMFCNNLVGACNDMGMQINARPSVDVGQARPDNLETALRNTHRQSAQMLAQTGATRQL

SEQ ID NO: 302762 - protein, 98 aa, Zea mays
  Clone ID: MRT4577_39196C.1.pep
LIFFFLIHAALFFNGTCLNIHVCLYRFNQDGASVSVVQYFKHQYNYSLKHINWPCLQSGNDSRPTYLPMEVCSILDGQRYSRKLNERQVTSILKMACE

SEQ ID NO: 302763 - protein, 185 aa, Zea mays
  Clone ID: MRT4577_39197C.1.pep
MGMDAGGGKLPYSYAGQQDGGKLVKSVSRVEPRRFGLGLVAGFLLVTCAYFSTAKFDAIQIAMTSRPVSSNAAGVAAAADTSNASRQGLDLGNKGPGAMSMAEEGSEAEALEKDGGKASSPSGPGVPAALLPPVSSEEAANSTQESGGLEDEELQVQDAVASGSGRSKDSAATANVSSPSVVHSH

SEQ ID NO: 302764 - protein, 555 aa, Zea mays
  Clone ID: MRT4577_39198C.1.pep
MMGWPFLDQRRPSFKRRQQQRPWWVRLALSLLLALACVLLLAVLLGSPDPGASPSTSAASSGSETTSSPLLRQRTYLEGITDALNMTDEMLSARSFSRQLMDQIYLAKTYVVVAKEANNLQFVAELSAQVRRAQSILAHAAAYGGTVMEQEAEKAIRDMSVLLFQAQQLRYDSSITIMKLKGQIQSLEEKSKVEVEKSTKYGQIAAEELPKGLYCLGVRLTMEWFKNPELQRKFSDRSPAVQSNLRDNSLYHFCVFSDNILAVSVVVNSTAINSRHPDKVVFHLVTDELNYAPMKAWFGMNDYRGVTVEIQKVEDFTWLNASYVPVLKQLQNAATQKFYFSGSGSRGTPIKFRNPKYLSMLNHLRFYIPEIYPELQKVVFLDDDIVVQKDLSELFTINLNGNVMGAVETCMETFHRFHKYLNHSHPLIRAHFDPDACGWAFGMNVLDLVEWRNKNVTGIYHYWQERNADHTLWKLGSLPPGLLAFYGLVEALDPKWHVLGLGYTNVDFATIKEGAVLHYNGNMKPWLKIGMEKYKSFWDNYVDYSHPLIQQCFMR

SEQ ID NO: 302765 - protein, 98 aa, Zea mays
  unsure (1)..(98): unsure at all Xaa locations
  Clone ID: MRT4577_39199C.1.pep
PQCCQQLIQVDPLLRLHGVAALGPPVSLHHPILIPFSXLGSASRGSSSTQRQCVPCYQQFPGPSAALVGVPQLLPFVPVVLPXPTASFQXHIIGGALF

SEQ ID NO: 302766 - protein, 40 aa, Zea mays
  Clone ID: MRT4577_3919C.1.pep
GSTKKHHFFLRINLKAILTGETGFMDQQFMLVYAWIMFDL

SEQ ID NO: 302767 - protein, 85 aa, Zea mays
  unsure (1)..(85): unsure at all Xaa locations
  Clone ID: MRT4577_391C.1.pep
LGVQHQLGACARLLQLAGCLRMHHAATEGEQSANARASLMNVSVLGLLTVQQSPVIRXFXLIDQKNNQFSLXMPQETIIGTLIKC

SEQ ID NO: 302768 - protein, 143 aa, Zea mays
  Clone ID: MRT4577_39200C.1.pep
CGYESSRFLSTGSNRPCIKPCAAPLGHHRHGQTTYGEGEIPLPLPNSRQRRARIAATGREGLHRVSVVFRLPSQWERTTGWSAISRRPRGAAVEPRAPVAGTTCVATPVRSRESEDHPGTWNLKSQVKTRYCRMMLMEDAAMS

SEQ ID NO: 302769 - protein, 82 aa, Zea mays
  Clone ID: MRT4577_39201C.1.pep
FPSKLAKLSCICCAVALALRQTSTPYVCLPPQAIGLGENKTSVRCQQEWTSNNYCKGIHHTPWKQVSLAPGRGWPHGHMHFV

SEQ ID NO: 302770 - protein, 46 aa, Zea mays
  Clone ID: MRT4577_39202C.1.pep
TFFTRSAKKDPKIEEIVSAPRPEENFIHSTLMGFPTKLNQKSLFCW

SEQ ID NO: 302771 - protein, 61 aa, Zea mays
  Clone ID: MRT4577_39203C.1.pep
LEGGGVHKMYLNKTTVYDLRKRWPTPGMAARCPVAGQPPKKRKRERHTRKDTYGTINTTKN

SEQ ID NO: 302772 - protein, 196 aa, Zea mays
  Clone ID: MRT4577_39204C.1.pep
SYPLNCTGVFRDAKCGGSRASPTRRLVFLPATGRNFPPHVLFPSQRSCPWRRLVSGGISRRRSRSWDRGDHSGRRCLLAIIGQALCALLEAQCRENESQPGSVILVVFDSIDASRSKPAKVIASSSTRSGSFLHFLSHATDMNPKCWGTYRIIPFFHVTASNVGLFQFFLVLNLPNLCTQGFSGMQCDRIQYGIHS

SEQ ID NO: 302773 - protein, 59 aa, Zea mays
  unsure (1)..(59): unsure at all Xaa locations
  Clone ID: MRT4577_39205C.1.pep
LYSRIRCSGRKHSSAALHCAALITDSLSLLPCTINPQSVSLHIATHYVMHITXWPYLAV

SEQ ID NO: 302774 - protein, 231 aa, Zea mays
  unsure (1)..(231): unsure at all Xaa locations
  Clone ID: MRT4577_39206C.1.pep
VFLWHVPATRGPCVLRGCLHPVWYSRRRTLLRALSLSTDYDGTTSLMNQYGNKXYTSLTRGSXAADSLTKEGQSEDRLFTVEIWDTAXGQVKVXTLSAALYRGADSWGLGXDANCMKSFDNXMNNRGEEWLIEASPXDADKXPFWAAVYKGGYKWANSRVRSEKNAQAWCAPKGNIPNFETSAKDRTNAEDALQRIEKNAPKNASDDELNDPHTVRLCERQPFPVIIRVLL

SEQ ID NO: 302775 - protein, 114 aa, Zea mays
  Clone ID: MRT4577_39207C.1.pep
SDRSTGDEVMEENKGHVSSRSVSCSGHGWIAKYTCQLPVNRGSLDDPHFVDQTKSMPRNLTTVFMFQGSAGLVSMSSVNARVGSCDLGSSSPMWHAQASGKKTFLSVSHNQKNI

SEQ ID NO: 302776 - protein, 164 aa, Zea mays
  Clone ID: MRT4577_39208C.1.pep
PTHLLGEGRGFEIAQGRLGPGRLHHCMRLVGAAERGMNLMVERALNRTAFGKRIAQHGSFLSDLAKCRIELEQARLLVLEAADQLDRHGNKKARGILAMAKVAAPNMALKVLDMAMQVHGAAGVSSDTVLSHLWATARTLRIADGPDEVHLGTIAKLELRRSRL

SEQ ID NO: 302777 - protein, 68 aa, Zea mays
  Clone ID: MRT4577_39209C.1.pep
LAMAKVAAPNMALKVLDMAMQVHGAAGVSSDTVLSHLWATARTLRIADGPDEVHLGTIAKLELRRARL

SEQ ID NO: 302778 - protein, 30 aa, Zea mays
  Clone ID: MRT4577_3920C.1.pep
MDGLVVAAGGDVSLHNFSARLWEQLVHFRV

SEQ ID NO: 302779 - protein, 487 aa, Zea mays
  unsure (1)..(487): unsure at all Xaa locations
  Clone ID: MRT4577_39210C.1.pep
MEGSGGPVELWILGAQTCDECDSCFPYIIDAAPSARTSYGGFQDTGIPDGIPQLEEYLSVYCSFAARPWPAANWKFYIAFSLFRGASIYAGVYHRWTMGNASGGERAKFAGRVANAMVDCAWDFINRVNVLQELPSKGSQVLGASWQEFHREEESSTSEKNQGKFVPSEKVMQLRKKLIKFIEDHIYPMEAEFYKHAQSTSRWTIHPEEENLKALAKKEGLWNLFIPLDSAARARKLLFEDHSQISLGSSNNLLLGAGLTNLEYGYLCEIMGRSVWAPQIFNCGAPDTGNMEVLLRYGTKEQQKQWLVPLLEGTIRSGFAMTEPQVASSDATNIECSISRQGDFYVINGRKWWTSGAMDPRCKILILMGKTDFSAPKHKQQSMILVDINTPGVQIKRPLLVFGFDDAPHGHAEITFENVRVPVTNILLGEGRGFEIAQGRLGPGRXHHCMRLVGAAERGMNLMVERALNRTAFGKRXAQHGSFLSDL

SEQ ID NO: 302780 - protein, 131 aa, Zea mays
  unsure (1)..(131): unsure at all Xaa locations
  Clone ID: MRT4577_39211C.1.pep
KNNGHTHISQEKSVPSASXSSPPSMNSKDADDSHXNHPDDSNQSXTGDCDXXGLSPEEGDDDDSTAQHDTSGHEEEDASPPEKHKAGKNRPLESLGLKTPLSDKXAKVGSPSAQKTGVPLNVLTKLSSKLV

SEQ ID NO: 302781 - protein, 46 aa, Zea mays
  Clone ID: MRT4577_39212C.1.pep
QPTRMCPFVTNWCGRSLYTYGAVQHRAVSFLGPSQQHRPGHVPVIE

SEQ ID NO: 302782 - protein, 216 aa, Zea mays
  unsure (1)..(216): unsure at all Xaa locations
  Clone ID: MRT4577_39213C.1.pep
MAQSRRSLPTKVTMGSTTMATRSRSSSQPKVVAXNPPPFPTTPPPSPPHTACPTLFSSPKSPWRADLAPAPRRHKPRARPRPMASPNPAPGSSPFPXSRTTLPRVDVRVPKSPVPLPSCSRMALPSPRPMASPNPSSSPFPXXRTAXPXTTXXTPRXAPXRRPPTXRXTTPXPRGTDNDSAPQRARTNPAKATDKDPEEESDERSSHTRDPTEKQS

SEQ ID NO: 302783 - protein, 41 aa, Zea mays
  Clone ID: MRT4577_39214C.1.pep
CQVLSVTPSTEQWHTCLVRSPYATNTSHENYSEPLVRPYAY

SEQ ID NO: 302784 - protein, 95 aa, Zea mays
  Clone ID: MRT4577_39215C.1.pep
AKWKKKSLGRVKRNRRKMTDRSSTFMGIVDGGDNMDGVRFFYAWAFMVQISHPRSPSAVGMGPIARLGNLDFRTTSIVDSSYIQSFAVRQIRESL

SEQ ID NO: 302785 - protein, 53 aa, Zea mays
  Clone ID: MRT4577_39216C.1.pep
PFPKHWGSQPVYKNLFIFAPPKFVSTPLLNSTSCPNLSHTSIAPPTGSNLNIF

SEQ ID NO: 302786 - protein, 94 aa, Zea mays
  unsure (1)..(94): unsure at all Xaa locations
  Clone ID: MRT4577_39217C.1.pep
STHSSAHASAHSFAHFSASFPSPSCQXVLKRFCAHLVVLGFLFCRSAQSSRLPFSFGPLFGLLLAALGLSAHCSSVPPVSPFLSPAASRSLDST

SEQ ID NO: 302787 - protein, 81 aa, Zea mays
  unsure (1)..(81): unsure at all Xaa locations
  Clone ID: MRT4577_39218C.1.pep
KNPGGVFPQARVCGYPGPFKPLNFGRPGTKGKTGCNVLELGPPPKKTRPGCIFGKKKKKKNKKKKNPKQKKKKKKKKKKXE

SEQ ID NO: 302788 - protein, 95 aa, Zea mays
  unsure (1)..(95): unsure at all Xaa locations
  Clone ID: MRT4577_39219C.1.pep
SSLLVADSVGGANVYSGTVLRLLLPAGRSDANKAGKRGFEDTIXDLQLXCPPTXXEAADDDVANADPADENVKRPAEAPTDDAHISSAPNAQAVG

SEQ ID NO: 302789 - protein, 126 aa, Zea mays
  unsure (1)..(126): unsure at all Xaa locations
  Clone ID: MRT4577_3921C.1.pep
MAPGLRLAYPWGRDVRRGTPVVVTMENPNYSVVEIDGPXXXALRAGVPPMDKGRGRGRSAKQFTWVLLLRAHRAAGCLASLAAVTWALPSAVAKRFRRXAAAEGVGRGRGWLLYRFIKVLLALSLL

SEQ ID NO: 302790 - protein, 129 aa, Zea mays
  Clone ID: MRT4577_39220C.1.pep
SSSEIWGGGGGGGGCIPSHGNLPPCSGITHHLPWLTPALSWDSRGTTEPDPIYYQHRPQVRNPKDATDDPARPTFYEGLALANNPVQSRSFSKVTAARQGNFTWITLRAEFRRVDGDYDKDWDRVLVGF

SEQ ID NO: 302791 - protein, 64 aa, Zea mays
  Clone ID: MRT4577_39221C.1.pep
GKGSKATSFFFQGATSLPGNKGGTTPVCTHTTTTTVPFKPSQRKLLTVLQTTKSDTRFNDGTRP

SEQ ID NO: 302792 - protein, 115 aa, Zea mays
  Clone ID: MRT4577_39222C.1.pep
SPFSPATWTATPRPRPRTSPTTAPPRRTPGQRHACAARARAPSTTRTPTGISMARQTTPTPASASATNATSATGAPSENTGTAGDTCPRAGYTALPAQAPARPRLTGAQSPGRHR

SEQ ID NO: 302793 - protein, 100 aa, Zea mays
  Clone ID: MRT4577_39223C.1.pep
PPPPSPPPPPPPPPPRPCRAPLPPSLRTSSPPLPRSFLVFPSHLLRSGAGGGLFHFHHETRGRRLGERGGDGSCRTRNLPISYVRARLHCTHMVPASPRV

SEQ ID NO: 302794 - protein, 128 aa, Zea mays
  Clone ID: MRT4577_39224C.1.pep
ACWLLPCYQTTNRLGIRTAPLRGWASIMGCPEPTWTLISTRYFFGPTCRRGLFTRGRGKAVACCCEGVPALAFEVLCCLRACAHCSIACFLSLEYCVFVSPASGSEMHERDKNNATRFMPLEPYAPVL

SEQ ID NO: 302795 - protein, 96 aa, Zea mays
  Clone ID: MRT4577_39225C.1.pep
LRAPSIEAAADPPRPNESYPFSSLCGDHSSSSHPPLLPVSHRPLLLPCAAGGIPTPSLLPSLPRTNRIQHHRLPCQSEFGCFKVLGKGLMLSNPIV

SEQ ID NO: 302796 - protein, 56 aa, Zea mays
  Clone ID: MRT4577_39226C.1.pep
VQAPTLIQFLLSLAFRFSVHVTHFRGVGSSPIGSRRRRASGSRRGVATVACLPRAE

SEQ ID NO: 302797 - protein, 264 aa, Zea mays
  Clone ID: MRT4577_39227C.1.pep
QQADIHLACSSLSSSTRLISILLVHSLSTSNRLISILLVHSLSCSNRLISILLVHSLGSTNRLISILLVHSLSSSNSPQSLLYYLPLQPLLYHGHTLSSNKIVTIPYDFRTGNQGIISEPRNNKNTRRPSEVGHLLGSTYLAPLRVLWSRLDLCREILEQTFVQQEGAGIGLGAGNENVQLLLPLLDKRRTVFIQGMVSFLVGAGGFGKLLGVDEQATPLPWKHRRAQHPRRRRAEGSRHRRRPADQSPKTREIKQRIRKGTSD

SEQ ID NO: 302798 - protein, 79 aa, Zea mays
  Clone ID: MRT4577_39228C.1.pep
TSCSFKIQEQWGQVAETKPLINNWGRKCLPLLEKRGSLLFHRYFFEEVLFLVFCEYNTLLTTFWFSTRKARMVLFVTAV

SEQ ID NO: 302799 - protein, 84 aa, Zea mays
  Clone ID: MRT4577_39229C.1.pep
DAPRPCCSFRSHTGFPDSPCSCVLLLSAARPVLGPARRLASPEPLALIMLPVRPYLTSRPTLRCCYSYPTRIALAPDRSKGSTF

SEQ ID NO: 302800 - protein, 98 aa, Zea mays
  Clone ID: MRT4577_3922C.1.pep
FWRRTSRGARKLLGGRLLDDRRPSHLAIGLVKLHGPGDDGATLGGRFARSHLQRELEGFVELRKLWRHDAGRQHLVFVGRPLKLLLGERDHRHRLGAL

SEQ ID NO: 302801 - protein, 67 aa, Zea mays
  unsure (1)..(67): unsure at all Xaa locations
  Clone ID: MRT4577_39230C.1.pep
PSLRWFCGTMPYHRAGDGSSVTLRSHGRNQSMVNNSFCIGAHRRCTFAPCFKSCRRSEYQETXXXXD

SEQ ID NO: 302802 - protein, 60 aa, Zea mays
  Clone ID: MRT4577_39231C.1.pep
VSMRHSVADDEQLQRSVTPGRVVQPVQLRCARRATERGHGHERDGHAHGDTAGRYARVRV

SEQ ID NO: 302803 - protein, 79 aa, Zea mays
  Clone ID: MRT4577_39232C.1.pep
HPPNKDRITLPKVWFPGHFMITAHLRKPFLAPVFHFNNFKGPFFWPKKTIKSPKKKKKSLEIKNKTKKNKKQKKGGARD

SEQ ID NO: 302804 - protein, 102 aa, Zea mays
  Clone ID: MRT4577_39233C.1.pep
RPGMVSTHAIGWPPAPTDKSSFHVNRVYDHPADSDDSLEHTCSRDARPFFDHRTRDNEKTPAYDGDSKTYWSTRLRVRDEDSDELNRGERHTRLRNTLPMAG

SEQ ID NO: 302805 - protein, 38 aa, Zea mays
  unsure (1)..(38): unsure at all Xaa locations
  Clone ID: MRT4577_39234C.1.pep
ILSDTIGYCRYDSXSITEWLIDICTITVRSMLYTHRVS

SEQ ID NO: 302806 - protein, 34 aa, Zea mays
  Clone ID: MRT4577_39235C.1.pep
EIPKILFQPQNLQNPGVKRAKLTRSTSVTPYIQL

SEQ ID NO: 302807 - protein, 88 aa, Zea mays
  unsure (1)..(88): unsure at all Xaa locations
  Clone ID: MRT4577_39236C.1.pep
DPDICPARPLVPRAARERARGMAREWKXRLEEXGGVEGAKPPYAHAFLXHVATFAVRDKEDLPLFRKIVLSFSWSQKMPLLVLTLRLG

SEQ ID NO: 302808 - protein, 96 aa, Zea mays
  Clone ID: MRT4577_39237C.1.pep
SKHTALASTVPQCAPSLAIHLVHDWATVAAVEVPRSSSVPRQFFSGPSPPTSSPSTYVTKARLVNHTGKNGDGVLVLGLLDACLLPYRKASLPATG

SEQ ID NO: 302809 - protein, 93 aa, Zea mays
  Clone ID: MRT4577_39238C.1.pep
MAASKVKQDMPPPGGYGPIDYKRNLPRRGLSGYSMFALGIGALILGYWRIMRWNRERRRLLIEDLEARIALMPLLQAEKDRRTLQILRENLEE

SEQ ID NO: 302810 - protein, 84 aa, Zea mays
  Clone ID: MRT4577_39239C.1.pep
RTPRSTPRQQASVVLLNSHSLSLSCVFLSRSIVGACSSQKREVKCCCNKELVSVILSKAFMLCSSTVELLSCDCRGSAVLQHHW

SEQ ID NO: 302811 - protein, 135 aa, Zea mays
  Clone ID: MRT4577_3923C.1.pep
HWVPRGRPGSSTEAIHPDVFALGDCGTIDAANYPATAQVASQKAVWLAKQLNKSSTLQSSAKGFTYRDLGTLAYIGNWNALFQGGGKWGGRLQGYVAWIIWRGAYITRTVSLRNKVLVPVYWVVNWVFGRDISRF

SEQ ID NO: 302812 - protein, 99 aa, Zea mays
  unsure (1)..(99): unsure at all Xaa locations
  Clone ID: MRT4577_39240C.1.pep
MSSSNTLHRVSWQXTYVDEHLMCEIEGHHLSSAVIVGHDSAFWAQSTVFPQFKPDEITNIIKDFDQPWFLALIGLFHWPTKYMVIQSEPCSFIHGKKGF

SEQ ID NO: 302813 - protein, 99 aa, Zea mays
  Clone ID: MRT4577_39241C.1.pep
MPAGSAEQRIVLYLELYASCVEYITPLRDSMSSVFPSAHLAFASIDLNAHTVFAITTALAILPTVCLRNLSLLSYLSADGVMATIAVILCLFWVACSGL

SEQ ID NO: 302814 - protein, 53 aa, Zea mays
  Clone ID: MRT4577_39242C.1.pep
LSFRVQVVAAVVSKTSRCGHFRMFFLVSPPSDPETAKICPPCHVNLSILCLLL

SEQ ID NO: 302815 - protein, 165 aa, Zea mays
  Clone ID: MRT4577_39243C.1.pep
HIPSRAFDNFQFVNFSEIMSKNMAQSRKEAAFALSALMEIPQQYKATVELGILGRRSSKSPNRVPLPPPSASHDAYSYSSKSFSKPTTYPQSSSSSSAYPQYGTPHTATPAAPSSTYDNQVCPICLVNPKDMAFGCGHQTCCDCGQSLESCPICRTPITTRIKLY

SEQ ID NO: 302816 - protein, 101 aa, Zea mays
  unsure (1)..(101): unsure at all Xaa locations
  Clone ID: MRT4577_39244C.1.pep
FPSFYQANSLSNTPDTYEQDISIIGRTLSKFDEDNLIPCFGFGDASTHDQDVXCFSPDEKPCNGFEEAFGQCRELVPHFRLARKLLCLVRPFNCIVHMGLH

SEQ ID NO: 302817 - protein, 164 aa, Zea mays
  Clone ID: MRT4577_39245C.1.pep
PAGFSHQLEWHRTKCQKRPSSASRSGGLFVDPEAITANMHVHQSSDRSSINFFVKLFSRRHCMNKISRAPSEKRRRALARATAACIFCCSRTRLSSPANENLRRRSCRSAVCNRHCCCKSAAHRHCHRRCSGHPSELRETSHPTSLSRRSGGRRRCPGRPRGSQ

SEQ ID NO: 302818 - protein, 410 aa, Zea mays
  unsure (1)..(410): unsure at all Xaa locations
  Clone ID: MRT4577_39246C.1.pep
HATSLRAVPVPAPRRTSXPAPAPQVAKPRQLERRYSRIADDYHSVDQVTDALAQAGLESSNLIVGVDFTKSNEWTGKFSFHGRSLHHISNTPNPYEQAISIIGRTLSKFDEDNLIPCFGFGDASTHDQDVFCFSPDEKPCNGFEEALDRYRELVPHLRLAGPTSFAPIIEMAMTIVEQSGGQYHVLLIIADGQVTRSVDTASGQLSSQEQKTVDAIVKASELPLSIVLVGVGDGPWDMMKEFDDNIPARAFDNFQFVNFSEIMSKNMAQSRKEAAFALSALMEIPPQYKATVELGILGRRSFKSPDRVPLPPPSASHDAYSYYSSKGFSKPTTYPQSSSSSSPYPHYGTPHTATPAAPSATYDNQVCPICLVNPKDMAFGCGHQTCCDCGQILESCPICRTPITTRIKLY

SEQ ID NO: 302819 - protein, 82 aa, Zea mays
  Clone ID: MRT4577_39247C.1.pep
LALNHHHSKQHGVPQLTMIYPLFRACQLPPNYTLFKPNSLNNTLYSTLKLYNQNVQLQLLDRAKGKKKPQRTHSLAHLNSTG

SEQ ID NO: 302820 - protein, 134 aa, Zea mays
  unsure (1)..(134): unsure at all Xaa locations
  Clone ID: MRT4577_39248C.1.pep
HASAPAKALCEHPRRQSPCVLLNYLAARDRLLRGRILXAGLHPFYIRLPSPDGTSTDVHLWAPTRYERTSVLLLHCFRASATWQKTTYLRKILAAGLECIVPDLLLFGASLCTGDDXCDTFHARTVKDDMDCMG

SEQ ID NO: 302821 - protein, 100 aa, Zea mays
  Clone ID: MRT4577_39249C.1.pep
REGEKSEIEKWGEKGGGGKSDTKTIPRKKSRKQKGQKQGGQKKKQKNTKCHKPSAKKKKGKPKKKAAKTKKKTGGERKKKEGAPGRRETEKRRRAKTDCP

SEQ ID NO: 302822 - protein, 87 aa, Zea mays
  Clone ID: MRT4577_3924C.1.pep
SHRGVGVGNFRHGLIKPQPAYNLGNNVCRHRFSMRAPNISSCHDHIRACCQASLDRVAHVVGVVLQRVLGLHLLLVLQAQRPYHQTQ

SEQ ID NO: 302823 - protein, 132 aa, Zea mays
  unsure (1)..(132): unsure at all Xaa locations
  Clone ID: MRT4577_39250C.1.pep
HHVWDVNINDTANKDLSNKSMNTMVEALKMHLKDEWSVDIVHWETCKNNHYACPNFYAIDSIHXISHXYASKHVXRGFTLEDHYFFSRXPTVENRLGQSGIKVALVINLIFVTAEADDIPLEVQYLLSLKQA

SEQ ID NO: 302824 - protein, 65 aa, Zea mays
  Clone ID: MRT4577_39251C.1.pep
VQCLTIVAFQLTHNASTSQSLITIVIRSLICGNAKKKNLRKRSKIQDLCAQQLLSTRIYWVTPTV

SEQ ID NO: 302825 - protein, 84 aa, Zea mays
  Clone ID: MRT4577_39252C.1.pep
GPALKKKIGGPLDNRELIRASLKFPFLHFFPPPFKLFWPLKPACLVCFFSTRFPPHKPQTMPFVFYPFAPGFLSPWRELYANGR

SEQ ID NO: 302826 - protein, 115 aa, Zea mays
  unsure (1)..(115): unsure at all Xaa locations
  Clone ID: MRT4577_39253C.1.pep
XKKRKAQEXWGDXLFQXIXXTRXKKRGIESQIIXEENHRFYSMCCEHFRQRMPLMILQKESDREDNKREKLFSTILRSQGKEHSLENLLQLREDLRDPAACEALRPIFRELSNKL

SEQ ID NO: 302827 - protein, 140 aa, Zea mays
  Clone ID: MRT4577_39254C.1.pep
RFFMLVLSRYLSPSQLRRLRGSCSYPAEGLFQAPPPWPVSQKLLFSHPRTGSPGWAPRSSSRRAPHGPSKSPDDAPSLDCSAQAIWWSPPPPPLYVVLRGSIGSFGLSSFSQCTNIIYMKKHKNSFLKKKKKKKKKPPPP

SEQ ID NO: 302828 - protein, 222 aa, Zea mays
  Clone ID: MRT4577_39255C.1.pep
MMRPSPPRRLSLAAPFLILLLLTLLSPPRAAAAGGSSAWVALRGAAGSRKASPAEQEGAAAGLLRRLLPFHSGSFSFQIDSKGGVCGQSSCFRISNVVDGSGKGGAEILIQGTTAVELASGLHWYLKYWCGAHISWDKTGGAQLASIPSPGSLPRVQGKGVKIERPVPWNYYQNVVTSRYSFVWWDWKRWEKEIDWMALQGINLPLAFTGQESIWQKVFKVV

SEQ ID NO: 302829 - protein, 121 aa, Zea mays
  unsure (1)..(121): unsure at all Xaa locations
  Clone ID: MRT4577_39256C.1.pep
LLKPTFKPQMRGGTFLNPPPGRGACFSSKKKKAFCWCKKPQGGPNKLKVNFYSKPPPPGKRKRKFRVCKGPHFFEGPFFYVKFVKPKNWEMWRKLGGSRKTKFLCGKKKXXRKKRPENPQY

SEQ ID NO: 302830 - protein, 200 aa, Zea mays
  Clone ID: MRT4577_39257C.1.pep
FSRPKEGHYPKQGFASHMKLSFSSSSRACSVALETCCTTILTIGLLHRQQVEAVAVLTLRRCQGVNFEDLQALASLKKLHISHLDITDEQLGTCLRGLRSLASLEIDNCSNITSLPHVESSSGLTTLHIRQCSKLSSLHSLPSFAALESMSIDNCSKLTLESFPADFSSLSSLRKLNIMCCTGLESLPSGFPSSLQVLDL

SEQ ID NO: 302831 - protein, 72 aa, Zea mays
  Clone ID: MRT4577_39258C.1.pep
GRRSHFIICTNLLMVRHSDPAVVVFNGTVTTMQCTHSIRHCILATVLDLGRIRIISTVAAGAPMTGSHLQLQ

SEQ ID NO: 302832 - protein, 35 aa, Zea mays
  unsure (1)..(35): unsure at all Xaa locations
  Clone ID: MRT4577_39259C.1.pep
ILTRWENSVHCVLXYTVPLLLSICLHVEQHNVFGV

SEQ ID NO: 302833 - protein, 134 aa, Zea mays
  Clone ID: MRT4577_3925C.1.pep
MERLIQEHAERLRRALADTRRRHYRSLVGAAEAAAARRIREKESEAWEAARRRADLEDRVARLRAEAAAWQAKELADQSTAAALHAQLQQARGKATDAEEGGNAADDAGSCFVDPDRVVEIAPPVARPCRSCRL

SEQ ID NO: 302834 - protein, 332 aa, Zea mays
  Clone ID: MRT4577_39260C.1.pep
MASLLRWKDKYVKERLQGLSCSSAAATSVVPSNGRAIDRHSPHLRDPHRRLPPPVPKPPRPSSSFSTTKDSSSSYKQRQQICHYDVDGKDKRRNKKKKNTAAAAAAGSGSSSSEHRRNGKEKALHPFPHASASSSRFLLNSSRLMMQSDDETTAVDSLPPLPSPRRPSFVDAAAEDDTDTFPSSHGDAASPAVPSRRLQLVAPPLELFAEPSASGAGSSSSSSSEIAGGHVVAAADNTVVVRSCSTRTAQHQVVVLRVSLHCKGCAGKVKKHLSKMEGVTSFDIDIATKKVTVVGDVTPLGVLNSISKVKSAQFWPDSRSSFSTPPRASASF

SEQ ID NO: 302835 - protein, 176 aa, Zea mays
  unsure (1)..(176): unsure at all Xaa locations
  Clone ID: MRT4577_39261C.1.pep
MLTCIACSKQQFAGGGPPLHEPPEDDDVVDGGGGGTATPRTRHAIKALTAQIKDMALKASGAYRHCKPCAGSSAAASRRHHPYHHRGGSAFGGSDAGSASDRFHYAYRRAGSSADATTSMSVRTDFPAGDXEDDEVASEAAGGCGGKDDDAKEWVAQVEPRVLITFVSLAQGGNDL

SEQ ID NO: 302836 - protein, 89 aa, Zea mays
  Clone ID: MRT4577_39262C.1.pep
QIKRARKKEFRLNLERGVISKLGFQIEKKKLKGAPYKIGGINPCYMGNKLQAYNHCLSAVCKNCKPKAVFFCSSWVPRFCESSTVDSNN

SEQ ID NO: 302837 - protein, 139 aa, Zea mays
  unsure (1)..(139): unsure at all Xaa locations
  Clone ID: MRT4577_39263C.1.pep
FPGSLISFPLAXXAAXXVGKVGKTTDRXXVVKKLQSRXLPXSLSPRXGGRDDGXRDGRQTGAXWHRSCSHGSGDALAXXTDRRRXGFRXGGDAAXXDIXXATGLPLPPGLXXXGPLXRLGPCKCFAXXALGFLXLSXHL

SEQ ID NO: 302838 - protein, 611 aa, Zea mays
  Clone ID: MRT4577_39264C.1.pep
MASNDNDRRPTDDKASIALLRRIRAGEHVDFVHGVDVCDAAPEILVANLEPVPGYSSVWYLYCAKKYTNKRGQLSGYRERAITGGGGASWHPEIGRKNVQGSGGGTFCTFTYGRKHKTEERSTRSVVVVNRLGWKMVEYDDLAEADAASNYVLCKVYRTALAKGKSSLPSSSSSGQNENASSSSSKPPTAKKRKACGGDHPEAAPASKLIQQHAQQVEEKACGGDHPEAAPASKLIQQQQVEELNVEDYDIDIMEMLPDVLSGEPVPELGMQQPTDARTEHDGRFNIVEELKMLPDEPVAEPGIQQPTDAETEHDVRFKVCCSSEHGHGSGSSFSMSIEEELNVDDYDIDIMEMMPDVLSGEPVPEPGMQQPTDARTEHDGRFNIVEELKMLPDEPVAEPGIQQPTDAETEHNVRFKVCCSSSEHGHGSGSSFSINIEEELNVDDYDIDIMEMMPDEPDHPEATPASLIQQQEADVQQHGHKHGVGFHFEGMQQPTNVAEPEHDDSRSIHPMSGDPLLAAQVSFDFEGMQQPTIVAESEHDDGRSVHPLSGGPVLADQVSFDFEGMQQPTTVVEPEHDDDWSMSIQLPRMCSQWRSQKFLEAWAILKDHMM

SEQ ID NO: 302839 - protein, 50 aa, Zea mays
  Clone ID: MRT4577_39265C.1.pep
RCCQTSRWRSREYNSLPTPRRSTTSGSRSAARQSTGTAAALASASTSKKS

SEQ ID NO: 302840 - protein, 97 aa, Zea mays
  unsure (1)..(97): unsure at all Xaa locations
  Clone ID: MRT4577_39266C.1.pep
MPLQDSFALKKKKKKKKKKKKKKKKKKKKKKKKKKKKKKKKKKKRKKKKKKKKNKIKKKKKKKGGGFPKKKRMGKPWHKTKXYLNWGAYPNNPVWKK

SEQ ID NO: 302841 - protein, 86 aa, Zea mays
  unsure (1)..(86): unsure at all Xaa locations
  Clone ID: MRT4577_39267C.1.pep
CQTCYQASRCRSQECSSQPTPGRSTTAGSTSSKXLKMLPDEPVXSREYNSLPTPRRSTTSGSRSAARRQSTGTAAALASASTSKRS

SEQ ID NO: 302842 - protein, 102 aa, Zea mays
  Clone ID: MRT4577_39268C.1.pep
QKEIVCVCVLTSRLGPGPGPSVRACGTRGGYHLIAKSDFFLGKLAEANQFLKKNDQIKVMGCRCGNQSQDSILSFSMAISELLRLKAAGNEAFQSGKYLEAV

SEQ ID NO: 302843 - protein, 256 aa, Zea mays
  Clone ID: MRT4577_39269C.1.pep
MAAAAGEAPRALSQKEQDIQMMLAADVHLGTKNCDFQMERYAYKRRSDGIYIINLGKTWEKLQLAARVIVAIENPQDIIVQSARPYGQRAVLKFAQHTGANAIAGRHTPGTFTNQMQTSFSEPRLLILTDPRTDHQPIKESALGNIPTIAFCDTDSPMRYVDIGIPANNKGRNSIGCLYWLLARMVLQMRGTILPGHKWDVMVDLFFYRDPEEAKEQEDEAAGAPEYAAITDYGAAAGLWGGDQWTSDAPGSPAVT

SEQ ID NO: 302844 - protein, 209 aa, Zea mays
  unsure (1)..(209): unsure at all Xaa locations
  Clone ID: MRT4577_3926C.1.pep
SCTADATQGGGALHIPVVHRDAVFPPRRGAPPGSFRCRHAAPDTAQLESLHSATAAADRVGSPVISGVPFDSGEYFAVVGVGDPPTHALVVIDTGSDLIWLQCLPCRRCYRQVTPLYDPRNSKTHRRIPCASPRCRGVLRYPGCDARTGGCVYMVVYGDGSASSGDLATDTLXLPDDTRXHNVTLGCGHDNEGLLASAGRLLXAGRGQL

SEQ ID NO: 302845 - protein, 57 aa, Zea mays
  Clone ID: MRT4577_39270C.1.pep
MATVPGDLIWQVVRKNNSFLVEHFGSGNAKVHFTKEPNNLYNIHSLKHLGLGNKNTW

SEQ ID NO: 302846 - protein, 62 aa, Zea mays
  Clone ID: MRT4577_39271C.1.pep
VSAAGSAGENSEVPDNVGDWLRGVYRFATDRNDFRRNLILNLGLFAAGVWLARNLSDIDLMA

SEQ ID NO: 302847 - protein, 119 aa, Zea mays
  unsure (1)..(119): unsure at all Xaa locations
  Clone ID: MRT4577_39272C.1.pep
MGQLNSVPXMRQQRLPFNQLPADYPHESFPFNQLTSWNSTAYLQQLQLLPFRXIIGVSPATFLTQPQKLAPYQHAAPNAGPLLQLLQVLPFNQXALANPAVIYQQPIIXGALFQICYEL

SEQ ID NO: 302848 - protein, 49 aa, Zea mays
  Clone ID: MRT4577_39273C.1.pep
GGATYSAICPPLSMGLTPLGTSSTFSQDGGSFLMSCLSLRVGTPADCPF

SEQ ID NO: 302849 - protein, 54 aa, Zea mays
  Clone ID: MRT4577_39274C.1.pep
ICFFKFFNFLCGIILRIFFKKKKKIKKVRPVYRVSQFKSRLIVIKVFVYFFIFY

SEQ ID NO: 302850 - protein, 87 aa, Zea mays
  Clone ID: MRT4577_39275C.1.pep
RARPSVGGPPGWVSKRLAQRQPGGPMLAFWLRSGDGQGAFPLLIILSGFLDLVRMMRAYLCDLRQGSLWGPPPPPGPFFLVGLSPFP

SEQ ID NO: 302851 - protein, 95 aa, Zea mays
  unsure (1)..(95): unsure at all Xaa locations
  Clone ID: MRT4577_39276C.1.pep
QNSTXPXXXQKKKKKKKKKKKKKKKKKKFLKKKXXLGGGGKKKEKKKKIPFLFKKILXXQIFQISIKFXXPSXFLLXXPNSPYIXLFFHFISPSF

SEQ ID NO: 302852 - protein, 69 aa, Zea mays
  Clone ID: MRT4577_39277C.1.pep
GFGWPSPNTKIGVDSPSLCFEKIPWVRPQKFFFELWGKFQIPGVFFFPRGLGFWGNGAGLTLLNPTKLF

SEQ ID NO: 302853 - protein, 44 aa, Zea mays
  Clone ID: MRT4577_39278C.1.pep
ARGGLWPYHPSRCGSSPLRRYRYHTDRWIIHNFWEISSIHLSAI

SEQ ID NO: 302854 - protein, 49 aa, Zea mays
  Clone ID: MRT4577_3927C.1.pep
ALFVGFCVVLCTEVSSQVRALAMRERRTRERTRLRYTAAEFTSARGVLL

SEQ ID NO: 302855 - protein, 48 aa, Zea mays
  Clone ID: MRT4577_39281C.1.pep
KGSSSRTLLCHVFSLMFYRWWIETLHKCSLRQLKFCIKVTFRRLGAPA

SEQ ID NO: 302856 - protein, 58 aa, Zea mays
  Clone ID: MRT4577_39282C.1.pep
VKKGIVIEIKTSFQLHKRSGNPLPTTIATKSAVKCLAAVVQIHAICALLTLRCHFLNL

SEQ ID NO: 302857 - protein, 117 aa, Zea mays
  Clone ID: MRT4577_39283C.1.pep
YSHQSPQQGSSSDTYDGGESESSSESRSPAPGPAVPACCFSRCRRSDLAPTCPRRRSRPPTSATSVSRTQGRLSISATTTTSRSRGRPSTSTTTAAPTCLACESGGGGGEWGARGDG

SEQ ID NO: 302858 - protein, 141 aa, Zea mays
  Clone ID: MRT4577_39284C.1.pep
CGELCADPFFPRDTSVPFFPPRSYPPPYGEMWCPRGSRSGFPGSPRGSAFLGGGMGRPGVGGPAPPGECLGPGFLGWGVSFVPLQVFSLAAGPGCAPPFYSLCCFFNEGSLSPLGSLCIMAPCARVPFFLLGAPLFCPLPA

SEQ ID NO: 302859 - protein, 88 aa, Zea mays
  Clone ID: MRT4577_39285C.1.pep
PLFVLGEKKIKGGLGAWSLLAHLVFLGFTPLGGFWFPGGPSCLHLGGKTFGFFFYFKGGPGFFFLRGGGAPRFFFFFLGKIKKRVFFF

SEQ ID NO: 302860 - protein, 104 aa, Zea mays
  unsure (1)..(104): unsure at all Xaa locations
  Clone ID: MRT4577_39286C.1.pep
YGFEFEPRLTRTNVTNDTQDGLSGAVSSGGRERXQRLSEEIEASIIWVNCSQXCFCQAPWGGNKRKGFGRELGQRGIDNYLSVKQVSEYISHEPRGWCRYHYKL

SEQ ID NO: 302861 - protein, 146 aa, Zea mays
  unsure (1)..(146): unsure at all Xaa locations
  Clone ID: MRT4577_39287C.1.pep
KIQPINTQTNQEKTKKNMPHKAHADHQRSPPTTNFSSQTKVYTSISCMINMTINTAITTNNTAPTNSSNSTHHSIPGPHLKNVDPPLPPTVHKTKNIVLPHALPDHHQVAPTHPLLNPPTIPPSIPPRSRERGVARAGARXRGREK

SEQ ID NO: 302862 - protein, 58 aa, Zea mays
  Clone ID: MRT4577_39288C.1.pep
LTNRGHSKEGDLHRRDGGTAPGDLTWLTVFLNNSFREKQPTNGIANERLTKAPSNHYK

SEQ ID NO: 302863 - protein, 904 aa, Zea mays
  Clone ID: MRT4577_39289C.1.pep
MAGSKDHTDISPDNILKPDVESLTADEQQQYEDYMRQAREKFLSQYTVDRHQKVVKHGETDLASLLSSLQVPNVSKPDDIQFIKQYVDHQQNQMKQQIGGLEESIRKLTHTLEKSVAPSFPSYETSNRISMYNTSATNGDLQTQPLYGMPMNSYPGQVPPPPSLLGRSAPLNTVGPSGPYANRPACSVGQSGAVLGPSSSLFGRSATLDTVGPSEMLPGPSDPYADRPAFYAGQSGVVPGLPRGAPIMANTTGQFGCTTVQTGYTYAEPAVAHHAPNYYTPQQQYISPSTYLNHNAPYNHRPINTIDRSRQEGRYTNTRPNEPHSPGSGGLPPDAMEKIREEMTELFRDKFGVNVARVGQSYQKPYNHRFDIVPYPQGARIPEFSKFSGENGRSTYEHIGQFLAHLGELADGEAFRVRLFSLSLTGTAFAWYAALPPNSINSWNELENKFHEHFFAGEYELGLGDLASVRQGREESINDYIRRFRDTRNRCFRIHVADKELAGLAFNGLLSYLRDKLDGTQFFSIAQLHQRALACESRFKETSKSAARTIHLIERDSSDDESADVYTAEFIWPTKAKSSACSSLQPVQKNRQEEIKSTFNVAKCDKIFDELLKNGNIKLTHNIPPIDELKRRAYCKWHNSFSHATNDCNVFRRQVQSAINKGRLAFQEMQVDTQPFPVNTIDVACEKILVRPEMADKSKSKDIIIDDPRTSNISQKEIARKAPDDKAKRSGGTGGQAQLMSQARQPGLSITDGMTPTGGRSGAQTDGSANSAEQSAYGQRRQPPHKALKGKETQRQSTYGRLIKTDSTFDQLLSKNTSKKIVLRDRSTKKPRSPAKTKRVNKTARKATQQASPIHSMRPGYFSPIYSSSVYYPVQTWNGTMMNPWYMYSPFVYPDWGAPPFYSF

SEQ ID NO: 302864 - protein, 193 aa, Zea mays
  Clone ID: MRT4577_3928C.1.pep
MVFYFKARPEAGDYTIFMGLDKYENEDLIKYGFPEDIWFHVDKMSSAHVYVRLNKGQSMDDMSEGLLEDCAQLVKANSIQGNKVNNIDVVYTPWYNLKKTPSMDVGQVGFHNPKLVRTIKVEKRINEIVNRLNKTKVERKPDLKAEREAISAAEKAERKAQLRDKKRREEMKISLNCFCRRQKGYHRLVRYWI

SEQ ID NO: 302865 - protein, 110 aa, Zea mays
  unsure (1)..(110): unsure at all Xaa locations
  Clone ID: MRT4577_39290C.1.pep
MGGIHGAPPPRGGPPPRXPRGKPKKGGTKSKTGGGSPRAGKPHNPQTDRDVIFGPPPPGGGPKPPFGSPGAWANPLKPPRFSGGTVSPPPGEAGAPVPCPAPKPGGVSGP

SEQ ID NO: 302866 - protein, 34 aa, Zea mays
  Clone ID: MRT4577_39291C.1.pep
IIFAFLGVPHPVPCYANRYGGPSRCSWSARTCER

SEQ ID NO: 302867 - protein, 90 aa, Zea mays
  Clone ID: MRT4577_39292C.1.pep
PPPLPWRTVLALAGFVPVQANTFSQLQAQALLKRKALMGFPVQKGGGALFLFWQGGEMVSLLGGRGLPPGGTPPPPNQKPTVDFPPTRGR

SEQ ID NO: 302868 - protein, 127 aa, Zea mays
  Clone ID: MRT4577_39293C.1.pep
ELLPWVLNQFQEERLVLQLKSLVARLFSWIIVKLPMKLAATVGGASKALEGRDGRVRTPHSRLRSWPATEGADAAGRRRCGRSTRMMRAGGAASRRWHGRFQRHPPSNDGMGSPCQRRGAVTSRDGI

SEQ ID NO: 302869 - protein, 44 aa, Zea mays
  Clone ID: MRT4577_39294C.1.pep
LTRTVSLSIGGDLKQQGRPLFQPKLSLIYNADTTIHYHTGRNDT

SEQ ID NO: 302870 - protein, 90 aa, Zea mays
  Clone ID: MRT4577_39295C.1.pep
QSSRRLRAGGGQNEGGNGDGSEEGTGGAGVRTGPSPTRSGRQGGGEDDARQQIGPPTWTETMRRLGGGERALLSVLAESGRWEGEGGRYF

SEQ ID NO: 302871 - protein, 99 aa, Zea mays
  Clone ID: MRT4577_39296C.1.pep
RLQAGSPSVQYTIHSGRFFNHKNGNQPNRKEGNHHLVFPPSIYHHLTQENWWCPGGRSGLVWPSGGGQDKPGLLTGTRSRPPVLWSGATSGRSTVHGCG

SEQ ID NO: 302872 - protein, 60 aa, Zea mays
  unsure (1)..(60): unsure at all Xaa locations
  Clone ID: MRT4577_39297C.1.pep
VGFLKLMLRFFTGXINRTQRELPGCEKNCLADLLLQIRMIHPATEMAETDSRRHQLTPRP

SEQ ID NO: 302873 - protein, 163 aa, Zea mays
  unsure (1)..(163): unsure at all Xaa locations
  Clone ID: MRT4577_39298C.1.pep
TRVVLVCCFTTLLRCCFAPAQENIPIEEVFENLRCNPQGLTTEQAEQRLAIFGPNKLEEKQXGTRRLGFHAFLFLVLRLAPSLHDGCVRVSMCLQESKFLKFLGFMWNPLSWVMEAVAIMAIALANGGVSSAASFFTPCGHGLQPSERAFWRLASEVFPGRPR

SEQ ID NO: 302874 - protein, 70 aa, Zea mays
  Clone ID: MRT4577_39299C.1.pep
WWRHFIIKKKKKKKKKKKKKKKKKKKKKKKKKKKKKKKKKKKKKGGPGFKGPKFTTPSLQRKIFFLGPPK

SEQ ID NO: 302875 - protein, 215 aa, Zea mays
  Clone ID: MRT4577_3929C.1.pep
MVFYFKARPEAGDYTIFMGLDKYENEDLIKYGFPEDIWFHVDKMSSAHVYVRLNKGQSMDDMSEGLLEDCAQLVKANSIQGNKVNNIDVVYTPWYNLKKTPSMDVGQVGFHNPKLVRTIKVEKRINEIVNRLNKTKVERKPDLKAEREAISAAEKAERKAQLRDKKRREEMERLEKEKQADIRSYKGLMVQEKMTSNKQIASGSKTLQELEEDFM

SEQ ID NO: 302876 - protein, 144 aa, Zea mays
  unsure (1)..(144): unsure at all Xaa locations
  Clone ID: MRT4577_392C.1.pep
PAALAATEAAAPISPLPERTYAEAGASSSGTPGSCSPPXPGAPAXPPTAARPPPPSSPPPSTGRPGSCARTAAPDRACCSGASSWPPAATPSGGPTWAPPPSASSRRTPRPWLPTPRASSPWGRLGPRPGPTSRSSTGDWSTVR

SEQ ID NO: 302877 - protein, 219 aa, Zea mays
  unsure (1)..(219): unsure at all Xaa locations
  Clone ID: MRT4577_39300C.1.pep
RCSTPQAPRPMAXPSSGTRXSCHSXAPPXAAARXXVVAYLRXAAAXAAGHPGTXXTXXGXXRHKKPAXXQHKTSXRGXPGXRGXXXAQXRXXAPXPAPWXXAXRAKPXXPGXXLXVYPNDXXLXXMYRTXGGVAPXSWKPRXXRTGPESXXPAPDKGCTXQVXRWRXRRPLRSSXEVQTXAGXLLXXGGKGERRYXXSWGDLHXXPETSGKVAWRAFAA

SEQ ID NO: 302878 - protein, 68 aa, Zea mays
  Clone ID: MRT4577_39301C.1.pep
LRPRVHGSLGFHRPPVSPAFLCSFILPASLGLVLVAPRLWLAPRWCSSCLPGRGCNPHVFKKNPKNGG

SEQ ID NO: 302879 - protein, 61 aa, Zea mays
  Clone ID: MRT4577_39302C.1.pep
YALSLLRTTIDHLCYGCRVAPSSAVAPSSPLQPAPVFDVYIDSLVLPHFVIFQTKPCGRKW

SEQ ID NO: 302880 - protein, 289 aa, Zea mays
  Clone ID: MRT4577_39303C.1.pep
MIVVEVRIMSVVLICIAVVLLVLVFLGSGLEKYGPRYTVYIFVTLCWKAVAALFILLGIFLILNSAAQDTCEAMDQWAQHPQAETALSSILPCVDESTTNRTLYQSKEVVVRLVGIVNRAISALSNRRPHHKHPGQFMPYLCSPYDSNLNDRPCKYREATFENATTAWLNYTCMAQDTDLCSGNKTLTYDIYGQLVLAANVSYALYHYAPFLLNLQDCKFVRATFSAIASRYCPPLGHDLVLVSAGLALIASAFVLCLVWMLFADRPRREEVSDLASGSRIAPVDSSPS

SEQ ID NO: 302881 - protein, 342 aa, Zea mays
  Clone ID: MRT4577_39304C.1.pep
MGFRAASAAAAAAVAVFAAAGLAVAAAASGDSLADLGGAAREIESAPEVKNLGPWAKGLLKGMPQAAAGPAAMAPVAKYPLVLAEDRTRRQDVLRHLKGYEGGWNVTNKHYWASVSFTGVSGFLLGALWFIFFGIAVAGRCYFGTRMSKRKVSYADVVGPVLLGDFTLAIIVGCILLLYGQSKFHEEATRTVYFVVNQSDFTIQTLRNVTEYLSFAQTITVAALYLPSHVQGQIDSLKGDLNKAADTISVKTAENYKMIRKVLHVMSGVLICIAVVLLVLVFLGYGLEKYGPRYTVYIFATLCWKAVAALFIMSRDFPDTQRCAGYLRSDGPGGPAPSQRQL

SEQ ID NO: 302882 - protein, 133 aa, Zea mays
  unsure (1)..(133): unsure at all Xaa locations
  Clone ID: MRT4577_39305C.1.pep
MSWKGYLDXYLMCEIEGHHLARMAIIXHNGATCXQSTAFSDCKTKDMGNIMNDFHESGDLATTGLFLGATKYXMDILCEPGVVIRGKNGSGGITVNKTGXGLVVGIYYEPMRTGQCNMSVXERRCDYLIEQGM

SEQ ID NO: 302883 - protein, 53 aa, Zea mays
  Clone ID: MRT4577_39306C.1.pep
AGYSLPCIHVSQTYTMCVYVFVFAYCVFYGLVDQAFGYVVVYSMFIHVVYIVP

SEQ ID NO: 302884 - protein, 108 aa, Zea mays
  Clone ID: MRT4577_39307C.1.pep
PTRPCVGHNHNLIFWPRACFFRTNCPAPSAFLSARLGLQLRPWWPPEARLPAPAQRSAFSLLSQAARPCPVPCARCSCSLWHPRHGALQGRAGKFRGPVLKFRRGPIS

SEQ ID NO: 302885 - protein, 105 aa, Zea mays
  Clone ID: MRT4577_39308C.1.pep
IYHQIHTDSSKKKTDNFTNERTFPQHGSNRTSKAKQILDKTRIQYRLTAESSLHSVCRSNFSATRCFTLPPETTTAPSLTRALSTGRSECIMPSSSEFLRRGIIV

SEQ ID NO: 302886 - protein, 39 aa, Zea mays
  Clone ID: MRT4577_39309C.1.pep
GHKGPPPNPRVQTTDGEHGGGRHVGAGRGPKTLPRKILR

SEQ ID NO: 302887 - protein, 160 aa, Zea mays
  Clone ID: MRT4577_3930C.1.pep
PARTAGVGAPAPATGGVVFPTRLDRTVRVAVARPRVSRSQEEKDDEEEVLVVDGIQVAYHLRYVKFDVFVNQCAGGDGSTAAAECAGSFVLTPHVIQQNQEEEEGGGGGDSPAKTAARFGITDLLDDIGADGDVTIVVSLVPRCAGDGVTVDGVSVTYVK

SEQ ID NO: 302888 - protein, 118 aa, Zea mays
  Clone ID: MRT4577_39310C.1.pep
SVLLPLENGDRHLKTRLVAGESLSVPSRSCMHGTHHCVIAAAPTPPPSIHTHTQKKKKQHPCHVQPEPQCVARQQQQKKKSCSHTTKRGSGGGHAILSVGVTFSLSQLIALSASCTDL

SEQ ID NO: 302889 - protein, 136 aa, Zea mays
  unsure (1)..(136): unsure at all Xaa locations
  Clone ID: MRT4577_39311C.1.pep
VHHHHHHHGQQAXGNRTRPRVYNAPTNSSTTQDSMEAGHSHHSMTSLSSSTTDCSTSPHPTGNQGNQAYQNRPAAANTLHFEQNGAMDVNLTVYSNPRQETGIAGHTAYQVSANTGPAHNMTEGHLPMRQRADREE

SEQ ID NO: 302890 - protein, 513 aa, Zea mays
  Clone ID: MRT4577_39312C.1.pep
MLMEEECVEAPSYIHIDSNAFSYRKHKSQTEEDIAVCECQYDILDPESPCGDRCLNLLTNTECTPGYCRCGVYCKNQRFQKCQYARTRLVRTGGRGWGLVADENIMAGQFVIEYCGEVISWKEAKRRAQAYETQCLKDAYIIYLNADESIDATRKGNLARFINHSCQPNCETRKWNVLGEVRVGIFAKQNIPFGTELSYDYNFEWYGGVMVRCLCGAASCSGFLGAKSRGFQEATYLWEDDDDRFSVENIPLYDSADDEPTSINKEILVSSDGMVTQYSNISRVQSTENPGNTGTNEFAPIIVDELTSSNGLAPMNVEPLTVSSNEFTPSNAMPMVARLVENGSTGYSAQDTHDASQNSAPKAANHANQTGPQNNSNHSALVPVKPAPKRRGRKPKRVVHKQLDIPDICDRLTSSVACEEILYCEEVKNHAVSEIDALYDEIRPAVEEHERDSQDSVSTSLAEKWIEASCRKYKAEFDLYAAVLKNVASTPLRSKDDVGPREQNGLKYLENGS

SEQ ID NO: 302891 - protein, 448 aa, Zea mays
  unsure (1)..(448): unsure at all Xaa locations
  Clone ID: MRT4577_39313C.1.pep
MLMEEECVEAPSYIHIDSNAFSYRKHKSQTEEDIAVCECQYDILDPESPCGDRCLNLLTNTECTPGYCRCGVYCKNQRFQKCQYARTRLVRTGGRGWGLVADENIMAGQFVIEYCGEVISWKEAKRRAQAYETQCLKDAYIIYLNADESIDATRKGNLARFINHSXEATYLWEDDDDRFSVENIPLYDSADDEPTSINKEILVSSDGMVTQYSNISRVQSTENPGNTGTNEFAPIIVDELTTSSNGLAPMNVEPLTVSSNEFTPSNAMPMVARLVENGSTGYSAQDTHDASQNSAPKAANHANQTGPQNNSNHSTLVPVKPAPKRRGRKPKRVVHKQLDIPDICDRLTSSVACEEILYCEEVKNHAVSEIDALYDEIRPAVEEHERDSQDSVSTSLAEKWIEASCRKYKAEFDLYAAVLKNVASTPLRSKDDVGPREQNGLKYLENGS

SEQ ID NO: 302892 - protein, 616 aa, Zea mays
  unsure (1)..(616): unsure at all Xaa locations
  Clone ID: MRT4577_39314C.1.pep
RFQKCQYARTRLVRTGGRGWGLVADENIMAGQFVIEYCGEVISWKEAKRRAQAYETXRQCLXILSLLIFELWQTGTFLASYNIXSVTAGLKDAYIIYLNADESIDATRKGNLARFINHSXKFVLKAQHTXFHLASYVCDLIIDFFCXTCKXKSNSSLLKHXQPNCETRKWNVLGEVRVGIFAKQNIPFGTELSYDYNFEWYGGVMVRCLCGAASCSGFLGAKSRGFQVGEQIYVVHVTSYFMLDTXVVFDRRNHRYLLVVICQSSLSDIGMTDCTLVFCICLFADITFXPSCYLLIAWKIDILHHYLVIFAFPCKLIFDMFIMFLMXLLIGMLQEATYLWEDDDDRFSVENIPLYDSADDEPTSINKEILVSSDGMVTQYSNISRVQSTENPGNTGTNEFAPIIVDELTTSSNGLAPMNVEPLTVSSNEFTPSNAMPMVARLVENGSTGYSAQDTHDASQNSAPKAANHANQTGPQNNSNHSTLVPVKPAPKRRGRKPKRVVHKQLDIPDICDRLTSSVACEEILYCEEVKNHAVSEIDALYDEIRPAVEEHERDSQDSVSTSLAEKWIEASCRKYKAEFDLYAAVLKNVASTPLRSKDDVGPREQNGLKYLENGS

SEQ ID NO: 302893 - protein, 48 aa, Zea mays
  unsure (1)..(48): unsure at all Xaa locations
  Clone ID: MRT4577_39315C.1.pep
ELIKQVGFQSHDFRACLECGSFLFFLVLXLFCSVKFASSFQHYRVIPP

SEQ ID NO: 302894 - protein, 68 aa, Zea mays
  unsure (1)..(68): unsure at all Xaa locations
  Clone ID: MRT4577_39316C.1.pep
MASETETFACQAEINQLISLXINTFYSNNEIFLMELISNSSDDLDKIMLESLTDKTKLDVQPELFIYI

SEQ ID NO: 302895 - protein, 136 aa, Zea mays
  Clone ID: MRT4577_39317C.1.pep
AQIERVPARLRRQRQFSLARALPLSLVAQWGRPVGTSFLRPFALSLFVSRAWFASAEPLPPGVPFSLFAPWTCLVSSAFPALTVDRRVGTRARHRVFQPRRPPTRPDPFFRAPPVPGTHPWPHSGNMSSKTKPLGF

SEQ ID NO: 302896 - protein, 516 aa, Zea mays
  unsure (1)..(516): unsure at all Xaa locations
  Clone ID: MRT4577_39318C.1.pep
MAEETANDAQVAQDNEIALSNEAIQGDELVHVEELSQGDDLVQGNELVVSEVTTPTIGTRRRRKKSLVWEHFTIEAVAGGATRACCKLCKQTFAYSSGSKIAGTSHLKRHITXWALVLRXNQEQRLALPSTGGTDNDGEGTIERRTKRRYRYTGYANAAFDQDRSCSYLAKLIIQHDYPLHIVQQPPFAIFIESLQPRFKIVDVETMEGEVYAVYQKEKENLLQAFNTMPGRISLTIGLWTTSQTLGYVSLAGQFIDSEWKVHRRMLNFMMVSSPHSENALSEAISMSLSDWNMKDRLFTITLDNECSSHDIYSANLRDHLSNKNNLMLKGQLFVVRCYAHILNAVALDVIASIHGVVYSIRESIKFIKASSAREEKFAEIALQLGIPSTKTLCLDVTTQWNTTYLMLLAALDYKQAFATLETCDDNYNESPSAXDWKKVEATCNYLKLLYDSAHSVMASANPTANIFFHEAWKIQLELANGTEHENPIFSSIAKDMHERFDKYWKDCSLVLAIAV

SEQ ID NO: 302897 - protein, 110 aa, Zea mays
  Clone ID: MRT4577_39319C.1.pep
RRACSAKYPDAHRCPSHVNRPSRSRSQIIISVPQRGWYRCMGCASRSQRCTVCTASPWPLILVLLIQSAAQLKTVRAKFGASRMGNHPMAPCERVSCSMGSCLCNPMPIL

SEQ ID NO: 302898 - protein, 37 aa, Zea mays
  Clone ID: MRT4577_3931C.1.pep
SVLPVDHASANIIVINSLVCSGFWTNTSVNFQRLCKW

SEQ ID NO: 302899 - protein, 87 aa, Zea mays
  Clone ID: MRT4577_39320C.1.pep
IRFEADWTAFYAEIGLDNMGRMISPAPVYSNKLQHINHELASTLADVVTEAEMNGTFPSHMHDGETELKVNYRNEGVRLTLMQKKLS

SEQ ID NO: 302900 - protein, 163 aa, Zea mays
  unsure (1)..(163): unsure at all Xaa locations
  Clone ID: MRT4577_39321C.1.pep
GASLXXRXPWXLSPCXVLXRXXXVLXXLPCLAXLXVXLXALXPGPSXWALRPRRPXAXSXSAXGPXLXXXPPCGXXPLXXXLVAPLLAPLVALCAPXACLVLPGGXSWVPAXVXXXLGPSPSLLLXXWVLLPALWPXXRWPLXPLSVSRPXPXSLFVSGXFPP

SEQ ID NO: 302901 - protein, 114 aa, Zea mays
  unsure (1)..(114): unsure at all Xaa locations
  Clone ID: MRT4577_39322C.1.pep
PPLCGGPQQXKSFKCCPLFFLLVPPPGLGLKAEVSQRIPPSPKVVSPQGDFYFWGGLKKGGSPSFSGLLPWGIPPEKARPKGWAPQGGFGGFFFGFAQNFGPKKGVPPIKTGAR

SEQ ID NO: 302902 - protein, 78 aa, Zea mays
  unsure (1)..(78): unsure at all Xaa locations
  Clone ID: MRT4577_39323C.1.pep
SQLLKQLSSTMRKVQGNAVXVTSIKLVTSIKTEGPFRAXGDRSDTPLTIPSQTESHTAGLFARAGVDRSALEVEVRYL

SEQ ID NO: 302903 - protein, 158 aa, Zea mays
  Clone ID: MRT4577_39324C.1.pep
PPGLFFFFFRLFFFLDLLGDNIFPQGPVFSFFSPSFFSPPFWENWFPSRSRSGFSGWPPGSVDLQCKFWLHPFFCPPSRGQVQKPLGGGAFQKGPFPVFSPPQKFFTPQSFFFFLFKTQFSLFFFFPFVSINGFWGAPYPVFFFFFPPPFFFLYPLAV

SEQ ID NO: 302904 - protein, 204 aa, Zea mays
  unsure (1)..(204): unsure at all Xaa locations
  Clone ID: MRT4577_39325C.1.pep
MADYEQEQDMEVEALQAILMDDIKEIDPSESGIATTARCFQILLSPQDDDFDESAYVPVQLALIFAHTEKYPDEPPLLNVKSXYEGLNHMILXLKEKLEQEVIIPHGEAVTVESFLAWRDRFEAELALQRAKLMPDSALTSSKEKKLTGRQYFESGRHAVKGASTVADEDEEEEEDIEFDDDFEDDEEDMLEHYLAQQSENPAA

SEQ ID NO: 302905 - protein, 246 aa, Zea mays
  unsure (1)..(246): unsure at all Xaa locations
  Clone ID: MRT4577_39326C.1.pep
MADYEQEQDMEVEALQAILMDDIKEIDPSESGIATTARCFQILLSPQDDDFDESAYVPVQLALIFAHTEKYPDEPPLLNVKSXYEGLNHMILXLKEKLEQEAKENLGMAMVYTLVSSAKEWLSEIYGQNGGDEEPEETEAEEEVIIPHGEAVTVESFLAWRDRFEAELALQRAKLMPDSALTSSKEKKLTGRQYFESGRHAVKGASTVADEDEEEEEDIEFDDDFEDDEEDMLEHYLAQQSENSAA

SEQ ID NO: 302906 - protein, 249 aa, Zea mays
  unsure (1)..(249): unsure at all Xaa locations
  Clone ID: MRT4577_39327C.1.pep
WAAWEDYEQEQDMEVEALQAILMDDIKEIDPSESGIATTARCFQILLSPQDDDFDESAYVPVQLALIFAHTEKYPDEPPLLNVKSXYEGLNHMILXLKEKLEQEAKENLGMAMVYTLVSSAKEWLSEIYGQNGGDEEPEETEAEEEVIIPHGEAVTVESFLAWRDRFEAELALQRAKLMPDSALTSSKEKKLTGRQYFESGRHAVKGASTVADEDEEEEEDIEFDDDFEDDEEDMLEHYLAQQSENSAA

SEQ ID NO: 302907 - protein, 65 aa, Zea mays
  Clone ID: MRT4577_39328C.1.pep
KPDIHKTAYVHNLMQGSASLLSEIRKYGGRSFHSVLRPRFAGNSYRPYSGSMLAREDSSHCLVVH

SEQ ID NO: 302908 - protein, 55 aa, Zea mays
  Clone ID: MRT4577_39329C.1.pep
LKSIIHCKHWSKDRSYFSPTIYKTIHFNDLYLGKDSIQTPYQWSLKKPNIFYRSI

SEQ ID NO: 302909 - protein, 46 aa, Zea mays
  Clone ID: MRT4577_3932C.1.pep
NTLFRQCLTCNVCMVSGTGVCAKRMVVDARHHMLGTALQDHTQGFF

SEQ ID NO: 302910 - protein, 66 aa, Zea mays
  Clone ID: MRT4577_39330C.1.pep
AGRFGVEFATRTLQVEGKTIKAQIWDTAGQERYRAITSAYYRGAVGALLVYDITKKQILLSGRYDV

SEQ ID NO: 302911 - protein, 248 aa, Zea mays
  unsure (1)..(248): unsure at all Xaa locations
  Clone ID: MRT4577_39331C.1.pep
MADYDQEQEMEVEALQAILMDDIKEIDPSESGIATTARCFQILLSPQDDDFDESAYVPVQLALIFAHTEKYPDEPPVLNVKSXYEGLNHMILXLKEKIQREATENLGMAMVYTLVSSAKEWLSEKYGQNGGDEEPEESEAEKEEVIIPHGEAVTVESFLAWRERFEAELALQRAKLMPDSALTATKEKKLTGRQYFETGRHAVKGASTVADEDEEEEEDIDFDDDFEDDEEDMLXEHYLAEQSGKSTA

SEQ ID NO: 302912 - protein, 52 aa, Zea mays
  Clone ID: MRT4577_39332C.1.pep
FFFFFFFFFFFFFFFFFFFFFFFFRKQQRLDGFYIHIALSDFFTNTLRNTLD

SEQ ID NO: 302913 - protein, 45 aa, Zea mays
  Clone ID: MRT4577_39333C.1.pep
ILNSGTRATLAQSWLPLVQSRSNSSLLATTHAPIRNVLVRLGRHL

SEQ ID NO: 302914 - protein, 63 aa, Zea mays
  Clone ID: MRT4577_39334C.1.pep
TLIHKNLKRRECLDVLRIKLTSTVLAMMRPYSWTMALTLKTLLYYYRLMTRIQGARKRLTAVG

SEQ ID NO: 302915 - protein, 56 aa, Zea mays
  Clone ID: MRT4577_39335C.1.pep
KNATSPTDTATLISAEIGQLDLPVGVLHFPLGARSPQGAQSEYRAGAEMKHLLGRC

SEQ ID NO: 302916 - protein, 123 aa, Zea mays
  Clone ID: MRT4577_39336C.1.pep
MSEKKRAPGPRKDEVVTREYTVNLHKRLHGCTFKKKAPNAIKEIRKFAQKAMGTNDVRIDVKLNKHIWSSGIRSVPRRVRVRIARKRNDEEDAKEELYSLVTVAEVPQEGLKGLGTKVVEDED

SEQ ID NO: 302917 - protein, 106 aa, Zea mays
  Clone ID: MRT4577_39337C.1.pep
SHAGMIGTTRPTPYHILHDEIGFNPDDLQELVHSLSYVYQRSTTAISVVAPICYAHLAAAQVGQFIKFDEMSETSSSHGGHTSAGSVPVQELPRLHEKVRSSMFFC

SEQ ID NO: 302918 - protein, 897 aa, Zea mays
  unsure (1)..(897): unsure at all Xaa locations
  Clone ID: MRT4577_39338C.1.pep
MESHNGEANDLPPPPPLIAGVEPLKADETKMPLKPRSLVQRNGFGRKGQPIKLITNHFKVSLVNAEEFIYHYYVNLKSADDTPXVDXKEXGKEVGEXSSLVRHNLEIRILAKMVTRDYEQVEELHVLILSMQGNVSXVFTVLGXVGGYETMNLLRHLVPASERTXRIFKXSLQLCWRAPLQSVWQSCXARCGEAADQVNQERDRTYLKHSFKXGGLSLXNQSLYNSNPYDSIELXATLSGLTXFISSFRAARCGHPLNIYASTILIIKVGLLTYLIIAKQKVDGTIMIDRPKGNRILKNLMVLKTAANQEQKIAGPSVYQRSTTAISVVAPICYAHLAAAQVGQFIKFDEMSETSSSHGGHTSAGSVPVQELPRLHEKVRSSMFXLLSSRECVPWFYLFGCMVGGSEPMNLLPHLVPASGXELCRMLNGXFLSIVAVVLGGTLQPFWLAXAALGAFLRGSRLGTWXTSLNHPXLSVAGTAEKWAVVNFSARCNVRDLVRDLIKCGGMKGIMVDAPFAVFDENPSMRRSPAIRRVEDMFEQVKTKLPGAPKFLLCVLAERKNSDIYGPWKKKCLAEFGIVTQCVAPTRVNDQYLTNVLLKINAKLGGLNSLLQIETSPAIPLVSKVPTIILGMDVSHGSPGHSDIPSVAAVVSSREWPLISKYRASVRTQSPKMEMIDSLFKPRETDDDGLIRECLIDFYTSSGKRKPDQVIIFRDGVSESQFNQVLNIELQQIIEACKFLDEKWNPKFTLIIAQKNHHTKFFIPGKPDNVPAGTVVDNKVCHPRNFDFYMCSHAGMIGTTRPTHYHILHDEIGFNPDDLQELVHSLSYVYQRSTTAISVVAPICYAHLAAAQVGQFIKFDEMSETSSSHGGHTSAGSVPVQELPRLHEKVRSSMFFC

SEQ ID NO: 302919 - protein, 74 aa, Zea mays
  Clone ID: MRT4577_39339C.1.pep
SLPGKTPPTLRKKRGKKRKEPALGAWEIIRGPLGLPPRPPPLLGGPKGGPPLPLRYRASGKGHSGGPFWGNPHL

SEQ ID NO: 302920 - protein, 66 aa, Zea mays
  Clone ID: MRT4577_3933C.1.pep
LGVDNQFPQETATPVNTPRPGTAHYKHNVYAQGGPADVNAQDHQLASRRPPPLFYSVPRTKPSRTT

SEQ ID NO: 302921 - protein, 700 aa, Zea mays
  Clone ID: MRT4577_39340C.1.pep
MESHNGEADDLPPPPPLAAGVEPLKADETKMPLKPRSLVQRNGFGRKGQQIKLITNHFKVSLMKAEDFFYHYYVNLKYEDDTPVDRKGSGRKVIEKLQQTYAAELANKDFAYDGEKSLFTIGALPQVKMEFTVVDEDVSTGKTPANGSPGNDSPPGSDRKRVRRPYNTKTYKVELSFAAKIPMSAISQALRGQESEHTQEAIRVIDIILRQHSAKQGCLLVRQSFFHNNPSNFVDLGGGVVGCRGFHSSFRATQSGLSLNIDVSTTMIVKPGPVIDFLLDNQKVGDPSMIDWAKAKRALKNLRIKISPANQEQKIVGLSERTCREQLFTLKHKNGNNGDSEEITVYDYFVKQRGIVLQYSGDLPCINVGKLKRPTYFPIELCSLVPLQRYTKALNTLQRSSLVEKSRQKPQERMSVLSDVLQRSNYDAEPMLKACGITIARNFTEVDGRVLQPPKLKAGNGEDIFTRNGRWNFNNKKLIRASSVEKWAVVNFSARCNVRGLVRDLIKCGGMKGIMVDAPFAVFDENPSMRRSPAVRRVEDMFEQVKTKLPGAPKFLLCVLAERKNSDIYGPWKKKCLAEFGIVTQCVAPTRVNDQYLTNVLLKINAKLGGLNSLLQIETSPAIPLVSKVPTIILGMDVSHGSPGHSDIPSVAAVVSSREWPLISKYRASVRTQSPKMEMIDSLFKPRETDDDGLIREVSD

SEQ ID NO: 302922 - protein, 66 aa, Zea mays
  Clone ID: MRT4577_39341C.1.pep
CRLQSVLVVVQVRAGDVLMSQCLELFMSACRTSPGPAGAELIAPMRQFCKLLSTLKLPPTDDAMLS

SEQ ID NO: 302923 - protein, 60 aa, Zea mays
  Clone ID: MRT4577_39342C.1.pep
MDLLLPYKIGDLAESKSFLNGYRGAWFRCKVHNMRVNDSGYLECYLEYIDYDGEDLDWVA

SEQ ID NO: 302924 - protein, 180 aa, Zea mays
  unsure (1)..(180): unsure at all Xaa locations
  Clone ID: MRT4577_39343C.1.pep
MDLLLPYKIGDLAESKSFLNGYRGAWFRCKAILGGSFTSVRYINKFGDMVYEEIEXREVHNMRVNDSGYLECYLEYIDYDGEDLDXVAVFQENPASSSQNSKGSTEVMIRPSFPQWYYGHEPDQLPVSDVTAVVDEAWKIGDMVDWLKDGCYWSGTILSTQKDMVKANQKVGIPLVFFDI

SEQ ID NO: 302925 - protein, 86 aa, Zea mays
  unsure (1)..(86): unsure at all Xaa locations
  Clone ID: MRT4577_39344C.1.pep
GASLGARFYRQIERHPGIIPVIGLICLGMGSAALYLXLRLALRSPDVCWDRXNNPEPWNRLSPNDQYKFLAVSTDCKXLXKDRPDF

SEQ ID NO: 302926 - protein, 120 aa, Zea mays
  Clone ID: MRT4577_39345C.1.pep
VSDLINLNLSDSTDRIIAEYICVGGSGMDMRSKARTLPGPVTDPSQLPKWNYDGSCTGQAPDEDSEVILYSQAIFKDPFRIGNNILVMCDAYTPAGEPIPTNKRHAAGNVFSNPDVAAEV

SEQ ID NO: 302927 - protein, 65 aa, Zea mays
  Clone ID: MRT4577_39346C.1.pep
ELASDFLHFLPGGSLYRGRNHHPVHCCERNKELFCKHGMSATDNSTSEKVPSGTGKAKLRVSEVS

SEQ ID NO: 302928 - protein, 125 aa, Zea mays
  Clone ID: MRT4577_39347C.1.pep
ESGVLVLPLPLHIFMLHPVRNEYSRDHPASPATIANTQYAWESIDVISSRSESRDSMLVTKHSTQSASPYGPSVLAVVSACAFILGVLSEASSEVVLWYSSPAEQSTFCAHCAILQPASASRLWM

SEQ ID NO: 302929 - protein, 62 aa, Zea mays
  Clone ID: MRT4577_39348C.1.pep
YFQQLCLSSSSFCVDYCIMKGIQIRVMLHVYLNIAPPYQRAVSSFTNSSISISEIIHFHNVL

SEQ ID NO: 302930 - protein, 88 aa, Zea mays
  Clone ID: MRT4577_39349C.1.pep
QPGMKRTVRGSTDTHHLFRPAFDTLPRQQLVLALLQHPYLLVQPRTSPSGARILTTRPATVQGVKDMDMESWRHGLYSVSISIRHVKS

SEQ ID NO: 302931 - protein, 69 aa, Zea mays
  Clone ID: MRT4577_3934C.1.pep
THYARTPVKQHTTFESTHAFPRICYREMVATRDTQSLINRVARLDTYEDTCHLVQEDRLYLDGRGLGNQ

SEQ ID NO: 302932 - protein, 346 aa, Zea mays
  unsure (1)..(346): unsure at all Xaa locations
  Clone ID: MRT4577_39350C.1.pep
PLAVTHLLQHTLRSLCGHDDAQWVYAVFWRILPRNYPPPKWDLQGGIYDRTRGNRRNWILAWEDGFCNFAASACDHEGAAAPAAAAASSSYTAECAAAGQEAAKGLQPELFFKMSHDIYNYGEGLIGKVAADHSHKWVFQEAQEHEINLISSWSNPADSHPRTWEAQFKSGIKTIALIAVREGVVQLGSMKKVAEDLSYVVMLRRKFGYLESIPGVLLPHPSSAAFPAGAIAGFPPPQTRPAAGRLDSSCRRRXLYDPYAQSAAAAAQMHIVPSMSSLEALLSKLPSVDPAAAAMASKEETDAVEHGERHGMADVVAARSRGESTSVAAAAAVSYYVNVAKPSEGF

SEQ ID NO: 302933 - protein, 34 aa, Zea mays
  Clone ID: MRT4577_39351C.1.pep
LNHLAIINTPLIVINYPLHSSFSYLCLTLSYLHI

SEQ ID NO: 302934 - protein, 257 aa, Zea mays
  unsure (1)..(257): unsure at all Xaa locations
  Clone ID: MRT4577_39352C.1.pep
IRHEGKTKSNYSLPRILAWEDGFCNFAASACDHEGAAAPAAAAASSSYTAECAAAGQEAAKGLQPELFFKMSHDIYNYGEGXYLAVNNTTVVYXEDYWSTIISRAVPLPGDVLVLCVIXLIGKVAADHSHKWVFQEAQEHEINLISSWSNPADSHPRTWEAQFKSGIKTIALIAVREGVVQLGSMKKVAEDLSYVVMLRPEFGYLESIPGVLLPHPSSAAFPAGAIAGPAAADAACSWPPGLVMPPPVELYDPYAQS

SEQ ID NO: 302935 - protein, 78 aa, Zea mays
  Clone ID: MRT4577_39353C.1.pep
YNGIPFFLIINHYSRKQACVVVKSYLTVSLNFGFEAASPHLQKEEPASVYLFPVPAHVEACGTGLPFVFIIILHTALL

SEQ ID NO: 302936 - protein, 69 aa, Zea mays
  Clone ID: MRT4577_39354C.1.pep
VSLWLELAIGRTTSGFAAGMISRGGFIKLWMCNCVCSSFERVYTLLFVWQEFTTQKRKTILHSTFLFNK

SEQ ID NO: 302937 - protein, 149 aa, Zea mays
  Clone ID: MRT4577_39355C.1.pep
KSASRVNTLDEPDLDPKDITPTRPAYGAEGELGIVLSERFMEHDAYSMFDGLMDGGSGVVCMAEFFSTSKVGSSSSLAPVIEASASLFHLLSIVEPSLHSHFIELDVEPQYFALRWLRVLFGRELCLDDLLVVWMKVFACSNDMLLREN

SEQ ID NO: 302938 - protein, 486 aa, Zea mays
  Clone ID: MRT4577_39356C.1.pep
MRPAIAAPAAIRHASSIAHPSRRQTCAGKTRCLASHSPATSAQLLSPRRPATITARTTPASLYTLVAQHRMASSSSVQKIKVKNPVVELDGDEMTRIIWQVIKDKFIHPYPDIDLKYYDLGLPYRDETDDQVTLDAAEAIKKYSVGVKCATITPDEQRVEEFKLKKMWLSPNGTIRNHLGGTVFRAPIVIPTIPRLVPGWKQPIIIGRHAFGDQYRAKDRVIPGEGTLEMVFTPKGGKPEVIKVYDFPAEGGVAQTQYNTTESISGFAHASFKMALDKKLPLYMSTKNTILKAYDGKFKDVFQEIYDTQYKKDFEAAKIWYEHRLIDDMVAQMIKSEGGYVIAMKNYDGDVQSDIVAQGFGSLGLMTSTLITPDGKTFEAEAAHGTVTRHYREHQKGKETSTNPIASIFAWTQGLAKRGELDNTPELVVFAETLEKACIDTVDVDKIMTKDLALACGKKDRASWVTTNEYLDAVERRLKSSLKGKL

SEQ ID NO: 302939 - protein, 48 aa, Zea mays
  Clone ID: MRT4577_39357C.1.pep
TKGVLGNKKKKKKKKKKKKKKKKKKKKKKKKKKKKKKKKKKKSVYSVT

SEQ ID NO: 302940 - protein, 66 aa, Zea mays
  Clone ID: MRT4577_39358C.1.pep
PRLGVKTPTVSSVLACQSLPPLKKDHQGRQLAQACSLYRCPSFDRRVAPATGSTACGFSMVPAGRS

SEQ ID NO: 302941 - protein, 68 aa, Zea mays
  Clone ID: MRT4577_39359C.1.pep
QCLYRPNGDWTRAVSQHICAAFDSGYARKNRCVCQLNSVRYFPLLPSFVITKRRFPSALLNSWLPLRV

SEQ ID NO: 302942 - protein, 130 aa, Zea mays
  unsure (1)..(130): unsure at all Xaa locations
  Clone ID: MRT4577_3935C.1.pep
GGARGGGAAAAAGXARKRFRTKFXXEQKARMVGFAEDAGWRLQKLDEAAVQRFCQEVGVKRRVLKVWMHNNKHTLARRGHAGLPGDPELLGPHDGQLGMPLPEPAAEPAAAAAAGLGVTDQAMSFGTGRH

SEQ ID NO: 302943 - protein, 86 aa, Zea mays
  unsure (1)..(86): unsure at all Xaa locations
  Clone ID: MRT4577_39360C.1.pep
TSYPVGFVPLLWWISAYKCIVCCDDIYMLKGSCCKSLAPFPQGCFYSNALLGLKCYENPKHKVTAVPADEEXICGATXRWWKGLLF

SEQ ID NO: 302944 - protein, 538 aa, Zea mays
  unsure (1)..(538): unsure at all Xaa locations
  Clone ID: MRT4577_39361C.1.pep
MAACIRKIASVEFGLSQGNRREVKDTWWWNEDVQKAIKEKKDCYKRLHHDKCADNIEKYRIAKKSAKRAVSRARGQAYDDLYQRLDTKQGEKDIYRMAKVRERKTRDVNQVKCIKDEANQLLVKNEEIKNRWKEIQEYEVKEALKRIKVGKAMGPDGIPIEVWRCLGDRAIIWLTKLFNTIFRTNRMTDEWRRSTLVPIFKNKGDVQSCTNYRGIKLMSHTTKLWERVIEHRLRKMTSVTQNQFGFMPGRSTMEAIFLLRQLMERFREQKKDLHMVFIDLEKAYDKVPKSVMWWALEKHKVSTKYINLIKDMYTNVVTSVRTSDGDTDDFSINIGLHQGSALSPYLFALVIDEVTRDMQGDIPWCMLFADDVVLIEESRSGVLQKLELWRQTLEAKCFTLSRSKTEYMKCDFSAMGYEDGDVSLDGQVVPKKDTFRYLRSMLQKEGDIDEDVSHRIKAGXEVAASCGCLMRPSXVPHKLKGKFYRTAIRLAMLYGAECWPTKIRHVQQLSVAEMRXVRWICGHTRRDRVRNDDIRERV

SEQ ID NO: 302945 - protein, 328 aa, Zea mays
  Clone ID: MRT4577_39362C.1.pep
LPFCSVYTGKTNLQLTFAGKSRPSSPRYLRAAMIEIDVLQRLGKHDFTGSRCVQIRNWFDYRNHICIVFEKLGPSLYDFLRKNSYRSFPIDLVREFARQILESVAFMHDLRLIHTDLKPENILLVSSESIRVPDYKVSIRPPKDGSFFKNLPKSSAIKLIDFGSTTFESQDHNYVVSTRHYRAPEVILGLGWNYPCDLWSVGCILVELCSGEALFQTHENLEHLAMMEKVLGPLPKHMIVRADRRAEKYFKRGVRLDWPEGAASRESMKAVWKLPRLQNLVMQHVDHSAGDLIDLLQGLLRYDPNERLKAHEALQHPFFTRCIRRCGF

SEQ ID NO: 302946 - protein, 227 aa, Zea mays
  unsure (1)..(227): unsure at all Xaa locations
  Clone ID: MRT4577_39363C.1.pep
HASANVVTSVRTSDGDTDDFPINIGLHQGSALSPYLFALVIDEVTRDIQGVLPWCMLFADDVVLIEEXRSGVSQKLELWRQTLEAKGFRLSRSKTEYMKCDFSAMGYEDGDVSLDGQVVPKKDTFRYLGSMLQKEGDIDEDVSHRIIGTWLKWRQAAGVLCDHRVPRKLKGKFYRTAIRPAMLYGAECWPTKRRHVQQLSVAEMRMLRWICGHTRRDRVRNDDVRER

SEQ ID NO: 302947 - protein, 103 aa, Zea mays
  unsure (1)..(103): unsure at all Xaa locations
  Clone ID: MRT4577_39364C.1.pep
GIPFGFLYPGGIAPXGAFPQPIPLFRLLFPPVQKFVPKGFVLEAEFGKRLAQVVNDPNLPKLGVYWSWNKDSGLFENQLLQEASDPEKAKKLWGINEKVVGVA

SEQ ID NO: 302948 - protein, 91 aa, Zea mays
  unsure (1)..(91): unsure at all Xaa locations
  Clone ID: MRT4577_39365C.1.pep
LPARIEKGASFGDSKKAFXAASEGPLKGILGYAEEDLVFPAFLGDSRLSIFDAKAGVALNDPFVKLVLWYDNEWGYSNRVVALIPPMFKTQ

SEQ ID NO: 302949 - protein, 698 aa, Zea mays
  unsure (1)..(698): unsure at all Xaa locations
  Clone ID: MRT4577_39366C.1.pep
AIPMLYCGQELINGNFTTAFLPPPSIYYTWPPRNISPPWRPDDKDGHYVFAVGENLTPRYRILNKMGEGTFGQVLECWDLENQEAVAIKIVRSLQKYREAAMIEIDVLQRLGKHDFTGSRCVQIRNWFDYRNHICIVFEKLGPSLYDFLRKNSYRSFPIDLVREFARQILESVAXSTQFTLATLKCNHLVFXFEQHHXLAIKSSEFXNIIRLLNCYGLAWSWXLDLQVLMCFPSPLXEADGCFSSIVMHDLRLIHTDLKPENILLVSSESIRVPDYKVVTGFLNFDTLLYCXTXRFFLGHIHIINVLXILYLPLTCHCHVGTTCATVTNKGLWKTATAGIPLILMWTGIXYLIXTDYAELQLHKCTFFSKLYFNLQXVSIRPPKDGSFFKNLPKSSAIKLIDFGSTTFESQDHNYVVSTRHYRAPEVILGIXHPLTHTQSGQFTFIFYFFLNDTSFFVLYLFFKSLINDNSCLGLGWNYPCDLWSVGCILVELCSVSLLRLCIGVLDXLDHICRNSVVLVLISLSCIFLFFHDNXGEALFQTHENLEHLAMMEKVLGPLPKHMIVRAEYVYKSFVIFLSYFLSFLFMYTSKMRYLISSVFAYLINLFINAVFXRRAEKYFKRGVRLDWPEGAASRESMKAVWKLPRLQNLVMQHVDHSAGDLIDLLQGLLRYDPNERLKAHEALQHPFFTRCIRRCGF

SEQ ID NO: 302950 - protein, 91 aa, Zea mays
  Clone ID: MRT4577_39367C.1.pep
MDRVAVAATEGQIGAVNDESWVAVDLSDDGLSSAADPGAVALEERPVFRTEKIKGVLLHPYRVLIFVRLIAFTLFVIWRISHRNPDRAVSG

SEQ ID NO: 302951 - protein, 88 aa, Zea mays
  Clone ID: MRT4577_39368C.1.pep
FFRVVGEFSDPTASFNRNFVNDPVHLSGRRSLLPIPMRNRCQIHVSRVMNPQMNERTLTPQTKQQTPYAPSVSPTLRERSGPPQVRLL

SEQ ID NO: 302952 - protein, 139 aa, Zea mays
  Clone ID: MRT4577_39369C.1.pep
KGGRAASFNIIPSSTGAAKAVGKVLPDLNGKLPGMSFRVPTVDVSVVDLPVRIEKGASYEDIKKAIKAASEGPLKGIMGYAEEDLVFTDFLGDSRSSIFYAKAGIALNDPFVKLVSWFDNEWGYSNRVVDLIPPMFKTQ

SEQ ID NO: 302953 - protein, 189 aa, Zea mays
  unsure (1)..(189): unsure at all Xaa locations
  Clone ID: MRT4577_3936C.1.pep
KGLGQDLLKLIXEISVQNGNESQAMTLQTRNLQQVRSVVAFPDATASVVTVLRSFRVLRVLDLQDCDLSQCCSLKYLGNLFHLRYLGLCNTSITQLPEEIVNLQLLQILDVWNNKMYCLPSTIVQLRYLMCLYIDGFTRVPNGIGSLTSLEELTFLGIYDSTVDIIEELGQLTELRVLHIVLFGEWNDK

SEQ ID NO: 302954 - protein, 452 aa, Zea mays
  Clone ID: MRT4577_39370C.1.pep
MPDEWRRSTLVPIFKNKGDVQSCTNYRGIKLMSHTMKLWERVIEHRLRKMTCVTQNQFGFMPGRSTMEAIFLLRQLMERFREQKKDLHMVFIDLEKAYDKVPRSVMWWALEKHKVATKYINLIKDMYTNVVTSVRTSDGDTDDFPINIGLHQGSALSPYLFALVIDEVTRDIQGDIPWCMLFADDVVLIKESRSGVSQKLELWRQTLEAKGFRLSRSKTEYMKCDFSAMGYEDGDVSLDGQVVPKKDTFRYLGSMLQKDGDIDEDVSHRIKAGWLKWRQAAGVLYDPRRCRESDQPRGKWVTRLVGKDVQPLQSVKLVRDQALDRPTPSSLHARASLRRLLGAFFSAEGPLSKNTFGKIISKQMNSTPILFTLTCNHLHVILRSLLSVKPKLLRTSDQQHPWGGTAPNDMALVPHVPLLRMATRYKLRKYTIAMSKIAGVPTTIIWYMPPSL

SEQ ID NO: 302955 - protein, 313 aa, Zea mays
  unsure (1)..(313): unsure at all Xaa locations
  Clone ID: MRT4577_39371C.1.pep
MMLNEQGSGRHPLSDASSLDLEPVISEQGSGRRILSSALHRCPGVVENEQGSLHLPRRVRRVRKLVEPTRVRVGSWNVGSLTGKLREIVDVAVRRRVNILYVQETKWKGQKAKEVEGTGFKLWYTGTAANKNGVGVLIDKSLKDGVVDVKRLGDRIILVKLVIGDLVLNVISAHAPQVGLNENSKREFWEGLEDIVSSVPVGEKLFIRGDLNGHVGTSSTSFEGVHGGFGFGTRNQKGEEILNFAXRPRCXIANTFFRKRKSHLVTFSSGQHXSQIDFILLRKEDRHACLDCKVIPGGCVVTQHKLVIADFRV

SEQ ID NO: 302956 - protein, 135 aa, Zea mays
  Clone ID: MRT4577_39372C.1.pep
GHVGDIWQVVLVGNPRKGCHQGQALKERAGVLVNKNVGISDNLGPGKPLRYFKGLPLPVCAALVKQLDSGEDDDQLTIPRGGSRHAAQNYNDSKRTHGMGNNFYGKKREKREIKNVSKCLIPKKKKKKKKRAGAP

SEQ ID NO: 302957 - protein, 47 aa, Zea mays
  Clone ID: MRT4577_39373C.1.pep
RSVEVVKVTDEMKEFAAYGKLRLERMNKKHLGARQKKAAEAEKEDKK

SEQ ID NO: 302958 - protein, 122 aa, Zea mays
  unsure (1)..(122): unsure at all Xaa locations
  Clone ID: MRT4577_39374C.1.pep
PVARGMASPRTXXVFSFFRRRRGEAAAGDVSAAAVMAFTKVQRIMTQPIVRHLFADRPPFLWARLLFCVLCFSFTSVALFLIGLALRFMPGVANPWWACAAAEPHLPLSPEQSAHPHLALLA

SEQ ID NO: 302959 - protein, 157 aa, Zea mays
  Clone ID: MRT4577_39375C.1.pep
QQQRFGGSTLSTPSRLLKKHGASIFSRGLVTASGREGLFTAGYLGLAPSITRNLIEEREFSNTNARFIGALLAGLLFGTLSHPLDTIKTCMQGDVEKEKYTSLRDTASTLYREGGLRRFFRGWGWRTSRFIGGIFIINVGKSLFGPLLFPQHFRQQK

SEQ ID NO: 302960 - protein, 456 aa, Zea mays
  Clone ID: MRT4577_39376C.1.pep
MAEDKKNVVPALAGFYEAMERSNVEKITDEMLAGLSGDSSDNESFDVESENEDAEDRPWRTSHVVFGKSTIISKVCTYIDTRDLVQEYIPYKVWPLVNDWEMSKDIVVGSSEGGLVYLRYTYRYRSQLDEPNYYDWLEAVEVTSDELLGAYTKAEDEAMNTAFSARGKRRLNRVFDVIIPVATAEAIVDPVKEIEAKNSKTEEHPKLQSPPTTMGLTKLAVAPATTPMKGRRMTSVLDAVLKSTKMPTPISTKASEDKIEDLREVTTASASPEAGPSGTKPVELAKESLLEKLTLSIPKAPSQDDLEYIVHHAPGKQLSEEQIAKSEVMTLRNEALDKDKILLSLVERLKSSEARLSSLSEVEQKMKESEKKKEIDAKRIADLEYALSIQVGLHRSEVQGLEKKLDEITEDFNVEQTKHEISDTERLRVQKNVEELRQTKEECYNVAIECCNKLKN

SEQ ID NO: 302961 - protein, 92 aa, Zea mays
  Clone ID: MRT4577_39377C.1.pep
MAAEDSKDILKKRLPKKIREVPDCYFLPRRSWPSALAIYGAVCAASFGAGMLLEVWINKKIKGIFPHFIAGERSKSLLDFRTLGLYLGNLRL

SEQ ID NO: 302962 - protein, 48 aa, Zea mays
  Clone ID: MRT4577_39378C.1.pep
VGVGVGIGEHDSASPFVTELGILVIEVRLNSVKDLGELKQVIDLDSGQ

SEQ ID NO: 302963 - protein, 66 aa, Zea mays
  Clone ID: MRT4577_39379C.1.pep
NSVLRRSTRVGIASGPERRSPAQAVAAHDCLPRPRQPQRARARQRAPRTRRRPLCDMLLLFCVGGS

SEQ ID NO: 302964 - protein, 96 aa, Zea mays
  Clone ID: MRT4577_3937C.1.pep
ITAFPITPSQLCPKSTPTSDKSEHSSRRPSHEQLEDSVWLASLKASDASAMATTSWCGVHCVPICLGNCSGDLACCTNCTRSSYGQLAMIQHGCGS

SEQ ID NO: 302965 - protein, 290 aa, Zea mays
  Clone ID: MRT4577_39380C.1.pep
GLWLHKTDASRPWAGLPIRVHRNAKALVDVAITSVVGSGESVKFWSDRWLLGKTVAEHCPTLIQVISRRALKRRTVAEGLTNRQWVSDIRGGLSVTVLVEYLQLWNLVDGVVLQPDIADQHIWRLSAHGTYCSKSAYDALFVGSIPFGPWRRVWKTWAPLRCKFFVWLAIKNRVWTADRLAKRGLPHPVACPLCDQAEETIQHILVSCVFARQIWTSMLHNLGLLAIVPQHGCTRFSNWWCQSIKKVEKSLRKGLNSLIILVAWEIWKHRNACVFEGGCALHPTSSECCD

SEQ ID NO: 302966 - protein, 76 aa, Zea mays
  Clone ID: MRT4577_39381C.1.pep
GCCLVHMGAGLVRRPDNLRGLIARDAPTTVAHLAPMDESLCSSHPGVHRRGHPLHLSVCLSVFLPPSILVCCCCCS

SEQ ID NO: 302967 - protein, 119 aa, Zea mays
  unsure (1)..(119): unsure at all Xaa locations
  Clone ID: MRT4577_39382C.1.pep
ALDRTFKAVLASFAPPVVGPLGERLYGYKXPICKWRRXTSARLSTSRXGHNGTSLARAIYPSIAIPMAMCCAIYSFLYCTYPRDREMARAEAARNKGDYGDEGFGSKDEDNGERKLLPQ

SEQ ID NO: 302968 - protein, 148 aa, Zea mays
  Clone ID: MRT4577_39383C.1.pep
SRSTHASEDTEGTNVIEKAPDGTPAGGGLLYVIVHEAKDLEGKHHTNPYAKIIFKGEEKKTRVIKKNRDPRWEDGFEFVCEEPPVNDKLHVEVLSKAPKKGLIYGKETLGYIDVNLADVISNKRINEKYHLIDSKNGQIQIELQWRTS

SEQ ID NO: 302969 - protein, 104 aa, Zea mays
  Clone ID: MRT4577_39384C.1.pep
HTNPYAKIIFKGEEKKTKVIKKNRDPRWEDEFEFVCEEPPVNDKLHVDVLSKASKKGLIHGKETLGYIDISLADVISNKRINEKYHLIDSKNGQIQIELQWRTS

SEQ ID NO: 302970 - protein, 568 aa, Zea mays
  unsure (1)..(568): unsure at all Xaa locations
  Clone ID: MRT4577_39385C.1.pep
MGVISTVLGFSGFGFGFSAGIVIGYFLFIYVQPTDVKDVKVRPLVEYDSKSLEGILPEIPLWVKNPDYDRIDWLNRFLELMWPYLNKAICRTAQDIAKPIIAENTAKYKIDSVEFESLTLGSLPPTFQGMKVYVTEEQELIMEPSLKWAANPNITVAVKAYGLKATIQIVDLQVFASPRITLKPLVPTFPCFAKILVSLMEKPHVDFGLKLLGADVMAIPGLYRFVQETIKKQVASMYLWPKTLEVPIMDPSKASKRPVGILLVKVVRAQNLRKKDLLGKSDPYVKLKMSDDKLPSKKTTVKRSNLNPEWNEDFKFVVTDPENQALEVDVFDWEQAWXPFLFKFCCSFSANIVTKXMQFFVVVXVGKHEKMGMNMIPLRELLPEGTKVTTLNLLKTMDPNDVQNEKSRGELTLELTYKPFKEEDIEKEDTQGADVIEKAPDGTPAGGGLLYVVVHEAQDLEGKHHTNPYAKIIFKGEEKKTKVIKKNRDPRWEDEFEFVCEEPPVNDKLHVEVISKAPKAGLIHGKETLGYIDISLADVISNKRINEKYHLIDSKNGQIQIELQWRTS

SEQ ID NO: 302971 - protein, 108 aa, Zea mays
  unsure (1)..(108): unsure at all Xaa locations
  Clone ID: MRT4577_39386C.1.pep
SKYINLARLLNHIDPLVTRNGITAXGQCVNVESSTIPSSPTPNVAETHTPSADDEDYDHAHLFGXRRPNITRMLXHRAAASNASYNNKQSYKSSVLLDIKPCDYYTYI

SEQ ID NO: 302972 - protein, 88 aa, Zea mays
  Clone ID: MRT4577_39387C.1.pep
SAVGWNGPPKLVCHVTLVGLPLDPQRRAVVTAQRRPREGATAGVRNTLSAWPPPSACNARVSPPAPFSSPPMASAPQARGHPHYGNAS

SEQ ID NO: 302973 - protein, 83 aa, Zea mays
  Clone ID: MRT4577_39388C.1.pep
KQSSLPALVMSLHMLASTSMASSCQSTSQYSHPRKIPSEREVLKALIQGVVASSGAGVSPEESGRREKGRRKRGRRVGRHICV

SEQ ID NO: 302974 - protein, 118 aa, Zea mays
  Clone ID: MRT4577_39389C.1.pep
SALGAWISYLSLFILWMAWQPGFREPVGTEKIIQNDRVSTAQARYCNTAFVNRASASQSGMGQWASVLPSPLAPFPFQVPFEIFSLYNFLYKSESNSGIFLIKKFRVQKDSDGDTNQT

SEQ ID NO: 302975 - protein, 85 aa, Zea mays
  Clone ID: MRT4577_3938C.1.pep
WTSSAASPRIREIETVSIVMDILKQQLALAAEVGMTAVTKFTDLGAHSLDTVEIVLTLEEEFKITGEDDNAQNIVTIQDAGHLIC

SEQ ID NO: 302976 - protein, 80 aa, Zea mays
  Clone ID: MRT4577_39390C.1.pep
IALEHVLLRYPGLLSGLFEQVGPFHACHSVDLDNCRLGVNRLLMHRDTGCPSRKCIASVNVNGVPRVVFYPPRLIAPALG

SEQ ID NO: 302977 - protein, 67 aa, Zea mays
  Clone ID: MRT4577_39391C.1.pep
EQLALPGFTLKTGDARPMNLAVLTVLRVAVSAPAQVALSGKVRHFSAIPRNEAALCGYKTRLCQGVL

SEQ ID NO: 302978 - protein, 108 aa, Zea mays
  Clone ID: MRT4577_39392C.1.pep
RMRKKKKFGFFFFGTTGFWEDFFKNNWVFFWKYPKKGEKGSPFQRPLECCMCILAIHATGNWGENPLKQREFFKGRDQLLDIFWRGGKKPNPLPRGEGLWFFVPLRGS

SEQ ID NO: 302979 - protein, 82 aa, Zea mays
  Clone ID: MRT4577_39393C.1.pep
AHGETKPACLYCPLADYTRVSSVFASPRTPPESSIRSRRMRGFLLLLIHCVHQCAAYYDPSHQPYFPFPSDQITHPYLALLA

SEQ ID NO: 302980 - protein, 58 aa, Zea mays
  Clone ID: MRT4577_39394C.1.pep
ADQPIRRGININLREKYEEDGNCVYCHTELFIFQTTEHAFSGCTSGTGPQENGTRNLQ

SEQ ID NO: 302981 - protein, 79 aa, Zea mays
  Clone ID: MRT4577_39395C.1.pep
VGMRCAPFESPVQIGRHWLPIVFSSSMQWYSGQASLCVALSERVGGWVERGACDLPPTVLQPSNKLVWCLCHPIAYAWV

SEQ ID NO: 302982 - protein, 78 aa, Zea mays
  Clone ID: MRT4577_39396C.1.pep
KSEVVLFFASLSDVQHLFLTASQIKNLHLRVSRVFHMRLQGAHLRKNLIFSTVKRPQPVSRLTSVCTMTSQAPRRHLC

SEQ ID NO: 302983 - protein, 197 aa, Zea mays
  unsure (1)..(197): unsure at all Xaa locations
  Clone ID: MRT4577_39397C.1.pep
GGGGPFPQDPRGVWVAPPPPGVRPWWDPPKLFPGSSVKGGGPPLLSKGGRVFFSQFLKRPFXPXVPPPGGAALFPPHIMVGFGKWGWSPPEMENPFPGGPNKVKGFLWPGVGGLFGPGSLFRGLNEGVPWGFSPELPPGGPLFPVPRGMPPPFFRSVFFGDEWSVFWVGGSRAWAPFSAFSVIKKPPGGGICFIRAP

SEQ ID NO: 302984 - protein, 77 aa, Zea mays
  Clone ID: MRT4577_39398C.1.pep
ARSVDLQAMVRSIMGCLFAQLSITRNPSNPMVCSDVGVVSQAICIDYMCNLTRLCINSFRLLDSCYFIVPRGVYHCS

SEQ ID NO: 302985 - protein, 77 aa, Zea mays
  Clone ID: MRT4577_39399C.1.pep
NGSLPSVLRLTPNFSFTSVYPLPRISPFLRSLANSFRFRDRKLVQQGSRLFKDLFLYPAQMFVLCLTSPCYQKLKIV

SEQ ID NO: 302986 - protein, 252 aa, Zea mays
  Clone ID: MRT4577_3939C.1.pep
EFEPTGLDMLRRTLKIPVWPIGPLVRAANLPVSPEAEAAVASFLDCHPPSSVLYISFGSQNSIRAEHMAELALALESTGRPFVWAVRPPDGHDVKGEFRADQWLPDGFEERARTSNRGLLVRGWAPQVRILAHASTGAFLSHCGWNSVLESVTHGVPIIGWPLAGEQFYNAKMLKEEWGVCVEVARGNMEDTMVNRAAVADVVETVMGQTAKAAEMRRRVWEIKEVVEGSWNDGGGSSRKAMEDFLRAMNLR

SEQ ID NO: 302987 - protein, 112 aa, Zea mays
  Clone ID: MRT4577_393C.1.pep
PGSTTRPRTRGHLDTSTLITNIRNIEKAIRDCLDHFKSTRHMILYYEDIISNSNALSRVQEFLGVPVRRLMSRQVKIHTRPLPDLVKNWEEVSSKLNGTEFAHFLDGSDYAK

SEQ ID NO: 302988 - protein, 438 aa, Zea mays
  Clone ID: MRT4577_39400C.1.pep
MMLFVSPPFNDCIGNAGPVSAMIGNRLESRPISASPSFSSSLVAYKGSAKTFNLVEMERATLGFDESRIIGEGGFGRVYEGILEDGERVAIKVLKRDDQQGTREFLAEVEMLSRLHHRNLVKLIGICTEGHSRCLVYELVPNGSVESHLHGSDKGAAQFDWNARLKIALGAARALAYLHEDSSPRVIHRDFKSSNILLEHDFTPKVSDFGLARTALGEGNEHISTRVMGTFGYLAPEYAMTGHLLVKSDVYSYGVVLLELLTGRKPVDMLRPPGQENLVAWAGSLLTSRDGLESIIDHSLGRSIPFDSIAKVAAIASMCVQPEVDQRPFMGEVVQALKLVCNEGGEFNESTFSQDLHIQDVEVMSRASTDVDVDPTLSAELFTSSARYDAIDAPGSFRRYSSSGPLRVGRTGLNKERGLSTGSSSEHVGLQRFRIDGE

SEQ ID NO: 302989 - protein, 587 aa, Zea mays
  unsure (1)..(587): unsure at all Xaa locations
  Clone ID: MRT4577_39401C.1.pep
ELAQDIASGVFMNQSQVRVMGANAAPDDPEKTIVFIDLVPLGPKFDNATAFLVFERFCNKQVIXTLWILESMTYCMFFTXLPPSPPAASMNNGLSNVNDPSLHPLAADVVNHKERKGRGIIIIIILSSAFAFILCAGAALVVYFKLRNRSHLTEASPVPTKPAGPGSAMLGNRLESRPISASPSFSSSLVAYKGTAKTFNLVEMERATLGFDESRIIGEGGFGRVYEGILEDGERVAIKVLKRDDQQGTREFLAEVEMLSRLHHRNLVKLIGICTEGHSRCLVYELVPNGSVESHLHGSDKGAARFDWDARLKIALGAARGLAYLHEDSSPRVIHRDFKSSNILLEHDFTPKVSDFGLARTALGEGNEHISTRVMGTFGYVAPEYAMTGHLLVKSDVYSYGVVLLELLTGMKPVDMLRPPGQENLVAWAGSLLTSRDGLESIVDPSLGSSIPFDSIARVAAIASMCVQPEVDQRPFMGEVVQALKLVCDEGSEFNGSTSFSQDLRIQDVEAMSRASGDVDFVDPTLSAELFTSSARYDAMDASGSFRRYSSSGPLRVGRAGLDKERGLSTGSSSEHVGLQRFRIDSE

SEQ ID NO: 302990 - protein, 167 aa, Zea mays
  Clone ID: MRT4577_39402C.1.pep
ASPWERDLLLQLRAAAILPAPAPTARLHGAQTFLLPISLPWSCLGSTQAPPSPLCSLATPTPNSLPSGSLCVSMTPARIPSLIPFQPSSGDATSCSWPRTQMPARPWFLPLLAGSHECSSSGPCSTARSPSVAPPSSCSSSAPSPMAGTWLPSRHALDPPSSDLPLP

SEQ ID NO: 302991 - protein, 55 aa, Zea mays
  Clone ID: MRT4577_39403C.1.pep
QKTLPNTYGLEYTRSYLEVEDTNYLLLVKNLSGSSSLWDNIHHIIILATRTRCAR

SEQ ID NO: 302992 - protein, 205 aa, Zea mays
  unsure (1)..(205): unsure at all Xaa locations
  Clone ID: MRT4577_39404C.1.pep
MGDNLMEKVTALSEQLKITGTEVGKKMTAGMSSMSFKMRELFLGQTPADKIVEDATSETLEGPDWAMNLEICDLINAGKVNSVDLVRGVKKRLVLKDARVQFLTLSLLETVTKNCEKVFSEVAAERVLDEMVRLVDDPLTVVNNRNKALMLXIEAXGESGEELRYLPVYEETYKSLKSXXSXRFPGRDNESLAPIFTPPRSVAGS

SEQ ID NO: 302993 - protein, 102 aa, Zea mays
  Clone ID: MRT4577_39405C.1.pep
GGSLGYRASLSSKAARFVSDLTAVILNPVSERETSHLPEVDEVLENLDDDKDSEHNFDSLDGPDTSSFRAFLISPYFNTHGEGKQGKNGSVKVGEAFHQENH

SEQ ID NO: 302994 - protein, 102 aa, Zea mays
  Clone ID: MRT4577_39406C.1.pep
QTAGSESGAQFPHLPPSPSTPPSSTPSTSPSPAPLLISEQQKKKNKGKKSPPPCCCRLFGLDRGPPATIQKAAAGCSAHSVPLSSPQPAGSCCSTAGCQCFP

SEQ ID NO: 302995 - protein, 362 aa, Zea mays
  unsure (1)..(362): unsure at all Xaa locations
  Clone ID: MRT4577_39407C.1.pep
MGYLPSLSSKAAHFVSDLTTVILSPVSERETSHLPEVDEVLENLDDDKDSEHNSDSLDGPDTSSFRAFLISFLSSSSSNNDSMEIIPEQNGDMGYPTLTPMGKGSKGRTGLLSRGKXHRKNHXKAARISGFKQTTAEPKIDREAVTHTEPDAPVLEHQEPKEVASFGSLPTMSEPSVLLSELMQRILYASLPVLAQGRNWVLLYSTWRHGISLSTLYRRSMLCPGFSLLVVGDKKGTVFGGLVEAPLQPSSSKKYQGTNNSFVFTNLHNRPVIYRPTGANNYFTMCSTDYLALGGGGHFALYLDADLLIGSSSNSETFNNGCLSHSSDFSVKDVELWGFVYPSKYEEMLTLCRTEKPGICRW

SEQ ID NO: 302996 - protein, 168 aa, Zea mays
  unsure (1)..(168): unsure at all Xaa locations
  Clone ID: MRT4577_39408C.1.pep
VGGSIPGKIINKAARISGFKQTTAEPKIDREAVTHTEPDAPVLEHQEPKEVASFGSLPTMSEPSVLLSELMQRILYASLPVLAQGRNWVLLYXLGCLYSDMFLTFDHTGLLLSNVYVHSXSTWRHGISLSTLYRRSMLCPGFSLLVVLLFPKCLKCSFTSTFIECFIF

SEQ ID NO: 302997 - protein, 80 aa, Zea mays
  Clone ID: MRT4577_39409C.1.pep
QTSLRIGRHSLSEWELGEGLSVTHRAQVVWYGTPVRVMRALRAVFYSTKRCPQRKKLWCNAKPVHRGTTINAKYMLKTER

SEQ ID NO: 302998 - protein, 62 aa, Zea mays
  Clone ID: MRT4577_3940C.1.pep
HQCSHQYSIARTIVFPLRKINQKTVLNYFQIFQTKLVQESTWLTRIPYLPLCIEVDAERNYF

SEQ ID NO: 302999 - protein, 120 aa, Zea mays
  Clone ID: MRT4577_39410C.1.pep
LGGFKKPRRERFAQPLRVFNIPTFRPPIDFTPVSHSSESVSRACFRKEGGQLRSALCPHLARLHLSLEHPLWKLLTTARDCSLMAKSLEIRPLGITTLKTDESNVCQTMIISGHALIHGY

SEQ ID NO: 303000 - protein, 177 aa, Zea mays
  unsure (1)..(177): unsure at all Xaa locations
  Clone ID: MRT4577_39411C.1.pep
MVSIFLGVLIALSDIISKKGVMDCLLLLFHSSSSDAMLQVVGDKKXTVFGGLVEAPLQPSSSKKYQGTNNSFVFTNLHNRPVIYRPTGANNYFTMCSTDYLALGGGGHFALYLDADLXNASRYLRXYTDFSVKDVEVFXIEAVCSASFFLLWGFVYPSKYEEMLTLCRTEKPGICRW

SEQ ID NO: 303001 - protein, 181 aa, Zea mays
  unsure (1)..(181): unsure at all Xaa locations
  Clone ID: MRT4577_39412C.1.pep
MEIIPEQNGDMGYPTLTPMGKGSKGRTGLLSRGKHSIGKIINKAARISGFKQTTAEPKIDREAVTHTEPDAPVLEHQEPKEVASFGSLPTMSEPSVLLSELMQRILYASLPVLAQGRNWVLLYXLRCLYSDIFXFDHMGLLLSNVYVHSXSTWRHGISLSTLYRRSMLCPGFSLLXNVAVS

SEQ ID NO: 303002 - protein, 39 aa, Zea mays
  Clone ID: MRT4577_39413C.1.pep
RSGPQGCLCSCAVMVARGYAKSGEMRVCAFRNGRGVVSA

SEQ ID NO: 303003 - protein, 177 aa, Zea mays
  unsure (1)..(177): unsure at all Xaa locations
  Clone ID: MRT4577_39414C.1.pep
MWEMDALLYCAVVALALHCVGCGCSAINLEGSALLKFQSRVQEDPHGAMAGWSARDADPCGWNGVRCADDRVVMLNLKDLSLRGTLGPELGSLGHLQALILSNNLFSGLIPKEIGALATLEILDLSYNNWTGEVPQKIAEIASLKHLLLSXNRFQWPVVQNSHGNFDQEADFDIYDH

SEQ ID NO: 303004 - protein, 61 aa, Zea mays
  Clone ID: MRT4577_39415C.1.pep
LWTLLHNPSHSFKDPNQTNIIRTSIQAYKKNSFVFVPKSWSPISKGHFRYQISKCEIPICL

SEQ ID NO: 303005 - protein, 119 aa, Zea mays
  Clone ID: MRT4577_39416C.1.pep
SSFASPVELHRSDTICKLNVGDNGFGRIGRLVTMAALNSGKMHIVAINYPLIDLNCIVYMLQYDLTHGKFYFTIDAQNLKPVINGYLITILQELDPCKIKSCYADAEYKMQSTGIFTTM

SEQ ID NO: 303006 - protein, 68 aa, Zea mays
  Clone ID: MRT4577_39417C.1.pep
SDSLNQIQKNKKKIKIKKKQKQIIYQQKKHIPTTNQLTPTNTYKTWGAPPYCFPPPRYKSMTRPRIIP

SEQ ID NO: 303007 - protein, 72 aa, Zea mays
  Clone ID: MRT4577_39418C.1.pep
IWRGAKRWQHKALLYQGSLTYNNLRGANPGEDCWENTVLSFTQRAVWGAACCRCQLGRALTAGGCCNCNSCW

SEQ ID NO: 303008 - protein, 198 aa, Zea mays
  Clone ID: MRT4577_39419C.1.pep
MRSSNGQTTLKSFIFKPRVVDGVPPPPPPPPEGVMEAPICPPELPKREIVRVTKTTIKEKASAFSSVGSTGKDGGGGAGGALSAAVFKRFHGSAPRARAEGDRVQAGEDGDVELGGAGDARLDVEEAGGESRRGPRSKRKSPLGGHEYMSEAKARRVVVLGDDPRPRPATTRGRRRRTRGGEGEGSVQPLRERRRVVA

SEQ ID NO: 303009 - protein, 75 aa, Zea mays
  Clone ID: MRT4577_3941C.1.pep
HARDQKQRGHWPQPNRGLYTPVFSIWGKGFSLLGMAPTQPGKFYFLMRKNIDKHIGFSLKPYLTQPIQKVGESFP

SEQ ID NO: 303010 - protein, 59 aa, Zea mays
  unsure (1)..(59): unsure at all Xaa locations
  Clone ID: MRT4577_39420C.1.pep
PKKISYYLDYSRNTRXRSXXXXXVXXFSSXXXFXXXPFQCPHASAPRTICRLLPLIXXX

SEQ ID NO: 303011 - protein, 116 aa, Zea mays
  Clone ID: MRT4577_39421C.1.pep
MPVRPSSVHSPTVSAPSPAAEGKGKEKECEGANDEDECMMRRTLAAHTDYIYTQQHHGWSNIIRPRLHALLSYVCSCPSVLVSCTRVCVCVCETPARAASAASLLPACQINSFFCP

SEQ ID NO: 303012 - protein, 82 aa, Zea mays
  Clone ID: MRT4577_39422C.1.pep
MARRATVMVLAAALAVLLLASSSSKTAPVASAARDDPSAAAAAAEGKGKEKECEGANDEDECMMRRTLAAHTDYIYTQQHHG

SEQ ID NO: 303013 - protein, 54 aa, Zea mays
  Clone ID: MRT4577_39423C.1.pep
QEQQDHGRRRRRRHVLLPDRRAARSASGLRCRRLALRLAGSALWVSGCPPLVCV

SEQ ID NO: 303014 - protein, 88 aa, Zea mays
  Clone ID: MRT4577_39424C.1.pep
PGGGGTSFLWGAIPPNEKGKKRRGPFFGGKTLSEKPIWITHGGKIPRINPRGRPLIYPLTGNTPPSNFPARGVKKGATILPKSSKLAK

SEQ ID NO: 303015 - protein, 165 aa, Zea mays
  unsure (1)..(165): unsure at all Xaa locations
  Clone ID: MRT4577_39425C.1.pep
MMSSKQGSHAKRSDRQFSGMLSSYVEMNTLQRNIQQAMDSNALMNDNFGAPMEDIDMNNMDMFHGYILYDEEGMNMVXNHVHKQNIVPKKKRQHPVLGWTQDEHKNFLRGLEVYGLXGTWKNISKYCRPTGTPIQICSHAHEXCHRKEGTTRKQRSSINDIGLYD

SEQ ID NO: 303016 - protein, 61 aa, Zea mays
  unsure (1)..(61): unsure at all Xaa locations
  Clone ID: MRT4577_39426C.1.pep
PRANPRRRSCARMLIMAVMVVAAGGHARFFLGXSEVSRSPDAGRLSFPCPPRLPRFHSLAA

SEQ ID NO: 303017 - protein, 86 aa, Zea mays
  Clone ID: MRT4577_39427C.1.pep
IGVEIGGWRGFMWCFSAPYSVWSLSCRVRRLGEVGEHAVVVDLDGRSRIDSECRYVVSLMHRSSRDRGLLLIRWWREKSRHGRLRG

SEQ ID NO: 303018 - protein, 118 aa, Zea mays
  Clone ID: MRT4577_39428C.1.pep
KRGRIGMVTSNATTATCQLILVPTSVRAPAETKGWENVQPRHGGAERSHGSDLRRRRPLAEADPKGAPPADKNVEGSDSQRPEQTVGVASHRRGRSKVAVDEVGRAHGETLTRGSGKG

SEQ ID NO: 303019 - protein, 386 aa, Zea mays
  Clone ID: MRT4577_39429C.1.pep
VLLLCLQNHYRSDLLWTEDSVSQLVLLIFQIKVNSIAIVCMRSMDRGPEHTINRGFYVAEGAKMCSVEQVRVAQALYVSGSLFNHSCQPNVHAYFLSRAFVLRTTEFIKSGSPVELSYGPQVGEMHISERQKSLQENYYFSCQCSSCSELNLSDLVMNSFCCPQSNCLGAISESTYYRSKENFVNVSLGGSYVCKLSLPDVSKVDMDMENVAKSLLQNSGVSLNIDHGCCMSCRSCIDLSSALATSHREESTIDRVKKHTFLDKTLITEALQSLKQLKKLRHPYSKALAQAEDTIAEAFAKVGDQELARKHCEASIQILEKLYHPKHIIIAHELIKLVSILLSLGDGASAAATFAQAEAIFSLYYGSHVEKVLTYMGALKKAVIDV

SEQ ID NO: 303020 - protein, 54 aa, Zea mays
  Clone ID: MRT4577_3942C.1.pep
GVDKKLHIPKTKGIGFIKKRGLSTLMQIPGSQTCRCPNQTPGGKLPKKPPQKTK

SEQ ID NO: 303021 - protein, 85 aa, Zea mays
  unsure (1)..(85): unsure at all Xaa locations
  Clone ID: MRT4577_39430C.1.pep
CDQPFSGHTEGGGGHRRGGLRRDQXFTWHIRSWELLGAGDEAXXSGIIQXVALQRSGKGRARLTRDHCRSGXRGWHSLGVMAPGT

SEQ ID NO: 303022 - protein, 44 aa, Zea mays
  Clone ID: MRT4577_39431C.1.pep
TQQLGGGPSRPKLAILREQRAKAGRKPKIQNHLPRREQMPWKTS

SEQ ID NO: 303023 - protein, 48 aa, Zea mays
  Clone ID: MRT4577_39432C.1.pep
AHRVNSALVHHREHNRLAGHASRASKMPLIATPTRLTKRPPTRPPTRP

SEQ ID NO: 303024 - protein, 94 aa, Zea mays
  Clone ID: MRT4577_39433C.1.pep
GKGRVERPKLLGKWRLRFPMAGFSPNPFSSYVNPVIRKLLPCFWGKSPLEKKDGPILFGWKTRKFIFVFAWPCQFFFKSPEGPPPSYKYVCMYV

SEQ ID NO: 303025 - protein, 59 aa, Zea mays
  Clone ID: MRT4577_39434C.1.pep
NQFRYIRALPSGHNHGNVPLISMHQRRYLFSITASSRKVMPFVSGSLVFPKRQNISDSC

SEQ ID NO: 303026 - protein, 79 aa, Zea mays
  Clone ID: MRT4577_39435C.1.pep
QAQWKACSLNDELLHTIHASENYVADPWRFALDGIMDKIIVCVTDYVLLNNVFLVLCHFFRSSLICHCVFLSFDTNLHA

SEQ ID NO: 303027 - protein, 65 aa, Zea mays
  unsure (1)..(65): unsure at all Xaa locations
  Clone ID: MRT4577_39436C.1.pep
KKPGGPTRSDYHAFLSXLLYHKRRQGXPPVSLHGQPHHLQRRLAQLHQWRQHSRQYRRHLHPRLH

SEQ ID NO: 303028 - protein, 69 aa, Zea mays
  Clone ID: MRT4577_39437C.1.pep
LEDSLNWRMQNEIDSILEKPIIPVDLYRSIRDTQLIGLSGYSKEGIPVFAVGVGLSTYDKASVTVSDYS

SEQ ID NO: 303029 - protein, 78 aa, Zea mays
  Clone ID: MRT4577_39438C.1.pep
VVWSSTIGSRSSTKVWPGAFFPTGGFAEGPCICNTPAVCIPSFYIVWRSPYSHRARAGVSPRGAFNRADGRPPSLGWK

SEQ ID NO: 303030 - protein, 104 aa, Zea mays
  Clone ID: MRT4577_39439C.1.pep
MYGHGHGFRFRYPNSRALHSRARERESCSSTAPALFFFFLSQKIMMPMVPRVVQQVLMRARMLYMQPHISEQPVNVSDSLHSAGQRGCYELHVPKSRSPVGDLS

SEQ ID NO: 303031 - protein, 136 aa, Zea mays
  Clone ID: MRT4577_3943C.1.pep
ATRPPTRPPTRATIHAPAPVSLSPAPTPFPRPELERGRTHRHSRTLTRTRRIPASAKSAAFSLLCRPWAVAPPRDGVGVPERGVIPARRAAPGVAVLVRAAQPARAAFPPLAQPPGAPRLSLPPRASSRRRARQPF

SEQ ID NO: 303032 - protein, 53 aa, Zea mays
  unsure (1)..(53): unsure at all Xaa locations
  Clone ID: MRT4577_39440C.1.pep
MTLFLTLVKMFERSKMVTIATGLDLLSYSICIFLSSASLYILHNXHKGDDHEE

SEQ ID NO: 303033 - protein, 125 aa, Zea mays
  unsure (1)..(125): unsure at all Xaa locations
  Clone ID: MRT4577_39441C.1.pep
SRPAGYLAGTVMLIXXMGLYGLFVSNASAGVGSESDRALSGSSLFGMFALKERPXKWMKITSLDELKTIVGHVIVMILLVKMFERSKMVTIATGLDLLSYSICIFLSSASLYILHNLHKGDDHEE

SEQ ID NO: 303034 - protein, 111 aa, Zea mays
  Clone ID: MRT4577_39442C.1.pep
ENKGRPKEGCLNNPTPGPRGLGPRVGPCPPWFRVFWQKVFPRHPQEGSLPPLPKAVFVWCLGSFFPQDGVRVFSEATWPWALFRPRVPRSGPGSGFSLKGATRGRGFFLNI

SEQ ID NO: 303035 - protein, 126 aa, Zea mays
  Clone ID: MRT4577_39443C.1.pep
VVEAIDVYLAGTVMLIFGMGLYGLFVSNASVGVRSESDRALSGSLLFGMFALKERPKWMKITSLDELKTIVGHVIVMILLVKMFERSKMVTIATGLDLLSYSICIFLSSASLYILHNLHKGDDHEE

SEQ ID NO: 303036 - protein, 130 aa, Zea mays
  Clone ID: MRT4577_39444C.1.pep
RRGRRAHAHGRWRLAGAFRRQGIKALPGSTSVGAEGIGGWVRRGDIELMTRIPFMPYSEAHVIASAEGLGFGTIFLVSTEVGLFAVDLKSGQERKLSEPGNYNDFAVFPFMSFYTPDCTSGKVPSPRRTH

SEQ ID NO: 303037 - protein, 101 aa, Zea mays
  Clone ID: MRT4577_39445C.1.pep
TKRRETTMKAAGPNRSISCPLPQRPITGIAREPRGREGPPQLMRRTLRGPYQAGHRTGTECYSRTTKLRKGPEVWKLVTNPMDGMTREARNFSHPPGQFPE

SEQ ID NO: 303038 - protein, 123 aa, Zea mays
  unsure (1)..(123): unsure at all Xaa locations
  Clone ID: MRT4577_39446C.1.pep
MGLLGMMGDSFGCSATGERLVSAARDGDIQEARALLELNPRLARYSTFGIRNTPLHYSAAKGHHEIVSLLIESGVDINLRNCRGQTALMQACLYGHWKXVQILVLFKANIHQKDCFSGATAIH

SEQ ID NO: 303039 - protein, 77 aa, Zea mays
  Clone ID: MRT4577_39447C.1.pep
DLSVVEERRVNGGKTTLVQDKEKQQLLLEKHTEKHFTADEVVRDIIIGVSNGLTVPFAVAGWLDGANASSTIVITFF

SEQ ID NO: 303040 - protein, 87 aa, Zea mays
  Clone ID: MRT4577_39448C.1.pep
PTRAALSATGSPLQLRPLAGGPRTCKSHWVRIHPPKYYADPRSNPIRGRRAEKIGREATMTRAQRVSMGMIDDMSTNMEVGLVLQNY

SEQ ID NO: 303041 - protein, 75 aa, Zea mays
  unsure (1)..(75): unsure at all Xaa locations
  Clone ID: MRT4577_39449C.1.pep
MSSTEXCGWRXGGAKTSSPDAFQLSEEDANKAILLDKPDADISELPIRYEVTEDYLPNRVHIFXIDIVDHTPHIP

SEQ ID NO: 303042 - protein, 59 aa, Zea mays
  Clone ID: MRT4577_3944C.1.pep
NILDLSAIRMFPSVYSVYLAQPCGGMRRSLVQKPDVSMWRNPEFFSSSLSVSIFQHLFH

SEQ ID NO: 303043 - protein, 97 aa, Zea mays
  unsure (1)..(97): unsure at all Xaa locations
  Clone ID: MRT4577_39450C.1.pep
CLIHYISQFHPTRYFNGAGNTQLLQAYRLQQAIAASVLQQPICQLQQQCLXHLTIRTMGTEQQQQLLPGGGALDMANPXVAYLQXQVLELNPLALAN

SEQ ID NO: 303044 - protein, 64 aa, Zea mays
  Clone ID: MRT4577_39451C.1.pep
KPKPGWAGKQFYASRSVFLLLETVIIAALWGNLFVIFFQGGQGLSGLGKIPLLHALCDVPRDKP

SEQ ID NO: 303045 - protein, 355 aa, Zea mays
  Clone ID: MRT4577_39452C.1.pep
MQTTTATTPLADRLRRYTPALASLARALYDARGALHGTVRAVPEGPPRTGKTAQLTVACDQGELHVHVDADAAFEAIALEPEAACRAAVASLYLAGPLAALARHGATRPAVRDVRLAAPSASRAGVLHLEYDHDGAPTGAATGATTGATVAGVSAALAAALAERIGPRGRGVLTPALAALALPTRLRLRTRHATPALLRTLRPGDVLLGWPAAPGFAPHATLGQATLLWGAANGHAVHAHARIDSRNVILERSPYAMNHDPDLSLRAAPDAASSPLDVSDVELPVHIEVVTVNLPIGQIAALQPGYILALPVALADADIRLVAHGQTLAFGELVAIGDQLGLHIRRIANADERRA

SEQ ID NO: 303046 - protein, 47 aa, Zea mays
  Clone ID: MRT4577_39453C.1.pep
PGLRVWVSGERQSPNPLFGCVSGKETTGPPNSPNLSGHYGHYRRPSF

SEQ ID NO: 303047 - protein, 111 aa, Zea mays
  Clone ID: MRT4577_39454C.1.pep
GSPCHHPYNSSHNSLFSQYLFLPYLSLLRVSSPLLLIGPVNYIRSAVLSFTFDQSSMRWTQTIGRYLQTSNSGERSATGVLAISSVGYRQINGDPCLIRSRPEQVPPRKIR

SEQ ID NO: 303048 - protein, 55 aa, Zea mays
  unsure (1)..(55): unsure at all Xaa locations
  Clone ID: MRT4577_39455C.1.pep
KGETHQWPAVLGIALIAMVEELGAEMAVRSLERLLQYGEQNIRRAVPXALGISLQ

SEQ ID NO: 303049 - protein, 252 aa, Zea mays
  unsure (1)..(252): unsure at all Xaa locations
  Clone ID: MRT4577_39456C.1.pep
MKVSVKTLKGSKFEIEVNPADKVSDVKKLIESSQGQNVYPADQQMLIYQGSVLKDETTLEENKVVENNFLVIMLRQNKGSSSAAPAKSKEPSNQAPPTQTVPATPASQAPATPAPQAVAAPAPIVPVSAPGPAATASPAPAVAVSTEAETYGQAASNLVAGGTLEATIQSILEMGGGTWDRDTVLRALRAAFNNPERAVEYLYXSGIPEPMEIPAPPPSAQPADPAQASQAAQPAVASSGPNASPLDLFPQA

SEQ ID NO: 303050 - protein, 114 aa, Zea mays
  Clone ID: MRT4577_39457C.1.pep
MEKKRVAVVGAGVSGLTACKHLLERGCRPAVFEADKLLGGVWARAPDCTSLQSERPMYQFSDFPWPESVKEVFPDRRQVADYLDAYARHFGVLDCVRFGRRVVGMEYVGVGEEE

SEQ ID NO: 303051 - protein, 106 aa, Zea mays
  unsure (1)..(106): unsure at all Xaa locations
  Clone ID: MRT4577_39458C.1.pep
VPRPAGVXXRGAGYTXFGQDISEAFNHNNGLTLIARAHQLVMEGYNWSQDRNVVTIFSAPNYCYRCGNQAAIMEIDEHLKYTFLQFDPCPRAGEPMVSRRTPDYFL

SEQ ID NO: 303052 - protein, 95 aa, Zea mays
  Clone ID: MRT4577_39459C.1.pep
SSKSKTKKGRYPKPKVAPPISPWLEFKGEPTNARSMSFVGKIVFPWVNFFEGAFYPFLKFTFVIQQVLIVLFSPKAFAKHCLFFCIPPVPNGKSF

SEQ ID NO: 303053 - protein, 48 aa, Zea mays
  Clone ID: MRT4577_3945C.1.pep
SYMSCETGRHQSLQCRSPEEHCLDVVTHWIQEGEEGTPKDYRHLRGCG

SEQ ID NO: 303054 - protein, 50 aa, Zea mays
  Clone ID: MRT4577_39460C.1.pep
KHISLGSLELAEIGNECILYKCRHGHKFSRNPRRNRSPTKNWRKNTERCT

SEQ ID NO: 303055 - protein, 65 aa, Zea mays
  Clone ID: MRT4577_39461C.1.pep
FFPFCSSIFPEGNSIVLPTTRLCPPALFFPGGPRASMVWSSTSNCKNILYGFMKNQKIIINTPLI

SEQ ID NO: 303056 - protein, 59 aa, Zea mays
  unsure (1)..(59): unsure at all Xaa locations
  Clone ID: MRT4577_39462C.1.pep
EISLKPGHSRGHVDMCTFYVHNCPSLVLCAPGNCHRYSFLPRSCQIGYTVTFLKKNXXF

SEQ ID NO: 303057 - protein, 221 aa, Zea mays
  Clone ID: MRT4577_39463C.1.pep
MARGRRGPGGRGRFGGGPLGDERPVRHGVRVEENPYFPLPRRASGWGVAPPSRHLWVGGLAPSVTASDLSELFLRCGDVEGVAREPGRNFAFVSFLREGDAVAAVRELQGARLAGAPVRIEFSKGVSVEHPLFIICLFNLTPSNYRCGVLLLSCVQNLSLSRKAEYQQLNLGFTAKKKKKTTFRFLRASTESAWKCQHIWSHSEVSAVKSRLQLTKSQTIG

SEQ ID NO: 303058 - protein, 54 aa, Zea mays
  Clone ID: MRT4577_39464C.1.pep
YICICSIFVYYAKSYERDYILHLCYTEASRTVSYKLNIRKIACKYIESIFFSHP

SEQ ID NO: 303059 - protein, 174 aa, Zea mays
  Clone ID: MRT4577_39465C.1.pep
KVGLPVDSSNNLSGFIQSPNPHGHATMMPGNSGSIPIQNSLPPVPSMQQLHANVPVSPIGSLPANPFNVPTSAPVLCNSTSPMLPSHALVNPAHSSMPMRPFIPPLPEGPPPFQQQTSSAVTVQPLDPSSQQSSQQLLAQDLDGDPQKRLQATLQLAATLLKQIQNQSNPGGQK

SEQ ID NO: 303060 - protein, 154 aa, Zea mays
  Clone ID: MRT4577_39466C.1.pep
MMARGRRGPGGRGRFGGGPLGDERPVRHGVRVEENPYFPLPRRASGWGVAPPSRHLWVGGLAPSVTASDLSELFLRCGDVEGVAREPGRNFAFVSFLREGDAVAAVRELQGARLAGAPVRIEFSKGVSVEHPLFIICLFNLTPSNYRCGVLLQK

SEQ ID NO: 303061 - protein, 87 aa, Zea mays
  Clone ID: MRT4577_39467C.1.pep
LFFLPKAPQVFFFYDLADVFPPNAEITPFFPLEANFSDSPGGGQPGLGGFAQGPPPLFIGPWAVEFALVKNFGPFFLSLFIFPVFGS

SEQ ID NO: 303062 - protein, 326 aa, Zea mays
  Clone ID: MRT4577_39468C.1.pep
MTSHARVRKLGIRLEETLLWEAFSPFGKVLRVTTFPGRTYAFVQYTSIAAACRAKEALQGKLFNNPRVSICFSRNEGAVPELGKQSFVAQYHPQPSARPVVGDQDYEDFPRARPFDSPPRNFRMSPPHFVPNSLPRDADDVGFSKGNYFEQETGIELGRVSNIEPFRTRELGQERRLPEEHEPHRQSPTARSDAPWKPWNNIPFDRPRRPLPFEDSWDVEDKSYLISKKLKGAQVHDTELPEYLFSGFDRGKVYPEYQRRPHHDLSEDGLQSRTSSSTDLHGRHHVHPLKNITPLTNKQEPWRAQESFDRRLGKMDRSTPDYNEPA

SEQ ID NO: 303063 - protein, 133 aa, Zea mays
  Clone ID: MRT4577_39469C.1.pep
IHSRCAGVYVWRKSLTEAEGEESVEQISKMRQMCSCWYFSTIATSLLKHGLYRVTRTPWNGVVLLWCGVGASKRGENHRLTGPLQSLAIINSRTGVNGKDIICSYSKSIRLRGLKSDPYSSPVIQYSIHIRIL

SEQ ID NO: 303064 - protein, 97 aa, Zea mays
  Clone ID: MRT4577_3946C.1.pep
FTGNVSIRGRILSGVVTKMKMQRTIVIRRDYLHYIRKYNRFEKRHKNMSVHLSPCFRDVQIGDIVTVGECRPLSKTVRFNVLKVTKAAGTKKQFQKF

SEQ ID NO: 303065 - protein, 156 aa, Zea mays
  Clone ID: MRT4577_39470C.1.pep
STHSLPLLAGSRLQGSPNTPASRLFRLATTRRRGRPAAALAGGGRQRTLLPVHRDVKRMNTRADEWEESDYATEGDDIELYQQNEGGETEWDQGQQPGARIHNAHQLPRSGRTIGTPRRNREAGGGGQRRQRPGEEKGARDNIFEPIQSFNAKGKK

SEQ ID NO: 303066 - protein, 139 aa, Zea mays
  unsure (1)..(139): unsure at all Xaa locations
  Clone ID: MRT4577_39471C.1.pep
DGRFYVQVEGTHPTPPGALSRSIGRAHAGRRDRQGYLSRTKGPADGRPRGAAHDRCTHQRVQPRGLGREKDGGRLGKTDFYEPRACDGAPADRDGRGRKDGRTSRGTAKRGTXERCQRRDRDDVGSTPENYRTRVPAGV

SEQ ID NO: 303067 - protein, 128 aa, Zea mays
  Clone ID: MRT4577_39472C.1.pep
FSAVLPVKARPAARSTAVARVPATRRSVRTAAAAVVVAEPAEVDYSSSFSVFPMEACDLLGGDACIGKMFPEAKLAAAAPEASRRVDAVERDYLSYDGPKTVFPGEACDDLGGEFCEAPYMDGVSRDA

SEQ ID NO: 303068 - protein, 118 aa, Zea mays
  Clone ID: MRT4577_39473C.1.pep
RSAPERPLRALEQHELELFFQPQINWRKKTIEAMEAFIRWQHPQKGLLPPGQFLPWSDQTEFMVPLTRWILETACQQNVLWQQQLQTPFLVSVNISEKQFYHPLLKNMVMEAIPGYRA

SEQ ID NO: 303069 - protein, 100 aa, Zea mays
  Clone ID: MRT4577_39474C.1.pep
KREIGFTSFVPGNGTKTPPWGNGNFYPRQKGGWLFWKPHWGKGGAFTIRGGAQKTQGARKRPKKKHRLLFFGGKNPPVFTFLRHGLQGVFFRQTFVFQSR

SEQ ID NO: 303070 - protein, 83 aa, Zea mays
  Clone ID: MRT4577_39475C.1.pep
RTGGAAAKVGTLGDSVPIFREKTKVPVPFGGPFSKRALKSFPQKSFKKPPVRDWLRVVSPPKARNVFEPPYFTIFENEGGEKN

SEQ ID NO: 303071 - protein, 570 aa, Zea mays
  Clone ID: MRT4577_39476C.1.pep
TSSTQVLLNGSPGNHIFHRRGLRQGDPLSPMLFVMVMDVLSSLFRVAENRGLLQGLGGADVRSRVSIYADDVVLFIKPIEADLNCAKIILNCFGSASGLVTNMLKSSAIPIRCDGQQVLAGCSVLHCSPAAFPCRYLGLPISDKKLRKCDLKLWIEKIADRLPNWKARLLNLAGRTALVKFVLSAIPTYLLIAINVPRWVIKSIDKIRRGFLWRGRKEVNGGSCLVPWEVVTRPLRLGGLGIPNLKLKSWALQAKWLWLEKTDQSRPWRGLSLPVQRQVRQFFDLSVFTILGNGATTLFWSDRWIHENTIQDIAPEVVGMVGRKAYSSRTVAQALDNWHWVSDIRGALSLSGLQQYLLLWDTLGDVRLSHDADRHVWMHSSSGMFSSKFCYKAFFMGSISFEPWKRLWKSWAPPKCKFFLWLAIRNKCWTADRLRRRGLQHPAVCVLCDQEQETVQHLLCTCSFARQFWHAILVPLCLGDLIPAVDEISFADWWRKALKKVPKFRKKGFNSLIILGSWCIWLTRNKAVFDGVNPSMCFVKSLFLNELSCWERAGAKQLASFGLPAIMSRV

SEQ ID NO: 303072 - protein, 101 aa, Zea mays
  Clone ID: MRT4577_39477C.1.pep
KQRAILVDEIWHAAGDSGSDIDWYVKRTVLGGIYSTSEVYMLTDNSPEFRDTWTFVNRRIKDALDLQKTFQEAAYLAEAVGAGMGGPVQGVLNRVFQNRSG

SEQ ID NO: 303073 - protein, 75 aa, Zea mays
  Clone ID: MRT4577_39478C.1.pep
GPAQARRKLPCRDSRPRTSLYPGSDCRNARTSLIKPGHDRRQKDRSARHHSRFRESLVSGRLQAALYPTSSRATS

SEQ ID NO: 303074 - protein, 61 aa, Zea mays
  Clone ID: MRT4577_39479C.1.pep
FGWWLYCVSSIYGGLAETGILLLSYLAMGCTGGLALGIIWDTGTRNSNLELGGKWAKKKNN

SEQ ID NO: 303075 - protein, 126 aa, Zea mays
  Clone ID: MRT4577_3947C.1.pep
KKSFNLFRVKPLWGLTGGFFPFKGCPPPKGFFLAPYFWGGPGKNLPPPMILMGGGPPPGGGPPPGPGGGPRLFFFFFFFSNQKKFFISTTRNLFFPGTLKGGSWVFPPLILAILIWGPFLGGFGRP

SEQ ID NO: 303076 - protein, 315 aa, Zea mays
  Clone ID: MRT4577_39480C.1.pep
MASSLAARRLLSRAAAVRRFPVPFASAPAPAMAPRSFSADAGPPPPLPPPPLQPVVEPPTSEGAGASSSSTTAGAGGAHRSSPGAAAGARRQGGAGYEEEQEKVLRASLLHVPRMGWSESAMVAGARDVGVSPAIVGAFPRKEAALVEFFMDDCLQQLMDRIDAGEGEQLKNLILSERLSKLVRMRLEMQAPYISKWPQALSIQSQPANVSTSLKQRAILVDEIWHAAGDSGSDIDWYVKRTVLGGIYSTSEVYMLTDNSPEFRDTWTFVNRRIKDALDLQKTFQEAAYLAEAVGAGMGGTVQGVLNRVFQNRSG

SEQ ID NO: 303077 - protein, 270 aa, Zea mays
  Clone ID: MRT4577_39481C.1.pep
MDPVTASIHGHYLPPPFNTRDFHHHLQQQQQHHHHQQHLQLKTEDDHGGGAPGLFGDRGTQGDHENNDENSGNSNGSGGGELALVPPSGGGGPEGGDATPRRPRGRPAGSKNKPKPPIIITRDSANTLRTHVMEVAGGCDISESVTAFARRRQRGVCVLSGAGTVTNVTLRQPASQGAVVALHGRFEILSLSGSFLPPPAPPEATGLTVYLAGGQGQVVGGSVVGALTAAGPVVVMAASFANAVYERLPLEDDDLLAAHQAPQAQADGVL

SEQ ID NO: 303078 - protein, 72 aa, Zea mays
  Clone ID: MRT4577_39482C.1.pep
TPDDSVNPKFIFRTYFCQFAFEVVEQGVFEGVPRVLRVMHNPYSDPPGMEKFARLPPAWASSPGVGMLSCPS

SEQ ID NO: 303079 - protein, 66 aa, Zea mays
  unsure (1)..(66): unsure at all Xaa locations
  Clone ID: MRT4577_39483C.1.pep
AYWSDWNTWISIRVGNDMSPDGICECGWEVXHDHLKYSGSIGRFFEITLAIRRCIPQYGLKYNLHV

SEQ ID NO: 303080 - protein, 138 aa, Zea mays
  unsure (1)..(138): unsure at all Xaa locations
  Clone ID: MRT4577_39484C.1.pep
AHAMATXQASAATXRHLXXAAWXPAAKPRQXELAXALPSSSSRGPAPLRASTEEAVEAPKGVGAPQLDPSTPSPIFGGXPGGLLRXAXVXEFFVLXWSSPMVPVFVMPTGGAAFXRVGPFLLLLARXVLCLALGSWLR

SEQ ID NO: 303081 - protein, 84 aa, Zea mays
  unsure (1)..(84): unsure at all Xaa locations
  Clone ID: MRT4577_39485C.1.pep
HSSATLNQQWPTEIFCMLILLTLSTRPANTTIYDNFSQPPIPSLLPQYLPSTTYQHSENPPTXPYNLKHANGSNNLPLSPLISK

SEQ ID NO: 303082 - protein, 420 aa, Zea mays
  unsure (1)..(420): unsure at all Xaa locations
  Clone ID: MRT4577_39486C.1.pep
VRIQERFYAFIKGAPETIQERLVDLPAAYVETYKKYTRQGSRVLALAYKLLPEMPVSEARSLERDQVESDLTFAGFAVFNCPIRGDSGAVLQELRQSSHDLVMITGDQALTACHVASQVHISSKPVLILTRIKTGGFEWVSPDETDRAPYSAVEVAVLSESHDLCINGDCFEMLQSTEAVLQVIPYVKVFSRVAPEQKELVLTTFKSVGRGTLXMCGDGTNDVGALKQAHVGVALLNAEPVQKVDSKSKAENKSGKLKNKKPANEASSQVTPVANSSGKASSSLSLTAAERQREKLQKLLDEMNDESDGRSAPIVKLGDASMASPFTAKHASVAPTLDIIRQGRSTLVTTLQMFKILGLNCLATAYVLSVMYLDGVKLGDVQATISGVFTAAFFLFISHARPLQTLSAERPHPNIFCAYV

SEQ ID NO: 303083 - protein, 86 aa, Zea mays
  Clone ID: MRT4577_39487C.1.pep
YRICLYTNDRMPDDALLGCRVGSGPVEEGCLPCQHPTPRRLSWVGPAVYREDSRAWAPIDQAVVFFLPYSMRNVFTCLRSGSCRCL

SEQ ID NO: 303084 - protein, 104 aa, Zea mays
  unsure (1)..(104): unsure at all Xaa locations
  Clone ID: MRT4577_39488C.1.pep
APIASLTSPYLXPAVSXMSEKPIAQPYKIFXSRGFTNSPLSPSVTNHPEGVIQRAHLVHKPAQNIMAHNYXPLVLTNLPKYSQQHKFLPSHQLDESNSGAYLQQ

SEQ ID NO: 303085 - protein, 110 aa, Zea mays
  Clone ID: MRT4577_39489C.1.pep
PPALHAFKNGKAPLKKTRRIGGLPPAWKGNPFNYPFWRILFPPFGSFKKGTQDNVLFFKTNLSVWVKDFALSKTSPLFVLLTTKFVVFTPGLGKNAGKTPKKNKRKKKLK

SEQ ID NO: 303086 - protein, 346 aa, Zea mays
  Clone ID: MRT4577_3948C.1.pep
MKAPSLLVQCFPGLLPSKATSCVPIVSEKDLQLPSPAVEIIPSKSVHPYKYAGEKVDVQGLNIFKGKVSVADMIVISPSEVASSKYDGTLKYWESSITLVDILKNEIRDGQLSFRGKRVLELGCGYGLSGIFACLKGASTVHFQDINAETIRCRTIPNVLANLEQAQDRQNRPSESPVTPSRQLLAPNVHFYAGEWDELPTILSVVQPPAAPTNLSFSEDDFMDGCSSHDGSSVVGHDYCPRRSRKLSGSRAWERASETDQADSGYDVILISDVPYAANSLKKLYALISKCLRPPYGVLYVASKKNLVGSNGGARQLRALMEEEGVLGGHFLTEVCDREIWKFFFK

SEQ ID NO: 303087 - protein, 125 aa, Zea mays
  unsure (1)..(125): unsure at all Xaa locations
  Clone ID: MRT4577_39490C.1.pep
MAALGSKLAQLQAKACEATRFVTRNGCAYHKTLIEKNKQFVVQPPTVEKCQELSKQLFYTRIASLPVRYEAFWKEADXVKQLWRNRKDLNVEHAGIIALFGLELYGWFCIGEIAGRGFTFTGYSV

SEQ ID NO: 303088 - protein, 536 aa, Zea mays
  Clone ID: MRT4577_39491C.1.pep
SHSSAEGLQRLRSASLLLCWLTPVGCERTASCCHPCCRGRPPAPDRDGRSVGGAARAAGAKGANWLGGLSRASFPKGFVFGTATSAYQVEGAASTNGRGPSIWDSFAHVPGNIAGNQNGDVAVDQYHRYKEDVDLMKSLNFDAYRFSISWSRIFPDGEGKVNPEGVAYYNNLINYLLQKGMTPYINLYHYDLPLALEKKYGGWLSAKMADLFTDYADFCFKTYGDRVKHWFTFNEPRIVALLGYDTGSNPPQRCTRCAAGGNSATEPYIVAHNFLLAHATAVARYRTKYQAAQKGKVGIVLDFNWYEALTNSPDDQAAAQRARDFHIGWFVDPLINGHYPQIMQDLVKERLPRFTAEQAKLVKGSADYIGINEYTSSYMKGQKLVQLAPSSYSADWQVQYGMARNGKPIGPQANSKWLYIAPTGMYGCVNYLKEKYGNPTIYITENGMDQPGNLTRDQYLRDATRVRFYRSYIGQLKKAIDQGANVAGYFAWSLLDNFEWLAGYSSKFGIVYVDFNTLERHPKASAYWFRDMLQKH

SEQ ID NO: 303089 - protein, 685 aa, Zea mays
  unsure (1)..(685): unsure at all Xaa locations
  Clone ID: MRT4577_39492C.1.pep
MDARWAVLLALLVASGGVRVCAAAGAKGANWLGGLSRASFPKGFVFGTATSAYQVEGAASTNGRGPSIWDSFAHVPGNIAGNQNGDVAVDQYHRYKEDVDLMKSLNFDAYRFSISWSRIFPDGQGKVNPEGVAYYNNLINYLLQQGMTPYINLYHYDLPLALEKKYGGWLSAKMADLFTDYADFCFKTYGDRVKHWFTFNEPRIVALLGYDTGSNPPQRCTRCAAGGNSATEPYIVAHNFLLAHATAVARYRTKYQXSILRTSEVPLKNNITLALLGVVNXLFYSMKCVVQDFIFKXCGQGLYMLGSWNNGQHTFTLITLLFMKCISLFSXDWTCACRISLVSWTENCXGRVTXVLXXAAQKGKVGIVLDFNWYEALTNSPDDQAAAQRARDFHIGWFVDPLINGHYPQIMQDLVKERLPRFTPEQAKLVKGSADYIGINEYTSSYMKGQKLVQLAPSSYSADWQVQYVCEFNFLCFKLDISNKYVFAXYIFFSPNLNIRPINSVVARNGKPIGPQVRCSSIYSLSHRCLHCIVHGMLGSISYEFXYCNKRILANQTHGHXANSKWLYIAPTGMYGCVNYLKEKYGNPTIYITENGMDQPGNLTRDQYLRDATRVRFYRSYIGQLKKAIDQGANVAGYFAWSLLDNFEWLAGYSSKFGIVYVDFNTLERHPKASAYWFRDMLQKH

SEQ ID NO: 303090 - protein, 77 aa, Zea mays
  Clone ID: MRT4577_39493C.1.pep
YIFLFYLYPFGGKIGPTQFKGVYTINIEHRPIMVEGETRFSFLTTGIRKLLPKLWHGYSTPILDNTSLSLGKGKQTM

SEQ ID NO: 303091 - protein, 178 aa, Zea mays
  Clone ID: MRT4577_39494C.1.pep
RGFHSELNRLVRDSLQFGSIAPSCAPKDPHDIGSFSEPQAPTCQDLEESMFLNEHEDAVGGLNDHPYSFSEPQPQTSAFITPSKNKASIQSKKGKASPSISEEWEKLIIIDDLDDDFASPAHSRTAVHKPPRPKPPSPGKPLDEKTSRILERLEPPRAKKQRANIGSKGSTGAAPGPW

SEQ ID NO: 303092 - protein, 186 aa, Zea mays
  Clone ID: MRT4577_39496C.1.pep
SSPGPTGKLFAGGRNPGPPPPCPGWGTPPPGGFLKPPRSPTLFPLPGFAPRTRAPRARGPGLSPFPKLSGTPQGNWNGLESRPGLEKKKNGEGFPPLGGRGNKGKTTALVFFNNPVGPPKGQKGGGFFLWKPQNCWGGPPQKGTQKRFWPPLETEGRFFFLRAIFFKRFSGPFLTGQKQKIPRPVF

SEQ ID NO: 303093 - protein, 91 aa, Zea mays
  Clone ID: MRT4577_39497C.1.pep
KTPPARGGIGYITPRGYTNMPPESKTRGKTPFFLTPALFFFPFGPEKTRRWRHVNPRFFSHAYPATGVHTLDAHNLSFTGSGGAAFSDAGG

SEQ ID NO: 303094 - protein, 59 aa, Zea mays
  Clone ID: MRT4577_39498C.1.pep
TIASLSIIVLTQPISKPHSKNHPMPSNNQPHGQKLFNIKHPAKNSSKHICSRLHNYTTI

SEQ ID NO: 303095 - protein, 82 aa, Zea mays
  Clone ID: MRT4577_39499C.1.pep
EFLTLKVITDCFILLSFLYSRQRLPTCPFWEGKLSLASGVNQPRTSNPTLVAGTEISVGRSIFYQQNDLIMYHNKGNKNTLP

SEQ ID NO: 303096 - protein, 37 aa, Zea mays
  Clone ID: MRT4577_3949C.1.pep
TGLLLLSACLVSLAMSAFSLRARSKSALLSISSVWST

SEQ ID NO: 303097 - protein, 141 aa, Zea mays
  Clone ID: MRT4577_394C.1.pep
MANTHLLDDCLFCKIIRGEIPSCKIAETDKSYAFLDINPLSEGHALVIPKYHAQFFHQVPDDVLADMLPLAKKVAIAIGLEDSQYNLLQNNGPMAHQVVPHVHFHIIPKPNPEEGLKIGWPQKQVTPEDLKKTLGRIKEKL

SEQ ID NO: 303098 - protein, 86 aa, Zea mays
  Clone ID: MRT4577_39500C.1.pep
PSRRQPNDPPARRRSRGERDRLRRRRRERMSYQQVPPQESYPPPGYSPVYPPPAGGQQGPYYPPQQQQPPPPPGYQGYFSQGQPQQ

SEQ ID NO: 303099 - protein, 104 aa, Zea mays
  unsure (1)..(104): unsure at all Xaa locations
  Clone ID: MRT4577_39501C.1.pep
GFRARLNRQAKLYISYSGLKFCVKLRVHSLSFRLPSMTIKCPACVVQPSIPTSGNACGSRSRLFGIHLCFRILIMRYMRAISERTRCYXPWRRPSTPRSNWSMS

SEQ ID NO: 303100 - protein, 75 aa, Zea mays
  Clone ID: MRT4577_39502C.1.pep
QEQSATLQDTNQSHRSNQSPQLNSSALGLMKGSFLCFFVALVAWLAFFSFSLLTLKCFVSEARDTNCVVVLAGSK

SEQ ID NO: 303101 - protein, 68 aa, Zea mays
  unsure (1)..(68): unsure at all Xaa locations
  Clone ID: MRT4577_39503C.1.pep
MSGGSAKREMETATSHAKAPSRESGTKGREESPPSVKSHQSGDKKKKMXKVVYYETDSSSPSTSGSDT

SEQ ID NO: 303102 - protein, 79 aa, Zea mays
  unsure (1)..(79): unsure at all Xaa locations
  Clone ID: MRT4577_39504C.1.pep
MVKNYWSVIAEXSKAVQNARSKIRGLIDEKSCDTLXMLGLTWNSAETFDVWLLTDDPFGTMNNHSELAHGYKAGMDIVV

SEQ ID NO: 303103 - protein, 119 aa, Zea mays
  Clone ID: MRT4577_39505C.1.pep
IRMGRGYTQKLGFARRFWTPSSELPLVRPLFDGWREDRWNNLNWYGRTGAYSQRSPVWRYHGSPRANRRSIYQRRGRSKLRSPVTRHDRGGYRRPRPVGNQSPADPILDAIDRPLSRHG

SEQ ID NO: 303104 - protein, 75 aa, Zea mays
  unsure (1)..(75): unsure at all Xaa locations
  Clone ID: MRT4577_39506C.1.pep
SKKEGGPPPQGAKTRAAEHREXQPREPRTTPTDGRGAKRAPSQKRSKAPQSRRAETAATPPRRXHXKKEFSPRRP

SEQ ID NO: 303105 - protein, 108 aa, Zea mays
  Clone ID: MRT4577_39507C.1.pep
NTNWSLFLTLCSRGGGKKLPQGQGTPKGETLFKKHGGQGATPGGPNLKTKKNPWLKPHEDPIPEKTPGFKKKNFPRKPLLGGHQKLGGGTEFRGPLGALLGRIEKILF

SEQ ID NO: 303106 - protein, 106 aa, Zea mays
  Clone ID: MRT4577_39508C.1.pep
RWKRQWSIGVQTMLHMMEADCARNGIPLANGDYLSYSMLLGTETGAVVLVVSYTTASRVVPPTTMSAPNIVLKTPGEGPSNSGASIRRRRLTQHALTYDHDGWLEG

SEQ ID NO: 303107 - protein, 122 aa, Zea mays
  unsure (1)..(122): unsure at all Xaa locations
  Clone ID: MRT4577_39509C.1.pep
YVSWDGXALHGGRQQAHRLQRARGISLSRRRRAHAVEFIGHNGGLASQDRLRLAASILCLESRLDDQSRETFQSGHGHILVLYLRKQYIFIQLSDDVVKLVTRIGVVTNQDPNIFFTVRLNL

SEQ ID NO: 303108 - protein, 194 aa, Zea mays
  unsure (1)..(194): unsure at all Xaa locations
  Clone ID: MRT4577_3950C.1.pep
MKAPSLLVQCFPGLLPSKATSCVPIVSEKDLQLPSPAVEIIPSKXLFTPILAIICILDCEGRYFIFAEILLKFCFIIFSYDCFHAFNFFQSVHPYKYAGEKVDVQGLNIFKGKVSVADMIVISPSEVASSKYDGTPKYWESSITLVDILKNEIRDGQLSFRGKRVLELGCGYGLSGIFACLKGASTVHFQDINA

SEQ ID NO: 303109 - protein, 70 aa, Zea mays
  Clone ID: MRT4577_39510C.1.pep
SGMYPLHLSRKLRYKFSSHVIPSKQITETVWRISNGNAHRKLVQMDYHEHNRPKKENQLKLGLIMHIQSY

SEQ ID NO: 303110 - protein, 85 aa, Zea mays
  Clone ID: MRT4577_39511C.1.pep
HQWLPKYYPSLRFLPFCEPTKAFIIHMATAPRHIHSPPQYSWLDTYWQPLTQAAEVTHHANDTSAITSAYTTHTVYTWHYLGTAL

SEQ ID NO: 303111 - protein, 127 aa, Zea mays
  Clone ID: MRT4577_39512C.1.pep
VYHPPPRGAPSSTPRHQDHQILSVDAAPSTPPNPRSDPVARSQESLRRRPAIIAPCAVLMSPPSSPCSPAHHSLPLAPEGITDHPDSPSIWARDRPRHPRHAPRHPLSLAPDGLRDGRPRLTHQIPL

SEQ ID NO: 303112 - protein, 149 aa, Zea mays
  Clone ID: MRT4577_39513C.1.pep
LGDLEGQLKDEKYVLVSKPYMILNDKLQHLNAEIERYRGLVEVLQNDKDQLMQREKEISAKAESLDSVKQTIITYEKKIEELETQIQILFSEKNDLETKVEETLQDSALSNELGMMENQLSRSKDAAFEALALREQAESLRSLVAKKIE

SEQ ID NO: 303113 - protein, 842 aa, Zea mays
  unsure (1)..(842): unsure at all Xaa locations
  Clone ID: MRT4577_39514C.1.pep
MDSTALQYENQKLVQQLEVQKSEMHALERKFKELSDDQCSYDKTLISLNKLWNQLIDDLVLLGVRAGGDLDNLQALDHEELSEESLESCPSEEIFLLRLLKTNNIRDNSDTSLLKFVEEALAFRSSATVTLMKSLQETISSQQARSESLSLALNGQKSNEDVIVALRNHNDCLKEVAENASQAISIINEKHKRYLDEIEAFKSNHSRELQEIKRISGELEESIAELEESQRKLVVLQLQRHGSVMDASGANAVNGGISTHKSSDKSMSWQDLKDAVDAAKTLAGNRLLELHQTQEDNLILSKELGDLEGQLKDEKYVLVSKPYMILNDKLQHLNAEIERYRGLVEVLQNDKDQLMQREKEISAKAESLDSVKQTETPIYQISRQLVKXEDMLTQNQHLLQQLTDRDDFXIKLVSDSVMMDQACSPLLSEGMMENQLSRSKDAASEALALREQAESLRSLVAKKIEEHKKISDKYNSQVIEIKSLKALVEELEQEKQELEFIADMYVKESSESRTIADIEESETRARNQAEYLRSNLEEHSLELRVKAANEAEAACQQRLSFAEVELEELRTKVDASERDVVELKEAIRIKEAEGDAYISDIETVGQAYEDMQTQNQHLLQQLTDRDDFNIKLVSDSVKMKQACSSLLSDKLMLEKQLQQVNTSLESSKLKIARGEEQMKTCVAQAIKTSAENRHLTISLERIALELSNTDKELKWLRSSVGSSEKEYEQTQQKISELRALLEHERSERRRLEEQYEEVKNEVMELTSETEETTVRKLEDEIKECKGILKCGVCFDRPKEVVITKCFHLFCSLCIQRNLEIRHRKCPGCGTPFGQNDVREVKI

SEQ ID NO: 303114 - protein, 569 aa, Zea mays
  unsure (1)..(569): unsure at all Xaa locations
  Clone ID: MRT4577_39515C.1.pep
AVDAAKTLAVXRLLELHQTQEDNLILSKELGDLEGQLKDEKYVLVSKPYMILNDKLQHLNAEIERYRGLVEVLQNDKDQLMQREKEISAKAESLDSVKQTIITYEKKIEELETQIQILFSEKNDLETKVEETLQDSGKKDFKNEIHVMAAALSNELGMMENQLSRSKDAASEALALREQAESLRSLVAKKIEEHKKILDKYNSQVIEIKSLKALVEELEQEKQELEFIADMYVKESSESRTIADIEESETRARNQAEYLRSNLEEHSLELRVKAANEAEAACQQRLSFAEVELEELRTKVDASERDVVELKEAIRIKEAEGDAYISDIETVGQAYEDMQTQNQHLLQQLTDRDDFNIKLVSDSVKMKQACSSLLSDKLMLEKQLQQVNTSLESSKLKIARGEEQMKTCVAQAIKTSAENRHLTISLERIALEVSNTDKELKWLRSSVGSSEKEYEQTQQKISELRALLEHERSERRRLEEQYEEVKNEVMELTSETEETTVRKLEDEIKECKGILKCGVCFDRPKEVVITKCFHLFCSLCIQRNLEIRHRKCPGCGTPFGQNDVREVKI

SEQ ID NO: 303115 - protein, 62 aa, Zea mays
  Clone ID: MRT4577_39516C.1.pep
IHIGNISRTSLINYAKQTSVMLEPQALNAYFILYIFCDMESLEIASKKCPISLIPMRPIIEI

SEQ ID NO: 303116 - protein, 75 aa, Zea mays
  unsure (1)..(75): unsure at all Xaa locations
  Clone ID: MRT4577_39517C.1.pep
PRGRXGQYSSNCCPSSASSPLTSPHDILPQSLDGMLRVSCYCDHGLARKNGMVYAGLPVTPTWCPLCYSSHMSAL

SEQ ID NO: 303117 - protein, 60 aa, Zea mays
  Clone ID: MRT4577_39518C.1.pep
RYYWGTDTATLSEMSTISVGPSKGTSAHYAGCGLMLYVFKSIQMVTNLEGEESVRTLRGA

SEQ ID NO: 303118 - protein, 100 aa, Zea mays
  Clone ID: MRT4577_39519C.1.pep
YYCTSRLAVPSPLLDACDRLTHGAGALRWLSPVLHCLALPCRRWVFRFHQNLGQSLDSPTPTVWRWGKQAFRFHRLRPPQLHHKRQRGRQRRGSRLQEQP

SEQ ID NO: 303119 - protein, 429 aa, Zea mays
  Clone ID: MRT4577_3951C.1.pep
MSDLLPEDVLVNIIGRLAPRYLAISRCVCKTWCTTIDAHNLLRMDLLPHSVSGLFINFNELSMSEFLSRPSKGPAISGKFDYLPSAGQVIDHCNGLILLHECVVNPATRQWALLPPRPSPNMPEHFCHGMYLVFDPTLSSHYEVFLIPQVSYNSNLDPAIEELEWPPSPCIVQVLSSRTKLWEERLFVREGEAAGNVADIRLDFQAVQENAVYWRGVLYVNYQSKFIMRISLSNDKYQVIKPPVDFEWFEFENESRLSKNLYLGKSEKGVYCALRYPSTVSFSIYILDESDGKTEWIMKPHYYLGSQGIDGPGPWTLQDINYNWDTQYEDSMEEKFEWDSDSDNVVENRSNGGYPCLPRIELLGFHPYKDVVFLSDTLRRGLAYHLDSSKIQDLGNLHPTYYGTEQGIQPFLLTAFPYTPWRGWFPEDT

SEQ ID NO: 303120 - protein, 109 aa, Zea mays
  unsure (1)..(109): unsure at all Xaa locations
  Clone ID: MRT4577_39520C.1.pep
GGNLPXTXXTYFXNKECERHTXLHKGVLXYXEGVRDSXLASXGKSPLXPEXSXYGGQTKPVFHKKAKTTXKIXXXLXCXSCKHYSQHAIXRCKHFXSWGDKKGXGTSLF

SEQ ID NO: 303121 - protein, 281 aa, Zea mays
  unsure (1)..(281): unsure at all Xaa locations
  Clone ID: MRT4577_39521C.1.pep
EADDSGSLIFELATLRRATGDFAEENKLGHGGFGAVYKGFLPDGRRIAVKRLDKASGQGLKELRNELLLVAKLRHNNLAKLLGVCVKGQEKLLVYEYMPNRSLDTYLFAADEKRASLDWEARYRILYGTARGLLYLHEDSQVRIVHRDLKASNILLDADMSPKISDFGLARLFSADNTTTVTSQVVGTLGYMAPEYAVLGHLSVKLDVYSFGVLILEVVTGRRNTDMFESAAGESIILLSYVWDHWVRGTALEAVDPSLXASASTRSXSXGGQCIHLGLLC

SEQ ID NO: 303122 - protein, 144 aa, Zea mays
  unsure (1)..(144): unsure at all Xaa locations
  Clone ID: MRT4577_39522C.1.pep
VKFQPVINVDVDTDADRKSMRNNVADAVQMAKTALDERTATDEPDYMSPYEPDSVIEPENIPLDDLDDISDDDEESDADEPDNEYPELSLEIADVTDTDELHESSYLNSLKVAELRELAKSRGIKGYXKMKKNELIEVLSSSMA

SEQ ID NO: 303123 - protein, 48 aa, Zea mays
  Clone ID: MRT4577_39523C.1.pep
VPSIGKRMHPKCPVSLQLIARCHRKYSGMLIHKQIYNTLRKKNTISLF

SEQ ID NO: 303124 - protein, 86 aa, Zea mays
  Clone ID: MRT4577_39524C.1.pep
MIQQQQLEHLHCINNLATNPLPLLYPSICLQQVHHLSLFFSMSPIGIVSSRIFARGRDPPIPSARVRPSYFPHPSSASRAVLLLEP

SEQ ID NO: 303125 - protein, 82 aa, Zea mays
  Clone ID: MRT4577_39525C.1.pep
QRPRESAIRTYALTKADRSYLQASPQNRSNANKSNVDMILIPGISTSSLIVLRSRIVALPMPGTKDKLMPNVASSSVVMWDS

SEQ ID NO: 303126 - protein, 58 aa, Zea mays
  Clone ID: MRT4577_39526C.1.pep
ISFDLNELALDELDEGGQLPDDANELGLNDVLVGKWQRHGLELTYICVWRGVRVPPSK

SEQ ID NO: 303127 - protein, 119 aa, Zea mays
  Clone ID: MRT4577_39527C.1.pep
MFMAMVPKFSEESKELELEPEILPDITRCMSTSGKRDDAPSAKRLKPKLQEPKALQVQDLSNTVKGSPSLCSHEAVKNPVKIFTVEETKKCHESANDVSEGTHFTGNDRQKLDKDVQGK

SEQ ID NO: 303128 - protein, 109 aa, Zea mays
  unsure (1)..(109): unsure at all Xaa locations
  Clone ID: MRT4577_39528C.1.pep
MHQAPNGVKPKLQEPKALQVQDLSNTVKGSPSLCSHEAVKNPVKIFTVEETKKCHESANDVSEGTHFTGNDRQKLDKDVQGKRDKTQLVEDSPTDDELDDYPXFGQQSC

SEQ ID NO: 303129 - protein, 122 aa, Zea mays
  Clone ID: MRT4577_39529C.1.pep
MAFPTAAAVLLNENMQIHKGNRVDAPSAKPLKSSAKPERKALQDVSNIPKGTALKNRSTVKEGSALKERPALHNVSNNLKERSILKERPPLQDVSNTRNERSILKEKSALCSHEAIKNPVNI

SEQ ID NO: 303130 - protein, 62 aa, Zea mays
  Clone ID: MRT4577_3952C.1.pep
TGGAHVLFHSAPLSFSLASCALCKGTNILCTECQCLEIFPGRGFSLFPLNSPPRCVVLKKKI

SEQ ID NO: 303131 - protein, 38 aa, Zea mays
  Clone ID: MRT4577_39530C.1.pep
KLVLLGLSNQAPVGDVKPVRPGIFSQKDRAKWDPWKVF

SEQ ID NO: 303132 - protein, 201 aa, Zea mays
  Clone ID: MRT4577_39531C.1.pep
MAFPTAAAVLLNENMQIHKGNRVDAPSAKPLKSSAKPERKALQDVSNIPKGTALKNRSTVKEGSALKERPALHNVSNNLKERSILKERPPLQDVSNTRNERSILKEKSALCSHEAIKNPVNIFADDEETKGCHEWAKDGMEGTHFTGNDSQKLDKDVQHKRIKKKVAKVTSALYGWSHEVYGHVMFMAMVPKFLKIERAGA

SEQ ID NO: 303133 - protein, 150 aa, Zea mays
  unsure (1)..(150): unsure at all Xaa locations
  Clone ID: MRT4577_39532C.1.pep
MHSSXKGISSSALPCKRTPPIWLKTGTTEVXEMXTEAAKKGQMPXMIGVLLRDRHGIPLGKSATDGTILRILYAHGMATEIPXDLYFXMNNAEAIYRMHLERNGKDLDSXIXLILGESRIHRLARYDEGTKKLPXPLWKYESTTASTLVY

SEQ ID NO: 303134 - protein, 77 aa, Zea mays
  Clone ID: MRT4577_39533C.1.pep
LQVDSRNLYTRMIWFSSLLHIHVHFFFFSTVATLLEHYPLKKNVGGTLNKQYNKNMIKKSFAFGNVENEGYNRKAYY

SEQ ID NO: 303135 - protein, 35 aa, Zea mays
  Clone ID: MRT4577_39534C.1.pep
TVPDCSLLSIVDDWATFYTAALRYVFRSRALYLYL

SEQ ID NO: 303136 - protein, 142 aa, Zea mays
  unsure (1)..(142): unsure at all Xaa locations
  Clone ID: MRT4577_39535C.1.pep
IRPLQFSHLVLANYTAHIQQVQFVPFIGTXAAMSSASYSPCHNLPFSQLSAASVYQFLPFNRIAALIYLAYSQQPIQLPFSHLPGVSLPAFFTNPQLLSFXQHAAPNAGTLLHMQRXLPFILLAFTDAAVFYQHALIGGALF

SEQ ID NO: 303137 - protein, 71 aa, Zea mays
  unsure (1)..(71): unsure at all Xaa locations
  Clone ID: MRT4577_39536C.1.pep
KKKKFSPKKKIKQTKXKKRPPPPPKNNHHQKKKKNQKKKKKKKKKKKKKKKKKKKKKKIKKKKKKKKKKLV

SEQ ID NO: 303138 - protein, 138 aa, Zea mays
  unsure (1)..(138): unsure at all Xaa locations
  Clone ID: MRT4577_39537C.1.pep
LDLIYEGAGRVLGCGLLXXXXXXXXGGGKKKKRKREKKKHKKKKKGGGGYKRTKKNHPRRKKKKNIKKKTKMGGAPSRENKITGPGKSLVLSFFWAPKKKTRGPVFKKGEGGKPRGSPQKFARKKRPLLPGAVTGKGA

SEQ ID NO: 303139 - protein, 169 aa, Zea mays
  unsure (1)..(169): unsure at all Xaa locations
  Clone ID: MRT4577_39538C.1.pep
LRGLVLSLPWXLFCLLXWARSCRLFRGXSLWLVAXSXGXRLFSWRSRXXXLLLGVWXXXPCAGLLSCAXCXRPAGXCRXGCXCXLSPRVGAGWSSLPXARXVASSLRGWLRCLPGPRLGLLPSRRLWGRGVAGGGGWLGPSGVGCLAXLXLAVFPGGRPSLCFSRPRPL

SEQ ID NO: 303140 - protein, 53 aa, Zea mays
  Clone ID: MRT4577_39539C.1.pep
NALILAGTNYMAIQGEPGAVIHGKKGSAGITVNKTRQGLLFGIYDEPMTPQQC

SEQ ID NO: 303141 - protein, 126 aa, Zea mays
  unsure (1)..(126): unsure at all Xaa locations
  Clone ID: MRT4577_3953C.1.pep
SQGWGERWETILLEGNQIGAVTQSVEAVXMSXRARGGVMASHRSGETEDTFIGGXGGGXSTGQIKTGAPCRAERLGKYNQRAXSEENXGVPGYPGQMQGPGSPVGGGEDFCSYTSLLPFVTMCRGR

SEQ ID NO: 303142 - protein, 656 aa, Zea mays
  unsure (1)..(656): unsure at all Xaa locations
  Clone ID: MRT4577_39540C.1.pep
KKVSVIPAYVLKSSKTPVLPCLPKNDRPNDVEDDDLLISVNNVNIAPNEHAEEVPTTLADIIYESDLQDVPRESTSDDLAPKVVCCQQKLLENTGDDSGKTLEVVQDSGDILSVTPHGLQMAHNLYPPDNKLHKPDLKKEAFADQSSALGNCLKDFVIPEQSYIWQGGFEVSGHGNSPEMFDGFQAYLSTCASSKVREVGEQLPDKIQLAEVPRHSSWPLQFNEVNPTEDNIALFFFAKDVESYERAYGKLLDNMLLGDLSLKANIGGTELLIFPSDKLPERIQRWNGLPFFWGIFYARKASSPLELPTNNCPLEQINEPVIQHDIGSPKAHQPLGIDLNECPNDYISDLSLSLGSESEKSGASLDRNIVLESKREDRSLNASEIHHEETAGTRQIIPGHPSVASCGTNLPTXSQQEVMXMIQDYLAAAKGSTGTPGGNKMEKTDQNETLFRFSQQLGATRSISHEIELNKHGLLPSHCHLSGSKICDDQTKSTPNSDMGPLDFDITNKRQKTYGKHSCIFGDAMTPMKCLSKIHPLPAGQDNPCDVLQHCHRGPSDPASLKKPLPDHFIHVLSSDDEDSPEPSTSLNKASSKADEGSSILCSLSLSMVATKRNLSGSDIVDDEPLSLSLGLPSVVGGRADQEMKQFLPEKPGINT

SEQ ID NO: 303143 - protein, 116 aa, Zea mays
  unsure (1)..(116): unsure at all Xaa locations
  Clone ID: MRT4577_39541C.1.pep
TKSYTDQEAGGPLLHGTEPILQYYSDETNSNSNSNDSSTANKRALWSVLGVLELPLSLPRRLTDPAREQRAVEQDSRGDREHTRPHLPVLAREPPRHXGTGRYRTPRSTCWFRAPP

SEQ ID NO: 303144 - protein, 92 aa, Zea mays
  Clone ID: MRT4577_39542C.1.pep
MYLKIKVKVSDEKERIPLDDQPMVDKIVESRSGKKEGKKKKHIKKNIYYESDTSSSLQKDSSSKKNTIKKNYTKMYFNYSDISYNFNAHFLS

SEQ ID NO: 303145 - protein, 70 aa, Zea mays
  unsure (1)..(70): unsure at all Xaa locations
  Clone ID: MRT4577_39543C.1.pep
ANASXTALSSCMEPVAPMYVSMVSSMDGALASCLACPWLVRSGASAVSAIGTIVCVCALSLLLLLDANAW

SEQ ID NO: 303146 - protein, 38 aa, Zea mays
  Clone ID: MRT4577_39544C.1.pep
SNSLALNDYIICSPDIMWQLSIQVCRSYHKHFQDQSSY

SEQ ID NO: 303147 - protein, 283 aa, Zea mays
  unsure (1)..(283): unsure at all Xaa locations
  Clone ID: MRT4577_39545C.1.pep
MPRDLSRSRSPPRRRWRSPSPARYRGRRGRRDRSPSPIRSRSPYRSSYRRRNPSFSPRRHKSRSPSPRRRKSPSPSQKRYRRKRSPSVTSSPVAASQSSHLGLAENKNVIDTQRLEEEKKRRQKEVELRLLEKETAKRVEQAIRRKVEESLNCDEIKHEIHRRIEEGRKRIHEEVAIQIEKEKDAALNEAKLKVEQEKKKREELEKKLEEERKKAEXALMKEALEQQQKELERYQELAEXLQKEREEAMKRKKMEEEQQRQNQMKLLGKNKSRPKLSFAFGMK

SEQ ID NO: 303148 - protein, 162 aa, Zea mays
  unsure (1)..(162): unsure at all Xaa locations
  Clone ID: MRT4577_39546C.1.pep
RRQKEVELRLLEKETAKRVEQAIRRKVEESLNCDEIKXEIHRRIEEGRKRIHEEVAIQIEKEKDAALNEAKLKVEQEKKKREELEXXLEEERKKAEEALMKEALXXXXXXXXXXXXLERLXXXXXXXXKRXXXEEEQQRLNQMXLLGKNKSRPKLSFAFGMK

SEQ ID NO: 303149 - protein, 87 aa, Zea mays
  unsure (1)..(87): unsure at all Xaa locations
  Clone ID: MRT4577_39547C.1.pep
LYSSSSHTTYLIKLXGKSIITTFVWAISHTHKKNISSSIFILYTFDTYSTTFFQPNPSFICYESHYIPLLIPYLETPSFSNSNYTLT

SEQ ID NO: 303150 - protein, 126 aa, Zea mays
  Clone ID: MRT4577_39548C.1.pep
PGLSFPGGDMFEHIPSGDALMLKWILPPWDEGQCLQIMEPSKETIGGKETGGKVIIINPVLGFWADDDDDPKTCRETYLLDLPPLSFVNGAEREEPQWRRIFLAGGFRDYKIPPPRGIPSLIEVFP

SEQ ID NO: 303151 - protein, 99 aa, Zea mays
  unsure (1)..(99): unsure at all Xaa locations
  Clone ID: MRT4577_39549C.1.pep
GSRREDPVSLITKLRXVRTNAPAGEKPETLKTHLRNVIIVAEXIGTIXKVYYGKTXTMCDTKPEMIGHYLAEISISYTPVQXGRAGMGDTHSSLFTALK

SEQ ID NO: 303152 - protein, 104 aa, Zea mays
  Clone ID: MRT4577_3954C.1.pep
VLKEGELARYLCRKGKCCRPMGIDSLVRRKSKACTLMSDIGYGYDMEHMHCLFIKSQEVMWSTLFLYLEPVMTHMKDLLGLELLTDVSLISCRKIAGALCSIRH

SEQ ID NO: 303153 - protein, 103 aa, Zea mays
  unsure (1)..(103): unsure at all Xaa locations
  Clone ID: MRT4577_39550C.1.pep
KWHFFIVSHFPPKLYIGIVFNTFKFLKRDNVFLFAKKKTGLKATPVAVATKTVVSKRFFPRTYXLXSTSFGGTQVGSCNLFDVNLPDGKASHLKGAVLFNAPF

SEQ ID NO: 303154 - protein, 41 aa, Zea mays
  unsure (1)..(41): unsure at all Xaa locations
  Clone ID: MRT4577_39551C.1.pep
XIGPIRLKXFQASNQTGPNGECFQTQAITGWPLHCRSVKXR

SEQ ID NO: 303155 - protein, 495 aa, Zea mays
  unsure (1)..(495): unsure at all Xaa locations
  Clone ID: MRT4577_39552C.1.pep
MGSVPPAEGDRRQPQQQPHVMMIPYPAQGHVTPMLQLAKLLHTRGFHVTFVNNEFNHRRHLRARGPGALHGAPGFRFTAIDDGLPPSDADATQDVPKLCYSTMTTCLPRFRDLIVRTNAEAEAEGRPAVTCVVADSIMSFGLRAARELGLRCATFWTASACGFIGYYYYRHLVARGIVPLKNEAQLTDGYLDTVVDWIPCAPKDLQLRDFPSFVRTTDPDDIMLNFFIHEVEAMSQASAVVINTFXDDLDATLLHAMANPVPXPIYNVGPLLLTVRNNVPADSPVAGIGVNLWKEKRAXFGWLKGGALRSCNQLGGITVMSNEQLVEFAWGLANTGYTFLWNVRPDLVKGGDSAGAGLPPEFLAATEGRSMLSTWCPQAEVLEHEAVGLFLTHSGWDSTIESICGGVPMVCWPFFAEQQTNCRYKRIEWGIGMEIGNDVRRGEVKALIREAMEGEKGRDMRRRVTELKGSAVAAAKLNGRSMRNVDRFIDEVLLA

SEQ ID NO: 303156 - protein, 38 aa, Zea mays
  Clone ID: MRT4577_39553C.1.pep
RHIGSPHNNMTSCSKRLICALATSRDSNLDNIVSRKGK

SEQ ID NO: 303157 - protein, 124 aa, Zea mays
  unsure (1)..(124): unsure at all Xaa locations
  Clone ID: MRT4577_39554C.1.pep
PPIFPREFCFQTKPLPTGDPNLHSLLRXPLLLKHLGGRSKEPTPXTNQINNFGSEVYFPKRTPLGGASPFLGWPSPTLLPKNMVGFWGDSRRFNIISVSTCYSHKDTCPFCTLILSQGEPKETW

SEQ ID NO: 303158 - protein, 59 aa, Zea mays
  unsure (1)..(59): unsure at all Xaa locations
  Clone ID: MRT4577_39555C.1.pep
RVNRPISFLTSGARESVFRTIKPIVESLADDLITGAKGSSRSXAIKKKDEIGRVSKPTR

SEQ ID NO: 303159 - protein, 482 aa, Zea mays
  Clone ID: MRT4577_39556C.1.pep
ASREKSICGCLLFSSSWHWQSARRKRPPPLLSTGTAPAPRRNRWTACRGARRRGFSAAWARSLSSRRSEVSKVLSYCNTKRLAVVPQGGNTGLVGGSVPVFDEVIVGLTGMNKIISFDNVNGILTCEAGCVLENLSTFVENEGFIMPLDLGAKGSCHIGGNISTNAGGLRFIRYGSLHGNVLGLEVVLADGTILDMLTTLRKDNTGYDLKHLFQLSEGSLAVVTKISVLTPALLPSNNVAFLSCNDYTSCQKLLLAARRSLGEILSAFEFMDHHCIDLAMQHLEGVQNPLPASPYKFYVLVETTGSDESSDKTKLEAFLLRSMEDGLVADGVIAQDISQASNFWRIREGISEASVKVGAVYKYDLSITVEKLYDIVEEMRCRLGDNAEVLGYGHLGDGNLHLNIVSSKYDDNILAQIEPFVYEWTSAQRGSISAEHGLGLMKAEKIHYSKSPEAVQLMASIKKLLDPKSILNPYKVLPQSVL

SEQ ID NO: 303160 - protein, 348 aa, Zea mays
  unsure (1)..(348): unsure at all Xaa locations
  Clone ID: MRT4577_39557C.1.pep
MPRREAARLLRRLGPIAVQSPKRGFSGMPHNQYESTNHAVNSYRRFHWIPSVQHPLCGPTSSGGIYEGQRSANKACEVQKRTFGSAATQFQRNPAYSVLNSDDIAYFKSILGENGVVQDEDRVAVANVDWMGKYRGASQLVLLPKTTTEVSKILSYCNTKRLAVVPQGGNTGLVGGSVPVFDEVIVGLAGMNKIISFDNVNGILTCEAGCVLENLSTFVENEGFIMPLDLGAKGSCHIGGNISTNAGGLRFIRYGSLHGNVLGLEVVLADGTILDMLTTLRKDNTGYDLKHLFIGSEGSLGVVTKISVLTPAKLSSTNVAFLSCNDYTSCQKILLXARRSLXEILSAF

SEQ ID NO: 303161 - protein, 56 aa, Zea mays
  Clone ID: MRT4577_39558C.1.pep
MVLFFLNSTMPGLPSEKESIPNLILRGFGTIDRVKAKLEQACPEVVSCADILALVA

SEQ ID NO: 303162 - protein, 76 aa, Zea mays
  Clone ID: MRT4577_39559C.1.pep
KKKKKKKKKKKKKKKKKKKKKKKRKKKKKKKKKKKKKKKKKKKKKKKKKKKKRGRNFNKFKVCMALFTGKTLYKPN

SEQ ID NO: 303163 - protein, 101 aa, Zea mays
  Clone ID: MRT4577_3955C.1.pep
SAKGFTAPQIWSRPIGLQINLVQYLPNFRLVCLFRLLFCLTWDWVFFFFGETHYGSGKIYAYTVFKKHNAVMLFEPQAHLTQSWGTFKEAPPISRLGLSQG

SEQ ID NO: 303164 - protein, 166 aa, Zea mays
  Clone ID: MRT4577_39560C.1.pep
SFLLRSMEDGLVADGVIAQDISQASNFWRIREGISEASVKVGAVYKYDLSITVEKLYDIVEEMRCRLGDNAEVLGYGHLGDGNLHLNIVSSKYDDNILAQIEPFVYEWTSAQRGSISAEHGLGLMKAEKIHYSKSPEAVQLMASIKKLLDPKSILNPYKVLPQSVL

SEQ ID NO: 303165 - protein, 226 aa, Zea mays
  unsure (1)..(226): unsure at all Xaa locations
  Clone ID: MRT4577_39561C.1.pep
KKGEKNASRNENTSTEERGPGRTRFFFDSPLQHRNRIHGFLVYPHPPSPAXPATRSTGPWRPPTPPARPTAPTTPSSPSSARIRPPPPYPRPRRPTXPQPFPLRRRXPSSEIRSSRPVAAATATATTSGSRTRTRRRRSTTAISPPSSGTASRSRTPTIRSLPPPPRSSSGRRSRLHRAPPGKPRSPSGRCSPTCRPPPPRRGSCTPPTTEAEMRRRRRRRRTRCS

SEQ ID NO: 303166 - protein, 47 aa, Zea mays
  Clone ID: MRT4577_39562C.1.pep
LGPSVLLISVYAILSTVGIRSTLYLWTHALPAPSKKPPYQKLILNTK

SEQ ID NO: 303167 - protein, 56 aa, Zea mays
  Clone ID: MRT4577_39563C.1.pep
QASSEAWAAPGVTISTMLDVLYARRRSAQSVFLSSGMKCPIISRLVWHMVHFWSVT

SEQ ID NO: 303168 - protein, 89 aa, Zea mays
  Clone ID: MRT4577_39564C.1.pep
ALSPIYALASSSCEPTRLQPMPDEQAVLAASYAGDDRGASALASSFVAAAAGGLLAEGSSRWRRWSWCGATAMGRATYEGPLETACWGA

SEQ ID NO: 303169 - protein, 156 aa, Zea mays
  Clone ID: MRT4577_39565C.1.pep
PTSKTRRSLGTPGSLLPRLHLLLSSGCNADNLHQTDAQGLQLYGTRRARSLGRRSLTVDSSKLRNRSQSHARDDGQDGEVLRRGPGRRRAELATEAGRGTSGDPTYASRCGGHGRLAGRTAGCHALVAGHRAGLLVAAAVGCQGEQGTDALGVERV

SEQ ID NO: 303170 - protein, 73 aa, Zea mays
  Clone ID: MRT4577_39566C.1.pep
QLIKQVGLHGANDHKPILVDNGYLPPCPKKFPFWKKGFTLLGSKKKQPGGFYINIPGGGVFFFFKKKQRGETR

SEQ ID NO: 303171 - protein, 162 aa, Zea mays
  Clone ID: MRT4577_39567C.1.pep
SSSSSSIKLKTLSICLVKVVRIATTAQEKMKLWKETSRSSKTTTSSRSGLAATPSRLPVKAAFIYVSFPHFDLFIRQMASCRFLQAERIIFSKKTQKEDLRMDCPQKSTRRSGATPIGCTFGAPHESSFQIKIVPTSKAWDKVKDKAGLRPKHRSKDGNNSW

SEQ ID NO: 303172 - protein, 393 aa, Zea mays
  Clone ID: MRT4577_39568C.1.pep
RLLKLDRPIIPCRPSHPQRLPSPWLQAITSPTLRTIRLKSPRNPQEKPLSSSRLVEMARLRHTARKSVIPFLPSRLAERPLRCPVAGQSSHLERLHHRLREEQERRRQEQQSSSFSLHQEIESVRSCSPVLPLEPPPAPPLGAPASGVAAGGDPDDGDGDDSSSHDTDFSANPEPEGWVARPITRDAARGCHFHDALDTLLRRAFDRHTWSVEYRCVVYQHSRGVYPDRWEATCLVRCPENSLQGAEACSEHYSISERDSAEAAMQDAARRALSHYCSVFGGAADGLDLKYYPRRPSGSTGGVIVSPVGEGNPRLSSTVNLAAVLNTELDHALDELSRARAEIALLRAERAERRHLDGGSPAPVGTQHPYRSPQRGHQSYGNPDCKTKITLEP

SEQ ID NO: 303173 - protein, 42 aa, Zea mays
  Clone ID: MRT4577_39569C.1.pep
ENEWALKMGLDLPGAFLVVLFLCSLPSCYSRSSPFYVGFLFD

SEQ ID NO: 303174 - protein, 50 aa, Zea mays
  unsure (1)..(50): unsure at all Xaa locations
  Clone ID: MRT4577_3956C.1.pep
MIIPKKNRNEICKYLFKEGVLYANKDYSLXKHPQIDVPDLQMIKLMQSFK

SEQ ID NO: 303175 - protein, 90 aa, Zea mays
  Clone ID: MRT4577_39570C.1.pep
WYPRGRPGRVFPQIQIAGVKDSDYQIAICFRASRNRQSSFGDQEIELFEFYRAEDPEHLIGEGCQHCNHCSGEDEVVEGDFQEFQDYDEF

SEQ ID NO: 303176 - protein, 60 aa, Zea mays
  Clone ID: MRT4577_39571C.1.pep
FYQPCRIRIFILESLCDPILPAHFRFIDGLAILLLGIQSSRDMRVPSRKLVPSITCSMEL

SEQ ID NO: 303177 - protein, 184 aa, Zea mays
  unsure (1)..(184): unsure at all Xaa locations
  Clone ID: MRT4577_39572C.1.pep
PKQELALPLPRPSRPAPPEPPTTAPRPFSPSSGRPRCASTCREPCHAAPRRAALHPRXPWLGEHAPAAPSPRSSSVRSAAPPAVSWPPLPSCVAAXPFHLLPASLSAPLRWPTIRPTSAPPQAQSPAPVSTLATTSRLAPPCSLQRRPRGALEPPAPTRACILAQPAISPSTVNRGEREKQPLM

SEQ ID NO: 303178 - protein, 121 aa, Zea mays
  Clone ID: MRT4577_39573C.1.pep
NSKSSITWSPSLIIDPSKLGNGSQSHQTITMKNGEEKHGQQVSEAPVGKVLGVGVSSTARRSRATPRRAARRRAKGGAAPPERVGRARGQGGARERGAGRGRCRGCSNGRHGWAVGAFLHM

SEQ ID NO: 303179 - protein, 283 aa, Zea mays
  Clone ID: MRT4577_39574C.1.pep
GRWNQVSHWSARPSVAMYSIVLCVAPTQQQSCRSHASPLTSLVVRCRCEVVSIATTAQEKMKPWKETSRSSKITTSSRRGWLVLDTPHGSLSSPSYLLVSRSVRFAVPWPHSRGVYSDHWEATYLVCSPENSLRGAEVCSEHYSISERDSAEAAMQDAARHALSHYCSVLGGVADGINLKYYPRRPSGSTGGVIVSPVGEDNPRLSSTVNLAAMLNTELDHTLDELSRARAKITLLRAERAERRHLDDGSPAPFGTQHPYRSPRRGHQSYGNPDCRTKINLEP

SEQ ID NO: 303180 - protein, 69 aa, Zea mays
  Clone ID: MRT4577_39575C.1.pep
FIMAKFAWSRSIITFVETVMLLKLNFFYGTSNVRQTRLLVLDYPWCNVFLPKKKKKKKKKKSTLRCYHC

SEQ ID NO: 303181 - protein, 72 aa, Zea mays
  Clone ID: MRT4577_39576C.1.pep
PPVPVVTPRFNPPPYRVIWFAPRCRSGVPGSPPGSDFVPLVGPFGCCWSIGPPPRLIWAPVPVFLDSDPVSN

SEQ ID NO: 303182 - protein, 222 aa, Zea mays
  unsure (1)..(222): unsure at all Xaa locations
  Clone ID: MRT4577_39577C.1.pep
MLSLGALRKLCAAFDAVALTVIAAGLSRPPSGRHPFSSAHAHSSHPADFPTIAACRAAISASKGDRRRRPGVGQHSSSPSPSLAAAAAKEEREQPVLVRIKHERDPERLYQLFRANAHNRLLVENRFAFEDAVARLAGARRNDLVEEILEQHKALPQGRREGFVVRIIGLYGKAGMPGHALRTFQKMXMYGCPRTAKSLNATMKVLLRARMFDEALSLFEEG

SEQ ID NO: 303183 - protein, 372 aa, Zea mays
  Clone ID: MRT4577_39578C.1.pep
MKLWKETSGSSKTTTSSRCGLAATPSRLPVKAAMARLRHTARKSVIPFLPSRLAERPLRRPVAGQSSHLERLHHRLHEEQERRRQEQEQQGSSFSLQQEIESVRSCSPVLPLEAPPAPPLGAPASGVAAGGDPDDGGGDDSSSHDIDFSASHEPEGWVARPITRDAARGCHFHDALDTLLRRALNRRTWSIEYRCVVYQHSRGVYPDRWEATCLVRRPENSLQGAEACSEHYSISERDSAEAAMQDAARRALSHYCSVFGGVADGLDLKYYPRRPSGSTGGVIVSPVGEGNPRLSSTVNLAAVLNTELDHALDELSRARAEIALLWAERAERRHLDDGSPAPVGTQHPYRSPRRGHQSYGNPDCKTKIDLEP

SEQ ID NO: 303184 - protein, 376 aa, Zea mays
  Clone ID: MRT4577_39579C.1.pep
MESHDLRAEWESRLVGGYEIDGFGYDYGAGKWYSFRLERMARLRHTARKSVIPFLPSRLAERPLRRPVAGQSSHLERLHHRLREEQERRRQEQQSSSLSLHQEIESVRSCSPVLPLEPPPAPPLGAPASGVAAGGDPDDGDGDDSSSHDTDFSANPEPEGWVARPITRDAARGCHFHDALDTLLRRAFDRHTWSVEYRCVVYQHSRGVYPDRWEATCLVRCPENSLQGAEACSEHYSISERDSAEAAMQDAARRALSHYCSVFGGAADGLDLKYYPRRSSGSTGGVIVSPVGEGNPRLSSTVNLAAVLNTELDHALDELSRARAEIALLRAERAERRYLDGGSPAPVGTQHPYRSPQRGHQSYGNPACKTKINLEP

SEQ ID NO: 303185 - protein, 119 aa, Zea mays
  Clone ID: MRT4577_3957C.1.pep
GRGRRQRKHFQRDILPGLASLPKHEVSEDLRALGRSKLVTPTKRGRNRQQPRGRRRARSVAVAMEVEESEVSPPLQASPSPVPADLDADALAITRWGRTTRRCRRPRCPPVNNASLRVA

SEQ ID NO: 303186 - protein, 96 aa, Zea mays
  Clone ID: MRT4577_39580C.1.pep
MAQPPSPKQRGRTPRLVHPPLPTLTAGEPGQSPKCLIPGKANPGDPGPPQGWLAPSARLEAPLGLPRWLGFPPPIAAALGAEAQEPGFLPQAESAA

SEQ ID NO: 303187 - protein, 116 aa, Zea mays
  unsure (1)..(116): unsure at all Xaa locations
  Clone ID: MRT4577_39581C.1.pep
TAGEPKSPGLVLFIVTPLEDCQGLATLPGFLGSTSQCLCHLLPPLPFSCSSCFSSRPPMEEXWAPSVGSSPSPPWASVLAFFPLVRRCRXRXPLAWLALLALGFLGSLSPPPARAG

SEQ ID NO: 303188 - protein, 64 aa, Zea mays
  unsure (1)..(64): unsure at all Xaa locations
  Clone ID: MRT4577_39582C.1.pep
TRCGGTQPRPRVKIGGPKKARKPGQWVTWVLANRGCVCFFNKPYTYPWAFSGKSSYTKGLXSLL

SEQ ID NO: 303189 - protein, 130 aa, Zea mays
  Clone ID: MRT4577_39583C.1.pep
FRGPPNPRKTPGVSLKKRGNKQRPPLFKPYPLSNPFPAVFFFYPKTPPSPRKKASFPRNKQRGWGWNFFFWGCPCKKLASPSQNPALGPGFLNFCQFFIGGPNRSFFKTQPPGQFSLGGGSLSLYYLNLP

SEQ ID NO: 303190 - protein, 83 aa, Zea mays
  Clone ID: MRT4577_39584C.1.pep
RDRGKGGRVRLWARIRLIVDSTPWDRPGESIERGEDTRARGQKNRAPGRLEFLAELWAPPRTVGRVLCRANHAVRSQGSEESS

SEQ ID NO: 303191 - protein, 67 aa, Zea mays
  Clone ID: MRT4577_39585C.1.pep
NKNRLSPISLWSEGDWYFSKKSLSHLFTSRGFSYHQSIMVMMEDNRIAAKKFRCYPHSAVVLERAQF

SEQ ID NO: 303192 - protein, 170 aa, Zea mays
  unsure (1)..(170): unsure at all Xaa locations
  Clone ID: MRT4577_39586C.1.pep
LQERLKSKGLSYRRVAVXSFFSMVVGIFIGFIHLFSVDVYKKIVSKNKMSLFHEGVIETETMGTRVKESKTVLVEKELELIDEPQIQESPPVRALLHDEVDFAESSLAIRESDIPVKKVLIIVTITFVWPQQPYYLXAHVLKAVLALLLWLVVEXPEQSYETAKNLLQST

SEQ ID NO: 303193 - protein, 48 aa, Zea mays
  Clone ID: MRT4577_39587C.1.pep
NADGTRMKLYYQLQRQPTLISLKAKIHSTVISPGISCNSKSALDIREY

SEQ ID NO: 303194 - protein, 170 aa, Zea mays
  unsure (1)..(170): unsure at all Xaa locations
  Clone ID: MRT4577_39588C.1.pep
MGTRSSAPSAGASMEGAAGSARPILLVAAIXGSLRRDGFNRGLLRTSYDVCEDSIPRLRIDELDLYDRPISNTDLETACVSGTVSPPAGDAFRAKGSQADWFLLGAPXYNYSIGTPLKNALDXSSREKNCAADKAAVIVIERRGFEGGMFQHHLRPVGVLQALTFINKPE

SEQ ID NO: 303195 - protein, 57 aa, Zea mays
  Clone ID: MRT4577_39589C.1.pep
PEIQALEESQAPQRTLRYSIICGEQFYEVQSKSTKNKRNEYKNIPKNHVNSTNKGGE

SEQ ID NO: 303196 - protein, 108 aa, Zea mays
  Clone ID: MRT4577_3958C.1.pep
TRPKKQTTQKALSITYHLTPPGTKILSRLALFALAERTTKAFIIAHCLLAPSANISQHLSPVTSMDSEHLAVQANMQQQALAASVLQQPIVQLQQQSLSHLTIQAITT

SEQ ID NO: 303197 - protein, 131 aa, Zea mays
  Clone ID: MRT4577_39590C.1.pep
KFFTQAIVYSTTHVQAPTPQLFVPPRGLINSISGLSLVSLASSLFNLLPAMRTVELCYQLRLHSQSCYQPLPQSYLSLPAIDREASAIFYPWQSPLWPWPVRQCCGAKKITEPVCEIAPPGLDVRVAARVG

SEQ ID NO: 303198 - protein, 149 aa, Zea mays
  unsure (1)..(149): unsure at all Xaa locations
  Clone ID: MRT4577_39591C.1.pep
EADGWRSHVVYRCVPGGLACAADDYSLYNAFSTYGDALXTKIILXRETLGPDGCGFHAFSXEDDMRSXALQVMKGKDLQGRNIIANEDQSRGERGGLRGEYGGGRLDVRGYGGRGVRYLVVRSRYRGGGGYGGANRLDEYGNHHGKWRN

SEQ ID NO: 303199 - protein, 139 aa, Zea mays
  Clone ID: MRT4577_39592C.1.pep
MASASPSASEPAAAPEVDAPAAALPAEGPTEIAFFDVETSVPQRAGQGYALLEFGAILVCPRRLVEVASYATLVRPADPASAVSAASVRCNGITRDAVSAAPPFRDVADAVYDLLNGRVWAGHNIVRFDSARIKGAFTE

SEQ ID NO: 303200 - protein, 115 aa, Zea mays
  unsure (1)..(115): unsure at all Xaa locations
  Clone ID: MRT4577_39593C.1.pep
GAAPELHSLPRHHHPPPKEPPRLDPPSGTPTRFKKXHRNPGTGAAGXXRAPKHRRHPXGAAGDAGAMHHHRILSHKRHPGYILKAGMRYFHQLRDEVYCAAANIAGLWGKDPEDK

SEQ ID NO: 303201 - protein, 99 aa, Zea mays
  unsure (1)..(99): unsure at all Xaa locations
  Clone ID: MRT4577_39594C.1.pep
PRIALETTYVLLXIWQIRHVSQIVVDDQXSRTTPSXVVFTKFERLIGDAANIHVAXMNPINTVFDAKRLIVRRFTDASVQRDIKLRPFKDIPGPGEKPM

SEQ ID NO: 303202 - protein, 156 aa, Zea mays
  unsure (1)..(156): unsure at all Xaa locations
  Clone ID: MRT4577_39595C.1.pep
GGERALAXAKSEXPAXGIDXGTTYSXVGXXQGGRVEIIANDQRNRTTPSYVGFTDTERFIGDASKNQVAMNPTNTVFDAKRLIGRRFSDPSVQSDMKLWPFKVIPGPGDKPMICVNYKGEEKQFXAEEISFMVLIKMKEIAXAFLGSTIKNAVLTF

SEQ ID NO: 303203 - protein, 85 aa, Zea mays
  Clone ID: MRT4577_39596C.1.pep
SWCELLATLFNQGQMSPCHSRVVSCRVAPFGLLHPLVPFGQRSLANTAAIGPRPIIGGMRSLNHLMHKGPSSIGSLYILGPTVGT

SEQ ID NO: 303204 - protein, 99 aa, Zea mays
  Clone ID: MRT4577_39597C.1.pep
MANSEGPAIGIDLGTTYSCVGVWQHDRVEIIANDQGNRTTPSYVGFTDTERLIGDAAKNQVAMNPTNTVFDANRLIGMRFSDPSVQSDMKLWPFKVIPG

SEQ ID NO: 303205 - protein, 72 aa, Zea mays
  Clone ID: MRT4577_39598C.1.pep
ASLPPGPCHRMRRHAGLVSSPRRRLRHQASTVLSGRSTLPPSCFHQVLLLRPDALVPSLPCRLHPRYLVRGK

SEQ ID NO: 303206 - protein, 68 aa, Zea mays
  Clone ID: MRT4577_39599C.1.pep
RLMYNKFYPCSSQSRRHSICKCSACKASLFFSTGMVRHMSSMHGCLGGRLGDGSSRSQQRPEGSVFVQ

SEQ ID NO: 303207 - protein, 83 aa, Zea mays
  Clone ID: MRT4577_3959C.1.pep
SDKAHLSMEEQFMDDQLHALIVLEVVKESSGKGHGHVYVIPAGVSGHKQPERLGGELHQCDLTARDRYGVMFCRTIRLGVACN

SEQ ID NO: 303208 - protein, 80 aa, Zea mays
  Clone ID: MRT4577_395C.1.pep
YAFIKFSATVELWLEMATGKNPLGITCPNPYPRRKNTPAKKPIPMTGIKFCPNPYPCGFRVPNGFPIPTVGFPFEPINKP

SEQ ID NO: 303209 - protein, 43 aa, Zea mays
  Clone ID: MRT4577_39600C.1.pep
TDDNKVNRVVLDEVSHMGKEILRHRWFIRLNSLSFILRLGPVK

SEQ ID NO: 303210 - protein, 70 aa, Zea mays
  Clone ID: MRT4577_39601C.1.pep
ELEWSEWLLSRVNKSHQVINGSACECPSPQNACYELSCMCVTFSVFCAMAVQLTAHVCVDEAVDHIKDVV

SEQ ID NO: 303211 - protein, 76 aa, Zea mays
  Clone ID: MRT4577_39602C.1.pep
TTAQLPNFIPMGKNSGDNLEKKIGDVNFHYKWPRATNRIYICTVSSVIVINSSILSWLELGRGHPVQREGSSSTRH

SEQ ID NO: 303212 - protein, 233 aa, Zea mays
  Clone ID: MRT4577_39603C.1.pep
MCGILAVLGCGDESQGKRVHVLELSRRLKHRGPDWSGLHQVADNYLCHQRLAIIDPASGDQPLYNEDKSIAVAVNGEVYNHEELRARLSGHRFRTGSDCEVIAHLYEEYGESFIDMLDGVFSFVLLDARDNSFIAARDAIGVTPLYIGWGIDGSVWISSEMKGLNDDCEHFEIFPPGNLYSSKEKSFKRWYNPPWFSEVIPSVPYDPLRLRSAFEKAVIKRLMTDVPFGVSLS

SEQ ID NO: 303213 - protein, 130 aa, Zea mays
  Clone ID: MRT4577_39604C.1.pep
APNSARVLLPAEKLLEEICDVGGAGSRVDRSASDEGLLDADPMESIDHEMDGADRVASDAGPISGAEQQWKKTRLISMMEEVCKRYRLYYQQVHTVINSFETVAGFSNAAPFAAMALRAMAKHFKCLKGM

SEQ ID NO: 303214 - protein, 110 aa, Zea mays
  Clone ID: MRT4577_39605C.1.pep
MTVVRVDENPAPDGENSPLDDEYVSADDEHVDDEDKETDSIDDYENPSGTPQMKKGPWSPEEDKRVKDYVEVHGAGNWNKVQQNARLNRCGKSCRLRWTNHLRPDLKKEP

SEQ ID NO: 303215 - protein, 165 aa, Zea mays
  unsure (1)..(165): unsure at all Xaa locations
  Clone ID: MRT4577_39606C.1.pep
NKKNIKRNIKRRMKRKEIKRKRKKIKDKNRKDKXKKXEKTKKKKXRRNKKVKKXEMXEKGRIKKNKKKKMKKXKNKKKDKDKNKKKNNDXDKKIDRMKXKLENRRGNYNRRRERKNHKREKNVRERRRXKLKXKEREIKKXKRKKRDIKKNTLKKNKKMKTKGIE

SEQ ID NO: 303216 - protein, 241 aa, Zea mays
  Clone ID: MRT4577_39607C.1.pep
RKHARARVEEGAQASWEDRRARARSRDRAEAELGEHTAGSGSAAMASSGRRLGGARAMGERRELDRREKRRAGAGRSDRHRGTRPGDPPATNAPRKKSTGLGRRTSRGTHDCAQTNLRERVKQGGSRGRKSMEGCPAHHRSSPHGRIATVLTTTARPTPLAWSMSREMDSLPSPGADCSSVCSRVAWRGAGHVLEIRERRKTTEGLEARGSRALLLHQCDSSVVEGAGAGRGAPRRWAGGR

SEQ ID NO: 303217 - protein, 92 aa, Zea mays
  unsure (1)..(92): unsure at all Xaa locations
  Clone ID: MRT4577_39608C.1.pep
NLLDGGTPMQYGARTLIAGGFQSIPYPIFPGGAIIGCSAXSLNVPKIKGTHTAMKSGMLAAEATLKSLVEGSSMELYWGDLKKSCIWEDLLK

SEQ ID NO: 303218 - protein, 127 aa, Zea mays
  unsure (1)..(127): unsure at all Xaa locations
  Clone ID: MRT4577_39609C.1.pep
RRQXKLPSXHQTVTSYGHEVGQSAYELHLVRAAAGSVAVFEAASAPPPLEAVVVTMASVPHPLRRLPFPGRENRRGNRRSGHVEDLLNVAYLCLTSQGRMENPKFIEQDRSESSTKRTTSLRAAKAK

SEQ ID NO: 303219 - protein, 117 aa, Zea mays
  Clone ID: MRT4577_3960C.1.pep
NPDGNYRCEPEFRELAKGPGFFGSKSAYINASAWAIEFFKCSTVFNNKMAWFFHALPAWSVVSEKCRWSFSSCSRVCPPFCVVFFLHIMPPGWPRLPPFHGGHVFGASCQALACREF

SEQ ID NO: 303220 - protein, 74 aa, Zea mays
  Clone ID: MRT4577_39610C.1.pep
ISPYSLLSPHSPINMLSMSIPAKYISSIKLLFSTHTSGTIYSNDVSQTHCFPPLQTHYLSGVPQHRVSTVPRAE

SEQ ID NO: 303221 - protein, 69 aa, Zea mays
  Clone ID: MRT4577_39611C.1.pep
NFFFFFFFFFFFFFFFFFFFFFFLGKIPGSNLKTTCFITKFPFTVVKAPPPFTIKHKCPRAPQTTTINN

SEQ ID NO: 303222 - protein, 107 aa, Zea mays
  Clone ID: MRT4577_39612C.1.pep
GFPAWKNCFLRAGFPLPPPGTRVFFKKVVFRSKDPTPSLEGLPAAFPLFKDIDPDNPVKLFEAQELKRPIMAKQRGQFQVWGLYFLLKKKIWELCPPGHGMFWMEFF

SEQ ID NO: 303223 - protein, 95 aa, Zea mays
  Clone ID: MRT4577_39613C.1.pep
MAPTAAEEMERMVEADWKEGMRKRNRYGLVEYRALPAYLRDNEYIHRHYRCEWPLPQVLLSAFSIHNETLNVWTITEEANIDTPVKEMRMLKRKS

SEQ ID NO: 303224 - protein, 124 aa, Zea mays
  Clone ID: MRT4577_39614C.1.pep
CYARPAARNRRGIKKQNGRENQEEQHPEAHHHEPRPQTDSPNEKNAHQPRPTDTTGTKRKRATHRNTTHRTARTRRRTPRPRKKAGPATTPARPEHTPTTARPPPRPPREPKERSKTREPEKQG

SEQ ID NO: 303225 - protein, 64 aa, Zea mays
  Clone ID: MRT4577_39615C.1.pep
YPKLFHCRSYTILFRVRSLFSCIFLYAHLVYELNNLSNDVSLLVSCLVDGVTNCRWRYVVLSIV

SEQ ID NO: 303226 - protein, 77 aa, Zea mays
  Clone ID: MRT4577_39616C.1.pep
MAAREDRTVEDALLPDTAEGLRFLVRRSMHRPPPWMPDFVLDDFIQLMYVDRPGPQANGGLLAGACVAELQQCERQL

SEQ ID NO: 303227 - protein, 39 aa, Zea mays
  Clone ID: MRT4577_39617C.1.pep
RRPVGIHTPHLFSSTQLAARELPSISKAKEKRSVKFVGE

SEQ ID NO: 303228 - protein, 98 aa, Zea mays
  unsure (1)..(98): unsure at all Xaa locations
  Clone ID: MRT4577_39618C.1.pep
PARPWVVFGSSSWPXVLVAVALMATAAEGYITQKTWGAIRRANRAGLFVGXSSCPTHTRWSPCSSRPASWPARASLTWTSKGEGFASEPSKAKASSWS

SEQ ID NO: 303229 - protein, 361 aa, Zea mays
  unsure (1)..(361): unsure at all Xaa locations
  Clone ID: MRT4577_39619C.1.pep
MRAPAGGASATALAAAMNIKQPLHGASTLFALLSLSLLLLRLLLRLRLAAFRDAALSLHLLARLRLRPVLLCLPAACHDGGAGAGATTLRVWCPAAPSSKPPLLLLHGFGGDAKWTWARNLPRLSRHFHVYAPDLVFFGAQXVRVAXRSVAFQARCAAEAMRLLGVPRYDVAGISYGGFVAYRMAAAEARDAVGRLVIMTTGVAATPGEMRAMAAREDRTVEDALLPDTAEGLRFLVRRSMHRPPPWMPDFVLDDFIQLMYVDQKRERAELLHELLKSGAGFDPLPVLTQETLIIWGDKDQVFPVDLGHRLHRLLGERSRLEIVRDAGHALQLEGADHVNRSIKSFLLDERVGPGAGAGRK

SEQ ID NO: 303230 - protein, 207 aa, Zea mays
  unsure (1)..(207): unsure at all Xaa locations
  Clone ID: MRT4577_3961C.1.pep
MPPPPCDRPCRRRSISGDPCQAQSHHVTPGADAAGEREHGQPCRAGAAKRGDGRVHGAHEALHRRSRKKKGKNSVETYKIYIFEVXLKQVHPDIGTSSKAMSIMNSFINDIFEKLAAEAVKLARYNKKSTITSREIQTSVRLVLPGELGKHAVSEGTKGVTKFTSAYAARPPLAGFSPEFTSLAVDMCCCLLGFYGCYLSGCSNCSI

SEQ ID NO: 303231 - protein, 35 aa, Zea mays
  unsure (1)..(35): unsure at all Xaa locations
  Clone ID: MRT4577_39620C.1.pep
KNIGYNESNENLFNTISIDYRWCGYPAFFSLXPLL

SEQ ID NO: 303232 - protein, 49 aa, Zea mays
  Clone ID: MRT4577_39621C.1.pep
SYFGSVDLRWYAIGPCINYICNVCVICSTNTSSVLLLFALVCYLQLLAD

SEQ ID NO: 303233 - protein, 65 aa, Zea mays
  unsure (1)..(65): unsure at all Xaa locations
  Clone ID: MRT4577_39622C.1.pep
RKKQETHRRAMLANDLNNNANKLARXTAQPQRVGPDIIKAVFAPQIHRHHQNNHPIMSLNANKPT

SEQ ID NO: 303234 - protein, 85 aa, Zea mays
  Clone ID: MRT4577_39623C.1.pep
TSRCYLGKQISCLVKGMLLQNGKGTMRAFGGPPQRDAGPTPGVFFNYAQRSSSGRKQVVVPSGRPFRFSRNPFQRSVAQGSPGLP

SEQ ID NO: 303235 - protein, 85 aa, Zea mays
  unsure (1)..(85): unsure at all Xaa locations
  Clone ID: MRT4577_39624C.1.pep
KKKKKXXGGFFLIKGTQYFVLFRGPPFYRSQVSLPCLPTFYLFISSPEFHLTAPLLTPLDLENPLPPQINPLFPPSPFSPFHFLP

SEQ ID NO: 303236 - protein, 82 aa, Zea mays
  Clone ID: MRT4577_39625C.1.pep
VISLALLSDDLINATLILYAFNVAFTDFDTLCLLTSYGTFSARYCRRFKILAERFTAPARIRPCPGCTLLIVVEMVHVMYAL

SEQ ID NO: 303237 - protein, 66 aa, Zea mays
  Clone ID: MRT4577_39626C.1.pep
KATLGRLVIKRAFCQESDFNAGLSGNEENRTMESLWAVTILLRIFSEEEKNLLSRQILVCESSHGK

SEQ ID NO: 303238 - protein, 278 aa, Zea mays
  Clone ID: MRT4577_39627C.1.pep
QLKAWIWLLITRALAVKEIHKQCTQQSHAFVFLHPYPKDSEKLMLSRQTGLTRSQISNWFINARVRLWKPMIEDMYKEEIGEAELDSNSSSDNGQRNKDKAPSPEENEDLQTPTSQACQTSQLGESKAIVGGVMGFSGVLAGGFHTEANPDDSFMSLMLKAQRPGETEGTGLLHDAVAHHSDDGARFMAYHLAEFGRYGNSSNVSLTLGLQHAENSLAVPPNTQPGFPGVRDQDMYNATAPPLNVASTSSEYDSASQIDQQQQRQRFEPSPLMHDFVA

SEQ ID NO: 303239 - protein, 58 aa, Zea mays
  Clone ID: MRT4577_39628C.1.pep
PGSTCLELSPGSGRPPLTVSAGFVPNGARPSTLLARRPQPRPTASHAAQREALRIPRA

SEQ ID NO: 303240 - protein, 105 aa, Zea mays
  unsure (1)..(105): unsure at all Xaa locations
  Clone ID: MRT4577_39629C.1.pep
MATYYSSPDSERDSQTMYSTESGNASYPVPSALGNFLYLNSASSGPYTEFNGIVQSQQNFMELTGHPSAISHDSSSNEATXLAXLTEQRSXGPLKDMRNEMLMHL

SEQ ID NO: 303241 - protein, 50 aa, Zea mays
  unsure (1)..(50): unsure at all Xaa locations
  Clone ID: MRT4577_3962C.1.pep
PVCLQFHVVLGLVWISHGLTIILWYPNMLLVERRKLPXCYESYAGGGQMV

SEQ ID NO: 303242 - protein, 201 aa, Zea mays
  unsure (1)..(201): unsure at all Xaa locations
  Clone ID: MRT4577_39630C.1.pep
MPPPPPRRFRPRAHPRDAHSAMASTSSAPAGATDAVLKPSEPAPEGVQQVQGIDFNQHAARPITVDELVSGYATMGFQATSVGAAVRIINDMRAWRDPETGDRTTIFLGYTSNLISSGLRETLRYLVQHKHVSAIVTTAGGVEEDFIKCLAPTYLGSFSTPGAGLRKKGMNRIGNLVVPNXNYCAFEEWVVPILEKQLQEQ

SEQ ID NO: 303243 - protein, 377 aa, Zea mays
  Clone ID: MRT4577_39631C.1.pep
KLMTMLDEVDRKYKHYYHQMQLVMSSFNMVAGAGAAKPYTAVALQTISRHFRCLKDAINDQISVIRKKLGEDDNTSGKEGKLTRLRYIDQQIRQQRAFQQYGMLQQNAWRPQRGLPENSVSILRAWLFEHFPLPYPKDSEKLMLSRQTGLTRSQISNWFINARVRLWKPMIEDMYKEEIGEAELDSNSSSDNGQRNKDKAPSPEENEDLQTPTSQACQTSQLGQSKAIVGGVMGFSGVLAGGFHTEANPDDSFMSLMLKAQRPGETEGTGLLHDAVAHHSDDGARFMAYHLAEFGRYGNSSNVSLTLGLQHAENSLAVPPNTQPGFPGVRDQDMYNATAPPLNVASTSSEYDSASQIDQQQQRQRFEPSPLMHDFVA

SEQ ID NO: 303244 - protein, 91 aa, Zea mays
  Clone ID: MRT4577_39632C.1.pep
MATYYSSPDSERDSQTMYSTGSGNASYPVPSALGNFLYLNSASSGPYTEFNGIVQSQQNFMELTGHPSAISHDSSSHEATNIGTSLTDQRS

SEQ ID NO: 303245 - protein, 488 aa, Zea mays
  unsure (1)..(488): unsure at all Xaa locations
  Clone ID: MRT4577_39633C.1.pep
MPPSSPGGGSQRNQANPSMASAAAVVSLNVGGEIFQITTATLSRAGASSPLASLGPSSPSAPHFLDGDPRLFAQLLSFLRHGRLLAPSYPSATLLAEARHFALDGALLASLSPASAFAPLSLRPSALLPLTGRVAPSAVAXPLAASPGLPXAAHGGVVTCFDAALASRTSVLTPLPAVDSLAAVSPVLALAGARDFHGVHLCRFSDDASAGCTDPNVLSWPGSPSATVLSMATTTASEAPSPPWLFSSFESARRNSSAVVVFDLNSLSPVVEIGRKEVFGADIEAAIPASKLAWLGGHSLLLAAGSHSGPAGVVGDIRLWDVRASATVPVWEVREKEDCFADVAASDALSAVFKVGAASSEVFMADLRRLGNGGGVGLEPWVCIGDGQKXLQPHHLEGKRGXGCRIECYCSWVFVARGADVEVWSQVGLAPEAGGKKVMRRNWVGSELSTKPKIVSWAFGGSRMALARADQLSVEIWDSATAAIGANP

SEQ ID NO: 303246 - protein, 82 aa, Zea mays
  Clone ID: MRT4577_39634C.1.pep
RFSFYMDSPKLAWREDQSQHGPIDCRTAIKCFSVYILLRGLKRLPLRVLLKKPLVPVIVIYWTRARTDFALVYWHQKGKEGQ

SEQ ID NO: 303247 - protein, 38 aa, Zea mays
  Clone ID: MRT4577_39635C.1.pep
PFVASISPNKMTFLKYSYLYFYLHTLLNIPTDDLIQLF

SEQ ID NO: 303248 - protein, 544 aa, Zea mays
  unsure (1)..(544): unsure at all Xaa locations
  Clone ID: MRT4577_39636C.1.pep
FQVDRKYKHYYHQMQLVMSSFNMVAGAGAAKPYTAVALQTISRHFRCLKDAINDQISVIRKKLGEDDNTSGKEGKLTRLRYIDQQIRQQRAFQQYGMLQQNAWRPQRGLPENSVSILRAWLFEHFLHPXFFRLTXDMFTHPLFYLFSCHADTLRYPKDSEKLMLSRQTGLTRSQVFFICLRYVFSYQICKSLECLSIIKSDGYVKRNNFSSFFCRKNXIGCFSCILLCCKHIVSAVGLLLVCMYICTNLILSLHLKSFPIDKNFKTNSAVALFQNKVHQFCWYLDLEDYLXLMTCCHISSLYSVSNNGNHIYXTHMRPSIXISNWFINARVRLWKPMIEDMYKEEIGEAELDSNSSSDNGQRNKDKAPSPEENEDLQTPTSQACQTSQLGESKAIVGGVMGFSGVLAGGFHTEANPDDSFMSLMLKAQRPGETEGTGLLHDAVAHHSDDGARFMAYHLAEFGRYGNSSNVSLTLGLQHAENSLAVPPNTQPGFPGVRDQDMYNATAPPLNVASTSSEYDSASQIDQQQQRQRFEPSPLMHDFVA

SEQ ID NO: 303249 - protein, 641 aa, Zea mays
  Clone ID: MRT4577_39637C.1.pep
MATYYSSPGSERDSQTMYSAESGNVSYPVPSALGNFLYTNNASSGPYTEFSGIVQPQQNFMELTGHPSAMSHDSSSNEATNMGSSLTEQRSFGPLKDMRNEMLMHLMDGAHSSGSDLIHNDAHSTVQLEFGMLNNHNSTSVPLAPGQGLSLSLNTHILAPSYPHWSAKQDLLTPNSYQGDDNRMKNMQSEASQAIRNSKYLKAAQELLDEIVSVWKSVKQKTDKGPSEAGKSYRWKTDGGTKSEGVSFDPQESGANTAAELSTAEKQELQNKMAKLMTMLDEVDRKYKHYYHRMQLVMSSFDMVAGAGAAKPYTAVALQTISRHFRCLKDAINDQISVIRKKLGEDDNTSGKEGKLTRLRYIDQQIRQQRAFQQYGMLQQNAWRPQRGLPENSVSILRAWLFEHFLHPYPKDSEKLMLSRQTGLTRSQISNWFINARVRLWKPMIEDMYKEEIGEAELDSNSSSDNVQRNKDKAPSSEENEDHKTSTSQVCQTSQLGESKANIGGVMSFSGAPAGGFHNDANPDDSFMSLMLKAQRPGETDGSGLLHDAVAHHSDESARFMAYHLTEFGRYGNNNVSLTLGLQHAENTQPGFPGVRDQDIYNSTAPLNVTSTSSEYDSASQIDQQQRQRFEVSPLMHDFVA

SEQ ID NO: 303250 - protein, 30 aa, Zea mays
  Clone ID: MRT4577_39638C.1.pep
HLNSWVISSRELLQSPARLLKSPQSYTWLV

SEQ ID NO: 303251 - protein, 55 aa, Zea mays
  Clone ID: MRT4577_39639C.1.pep
RPHLLPRTLFIALSHSKTLAGHFFFNKFIHEPKNHILYIHSSLSQEETLTLFKGF

SEQ ID NO: 303252 - protein, 119 aa, Zea mays
  unsure (1)..(119): unsure at all Xaa locations
  Clone ID: MRT4577_3963C.1.pep
VPSLLGSPRFLFRALVLVCWGVCVLRAFLGAGLSPLVFLWVPAGSSVPLVSVRGSSSWCASVFFPPRLRCRXSPCGSCGGWCCVRLLVVLVSPPGSVAGPWVCPFRSFRCRGFXSWSCP

SEQ ID NO: 303253 - protein, 236 aa, Zea mays
  Clone ID: MRT4577_39640C.1.pep
PPPPGANPAAARGALPPSPSPGGRPHPRRGLAAPSPGASCARAGASRPCLAESSPVEGGPRRGQPSRATGTKGLARPCRGRLRLQRGRRASRGAASHPPLRRIASSASARRPSRARAGNQSRPSGRPCCVRARLRGDPAPLAVLAGDDRALAAVAERCTPGARCVVPPRPAPAAPAPLIRRAPAPWSRALEHAYPCAAWSHPPASGLTAPTPRRRLAVWASPRRGRLGGAMKIAYR

SEQ ID NO: 303254 - protein, 225 aa, Zea mays
  Clone ID: MRT4577_39641C.1.pep
GRVGGRVGASKRRQEWQPKQAAEEEEETSGAVPTEEEESYPKRDEADGKPSAEAETTTSKAVCNTDGPVSETCDLDGDVRTNGSALSVTFVPASPSERREWKVRPYSRRTMVGVDRVTVTRLGSPDDPAAPCAVAHSVPGVLFALGGLTGNYWHDFSDVLMPLYAASRRYGGEVLFLVSNMQPWWLGKYEAVVRRLFRYDAVDLDRDARVRCFRRLTVGLRLHKE

SEQ ID NO: 303255 - protein, 64 aa, Zea mays
  Clone ID: MRT4577_39642C.1.pep
RAGGGRGALGVVESGGDGGSHVPAGDVDLRGRPLLCQQQPRVRHVGQIRQYACESLDVSSVALA

SEQ ID NO: 303256 - protein, 137 aa, Zea mays
  Clone ID: MRT4577_39643C.1.pep
MRRRPFLDQQRTSFKRWWQQRSWWARLLLSLLLALACVLLLAVLLGSPDPDTSPSTSARVLRMVAEYRQPLVKTEGASLSIAKVAAVATGGGEARVELDESARSQVKASSGWVMNSTDSMMRGGGRGRDPRPLASAP

SEQ ID NO: 303257 - protein, 63 aa, Zea mays
  Clone ID: MRT4577_39644C.1.pep
RIHSSSMDVMPRPRVAPWLGLQLRACPRWPIRKHCPPILRAKPEGCLLVLGGRRLRGRPIEHR

SEQ ID NO: 303258 - protein, 127 aa, Zea mays
  Clone ID: MRT4577_39645C.1.pep
CIMVGDSLPPDIKGANASGMASAFVTGGVHPDELGLGEFEKTAGKNAVSSLCTKHGWYPFYVLPSFGWKKPGLKFFVLFSVHGKVILAKYGCYGNKCHPMPNPPEVSFFLISPTQCPTPWRQICICI

SEQ ID NO: 303259 - protein, 100 aa, Zea mays
  Clone ID: MRT4577_39646C.1.pep
NSEGDSSANYDDNKSVLHAVNYVGKEFADDGVDSSFQNFCFSDHEANWGLNECCRLMDIYSPDDDFSYLLDSPPDLLPSYTGFCDEFVSIDALMNMSSRC

SEQ ID NO: 303260 - protein, 71 aa, Zea mays
  Clone ID: MRT4577_39647C.1.pep
YSSKTTGPARAGDIYAGARSRANTIIGDGRSSYYCEDLKDCEKGNLIKVKCYIEAEAILTRLLEDGVLYVI

SEQ ID NO: 303261 - protein, 45 aa, Zea mays
  Clone ID: MRT4577_39648C.1.pep
HICFFCTVIMAFLDACWPQGGRYKPPHVHLLGQLHGQPRGPHQAL

SEQ ID NO: 303262 - protein, 91 aa, Zea mays
  unsure (1)..(91): unsure at all Xaa locations
  Clone ID: MRT4577_39649C.1.pep
GGVYGGGGPRIGGGGYGGGAAASGAAGGSGGGGGGYGGGTRGGGXGNSAGNWRNLPVGPPRPIFPFRPLFFSPSPKGLSSFAPFGVPPLCF

SEQ ID NO: 303263 - protein, 357 aa, Zea mays
  Clone ID: MRT4577_3964C.1.pep
MPLQVHPLLLLLLVSSLPSCAISSGSSSCAGRDDAAIVAAAFRHVRNFRAPRTKACQPVRALRLPSRNLTGAVSWAALANLSALAAVDLSGNALQGAIPGGFWRAPSLRAVDVSRNQLGGALRVEPNPQLQSLNVSGNRFTGVDGVEGLSGLVALDVSTNRIRAVPRGLRRLTRLKRLDLSSNGMRGWFPGDLPPLGGVRSLNVSYNKFSGVVDTGAVTKFGHSAFVHAGNASLVFSGHSTEPRRPRPSPPHGKSKKNGGSAGTSTESKATRSSKKRKHLSIVAVAVICGVVSLAMQINLLPPLACGVLKSRQKGGKDDDEKKPQWGEKGEEEKEEDVVVAAARGALAAPPPSERPF

SEQ ID NO: 303264 - protein, 73 aa, Zea mays
  Clone ID: MRT4577_39650C.1.pep
AKSAQSIGVNDINVYTYRASALLCIESNWIQLNDLFRETNEVSISTLQLCISSCVYEYMIMRHGYVIPYLAKA

SEQ ID NO: 303265 - protein, 76 aa, Zea mays
  unsure (1)..(76): unsure at all Xaa locations
  Clone ID: MRT4577_39651C.1.pep
APLGLGRHPDGAAILMVKEIKTARLPMFSMFPFFIXGLLXGEGPVENLAKXLNRPLCGCNGITVIXSGAAKRWPIL

SEQ ID NO: 303266 - protein, 92 aa, Zea mays
  unsure (1)..(92): unsure at all Xaa locations
  Clone ID: MRT4577_39652C.1.pep
MRLAGGLSIHPPLGSIYPSVRVHSAILSCSSCPSSRVHSLQPAGPTCPPSGPTCHPPVXVPPPVXLPPPPCHYPTQPPRPQPHPQPHPCPCQ

SEQ ID NO: 303267 - protein, 172 aa, Zea mays
  unsure (1)..(172): unsure at all Xaa locations
  Clone ID: MRT4577_39653C.1.pep
MAVGKNKRISKGKKGGKKKTVDPFSKKDWYDIKAPSVFSVRDIGKTLVSRTQGTKIASEGLKHRVFEVSLADLQSDEDQAYRKIRLRAEDIQGRNVLTNFWGMSFTTDKLRSLVKKWQTLIEAHVDVKTTDNYMLRLFCIGFTKKRPNQVKRTCYAQASQIRQIRXKMTEIM

SEQ ID NO: 303268 - protein, 98 aa, Zea mays
  Clone ID: MRT4577_39654C.1.pep
CIACLITRLARCILDNLILIMDSRYITLCIFLVLVLHGDTTLAETCKQFPKWSPLCFSAICKASCFIEGKFSDGYYVKGHRCCSTGYEYVCNCLLCKN

SEQ ID NO: 303269 - protein, 109 aa, Zea mays
  unsure (1)..(109): unsure at all Xaa locations
  Clone ID: MRT4577_39655C.1.pep
RTSTRSTPNPRNKTTPANTEKKNKKVTAVSKSPTPPQKKKAXAARDSAHPKIVXRVFKKKKKIAEPPAARTKNRFIERLSRARQQGIRPPHHAFLYACPVYLPQRPLAI

SEQ ID NO: 303270 - protein, 90 aa, Zea mays
  unsure (1)..(90): unsure at all Xaa locations
  Clone ID: MRT4577_39656C.1.pep
IQPICINHCAAPTSSQDLGAHKHQGQVNVSLHXPLSTLAQTPLFXSIIYRMCLLNGFEHGLGIGVQTHVVGFGSQVLKRPLRWPVQVFVK

SEQ ID NO: 303271 - protein, 222 aa, Zea mays
  Clone ID: MRT4577_39657C.1.pep
MENYHMLFGTTATHAQPSSAAGTPSSYNFIATSTSSASGLRRDHDRGQHSGHVHAAGGSSSPSSFFVAERLSHNDDSSKDGGGGPGPAAAGSGEKEAEADDRPAAARRKGEKKERRPRFAFQTRSQVDILDDGYRWRKYGQKAVKNNNFPRSYYRCTHQGCNVKKQVQRLSRDEGVVVTTYEGTHTHPIEKSNDNFEHILTQMQIYSGMGSTFSRSSHDMFH

SEQ ID NO: 303272 - protein, 228 aa, Zea mays
  unsure (1)..(228): unsure at all Xaa locations
  Clone ID: MRT4577_39658C.1.pep
MENYHMLFGRPSTQPSSAATSNSYNFMLPPAGSTSGAGGLRDHDRGGGQHSGHAGGVPSSSSFFAEPSNTSSKDSGAAASSPPPAAGIGRGEEPAAGTPPAAAEVDGRLQAGKRKGEKKERRPRFAFQTRSQVDILDDGYRWRKYGQKAVKNNKFPRSYYRCTHQGCNVKKQVQRLSRDEXVVVTTYEGTHTHPIEKSNDNFEHILTQMQIYSGMGSTFSSSSHNMFH

SEQ ID NO: 303273 - protein, 88 aa, Zea mays
  Clone ID: MRT4577_39659C.1.pep
KKQKNKTNNTYSKKLYIIYNITGITIKPQTLYILNLPLHLLFHHIELKSQTDLQCHTYPHCLAHIKHIEFLPTCVYMNTQDYAPFTVN

SEQ ID NO: 303274 - protein, 65 aa, Zea mays
  Clone ID: MRT4577_3965C.1.pep
RIRLYLTFCYALSIIECLLNTVSRQFIRAAHKSFSTAISSGYTSTLASSVSPSFKPFPLSSTPTP

SEQ ID NO: 303275 - protein, 290 aa, Zea mays
  unsure (1)..(290): unsure at all Xaa locations
  Clone ID: MRT4577_39660C.1.pep
SKPAGMPPSPPSTLLPTSRXPTPSRAPSPCRTAPTLRSPCHTPTXTPPRRGHAAHDGARGEGGTXPRRWPRSRPWRASPSRASWPWPPPCSRAPGPPRASGSSRPTSSSPCTSSSSSSGSCPTTGTPSSRPPPPSTRTTPGRRPRSSRPPPPPPRRPSEPRRSSTASPCRLSSPPPPRTPAAAAPASPPSPTRTPPRLPRTXLWRSLAPAPQERAVVLEREPSLXRRRPWTAATTTTTTWTPRGTPSCRRRARRLRLPPLQLQLQLPLPPRTISNGRRRGPGTRRSAPRR

SEQ ID NO: 303276 - protein, 97 aa, Zea mays
  Clone ID: MRT4577_39661C.1.pep
TGGLLKRGGGLKAIAGGLDLLDKWVLNVEGAHTLTVINALTTIFDELQLKDNKDRQKHSNLTMLNTLSVDDCSNMEHVTRPETLQHLILLSTTASGT

SEQ ID NO: 303277 - protein, 122 aa, Zea mays
  Clone ID: MRT4577_39662C.1.pep
MRVMRVALALLALAASATFTHTTGCCSCQPPPSVHLPPPAHLPPSVHLPPNVHLPPSVHLPAPVHLPLPVHVPPPHHLPLSPFHYLTQPLRPQPHPQPHPCSCQQPHSSPCQLLVTCRHMQY

SEQ ID NO: 303278 - protein, 76 aa, Zea mays
  Clone ID: MRT4577_39663C.1.pep
ICFPLLKKKKKKKKKKKKKKKKKKKKKKKKKKKKKKKKKKKKKKKKKKKKGPPPHQIPGNRGGFPFLPKNKRGKRL

SEQ ID NO: 303279 - protein, 52 aa, Zea mays
  Clone ID: MRT4577_39664C.1.pep
YPPSLLLTTFAAAARREDQRQRSHLVVVRFGFGEGRHGRARLKGDTPAAEWR

SEQ ID NO: 303280 - protein, 98 aa, Zea mays
  Clone ID: MRT4577_39665C.1.pep
YMIDMQKVWISLTLLNKHTVHDHALGLFTLVTIQILRTMLVRLDHPGQVTYRDLHKPTPLKDNGYMIEMLLMLKLGINGEVNLVPQLPVKMQHDLLHI

SEQ ID NO: 303281 - protein, 117 aa, Zea mays
  Clone ID: MRT4577_39666C.1.pep
RREAIWLLHGGAAVGGPCPTVTVASSVRQPSLAPRTRPLTLNLDRCTATTLCLSASRWPCAADLSIAGSRLEYNHLFCLLIDVSNSKGKVLQWLGISFLKEYHGENAILNRQDHRST

SEQ ID NO: 303282 - protein, 97 aa, Zea mays
  Clone ID: MRT4577_39667C.1.pep
GGGATSHLPAYSALNHSSRVLCVVTTASRVLCVVTTASRVLCVVTTASRVLCVVTTVSRVLCVVTTASRVLCVVTTASRVLCVVTTASRVLCVVTTA

SEQ ID NO: 303283 - protein, 196 aa, Zea mays
  unsure (1)..(196): unsure at all Xaa locations
  Clone ID: MRT4577_39668C.1.pep
AGLLAVLEAGARIAAAGKXNLFCRXLHPQLAIQRTLTCVMESXSDSSQTLQSASASGIMGMAPILXKDATXERILPICLFLLIDEFPDALLIIFSKLDQVNQVMGFNFLXHTLLPXIVELAEDKHWTLPLAIIXEYIPLLASQLRVRIFDDKLGSLCMQWSEDKVFXSHNAAGNNLKRLWEESCTEWSMQHIIPAV

SEQ ID NO: 303284 - protein, 53 aa, Zea mays
  unsure (1)..(53): unsure at all Xaa locations
  Clone ID: MRT4577_39669C.1.pep
LADCFPAHFLLCLSCFSCPLAVWGGPTHCKFAAPVVFLWTKTAASLFXFCXAW

SEQ ID NO: 303285 - protein, 53 aa, Zea mays
  Clone ID: MRT4577_3966C.1.pep
AGRDKLRSTQILTPHQRRCMYSSDLPAAVLSTLPTTMVKKPGNLLNLHLFFIF

SEQ ID NO: 303286 - protein, 37 aa, Zea mays
  Clone ID: MRT4577_39670C.1.pep
LPYSFIYALLVKLHGNECMDYDSVGSVLFDLKSKFQK

SEQ ID NO: 303287 - protein, 83 aa, Zea mays
  unsure (1)..(83): unsure at all Xaa locations
  Clone ID: MRT4577_39671C.1.pep
GLVRTKTVMKAARVIIAXYYTRLGNDFHTNXRVCEEIGIIPSKKLRNKIAGYVTHLMKRIQRGPVRGISIKLQEEDRERRDTY

SEQ ID NO: 303288 - protein, 70 aa, Zea mays
  Clone ID: MRT4577_39672C.1.pep
HLSISPQKQNGIGLQYNTHFVPNIINSQHNIYGCFGKGPMEIFWIPGTGRYVNKQGTHLKIPNSGYLKFS

SEQ ID NO: 303289 - protein, 128 aa, Zea mays
  unsure (1)..(128): unsure at all Xaa locations
  Clone ID: MRT4577_39673C.1.pep
QLIALEISWKCQNHQVPLIQIXLAYPQQFLPFNQVAALHYHDYCQQQQLGPIRQLAGVNRSPSCMQPQRWRCCRPAVPXAGTVSQGQQCQPFNQRALTKAAAXYLQPIIGGASFKFHIRDSSIIKSFV

SEQ ID NO: 303290 - protein, 57 aa, Zea mays
  Clone ID: MRT4577_39674C.1.pep
LRIKPDGGNSSTSNQTSRAKNLAPHKPRMNTALTTDLVGLWHQKQIWATSNTTRTKI

SEQ ID NO: 303291 - protein, 99 aa, Zea mays
  Clone ID: MRT4577_39675C.1.pep
PSWLSLQINAPRPPFCGAGHLLPENRVFWFFGLGRPPSVFSKIFVFLGLEKESQIVFFPPPWVLVPKKKKKKKKKKKKKKKKKKKKKKKKKRKKKKKKR

SEQ ID NO: 303292 - protein, 42 aa, Zea mays
  Clone ID: MRT4577_39676C.1.pep
YSPVLDSLSAYRSDRPAPSPPPTLWLDHAHCRSRMPRLKDGL

SEQ ID NO: 303293 - protein, 536 aa, Zea mays
  Clone ID: MRT4577_39677C.1.pep
MALARLRLLDRYGLLSPALSATALRSLGDLRALCTLSTTLRSGAGEDEIERIRREFDDAKRNYLSIPAAIKDMPKMNPQGIYVNKNVKLDDLQVYGFDYDYTLSHYSEHLQCLIYDLAKRHLVNELKYPESCLQYEYDRTFPIRGLYYDRLKGCLLKLDFFGSIEPDGCFFGRQRLSLSEIKELYGTRHIGRDQARHLVGLMDVFCFSEACLIADIVQHFIDAKLEFDPSYIYEDVNQSIQHVHRSGLIHRQILSEPEKFLIKKSQVFRFLKMLKEKGKKLFLLTNSPFYFVDGGMRYLLEDQHFDGNSWRELFDVVIAQANKPTFYNSDHPFRVYDTQKDTLTFTAVDKFLPDQVYYHGCLKSFLQITKWKGSEVIYFGDHLLSDLRGPSKAGWRTAAVIRELEDEIEIQNGDSYRFQQAKLSIIHDLLGKVHAAVVSTEKGQVYKALLNELNAERRQCRSGMRDLFNTSFGATFLTDTGRESSFSYHIHQYADIYTSKLENFLSYAPESWLHPPHDIKIMPHNAKVPASLFSTS

SEQ ID NO: 303294 - protein, 173 aa, Zea mays
  Clone ID: MRT4577_39678C.1.pep
MVLPLVKLGSLAFRTLSKPIAARLKYNAGIHPKFRGLIIGIAQANHRFTTNMQRRLYGRATDIHIRPLNEEKAIQAAADLLGELFVFSVAGAAIIYEVQRSARSEARKEEARRLEIEEIKKREEQLALEVQVMKHKISEMERQYSKWTLPGLRGFGTAQAAAQPAGTQHPTAA

SEQ ID NO: 303295 - protein, 64 aa, Zea mays
  Clone ID: MRT4577_39679C.1.pep
FGTRDAPTPSLVPAWLPSSPSRPIGFTIHRPRAPTAAVRTGAVDRELAKLGGVDCSWGGGSVCG

SEQ ID NO: 303296 - protein, 68 aa, Zea mays
  Clone ID: MRT4577_3967C.1.pep
NKCRQLILFSQEYHALRCCSVQAPIPTRMGSNKNRPPKLAAVETPATWAMEFLIRYSICRHQHDMACS

SEQ ID NO: 303297 - protein, 77 aa, Zea mays
  unsure (1)..(77): unsure at all Xaa locations
  Clone ID: MRT4577_39680C.1.pep
LVGEXQXILXLAVLCCERHLLKKNPNNPCPRTLPRPGYRASAGPAHCTAAGYGFQTAQPPLTRRAQATNQRGMAWNN

SEQ ID NO: 303298 - protein, 291 aa, Zea mays
  unsure (1)..(291): unsure at all Xaa locations
  Clone ID: MRT4577_39681C.1.pep
SXIXKAMXXINDLLSFDFMDPPAPQALISAMEQLYSLGALDEEGLLTKLGRKMAEFPLDPPLSKMLLASVDLGCSDEILTIIAMIQTGNIFYRPREKQAQADQKRAKFFQPEGDHLTLLAVYEAWKAKNFSGPWCFENFVQSRSLRRAQDVRKQLLTIMDRYKLDVVSAGKNFTKIRKAITAGFFFHAARKDPQEGYRTLVENQPVYIHPSSALFQRQPDWVIYHELVMTTKEYMREVTVIDPKWLVELAPRFYKGADPTKMSKRKRQERIEPLYDRYHEPNSWRLSKRRA

SEQ ID NO: 303299 - protein, 63 aa, Zea mays
  Clone ID: MRT4577_39682C.1.pep
PPIHKVYKPKLKTTRKPPPPRAGVGCKLFKQKERPRGNVFIFGPEGFFFWDRKQGSPLPLFLK

SEQ ID NO: 303300 - protein, 60 aa, Zea mays
  Clone ID: MRT4577_39683C.1.pep
SCSSGCTCRSSSPAAACWRCTICSSTIASWELSHRAAAGGDGMWRRCEVLCAQATAGCGG

SEQ ID NO: 303301 - protein, 154 aa, Zea mays
  Clone ID: MRT4577_39684C.1.pep
MQVGGQHGAQLVIVPMVSGTVKSEEGFEPKLDGELHGVGYDYIHNDADGGNMRLDVRSQVKNHDGTVLAMYYKGTVKLTQGVGKVLSGAPDAKTTDYGDSFVNFSFETGNEKYKELQNGTYVAAGHFVTGEGKPGVVVEYKVSKVVYNASQGKM

SEQ ID NO: 303302 - protein, 78 aa, Zea mays
  Clone ID: MRT4577_39685C.1.pep
ALLSSDTSCMSRDFVPSVEQIQQLSELLPRIFSELTWPFAPSFSILLRVCEIVGLYFFSDDADCAVTSYSLFLTPCEP

SEQ ID NO: 303303 - protein, 115 aa, Zea mays
  unsure (1)..(115): unsure at all Xaa locations
  Clone ID: MRT4577_39686C.1.pep
AGACGRXXRXPCGRRRXARFXXSEFXQQYSPRAPAALPPGPACWGGTVRYGAGPQVLAFGRTPPLPPLPHRSTATQLRSRRGQLRLRPTDPLTKSPVRSTQHRLFFLHIYRRLCA

SEQ ID NO: 303304 - protein, 330 aa, Zea mays
  unsure (1)..(330): unsure at all Xaa locations
  Clone ID: MRT4577_39687C.1.pep
MAAVTAAAISLSSSSASSPAAAAKAKAASPSSSPCRHLQFLSAPSPRRXGGPAPARXRAQVSTTETAAAGPAKTSKKQDEGLVTNKYKPKEPYVGRCLSNTRITGDDAPGETWHMVFSTEGEIPYREGQSIGIIADGEDKNGKPHKLRLYSIASSALGDFGDSRTVSLCVKRXPKDPRSTIIMLATGTGIAPFRSLLWKMFFEEHEDYKYTGLAWLFLGVPTSDTLLYKEELEKMKEMAPDNFRLDFAVSREQTNAAGEKMYIQTRMAEYKEELWELLKKDNTYVYMCGLKGMEKGIDDIMLDLAAKDGINWLDYKKQLKKSEQWNVEVY

SEQ ID NO: 303305 - protein, 369 aa, Zea mays
  unsure (1)..(369): unsure at all Xaa locations
  Clone ID: MRT4577_39688C.1.pep
MAAVTAAAISLSSSSASSPAAAAKAKAASPSSSPCRHLQFLSAPSPRRXGGPAPARXRAQVSTTETAAAGPAKTSKKQDEGLVTNKYKPKEPYVGRCLSNTRITGDDAPGETWHMVFSTEGEIPYREGQSIGIIADGEDKNGKPHKLRLYSIASSALGDFGDSKTVSLCVKRLVYTNDQGEIVKGVCSNFLCDLKPGAEVKITGPVGKEMLMPKDPNATVIMLATGTGIAPFRSFLWKMFLEEHEDYKFTGLAWLFLGVPTSDSLLYKEELEKMKEMAPDNFRLDFAVSREQTNEAGEKMYIQTRMAEYREELWELLKKDNTYVYMCGLKGMEKGIDDIMLDLAAKDGIDWMQYKKQLKKGEQWNVEVY

SEQ ID NO: 303306 - protein, 369 aa, Zea mays
  unsure (1)..(369): unsure at all Xaa locations
  Clone ID: MRT4577_39689C.1.pep
MAAVTAAAISLSSSSASSPAAAAKAKAASPSSSPCRHLQFLSAASPRRXGGPAPARXRAQVSTTETAAAGPAKTSKKQDEGLVTNKYKPKEPYVGRCLSNTRITGDDAPGETWHMVFSTEGEIPYREGQSIGIIADGEDKNGKPHKLRLYSIASSALGDFGDSKTVSLCVKRLVYTNDQGEIVKGVCSNFLCDLKPGADVKITGPVGKEMLMPKDPNATVIMLATGTGIAPFRSFLWKMFLEEHEDYKFTGLAWLFLGVPTSDSLLYKEELEKMKEMAPGNFRLDFAVSREQTNAAGEKMYIQTRMAEYREELWELLKKDNTYVYMCGLKGMEKGIDDIMLDLAAKDGIDWMQYKKQLKKGEQWNVEVY

SEQ ID NO: 303307 - protein, 67 aa, Zea mays
  Clone ID: MRT4577_3968C.1.pep
ASLASPMLFRRWGFLSVPGGLISAFPGRPLGVCINLRVWFGLSFAPPLLSFPVFLSWGLGGSTRKHL

SEQ ID NO: 303308 - protein, 55 aa, Zea mays
  Clone ID: MRT4577_39690C.1.pep
ASDSFDGNYRGLGYCLACFGITTGWEPAEAAWRMSTALEVPLSLLSYSHSLCMKL

SEQ ID NO: 303309 - protein, 369 aa, Zea mays
  unsure (1)..(369): unsure at all Xaa locations
  Clone ID: MRT4577_39691C.1.pep
MAAVTAAAISLSSSSASSPAAAAKAKAASPSSSPCRHLQFLSAASPRRXGGPAPARXRAQVSTTETAAAGPAKTSKKQDEGLVTNKYKPKEPYVGRCLSNTRITGDDAPGETWHMVFSTEGEIPYREGQSIGIIADGEDKNGKPHKLRLYSIASSALGDFGDSKTVSLCVKRLVYTNDQGEIVKGVCSNFLCDLKPGADVKITGPVGKEMLMPKDPNATVIMLATGTGIAPFRSFLWKMFLEEHEDYKFSGLAWLFLGVPTSDSLLYKEELEKMKEMAPDNFRLDFAVSREQTNAAGEKMYIQTRMAEYREELWELLKKDNTYVYMCGLKGMEKGIDDIMLNLAAKDGIDWMQYKKQLKKGEQWNVEVY

SEQ ID NO: 303310 - protein, 116 aa, Zea mays
  Clone ID: MRT4577_39692C.1.pep
CHRAIWATCWCFYRTKTNSQGIKRTKRHLPPVPHDARRAYRADQHLKKSAPPGLQQEQRAQSGRSVHKTRPKPWGSQSIMYATPSKIMPGQPLAEADQRPPCPTSIGKPPADQQTL

SEQ ID NO: 303311 - protein, 36 aa, Zea mays
  Clone ID: MRT4577_39693C.1.pep
RYSDTGYHLYYLRRILMKKPHCSFRKCKRLYLSDST

SEQ ID NO: 303312 - protein, 126 aa, Zea mays
  unsure (1)..(126): unsure at all Xaa locations
  Clone ID: MRT4577_39694C.1.pep
VIKSGXRMYLTNSAVRVFGKDXXXPGTAEEGPIVEGDPELIDDSEFYQQLLKEFLESCDRGASESAFYSXKKQQVKKRKLVDRRASKSRKIRYHVPEKIPNFMAPEPMVLPPMAPKLFENLFGNSS

SEQ ID NO: 303313 - protein, 86 aa, Zea mays
  Clone ID: MRT4577_39695C.1.pep
DTNDFSSNGVATEGVRCQQSQQYVCCVPIFTSTCTWTTHLSLTSKNAVFKFTISFNPVEQILVDQHVVGLILARLAYSLVGTKETR

SEQ ID NO: 303314 - protein, 52 aa, Zea mays
  Clone ID: MRT4577_39696C.1.pep
PTSSALGPRPRGSSNISGTPAEGPRGGRSVTDPCRNALSKQSNCNNISSLSS

SEQ ID NO: 303315 - protein, 82 aa, Zea mays
  Clone ID: MRT4577_39697C.1.pep
RTRGRTRGRTRGRTRGEDHEKDVLLVGDDPWEDFVNCVRCIRILSPQEERQMRLASDYGDSFVGNQACSSSDGGRPWRVTGD

SEQ ID NO: 303316 - protein, 1086 aa, Zea mays
  Clone ID: MRT4577_39698C.1.pep
MEAPGTSSGGAGGEGAGGTKVNEELWYACAGPLVALPPAGSLVVYFPQGHSEQVAASMRKDADAKIPSYPNLSSKLICILRSVTMLADPDTDEVYARMTLQPVSNVTHCDKETLLATELALKQTRPQTEFFCKTLTASDTSTHGGFSVPRRAAERIFPHLDFSVQPPAQELQARDLHDAIWTFRHIYRGQPKRHLLTTGWSLFVSGKRLLAGDSVLFIRDGRQQLLLGIRRANRQPVNLSSSVLSSDSMHIGILAAAAHAAANNSQFTVFYNPRASPSEFVIPFAKYQKAVYSNQLSLGMRFRMMFETEESATRRYMGTITGISDMDPLRWKNSQWRNIQVAWDEAAPSERRTRVSLWEVEPVIAPFFIYPSPLFTAKRPRQPGVTDDDSSEMDNLFKRTMPWFGEEVGKRDLSTQNGLVPGLSLVQWMNMQHNPSLANTVMQPELLNSLAGKPVQTLAAADLSRQISFQPQFLQQNNIQFNTSLLPPQNQQTEQLANVIATPNQLGSVIVPQKAVQNCSSEQKQNLVTQPLQVSQPMVSVAQPQLVHTQLQQPQVVLQAQPQQPQVIVQAQLQQQQPLVQNHTTIQGGLQQIQLLQQQQVQQSVQEQQQIKIQPFQVPNDANMVTQLSDQMKIQLLKALQPQQPLVMEQQKMIFDLQQQAVNSQSTAQQCSQVATQVVGLHSSSTNQYPTQQKTQPLKTFQDFPGNAVSIVKPEIVTSVGARSLHVPGGVQSMKMDEVPSSSTSPSTNNNPVILRSTPSSSKNQCLPTAAKAPQSSVVLGSTLEQGMKPCDSTQHPMVIPKLAEERPATGQDYMNNNQLDYLDTSSSATSVCLSQADGSLQQSFPPSSFNQHQPLREAVPDSEFEVTDAGNNFLFGANIDGHMEPLNEDDLLGTAFEADKYMEQMPGNGISNYISSKDSQQELSSSMISHPFGVADIAFNSIDSSINDIQFLNRNSRAPGPVQQRMRTYTKVHKRGAVGRSIDINRYSGYDELKHDVARMFGIEGQLSDQNRVGWKLVYEDHEKDVLLVGDDPWEDFVNCVRCIRILSPQEERQMRLASDYGDSFLGNQACSSSDGGRPWRVTGD

SEQ ID NO: 303317 - protein, 204 aa, Zea mays
  unsure (1)..(204): unsure at all Xaa locations
  Clone ID: MRT4577_39699C.1.pep
PAARAGRAREVPPRYLAAALLAAAAPLRRLNHPLRGAALPSPTMSARAEMSPRRRRRRASPPPASLPDDDDMLREILLRLPPRPSSLPRASLVSKRWRSLVADPQFQRRFRNHHGKPPLLGFFVEDRRSCPFFPKLGRPDRIPRARFSMPPNKDDRIPGARFSMSLNGDNRIVDCRHGLVLFLGXTAAPLLEWDPRCPRTSAPL

SEQ ID NO: 303318 - protein, 54 aa, Zea mays
  Clone ID: MRT4577_3969C.1.pep
GEEHIFYFSTAPNKLEIDLGNSRSRPTLITSDAACLGLMRDCLKDSSLIDLKKD

SEQ ID NO: 303319 - protein, 260 aa, Zea mays
  Clone ID: MRT4577_396C.1.pep
MDDFDPVPSDDDGDGGVAASSSSPGRSICHAGCGRPSRVCLCPYLPASPLPTSTTVVILHHPHALRRNPLSTLPLLARCLSNLRLVPGRRLLSSSTAPAPGPVLLLYPSPAASDLVSWCRSTPRPARAAPTLLLLDGTWRQAREMHAASLAVLASLGAVPVALPVDSRADGDSMFESDLVVRKEPRKGCVSTMEAVARALRLLEPEREGAVVEETMLGVLRAMVAFQTEHLRHRTVKPRAKMRKKKELRREQEMQRDAVD

SEQ ID NO: 303320 - protein, 123 aa, Zea mays
  Clone ID: MRT4577_39700C.1.pep
FLPHLSSAHLPPSWPPPPLPTPEHPAPSTPLHPDSPRPSWPRWGRPWHRLRGDRSGRKCWSTWRRTTSSNGGRSYARASPTPAVSSRSLSGVVGTTPPPRPLGHRTRTCLLSTSLKSLGNFQI

SEQ ID NO: 303321 - protein, 82 aa, Zea mays
  Clone ID: MRT4577_39701C.1.pep
VNRGSYFWSLGARAFYFSCPVFLWLFGPIPMFVACVALVCALYFLDVCKDWEEEEGDGHGHRCTSDDERRATTQGKDAEQQV

SEQ ID NO: 303322 - protein, 129 aa, Zea mays
  unsure (1)..(129): unsure at all Xaa locations
  Clone ID: MRT4577_39702C.1.pep
TTNSXXPXAKGXXDXXGXKEGXRTXXXAXXATQKTGEGAAAKDRRXGRXASXNNXPSSTXXAKXXXXXXPEXKGKXTGRAPRXPTXXXXXGDPTGXXGKGAPDEESXRAXGAAAEGPXGGSTGHGEEGR

SEQ ID NO: 303323 - protein, 118 aa, Zea mays
  unsure (1)..(118): unsure at all Xaa locations
  Clone ID: MRT4577_39703C.1.pep
MEIIHQQVQRKKEKMAWLADLQRKIDEATEEVCHLVQDEQDRRPQHREFXQEGLLNEDXDAELQATPWPPSYKPPQLPMYDGHSDPKQFLMSYEATISSYGXNTTVMAKSFVMAVRNV

SEQ ID NO: 303324 - protein, 107 aa, Zea mays
  unsure (1)..(107): unsure at all Xaa locations
  Clone ID: MRT4577_39704C.1.pep
MATAAAASTVLTGATTAAPKARRRAHLLALRRALAAPIRCSAALHGMGGGXPATPLRPWGPTDPRKGADIFVESLERCGVRDVFDNQGGASMEIQQAITRFTVIANH

SEQ ID NO: 303325 - protein, 117 aa, Zea mays
  Clone ID: MRT4577_39705C.1.pep
PKVKALGLIYKLEVPGRGPYSGGFGGNSFYGAQPIALSFPPLVFSTGPSPHPMVSSKNPNRGREWVAPFQGGAGLVSPRSPHYEPRECENKGAALARALVFSKSAFVDKKKWAMGFV

SEQ ID NO: 303326 - protein, 57 aa, Zea mays
  Clone ID: MRT4577_39706C.1.pep
DCLLPPVCNYLQVRRCALSLFKGQYGTSVTVILVYYGKLLIISSCQIIHWDHRSFRI

SEQ ID NO: 303327 - protein, 36 aa, Zea mays
  Clone ID: MRT4577_39707C.1.pep
DQVVYICQHKFIFIPRTSFVGLWIVLNASGHNLLIG

SEQ ID NO: 303328 - protein, 31 aa, Zea mays
  Clone ID: MRT4577_39708C.1.pep
LGPLGYKSTYTKGVISQSSNIGKLKSFFIPS

SEQ ID NO: 303329 - protein, 64 aa, Zea mays
  Clone ID: MRT4577_39709C.1.pep
TYATKYSGPVRMANKEGYKVLTLKTDRLYKVVGTFITLAGETEDTEETGALTTVNIESLLIHFT

SEQ ID NO: 303330 - protein, 210 aa, Zea mays
  unsure (1)..(210): unsure at all Xaa locations
  Clone ID: MRT4577_3970C.1.pep
VGSAHDAAPGLDSGVQVVVRIRPSCWVDEEEAGEDGRGPEACVRKTAANSVAIQGQDFTFDAVADSVSTQEDIFTLVGLPLVENCLSGFNSSIFAYGQTGSGKTYTMWGPLSALSEDSLSSERGLTPRVFEQLFSRINEEQVKHADKELTYNCICSFLEIYNEQITDLLDPSQKNLQVREDVRTACVYVESLTKELVFTLEDVTQLXVKG

SEQ ID NO: 303331 - protein, 217 aa, Zea mays
  Clone ID: MRT4577_39710C.1.pep
LKSKPHVLLAGHIHGHAQGQAQQTSHFRALPSRATTERRVEKEPVVCVVLLRQQPATAKMDVPTTAREHAGRVRSHRPAGTGSFVRRASIGKFGNGGKGGWIAKSAYIGLRFGLRTISSSQNGVPVVQTKGRKRRVCSDRVGWLLGHILFCLACFIKELDSFLTCYLYHHSSVLPHSSHVTASPLPFTPPAAVPPTLPHLCRRQPLPVPPTSLVFPP

SEQ ID NO: 303332 - protein, 58 aa, Zea mays
  unsure (1)..(58): unsure at all Xaa locations
  Clone ID: MRT4577_39711C.1.pep
STGCLKKPHLFLPVTVLLLXIRMYQKSTDLLIRKLPFQLLVREIFHDFKTDLLFQSSV

SEQ ID NO: 303333 - protein, 130 aa, Zea mays
  Clone ID: MRT4577_39712C.1.pep
MTTTAAVVKLLTAVLLFFAVSLRGTKGEPCGTSSIHVQTVNTGATAAAGDTLFEVQVKNLCPCSVKNVRMDGGGFATTVEVDPVLFRPVDGGVYLVNAGESIASMGIVSFRYAWDHFFQLTPRSLEVDGQ

SEQ ID NO: 303334 - protein, 131 aa, Zea mays
  Clone ID: MRT4577_39713C.1.pep
MTTTAAVVKLLTAVLLFFAVSLRGTKGEPCGTSSIHVQTVNTGATAAAGDTLFEVQVKNLCLCSVRNVRVDGGGFATTVEVDPALFRPVDGGVYLVNAGESIASMGIVSFRYAWDHFFQLTPRSLEVDGQG

SEQ ID NO: 303335 - protein, 35 aa, Zea mays
  Clone ID: MRT4577_39714C.1.pep
MDSADAATALGAWIRGYFTPATFFLVVNLVIGISA

SEQ ID NO: 303336 - protein, 47 aa, Zea mays
  Clone ID: MRT4577_39715C.1.pep
TFAPLICSLLILQGEYFLIECSIPSISVHHILPPLLAYQNLSVRTHP

SEQ ID NO: 303337 - protein, 53 aa, Zea mays
  Clone ID: MRT4577_39716C.1.pep
TVVLKVGLDHLADEECVKLLGPCRKAIPSSKGGGKIIIGDIIIDHSGLIVETY

SEQ ID NO: 303338 - protein, 102 aa, Zea mays
  Clone ID: MRT4577_39717C.1.pep
GPPLRKAPQAVRQNPRPVPVRKAAPGREVRPWRRKQEKEATKRRTGRGTKAGDPSRVPGRRSFARPLLLACLPAPGRAGGLASGFLFWSFPANGRGWVSECL

SEQ ID NO: 303339 - protein, 282 aa, Zea mays
  unsure (1)..(282): unsure at all Xaa locations
  Clone ID: MRT4577_39718C.1.pep
MDSADAATALGAWIRGYFTPATFFLVVNLVIGTIALTSRATQQRRRRENYYHDDGHSHGHGHQETLHPQMEQPGYGHYYHPPRCSARRPCWTGSARWASTASSLPTNPPPPRQFQRATASPPRRTRRGTRTRTTTSAGPSRHGSSRTRRRRLRGATQQGPSRARGLGRRPXEAGGSRRRXVWTRGRRHSSTASGSSSRCTTTRRRNTSRLRRPRRRCRARRPSWTASAPSACTASAPATSAPTFPPPPPPRRRTRRRSSRRRTTGGAGRSRRGSRARSRTRG

SEQ ID NO: 303340 - protein, 230 aa, Zea mays
  unsure (1)..(230): unsure at all Xaa locations
  Clone ID: MRT4577_39719C.1.pep
SRPRARSRTDARPPPPRRRSSSTCSSSCPASCPAPAPAPTGSARSAPPAASPCPSPWRRWRREGRGRGRRSGSGTGRRSGGGPGRTTCATAAARAPEAGRIPPPGSGAPXLLPEAVXMPPPSRPXSAPASXPPLSGRLPXPSSTWPLLSCPPASSPSCPAAPVPARTGRCRSACARASSRPPGWRSRRSLELTRRRRVRRERGSRRGPASGACPARTTCAAAGRVPAAAE

SEQ ID NO: 303341 - protein, 97 aa, Zea mays
  unsure (1)..(97): unsure at all Xaa locations
  Clone ID: MRT4577_3971C.1.pep
VIDDCPDDLIVWYRHTFKGAWPFSTGAHGWSISDCTAGGLKAXIAMXKTYPEIVRGPIEPNKSYDAGSXLMSYMNDHVGIATXELTRSYAWLKLINP

SEQ ID NO: 303342 - protein, 111 aa, Zea mays
  Clone ID: MRT4577_39720C.1.pep
SRPRARSRTDAPPPPPPPPPPPRRRSSSTCSSSRPASCPAPAPAPTGSARSAPPAASPCPSPWRRWRREGRGRGRRSGSGTGRRSGGGPGRTTCATAAARAPEAGTYSSSW

SEQ ID NO: 303343 - protein, 86 aa, Zea mays
  Clone ID: MRT4577_39721C.1.pep
NFPSRWRLLLHAFRGPIPPFSESYYTLLALFLHPNYWKTPGFPHFNPLAQHPLFAGWHITKKAPPLCPYQHLTIFNGKWPPLFTAL

SEQ ID NO: 303344 - protein, 73 aa, Zea mays
  Clone ID: MRT4577_39722C.1.pep
CGPRPPPGIPWSGCEQPNQLWVHAHALGTVCNVKCELMWKIVIRNDPIILVSPLVSGPKVVLWHQNMEPPRIF

SEQ ID NO: 303345 - protein, 57 aa, Zea mays
  Clone ID: MRT4577_39723C.1.pep
LCFFHKKLIKWGEGGILNTASTQSKRGSTQTKRIKQGTLNISTYTRPQTPPSNRGGD

SEQ ID NO: 303346 - protein, 101 aa, Zea mays
  Clone ID: MRT4577_39724C.1.pep
FMLPTWEATLFQLGCYPSLYYNKNSCFIFGTTTALMICHHQFYNSGCTTQPHTDHQQSYIHHHHLQEPPAATHPPKQQQQLLLLPSSSTCYCSSMKKLLNK

SEQ ID NO: 303347 - protein, 71 aa, Zea mays
  Clone ID: MRT4577_39725C.1.pep
IVILSSLFSVFFPFLSEKTQGSQAPHNKKGGGRNILNPHTPKKKAGRTALGPKRLRPLRPTRRTATKKAPV

SEQ ID NO: 303348 - protein, 42 aa, Zea mays
  Clone ID: MRT4577_39726C.1.pep
AVLSSPKMNVKPPLIYCFTNRSKVGKLMFLFQLALVLQFCLP

SEQ ID NO: 303349 - protein, 268 aa, Zea mays
  unsure (1)..(268): unsure at all Xaa locations
  Clone ID: MRT4577_39727C.1.pep
MAIPLVLVLLPLGLLFLLSGLVVNTVQAVLFLTIRPFSKRLYRQINVFLAELLWLQLIWLVDWWAGIKVQVYADPATWKLMGKEHALLISNHRSDIDWLVGWILAQRSGCLGSAIAIMKKSSKFLPVIGWSMWFAEYLFLERSWAKDEKTLKSGLQRLKDFPRSFWLALFVEGTRFTPAKLLAAQEYAISQGLTAPRNVLIPRTKGFVSAVSIMRDFVPAIYDTTVIIPEDSPKPTMLRILQGQSSVVHVRXKRHSMSXMPNSDEDVS

SEQ ID NO: 303350 - protein, 321 aa, Zea mays
  unsure (1)..(321): unsure at all Xaa locations
  Clone ID: MRT4577_39728C.1.pep
MATRADVEKGGPARKEPGKVPSPLYPQHEGEREWVPWLVPVIFVASITVFVVTMYANNCPARRDAKCVXLPRPLLLPAAATEPALRALLRHXTKMGALVWEKVVHRHQGWRLLSSMWLHAGVIHLVANMLCLLFIGMRLEQQFGYVRIGAIYVLSGVGGAVLSSLVVRNRVTVGASGALLGLLGAMLSELLTNWTIYTNKAAAVATLLSVAAVNLVLGVLPHVDNLAHLGGFLAGFLLGFVVLMRPHLGWMERYGLPAGAPCTARKYLAYQWTLLAVAIIILLVGFAAGMAMLFRGANANDSCHWCHYLSCVPTARWNCTN

SEQ ID NO: 303351 - protein, 313 aa, Zea mays
  unsure (1)..(313): unsure at all Xaa locations
  Clone ID: MRT4577_39729C.1.pep
MATRADVEKGGPARKEPGKVPSPLYPQHEGEREWVPWLVPVIFVASITVFVVTMYANNCPARRDAKCVXLPRPLLLPAAATEPALRALLRHXTKMGIRHWEKVVHRHQGWRLLSSMWLHAGVIHLVANMLCLLFIGMRLEQQFGYXVAATYLLYSTLPCPWLPIITTIYNRVXVRIGAIYVLSGVGGAVLSSLVVRNRVTVGASGALLGLLGAMLSELLTNWTIYTNKAAAVATLLSVAAVNLVLGVLPHVDNLAHLGGFLAGFLLGFVVLMRPHLGWMERYGLPAGAPCTARKYLAYQWTLLAVAIIIXLVG

SEQ ID NO: 303352 - protein, 35 aa, Zea mays
  Clone ID: MRT4577_3972C.1.pep
MWHPFSTFSTLIDCLLDSICLFTVLKLLFMQVCSL

SEQ ID NO: 303353 - protein, 69 aa, Zea mays
  Clone ID: MRT4577_39730C.1.pep
ESQVPRGSEEITDRNFGPAQIRGVAPPTFKKSHRRCGCSYRHAVRFMLFEIENMCKNMLPSSYSWFVLW

SEQ ID NO: 303354 - protein, 54 aa, Zea mays
  Clone ID: MRT4577_39731C.1.pep
RAILLKWTHSLPTNIILCRRISGLRFIEISVCRYHQERVRIRTGSVCSSATTLS

SEQ ID NO: 303355 - protein, 74 aa, Zea mays
  Clone ID: MRT4577_39732C.1.pep
IKPIRSHTACVVIVRTHARIYIRYLLTFCSSETCFKASIHPWMLMYEYVLVVCQAPGQQNRVLYYIYLRLMVIK

SEQ ID NO: 303356 - protein, 104 aa, Zea mays
  Clone ID: MRT4577_39733C.1.pep
VCLPVLGKAMEQEQTPKLPLYPHTKPSPGGHLLFYPTSILDCTNDPNHPDSTSTLCNCISCSEQDFFNRSTTLTDNHLRIVGAKDYYIESLDYEIIENDLFKHD

SEQ ID NO: 303357 - protein, 74 aa, Zea mays
  Clone ID: MRT4577_39734C.1.pep
LLRRPVAERLTGELSQWHGPLFRERLNVGRGGWLAKAPVASLDSDLEDASHNAAHDMLNATGCLTKRDDQLGES

SEQ ID NO: 303358 - protein, 32 aa, Zea mays
  Clone ID: MRT4577_39735C.1.pep
YWGNPLYPPLSIYIGNNAVSRPPFSCVVWPII

SEQ ID NO: 303359 - protein, 823 aa, Zea mays
  Clone ID: MRT4577_39736C.1.pep
MFKFLKEVVAGSGSGLKDFPYTIGEPYASAWGSWKHHRGTSKDDGSPVSIFSLSGSNPQDRHMVAGRNGVKRLRTVRHPNILSFLHSTEAEAADGPAMKYTIYIVTEPVMPLSEKLKELNLGGTQRDEYFAWGLHQISKAVSFLNNDCKLVHGNVCLASVVVTQTLDWKLHAFDVLSEFDANNEASGSPMLQFEWLVGMQYKPMELSKSDWASIRKSPPWAIDSWGLGCLIYELFSGAKLARTARLRNTASIPKSLLPDYQRLLNSTPSRRLNPSKLIDNSEFFQNKLVETIQFMEILNLKDTFEKDSFFRKLPNIAEQLPREIVLKKLLPVLASSLEFGSAAAPALTVLLKMGSWLPADQFSIKVLPTIVKLFASNDRAIRACLLHHINQFGESMSAQIVDEQVFPHVATGFSDTDGTIRELTLKSMLVLAPKLSQRTISGSLLKYLSKLQVDEEPGIRTNTTILLGNIAGYMNDGTRKRVLINAFTVRALRDTFPPARAAGIMALSVTSSYYEMTEIATRILPNIVVLTFDPNSDVRTKAFQATDQFLQIAKQHHEKLNTGDNSVAESTGVKLKPGNAGLLGWAMSSVTQKGKPSDHAPISTANANNSQASTTSTATPDTQASTLAYAPSTSTSLDQAASASARSSVDGWGELEDGNIHEENSSDKDGWDDVDPFEDKPSPSLLSNIQAAQKRPVVQPKQPVANSSKPNPLKAPKSEDDPLWGPIAAAPPKSAVKSADIKPSTSHNDEDDLWGSIAAPPKSSGKPLKPAVANSDDLWGAIAAPPPATKARPLASSGRGRGTKPAQPKLGAQRIGRTSSTGM

SEQ ID NO: 303360 - protein, 53 aa, Zea mays
  Clone ID: MRT4577_39737C.1.pep
IIDRELNYVLRATPHLNISGSFKPHGHTYREAPHILGGGFLYNQDCFPTTQNL

SEQ ID NO: 303361 - protein, 102 aa, Zea mays
  Clone ID: MRT4577_39738C.1.pep
INSNLYYYNVSVSCRNRIIHETVSTVTNHHPTNSATIQCPARPKPPTLRQSCHTTPFTAHTASNKPPQTPPHAPTQTPSSSACASELFSVAPPMGLASQTPT

SEQ ID NO: 303362 - protein, 45 aa, Zea mays
  Clone ID: MRT4577_39739C.1.pep
CSDSIPPLHASLLVLPMIAVSIEAGSKSLPKMACCYTTSRIPNSS

SEQ ID NO: 303363 - protein, 62 aa, Zea mays
  unsure (1)..(62): unsure at all Xaa locations
  Clone ID: MRT4577_3973C.1.pep
KVPVDPHIXXYFXSPTALTFPNXPMSGQKLFGVDYPXXXXTXXXNXXXPYIKXYSRXITSLK

SEQ ID NO: 303364 - protein, 423 aa, Zea mays
  Clone ID: MRT4577_39740C.1.pep
EETKNIVCNEIVSAYELDGHPDYDYCYGDIVVRLPPVSPVIESTNNKDQMELDRTVDASEGFAASNDAPSNTSASEQLLQKESCSQFTSLSWAGNIVGFQDGEIEVIWGDGSISKVGPHEIYVVGREDDDASLDDGTASDGASWETVDDNEMDVLDDSAKGTGGRKWVKKVQQEWSILEKNLPDYIYVRVFEDRMDLLRAVIVGASGTPYQDGLFFFDFYLPPEYPQVPPSAYYHSGGLRVNPNLYVDGKVCLSLLNTWTGRGNEVWDPSSSSILQVLVSLQGLVLNEKPYFNEAGYEKQVGTVEGEKNAVPYNENTYLLSVKSMLYILRRPPLHFEDFVKSHFRKRGHYILKACEAYLQGNVVGTLTDDACTTNRSTEHSSSVGFKLALAKILPRLITALKEHGADCDQYEHLGKTDPVRES

SEQ ID NO: 303365 - protein, 129 aa, Zea mays
  unsure (1)..(129): unsure at all Xaa locations
  Clone ID: MRT4577_39741C.1.pep
VILDVEHAAFSPSHMVPGIDVSNDRMLQGRLFSYPDTHRHXRLGANYLQLPINQPYRARVAHHQRDGPSTFSQNFNGSPNYEPQSVDPSGPVQQLQDVTAKYSPVSLNGTTGRYPHRRSEDDFVQPGNL

SEQ ID NO: 303366 - protein, 61 aa, Zea mays
  Clone ID: MRT4577_39742C.1.pep
CKVALQAASSFSMPMAIGCESGSGCLILNIPLASCHRQYLGLTHTLRLCHGINFTTPSPTF

SEQ ID NO: 303367 - protein, 1104 aa, Zea mays
  Clone ID: MRT4577_39743C.1.pep
MESLPNGSVNNAEHNQENKKSMDASVPEEVQDVFIYREDVVSLKSKEDVRGLVLEVAGEYDSEGSITDDDIDTEEHEDKTVRGAENGAADGDNASNGAEVESQSSLPDNKVRVLWLDDSEKTEDIDEVVVVDRSFLHGDLVASASDPTGQMGLVLDVNLVVDLQGVNGDMIKGVSSKDLRRIREFNVGDYVVSGLWLGRVDEVLDSVNVLFDDGSVCKVNRADPMCLKPVFGPMHPDTDCPFYPGQRVKAVSSSVFKTSRWLNGLWRASRLEGTVTKVESVSVIVYWIASAHFASDQQPVPPEKQNPKDLTLLSCFSYANWQLTDWCLPHRYTLCTNDTVINSDKHTGQICTCPESSVPLSDIPESQADVQTEQDQMTDTDAGHRQIDVDSTADGLSMSDGDNSCIAKESETSVSSILKEPQDNATSRKKLRKVSLKKHKRTKKRDDSFERALLIANTCTKVDVIWQDGTKECGVAATALIPIHNPNEHEFFPEQYVVDKVTNDVGVDDSSEPRRVGLVRGVNAKDRTATVSWFKPPLHPEEPKEIACNEIVSVYELDVHPDYDYCYGDIVVRLPPVKPVIESTNSKEQMELDKTFDASEGFAASYSAPPDTSADEQLLQKESCLQFTSLSWAGNIVGFQDGEIEVIWGDGSISKVGPHEIYVVGREDDDASLDDGTASDGASWETVDDNEMDVLDDSAKDDSQSIPENSIEREDGSFSSQNGSSVATGPLSVAFGFVTRLASDLFARGRRHLDRSSNSDAMDEVESHQSNEVSETSDDIDKINENNVESPEDAAVIENDSSVEKSVDVVMADNLVDLECFKHFDILQCPPDHHYLENIAQGTGGRKWVKKVQQEWSILEKNLPDYIYVRVFEDRMDLLRAVIVGASGTPYQDGLFFFDFYLPPEYPQVPPSAYYHSGGLRVNPNLYVDGKVCLSLLNTWTGRGNEVWDPSSSSILQVLVSLQGLVLNEKPYFNEAGYEKQVGTVEGEKNAVPYNENTYLLSVKSMLYILRRPPLHFEDFVKSHFRKRGHYILKACEAYLQGNVVGTLTDDACTTNRSTEHSSSVGFKLALAKILPRLITALKEHGADCDQYEHLGKTDPVRES

SEQ ID NO: 303368 - protein, 107 aa, Zea mays
  Clone ID: MRT4577_39744C.1.pep
KLFIQPWVLPVLFKPPPPVTFSPPKGPPQIRGFPQINLSKSPPALIFFPFYVPGGPFQTLLFERAPQIFCPPVFFFSRRAFGFPPPPGGLPRAPNLRFPFRAVWVPP

SEQ ID NO: 303369 - protein, 117 aa, Zea mays
  Clone ID: MRT4577_39745C.1.pep
VNVWAYHSGRKMVYLNPFTGDTSEQHLLDKRNGMWVKFFNFTLLKSMDEDLAEEADDGMHPGNEQWLWPLTGQVFWPGIADREREEKYIKKLDKKLKNKVKLLERQKSGYKQKPLGQ

SEQ ID NO: 303370 - protein, 27 aa, Zea mays
  unsure (1)..(27): unsure at all Xaa locations
  Clone ID: MRT4577_39746C.1.pep
VLWASMSVTIVKSLIXSQSIIILTYLL

SEQ ID NO: 303371 - protein, 148 aa, Zea mays
  unsure (1)..(148): unsure at all Xaa locations
  Clone ID: MRT4577_39747C.1.pep
DAFDMGGGLIAPDRAMDPGLVYDIQPEEYTRLDDRADRLNLPSIAVSDLKNSVTVSRTVPRVRAGEXATYRAVVEAPAGVTMSVEPPVIAFQKGGPRNATFKVRFMAKQRVQGGYAFGSLTWLDDGKHSVRIPVAVRTVVRDFVADVS

SEQ ID NO: 303372 - protein, 160 aa, Zea mays
  unsure (1)..(160): unsure at all Xaa locations
  Clone ID: MRT4577_39748C.1.pep
FPRERPRDRGGFTYEGPSKTSKQPTKAGGKTTGKAARSRKRAEATGPKRTRDGSAHTRSEANKDEPDGPNDRHSSSLDEKNRRTLEAQGDEKTGEVARAGPKKAPAKGGGNKDAKRKRSTTGCFLLMDHFRKEFRVTHSDNKNVVTVXKEGGERWKXMTD

SEQ ID NO: 303373 - protein, 93 aa, Zea mays
  unsure (1)..(93): unsure at all Xaa locations
  Clone ID: MRT4577_39749C.1.pep
AHALIVRRXLSALDTAVELELTGYRGPRLHGRYEVDIFTQHLITVRARCKYSHKDIVSDGLRNSLGQEKYRKDLTVPPGXCTDFLLCATALVL

SEQ ID NO: 303374 - protein, 55 aa, Zea mays
  Clone ID: MRT4577_3974C.1.pep
SESFHMFTCDKVGLSVCEVPPRRPSFCKEVRVPLMKDELGSLRANAQFMKNPYIV

SEQ ID NO: 303375 - protein, 689 aa, Zea mays
  unsure (1)..(689): unsure at all Xaa locations
  Clone ID: MRT4577_39750C.1.pep
MAPPSVSASHLLITASLPKPKPSSLRPPRLPVAKPLPASAALLALAASPALAADAPAPAXPNPRAXPELQAEAPTPTVNPFSSSLLTAPKPSAAASDLPEGAQWRYSEFLSAVKRGKVERVRFSKDGGLLQLTAVDGRXRATVVVPNDPDLIDILATNGVDISVSEGESAGPGGFVAFVGNLLFPFIAFAGLFFLFRRAQGGXPGAGPGGLGGPMDFGRSKSKFQEVPETGVTFLDVAGADQAKLELQEVVDFLKNPDKYTALGAKIPKGCLLVGPPGTGKTLLARAVAGEAGVPFFSCAASEFVELFVGVGASRVRDLFEKAKAKAPCIVFIDEIDAVGRQRGAGLGGGNDEREQTINQLLTEMDGFAGNSGVIVLAATNRPDVLDSALLRPGRFDRQVTVDRPDVAGRVKILEVHSRGKALAKDVDFDKIARRTPGFTGADLQNLMNEAAILAARRDLKEISKDEISDALERIIAGPEKKNAVVSEEKKRLVAYHEAGHALVGALMPEYDPVAKISIIPRGQAGGLTFFAPSEERLESGLYSRSYLENQMAVALGGRVAEEVIFGQDNVTTGASNDFMQVSRVARQMVERFGFSKKIGQVAIGGPGGNPFLGQQMSSQKDYSMATADVVDAEVRELVEKAYSRARQIITTHIDILHKLAQLLIEKETVDGEEFMSLFIDGQAELFVA

SEQ ID NO: 303376 - protein, 88 aa, Zea mays
  Clone ID: MRT4577_39751C.1.pep
MSYYGQQPPVGVPPQQGYPGKDGYPPAGYPPAGYPPPAQGYPPQGYPQQGYPPQYAQPPPQQQQSSGPSFMEGCLAALCCCCLLDACF

SEQ ID NO: 303377 - protein, 58 aa, Zea mays
  Clone ID: MRT4577_39752C.1.pep
RLLDGAEFQVDKLKKKLRHEENVHRALERAFTRPLGALPRLPPYLPSQTLALPAEVAV

SEQ ID NO: 303378 - protein, 37 aa, Zea mays
  Clone ID: MRT4577_39753C.1.pep
MMGSSSVRLDLAPVVCQTSPSDVSGHVKKKRGGGENG

SEQ ID NO: 303379 - protein, 88 aa, Zea mays
  Clone ID: MRT4577_39754C.1.pep
MSYYGQQPPVGVPPQQGYPGKDGYPPAGYPPAGYPPPAQGYPQQGYPQQGYPPQYAQPPPQQQQSSGPSFMEGCLAALCCCCLLDACF

SEQ ID NO: 303380 - protein, 106 aa, Zea mays
  unsure (1)..(106): unsure at all Xaa locations
  Clone ID: MRT4577_39755C.1.pep
MHAARLRSSRRVRGGGDDSERWTTPPHXEERPKAYLXNRPPTSWGETRXWFIRERPCYMTYLLTVSILRPDLNAKPXLTNYTSAHEKEMKRLKQQELANDSEGADS

SEQ ID NO: 303381 - protein, 93 aa, Zea mays
  Clone ID: MRT4577_39756C.1.pep
MSYYGQQPPVGVPPQQGYPGKDGYPPAGYPPAGYPPPAQGYPPQGYPQQGYPQQGYPPQYAQPPPQQQQSSGPSFMEGCLAALCCCCLLDACF

SEQ ID NO: 303382 - protein, 98 aa, Zea mays
  Clone ID: MRT4577_39757C.1.pep
EVVVVAHVRHRVAEHVRHRTTGRRRRRGGRRRYREISSGRRRRNIVGRRRRAADGGDGEDHGESCHFFLLLWPLLKTACTYVFYVYMFSISAARPASL

SEQ ID NO: 303383 - protein, 60 aa, Zea mays
  Clone ID: MRT4577_39758C.1.pep
LLSRLRVEMAGPILTLDPRGSKLLTQLPIPNPNHMSVNLWNGLGYPMTGLKPSFFYDGYK

SEQ ID NO: 303384 - protein, 76 aa, Zea mays
  Clone ID: MRT4577_39759C.1.pep
MSYYGQQPPVGVPPQQGYPGKDGYPPQGYPQQGYPQQGYPPQYAQPPPQQQQSSGPSFMEGCLAALCCCCLLDACF

SEQ ID NO: 303385 - protein, 279 aa, Zea mays
  unsure (1)..(279): unsure at all Xaa locations
  Clone ID: MRT4577_3975C.1.pep
MVSAAAQAGVVASCVVXLFVPMGLAGRHLSRNKVLFFSGALFISLAVGIHLSPYLPSLSLPHLASFLLLPHPVSASASSGSSCVQFLHRVSWSNAAGAADNGSGGGKARAWSWPPSLASACGFARLSRDDASLLLNGSWVMVAGDSQARLLVLALLRLLLDPAAAAAATEVELFRRHSDYRAAVPARDISVDFVWAPFESNLTRLLREDLRLAPRLPDVLVLGSGLWHMLHGTDAASYGDALAXSGARAAKSLXSPLXPEPPPHMXWLGLPPLGNPWSK

SEQ ID NO: 303386 - protein, 76 aa, Zea mays
  unsure (1)..(76): unsure at all Xaa locations
  Clone ID: MRT4577_39760C.1.pep
NGRPTADGKGATADNARTKNQNRXNHAGKGTPRKPGSKEVYVFAMFNEDQKDGDPPEKKFGLFNPDKTPVPPINFA

SEQ ID NO: 303387 - protein, 89 aa, Zea mays
  Clone ID: MRT4577_39761C.1.pep
AGRGLRAMRDSRCWCTKVACACPKPSVTRTVSAEAGAQSRIPEPWIMPNRALYKRTRTTLGMPLSMTCTAYNNIGPLMLDARSTSDVVS

SEQ ID NO: 303388 - protein, 39 aa, Zea mays
  Clone ID: MRT4577_39762C.1.pep
GCGGGYIGGYLATTRRSAWRTSAFHRLDGKMMARCGHSC

SEQ ID NO: 303389 - protein, 56 aa, Zea mays
  unsure (1)..(56): unsure at all Xaa locations
  Clone ID: MRT4577_39763C.1.pep
KPARKEMGDMELATEKALKRAEMAEAFXKAVKGELKSWLHKEQKKSAEAAQLFAGA

SEQ ID NO: 303390 - protein, 242 aa, Zea mays
  Clone ID: MRT4577_39764C.1.pep
MEPTPLSACISLLCIALLCLLWHKSTKPPAGAPAPPPPPGPTPFPVIGNIPDLVRSGELHRALARLSASYGPVMSMRLGMASLVVLSSPATAHEALHKKEGAVSSRWVPDSASVMGHSDISMVWLPSSSPLWKHLRTVASTLLFTSRRLRASRAIQERKARELVDHLHACSGRPVRVALPVFSAVLNMLSSVLFSEDVVELGSVSGQEFMELIADSSAETAKPNISDFFPFLSSLDLSRRRR

SEQ ID NO: 303391 - protein, 70 aa, Zea mays
  Clone ID: MRT4577_39765C.1.pep
RPTLSLCPCSRAPPLATVPLGSAPASPPTTPPPVSSLVPQAFPFNYSAIGSPRRRRRRALWVASYRPYPR

SEQ ID NO: 303392 - protein, 232 aa, Zea mays
  unsure (1)..(232): unsure at all Xaa locations
  Clone ID: MRT4577_39769C.1.pep
IGYLEAGQASYSILDGDARDVTGLSMSIVRAPPCCFTMPLRXLRGTDAKPVARAMLRQLVRADDTYNEKVITPQEDAELQVPGQRLILDLPDQEGIYRPXHCRAQACSYCNAKDHSISHDQSHKNYINDNQDRDGWKLAXLTDPTSYCVNENNNDDDLLKIHVDIHHQGPTTYATTCRICHPGHETRQLNNLTYIYIYKHARMEKRHTHCNKMTILKVTWKRNQPLSLRRYR

SEQ ID NO: 303393 - protein, 59 aa, Zea mays
  Clone ID: MRT4577_3976C.1.pep
FIYSSNVLRVERHQTWTGDRTERLPPSLAFLIEAWSRCSRTHIQWRTARYRYIDKQKQL

SEQ ID NO: 303394 - protein, 140 aa, Zea mays
  Clone ID: MRT4577_39770C.1.pep
MHFSSSSTSWPWTILITLGCLMLHASLSAAQLTPTFYDRSCPNVTNIVRETIVNELRSDPRIAASILRLHFHDCFVNGCDASILLDNTTSFRTEKDAFGNANSARGFPVIDRMKAAVERACPRTVSCADMLTIAAQQSVT

SEQ ID NO: 303395 - protein, 118 aa, Zea mays
  unsure (1)..(118): unsure at all Xaa locations
  Clone ID: MRT4577_39771C.1.pep
PLPLRTTSKALGEACHSHQSSISCTELDIQIPTAFDPFAAANAGDYAAEAGSKDYVHERMQQRHGLKSLTTVQGLKKEYSYCQILKDLRKEFCCNGTLVQDPXVGQVIHLHGDQRKNA

SEQ ID NO: 303396 - protein, 64 aa, Zea mays
  unsure (1)..(64): unsure at all Xaa locations
  Clone ID: MRT4577_39772C.1.pep
TINTYKFTSEAIHTIGSIENTTKHSLSSLIMSKIDLSSYHRAHARRPTHHNKSDVSDKMVIXIV

SEQ ID NO: 303397 - protein, 139 aa, Zea mays
  unsure (1)..(139): unsure at all Xaa locations
  Clone ID: MRT4577_39773C.1.pep
GRCRVFYIIPRVTVLRRPTPATAQGLDRNKTDVALAXTKAEDALIKVNGVPIELIQPEMLRLEDFQPILLRGRFRLKDIHMRMRGRCGGNTSQIYHIRQVEAKGLVCYYQNDVDEXASRRTCKXIFMRYXDRTLLKGDP

SEQ ID NO: 303398 - protein, 422 aa, Zea mays
  Clone ID: MRT4577_39774C.1.pep
MQSVCQTLRVVTEREMEDEAALEMNELNSFTPPGKDKDELSFGGNSADRREASWTSLAGTSQQEPDLAALRMHGTFSPGGQGLSLSGVQATAEGSKTKRRTKAEKTVSLQVLRQYFAGSLKDAARSLGVCPTTLKRICRQHGITRWPSRKIKKVDHSLRKLQQIIDSVHGAETAFQLNTLYKDLTDTSISSDNNLSGSVTVPPTNQSNLTDFNKHQPHKSSSNMPSTSHSHSSCSHGSQSSPSCSVGATEHAQQGIIDLMKSENPVKDSSIQTMQTENTSLYEHFSVHEAPIDLLQDVTEKANGAHHSSRSLSSPNPKQNTDANMRVKATFGSEKVRFRLNPECNFQGLKHELAKRLSIVDTNPLVLKYLDDDSEWVLMTCDADLQECLHVYKLADIQTIKISVHLAVSPATRVTAGHTGLS

SEQ ID NO: 303399 - protein, 477 aa, Zea mays
  Clone ID: MRT4577_39775C.1.pep
LSHHAKIFKLKGAVAIRLRCTRTGTADFVLEFFLPTDCEALEEQKTVLDSLSGTMQSVCQTLRVVTEREMEDETALEMNELNSFTPPGKDKDELSFGGNSADRRGEASWTSLAGTSQQEPDLAALRMHGTFSPGGQGLSLSGVQATAEGSKAKRRTKAEKTVSLQILRQYFAGSLKDAARSLGVCPTTLKRICRQHGITRWPSRKIKKVDHSLRKLQQIIDSVHGAETAFQLNTLYKDLTDTSISSDNNLSGSVTVPPTNQSNLTDFNKHQPHKSSSNMPSTSHSHSSCSHGSQSSPSCSVGATEHAQQGIIDQMKSENPVKDSSIQTLQTENTSLFEHFSVNETPIDLLQDVTEKANGGHHSSRSPLSPNPKQNTDANMRVKATFGSEKVRFRLNPECNFQELKHELAKRLSIVDTNPLVLKYLDDDSEWVLMTCDADLQECLHVYKLAGIQTIKISVHLAVSPATRVTTGHTGLS

SEQ ID NO: 303400 - protein, 146 aa, Zea mays
  unsure (1)..(146): unsure at all Xaa locations
  Clone ID: MRT4577_39776C.1.pep
HTETIAGRGRGSPSSESKNASPVPDRAKCNRADLPVQHEGTTIFVIKSYSEDDIHTSVXCTVWSSQPTETRCLMAAYQEAESMGSVCPILLFFSENTSGQFVGVGXMTGAADSEKTIEHWHQDKRTVSCYVKWHIVKAGPNNIFTH

SEQ ID NO: 303401 - protein, 45 aa, Zea mays
  Clone ID: MRT4577_39777C.1.pep
RRWQVTGLPCFHAIAFITSLPNNKIADFVHPYYTVEKFKLSYAGV

SEQ ID NO: 303402 - protein, 69 aa, Zea mays
  Clone ID: MRT4577_39778C.1.pep
VSNIQSGMPSILVWRWSNLKNNKVELQLQFDLLQPREEVNQKRNITQSKIQLIPTPVLQIRSQEYIPIK

SEQ ID NO: 303403 - protein, 66 aa, Zea mays
  Clone ID: MRT4577_39779C.1.pep
TESFYVNNDLTIPEDIQAINVRPIKYSFYLRKPKVEINDANLVCQMLYGAICSFIGTRDLRQEPIV

SEQ ID NO: 303404 - protein, 62 aa, Zea mays
  unsure (1)..(62): unsure at all Xaa locations
  Clone ID: MRT4577_3977C.1.pep
MVSTPADLVPETPLGAVIKSWLAFAAQKVVVVNALALALAGLMDEAYFAXPAAAPASWLSSP

SEQ ID NO: 303405 - protein, 89 aa, Zea mays
  Clone ID: MRT4577_39780C.1.pep
LAWLYCGCWGACGVNGITVCGFLVLHAVALPLPAAAAGLIRVLPVRARGEADVTRRHHACRAPRVAGGGACRRRDGSSDTASPSPRPRP

SEQ ID NO: 303406 - protein, 188 aa, Zea mays
  Clone ID: MRT4577_39781C.1.pep
MGRPRPKRGERRIDAAIDHLSQYGFAKPQIRKIINNLLQLYGKDGWLFLEEASYRVVLDKLLEEQAQDDQKQEAAAAEEASPPQNGMEVALVHDEAPNGSQSALELQASPNSSPPLECVLPLAPAKGPPRARPPCYGWISEESGSDSEPEDREMLSDVARPVIFPKKDIPNPVETLPSKRKRPSRWDV

SEQ ID NO: 303407 - protein, 66 aa, Zea mays
  Clone ID: MRT4577_39782C.1.pep
RTRARENMVVNKDLVSDNELLSNSFTYEDLENCALREENGKGHCQGPVKVIVDAMAYGQGRWGLMP

SEQ ID NO: 303408 - protein, 96 aa, Zea mays
  unsure (1)..(96): unsure at all Xaa locations
  Clone ID: MRT4577_39783C.1.pep
PDKSGGGERXKDRQGSRVXEKETVDNAVLFDQDTYDRLAHQGAQGQVRSPSSILSECLRGHGSLSRKDIKDLMAKELIRLGSVHATXQIDTGATNT

SEQ ID NO: 303409 - protein, 59 aa, Zea mays
  Clone ID: MRT4577_39784C.1.pep
PELKKFMDKKLSLKLNGGRHVQGILRGFDPFMNLVIDECVEMATSGQQNNIGMVVIRGN

SEQ ID NO: 303410 - protein, 161 aa, Zea mays
  Clone ID: MRT4577_39785C.1.pep
YDVPHLDNNLIGTISYRNMQEELGQRMHVPHGINLCFSTSSELFQVESSIELGPAEVNPVPSEKLSANSQAVRDDAGAVEGIDMNGKPVQKPKRKKHRPKVIKEGQSAKLQKPKTPKPPKENGNQPTGKRKYVRKKGLSTPAKQIPSESADTHTRAKPGIA

SEQ ID NO: 303411 - protein, 70 aa, Zea mays
  Clone ID: MRT4577_39786C.1.pep
KFWNFFNFLSEYNSLLFKKIKLYILEALNNLFIGFKNFILFYFFGVKSCLGPLLDILFSRVLNKNLSLFY

SEQ ID NO: 303412 - protein, 369 aa, Zea mays
  Clone ID: MRT4577_39787C.1.pep
MNSKRRRSHSPVEYKEGRDKDYGTSGKKDKSRDLDDTCDARRGHETDRHSDKHSFGTSRESKKHDDYRRYHDKYGDDYGRSHPRASRSDRESKADTYYDRSKHDNTSGRSRGDQRDVGSRYGEKSVNRDQRSINEGKQESPRGYQKNDGGEYNKHMDARKQEYKGYGDDRDHYRVVRKNKETIKEEEDSKRRNGKEIEKEALVETRDKKRSLFSSTGPNVDNPGDVKLSSATNEALDNAAETVDGVNAAKVAAMKAAELVNRNIAAFGAGTGRLSTDQKKKLLWGNKTSNPSEETSKRWDLFSDRERQEKFNKLMGVKSSAPVQENTVENKVGSSAEEAKKLEELDTNLEKHYIAGLRRRDGRTVGLGL

SEQ ID NO: 303413 - protein, 177 aa, Zea mays
  Clone ID: MRT4577_39788C.1.pep
MNSKRRRSHSPVEYKEGREKDYEASGRKDKSRDLDDTFDAKRGHESGRHSDRHSYGTSRESRRHDDYRRYHDKSGDDYGRSYPRASWSDRESRADTYYDRSKHDSTSGRSRGDQQDVGSRYGEKSVNRDQRSINEEKQEPPRGYQKSDVGEYNKCTDARKQSTEVMEMIEIITGLFI

SEQ ID NO: 303414 - protein, 251 aa, Zea mays
  unsure (1)..(251): unsure at all Xaa locations
  Clone ID: MRT4577_39789C.1.pep
RTRGFGIRKVSIQQGQEPENLLNNELWGYQVGLFGERNNIYTQDSKITEWTSIDNLTYSPLTXTTFSTPVGSDAVTLNLSGMGKGEVWVNGESIGRYWVSFKAPSGNPSQSLYHIPREFLNPQDNTLALFEEMGGNPQLITVNTMSVSRVCGNVNELSAPSLEYKDKEPAVDLWCTEGKQISTIEFASYGSPTGDCKKFGFGRCHAGASESVVKQACLGKSGCSVPVTPIKFGGDPCPGIQKSLLVVANCR

SEQ ID NO: 303415 - protein, 146 aa, Zea mays
  unsure (1)..(146): unsure at all Xaa locations
  Clone ID: MRT4577_3978C.1.pep
KKSGKPRGSPMWTRALATGLLFAAGAALIERLLTCSPPASVGAGLTFFFHPSLPVGVVGVXCFSAHWVHCGVVDFALFMLGYQPVLWEALIRHHLLLLSLSSVLASALLGGCWFEDCLLVCLGHAWSSCRVGLWALLGRWPWLRFR

SEQ ID NO: 303416 - protein, 268 aa, Zea mays
  Clone ID: MRT4577_39790C.1.pep
MRRRLLLGVGTPAVAALAAAAPPAVLQDGAVTVLITAGAYSLVRVFDELTERRLIEKSLSRKVVHVLSGVLFMSSWPLFSNSTEARYFAAVVPFLNSMRLLIYGLRLYTDEALVKSVTREGKPEELLRGPLYYVLVLLFSVLVFWRESPIGIVSLSMMSGGDGFADIVGRRYGSAKLPFNRKKSWAGSISMFISGFLLSAMMMLYFSSLGYIDVIWEEALGKLALVALAATVVECVPVTEVVDDNISVPLATMLVAFLLFSSNRTIVN

SEQ ID NO: 303417 - protein, 211 aa, Zea mays
  unsure (1)..(211): unsure at all Xaa locations
  Clone ID: MRT4577_39791C.1.pep
STEARYFAAVVPFLNSMRLLIYGLRLYTDEALVKSVTREGKPEXSDELKIRMIVXCCSDDNDFASLXELLRGPLYYVLVLLFSVLVFWRESPIGIVSLSMMSGGDGFADIVGRRYGSAKLPFNRKKSWAGSISMFISGFLLSAMMMLYFSSLGYIDVIWEEALGKLALVALAATVVECVPVTEVVDDNISVPLATMLVAFLLFSSNRTIVN

SEQ ID NO: 303418 - protein, 141 aa, Zea mays
  Clone ID: MRT4577_39792C.1.pep
MLQQKRIHSPLVRSIQLPISQLGDSKTRDHSHALRAPPLPIALMIVCLLLRALHSLGSARHLVVLLVRLLGSVSLLLTHLDNRQLLIKSDPGEVVKPDQFKAINDEGMPIYQRPFMRSCLLSRCVRTNWNPQRASVRDKVC

SEQ ID NO: 303419 - protein, 163 aa, Zea mays
  Clone ID: MRT4577_39793C.1.pep
NHPYEHLCIPPRSIFHSYHLLKLIHPLAPDPSRSSLSHSLCSDPLERARRRGETERARSSPSADLGRPPAPSTSLLLPPASLARSKPPERTSVSEYSLAARGGDERLNSYPRQTDETMPYVFGCRLPSSLGESAPNHEEMEHWKKKARGAISKSSSSAQHAAT

SEQ ID NO: 303420 - protein, 123 aa, Zea mays
  Clone ID: MRT4577_39794C.1.pep
RQLLIKSDPGEVVKPDQFKAINDEGMPIYQRPFMKGKLYIHFTVEFPDSLAPEQCKALETVLPPRPSSKLTDMEIDECEETTMHDVNNIEEEMRRKQAHAAQEAYEEDDEMPGGAQRVQCAQQ

SEQ ID NO: 303421 - protein, 193 aa, Zea mays
  unsure (1)..(193): unsure at all Xaa locations
  Clone ID: MRT4577_39795C.1.pep
EKGMQHNQKXTFAGEADEAPDTVTGDIVFVLQQKDHSKFKRKGEDLFYEHTLSLTEALCGFQFVLTHLDNRQLLIKSDPGEVVKPDQFKAINDEGMPIYQRPFMKGKLYIHFTVEFPDSLAPEQCKALETVLPPRPSSKLTDMEIDECEETTMHDVNNIEEEMRRKQAHAAQEAYEEDDEMPGGAQRVQCAQQ

SEQ ID NO: 303422 - protein, 80 aa, Zea mays
  Clone ID: MRT4577_39796C.1.pep
RTHISTLSEAQVTRSTGDWSMAGQALLSCRQLLWRPLQTACCRSAARNAPFAVSASYRHPDKQSATQTAGVLSPSSPSPT

SEQ ID NO: 303423 - protein, 61 aa, Zea mays
  Clone ID: MRT4577_39797C.1.pep
MRWRLQPAPAPALLLVLATIAAVVVVRAEPQVPCYFVFGDCLVDNGNNNDIGWLARTNYAP

SEQ ID NO: 303424 - protein, 92 aa, Zea mays
  Clone ID: MRT4577_39798C.1.pep
NEIQPDLNSDISAYTTDSTAEIAAHRVTASRATDVAGRRTHAYPIQACKCNATTASLTRGIASSQYTYHIPVHMPHRITLRYKHSFEIKSHA

SEQ ID NO: 303425 - protein, 87 aa, Zea mays
  Clone ID: MRT4577_39799C.1.pep
QAHPHSRFLPCYLSVRHVQSAPRSSTSIPPRLPDRASGLGPEHAPRPPRNPQRSGHSHDLSQQHPAHPPIATRSGAPPPWGSHTTTL

SEQ ID NO: 303426 - protein, 70 aa, Zea mays
  Clone ID: MRT4577_3979C.1.pep
RNRRGVPGCDPRVRGRVDGHAGSFFLVQAHSVPFQEKTIYVNAGCILIHTWCDNEGAIVTRTPFSRTRLS

SEQ ID NO: 303427 - protein, 50 aa, Zea mays
  Clone ID: MRT4577_397C.1.pep
WGFHLVYCGGLWPLRNKIGPRQHKLLLLAHFPVSFLSQPKSCYHVSLLHA

SEQ ID NO: 303428 - protein, 44 aa, Zea mays
  Clone ID: MRT4577_39800C.1.pep
FHCLILTQESFPSQSRRVTGIAQPLFLPVIRWTFMSIEILQNRL

SEQ ID NO: 303429 - protein, 100 aa, Zea mays
  Clone ID: MRT4577_39801C.1.pep
PRVRYAIRSLDPIFSSHEAQRPWPWPCMAPPPRAICWSLPGRRWIFDGSMALMSHYRFRNHVRLTCNLPKPMRWFKSRWVHRMLTCCYTICLYSSYDIDE

SEQ ID NO: 303430 - protein, 77 aa, Zea mays
  Clone ID: MRT4577_39802C.1.pep
LSSLEPPSHVPSHQVPLHADFSLPGRSSTARAAPFPRARNLPCWPSLVLPARAVSLFFFPSLLILHLAHGACPCSDL

SEQ ID NO: 303431 - protein, 245 aa, Zea mays
  Clone ID: MRT4577_39803C.1.pep
MRRYNPQYRSPPRRGYGGRGRSPPRRGYGGRREQGSGSLLVRNIPLSCRPEDLRVPFERFGPVRDVYLPKDYYTREPRGFAFVEFVDPYDASDAQYHLNHTVFCGREITVVVASESRKRPDDMRNRARIRGYSGEPERRHSRYGRSRSRSRSYSPRYRGRPRSRSRSYSPAPRRRDDYSASPPRSHHTQSPRRLPKGHEEDERRSYSPAGGGGERDADTNGKRSPPSDTEGSPPRTRRSPRQSSG

SEQ ID NO: 303432 - protein, 170 aa, Zea mays
  Clone ID: MRT4577_39804C.1.pep
AFPVLDIKPYLPYSDSVKGAAVPSWLEVDGALAVESVHFSEHFISALSTCWMHVQQMSLYASADEFQDLIKQALSWDIRSISQRNRPHQVSVEADANGPRGEDTDDDHHHRDTGRCGVVYHLHLEGIDVSYRIDQGSNIFVEDAALLPDAVQKRHGYLAWTDKLLGSSVL

SEQ ID NO: 303433 - protein, 142 aa, Zea mays
  unsure (1)..(142): unsure at all Xaa locations
  Clone ID: MRT4577_39805C.1.pep
GKKKGKKGGHGNANRDGAGAIVEVQPPPDAPTKPAAGNSGPFTVIDAGPYVPAAAGMSYPGYYAAGVHPPAYVMSYSTAHPSSALRSSACYHPMAGAPYTPGSGGGYFYSTAPAQKAXKKSYYMFSEENANACGSHVRRLDG

SEQ ID NO: 303434 - protein, 390 aa, Zea mays
  Clone ID: MRT4577_39806C.1.pep
MAGLRPRAAVASNCLRPAIRRGARHASGAAFGYYTCWQLQGNILNWRSISATKKLWSTVASAKPDDSKFESVDAPLEPQTCEGSFLCGLLKNLPHIFLAAAAKQLQELSYQREESLKRWEHSIGSKEDCLHRRIAELKEHECQRAIEDIMYMLIVYKFFKIEVPMVPNLSKLISNRRLQLWPPRETDLESIHGPEVLELIREHLTSIIRWVHRNGPKINRSTLRIKRLQFVRIYSASIMYGYFLKSVSIRHRLELTLTRSEGVPPIQFLNAQLTNKQEQEGAIGGSSEASSSLRPSSVVNPHDLRGYIMGFDPKTLQLCAKLRSSEASNLIERHSWALFGGDMELSQENDEAVILDPSSLKRLLLEAIAFGSFLWDVEDYVDEIFKLSDS

SEQ ID NO: 303435 - protein, 45 aa, Zea mays
  Clone ID: MRT4577_39807C.1.pep
NIVECPWLSVRCKDLYKFYHRSKLFLNIQTVSTISSSLKLEPNQT

SEQ ID NO: 303436 - protein, 144 aa, Zea mays
  unsure (1)..(144): unsure at all Xaa locations
  Clone ID: MRT4577_39808C.1.pep
YLQQXQHFLPFNQLTXFNPSIYFQXQQLLPFNQLXKTPYPFLXQQXLXPFHXQTIXNIXXFLKQQHXXPFYPQIXXNINXFXQQQQXLPFYPQNXXNIXSFFHQQQXXXFXXXXSTKTKTXLFXXPXIKKKIFIFYLYCNNKIL

SEQ ID NO: 303437 - protein, 149 aa, Zea mays
  Clone ID: MRT4577_39809C.1.pep
GAPSSSFFFFFFFFFFFFFFFFFFFFFFFFSGPGKPPFFRKNKKRGSYFNNFGPDPESTTLPKKALIYPKPRGGPQRGGGLWPTTPPTKEKKTPPPKRISLWENLYTGHKLGGKGLFFFRMGRYINPGPGFYFTPPLTFDPPKGGVNWL

SEQ ID NO: 303438 - protein, 115 aa, Zea mays
  Clone ID: MRT4577_3980C.1.pep
FGPRLARPSGLFKGERGKKTRGFFPPGVKVGLNKMGGKGAAPVKGRGGATSNLGRGRAPNGVFSGGGGARSMLPFFPQGGGGPKKSPNPVLFMSLGVFPGVAMPPVFGELVPPPP

SEQ ID NO: 303439 - protein, 83 aa, Zea mays
  Clone ID: MRT4577_39810C.1.pep
QICLFLNLDQAMRAMVSRPWRIQKAEVVYPAGCCECELCPHLQRKCEMMMLCAEALPPSLSCPGIQHSNFPYGIVKEGGLFFS

SEQ ID NO: 303440 - protein, 64 aa, Zea mays
  Clone ID: MRT4577_39811C.1.pep
DTKLEIRDTYIGSSNMVGRIHCSTRVCIITAIYNQSRHHSTDHASVHESAHASAHASADSCADA

SEQ ID NO: 303441 - protein, 56 aa, Zea mays
  Clone ID: MRT4577_39812C.1.pep
MFCQTTADIEMGMPVAPSHVFCNFLVRADLKCLCGYNISTWMGLYNIDPKLAMELP

SEQ ID NO: 303442 - protein, 53 aa, Zea mays
  Clone ID: MRT4577_39813C.1.pep
GSGDDTQGLPITISRTLDTMFHLQSSRITLRQHSHSRAYQPIAPTVGAPWVPE

SEQ ID NO: 303443 - protein, 692 aa, Zea mays
  unsure (1)..(692): unsure at all Xaa locations
  Clone ID: MRT4577_39814C.1.pep
MAGRRPAPAALLLLAVAFAPISSAVRPVSDAHRSAAEELFAPSADGSFGDLESTYEAVKTFQILGLEKYNSLSGKACKFAAENLASTDSTAKDLFHAVRISGALGCGVDAGVYDGVVARLKAVIKDTNSLLEFYYSVGGLLSIKEQGHNVVLPDAESTFHAIKALSQSDGRWRYDTNSAESSTFAAGIALEALAGVVSLADAEVDPSMMGVVKNDIVKLFDTIKSYDDGTFYFDEKHVDATEYKGPIITSASVVRXGVTSFAAVASGKLNIPGEKILGLAKFFLGIGLPGSAKDCFNQIESLSFLENNRVFVPLILSLSSKVFSLTSKDQLKVEVTSVFGSAAPLLKVNLVQVLGSDSKVITNGNRELQYDLDKNVHYLDIAPLEIDVGKYSVVFEISLQEQERETVYATGGRNTESVFVTGLIKVDKAEIGISDNDAGAVESVQKLDLLKDTKVSLSANHLQKLRLSFQLTTPLGLTFKPHQVFLKLKHESKVEHLFVVPGSARQFKIVLDFLGLVEKFYYLSGRYDLELAVGDAAMENSFLRPLGHLELDLPXTPQKAPRPPAQAVDPFSKFGPKAEILHIFRAPEKRPPKELSLAFTGLTLLPFIGFLIGLVRLGVNVKNFPSLPGPAAFASVFHAGIGAVLLLYVLFWLKLDLFTTLKYLGFLGIFLVFVGHRTLSYLSSASAKQKTA

SEQ ID NO: 303444 - protein, 70 aa, Zea mays
  unsure (1)..(70): unsure at all Xaa locations
  Clone ID: MRT4577_39815C.1.pep
MDASAAIAGGKAKNGAAGRKAGGPRKKSVTRSVKAGLQFNVGRIVRYLKNGRYAQXXGTGAPVYMAAVLE

SEQ ID NO: 303445 - protein, 310 aa, Zea mays
  Clone ID: MRT4577_39816C.1.pep
MSKMAIRVPKSMRAKRELLKHAPKLVENGKKMLILHGTKTSAVLNSVLADLFHLKRDHAVKYTKKNDSIRPFESGGETSLEFFSLKSDCSLLVYGSHSKKRPNNLVLGRTYDHHIYDLVEVGVENYKSIESYAYDKKLAPKLGTKPFFAFIGEHFESAEELKHLKEVLLDHFRGEVVENLNLAGVDRIYVCTAISPTTVYMMHCALRLKRSGTSIPRMELVEVGPSMDLVVRRHRLPAESLKKEAMKTAEHAKKMKNVTKDPVQGKLGKVYMPDQQVGKLTLSNDIKGLKRERREAKKNQDSKKQKVNPE

SEQ ID NO: 303446 - protein, 403 aa, Zea mays
  unsure (1)..(403): unsure at all Xaa locations
  Clone ID: MRT4577_39817C.1.pep
DEIIVYLGKACKFAAENLASIDSTAKDLFHAVRISGALGCGVDAGVYDGVVARLKAVIKDTNSLLEFYYSVGGLLSIKEQGHNVVLPDAESTFHAIKALSQSDGRWRYDTNSAESSTFAAEALAGVVSLADAEVDPSMMVVVRNDIVKLFDTIKSYDDGTFYFDEKHVDATEYKGPIMTSASXVVRGVTSFXAAVASGKLDIPGDKILGLXKFFLGIGLPGSSKDCFNQIDSLSVLEDNRVFVPLILSLSSKVFSLTSKDQLKVEVTSVFGSAAPSLKVNLVQVLGSDSKVITSENKXIAKSVASSGNFLVIVFVCCSSNSLASFSFLSQELQYDLDNNVHYLDIAPLKIDVGKYSIVFEISLXEPEQETVYATGGRNTXSVXVTXLIXVDKAEIGISXHDAG

SEQ ID NO: 303447 - protein, 271 aa, Zea mays
  Clone ID: MRT4577_39818C.1.pep
MPQSPKPYTSISATVIAIAMAGRRPAPAAILLLLAAAFAPISSAVRPVSDAHRSAAVELFAPSADGSFGDLESTYEAVRTFQILGLENYKSLSGKACKFAAENLASPGSTTKDLFHAVRISGALGCAVDAGVYDGVVARLKAVIQDTNSLLELYYSVGGLLGIKEQGHNVVLSDAEGTFHAIKALSQSDGRWRYDTDSAESSTFAAGIALEALAGIVSLADAAVDPSMMGVVKNDVVKLFDTIKSYNDGTFYFDEKHVDATEYKGPIITSA

SEQ ID NO: 303448 - protein, 139 aa, Zea mays
  Clone ID: MRT4577_39819C.1.pep
PDAHEKAARPPAQAVDPFSKFGPKAEISHIFRAPEKRPPKELSLAFTGLTLLPFIGFLIGLVRLGVNLKNFPSLPGPAAFASLFHAGIGAVLMLYVLFWIKLDLFTTLKYLGFLGIFLVFVGHRALSYLSSVSTKQKTA

SEQ ID NO: 303449 - protein, 234 aa, Zea mays
  unsure (1)..(234): unsure at all Xaa locations
  Clone ID: MRT4577_3981C.1.pep
MGDADAYAKRVLLTAAGDTVSRGIASTLTKHGCRLVLLGDEGALAATEEEARRCGVGGGCVELVGLDFKACGEAAADAAVDRAWRCFAGLDAFVNCYSYEGXIAKRFQDTKSGGSIVFLTQIIGAERGLYPGAAAYGTSLGAIHQLVRLCAMELGKHKIRVNAACRGLHLQDKFPVSVGKEKAEKATAEVMPCGXWLDPEKDLASTVLYLVGDESRYMTGTTIFVDGAQSIVRP

SEQ ID NO: 303450 - protein, 83 aa, Zea mays
  Clone ID: MRT4577_39820C.1.pep
HPQEATLHSFLTELFSVPERQFRCRSHRISTSYSSGQAILVTGPHGPGSREHLEADCIPRVSLFRSRDEVAAACCSYLSHSLP

SEQ ID NO: 303451 - protein, 62 aa, Zea mays
  Clone ID: MRT4577_39821C.1.pep
VCTARILQGQHVFHSKWKEYLTSDKFILCVMYMLRMCSYIYVIDTTSNQWVWLMNKVALVTL

SEQ ID NO: 303452 - protein, 65 aa, Zea mays
  Clone ID: MRT4577_39822C.1.pep
RRNASRTHMWQQRWAQFHSYNLSRTTPHHCSKLLKIRCKFQMVSLSIVQKTKQRTTCHMKLSPDS

SEQ ID NO: 303453 - protein, 74 aa, Zea mays
  unsure (1)..(74): unsure at all Xaa locations
  Clone ID: MRT4577_39823C.1.pep
MRRLLIPLALWLSAVGVGVAELMEAQRRGLHVAXEEFHEHPPVQWAFQETSVESAVDTPFPAGIFVRLEFKLQQ

SEQ ID NO: 303454 - protein, 89 aa, Zea mays
  Clone ID: MRT4577_39824C.1.pep
FCPRGRAPPPAFSFASVAAPRAQMPFGAMLPGLHFGAFVFAPQALPHPASCFCCPRAPRAQNFVWANSVPPRLVVYVLSPPCLGFFSGR

SEQ ID NO: 303455 - protein, 317 aa, Zea mays
  Clone ID: MRT4577_39825C.1.pep
MGRPPCCDKANVKKGPWTPEEDAKLLAYTSTHGTGNWTNVPQRAGLKRCGKSCRLRYTNYLRPNLKHENFTQEEEDLIVTLHAMLGSRWSLIANQLPGRTDNDVKNYWNTKLSKKLRQRGIDPLTHRPIADLMHSIGALAIRPPQPATSPNGSAAYLPAPALPLVHDVAYHAAGMLPPTPAPQRQVVIARVEADAPASPTEHGHELKWSDFLADDAAAAAAAAAEAQQQLAVVGQYHHEANAGSSSAAAGGNDGCGIGVGGDDGAAAFIDAILDCDKETGVDQLIAELLADPAYYAGSSSSSSPGMGWASMGLLNAD

SEQ ID NO: 303456 - protein, 42 aa, Zea mays
  Clone ID: MRT4577_39826C.1.pep
DISLYDYLAENAIKHMMYLQHYEVHYSKKKVTKEQSAILERL

SEQ ID NO: 303457 - protein, 113 aa, Zea mays
  unsure (1)..(113): unsure at all Xaa locations
  Clone ID: MRT4577_39827C.1.pep
RASSMLGDFYGPLPHXPGLPEVSGLRSSASLPMRLNATFDDFMGAVFFMTHAVGTSGGSRRAPTEAMLKVAINGFGRIGRNFLRCWHGRGDALPLDVIVINDTGGVKHASHLL

SEQ ID NO: 303458 - protein, 129 aa, Zea mays
  Clone ID: MRT4577_39828C.1.pep
NLSHYFIEGLQEGTLMEIIDSQVVEEADQEEINDISSLIEVCLRSKGGHRPSMKEVDMRLQCLRTKRLRNKTHLLIEKGGEMEPLLCAEAQHPHERINPIYNEEHLTIPMMSGCYSLEQELAAASSMVR

SEQ ID NO: 303459 - protein, 52 aa, Zea mays
  Clone ID: MRT4577_39829C.1.pep
SLLHVLYSTFLFFPKKKKKKKKKKKKKKKKKKKKKKKRKKERKKKKGKERGR

SEQ ID NO: 303460 - protein, 73 aa, Zea mays
  Clone ID: MRT4577_3982C.1.pep
RAFKVLGIVVLAYTIHGRCVHQPAHSEGHYVMQTGPLSLTPHGNIMCDDVTTGHVGRQPVLYAQGEADWHLYA

SEQ ID NO: 303461 - protein, 290 aa, Zea mays
  Clone ID: MRT4577_39830C.1.pep
MQWAGLRSQAPVPTAAWTGPRPRTARCPQGRFPTARRALVASAAASDANSSSNSPGKDEEGEEVVRREKEEKAVASLLMRSQKYAMLKQQLAVAAQFEDYKEAARLRDSLRSFEEKEPVLCLRRLMKKAIEEERFEDAAKYRDELKILAPHSLLKCSSDATTLGIRVQVRSVYIESRSQPLKGQFFFAYRIRITNSSQRPVQLLKRHWIVTDGNGRTENIWGVGVVGEQPVIFPKTGFEYSSACPLSTPNGRMEGDFEMKHIDKAGSSTFNVAIAPFSLSILGDDNDVLL

SEQ ID NO: 303462 - protein, 167 aa, Zea mays
  Clone ID: MRT4577_39831C.1.pep
MARARQWPRPWTTSPSTRSRAPPLPPPPPPPRYSTTTTSWSSMQGLFSVRNLSSMESRLRPRGSTRPRRSTRTTSRCRRRQLSWWTSQATTRQVLCLSSTTTGSTSSSRPAPAPSARDTASSWTTWASATSPTLSSPPCPPTRPRRPPPPPPPHAPPPPCTPPPPPR

SEQ ID NO: 303463 - protein, 61 aa, Zea mays
  Clone ID: MRT4577_39832C.1.pep
MARHFVLNTGAKVPYVGLGTWQSDPGVVGNAVYAVVKAGYRHIDCARVYGEKKNFWKEREG

SEQ ID NO: 303464 - protein, 69 aa, Zea mays
  unsure (1)..(69): unsure at all Xaa locations
  Clone ID: MRT4577_39833C.1.pep
MSPIFVYIAKGRPDLYMFXRHVSVNSSLRVMEATWKPDPNASYCVLSCPFALQLNCNDDRHHDSLILVL

SEQ ID NO: 303465 - protein, 76 aa, Zea mays
  Clone ID: MRT4577_39834C.1.pep
PLAERGRQLKLLESGLGLLFACQNPSTGAPQGGIYSIKLSSYSGITNRTGFLQERVLSFPLPRAKKKKKKKKKKSL

SEQ ID NO: 303466 - protein, 86 aa, Zea mays
  Clone ID: MRT4577_39835C.1.pep
FVSPSHHRSALSLFPLSHTSSSDACFSRVVSVIQTPSVIRVTDRAHGGGVYPGYHGGGRRRRRLITIWNPCFNALQPSIIAGIKDK

SEQ ID NO: 303467 - protein, 495 aa, Zea mays
  Clone ID: MRT4577_39836C.1.pep
MAMLVLWLAWLLVSLIAVYFLDLYVHARRGLPPGPRPLPLIGSLHLLGDQPHRSLARLAKFHGPLMSLRLGAVTTVVISSPDVAREFLQKQDAVFANRFVPHAIGDHVKNSVPWLPHSGRWRALRKIMATELFAPHRLEALQHLRRQKVEELVGHVRLLALQGRAVDVGSVAFTTSLNLLSRTIFSCDLTNLDDHTGSAKEFQEVVTEIMEVAASPNLSDLFPALACADLQGLRRRLAKLFARLHQVFDVEVDRRLCERDAGDRRKNDFLDLLLDTDGGTAALDRDSLLSLFTDLFAAGSDTSSSTVEWALTELLRNPVPMAKTCDELLAATGAARNIEESEIEQLPYLQAVVKETFRLHPPVPLLLPRRAGAATRAMGHTIPKGARVLVNVWAMGRDGDVWPDPEKFMPERFLGRPTDFRGGDLELIPFGAGRRICPGMPLASRMVHLVLASLLNQFRWRLPAEVERDGTDEMAESFGVTLKKASPLCAIATPV

SEQ ID NO: 303468 - protein, 288 aa, Zea mays
  Clone ID: MRT4577_39837C.1.pep
LAARVVVVPQGLGNNTGDYARLAAALRDDHSLPAAVVARVTRPDWLRNAAGLADASYWRGTLRPRPVLDWYLKRVDDAVSEARELCAPGGKISLIGHSAGGWLARVYMAEFDASDISLLLTLGTPHLPPPKGVPGVIDQTRGLLNYVEENCAPAVYTPELRYVCIAGRYIQGAPLLGNSAAASDEILAVDTPSEGGDAVIVSSSDNSTSTASAVSWRARFVGQGYKQVCGRADVWGDGVVPEMAAHLEGALNVSFDGVYHSPVGSDDEQRPWYGSPAILKQWVHHLLS

SEQ ID NO: 303469 - protein, 54 aa, Zea mays
  Clone ID: MRT4577_39838C.1.pep
MPNFPGNWKIIRSENFEEMLKALGVNMMMRKIAVAEASKPAMEIQQENDDTFYI

SEQ ID NO: 303470 - protein, 40 aa, Zea mays
  Clone ID: MRT4577_39839C.1.pep
RLCNPKYAERGGRILMTSLSKGRSGPILLLLFERAYTSEG

SEQ ID NO: 303471 - protein, 96 aa, Zea mays
  unsure (1)..(96): unsure at all Xaa locations
  Clone ID: MRT4577_3983C.1.pep
PSIPSYLFQLAIAASVLGQRIGQLLQQSFSHXLTIQTISTQPNQQFLSALNHLVIVNPVTHLPHQVLVSXNPLPLAHVVALPLQQQLPQFLPCLIK

SEQ ID NO: 303472 - protein, 55 aa, Zea mays
  Clone ID: MRT4577_39840C.1.pep
DMCGTTTTGWVVMGTYAGMQRARYLDYGCIGHLILVHGDVGDDGALRRRTRTWRG

SEQ ID NO: 303473 - protein, 78 aa, Zea mays
  Clone ID: MRT4577_39841C.1.pep
SLSSPEIHGPAPPNYFIKRPGSLAKYESTKAGPSEAAFPAFSFCGKLKGLHASFDLRVLVLFLESQIPWVFPNGPGVP

SEQ ID NO: 303474 - protein, 169 aa, Zea mays
  unsure (1)..(169): unsure at all Xaa locations
  Clone ID: MRT4577_39842C.1.pep
FSRIPSFXFTHDAGTMFELDHSAVPEXMHQKNTSRCISHLSELSGLPDDTDGFPETAVAQFSNPSSTSKMEAGSPMQAMMSYNTKWFPKDFLEGQIWAVFDSLDRMPRSYVRIIHVVSSTSVFVLKLEPHPMLNEEIQCVEDGLPVASGAFRAGTETTYKXTCEFSHPA

SEQ ID NO: 303475 - protein, 65 aa, Zea mays
  Clone ID: MRT4577_39843C.1.pep
VSLPYDGILQRYLPSISIEGLFGSRVIKSQACPTMLNLFVKPYGPLGVCNSLVCNKKHVSTQIFH

SEQ ID NO: 303476 - protein, 214 aa, Zea mays
  unsure (1)..(214): unsure at all Xaa locations
  Clone ID: MRT4577_39844C.1.pep
WDLQRASGWRAAWWRECFPCPSTIPSPPPIPPSPPXTPLSGQRPDASPPRRCTPPPPRPPPPPPPPPPPTPPPSPPPPPPPPPAPPPPPAPPPPPXPPPQLPPPRRPSTPPPTTNPPPPPPTHPPPPPEKPKXPPPPPPPPPXPNPPTTPPPSPHPPPPAAPPTPPVSPPTPTPPPPPXPPTPSPPPPXPPPPPPPPPRPSPALPPTIEPPHTP

SEQ ID NO: 303477 - protein, 100 aa, Zea mays
  Clone ID: MRT4577_39845C.1.pep
REWSLGPRPFAPVQRAGQLCSFLGPVSPWSPCPMPCAARPVVPYMIVYPVGDRSNVCPRLDHSQGCWCERESLVSNGKAQGGPLHRSHPPPHEPQPQYAR

SEQ ID NO: 303478 - protein, 213 aa, Zea mays
  Clone ID: MRT4577_39846C.1.pep
MSDNGEIEVENSALYEVLPKDVVKEVGNVKLFNKWDYDVEVRDISLTDYISLRNPVYVTHTAGRYATKRFRKANCPIIERLTNSLMHHGRNNGKKLMAVRIVAHAFEIIHLMTDQNPIQVAVDAIVNCGPREDSTRIGSAGTVRRQAVDVSPLRRVNQAISLLTTGAREASFRNVKSIAECLAEELINAAKGSSNSYAIKKKDELERVAKSNR

SEQ ID NO: 303479 - protein, 95 aa, Zea mays
  Clone ID: MRT4577_39847C.1.pep
IRIQVYNSYGKMIFRVKALTINHHMYKHSVVGQNQNITIKFICSERILHQKLKKSCCFRTYSLAFHCKCFYDPINIFTLPGHLAGNTCSANCCIG

SEQ ID NO: 303480 - protein, 66 aa, Zea mays
  Clone ID: MRT4577_39848C.1.pep
VRRRDVRQGRWAGYQASSSARRTLASACGSTTVSRSLPTTSITESRFRTTLRITTSVHSDIHAEDL

SEQ ID NO: 303481 - protein, 120 aa, Zea mays
  Clone ID: MRT4577_39849C.1.pep
FGTRAARLEETDQALYGAFRGAANSLSQLYTLAMGAQKASFNAGERHAMEKLYEWILRQHENGLRLTVADVASRIQVSLQSFPYMFLSKFNMETRVKIWDILPLHCLVLNYMLSGTDLLP

SEQ ID NO: 303482 - protein, 303 aa, Zea mays
  Clone ID: MRT4577_3984C.1.pep
MQVHDPCPQLHSKPRAALYCTVLLERERRLRRWNLVMGDAYAKRVLLTAAGDTVSRGIASTLTKHGCRLVLLGDEGALAATEEEARRCGVGGGCVELVGLDFKACGEAAADAAVDRAWRCFAGLDAFVNCYSYEGEVQDCLSISEDEYMKTIKVNVITPWFLMKAIAKRFQDTKSGGSIVFLTQIIGAERGLYPGAAAYGTSLGAIHQLVRLCAMELGKHKIRVNAACRGLHLQDKFPVSVGKEKAEKATAEVMPLRRWLDPEKDLASTVLYLVGDESRYMTGTTIFVDGAQSIVRPRLRSFM

SEQ ID NO: 303483 - protein, 59 aa, Zea mays
  Clone ID: MRT4577_39850C.1.pep
PSYNAHKCNNPGGQYNYPRGLHHLSACAPTATILLQCLQAHIDFLLSTAPATKADSSMR

SEQ ID NO: 303484 - protein, 72 aa, Zea mays
  Clone ID: MRT4577_39851C.1.pep
VKLAISGNAKAEAGLYAYRLDLSLLFELRYVQAGPGASSGRPTSVQRSFMPAPRVIVRATSHAHNQCPGHLD

SEQ ID NO: 303485 - protein, 154 aa, Zea mays
  Clone ID: MRT4577_39852C.1.pep
ERLSGFLEKDFQLFTDDEVMDTMKHVINLSNVVDRLCKQMYQCIENDLLYPLRTPHNIAPYKSKGLDRASELNISWDPAEQSSQSTKHSQEDEHRNQPASISLGKRTHELHGSSSGNRGDNRGHRSNKRDRVDANGGGDALFDLNVPAELVDKI

SEQ ID NO: 303486 - protein, 100 aa, Zea mays
  unsure (1)..(100): unsure at all Xaa locations
  Clone ID: MRT4577_39853C.1.pep
MATNIFSLHMLLALSACDANPTIFHQCSQAPKDSLLPPYLPSMIAVVCDNPTLXPYKLQQAIAASNIHLSPLGQQSPALYFEQAXVHTIRAPHLHQLELP

SEQ ID NO: 303487 - protein, 206 aa, Zea mays
  Clone ID: MRT4577_39854C.1.pep
LTFLLPPVTQSVMAAQIQTPSTWAGARSPSGAALAAATPGGHGLCAAVPACARARRGPRRRAGKRLAGARAGSHGGVRARTSSGAASPAPSDLVRRAWALPRRLPVTLVHGNGQRLQSAKRAPLQTQMARLGRARVLAVRYPGRVPQTPAKIQLQRQAAAVAVACPGPWPVRRQPSIHVFIQRRENEPGAATALREYANVMVEQPQ

SEQ ID NO: 303488 - protein, 165 aa, Zea mays
  Clone ID: MRT4577_39855C.1.pep
DCIILLYDAAYGEAMSSQHGPDYDWRTSPIDPQPVYASGGKAHGRYTMFANVIDSSQVRVQRGGSSRFAARSSRRSTQDLAEVEQLREELTRHQDYLNQQATQHEYYATQIQQQQTLIQQLAQAQGIHVSVPPTTSRSLSLVFTSTSTYISIYRTSDPSSYLADA

SEQ ID NO: 303489 - protein, 140 aa, Zea mays
  unsure (1)..(140): unsure at all Xaa locations
  Clone ID: MRT4577_39856C.1.pep
MTEQQYLEHSIPWIAANDAAWRAFCRYWASAEFKAKSVRHSSNHGTESYHKYGRXDDHFRLAKRMEASTGAXPSDVQIYLRGHRGPDPANPDVLCSQKATDRVATYGEAMSSQHGPDYDWRTSPIDPQAVYASGGKAHGR

SEQ ID NO: 303490 - protein, 104 aa, Zea mays
  unsure (1)..(104): unsure at all Xaa locations
  Clone ID: MRT4577_39857C.1.pep
MLAYQGRQEKYAPTTHGVKKPHRFRPGTVVLRQIHTYXRXTGLLMPKFTFQRLICEITQDLKTDLRFQRHALLALHKAGQAYLVXLLQDTILXAIHSKRVTIMP

SEQ ID NO: 303491 - protein, 90 aa, Zea mays
  unsure (1)..(90): unsure at all Xaa locations
  Clone ID: MRT4577_39858C.1.pep
PPRNVTPPDTDIYSIPRVLAPMPXKYARCTKKNFGRYHVSEPPVEHLRDSLYKTERDVMKVISPAMFGSEGRCPESKNEATQYGLDMTEQ

SEQ ID NO: 303492 - protein, 88 aa, Zea mays
  Clone ID: MRT4577_39859C.1.pep
LISHLHLLRSVGAPSSVPSLSRAQHAGDGGSSDAHDRALSDGFVIDSSQVRVQRGGSSRSAARSSRRSTQDPAEVEQLREELRRHQDY

SEQ ID NO: 303493 - protein, 68 aa, Zea mays
  Clone ID: MRT4577_3985C.1.pep
MKDLWVFKLSTRMLVLTSTGCYTILILEELQVINSHIDCKGAWYGWTDNHFAFLWCVGLPVVVFLVQG

SEQ ID NO: 303494 - protein, 43 aa, Zea mays
  Clone ID: MRT4577_39860C.1.pep
SLVDRLLRPLIRTLFRYLSLSEILYFTLTTIKGAGTSSLQLRL

SEQ ID NO: 303495 - protein, 150 aa, Zea mays
  Clone ID: MRT4577_39861C.1.pep
SARTRLIDHQAVYASGGKAHGRYTMFANGIDSSQVRVQRGGSSRSATRSSHRSTQDPAEVEQLREELRRHQDYLKQQAAQHEYYATQIQQQQTLIQQLAHAQGIHVPVPPSHHHLPFIILALHLHLYLHLHLPNIRPLQLPCRRMNKRTG

SEQ ID NO: 303496 - protein, 176 aa, Zea mays
  Clone ID: MRT4577_39862C.1.pep
FPSPSRDSVGHGGSDPNSFDVGGREIPQRHDPSSGHPWWARLVRGRPSLCAGAAWPSTAHWQAPCRCAGGQPRRRAGEDLQRRGVPGSVRSHPVGVGPAQAAPRDPGAWQRTTAAECQKGSPPDPNGASKARACACCPVAWMSATDTSKDPAAEASSIRRCRLSEAPTRSSSTFHS

SEQ ID NO: 303497 - protein, 113 aa, Zea mays
  unsure (1)..(113): unsure at all Xaa locations
  Clone ID: MRT4577_39863C.1.pep
DCIVLLYEAAYGEAMSSXHGPDYDWRTSPIDPQAVYASGGKAHGRYTMFAYVIDSSQVRVRRGGSSRSAARSSRRSTQDPAEVEQPREELRRHQDYLKQQATQHEYYATQIQQ

SEQ ID NO: 303498 - protein, 127 aa, Zea mays
  Clone ID: MRT4577_39864C.1.pep
LSPDNVFSQEPGLPLVSPRFFSGFFRGSWSACWSRFGVPPSTPRFPPRFRFIVLAPLLGPPLPPLFLPLSPPDGLFYLCCVSLSSFFLSGALWDPPLGFRSPLCFRFLVGPLFGFSFFSPFLSPFKF

SEQ ID NO: 303499 - protein, 183 aa, Zea mays
  Clone ID: MRT4577_39865C.1.pep
MRGAVEVHTIRRDVASPSPLRLRDPPALDMMRYQRLSPDCLPLGNGGGGGGGAVPRKQASRSSYIREDDAPAVATDGSRLASYLAASSHEPKPLRARAPQPAPLSSVAGRSPARDHAHHHHTSDSSDTASPSSTGGGGGAVVGDVLLQWGHKKRSSCRRDSATAAAPSAQRRQSAVGGGVKIQ

SEQ ID NO: 303500 - protein, 76 aa, Zea mays
  Clone ID: MRT4577_39866C.1.pep
LCLLIPCFLLSLSSVYMDFCMYDCIVLCMRLHMARRCLVSTDHTMTRGPHLLIPRLCMQVVEKLMEGTQCLLTSST

SEQ ID NO: 303501 - protein, 107 aa, Zea mays
  Clone ID: MRT4577_39867C.1.pep
SAASLKFFFFYHSTHVACCASYNNTANNGRTQLRFTFVVPPLTSPTACNHLILHQQNQAHNVTHPSHKTRTAPITQQKNSDHSATAPVLGLVRLTVPYKLPTRYPSS

SEQ ID NO: 303502 - protein, 60 aa, Zea mays
  Clone ID: MRT4577_39868C.1.pep
KKKILYKKIQGYILVSCVLRNLGFRGLNSIFSPSFYNPFTFQNPGLSQLNWVSFHSPFTI

SEQ ID NO: 303503 - protein, 52 aa, Zea mays
  Clone ID: MRT4577_39869C.1.pep
WGPSGAIDNLWSSLLGARHGYHNPPPLGALLNKDDSLAGRKKEPELSVRRAE

SEQ ID NO: 303504 - protein, 183 aa, Zea mays
  unsure (1)..(183): unsure at all Xaa locations
  Clone ID: MRT4577_3986C.1.pep
MATQAAXLAGXSQLAAQPGRDRAXAXAXAPAPGPARXAXAGGGGGXXGXKAGTXRTAAXARXGXRXRASXXEPDGGRXXDPXAPEEGGRRAAXRREAAEXPHRXRXGRXDKEXXHXPSEGXASPXQGXKREXEXXQAPXXKAXRGQEGRKXNKXXXXXRPXGDAQAKAXPADGATRGAPXGER

SEQ ID NO: 303505 - protein, 108 aa, Zea mays
  Clone ID: MRT4577_39870C.1.pep
VTSSVVGSLPPGYAAYTASKPAVKALVRTMAKELRGTRVTANCVAPGATASDMFFKGKSEDMVRRAVEICPMERLGEPGDIAPVVGFLCTDAAEWVNGQVIRANGGYV

SEQ ID NO: 303506 - protein, 123 aa, Zea mays
  Clone ID: MRT4577_39871C.1.pep
CHHCAREEPNVQEVNVGVAAVWLILLLGEMRHHAMQGRLAMEQRALAAFGLPGRFLFFFGSAASPSPRADAELCCREVPRGRICTSPILSLHPPKLPCPSAHAMGCVTGSDMALAGTLLFSEI

SEQ ID NO: 303507 - protein, 554 aa, Zea mays
  Clone ID: MRT4577_39872C.1.pep
MRPRGTSLQQSSASALGDGDAALPKKKRNRPGNPKPDAEVIALSPRTLLATNRFVCEVCSKGFQRDQNLQLHLRGHNMPWKLKQKDPKDARRRVYLCPEPTCVHHSPSRALGDLTGIKKHYCRKHGEKKFRCDRCSKRYAVESDWKAHGKTCGAREYRCHCNALFSRKDNFITHRATCDAAVRGTAQKPPLVAGLYVGSGSDDRLGLSDAAAQMHGFADQGQSSSAAEASQFDHVMPSYSGSSMFRSQASDFSLSFFLGGGTPLIEQDLSDNGGDLSEGSQGPLLHGKAPLHGVMTHLPEQQYQPNSGNANVNLLDIGFFSGNSGGTSGSQGPLLHGKEPFHSHDLTQLPEQQHQPGSSNARVNLPNLGVFSGNSGGWPGSSHQDARLVIQDQLNGGSSSNTEHGNGMASIGSHFGGGFVPSLHNSSPSAGLSATALLMKAAQMGSTTSSTTHNPNGPSALLRAAGFAGTASVRETSSRAAEEEKSHEAYFHDLIMNSLPLTGGGTGGLSGLAGVDDGNVSTRDFLGVGRDDATAPQGLHGMGAPNPTQMKWYM

SEQ ID NO: 303508 - protein, 75 aa, Zea mays
  unsure (1)..(75): unsure at all Xaa locations
  Clone ID: MRT4577_39873C.1.pep
GERARESREHAEYLRMDRRMGKFMRKLVLPEAQDMENIXGVARDGVLAVXVDKVPRPEXERKLKTIECQGRLSWH

SEQ ID NO: 303509 - protein, 73 aa, Zea mays
  unsure (1)..(73): unsure at all Xaa locations
  Clone ID: MRT4577_39874C.1.pep
FFXCGELFSHEPCXGHTQALRAEKXGPKGQTKPSNGAQGKADKPKPNADVDINVGLSTRPPWFCRCASLIPYP

SEQ ID NO: 303510 - protein, 34 aa, Zea mays
  Clone ID: MRT4577_39875C.1.pep
LSEGSVDKTVKFWDVESLTVLSTEPSLSYQPHQK

SEQ ID NO: 303511 - protein, 56 aa, Zea mays
  Clone ID: MRT4577_39876C.1.pep
PVVQVPRVVGSYLIGRTLSVGAVPILFGIWLGSSFLCVVDGSLVLCFAWVENENPF

SEQ ID NO: 303512 - protein, 132 aa, Zea mays
  Clone ID: MRT4577_39877C.1.pep
KKKKKKKKKKKKKKKKKKKKKKKKKKEKKKKKKKKKKKGFSKKNFALPGRPFKGAIFPIFLPPGGRWTFLLGAPFPPLGGRFPFPWPAFSTVGPGKPLAFPTLFALQPFPFSPVGLLAKGPPPFPFPTICPP

SEQ ID NO: 303513 - protein, 36 aa, Zea mays
  unsure (1)..(36): unsure at all Xaa locations
  Clone ID: MRT4577_39878C.1.pep
RNRVRTHAVXANCILSFRXLSECCITXXWXAVVFYQ

SEQ ID NO: 303514 - protein, 55 aa, Zea mays
  Clone ID: MRT4577_39879C.1.pep
VTDGGWSGETYNGSPLQALSSSINPLAPHIVEIEREMCCGECSLARRTRRRMEAT

SEQ ID NO: 303515 - protein, 39 aa, Zea mays
  Clone ID: MRT4577_3987C.1.pep
RKRMSVLLLILLCRKAMVKILSYKYVIEYVRFIAKVSKS

SEQ ID NO: 303516 - protein, 83 aa, Zea mays
  Clone ID: MRT4577_39880C.1.pep
DGASTAPWDQGSQQHADKDMRSGLPVNRATGGDYREIQIPMQATRIHGTLADNPATGSVTCHRTGTYIHHTFVRIILGPGSST

SEQ ID NO: 303517 - protein, 116 aa, Zea mays
  unsure (1)..(116): unsure at all Xaa locations
  Clone ID: MRT4577_39881C.1.pep
LLNLQIPTINVVGSLVRSGIRVLGFSGDQDSVIPLTGSRILVQSLARGMGLKTTXPYRVWFEGQQVGGWTQVYGGGALSFATVRGASHEAPFSQPGRSLVLFRAFLQGQPLPETFS

SEQ ID NO: 303518 - protein, 67 aa, Zea mays
  Clone ID: MRT4577_39882C.1.pep
VMPYDRSMFPNAVLLVLSRQTKVQRSSTLSSMTSCHPLCKKERVFQAGGCSCITKSGAQFQGNFVRI

SEQ ID NO: 303519 - protein, 200 aa, Zea mays
  Clone ID: MRT4577_39883C.1.pep
MATLALPPTTKAAGQDATQESLAENPAKDAADPGSMESEWVLLGKSDIVPADVAAAAAAGHHHLNFSPLPMIPIWVQMVLGGVVYTAVPFYKRVLKVEGETLANVETAVEVVEHVAEVTEKLAADAASSLPENGSLHKVAVEVECVAEAVDKDAHEVEAVIDKVEEVSEKIDATVEPVIEELEKDLIPNPRSSSGSDAQK

SEQ ID NO: 303520 - protein, 85 aa, Zea mays
  Clone ID: MRT4577_39884C.1.pep
KEFGREFREMSVHDRYCENVEFRVLSTGTLSHLSHQALAVLGSHICFLTVTTSSSSSTAKLAGNKIEIKTNNICLCGKNTNRDQN

SEQ ID NO: 303521 - protein, 108 aa, Zea mays
  unsure (1)..(108): unsure at all Xaa locations
  Clone ID: MRT4577_39885C.1.pep
DPETRPGXRVKEEVAAVAPVGSSGFAVPEPLQKKEAQKLAHNLSVAAFLNRSISTLLRLLFHLFSQPCFCSVCAGPALILGFEVPHICHGRRNRVGHRRFCIKIQSGP

SEQ ID NO: 303522 - protein, 128 aa, Zea mays
  Clone ID: MRT4577_39886C.1.pep
MESEWVLLGKSDIVPADVAAAAAAAGHHRLNFSPLPMIPIWVQMVLGGVVYTAVPFYKRVLKVEGETLANVETAVEVVEHVAEVTEKLAADAVSSLPENGSLHKVAVEVECVAEAVDKDAHKVEAVID

SEQ ID NO: 303523 - protein, 56 aa, Zea mays
  unsure (1)..(56): unsure at all Xaa locations
  Clone ID: MRT4577_39887C.1.pep
ACSRWCPGVVGDHSPQVARAGGACCRDEIVGEEGRRERRVWERLAGKLPPXPAAIP

SEQ ID NO: 303524 - protein, 58 aa, Zea mays
  Clone ID: MRT4577_39888C.1.pep
QASDLWNLNNNNTDGFYPCQWNLNNNNTDICEIVCSCAVLQLKRKKWIRSIKNKKRAG

SEQ ID NO: 303525 - protein, 118 aa, Zea mays
  Clone ID: MRT4577_39889C.1.pep
TDTWAFDVSNLTIDTRVFEVLATNGDTHLGRDDFDHRIMVYITTFIIKNYINDISKDNRAHGKLQKEAERAKRALTIQHQLLVEIESILDRIDFASPPDRVKFAELNTDSFLNTMGPV

SEQ ID NO: 303526 - protein, 35 aa, Zea mays
  Clone ID: MRT4577_3988C.1.pep
YYIERDLNHIVLHDISSQLGERAIALVSLGRYTGS

SEQ ID NO: 303527 - protein, 71 aa, Zea mays
  Clone ID: MRT4577_39890C.1.pep
AHLVIQRTSTLTGTGDTTLSDRVSSVYNVNITATLGTLGQGCPQHSYFKTLVTTPHPDRQRQAEPSVLVTF

SEQ ID NO: 303528 - protein, 141 aa, Zea mays
  Clone ID: MRT4577_39891C.1.pep
ARNSARGSAMPSIEQFQHWMATNVCALVFVYPCVGSFVWLGTPARRLSYDRRSPGLRRLPLLELLVYCRLLAEIGGRRRCLAKGEEWRRREQQEWRAPPISASQCRFLLSQPLVLLTPPPSAQWSVCPALCPGMFLVALPS

SEQ ID NO: 303529 - protein, 71 aa, Zea mays
  Clone ID: MRT4577_39892C.1.pep
KAIPGLPLSKLQALHENNCPNEVIQTAIALTLHPNVRYTVVFQTFKSPYLLKPSLLKIPQTEVKRSPIMPG

SEQ ID NO: 303530 - protein, 59 aa, Zea mays
  Clone ID: MRT4577_39893C.1.pep
RTRGGMFYWKYQLGIVKRTLIRRRKVMEDTNQKIWRHAKIFNIRRTTSPKSHLTFAESA

SEQ ID NO: 303531 - protein, 105 aa, Zea mays
  unsure (1)..(105): unsure at all Xaa locations
  Clone ID: MRT4577_39894C.1.pep
MRVLLVGRSLLALAASAISTHTSGGCGCQPPAPVYLPSSVHLPPPVHLPPSVHLPPPVHLPSPVHLPPAVHVPPAVHLPAAPCHYPTQPARSXAYSQPHPCPCQQ

SEQ ID NO: 303532 - protein, 563 aa, Zea mays
  Clone ID: MRT4577_39895C.1.pep
DVKGVDEAKAELEEIVHYLRDPKRFTCLGGKLPKGVLLVGPPGTGKTMLARAIAGEAGVPFFSCSGSEFEEMFVGVGAKRVRDLFNAAKKCSPCIIFIDEIDAIGGSRNPKDQQYMKMTLNQLLVELDGFKQNGGVIVIAATNFPQSLDKALVRPGRFDRHIVVPNPDVEGRRQILEAHMSKVLRADDVDLMIIARGTPGFSGADLANLVNVAALKAAMDEAKAVTMQDLEYAKDRIMMGSERKSAVISDESRKITAYHEGGHALVAIHTEGAHPVHKATIVPRGVSLGMVIQLPEKDQHSVSRKQMLARLDVCMGGRVAEELIFGESEVTTGSSSDLNYATRLARAMVTKYGMSKRVGLVSYSENSVSGQTSVIDKEVKEILEKAYNNAKAILTTHDKELHMLANALLEHETLSGAQIKKLLPQVDNSNNKQKKAAKVPQKTPAARAKGVAQEAAGKAKGVAGTAAVAQEAATANTEGGAGTAAVPQEAATSVAAKAKGVAGTAAAAQEAATANTEGVAGTAAAPQEAATSVAAKAKGVAGTAAVAQEAATANTEGVAGVGS

SEQ ID NO: 303533 - protein, 190 aa, Zea mays
  Clone ID: MRT4577_39896C.1.pep
RPGITNTVIGVGDDCISIGPGTSKVNITGATCGPGHGISIRSLGRNKDEKDVTDINVKDCTLKKTMFGVRIKAYEDAASVLTVSKIHYENIKMEDSANPIFIDMKYCPNKLCTANGASKVTVKDVTFKNITGTSSTPEAVSLLCTAKVPCTGVTMDDVNVEYSGTNNKTMAICTNAKGSTKGCLKELACF

SEQ ID NO: 303534 - protein, 45 aa, Zea mays
  Clone ID: MRT4577_39897C.1.pep
DFGFPPGGGGFSLMGLVLFNACSPEPCQVKSPPPCLFCLKGANSP

SEQ ID NO: 303535 - protein, 166 aa, Zea mays
  Clone ID: MRT4577_39898C.1.pep
PVPPFPGEQKYVPGSALPPLGLSKPPTHCKSTGSMSTRAAFSPCWRWRRLLPAAPCVPVGPARWRTWPATCAARRNTSIGPHHDAEINLMLSSAEVVVAVICGPLGPCWHPATTATCQPEIQPYLCKHDDIKWLLHLVTLAVSNINWVGELYSMFLPEPNQCIMYG

SEQ ID NO: 303536 - protein, 72 aa, Zea mays
  Clone ID: MRT4577_39899C.1.pep
MMNAADVDLDDFTVFEGGASTAFSSPAVGSSFDFSSGASSTASNLGTVSPQDLLVQEPFMSAPNSAALTALT

SEQ ID NO: 303537 - protein, 49 aa, Zea mays
  Clone ID: MRT4577_3989C.1.pep
VNVAARFTDGSASWRTGLFSDSGSSSSIWSVIVAEQSIVCVLLGRRRIR

SEQ ID NO: 303538 - protein, 82 aa, Zea mays
  unsure (1)..(82): unsure at all Xaa locations
  Clone ID: MRT4577_39900C.1.pep
RLSLLHAAAAALVVLLQLHGGAVVVASEPPYTCSAGAXNIPFCDARLPIDRRVDDLVSRTTVAENISQLGDQSPAIPRLGVP

SEQ ID NO: 303539 - protein, 149 aa, Zea mays
  unsure (1)..(149): unsure at all Xaa locations
  Clone ID: MRT4577_39901C.1.pep
MAAMVGARRALLAARFSPRGTIAASAAPAPLYRPMDSPLRLPAERVCLQSWVPHRGAGTFASERTDEDYQREWGQNKAGSYTDSRWNGSNLQLQRDVTSAGSTTGTHKNKGVDGVGGSXAHYRSGGSYGFXNXHQPYTGYRAXNERYHA

SEQ ID NO: 303540 - protein, 122 aa, Zea mays
  Clone ID: MRT4577_39902C.1.pep
KQKKIKIKINNHPPLVRSTPWGCLLTVIVNQPLAQKAASTHTTGVLRLPATAGFSFKAAVACVKSGSPVTFHGPRYFEPPGDFGPPGIVGPRGDLLPPGDVSTTSIILNRPGSWPLPNQTAA

SEQ ID NO: 303541 - protein, 81 aa, Zea mays
  Clone ID: MRT4577_39903C.1.pep
KVGQRSRPSYVLLLRTKRFSRSSSCFPTFFFSPRFLGKALMGSCTSCTHRLTRWTAACSFYYRRVKLCLGWSSTLAWPDAW

SEQ ID NO: 303542 - protein, 110 aa, Zea mays
  Clone ID: MRT4577_39904C.1.pep
VWLQLQDGIGRADPSNKIVLFRVKGWDRIFPVLSPVFPQNWRGERMPKDVPILVVPQPNPPLYQGARVYARTWFYWGFGKMILPFRDSSFFGGPWGNDLFAKGWVSPPDE

SEQ ID NO: 303543 - protein, 77 aa, Zea mays
  Clone ID: MRT4577_39905C.1.pep
PSSYPRHVSTQWMVISTDIFDSIDPLCIMHPPHPVKLGDPLMGALTSICGQHLIINGQCRPRNLDNMIYEIHVNGPE

SEQ ID NO: 303544 - protein, 108 aa, Zea mays
  Clone ID: MRT4577_39906C.1.pep
VLDEGSHQGREHAVGALLTMCESDRSRYRDLILNEGAIPGLLELTVHGTPKSRMKAHVLLDLLRNSPYSRPKLPADTLENIVTNIASQIDGEDRGGKAKKMLAACRPG

SEQ ID NO: 303545 - protein, 84 aa, Zea mays
  Clone ID: MRT4577_39907C.1.pep
GVSVAPWTQRSDSFTSAARWMTYFMLVYSSLVQVCIVIVFPREPDDSGMYFCNINAYLASPSRGFLSCARYVEHSYDIYVLVHF

SEQ ID NO: 303546 - protein, 141 aa, Zea mays
  unsure (1)..(141): unsure at all Xaa locations
  Clone ID: MRT4577_39908C.1.pep
SARGAHGHVFFGRLAAPVAAASTARELAPRNATPAMGMNNVRLAAQATQPGNDLSKAAKSSDASMAYGEGLRYDPSNSGLHXNHDSCXDYSSKRGKGLYETGXALRRQPCYPKTLLTRAASYTRVSHEHAHGSTLLSLMRH

SEQ ID NO: 303547 - protein, 153 aa, Zea mays
  unsure (1)..(153): unsure at all Xaa locations
  Clone ID: MRT4577_39909C.1.pep
EQDSXRGXEGRERDKAAXEHAGPRTXXXADXXAXAARDXXXXTGGPGXEGPXGRRDXRXTXRSGXNNPXPXPNDXXPTXXGKXANQGPDXXDPXAPPGGHTXGDXRRXSXRQRRDGQNNNGQXDRTXNPAXAAEPRGRGPRXGGDQNPAPDPA

SEQ ID NO: 303548 - protein, 112 aa, Zea mays
  Clone ID: MRT4577_3990C.1.pep
MGRDELLRRSLVALAAAVALTGLATASLRKAAATYGFGILAIAGVLLPDWEFFDRDYSQWLTPMPASRRTAAAAAADREHDVWKFKPYPLRVAMLTTIYGFGLHKWWTYVSS

SEQ ID NO: 303549 - protein, 79 aa, Zea mays
  unsure (1)..(79): unsure at all Xaa locations
  Clone ID: MRT4577_39910C.1.pep
TPGGKFSQMIIGPRXKRGXRVKSIKPGKGFLSKFFGGPYKPWGTFLEDVVINHXKRAGLPXTPFPPFGLRGNPFPPWRG

SEQ ID NO: 303550 - protein, 100 aa, Zea mays
  Clone ID: MRT4577_39911C.1.pep
ATPRFAARTAVTSKCPTTGGPRLTRGRRPTAGGGTSGAGGAPCPPTRGRCTWPVSLKAGASGGSPRMVKPVPCLVQVKKSRRWRGRRSLLVVRHCPARVL

SEQ ID NO: 303551 - protein, 54 aa, Zea mays
  Clone ID: MRT4577_39912C.1.pep
RLNQLTLGDFKDSKNSCLQFPFKLFLNVYTIIVSVICWLYRKHLVGQLWMFFSH

SEQ ID NO: 303552 - protein, 168 aa, Zea mays
  unsure (1)..(168): unsure at all Xaa locations
  Clone ID: MRT4577_39913C.1.pep
MEKAGQQRHVIGGGGKKAPALGLQKQNSWSPDIERDEAWERRRRGMRRGGTALRRARSVTDDDLDELRGCIDLGFGFEPXPPPRAPXCAGRNRLLETLPALDLYYAVHGGAAEAPPCSCGAASEASSSEESPLGSPMSILSPGDTPETVKMRLKQWAQVVALSMLSRH

SEQ ID NO: 303553 - protein, 92 aa, Zea mays
  Clone ID: MRT4577_39914C.1.pep
PNFCGPLVVLVFPIPFSCDQPLISRILLGWVPINALISFLSFSQAWFFLVKSCGLSTPLFRATMYVRFSSPVPFEVYCLFPFPSRAYGPNPS

SEQ ID NO: 303554 - protein, 34 aa, Zea mays
  Clone ID: MRT4577_39915C.1.pep
KKKKKKKKKKKKKKKKKKKKKKREKKNNLKFINI

SEQ ID NO: 303555 - protein, 64 aa, Zea mays
  Clone ID: MRT4577_39916C.1.pep
AGRIEDGRFSKSPLRLARGRRGGGSGRVYRSALPMEKAGQQRRLPPCSSYLGLLANHLSSTMIV

SEQ ID NO: 303556 - protein, 194 aa, Zea mays
  unsure (1)..(194): unsure at all Xaa locations
  Clone ID: MRT4577_39917C.1.pep
MEKAGQQRHVIGGGGKKAPALGLQKQNSWSPDIERDEAWERRRRGMRRGGTALRRARSVTDDDLDELRGCIDLGFGFEPXPPPRAPXCAGRNRLLETLPALDLYYAVHGGAAEAPPCSCGAASEASSSEESPLGSPMSILSPGSLRLSRQSPPVILVSISDPFPFVRAGDTPETVKMRLKQWAQVVALSMLSRH

SEQ ID NO: 303557 - protein, 103 aa, Zea mays
  unsure (1)..(103): unsure at all Xaa locations
  Clone ID: MRT4577_39918C.1.pep
MATVPNPKATRARREPALRPRSNNVAAPPPPPLRPSSLQLRMKDEAAAAPPAFVVGPRGRELLPPPSSNYEAWDLSDSESAPAXXWATLPNRALVCRPLPQDV

SEQ ID NO: 303558 - protein, 110 aa, Zea mays
  Clone ID: MRT4577_39919C.1.pep
ITVLINNMCSSTRVNCLRAKGRLSNVSTVPKQKQPNFTLFLICSRSIVHITSLALTAQVSNPDQSFPRSVSTHTVQGRPSTSQIYVCQRNQLTKALKLASVFHCYVRAKL

SEQ ID NO: 303559 - protein, 91 aa, Zea mays
  unsure (1)..(91): unsure at all Xaa locations
  Clone ID: MRT4577_3991C.1.pep
LRVRPRVRNRSTGPARCYRXQSMNMPYAKSRYCRGVPDPKIRIYDVGMKRKGVAEFPDGVHLVCWEKEKDPSEALEAARIARNKYMTKCAG

SEQ ID NO: 303560 - protein, 115 aa, Zea mays
  unsure (1)..(115): unsure at all Xaa locations
  Clone ID: MRT4577_39920C.1.pep
SPPPQSLGKKTPRKAAPTGTGLPPSCPPKGRSSPPPRKAWASPPPRPKAPGGTRGNPGRSRPPPGAHVHXVPVCIKPPPSAPVKWGKKKTPPPLLLWTTCRLGRKIHLKKNGRNP

SEQ ID NO: 303561 - protein, 41 aa, Zea mays
  Clone ID: MRT4577_39921C.1.pep
IGFPHFRPHPSPCFFGGSRDQSGAGNVRRLPWCCPRSVQQG

SEQ ID NO: 303562 - protein, 99 aa, Zea mays
  Clone ID: MRT4577_39922C.1.pep
RPSVLLAAPPRPAVLLAATAPPAAKMPFKRFVEIGLVALVNYGMVYGRLVVIVDVFYQNSSLVDAPYLIRCLMNFKLLFLTDLKIYIITCASDDYTDLG

SEQ ID NO: 303563 - protein, 133 aa, Zea mays
  Clone ID: MRT4577_39923C.1.pep
IFCSSNVHPPVVTLRLRELFTYLASASPSAVDLLIYSNPSASPNCLTLHHNKETSQESSMHNMMPPYSKAYTPIILLLKLLNKPLFLLSRVYLEKVSYLLEVVINNAAFHVDCPPYSVQITNNSDIEFLDGTP

SEQ ID NO: 303564 - protein, 92 aa, Zea mays
  unsure (1)..(92): unsure at all Xaa locations
  Clone ID: MRT4577_39924C.1.pep
TARQTXEXENNXPAAAXDPXAKDANHXXGGGXXAQAQQEKPRANDPHHXRRTKXXAPAXXKKXDHARAGGTNEXXGHKQGKXEGDANTRKDA

SEQ ID NO: 303565 - protein, 102 aa, Zea mays
  Clone ID: MRT4577_39925C.1.pep
DFPVRPSVPRGGAFFFFWGFQLLFCPSLPLGPRFRGELSLVGRAPCFPGFPLFFLPCLGAGGPCFPIVFPFPFAPYRVPWLAFSFPFPPPFLTPESFPPCAN

SEQ ID NO: 303566 - protein, 356 aa, Zea mays
  unsure (1)..(356): unsure at all Xaa locations
  Clone ID: MRT4577_39926C.1.pep
MHPGGGPLSVPPGFRFHPTDEELLYYYLRKKVAYEPIDLDVIREIDLNKLEPWDLKERCKIGTGPQNDWYFFSHKDKKYPTGTRTNRATTAGFWKATGRDKAIFLGSARRIGLRKTLVFYIGRAPHGKKTDWIMHEYRLDQENVEIQEDGWVVCRVFKKKSYEQRGHDVAEMVALDDEELXLSRFLSPAGTSSLPTTDHKNNPHLMQYDFPSFDPSMQLPQLMSADQPVPTLFPSHPGVATAMSSSIDVECSQNLLTMLTSNGSDGMLHVRAGGAGAGVDRFAGTTDWSILDKLLASHQNLDQLFHGKVTAASASPMAPYHQQLMELGGSSSSSSLQRLPLQYLSGETTDLLRFPK

SEQ ID NO: 303567 - protein, 146 aa, Zea mays
  Clone ID: MRT4577_39927C.1.pep
SLFPLYSSPISSAVFFSFPRSVSSLFPPEGPPSFLRFLFFPAAGGQQGSVFLCSGGACKCFPALFRGPQNPGGSSFFLVLDSEWEGERVRFRWWGDSGDMPWRSTPYGDGRVPCFRGRVNLGGLFCRGAGHQRKATAMGRVRWGRP

SEQ ID NO: 303568 - protein, 77 aa, Zea mays
  Clone ID: MRT4577_39928C.1.pep
KRVGTSFRNGQFYCVDGQLVHDLHLVNTISPSPLEPSNALPIRWATYGHDVLGVLSGFGASWTVGVLTCKLIQLIFH

SEQ ID NO: 303569 - protein, 108 aa, Zea mays
  Clone ID: MRT4577_39929C.1.pep
LLEFILVGLIAIIALSAGFGLLFSILGVSNIINKLRQRRAKLLRQKFFKRNHGLLLQQLISSNKDIAERMKIFSFEELEQATNMFDQNRIIGDGGHGTVYKGILSDQR

SEQ ID NO: 303570 - protein, 41 aa, Zea mays
  Clone ID: MRT4577_3992C.1.pep
GGLAQRPCPRKCRRPPCPRSRTCGPKKNIACAAGSLSPPSD

SEQ ID NO: 303571 - protein, 190 aa, Zea mays
  unsure (1)..(190): unsure at all Xaa locations
  Clone ID: MRT4577_39930C.1.pep
KKTLPLLNFIKSSHLSRCLKSIEYKYDSGIMDYRIFLLILFVFSAFVTPFVCCPQNNFVCFSFCSAHFSLHAIYSSVESFHIFFSTSLICFYYESKYYNFCGSIAKLSFRIKLMIHSKFSQLSSFFLSVHINGVIYETIFSFTSFIPLTGSYCFYSSPQKYILILNIKFTIHFSLKKIHFHIFVFXWCIG

SEQ ID NO: 303572 - protein, 98 aa, Zea mays
  Clone ID: MRT4577_39931C.1.pep
MGAVAPLGPAMGVTEPPKSLGPPTVVLVHRTSNNPAGAPDHLTSSVSEFFTLPMSVSLVTQILQHIGEIEMISCYKCTFGLREGKEYKRDAKANAKSV

SEQ ID NO: 303573 - protein, 94 aa, Zea mays
  Clone ID: MRT4577_39932C.1.pep
GPAGTCSLRRHTPTLSLPPYLYSILRRCRHGSLSASTISGQALVGCLQLRSSSTIGSPVVRTEETGLYMKGSGDVAHRCRSMHARVQERRRAVR

SEQ ID NO: 303574 - protein, 99 aa, Zea mays
  Clone ID: MRT4577_39933C.1.pep
MEPPPLAAGCTTLWGTEACEHLWGLQSLLFYAHAGLQHRDAAVDQVLALQLLGFLDYTALATTTGPKDARLLVPITTDLCNMLACLLTLASLCLRTLGC

SEQ ID NO: 303575 - protein, 595 aa, Zea mays
  Clone ID: MRT4577_39934C.1.pep
MDSDVEMNTASDEEVMDNDDYYDYCYSDVGDDGGSNSGSEELVAGDYDEGLEAEGTDEVVSRREQTFVVLNEQVISERQAEDVSKVSAVTLITREEACALLHHYKWNISKLSDEWFADEEKVRHTVGLLLNGNHDPRSRKLVCGICFEGCSSDMMSSAGCAHFYCHECWEGYISAAIGDGPGCLSLRCPDPSCSAMVLQGMINELAKDEDRKKYARFLLRAYVEGSKKTKWCPAPDCTCAVEFLGDENYDVSCNCMFSFCWNCTEEAHRPVNCETVSKWILKNSAESENMNWILANSKPCPKCKRPIEKNQGCMHMTCTPPCKFEFCWLCLGAWSDHGERTGGFYACNRYESAKKEGVYDETDARRERAKNSLERYMHYYERWASNQTSRQKAQADLLKAEKDQIANLTDIFGIPETQLKFIIEAWSQIIECRRVLKWTYAYGYYLDDKIKSEFFEYLQGEAESGLERLHQCAEKDLQNFLPSVKSDSTETTTPTVAEFGEFRVKLAGLTSVTRNYFENLVQALEAGLEDVRATGQAAGTSSTATSSKKGGTKSKKKQHTAPSSDHTDDGWPCERCTFLNPPTVDACSVCEKSRY

SEQ ID NO: 303576 - protein, 144 aa, Zea mays
  Clone ID: MRT4577_39935C.1.pep
VLLSALPFAVPLVIWRLIWWLLASVAACSSSSSFLSPHLYAGVTCLATCLPSEREREREGRRFGRSGIWSLTSPLSAGISLGMCLGRRHDRTGHGTRRGARRAGTGCCTGCCYRCRCRGPCHGPDDEAAPEFAAEGGARGRACY

SEQ ID NO: 303577 - protein, 97 aa, Zea mays
  unsure (1)..(97): unsure at all Xaa locations
  Clone ID: MRT4577_39936C.1.pep
IIPSSTGSANAVGKVLSELNGKFTAMSFREPTGDAPVVDLTDKLDXSATYDEKKAAPKAPSXSSLKGILSYGPPYLVSINFQGERRSSIFDAKAGIA

SEQ ID NO: 303578 - protein, 254 aa, Zea mays
  Clone ID: MRT4577_39937C.1.pep
MALIIKRFKTALKGRKEYPNKNKARGKRSCFKCGKTGHFIAQCPDNDDDQEQEKHGKREKKKVYKKAKGEAHLGKEWDSDCSSSDSNDEGLAASAFNKSLLFPNERHTCLMAKEKKDKPETQGTLKRFLRRAQNEFELKVKKIRSDNGSEFKNLQVEEYLEEEGVKQEFSAPYTPQQNGVMCDHKNNKSKINLLPQRWCIPQLKMMDTFLKRRRVIKGEHKKKKSWRKKHHWPLQLKSERQFKEIIPSIRFWVT

SEQ ID NO: 303579 - protein, 214 aa, Zea mays
  Clone ID: MRT4577_39938C.1.pep
MTGEKKMFSSYVKNKDSQDSIIFGDGNQGKDKSETQGTLKRFLRRAQNEFELKVKKIRSDNGSEFKNLQVEEYLEEMKKTFQRPRYAPWRLEMYGLKNNWSKINRLPQLWCIPQPKVTNRLYQMDVKSAFLNGPIKEEVYVEQPSGFEDERYLDHVLKQLKDGTFISQTKYTQDLLKRFGMKDAKPAKTPMGTDGHTDLNKGDFGEAMGLKGQD

SEQ ID NO: 303580 - protein, 1496 aa, Zea mays
  Clone ID: MRT4577_39939C.1.pep
MDPKGKGMVINDKEKESFINEPKDDKPTDSGSSHKKKDGKKKRRIKKIVYYDSDESSSSQRDDDDKKKKTVNSNFSFDYSRIPQNSNAHLLSIPLGKPPHFDGEDYGFWSHKMRSHLFSLHPSIWEIVENGMQFDSTDNPMFINEQIHKNAQATTVLLASLCREEYHNISHEGNDATMITKMELVEGELGRFAMIRGEEPTQTYNRLKTLVNKIKSYGSTRWTDHDVVRLMLRSFTVLDPHPVNSIRENPRYTKMTPEEILGKFVSGRKMIKEARYVDEALNGPMPIHEPQTVALKAISSREGLPSKVAQVEAAGLNEDEMALIIKRFKTVLKGRKEHPNKSKTKGKRSCFKCGKIGHFIANYPDNNSDQEQGKNGKRENKKVYKKAKGEAHLGKEWDSDCSSSDSNDEGLAATAFNKSSLFPNDHHTCLMAKEKKVSTRNTIAYASSSDDESSDDEVDYASLFKGLDRTKIDKINELIDALNEKNRLLERQEDLLYEEHDKFVYASGGSSWIIDSGCTNHMTREKKMFTSYIKNKDSQDSIIFGDGNQGKVKGLVKIAISSEHSISNVFLVESLGYNLLSVSQLCNMGYNCLFTNVDVSVFRRSDGSLAFKGVLYDKLYLVDFAKEEAGLDACLIAKTSMGWLWHRRLAHVGMKNLHKLLKREHVLGLTNVTFEKDRPCAACQAGKQVGSSHHSKNVMTTSRPLELLHIDLFGPVAYLSIGGSKYGLVIVDDFSRFTWVFFLQDKSETQGTLKRFLRRAQNEFELKVKKIRSDNGSEFKNLQVEEYLEEKGIKHEFFAVYTPQQNDVVERKNRTLIDMARTMLGEFKALERFWSEAVNTTCHAINRVYLHRLLKKTSYELLTGNKPNVSYFRVFGSKCYILVKKGRNSKFAPKAVEGFLLGYDSNTKAYRVFNKSSGLVEVSSDVVFDETNGSPSEQVDIDDVDEEDVPTAAIRTMAIGDVRPQEQKEQDQPSSSTMVHPPTQDDGQAHQEEACDQGGAQDDHVMEEEAPQAPPTQVRATIQRNHPVDQILGDISKGDEHGVVTRNKVRLVAKGYAQVVGLDFEETFAPVARLESIRILLAYAAHHSFRLFQIDVKSAFLNGPIKEEVYVEQPPGFEDERYPDHVCKLSKALYGLKQAPRAWYECLRDFLIANAFKVGKADPTLFTKTCDGDLFVCQIYVDDIIFGSTNQKSCEEFSRVMTQKFEMSMMGELNYFLGFQVKQLKDGTFISQTKYTQDLIKRFGMKDAKPAKTPMGTDGHVDLNKGGKSVDQKAYRSMIGCLLYLCASRPDIMLSVCMCPRFQSDPRECHLVAVKRILRYLVATPCFGIWYPKGSTFDLIGYSDSDYAGCKVDRKSTSGTCQFLGRSLVSWSSKKQNSVALSTAEAEYVVAGQCCAQLLWMRQTLRDFGYNLSKVPLLCDNESAIRMADNPVEHSRTKHIDIRHHFLRDHQQKGDIEVFYVSTENQLADIFTKPLDESTFCRLRSELNVLDSRNLD

SEQ ID NO: 303581 - protein, 113 aa, Zea mays
  Clone ID: MRT4577_3993C.1.pep
RVHDFASSSREKAEIEELRKEVREARRIKMLHQPSKVMDMEFELQALRTLISEKTQLCNQLKKELAMIKRLEDDSSGLFELEGSNTLGSQLCIIPRVDGASNRWPKRPKHLMK

SEQ ID NO: 303582 - protein, 300 aa, Zea mays
  unsure (1)..(300): unsure at all Xaa locations
  Clone ID: MRT4577_39940C.1.pep
DKSETQGTLKRFLRRAQNEFELKVKKIRSDNGSEFKNLQVEEFLEEEGIKHEFSAPYTPQQNGVVERKNRTLIDMARTMLGEFKTPECFWTEXAVNTACHAINRVYLHRLLKKTSXEEDVPTAAIRTMAIGEVRPQEQDERDQPSSSTMVQPPTKDDEXRLFQMDVKSAFLNGPIKEEVYVEQPPGFEDERYPDHSCEEFSRVMTQKFEMSMMGELNYFLGFQVKQLKDGTFISQTKYTQDLLKRFGMKDAKPAKTPMGTDGHTDLNKGGSFCILLLIVVLKLYKPSLDLTSPLQSDAHV

SEQ ID NO: 303583 - protein, 575 aa, Zea mays
  Clone ID: MRT4577_39941C.1.pep
MDPKGKGIVINDKEKESFVNEPKDDKPTDSGSGHKRKDGKKKTRRIKEIVYYDSDESSSSQQDNDDYEKKKTNPRYTKMTPEEILGKFVSGRMMIKEARYVDDALNGPINEPQPLALKATRSKETLPSKVAQIEAAGLNDEEMALIIKRFKTALKGRKGQPSKTKTKGKRSCFKFGKLGHFIANCPDNDSDQDQGNKREKKKNYKKAKGEAHLGKEWDSDCSSSDSDNEGLAATAFNKSSLFPNERHTCLMAREKKVYASGGSSWIIDNGCTNHMTGEKKMFTSYVKNKDSQDSIIFGDGNQGKDKSETQGTLKRFLRRAQNEFELKVKKIRSDNGSEFKNLQVEEFLEEEGIKHEFSAPYTPQQNGVVERKNRTLIDMARTMLGEFKTPEYFWSEAVNTACHAINRMKKTFQRPQYAPWRLERCGHRNKMSEINLPPQLWCIPQLKTMNRLYQMDVKSAFLNGPIKEEVYVEQPPGFEDERYPDHVCKLSKALYGLKQAPRAWFQVKQLKDGTFISQTKYTQDLLKRFGMKDTKPAKTPMGTDGHTDLNKGVMVLKLYKHSLDLTSPLQSDAHV

SEQ ID NO: 303584 - protein, 73 aa, Zea mays
  Clone ID: MRT4577_39942C.1.pep
ATTSHAIDINKHATQWRIALRSEPTNHPAYVSHALVLKAEGYLQEAPDCLQPAYELRELSPIQDFSEQLLIML

SEQ ID NO: 303585 - protein, 140 aa, Zea mays
  unsure (1)..(140): unsure at all Xaa locations
  Clone ID: MRT4577_39943C.1.pep
SRSRTTRFRVAFSSIDGGTFRTIKFVDASVVKIEGRGLVLHECKNGEHLTLANAYYIPXLTTNTISIGQLNEKGFDVRIWDGTMTIRDENEKLLTRNPHGLRRLYKLELQIAXPVCLVTCAEEDVWRWHAHRHRSVGLGL

SEQ ID NO: 303586 - protein, 85 aa, Zea mays
  Clone ID: MRT4577_39944C.1.pep
LLSALLSDRMERSGRNGLARQQSSEWLGRGSDGLIGLSDASALGSPRKSFADALQENISRPAVIAGHLSRSNSRNVLEGPTPTAT

SEQ ID NO: 303587 - protein, 1087 aa, Zea mays
  Clone ID: MRT4577_39945C.1.pep
MSPKEILGKFVSGRMMIKEARYIDEALNGPIHEPQAIALKATSSREALPSKVAQIEAVGLNEDEMALIIKRFKTALKGRKEHPKKNKTKGKRSCFKCGKVGHFVANCPDNDSDQEQGKNGKRENKKVYKKAKGEAHLGKEWDSDCSSSDSDDEGLAATAFNKYEHLVSISRLKDEVASLNAQLKTSKSEFDKLKFARDAYTIGRHPSIKDGLGFKREAKNLTSHKAPISAKKKGKAPMANSAKKNHAFMYHDRRYSRNVHRSYDTFDSHAMIASSSYIMHDRNLARKMLLMYLGKKDKKVVARKLGAKCKGDKTCIWVPKTIVTNLVGPNKSWVYVSGGSSWIIDSGCTNHMTGEKKMFTSYVKNKDSQDSFIFGDENQGKVKGLGKIAISNEHSISNVFLVESLGYNLLSVSQLCNMGYNCVFTNVDVSVFRRSDGSLAFKGVLDDKLYLVDFAKEELWHHRLAHVGMKNLHKLLKGEHVLGLTNVHFEKDRPCAACQAGKQVGSAHHIKNVMTTSRPLELLHMDLFGPVAYLSIGGRTLKRFLRRAQNEFELKVKKIRSDNGSEFKNLQVEEYLEEEGIKHEFSALYTPQQNGVEERKNRTLIDMARTMLGEFKTPEQFWSEAVNTACHAINWVYLHRLLKKTSYELLTGNKPNVSYFRVFGSKCYILVKKGRNSKFAPKFVEGFLLGYDSNTKAYRVFNKSSGLVEVSSDVVFDETNGSPREQVELDDVDEEDVPTDAIRTMAIGDVRPQEHKEQEQPSSSTTVHPQPKMMNRVEEALLDPDWVLAMQEELNNFKRNEVWTVVPRPKQNVVGTKWVFRNKQDEHGVVTRNKARLVAKGYAQVAGLDFEETFAPVARLESIRILLAYAAHHSFRLYQMDVKSAFLNGPIKEEVYVEQPPGFEDERYPDHVCKLSKALYGLKQAPRAWYECLRDFLIANAFKVGKADPTLFTKTCDGDLFVCQIYVDDIIFGSTNQKSYEEFSRVMTQKFEMSMMGELNYFLGFQVKQLKDCTDTRTNATWSAWSTPRPSPNPRPSSPTWRASKGAPDAKRHTGNFEPAETVKYVPLDPSNDASKQIRIGSKLDPK

SEQ ID NO: 303588 - protein, 96 aa, Zea mays
  Clone ID: MRT4577_39946C.1.pep
SLPPPVADSLPVCRHCRRSCRVKDTATSGKKHLNSVTLLFKLPYYTQWGQSLLIAGSEPALGSWNVKQGVSLSPVHQDSELIWCGSVSVVAGFTSE

SEQ ID NO: 303589 - protein, 1629 aa, Zea mays
  Clone ID: MRT4577_39947C.1.pep
MDPKGKGMVVNDKEKESFVNDPKDDKPTDSGSSHKRKDGKKKKTRRIKEIVYYDDSDESSSSQKDDDNYEKKKTFNSNFSFDYSRIPQSTNAHLLSIPLGKPPHFDGEDYGFWSHKMRSHLFSLHPSIWEIIESGMQFDSIDSPIFINEQIHKNAQATTVLLASLCRDEYHKVSGLDNAKQIWDTLKISHEGNDVTMLTKMELVEGELGRFAMIRGEEPTQTYNRLKTLVNKIRSYGSTRWTDHDVVRLMLRSFTVLDPHLVNNIRENPRYTKMSPEEILGKFVSGLMMIKEARYVDDALNGPIHEPQTVALKATRSKEVLPSKVAQVEAAGLNEEEMALIIKRFKTALRSRKEHPNKNKTKGKHSCFKCGKIGHFIANCPDNDSDQEQEKKREKKKAYKKAKGEAHLGKEWDSDCSSSNSDNEGLAASAFNKSSLFPNEHHTCLMAKEKKVNTRKSTYASSDDESSDDEIDYASLFKGLDRTKIDKINELIDALNDKNRLLEKQEDLLYEEHDKFVEAQKSLALEVKRNEMLSCELSTCHESISSLKSVNDDLNAKLEIASKLTSREEHVTICNRCKDFNVDACSEHLVCISKLNDEVASLNAQLKTSKNDFDKLKFARDAYTVGRHPSIKDGLGFKREAKNLTSHKAPISAKEKGKAPMTHNSQKNHAFIYGDKRYSRNVHRSCNDSNAMFASSSSYVHGRDMPRRNVIHHVPRRNVHVPRKINEPSTIYHACNASFAICRKDKKVIARKLGAKCKGDKTCIWVPKDIVTNLVEPNKSWVYASGGSSWIIDSGCTNHMTGEKKMFTSYVKNKDSQDSIIFGDGNQGKVKGLGKIAISSEHSISNVFLVESLGYNLLSVSQLCNMGYNCLSTIVDVSVFRRSDGSLAFKGVLDGKLYLVDFAKEEAGLDACLIAKTSMGWLWHRRLAHVGMKNLHKLLKGEHVIGLTNVTFEKDRPCAACQAGKHVGSSHHTKNVMTTSRPLELLHMDLFGPIAYLSIEGSKYGLVIVDDFSRFTWVFFLQDKSETQGTLKRFLRRAQNEFELKVKKIRSDNGSEFKNLQVEEYLEEEGIKHEFSAPYTPQQNGVVERKNRTLIDMARTMLGEFKTPERFWLEAVNTACHAINQVYLHRLLKKTSYELLTGNKSNVSYFRVFGSKCYILVKKGRNSKFAPKAVEGFLLGFDSNTKAYRVFNKSSGLVEVSSDVVFDETNGSPREQVVDLDDIDEEDIPTVAIRTMAIGEVRPQEQKEQDQPSSSTMVHPPTQDDEQPFRVEEALLDPDWVLAMQEELNNFKRNEVWTLVPHPKQNIVGTKWVFRSKQDEHGVVTRNKARLVAKGYAQVAGLDFEETFAPVARLELFQMYVKSAFLNGPIKEEVYVEQPPGFEDERYPDHVCKLSKALYGLKQAPRAWYECLRDFLIANAFKVGKADPTLFTKTCDGDLFMCQIYVDDIIFGSTNQKSCEEFSRVMTQKFEMSMMGELNYFLGFQVKQLKDGTFISQTKYTQDLLKRFGMKDAKPAKTPMGTDGHVDLNKGGQCCAQLLWMRQTLRDFGYNMSKVPLLCDNESAIRMADNPVEHSRTKHIDIRHHFLRDHQQKILVRQWGSRAKIDPVLVLDAKGGENKAKATNGSATT

SEQ ID NO: 303590 - protein, 387 aa, Zea mays
  Clone ID: MRT4577_39948C.1.pep
MSETESAAAAPVAAAESKPRRLRGHKKGAVTCCVASSARPGVVASSGEDGCLCWFDLRTKDVLLTMEAANKPISSICFKPGNEDFVYISAGNEILSFDVRMGTQTKPLETYNYNRDEINQIAVSSKGFLAAADDSGDVKIVNTIQKCLYKRLREAHTSICSSVQFIPWRPWTAITGGLDSKLAAWDFSKGRTLFSIDYGSPELQNGSSSGSAGQCFNPAFVHSVAVSEEGILGGLYKVCAVARGDGAVDVVDLEYELAPAKSKGPPRAAILTTRSKGAELGDGSCNQSRAKRIHLDYTMGGHTAAVSCVAFSAFGEKGKFLISGGNDASVKLWDWSKGFYSETNSKVDLVLDIDVKKKVNWLCTAPTDSDNLIVCDTSKVVKVYSFR

SEQ ID NO: 303591 - protein, 508 aa, Zea mays
  unsure (1)..(508): unsure at all Xaa locations
  Clone ID: MRT4577_39949C.1.pep
MAQGHISLSVFNKSPGLVEVSSDIVFDETNGSPREQVDLDDIDEDDVPTAAMRTMAIGYVRPREQQEQDQHSSSTMVHPPTQDDXQVHQEEACDQGGAQEEQTMEEEARPAPPTQXLFQMDVKSAFLNGPIKEEVYVEQPPGFEDDRYPDHVCKLSKALYGLKQAPRAWYECLRDFLIVNSFKVGKADPTLFTKTCDDDLFVCQIYVDDIIFGSTNQKSCEEFSRVMTQKFEMSMMGELNYFLGFQYTQDLLKRFGMKDAKPAKTPMGTDGHVDLNKGGKFVDQKAYRSMIGSLLYLCASRPDIMLSVCMCARYQSDLRECHLVAVKRILRYLVSTPCFGIWYPKGSTFDLIGYSDSDYAGCKVDRKSTSGTCQFLGRSLVSWSSKKQTSVALSTTEAEYVAARQCCAQLLWMRQTLRDFGYNLSKVPLLCDNESAICMADNPVEHSRTKHIDIRHHFLRDHQQKGDIEVFHISTENQLADIFTKPLDEKTFCRLRSELNVLDSRNLD

SEQ ID NO: 303592 - protein, 253 aa, Zea mays
  Clone ID: MRT4577_3994C.1.pep
VQTPAASLHCRHKRLWLHGRSKSEQLVAPSRRGDSGYGKEDGFHNVNEGHDVWSKATIGSKQSCMAGTGITNLDLILSQMSRMRNQISIGRIQPPIGAEPSDRWLKRLQPDIPDPDIPGSRRPKVGGSPPLRQRNRSFDMALPCNRTDTGTTDCVMEDQSLDKVEKTQEKPESTPIPAKSVNSWIGRWCQGGTPVFHEGPGQGRQATKPGRPSEELEGRFPSIAAMAMMGRAMNKLRPCEHQKMGPLVVWKTD

SEQ ID NO: 303593 - protein, 53 aa, Zea mays
  Clone ID: MRT4577_39950C.1.pep
LLFIIKTQRVMEYLYANILNAYLFFLSDDPGAQRFCDSSYSFCVTLPIPLFLT

SEQ ID NO: 303594 - protein, 345 aa, Zea mays
  Clone ID: MRT4577_39951C.1.pep
MDPKGKGMVINDKEKESFLNEPKDDKPTDSGSSHKKKDGKKKREEYHKVSGFDNTKQIWDTLKISHEGNDATMVTKMELVEGELGRFAMIRGEEPTQTYNRLKTLVNKIRSYGSTRWTDHDIVRLMLRYTKMMPEEILGKFVSGRMMIKEARYVDEALNGPMPIYEPQTVALKATSSREALPNMVAQVGAVGLNEDEMALIIKRFKIALKGRKEYSNKNKGDERHGKRENKKVYKKAKGEAHLGKEWDSDCSSSDSDNEGLASSAFNKSSLFPNEHHTCLMAKEKKVYASGGSSWIIDSGCTNHMTGEKKMFTSYVKNKDSQDSIIFGDGNQGKVKGLGKCHTRF

SEQ ID NO: 303595 - protein, 517 aa, Zea mays
  unsure (1)..(517): unsure at all Xaa locations
  Clone ID: MRT4577_39952C.1.pep
MDPKGKGIAINDKEKESFVNEPKDDKPTDSGSGHRRKEGKKKKTRRIKEIVYYDDSDESTSSQKDDDHNDYERRKSVNSNFSFDYSRIPQSANAHLLSIPLGKPPHFDGEDYGFWSHKMRSHLFSLHPSIWEIVESGMHFDSSDSPMFINEQIHKNAQATTVLLASLCRDEYHKXYTKMSPEEVLGKFVSGRMMIKEXKTTLKGRKGQPSKTKAKGKRSCFKCGKIGHFIANCPDNESDQEHGSKREKKKNYKKAKGEAHLGKEWDSDCSSSDSDNEGIAATAFNKSSLFRNERHTCLMAREKKVCSRNSTYASSSEDESSDEDEIDYSCLFKGLDRTKVDKINELIDALNDKNRLLEKQEDLLYEEHDKFVEAQKSHALEVKRNEMLSCELSSCHETISSLRSINDDLNAKIEIASKSTTCVENVVICNRCKDFDIDACSEHIASIAKLNDEMASLNAQLKASKSDFDKLKFARDAYTIGRHPSIKDGLGFKREAKNLTSHKAPISAKEKGKAPMT

SEQ ID NO: 303596 - protein, 138 aa, Zea mays
  Clone ID: MRT4577_39953C.1.pep
MDTKGKWIVINDKEKETLNIDEPKGDKPTDLGSNNKRKDGKKKRRIKKIIYYDSDTSSSSPKDNDDNYSTKKKIVNQNYSFDYSLHIGKEWDSDCSSSDSDDEGLVASAFDKSSLFPNEHHTCLVAKEKKIIAIFSRV

SEQ ID NO: 303597 - protein, 66 aa, Zea mays
  Clone ID: MRT4577_39954C.1.pep
MEAAAGALSPVLRKLGELLAGEYNLEKRVKKGVQSLRTELEMIHAVLREVGKVPLDQLQEPVRIWA

SEQ ID NO: 303598 - protein, 407 aa, Zea mays
  Clone ID: MRT4577_39955C.1.pep
MSSSGKMEGPSAPVVRRDPYEVLSVPRDSSDQEIKSAYRKLALKYHPDKNASNPEASELFKEVAYSYSILSDPEKRRQYDTAGFEELENEGMDMEIDLSNLGTVNTMFAALFSKLGVPIKTTISPTVLEEAMNGTVTVRPLPVGTSATGKVDKQCAHFFGVTISEEQAHSGMVVRVTSPAQSKFKLLYFEQEVNGGYGLALQEDSQKTGKVTSAGMYFLHFQVYRMDSTANALAMAKDPEAAFFKRLEGLQPCEVSALKSGTHIFAVYGDNFFKPASYMIEAMCAKSYEDTTERLKEIESKILAKRNDLRQFETEYRKALARFQEVTNRYTQEREAVDDMLRERDNIHCSFTTERTLANPVGVGSSSRYTIEQSIPESPENGSVDGRDKSGKKKWFNLNLNRSDKKA

SEQ ID NO: 303599 - protein, 85 aa, Zea mays
  Clone ID: MRT4577_39956C.1.pep
LTQYAQHYTSEPPTNHLPRVRGKHQPCHVNGGTRASELRSADRANSRLQEGLAQRDGGRHSEPVEEDEDPRDVDELQLGGTRAGT

SEQ ID NO: 303600 - protein, 197 aa, Zea mays
  unsure (1)..(197): unsure at all Xaa locations
  Clone ID: MRT4577_39957C.1.pep
MPPPRPAPHIQPVLPPVVSAAEISPAREIFSSWRPPTLILPSLAYGAVQPGTLGRLTALQLLSLRSNNLSGPLPADLPRLPALAGLHLHRNAFSGALPPGLAXLAALQALDLSSNGFGGGIPDALANLTRLAALDLSNNSLSGRVPDLGLLALQFLNLSNNRLDGPVPPSLLRFADAAFAGNDLTRPAAAGPPTAAV

SEQ ID NO: 303601 - protein, 125 aa, Zea mays
  unsure (1)..(125): unsure at all Xaa locations
  Clone ID: MRT4577_39958C.1.pep
AGRVSNIISSVVHTSTSRSPVCCTQTHQASAPLAYYHDVDYCSEEVRSVVPAGFGRHCVVVQEDVYXDKFEECLDXARAGSNHHHYHGHHCGLGFWVREISVEDDISTCTGEVHERMESFLARAN

SEQ ID NO: 303602 - protein, 41 aa, Zea mays
  Clone ID: MRT4577_39959C.1.pep
SLGSHHSKTAQLKVKKHIYSHPNYIWSTSKYHCLITYNIVV

SEQ ID NO: 303603 - protein, 367 aa, Zea mays
  Clone ID: MRT4577_3995C.1.pep
AGRNKYDAEEAISLVEALAVQLTQREGELIYEKAEVKKLANFLKQATEDARKVAEEERALALAEIEKARSAIEKVEKAWHVHDFASSSREKAEIEELRKEVREARRIKMLHQPSKVMDMEFELQALRTLISEKTQLCNQLKKELAMIKRLEDDSSGLFELEGSNTLGSQLCIIPRVDGASNITNCPIQWYRVISGGTRELISGATKFMYAPEPFDVGRLLQAEIVLNADKIIVQTDGPVDNAAGLERYVDSLMKRTDIEFNVVVTQMNGKDYSSNSVHVFHIGKLRIKLRKGWSTKARESYSTTMKLCGSRGGGNAAARAVFWHPRKGSSYTLAFETDRDRNAAIMIARKFASNCNIALAGPGDQGT

SEQ ID NO: 303604 - protein, 128 aa, Zea mays
  Clone ID: MRT4577_39960C.1.pep
PAAEISPAREISSSRRPPTLILPSLAYDVVQPGTLGRLTALQLLSLRSNNLLGPLPGDLLRLPALAGLHLHRNAFSGELPAGLAALAALHVLDLFSHRFRRRHSAPRPSNLIRLCRASKILNLSPATR

SEQ ID NO: 303605 - protein, 69 aa, Zea mays
  Clone ID: MRT4577_39961C.1.pep
YQTCGWHTSKRLPIILTGISGLALHWKKLANSNCWITLPEGKNDTYMCQLAYDPASTFHCYTPSTKWIT

SEQ ID NO: 303606 - protein, 219 aa, Zea mays
  Clone ID: MRT4577_39962C.1.pep
MPLPLPRSMVLSPISFHLPAPMDPYVAGGTTRHSGRPDWVLLHNSARISGHRNSTTAGCHTMEGRPIEVSFWLVDPPGVSYFSVHCPGLSKDFQGEPYVHCAEAALVLFSVTFLPVPGRRSIQHFVYRAGPGAPSLDLIPDPDKIRRGDRYGLLPCGDDTDHYAVVFLDRNFIAYDKPLAFQCSRLLVGNKSWSSKVPLSCLSEDDQALLLKHGTCKPP

SEQ ID NO: 303607 - protein, 257 aa, Zea mays
  Clone ID: MRT4577_39963C.1.pep
MDYVVARMQLQQAAVPPPVHSIADHRPPPVSQRTRGSATMQRQRREALEQEVAELKQQLSNEQTVHQILERALQPSSSMALANIPAFIPTKAKELLAELLLVEEEIARLEDQIKRMKKSAATQQQQQTEHCKSMFFISQAMDGEAYLSTVVNNKRHSLASSSDGHAVLEKKIAQHELPITKKSPTVIAKRRARDQQQPPNKLSERILKCLVCIFMRLLRSSRASESAAGNLGGFRMDMGARQRGCSCGDQGKRKGAS

SEQ ID NO: 303608 - protein, 135 aa, Zea mays
  Clone ID: MRT4577_39964C.1.pep
TETHQANRTSNILTTPATTILNLLSLLALLPSATNAFIIPQCSLAPSAIIPHFLPPFTSIGFKHPTVHAYKLQLTLAASVLQQPIAQFQQQSLAHLNLQTIATQQKQQFMPSLNHLTAMNPVTYLQQQLLASNPL

SEQ ID NO: 303609 - protein, 119 aa, Zea mays
  unsure (1)..(119): unsure at all Xaa locations
  Clone ID: MRT4577_39965C.1.pep
KKKKKKKKNLKKKKGAAARGLAGCTMVTSMLSLAIGKSVKKDLAMTGEVTLTGRILPIGGVXIFSVKENVDFMIVPARLQVLDFLNXKEKTIAARRSGVKXTIIIPSANRRDFDELASN

SEQ ID NO: 303610 - protein, 141 aa, Zea mays
  unsure (1)..(141): unsure at all Xaa locations
  Clone ID: MRT4577_39966C.1.pep
MHGNDHDVLLRAKSSRXRQPIASARHGRQYKEYQETPTQPLFQAGQVTSWTFYCTCIHXFVSNLLFLYISILTXLGLLHSPPCSGTPXIHNIRWLFGTMIFCPLXCTVGFSFADMIPXATTFSLXMARKLSLTTHIVLHHH

SEQ ID NO: 303611 - protein, 108 aa, Zea mays
  unsure (1)..(108): unsure at all Xaa locations
  Clone ID: MRT4577_39967C.1.pep
EEANTKVLKPYTITKWRESXTEHELNKLLXALQLFDRDWHKIEAPVGCKTVIQIRSHAQKYFLKVQKNRTSEHVPPSRPKATAAHTYPQKAHKTEPHYSLKTERSSIH

SEQ ID NO: 303612 - protein, 167 aa, Zea mays
  Clone ID: MRT4577_39968C.1.pep
MASAEGERWVGLATDFSQGSREALQWAATNLLRAGDHLLLLHVIKEPDYEQSEAILWESTGSPLIPLSEFSDPIIAKKYGAKPDMETLDLLNTTATQKEIMVVVKVLWGDPREKLCQVIHDTPLSCLVIGSRGLGKLKRVLLGSVSDYVVNNATCPVTVVKSTSTEG

SEQ ID NO: 303613 - protein, 159 aa, Zea mays
  unsure (1)..(159): unsure at all Xaa locations
  Clone ID: MRT4577_39969C.1.pep
MASAEGERWVGLATDFSQGSRAALQWAATNLLRAGDHLLLLHVIKEPDYEQSEAILWESTGXPKYGAKPDMETLDLLNTTATQKEVSXKPLIMVVVKVLWGDPREKLCQVIHDTPLSCLVIGSRGLGKLKRVLLGSVSDYVVNNATCPVTVVKSSSTEG

SEQ ID NO: 303614 - protein, 103 aa, Zea mays
  unsure (1)..(103): unsure at all Xaa locations
  Clone ID: MRT4577_3996C.1.pep
RVRSPTDVVVHKRDLPRGASKLLXLMHVYVLVASATSATIMTQXSLATDAMIAEQRIPVTSMGLXHTISRAYVLHIAGADSVMNRTSAELLQQSWSHMTLRTI

SEQ ID NO: 303615 - protein, 175 aa, Zea mays
  unsure (1)..(175): unsure at all Xaa locations
  Clone ID: MRT4577_39970C.1.pep
MASAEGERWVGLATDFSQGSREALQWAATNLLRAGDHLLLLHVIKEPDYEQSEAILWESTGSPLIPLSEFSDPIIAKKYGAKPDMETLDLLNTTATQKEVXISFDKQIMVVVKVLWGDPREKLCQVIHDTPLSCLVIGSRGLGKLKRVLLGSVSDYVVNNATCPVTVVKSSSTEG

SEQ ID NO: 303616 - protein, 33 aa, Zea mays
  unsure (1)..(33): unsure at all Xaa locations
  Clone ID: MRT4577_39971C.1.pep
DILCPVXNSLSQXGCDAYRTFLMINHHVSKSIF

SEQ ID NO: 303617 - protein, 67 aa, Zea mays
  Clone ID: MRT4577_39972C.1.pep
QMELTSPLRALLLANKCYRCHRASLRSHGNLSTRISVFICVLHVLLALNSHLFTVNMVPWKLSLLIR

SEQ ID NO: 303618 - protein, 57 aa, Zea mays
  Clone ID: MRT4577_39973C.1.pep
FHLPSASFSVLSYTESHCLCHLSSEQPSGGILSFGFRFSVPHERACRAEARAEFRAY

SEQ ID NO: 303619 - protein, 51 aa, Zea mays
  Clone ID: MRT4577_39974C.1.pep
CPPRLSLPCLLLQSCCWALQCPVHTCVAPPENSPASASGQFKNDLHVPYFV

SEQ ID NO: 303620 - protein, 49 aa, Zea mays
  Clone ID: MRT4577_39975C.1.pep
IIADCRSVLTLEVLLHIEVRLVTMTAALSWAIVCISAALIGYQTVIPGR

SEQ ID NO: 303621 - protein, 87 aa, Zea mays
  unsure (1)..(87): unsure at all Xaa locations
  Clone ID: MRT4577_39976C.1.pep
MSTEEAVVAEVPVTEVPAXVPAAQVAEAPRARRGPKXKKAPKXKKPFVGNNPAVHTAYAEMIVDVIGGLXDRKGFSSWAISKYLEGI

SEQ ID NO: 303622 - protein, 1421 aa, Zea mays
  unsure (1)..(1421): unsure at all Xaa locations
  Clone ID: MRT4577_39977C.1.pep
MDPKGKGMVVNDKEKESIFNEPRDDKPTDSGSSHKKKDGKKKRRIKKIIYYDSDASSSSPKDDDDEDSSSKKKTVNQNYSFDYSRMLYNSNAHLLSIPLGKPPHFDGEDYSFWSHKMCSYLFSLHPSIWEIVENGMHFDNTDNAVFINEQIHKNAQATTVLLASLCRDEYNKVSGLDNAKQIWDTLEISHEGNDATMITKMELVEGELGRFTMIRAEEPTQTYNRLKALVNKIRSYGSTRWTDHDVVRLMLRSFTVIDPHLVNLIRENPRYTKMTPEEILGKFVSGRMMVKEARYVDDALNGTLPVYELQPVALKATSSREALPSKVAQVEAAGLNEDEMALIIKRFKTALKGRKEYPNKNKTRGKRSCFQCGKTGHFIANCPDNDSDQGQEKSEKKEKKKNYRKAKGEAHLGKEWDSDCSSFDSDDEGLAASAFNKSSLFPNERHTCLMAKEKKVCVRDTPKYTSSSDEESSDDEVDYSSLFKDKLLEKQEDILYEEHDKFISVQKSLALEIKRNEMLSSELSACHESVSSLRSLNDDLNAKLEEVNKSSSCVEHAVICNRCKDFDVDAYNEHIVSITKSSNEVASLNAQLKTCKDDFNKLKFVRDAYTIGRHPSIKDGLGFRKETKNLTSQKDHVLNKEKGKAPMVYASXFKLDYRQQMHXNHMTGEKKMFTSYVKNKDSQDTIIFGDGNQGKVKGLGKIAITNEHSISNXSSRVAWLQPSVWRTCVRTNQCLFRXKIGLVQHVKQGNMWEVLIIAXNMMTTSRXWSFFTWTSSDPLPTLASGEVSMVLXIIDDFSRFTWVFFLQDKSETQGTLKRFLRRAQNEFELKVKKIRSDNGSEFKNLQVEEYLEEEGVKHEFSAPYTPQQNGVVDRKNTTLIHMARTMLGEFKMPERFWSEAVNTACHAINRLYLHHLLKKTSYELLTGNKPNISNFRVFGSKCYILVKKGRHSKFAPKAVEGFLLGYDSNTKAYRVFNKSSGLVEVSSDVVFDETNGSPREQVDLDDIDEDDVPKAAMRMMAIGDVRPQEQQEQDQPSSSTMVHPPTQDGKQEELNNFKRNEVWSLVPRPKQNIVGTKWVFHNKQDEHGVVTRNKARLMAKCYAQVAGLDFEETFAPVARLESIQILLSYVAHHSFRLFQMDVKSAFLNGPIKEEVYVEQPPGFEDDRYPDYVFKLSKALYGLKQAPRAWYECLRDFLIVNAFKVGKADPTLFTKTCDGDLSVCQIYVDDIIFGSTNQKSCEEFSRVMTQKFEMSMMGELTYFLGFQVKQLKDDTFISQTKYTQDLLKRFGMKDAKPVKTPMGTDGHVDLNKGGKSVDQKAYRSMIGSLLYLCASRPDIMLSVCMCARCKSDPKECHLVAVKRILRYLVSTPCFGIWYPKGSTFDLIGYSDSDYAGFKVDRKSTSGTCQFLGKSLVSWSSKK

SEQ ID NO: 303623 - protein, 240 aa, Zea mays
  Clone ID: MRT4577_39978C.1.pep
MDPKGKGMVVNDNEKESIFNEPRDDKVIDSGSSQKKKDGKKKRRIRKVVYYDSDRSSSSQKDDEYEEKKKTNPGYIKMTPEEILGKFVSGRMMIKEARYVDDALNGPMPIYEPQTLALKATSSREALPSKVAQVEAVGLNEEEMALIIKCFKTTLKGCKEHPNKSKTKGKRSCFKCGKDQEKKREKKKTYKKAKGEAHLGKEWDSDCSSSDDEGLAASAFNKSSLFANEHHTCLMAKEKK

SEQ ID NO: 303624 - protein, 1156 aa, Zea mays
  unsure (1)..(1156): unsure at all Xaa locations
  Clone ID: MRT4577_39979C.1.pep
MMSHLLHQGMMTTMTLRRRKRRMELVEGELGRFXMIRGEEPTQTYNRLKTLVNKIRSYGSTRWTDHDAIRLMLRSFTVIDPHLLNLIRENPRYTKMTPEEILGKFMSGRMMGQEKYRKREKKTNYKKAKREAHLGKEWKSDCSSSDSDDEGLAASAFDKSSLFPNERHTCLMAKVEKINELIDALNEKDRLLEKQEDILYEEHDKFVSVQKSLALETKRNEILSSELCACHESISSLKNLNDELNAKLEEVSKTSSCVEHVSICNRCKDFDIDACDEHLISITKLNEEVASLNAQLKTCKIDFDKLKFARDAYTISRHPSIKDGLGFRKETKNLPSQRIPVLNKEKGKAPMASSPQRNHAFIYDREIASRSYYNKSYVHTAYNNSHDMFASSSTFVHGRSRPRRNLVVPHVYASRGSSWIIDSGCTNHMTGEKKMFTSYVKNKDSQDTIIFGDGNQGKVKGLGKIAITNEHSISNVFLVESLGYNLLSVKKIRSDNGFEFKNLQVEEFLEEEGIKHKFSAPYTPQQNGVVERKNRTLIDMARTMLGEYKTSERFWSEAVNTACHAINRLYLHRLLKKTSYELLTGNKPNVSYFRVFGSKCYILVKKGRHSKFAPKAVEGFLLGYDSNTKAYRVFNKSSGLVEVSSDVVFDETNGSPREQVDLDDIDEDEVPTATMRTMAIGDVQPQEPHEEDQPSSSTMVHPPTQDDVQVPQEEGQDQGGAQEDLMVEEEAPRAPPTQVRASIERHHPVDQILGDISKGVTTRSRLANFCEHYSFVSSIEPFRVEEALQDPDWVLAMQEELNNFRRNEVWSLMPHPKQNVVGTKWVFRNKQDEHGVVTRNKARLVAKGYAQVAGLDFEETFAPVARLESIRILLAYVAHHYFRLFQMDVKSAFLNGPIKEEVYMEQPPGFEDDRYPDHVYKLSKALYGLKQAPRAWYECLRNFLISNAFKSCEEFSRVMTQKFEMSMMGELTYFLGFQVKQLKDDTFISQTKYTQDLLKMFGMKDAKPAKTPMGTDGHVDLNKGGRSLVSWSSKKQTSVALSTAEAEYVAAGQCCAQLLWMRQTLWDFGYNLSKVPLLCDNENAIRLADNPVEHNRTKHIDIRHHFLRDYQLKGDIDVYHISTENQLADIFTKPLDEKRFCRLRSELNVLDSRNLD

SEQ ID NO: 303625 - protein, 94 aa, Zea mays
  unsure (1)..(94): unsure at all Xaa locations
  Clone ID: MRT4577_3997C.1.pep
LIFGYSQDGLTEHCLYLLIEMNGHIIPDATSLLGMLSXFRHAFIEADGPPCLKAMIEHGVVPEIDHYLRIVHHLGHTWLLDEACDLIQTIPMTS

SEQ ID NO: 303626 - protein, 1518 aa, Zea mays
  unsure (1)..(1518): unsure at all Xaa locations
  Clone ID: MRT4577_39980C.1.pep
MDPRGKGMVVNDKEKESFVNDPKDDKPTDSGSSHKRKDGKNKKTRRIKEIVYYDDSDESSSSQKDDDNYEKKKPVNSNFSFDYSRIPQNKNAHLLSIPLXLVEGELGRFAMIRGEEPTQTYNRLKTLVNKIRSYGSXALNGPIHEPQTVALKATRSKEVLPSKVAQVEAAGLNEEEMALIIKCFKTALRGRKEHPNKTKTKGKRSCFKCGKIGHFIANCPDNDSDQEQGNKREKKKAYKKTKGEAHLGKEWDSDCSSSDSDNEGLAATAFNKSALFPNEHHTCLMAREKXDRTKVDKXINELIDALNDKNRLLEKQEDLLYEEHDKFVEAQKSLALEIKRNEMLSCELSICHDSISSLKSINDDLNAKLEIANKSTSCVEHVAICNRCKDFNVDACSEHLVSISNLNDEVASLNAQLKTSKSEFDKLKFARDAYTIGRHPSIKDGLGFKREVKNLTSHKASISAKEKGKAPMASSVQKNHAFMYHDRRHSRNVDRSYDAFDSHAMIASSSSIMHDRNLARKNVVHHMPRRNAHVPRKTSNEPSTIYHALNASFAICRKDKKVVARKLGAKCKGDKTCIWVPKTICLCIRGSSWIIDSGCTNHMTGEKRMFSSYVKNKDPQDSIIFGDGNQGKVKGLGKIAISSEHSISNVFLVESLGYNLLSVSQLCNMGYNGLFTNVDVSVFRRSDGSLAFKGVLDDKLYLVDFAKEEAGLDACLIAKTSMGWLWHRRLAHVGMKNLHKLLKGEHVIGLTNVTFEKDRPCAACQADKQVGSSHHAKNVMTTSRPLELLHMDLFGPVAYLSIGGSKYGLVIVDDFSRFTWVFFLQDKSETQGTLKRFLRRAQNEFELKVKKIRSDNGSEFKNLQVEEYLEEERIKHEFSAPYTPQQNGVVERKNRTLLDMARTMLSEFKTPERFWTEAVSTACHAINRVYLHRLLKKTSYELLTGNKPNVSYFRVFGSKCYILVKKGRNSKFAPKAVEGFLLGYDSNTKVYRVFNKSSGLVEVSSDVVFDETNGSPREQVVDLDDVDEEDVPTAAMRTMAIGDPFRVEEALLDPNWVLAMQEELNNFKRNEVWTLVPRPKQNVVGTKWVFRNKQDEXHGVVTRNKARLVAKGCXQMDVKSAFLNGPVKEEVYVEQPPGFEDERYPDHVCKLSKALYGLKQAPRAWYECLRDFLIANAFKVGKADPTMFTKTCDGDLFVCQIYVDDIIFGSTNQKSCEEFSRVMTQKFEMSMMGELSYFLGFQVKQLKDGTFISQTKYTQDLIKRFGMKDAKPAKTPMGTDGHTDLNKGGKSVDQKAYRSMIGSLLYLCASRPDIMLSVCMCARFQSDPRECHLVAVKRILRYLVATPCFGIWYPKGSTFDLIGYSDSDYAGCKVDRKSTSGTCQFLGRSLVSWSSKKQTSIALSTAEAGYVAAGQCCAQLLWMRQTLRDFGYNLSKVPLLCDNESAIRMADNPVEHSRTKHIDIRHHFLRDHQQKGDIEVFHVSTENQLADIFTKPLDESTFCKLRSELNVLDSRNLD

SEQ ID NO: 303627 - protein, 1368 aa, Zea mays
  unsure (1)..(1368): unsure at all Xaa locations
  Clone ID: MRT4577_39981C.1.pep
MDPKGKGMVVNDKEKESFFNEPKMTSPLTRARVTRRKTDEYHKVSGLDNAKQIWDTLKISHEGNDVTMLTKMELVEGKLGRLKTLVNKIRSYGSTRWTDHDVVRLMLRSFTVLDPHLVNSIRENPRYTKMTPEEILRKFVSGRMMIKEARYVDDALNGPIHEPQTIALKATSSREALPSKVAQIEAAGLNEDEMTLIIKRFKTALKGRKEHPNKSKTKGKRSCFKCGKIGHFISNCPDNDSDQEQEKKREKKKAYKKAKGEAHLGKEWDSDCSSSDSDNEGLAASAFNKSSLFPNEHHTCLMAKEKKVSTRNAITYTSSSDDESSDDEVDYASLFKGLDRTKIDKINELIDALNEKNRLLEKQEDLLYEEHDKFTSKNEFDKLKFARDAYTIGRHPSIKDGLGFKRESKNLTSHKAPISTKEKGKAPMANSTQKNHAFMYHDRRYSRNVHYDKSYNDVVSPAMIASSSSIMHDRSLARKNVTHHMPRRNVHVYASGGSSWIIDNGCTNHMTGEKKMFTSYVKNKDSQDSIIFGDGNQGKVKGLGKIAISFEHSISNVFLVESLGYNLLSVSQLCNMGYNCLFTNIDVTVFRRSDGSLAFKGVLDDKLYLVDFAKEEVGLDACLIAKTSMGWLWHRRLAHVEMKNLHKLLKGEHVIGLTNVTFKKDRPCAACQAGKQVGSSHHTKNVMTTSRPLELLHMDLFGPVAYLSIGGSKYGLVIVDDFSRFTWVFFLQDKTETQGTLKRFLRRAQNEFELKVKKIRSDNGSEFKNLQVEEYLEEEGIKHEFSAPYTPQQNGVVERKNRTLIDMARTMLGEFKTHERFWSEAVNTACHAINRVYLHRLLKKTSYELLTGNKPNVSYFRVFGSKCYILVKKGRNSKFAPEAVEGFLLGYDSNTKAYRVFNKSSGLVEVSSDVVFDKTNGSPREQVVDLDDVDEEDVPTAAIRTMAIGDVRLQEQKEQDQPSSSTMVHPXTQDNEQVHQEEACDQWGAQDDHXLFQMDVKSAFLNGPIKEEVYVEQPPGFEDERYPDHVGKADPTLFTKTCDGDLFVCQIYVDDIIFGSTNQKSCEEFSRVMTQKFEMSMMGELNYFLGFQVKQLKDGTFISQTKYTQDLIKRFGMKDAKPAKTPMGTDGHVDLNKGGKSVDQKAYRSMIGSLLYLCASRPDIMLSVCMCARFQSDPRECHLVAVKRILRYLVATPCFGIWYPKGSTFDLIGYSDSDYAGCKVDRKSTSGTCQFLGRSLVSWSSKKQTSVALSTAEAEYVATGQCCAQLLWMRQTLRDFGYNLSKVPLLCDNESAIRMADNPVEHSRTKHIDIQHHFLRDHQQKGDIEVFYVSTENQLADIFTKPLDEKTFCRLCSELNVLDSRNLD

SEQ ID NO: 303628 - protein, 91 aa, Zea mays
  Clone ID: MRT4577_39982C.1.pep
WVTPAIHPSSCPASGGGLLFALQRMAVCESSFLKKPFFAMQCNAIEWWLFFFLFFFFFLKKGGERDKYLLLRKQCQWLVRCNAWRRVKMFF

SEQ ID NO: 303629 - protein, 439 aa, Zea mays
  unsure (1)..(439): unsure at all Xaa locations
  Clone ID: MRT4577_39983C.1.pep
MDSRARLRPRGSDHASNAEKGNKREKKKHYKKAKGEAHLGKEWDSDCSSSDSDNEGLTATAFNKSTLFPNERHTCLMAREKKVYASGGSSWIIDSGFTNHMTGEKKMFTSYVKNKDSQDSIIFGDGNQGKEKSETQGTLKRFLRRAQNEFELKVKKIRSDNGSEFKNLQVEEFLEEEGIKHEFSAPYTPQQNGVVERKNRTLIDMARTMLGEFKTPECFWTEAVNTACHAINRVYLHRLLKKTSYELLTGNKPNXEEDVPTAAIRTMAIGEVRPQEQGERDQSSSSTMVQPPTQDDEXRLFQMDVKSAFLNGPIKEEVYVEQPPGFEDERYPDHSCEEFSRVMTQKFEMSMMGELNYFLGFQVKQLKDGTFISQTKYTQDLLKRFGMKDAKPAKTPMGTDGHTDLNKGGSFCILLLIMVLKLYKHSLDLTSPLQSDAHV

SEQ ID NO: 303630 - protein, 938 aa, Zea mays
  Clone ID: MRT4577_39984C.1.pep
MDPKGKGIVINDKEKESFVNEPKDDKPTDSGSGHRRKEGKKKKTRRIKEIVYYDDSDESTSSQKDDDHNDYERRKPVNSNFSFDYSRIPQSSNSHLLSIPLGKPPHFDGEDYGFWSHKMRSHLFSLHPTSLCRDEYHKVSGLDNAKQIWDTLKMELVEGELGRFAMIRGEEPTQTYNRLKTLINKIRSYGSTRWTDHDVVRLMLRSFTVLDPHLVNNIRENPRYTKMSPEEVLGKFVSGRMMIKEARYVDDALNGPINEPQPLALKATRSKEALPSKDQGNKREKKNYKKAKGEAHLGKEWDSDCSSSDSDNEGLAATAFNKSSLFPNERHTCLMAREKKGLDRTKVDKINELIDALNDKNRLLEKQEDLLYEEHDKFLEAQKSQALEVKRNEILSCELSSCHETISSLRSFNDDLNAKLEIASKSTTCVENVVICNRCKEFDIDACSEHIASIAKLNDEMASLNAQLKASKSDFDKLKFARDAYTIGRHPSIKDGLSFKREAKNLTSHKAPISAKEKGKAPMASSTKKNHAFMYNDRRQSHRSCNAFDSHAYDSYAMYASSSSYMHCRDMPRKNIHHVPRKNFVHAPRKVMNGPSTIYHALNASFAICRKDRKIFARKLGAKCKGDKTCIWVPKEIVTNLVGPNKSWVYASGGSSWIIDSGCTNHMTGKKKMFTSYVKNKDSQDSIIFGDGNQGKVKGLSKIAISNEHSISNVFLVESLGYNLLSVSQLCNMGYNCLFTNVDVSVFRRSDGSLAFKGVLDGKLYLVDFAKEEAGLDACLMAKTCMGWLWHRRLAHVGMKNLHKLLKGEHVIGLTNVHFEKDRPCAACQAGKQVGGAHHSKNVMTTSRPLELLHMDLFGPVTYLSIGGSKYGLVIVDDFSRFTWVFFLQDKSETQGTLKRFLRRAQNEFELKVKKIRSDNGSEFKNLQVLIMGKRGSF

SEQ ID NO: 303631 - protein, 668 aa, Zea mays
  unsure (1)..(668): unsure at all Xaa locations
  Clone ID: MRT4577_39985C.1.pep
MTREKKMFTSYIKNKDXQDTIIFGDGNQGKVRGLGKIAITNEHSISNVFLVESLGYNLLSVSQLCHMGYNCLFTNVDVSVFRRSDGSLAFKGVLDDKLYLVDFLKEEAVLDACLIAKTGLGWLWHHRLSHVGMKNLHKLLKGEHVLGLTNICFEKDRPCAACQAGKQVGRTHHSKNVMTTSRPLELLHMDLFGPVAYLSIGGSKYGLVIIDDFFRFTWVFFLQDKSETQGTLKRFLRRAQNEFELKVKKIRSDNGSEFKNLQVEEYLEEEGVKHEFSAPYTPQQNGVVERKNMMLIDMERTMLGEFKTLERFWSEAVNTACHAINRPYLHRLLKKTSYELLTGNKPNVSYFHVFGSKCYILVKKGRHSKFAPKAVEGFLLGYDSNTKAYRVFNKSSGLVEVSSDVVFDETNGSPREQVDLDDIDEDDVPTAAMHTMAIGDVRPQEQQEQDQPSSSTMVQPPTQDGEQPGATSKAKCCGNQVGVPQQARRARVVTRNKARLVAKGYAQVAGLDFEETFAPVARIESIRILLAYAAHHSFRLFQMDVKSAFLNGPIKEEVYVEQPPGFEDDRYPDHVFKLSKALYGLKQAPRAWYECLRDFLIANAFKVGKADPTLFIKTCDGDLFVCQIYVDDIIFGSTNQKSCEEFSRVMTQKFKMSMMGKLTYFLGF

SEQ ID NO: 303632 - protein, 661 aa, Zea mays
  unsure (1)..(661): unsure at all Xaa locations
  Clone ID: MRT4577_39986C.1.pep
MVVNDKEKESFLNEPRDDKPTDSGSSHKKRDGKKKRRIKKIIYYDSDASSSSPHDDDDDSSSKKKPVNQNYSFDYSRIPYNSNAHLLSIPLGKPPHFDGEDYSFWSHKMRSHLFSLHPSIWEIVENGMHFDSINNAMFINEQIHKNAQATAVLLASLCRDEYNKVSGLDNAKQIWDTLKISHEGNDTTMITKMELVEGELGRFAMVRGEEPIQTYNRLKTLVNKIRSYGSTRWTDHDVVRLMLRSFTVIDPHLVNLIRENPRYTKMTPEEILGKFVSGRMMVKEARYVDDALNGPLSVYEPQPVALKATSSKEALPSKVAQVEAAGLNEDEMALIIKRFKTTFKERKEYPNKNKTRGKRSCFKCGKNGHFIAQCPDNENDQGQERHGMKEKKKSYRKAKGEAHLGKECDSDCSLSDSDDEGLAALAFDKSSFFPNERHTFLMAKEKKRKEMLSSELSVCHESVSSLKSLNDELNAKLEEVNKSSSCVEHVVICNRCKDFDVNSCDEHLISIAKLNDEVASLNAQLKTCKIDFDKLKFARDAYTIGRHPSIKDGLGFRKKAKNLTSXKAPIPNKEKGKAPMASSTQRNHAFIYNRKIASHSNYNRSYDHDAFDSHAMFASSSTFVHGLCIRGFKLDYRQRMHKPYDRGEEDVHLLRQEQGFL

SEQ ID NO: 303633 - protein, 188 aa, Zea mays
  Clone ID: MRT4577_39987C.1.pep
MALIIKRFKMALRGRKEHPNKTKTKGKRSCFKCGLAATAFNKSALFPNEHHTCLMAREKKDKSETQGTLKRFLRRAQNEFELKVKKIRSDNGLFQMDVKSAFLNGPIKEEVYVEQPPGFEDEWYPDHVLKQLKDGTFISQTKYTQDLIKRFGMKDAKPAKTPMGTDGHTDLNKGVVQALPGPHKSIYK

SEQ ID NO: 303634 - protein, 48 aa, Zea mays
  Clone ID: MRT4577_39988C.1.pep
LAAVPAVVPASSVPVLWPRGFRARALAWVVISVLFSAHRSSGPCPRVL

SEQ ID NO: 303635 - protein, 37 aa, Zea mays
  Clone ID: MRT4577_39989C.1.pep
KIKLCSKVNLPDNRQFIGPFSKPYFLKKKKKKKKTQP

SEQ ID NO: 303636 - protein, 98 aa, Zea mays
  Clone ID: MRT4577_3998C.1.pep
LRRCLGNIPRDGHNNRGKSPGVSLGVFFLAATLAYPPAFFYQLEDGHEISLLRLVKVILPYVPPMEGNMLGIFSGTCASMIGISNAPIKKTKEKKKKK

SEQ ID NO: 303637 - protein, 282 aa, Zea mays
  unsure (1)..(282): unsure at all Xaa locations
  Clone ID: MRT4577_39990C.1.pep
MAGYGEENQNAMNGYEEEEEEEEVEEVEEVYEEEEEGDGEGEGDEGAAAEAAAMAAETRSVDGGRGLAEAVGNVDAGGEDERDADSSGGDASGKVFVGGVAWETTEETFTKHFQKYGAITDSVIMKDKHTRMPRGFGFVTFSDPSVLDRVLEDEHVIDGRTVEVKRTVPKELSSKDGPKTKKIFVGGIPPSLTEDKLKEHFSSYGKVVEHQIMLDHSTGRSRGFGFVTFESEDAVERVMSEGRMHDLGGXQVEIKKAEPKKPGAGDSSSNGRHRPRGGHRDS

SEQ ID NO: 303638 - protein, 349 aa, Zea mays
  Clone ID: MRT4577_39991C.1.pep
MAAETRSVVGGRGLAKAVGNVDTGGEDGRDADSSGGDASGKIFVGGVAWETTEETFTKHFQKYGAITDSVIMKDKHTRMPRGFGFVTFSDPSVLDRVLEDEHVIDGRTVEVKRTVPKEEMSSKDGPKTKKIFVGGIPPSLTEDKLKEHFSSYGKVVEHQIMLDHSTGRSRGFGFVTFESEDAVERVMSEGRMHDLGGKQVEIKKAEPKKPGAGDSSSNGRHSRGGGHRDSYRGSGVSVNSGGGYGYGGGYRSAAAAYYGSTAYGAYGRGYGYGATSGYGSGYGSAYGGSMYGGPYGAYGSYGGAYGGGAYGAPGGYGGGGYGSYGGAGGMGGGGSAGGRGSSRYHPYGK

SEQ ID NO: 303639 - protein, 353 aa, Zea mays
  Clone ID: MRT4577_39992C.1.pep
MAAETRSVVGGRGLAKAVGNVDTGGEDGRDADSSGGDASGKIFVGGVAWETTEETFTKHFQKYGAITDSVIMKDKHTRMPRGFGFVTFSDPSVLDRVLEDEHVIDGRTVEVKRTVPKEEMSSKDGPKTKKIFVGGIPPSLTEDKLKEHFSSYGKVVEHQIMLDHSTGRSRGFGFVTFESEDAVERVMSEGRMHDLGGKQVEIKKAEPKKPGVGDSSSNGRHSRGGGHRDSYRGSGGNGFSGNSSGGGYGYSGGYRSTAAAHYGSTAYGAYGRGYGYGGTAGYGLGYGSAYGGSMYGGPYGAYAAYGGAYGGGAYGAPGGYGAGGYGSYGGAGGMGGGGSAGGRGSSRYHPYGK

SEQ ID NO: 303640 - protein, 65 aa, Zea mays
  Clone ID: MRT4577_39993C.1.pep
ASVLVLECLINMDDDLCFTVLRNTVIKGSHGRGDCSHGSMQHETHDRHDVSWKECFTAYSRCPDR

SEQ ID NO: 303641 - protein, 52 aa, Zea mays
  Clone ID: MRT4577_39994C.1.pep
THPNKPKLFNSPISHSPSLFPINSLHITTYHYQLSNLLSLIFIFINHTFNIT

SEQ ID NO: 303642 - protein, 66 aa, Zea mays
  unsure (1)..(66): unsure at all Xaa locations
  Clone ID: MRT4577_39995C.1.pep
PPQLXIFQNSPLNNLQPKXFFFFFFFFLFFFFFFFFFFFKFFFFFKSSLCNCNITIMLFMLQLQIP

SEQ ID NO: 303643 - protein, 106 aa, Zea mays
  Clone ID: MRT4577_39996C.1.pep
GTKPRKILRALLRTKKILPPPGVWPPKKKKGGWGPPPKLCLNLCPEFYPWLPKNPSVFKTPFPRGKLEIWKKKKKGGGKKKFKTPRALNRGQFFFFKKNREFFLFP

SEQ ID NO: 303644 - protein, 82 aa, Zea mays
  unsure (1)..(82): unsure at all Xaa locations
  Clone ID: MRT4577_39997C.1.pep
NTLKASYIHLFNPTNDPTINPYVTHILKTKENYFTLGSFHALDPSTLLNTRFNNSXECRTLLXQHEXRPKSLVTLSVEYDPN

SEQ ID NO: 303645 - protein, 85 aa, Zea mays
  Clone ID: MRT4577_39998C.1.pep
TSPVGFPGAVPRIILWSDVCAPSCCRIYFKTFFFFSKDGVVCIRFGTFSFVCWCPLSSPFLSLIKGPLFYHAACAPHLTNKSHTP

SEQ ID NO: 303646 - protein, 123 aa, Zea mays
  Clone ID: MRT4577_39999C.1.pep
MGKNNKRKRESTPPSEDFGDSEYSEEEFSSESEGSPAPVSPPASSDDSDDSQGIAAEDSDGGDEDEDDDDDDDNDDDDGSGSGRGGGDGSGGSTKGDSSKGSTKGGSSRGSTKGGGGRGRASG

SEQ ID NO: 303647 - protein, 93 aa, Zea mays
  unsure (1)..(93): unsure at all Xaa locations
  Clone ID: MRT4577_3999C.1.pep
FIIVFCYQGFTEIXMSKLGGGEAFTXEREREIEQVVESVNELAHIFXDLSVLVIDQGTIIDRIDYNIQNVAASVEEGVGQLQKAERSXKKGAL

SEQ ID NO: 303648 - protein, 626 aa, Zea mays
  unsure (1)..(626): unsure at all Xaa locations
  Clone ID: MRT4577_399C.1.pep
GYFQRCLXCKSVGSECHCSSVKTVIDVCLGDIRRVVMFLQFWYQGHQFTGRPKECLCGPFSLDLDAVHSTVPKMLPWEFPCKLSETLCMEVDKTILLAEEKKKQMEISDLEGLQLHVTAPLIKPTRPNTRRAKKSKLKRAHLTEHNDISPCKNELDDFHDLPDISLPSDKQIKRNRHRSLLLSESDDDPADVGTEXITYLLLLKLVSSHNLQRCLLCMGKGFLISXFPVESRETCEIADSFQNPPESNMYGSISQVCDTFMSQDVSCVPESSLILDGTSASISGDEFLSRAVSNGFSAFCEGTYTTSRMVLEDTGCVKNLMAERQKDVEDVVGETSETYMESFRRNEQASCSAAGFQLMDECSRAESIWLLSGKKPNDSCKVELVQDTWNRLRSCRLEFTSEANHNRATSGALKLVSEVSDLISESDLMLFRCYPLTKDTLDPSLTPCDEPVDSSWYSNQVEMGSVYAQHALHILSRNSQKIDGGSVDLSQELFASTDAGFRNDYGSTDISHMKNPTTCIFKRRERHVHLCETLSPVVPPKLLQSLRGPAFVDYLSSISQISKLENLRLSENKVINKRRRSRQARHYLSSGALQLSHEDVVLLAESGCFSSRRERVEVVEQAPVST

SEQ ID NO: 303649 - protein, 140 aa, Zea mays
  Clone ID: MRT4577_39C.1.pep
AIGANCPNHLLFFDWPPQAGQGQAEAPIHSYPQTQTRRVTLYLRTKVSVRAAEKYSCRVLCKSDNFSSTSIHHTHARPLHLKLPGGFPGWRHELYSSLTPTVAATGTGSCGYCGYALNLSSSARDTEGIWPKFRKQIRKG

SEQ ID NO: 303650 - protein, 41 aa, Zea mays
  Clone ID: MRT4577_3C.1.pep
DPLRCSKSCATGLIHNQMQHSALCQVLIKRTRGRTSGRMRG

SEQ ID NO: 303651 - protein, 108 aa, Zea mays
  Clone ID: MRT4577_40000C.1.pep
STSPAPRRARPDSATPRRGHPDGALTSKDPARPQAEEHPRTDGAEREETLLRLVRRAVVEDAALPPPPPPPRECKLESKPDAAQDGMPIAPLGVKNGHGLWATTTAAG

SEQ ID NO: 303652 - protein, 78 aa, Zea mays
  Clone ID: MRT4577_40001C.1.pep
PPRKNSPGGRGIKWGAPPFFFFFFFFFFFFFFFSYLILMVCSSLGRSRKKNKECATIFYIYIELQKCILHLTWLDTFN

SEQ ID NO: 303653 - protein, 247 aa, Zea mays
  unsure (1)..(247): unsure at all Xaa locations
  Clone ID: MRT4577_40002C.1.pep
MADSEDIQPLVCDNGTGMVKAGFAGDDAPRAVFPSIVGRPRHTGVMVGMGQKDAYVGDEAQSKRGILTLKYPIEHGIXVPAMYVAIQAVLSLYASGRTTGIVLDSGDGVSHTVPIYEGYALPHAILRLDLAGRDLTDSLMKILTERGYSFTTTAEREIVRDIKEKLAYVALDYEQELETAKSSSSVEKSYELPDGQVITIGAERFRCPEVLFQPSFIGMEAPGIHETTYXSIMKCDVDIRKDLYGNI

SEQ ID NO: 303654 - protein, 33 aa, Zea mays
  Clone ID: MRT4577_40003C.1.pep
WSSSGTSGTIVYYDDPDVVEFTDISTFLCLLIT

SEQ ID NO: 303655 - protein, 60 aa, Zea mays
  Clone ID: MRT4577_40004C.1.pep
SYYRTMGNLYKQLAYLPCILTAPYHAPEILMYCHLSNMYLREPLSCLDVLFKTISCFMVL

SEQ ID NO: 303656 - protein, 124 aa, Zea mays
  unsure (1)..(124): unsure at all Xaa locations
  Clone ID: MRT4577_40005C.1.pep
MADSEDIQPLVCDNGTGMVKAGFAGDDAPRAVFPSIVGRPRHTGVMVGMGQKDAYVGDEAQSKRGILTLKYPIEHGIVSNWDDMEKIWHHTFYNELRVAPEEHPGLFTEAPLNPXANREKMTQI

SEQ ID NO: 303657 - protein, 377 aa, Zea mays
  Clone ID: MRT4577_40006C.1.pep
MADAEDIQPLVCDNGTGMVKAGFAGDDAPRAVFPSIVGRPRHTGVMVGMGQKDAYVGDEAQSKRGILTLKYPIEHGIVSNWDDMEKIWHHTFYNELRVAPEEHPVLLTEAPLNPKANREKMTQIMFETFSVPAMYVAIQAVLSLYASGRTTGIVLDSGDGVSHTVPIYEGYALPHAILRLDLAGRDLTDSLMKILTERGYSFTTTAEREIVRDIKEKLAYVALDYEQELETAKSSSSVEKSYELPDGQVITIGAERFRCPEVLFQPSMIGMEAPGIHETTYNSIMKCDVDIRKDLYGNIVLSGGSTMFPGIADRMSKEITALAPSSMKIKVVAPPERKYSVWIGGSILASLSTFQQMWISRAEYEESGPAIVHRKCF

SEQ ID NO: 303658 - protein, 131 aa, Zea mays
  unsure (1)..(131): unsure at all Xaa locations
  Clone ID: MRT4577_40007C.1.pep
FRAPPTSSRASAVRTCRGADHQWDGNLFATVGAQVDIWDPDRSEPVNSFEWGKHTVLSVLFDPGDCNILIKSXDRSLTLYDDLPMSSPARKLIMKTXRCNSVCWNPREPMNFTAVRFIYGILTGKECATCM

SEQ ID NO: 303659 - protein, 406 aa, Zea mays
  unsure (1)..(406): unsure at all Xaa locations
  Clone ID: MRT4577_40008C.1.pep
MADSEDIQPLVCDNGTGMVKAGFAGDDAPRAVFPSIVGRPRHTGVMVGMGQKDAYVGDEAQSKRGILTLKYPIEHGIVSNWDDMEKIWHHTFYNELRVAPEEHPVLLTEAPLNPKANREKMTQIMFETFSVPAMYVAIQAVLSLYASGRTTGIVLDSGDGVSHTVPIYEGYALPHAILRLDLAGRDLTDSLMKILTERGYSFTTTAEREIVRDIKEKLAYVALDYEQELETAKSSSSVEKSYELPDGQVITIGAERFRCPEVLFQPSFIGMEAPGIHETTYNSIMKCDVDIRKDLYGNIVLSGGSTMFPGIADRMSKEITALAPSSMKIKVVAPPERKYSVWIGGSILASLSTFQQXHQVFRRLFCIYYLSLFCEVLTXFLFSLXMWISRAEYEESGPAIVHRKCF

SEQ ID NO: 303660 - protein, 131 aa, Zea mays
  unsure (1)..(131): unsure at all Xaa locations
  Clone ID: MRT4577_40009C.1.pep
SSVGVDIFSQNLVEDDETASHDCXYTDXTEMYHQLDRXHYNGCSQPLLLAYDITNADSILPADESLVDLIDQGNANTIVXLADXRSAMLDAKHLRAEDAKTHAHYQASLSSXTSANTAISVYDICYETAIR

SEQ ID NO: 303661 - protein, 46 aa, Zea mays
  Clone ID: MRT4577_4000C.1.pep
ANLNKHPFSPLLNISLLLQLPIMHSQTPYLLIHSKPMSVYCKTHSN

SEQ ID NO: 303662 - protein, 54 aa, Zea mays
  Clone ID: MRT4577_40010C.1.pep
LLHIILKTAELGEKDHTFSQAIRSVACALPFTLQRTEVVILISKTKYLRIVTCR

SEQ ID NO: 303663 - protein, 520 aa, Zea mays
  Clone ID: MRT4577_40011C.1.pep
VYASGGSSWIIDNGCTNHMTGEKKMFTSYVKYKDSQDLIIFGDGNQGKIDLVQLVKQDKSETQGTLKRFLRRAQNEFELKVKKIRSDNGSEFKNLQVEEYIEEEGIKHEFSAPYTPQQNSVVERKNRTLIDMARTMLGEFKMPERFWSEAVNTACHAINRVYLHRLLKKTSYELLTEQVDLDDVDEDDVPTTAIRTMAIGDVRPQEQQEQDKPSSSTMVHPPTQDDEQVPQEEVYDQGGAQEDQVVEEEAPRAPPTQVRATIQRNHPVDQILGDISKGVTTRSRLANFCEHCSFVSSIEPFRVEEALQDPDWVLAMQEELNNFKKNEVWSLVPCPKQNVVGTKWVFRNKQDEPGVVTRNKETFAPVARLESIRILLAYAAHHSFRLFQMDVKSAFLNGSIKEEVYVEQPPGFEDERYPDHVCKLSKALYGLKQAPRAWYECLRDFLIANAFKKFEMSMMGELNYFLGFQVKQLKDDTFISQMKYTQDLLKRFGMKDAKPAKTPMGTDRHVDLNKGVSKVN

SEQ ID NO: 303664 - protein, 82 aa, Zea mays
  unsure (1)..(82): unsure at all Xaa locations
  Clone ID: MRT4577_40012C.1.pep
RSPCARCRCCLARRLCGCXGCCGLPWSWSSXCSWXCCPLWCAPLVCVRWLLWVLXXSCFASXVLLGRCCPSPWVPDGIGCAR

SEQ ID NO: 303665 - protein, 369 aa, Zea mays
  Clone ID: MRT4577_40013C.1.pep
MDPKGKGIVINDKEKESFVNEPKDDKPTDSGSGNRRKEGKKKKTRRIKEIVYYDDNDESTSSQKDDDHNDYERGKPEARYVDDALNGPINEPQPLALKATRSKEALPSKVAQFEAAGLNDEEMALIIKRFKTALKGHKGQPSKTKTKGKRSCFKCGKLGHFIANCPDNDSDQEKGNKREKKKNYKKAKGEAHIGKEWDSDCSSSDSDNEGLAATAFNKSSLFPNEHHTCLMAKEKKGRRRCSPPTSKMRIPMIQLYSVMGTKARISLKPKGPSNASSGELKMKVKKIRSDNRSEFKNLQVEEFLEEEGIKHEFSAPYTPQQNGVVERKNRTLIDMARTMLGEFKTPECFWSEAVNTACHAINRVVGDHN

SEQ ID NO: 303666 - protein, 390 aa, Zea mays
  Clone ID: MRT4577_40014C.1.pep
MDPKGKGMVINDKEKESFVNEPNDDRPTDSGSGHKRKDGRKKKTRRIKEIVYYDSDESSSSQKDDYDYDRRKTVNSNFSFDYSRIPHSSNAQLLPIPLGKPPHFDGEDYGFWSHKMRTHLFSLHPSIWEIVESGMKFDSSDSPVFINEQIHKNAQATTVLLASLCRDEYHKVSGLDNAKQIWDTLKISHEGNDVTLLTKMELVEGELGRFAMIRGEEPTQTYNRLKTLINKIRSYGSTRWTDHDVVRLMLRSFTVLDPHLVNNIRENPRYTKMSPEEVLGKFVSGRMMIKEARYVDDALNGPIHEPQPIALKATRSKEALPSKVAQVEAVGLNDEEMALIIKRFKTALKGRKGQPSKTKAKGKRSCFKCAKNICANLAGPNMSWVPKTQA

SEQ ID NO: 303667 - protein, 88 aa, Zea mays
  unsure (1)..(88): unsure at all Xaa locations
  Clone ID: MRT4577_40015C.1.pep
RVQISQSSCSTPLSSSNSAAMSGRGMGGKGLGKGGAKRHRXGLRDNIQGITKPAFLRLARWGGVKRIFGLIYXETRGVLKIFLENVIL

SEQ ID NO: 303668 - protein, 1644 aa, Zea mays
  Clone ID: MRT4577_40016C.1.pep
MDPKGKGIVINDKEKESFINEPKDDKPTDSGHKSKDGKKKKTRHIKEIVYYDDSDESTSSQKDNDDNDYERRKPVNSNFSFDYSRIPQSTNAHLLSIPLGKPPHFDGEDYEFWSHKMRSHLFSLHPSIWEIVESGMKFDSSDSPMFINEQIHRNAQATTVLLASLCRDEYHKEARYVNDALNGPIHEPQPIALKATRSKEALPSKVAQVEAAGLNDEEMALIIKRFKTALKGRKGQPSKTKTKGKHSCFKCGKVGHFIANCPDNDSDQEEGNKREKKKNYKKAKGEAHLGKEWDSDCSSSDSDNEGLAATAFNKSSLFPNKHHTCLMAREKKGLDRTKVDKINELIDALNDKNRLLEKQEDLLYDEHDKFVEAQKSLALEIKRNEMLSCELSTCHDSISSLKSINDDLNAKLEIANKSTSCVEYVVVCTRCKDFNVDACSEHLVSISKLNDEVASLNAQLKTSKSEFDKLKFARDAYTIGRHPSIKDGLGFKREAKNLTSHKAPIPAKEKGKAPMASSAKKNHAFMYHDRRHARNANRSYDAFDSHVYDSYAMFASSSSYMHGRNVARRNTINHMPRRNGVNVPRKINEPSTIYHACNASFAICRKDRKVYASGGSSWIIDSGCTNHMTGEKKMFTSYVKNKDSQDSIIFGDGNQGKVKGLGKIAIPSEHSISNVFLVESLGYNLLSVSQLCKMGYNCLFTNVDVSAFRRSDGSLAFKGILDGKLYLVDFAKEEAGLDACLIAKTSMGWLWHRRLAHVGMKNLHKLLKGEHVIGLTNVQFEKDRPCAAYQAGKQVGGAHHTKNVMTTSRPLEMLHMDLFGPVAYLSIGGSKYGLVIVDDFSRFTWVFFLQDKSETQGTLKRFLRRAQNEFELKVKKIRSDNGSEFKNLQVEEFLEEEGMKHEFSAPYTPQQNGVVERKNRTLIDMARTMLGEFKTPECFWSEAVNTACHAINRVYLHRLLKKTSYELLTGNKPNVSYFRVFGSKCYILVKKGRNSKFAPKAVEGFLLGYDSNTKAYRVFNKSSGLVEISSDVVFDETNGSPREQVVDFDDVDEEEVPTAAIRTMAIGDVRPQEQDERDQPSSSTMVHPPTQDDEQEAYDQGGAQDDHVMEEEAQPTPPTQVRAMIQRDNPVDQILGDINKGVTTRSRLVNFCEHYSFVSSIEPFRVEEALLDPDWVLAMQEELNNFKRNEVWTLVPRPKQNVVGTKWVFRNKQDEHGVVTRNKARLMAKGYAQVAGLDFEETFAPSAFLNGPIKEEVYVEQPPGFEDERYPDHVCKLSKVLYGLKQAPRAWYECLRDFLIANAFKVGKADPTLFTKTCDGDLFVCQIYVDDIIFGSTNQKSCEEFSRVMTQKFEMSMMGELSYFLGFQVRQLKDGTFISQTKYTQDLIKRFGMKDAKPAKTPMGTDGHTDLNKGGKSVDQKAYRPMIGSLLYLCASRPNIMLSVCMCARFQSDPRECHLVAMKRILRYLVATPCFGIWYPKGSTFDLIGYSDSDYAGCKVDRKSTSGTCQFLGRSLVSWSSKKQTSVALSTAEAEYVAAGQCCAQLLWMRQTFRDFGYNLSKVPLLCDNESAIRMVDNPVEHSRTKHIDIRHHFLRDHQQKGDIEVFHVSSENQLVDIFTKPLDEQTFCKLRSELNVLDSRNLD

SEQ ID NO: 303669 - protein, 75 aa, Zea mays
  Clone ID: MRT4577_40017C.1.pep
YLGSTAFLSAAARPKTGGDFLKGSSGSPRLIILVQGSDNLPHKKNLEFTTCTISTRRTGHHGTGAIYATQSALFE

SEQ ID NO: 303670 - protein, 71 aa, Zea mays
  unsure (1)..(71): unsure at all Xaa locations
  Clone ID: MRT4577_40018C.1.pep
FVLQRNSSFLGRPKLNXRAAVFHRLAWKTPGVPQLIRLADHPPLAGWRITKKARTVRPSKQLPILNGNWDP

SEQ ID NO: 303671 - protein, 1506 aa, Zea mays
  unsure (1)..(1506): unsure at all Xaa locations
  Clone ID: MRT4577_40019C.1.pep
MDPKGKGMMVNDKEKESFVIDPKDDKPTDSGTSHKRKDGKKKKTRRIKEIVYYDDSDESSSSQKNDDNDYEKKKMVNSNFSFDYSRIPQSSNTHLFSIPLVYGRVENGMHFDSTDSPMFINEQIHKNAQATTVLLASLCREEYNKVSGLDNAKQIWDTLKISHEGNDVTMLTKMELVEGEHGRFAMIRGEEPTQTYNRLKTLINKIRSYGSTRWTDHDVVRLLLRSFTVLDPHLVNNICENPRYTKMSPEEVLGKLVSGRMMIKEARYVDDALNGPIHEPQTMALKATRSKEALPSKVAQVEAVGLNEEEMSLIIKRFKTALKGRKEHPNKNKTKGKCSCFKCGKIGHFIANCPDNNSDQEQDKKREKKKAYKKAKGEAHLGKEWDSDCSSSDSDNEGLAASAFNKSSLFPNERHTCLMAKEKKVCTRNNTIYASSSDDESSDDDEIDYSSLFKGLDRNKIDKINELIDALNDKNRLLEKQEDILYEEHDKFVEAQKSLALEVKRNEMLSCELYTCHESISNLKSINDDLNAKLEVANRSNSCVEHVVICNRCKDFNVDACSEHLVSITKLNGEVASLNAQLKTSKDEFDKLKFARDAYTIGRHSSIKDGLGFKREAKNLTSHKAPIPAKEKGKAPMTNSCQKNHAFMYHDRKFSKNVHYDRSCNAYNSNAMIASSSSIMHNRNLTRKNVMPRRNVVHVPRKVNNEPSTIYHACNAAFAICRKDRKLIARKLGAKCKGDKTCIWVPKDIVTNLVGPNKSWVYASGGSSWIIDSGCTNHMTGEKKMFTSYVKNKDSQDSIIFDVSVFRRSDGSLAFKGVLDGKLYLVDFAKEEVDLVQLVKQDKSETQGTLKRFLRRAQNEFELKQNGVVERKNRTLIDMARTMLGEFKTPERFWSEAVNTACHAINRVYLHRLLKKTSYELLTGNKPNVSYFRVFGSKCYILVKKGRNSKFAPKAVEGFLLGYDSNTKAYRVFNKSSGLVEVSSDVVFDETNGSPREQVVDLDDVEEEEVPTAIIRTMAIGEVRPREQKEQDQPSSSTMVHPPTQDDEQPFRVEEALLDPDWVLAMQEELNNFKRNEVWTLVPRPKQNVVGTKWVFCNKQDEHGVVTRNKARLVAKGYAQVAGLDFEETFAPVARLESIRILLAYVTHHSFRLFQMDVKSAFLNGPIKEEVYVEQPPGFEDERYPDHVGKADPTLFTKTCDGDLFVCQIYVDDIIFGSTNQKSCEEFSRXVMTQKFEMSMMGELNYFLGFQVKQLKEXTFISQTKYTQDLLKWFGMKDAKPAKTPMGTDGHVNLNKRSRPDIMLSVCMCARFQSDPRECHLVAVKRILRYLVATRCFGIWYPKESTFDLIGYSDFDYAGCKVDRKSTSGTCQFLGRSLVSWSSKKQTSVALSTAEAEYVAAGQCCAQLLWMRQTLRDFGYNLSKVPLLCDNESAIRMADNPVEHSRTKHIDIRHHFLRDHKQKGDIEVFYVSTENQLADIFTKPLDESTFCRLRSELNVLDSRNLD

SEQ ID NO: 303672 - protein, 421 aa, Zea mays
  unsure (1)..(421): unsure at all Xaa locations
  Clone ID: MRT4577_4001C.1.pep
CYPTTWPPSAGRFRDDIARSVMKPMIDFLERTGSYLTVNAYPFFAYAEEPDKISLDYALGNSNATGVRDPVTGLVYHSLLDAQLDATYFAMEKLGTSRSSARGPKSVAPAAHVSESGWPSGGKPKRGGRPRPRPRGGGRRLELEQAGGEAASVANAQAYNNYLIKRVLSGDTGTPYHPDADMDVYIFSLFNENQKXTGRTXEQHFGLFYPNRTKVYEFDFRGGALVASWCVANASAGDARLQAALEYACGHGADCGAIQPGAPCFEPDTRLAHASYAFNSYYQRNGRAKAACDFDGAAYVVYHEPAGTCDPNVSWCVANAAAGDARLLAALNYACANGADCGAIQPGGACFEPNTVVAHASYAFNSYYQRKGRGSGTCDFAGAGSVVYHAPKIIGKCVLPSKAWIQETTTVKSRGFKTSSV

SEQ ID NO: 303673 - protein, 358 aa, Zea mays
  Clone ID: MRT4577_40020C.1.pep
MPPLSPPASLTPAAGGRRRWKCRLSPTIARDRCYTRSFRSAGLRPAAIPLPDGAVVHLWLPPPAADPAKPLYPVLLLHGFGAQATWQWAPFLGPLLAAGLAPYVPDLVFFGASSSPAADRSPVYQAACVAAAMAALPGAPQRYAVVGVSYGGFVAYHLAHAFPAAVERLVLVAAGVCLEEADLAAGLFAVEDIAEAASLLLPQRPEDLRRLVGLTFCRPQRFMPSCFIRDYIRVMCTENVKEKRELLYALINGRKLSDLPKINQQTLIIWGEQDRVFPLELGLRLKRHLGDTSELIIVKNAGHAINREKPAELCRLIKHYIVDPSVKCRDDRKGSWKNAIKRFVGSSLRKVDSSRPLL

SEQ ID NO: 303674 - protein, 147 aa, Zea mays
  unsure (1)..(147): unsure at all Xaa locations
  Clone ID: MRT4577_40021C.1.pep
MKPVVGIVVSNKMQKSVVVAVDRLFHNKVYNRYVKRTSKFMAHDDDDSCNIGDRVXLIGEEGRLVEGGGGESFVVGVGRRTIRVPLLSKVCLALSFLVRLDPSRPLSRHKHWVVAEILRRAKVYVPPAATASSERGSKSQQAGGATK

SEQ ID NO: 303675 - protein, 50 aa, Zea mays
  Clone ID: MRT4577_40022C.1.pep
GQLGDTYELIIAKNAGHAINREKPAELCRLIKHYIDDPSVKCRDDRTVHN

SEQ ID NO: 303676 - protein, 66 aa, Zea mays
  Clone ID: MRT4577_40023C.1.pep
FNTKECVHLTTWYMVYAAYLHRALCHNETKILPYVLVRTLVRTIHIKPFATRRCLLENIFEKKENV

SEQ ID NO: 303677 - protein, 968 aa, Zea mays
  unsure (1)..(968): unsure at all Xaa locations
  Clone ID: MRT4577_40024C.1.pep
MPTLLVDTPQLRMVLVFKGKPRTQQAKRLPFSPRRKGRPLWLVVLKETMLLFMIGKVLVTIRVIFMLLIMIPMLCLPLALLLCMVEVGLGEVILYLMCLGECAMNLLPFTMLAILHLRSYVYASGGSSWIIDSGCTNHMTGEKKMFTSYVKNKDSXDSIIFGDGNQGXDVSVFIRSDGSLAFKGVLDGKFYLVDFSKEETDLDACLIAKTSMGWLWHRRLAHVGMKNLHKLLKGEHVLGLTNVCFEKDRPCAACQAGKQVGSTHHSKNVMTTSRPLELLHMDLFGPVAYLSIGGSKYGLVIVDDFSRFTWVFFLQDKSETQGTLKRFLKRAQNEFELKVKKIRSDNGSEFKKFQVEEYLEEEGVKHEFSAPYTPQQNGVVERKNRTLIDMVRTMLGESKMPERFWSEAVNAACHAINRLYLHRLLKKTSYELLIGNKPNVSYFRVFGSKCYILVKKVSSDVVFDETNGSPREQVDLDDIDEDDVLTAAMRTMAIGEVRPQEQQEQDQPSSSTMVHPPTRDDGQVPQEEARDQRGAQEEQVMEEEAPLAPPTQVRAMIQINHPVDQILGDISKGVTTRSRLANFCEHYSFVSTIEPFRVEEALQDPDWVLAMQEELNNFKRNEVWSLVPRPKQNVVGTKWVFRNKQDEHGVVIRNKARLVAKGYAQVAGLDFEETFAPVARLESIRILLAYAAHHSFRLFQMDVKSAFLNGPIKEEVYVEQPPGFEDDRYPDHVFKLSKALYGLKQAPRAWYECLRDFLIANAFKVGKADPTLFTKTCDGDLFVCQIYVDDIIFGSTNQKSCEEFSRVMTQKFEMSMMGKLNYFLGFQVKQLKDGTFISQTKYTQDLLKRFGMKDAKPVKTPMGTDGHVDLNKGGKSVDQKTYRSMIGSLLYLCASRPDIMLSVCMCARYQSDPRECHLVAVKRILRYLVYTPCFGIWYPKGSTFDLIGYSDSDYAGCKVDRKSTSGTC

SEQ ID NO: 303678 - protein, 65 aa, Zea mays
  Clone ID: MRT4577_40025C.1.pep
WGLGAFLRRFANEMASVFFFLCPPPPQEYILSGRDPEFRVFQIAGARGFFPGCSHFWSKGLRLLS

SEQ ID NO: 303679 - protein, 35 aa, Zea mays
  Clone ID: MRT4577_40026C.1.pep
RQRTGRHKAGYICLSCPGRTRVIIAPAKCLQRFHD

SEQ ID NO: 303680 - protein, 85 aa, Zea mays
  Clone ID: MRT4577_40027C.1.pep
SITHLSYNTNHFHNNIYNLHHNLSLYTHIKHQFHNPKFYTYISTHTIHYFPTYCYILHVKYLHFYMNNLHNKNFNDLSYYNILLT

SEQ ID NO: 303681 - protein, 761 aa, Zea mays
  Clone ID: MRT4577_40028C.1.pep
MTGEKKMFTSYVKNKDSQDTIIFGDGNQGKVKGLGKIAITSEHSISNVFLVESLGYNLLSVSQLCHMGYNCLFTNVDVSVFRRSDGSLAFKGVLDGKLYLVDFPKEEADLDACLIAKTSMGWLWHCRLAHVGMKNLHKLLNGEHVLGLTNVCFEKDRPSAACQAGKQVGSTHHNKNVMTTSRPLELLHMDLFGPVAYLSIRGSKDGLDKSKTQGTLKRFLRRAQNEFELKVKKIRSDNGSDFKNLKCYILVKKGRHSKFAPKAVEGFLLGYDSNTKAYRVFNKSSGLVEVSSDVVFDETNGSPREQVDLDNIDEDDVPTAAMRTMAIGDVRPQEQQDQDQPSSSTMEELNNFKRNEVWSLVPRPKQNVVGTKWVFRNKQDEHGVVTRNKARLVAKGYAQVTAYAAHHSFRLFQMDVKSAFLNGPIKEEVYVEQPPGFEDDRYPDHVFKLSKALYGLKQSPRAWYECLRDFLIANAFKVGKADPTLFTKTCDGDLFVCQIYVDDIIFGSTNQKSCEEFSRVMTQKFEMSMMGELTYFLGFQVKQLKDGTFLSQTKYTQDLLKRFGMKDAKPAKTPMGTDGHVDLNKGGKSVDQKAYQSMIGSLLYLCASRSSIMLSVCMCARFQSNPKECHLVAIKRILRYLVATPCFEIWYPKGSTFDLIGYSDFDYAGCKVDRKSTSGTCQFLGRSLVSWSSKKQTSVALSTAEADLKGALKGKMNLDVAKTSIALWYWCIYFQVHTYALIAFLLLIDIFGEAMGLKGQE

SEQ ID NO: 303682 - protein, 324 aa, Zea mays
  unsure (1)..(324): unsure at all Xaa locations
  Clone ID: MRT4577_40029C.1.pep
TAYFGLLGRCARGRSXLDCLACVVAWSISATRPPIFGFAPYNPVLGETHHVSTTSGCGGGLNVLLEQVSHRPPVTALHATDARGEVRLVWCQSPAPRFHGASVEAAVRGARELRLLRHAETYVIGCPGLLIRLFPSPACEWSGDVRVVCAESGLEAQXQLLPDXRSFLGFGGGDARCVRGRIFRSAEPGDTLCEIDGFWDRQVTRRDLATGEVSVLYDAQRAIGDLATPVVQDRKGVSASGSAKVXGEVSDAILKKDWETAQQAKRRVEDTARRFAKERNDRGEVWTPKHFSLSQNKSGDWECWPLEDSVPPAPIVVPSSSSSS

SEQ ID NO: 303683 - protein, 96 aa, Zea mays
  unsure (1)..(96): unsure at all Xaa locations
  Clone ID: MRT4577_4002C.1.pep
NHSXIXXXXXSNXCIXXXFGXRLGVCLIVXXXTXXXLAIHYTXXXITXFSXVTHICRDVXLRXLXRYLXANGASIXFICVFXHVGRGLYYGXYTFL

SEQ ID NO: 303684 - protein, 76 aa, Zea mays
  Clone ID: MRT4577_40030C.1.pep
KHSFWLVLHCIITHSWIHGLDEAQPAVIYSSPHADAPPYRHTKRNQHDRSTHYDTNPYKHAYTIDYRSILITGRPR

SEQ ID NO: 303685 - protein, 1677 aa, Zea mays
  Clone ID: MRT4577_40031C.1.pep
MDPKGKGMMINDKEKESFLNEPKDDKPTDSSSSHKKKDGKKKRRIKKIVYYDSDESSSSQKDDDDEKKKTVNSNFSFGYSRIPQNSNAHLLSIPLGKPPHFDGEDYGFWSHKMRSHLFSLHPSIWEIVENGMQFDSMDNPMFINEQIHKNAQATTILLASLCREEYHKVGGLDNAKQIWDILKISHEGNDATMITKMELVEGELRRFTMIRGEEPTQTHNRLKTLVNKIRSYGSTRWRTTTSYTKMTPEEILGEFVSGRMMIKEARYVDEALNGPMPIHEPQTVALKATSSREGLPSKVAQVEAAELNKDEMALIIKRFKTALKGRKEHPNKSKTKGKRSCFKCGKIGHFIANCPDNDSDQEQGKNGKREKKKVSRRLRARHTLEKNGTRIVLRPTPTTKDSPPRPSSNRLSSPTSITLASWQRRRRCKDFNVDACVEHLTSITKLNGEVASLNAQLKTSKNDFDKLNIATDAYTVGRHPSIKDELGFKSGCTNHMTGENKMFTSYVKNKDSQDSIIFGDGSQGKVKGLGKIAISSEHSISNVFLVESLRRSDGSLAFKGVLDGKLYLVDFSKEEANLDACLIAKTSMGWLWHRRLAHVRMKNLHKLLKGEHVLGLTNVTFEKDRPCAACQAGKQVGSSHHSKNVMTTSRPLELLHMDLFGPVAYLSIEGSKYGLVIVDDFSRFTWVFFLQDKTETHGTLKRFLRRAQNEFELKVKKIRSDNGSEFKNLQVEEYLEEEGVKHEFSAPYTPQQNGVVERKNRTLLDMARTMLSEFKTPERFWTEAVNTACHAINRVYLHRLLKKTSYELLTVKKGRNSKFAPKAVEGFLLGYDSNTKAYRVFNKSSGLVEVSSNVVFDETNGSPREQIDLDDVDEEDVPTAAIRTMAIGDVRPQEQKEQDQPSSSTMVHPPTQDDEQVHQEEACDQGGAQDDHVMEEEAPQAPPTQVRATIQRNHPVDQILGDISKGVTTRSRLANFYEHYSFVSSIEPFRVEEALLDPDWVLAMQEELNNFKRNEVWTLVPRPKQNIVGTKWVFRNKQDEHGVETRNKARLVAKGYAQVAGLDFEETFAPVARVESIRILLAYAAHHSFKLFQMDVKSAFLNGPIKEDVYVEQPPGFEDERYPDHVCKLSKALYGLKQAPRAWYECLRDFLIANAFKVGKADPTLFTKTCDGDLFVCQIYVDDIIFGSTNQKSCEEFSRVMTQKFEMSMTGELNYFLGFQVKQLKDGTFISQTKYTHDLIKRFGMKDAKLAKTPMGTDRHVDLNKGGKSVDQKAYRSIIGSLLYLCASRPDIMLSVCMCARFQSDPRECHLVAVKRILRYLVATPCFGIWYPKGSTFELIGYSDSDYAGCKVDRKSTSGKCQFLGRSLVSWSYKKQTSVALSTAEAEYVAAGQCCVQLLCMRQTLRDFGYNLSKVPLLCYNESAIRMADNPVEHSRTKHIDIRHHFLRDHQQKGDIKVFYVSTENQLADIFTKPLDEKTFCRLRIRLGQEATVCKILLQQQLSSQSEDVTIRNALWEALQNSIALGPTRRRELSFEVGDYVYLKVSPIRGTKRFGVKGKLAPRYIGPYQIQARRGEVAYQLSLPENLSAVHDVFHVSQLKKCLRVPEEKLPTEDLEVQEDLTYIEKPTQILETANRVTRRNTIRMCKVKWGHHSEEATWEREDDLRAQYPELFASQP

SEQ ID NO: 303686 - protein, 1228 aa, Zea mays
  Clone ID: MRT4577_40032C.1.pep
MDPKGKGMVVNDKEKESIFNEPRDDKPTDSGSSHKKRDGKKKRRIKKIIYYDSDASSSSPREDDDDDDSSKRKTHLCARDEYNKVSGLDNAKQIWDTLKISHEGNDATMITKIELVEGELRRFAMIRGEEPTQTYNRLKTLVNKIRSYGSTRWTDHDVVRLMLRSFTVIDPHLVNLIRENPRYTKMTSEEILGKFVSGHMMVKEARYVDDALNGPLPVYEPQPIALKATSSREALPSRVAQVEATGLNEDEMALIIKRFKTALKGRKEYPNKNKIRGKRSCFKCGKTGHFISQCPDNDNDQAQERHGKKEKKKNYRKAKGEAHLGKEWDSDCSSSDSDDEGLAASTFDKSSLFPNERHTCLMAKEKKVHIRDTPKYSSSSDEESSDDEVDYSELFKGLDRAKVYASGGSSWIINSGCTNHMTEEKKMFTSYVKNKDSQDTIIFRDGNQGKVKGLGKIAITNEQSISNVFLVESLGRSDGSLAFKSVLDGKLCLVDFSKENAGLDACLIANTNMGWLWHHHLAHVGMKNLHKLLKGDRVLGLTDVCFEKNRPCATYKSETQGTLKRFLRKAQNEFELKVKKIRSDNGSEFKNLQVEEFLEEEGIKHEFSAPYTSQQNGVVERKNRTLIDMARTMLGEFRTPERFWSEVVNTACHAINRLYLHRLLKKTSYKLLTGNKPNVSYFRVFGSKCYILVKKGRHSKFAPKAVEGFLLGYDLNTKAYRVFNKSSGLVEVSSDVVFDETNGSQREQVDLDDIDEDEVPTAAMRMMAIGDVRPQELQEQDQPSSSTLVHPPTQDDGQVPQEQERDQGGAQEEHVMEEEAPQAPPTQVRASIQGHHPVDQILGEISKGVTTRSRLATFCEHYSFVSSIEPFRVEEVLHDPDWMLAMQEELNNFKRNEVWSLVPRPKQNVVGTKWVFRNKQDEHGVVTRNKARLVAKAYAGHHSFRLFQMDVKSAFLNGPIKEEVYVEQPPGFEDDWYPDHVYKLSKALYGLKQAPRGCYPSLLQKPCDGDLFVCQIYVDDIIFGSTNQKSCEEFSRVMMQKFEMSMMGELTYFLGFQVKQLKDGTFISQTKYTQDLLKRFGMKDAKPAKTLMGTDGHLDLNKGGKSVDQKAYRSMIGSLLYLCASRPDIMLSVCMCARFQSDPKECHLVAVKRILRYLVSTHCFGIWYPKGSTFDLIGYADSDYAGCKVDKKSTSGTCQFLGRSLVSRSSKKQTSVALSTIEAEYIAA

SEQ ID NO: 303687 - protein, 75 aa, Zea mays
  Clone ID: MRT4577_40033C.1.pep
PGLGLGPPPPPGMGAPPKASPPVVKDLGAIPPPGPPDDNRGLLLFFVVGPPMGWVFFNILQRGFNQFNRMGSDLS

SEQ ID NO: 303688 - protein, 215 aa, Zea mays
  Clone ID: MRT4577_40034C.1.pep
MRPIFCGNLDYDARQSEIERLFGKYGRVERVDMKTGFAFVYMEDERDAEDAIHRLDRTDFGRKGRRLRVEWTKEDRSGGRKGNGKRSPSSVKPTKTLFVINFDPINTRTIDLEKHFDLYGKIANIRIRRNFAFVQYETQEDATKALDGTNGSTVMDRVISVEYALRDDDEKRNRYSPDRRGGGRDRSPDRRDNRGKSASPYGRGRRRGSPDYGRG

SEQ ID NO: 303689 - protein, 68 aa, Zea mays
  Clone ID: MRT4577_40035C.1.pep
NPVGKRGRPGVKIPFSPPRWFFYFFSSSPKKKKKKKKKKKKKKKKKKKKKKKKKRKKKRKKKNSRGGG

SEQ ID NO: 303690 - protein, 88 aa, Zea mays
  Clone ID: MRT4577_40036C.1.pep
INVLLIILLISKLVLKRLLMRLYVDLVFDQMFDEGLGVVQGYVPVSVVVAHVVDHVPPHGRGAKSRWYIMSCRYRSHYRPIILFGHYS

SEQ ID NO: 303691 - protein, 157 aa, Zea mays
  Clone ID: MRT4577_40037C.1.pep
PIPPPLVGPQGILRGAPSSQKKWPGSWGPREGFVPAGFFDPQPKVFWPVNRCFFWAFGLGGGLPFYKKHKCVFWSGGPWGGVGHFLKKTPPAYGWGREKVELAPPPPPQGGLPVFLIKKGLGAKKKKKKKKKKKKKKKKKKKKKNQKKIFKPPPTTT

SEQ ID NO: 303692 - protein, 1388 aa, Zea mays
  Clone ID: MRT4577_40038C.1.pep
MSEPSMADLMEMMKSWHSELKMEIKEMKIEMASLKDKASSSSGVGGGNRMEPPREPDRPPRFQKWDFPRFDGKSDPRLFLNRRESYFRKQRTMAEERVGMASYNLEDVAQEWFMQLQEDEGTPSWGRFKDLIDLRFGPALRSAPLFELTECRRTGTVEEYSNRFQSLLFRAGRLDEAQRVQLFTGGLLPPLSHAVRLHNPETLTAAMSLARQVELMELDKMAAAPAKPAHRALPAAIKPQQAPHSLRYQHHRRYSRGHNRTCRRLFYVEGIELEMAVDAAGDAVPAEEGPIYSLHAVAGVPTFDTLQVRAFLGTAVLVALLDTGSTHNFIGERAAYRSGMHIQPRPRLTATVANGERVTCPGVIRDASIRVQGDTFHVDLFVMPLAGFDLVLGTQWLGTLGPIVWDVAARTMQFQREGHAVCWTGLASSDKPAVRAVTAPPTPTLQLQPAQEPLLDALLHSLSHVFTEPRGLPPKRSRDHRIILKPGALPVAVRPYRYPAAHKDDLERQCAAMIEQGIVRRSDSAFSSPVLLVKKPDGSWRFCVDYRALNALTVKDAFPIPVVDELLDELHGAKFFTKLDLPPATFQALMNDVLRPFLRWFVLVFFDDILIYSKSWGEHLRHLRAVLEELQRHQLFLKRTKCAFGATKVGYLGHVISEAGVAMDPAKVQAIRDWPTPRSARAVRGFLGLMGYYRKFVHHYGTVAAPLTALLKKDGFSWSAGAAEAFVALKDAITSAPVLTMPDFSKPFVVECDASSHGFGAVMVQGGHPIAFFSQAVSPRHQALAAYERELIGLVLAVRHWRPYLWGRRFLVKTNHYSLKYLLDQRLATLPQHHWVGKLLGFDFSVEYKPGSTNVVADALSRRDTPNYGALLALSAPHFDVLDRLRQAQLTDPALTAIRGEVQAGTKRAPWEVVDRMVQYAGRLYLPPSSPLLRELLAVVHAEGHEGVQRTLHRLRRDFHFPNMKQVVQDYVRECPTCQRHKSEHLHPAGLLLPLPIPQGVWTDVALDFVEALPRVRGKSVILTVVDRFSKYCHFIPLAHPYSAESVAQAFFAEIVRLHGVPQSLVSDRDVVFTSKFWKEIMRLMGTSLHMTSAFHPQSDGQSESANRVIIMYLRCLTSNRPRQWLQWLPWAEYVFNTAYQSSLRDTPFKIVYGREPPSIRSYEPGDTRVAAVARTMEEREEFLADVRHRLEQAQAVQKKYYDQGHRVVTYQVGEWVLLHLRHRSPASLATDSTGKLKPRFYRPYRVLELINEVVVRLELPARARIHDVFHVGVLKKYHGTPPQVTPPLPPLHHGAVTLEPARAIRTRLNRGVRQVLVQWKDQSPASATWEDMDTFTDKFPTFQLEDELLLEERRDVMYGHTYARRRRARDVRRARQAAKAHAQQVSG

SEQ ID NO: 303693 - protein, 391 aa, Zea mays
  unsure (1)..(391): unsure at all Xaa locations
  Clone ID: MRT4577_40039C.1.pep
MPAARVRATPTRTPPRSSSPAPRTEAVVPPDWDSAVSTVSSHPTPPVVVVCGPKNSGKSTFSRVLLNALLPRHGKVAYLDTDVGQPEFGPPGCLSFHVLDEAIADLMNPSLREAERCYFFGDISSKRDPEAYLNXVYSIXDYFVGKYRCDENEMXLQLIVNTPGWVKGAGFDMLVEMLRYICPTIVVQIRITIKNKNLPDGGFWLDGGQTGPMMINIDAAFHDASNRSLLIQKDSCGMRERRLVEYLKQCFPSNISLSTNKELAYALASLPPYQVPFSDVAIVHLHCKVPAGEIWHSLNATIVGLAVSNASEGTRSIPYCVGLGIIRGVDIQKGLLYLITPVPLQRLQCVDLLQQGLIEIPTALLQVRGCVSPYMSTNVLHKISERDLYAG

SEQ ID NO: 303694 - protein, 142 aa, Zea mays
  unsure (1)..(142): unsure at all Xaa locations
  Clone ID: MRT4577_4003C.1.pep
LLQIVLELATRIELEKLDEHETDADEAVSLDDDKEDVDDVYDDKDADEIHGDASAXSHESMSGNRSRWGMLELAIXTFTGVAWFCIECYNIFFAISGPYVLKRPCLDWNVIFGVVTIQDLISLLEIHRAXYFEAPDLSQMIL

SEQ ID NO: 303695 - protein, 56 aa, Zea mays
  unsure (1)..(56): unsure at all Xaa locations
  Clone ID: MRT4577_40040C.1.pep
FGVGGCSSFRRRFYASIGWGERWGLRISLKLCPLGRGWAVSCHIYYPMPWWXVSVK

SEQ ID NO: 303696 - protein, 82 aa, Zea mays
  Clone ID: MRT4577_40041C.1.pep
PSVSMVVEAFSVSVGKFSWDVSVVQVNFTPRGERGFFLWDPLGNPPFTHGFCVLGQLGATAQRGKFVRELKTGGLGPGFTFF

SEQ ID NO: 303697 - protein, 74 aa, Zea mays
  Clone ID: MRT4577_40042C.1.pep
MAASTKTVAVLLAAVLLALVASAAASRKLEEDALLGSLAPAPAPAVGGAAGLPAAKPGAWAVAALVSLVAFLVN

SEQ ID NO: 303698 - protein, 124 aa, Zea mays
  unsure (1)..(124): unsure at all Xaa locations
  Clone ID: MRT4577_40043C.1.pep
GAAALGRPAPPLRLLWSWCPVFXGARWWRGPRCGLXLCSPRRLVCCWGRPPWCCGGAPGXLVFLVLALVGCWLGASGAXCVSSPGFASFLRLVVSVLXVPPPVFSGGAPXLLLSVFVSGVLFVR

SEQ ID NO: 303699 - protein, 74 aa, Zea mays
  Clone ID: MRT4577_40044C.1.pep
MAASTKTVAVLLAAVLLALVASAAASRKLEEDALLGSLAPAPAPAVGGAAGLPGGKPGAWAVAALVSLVAFLVI

SEQ ID NO: 303700 - protein, 104 aa, Zea mays
  Clone ID: MRT4577_40045C.1.pep
KPKRGELKFFVVCKGGVGVCPNAECHFRPPAMQKPGFATLPAGPYAIKVAISAKALRNTSSESSPSSHECKRSKKKTGTINRKRYVTLDIKQAPSDGGTAYFLD

SEQ ID NO: 303701 - protein, 1230 aa, Zea mays
  unsure (1)..(1230): unsure at all Xaa locations
  Clone ID: MRT4577_40047C.1.pep
MVVNDKEESLFNEARDGKPNDSGSSHKKRDGKKKRRIKKIIYYDSDASSSSPRDDNDDDSSSKKRTVNQNYSFDYSRMPYNSNAHLLSIPLGKPPHFDGEDYSFWSHKMRSHLFSLHPSIWEIIENGMDEYNKVSGLDNAKQIWDTLKISHEGNDATMITKMELVEGEMGRFTMIRGEEPTQTYNRLKTLNPRYTKMTPEEILGKFVSGRMMVKEARYVDNALNGPLPVYEPKPVALKATSSREALPSKDEMTLIIKRFKTALKGHREYPNKNKTRGKRSCFKCGKTGHFIANCPDNDSDQGQEKSRKKEKKKNYRKAKGEAHLGKEWDSDCSSSDSDDEGLAASAFNKSSLFPNERHTCLMAKEKKVRVRDTPKYTSSSDEESSDNEVDYSSLFKGLDRAKVEKINELIDALNEKDTLLEKQEDILYEEHDKFISVQKSLALEIKRNEMLSSELSACHESVSSLRSLNDDLNAKLEEVNKSTSCVEHVVICNRCKDFDVDASNEHIVSITKLSNEVYASGGSSWIIDSGCTNHMTEEKKMFTSYVKNKDSQDTIIFGDGNQGKVKGLGKIAITNEHSISNVFLVESLGYNLLSVSQLCHMGYNCLFTNVDVSVFRRSDGSLAFKGVLDGKLYLVDFSKEEADLDACLIAKTSMGWLWHRRLAHVGMKNLHKLLKGEHVLGLTNVCFEKDRPCAACQAGKQVGSTHHSKNVMTTSRPLELLHMDLFGPVAYLSIGGSKYGLVIVDDFSCFTWVFFLQDKSETQGTLKRFLRRAQNEFELKVKKIRSDNGSEFKNLQVEEYLEEEGVKHEFSAPYTPQQNGVVERKNRMLIDMARTMLGEFNTPERFWSEVVNTACHAINRLYLHRLLKKTSYKLLTGNKPNVSYFRVFGSKYYILVKKGRHSKFAPKVVEGFLLGYDLNTKAYRVFNKSSGLVEVSSDVVFDDTNGSPREQVDLDDIDEDDVPTAAMRTMAIGDVRPQEQQEQDQPSSSTMVSPPTQDDGQVPQEEARLVAKGYAQVAGLDFEETFAPVARLESIRILLAYAAHHSFRLFQMDVKSAFLNGPIKEEVYVEQPPGFEDVRVMTQKFEMSMMGELTYFLGFQYTQDLLKRFGMKDAKPAKTPMGTDGHVDLNKGVSTPCFGIWYLKGSTFDLIGYSDSDYAGCMVDRKSTSGTCQFLGRSLVSWSSKNQTSVALSTAEAEYVAXGQCCAQLLWMRQTLXDFGYNLSKVPLLC

SEQ ID NO: 303702 - protein, 1474 aa, Zea mays
  unsure (1)..(1474): unsure at all Xaa locations
  Clone ID: MRT4577_40048C.1.pep
MDPKGKGMVVNDKEKESLFNEPRDDKPTNSATTVLLASLCRDEYNKVSGLDNAKQILDTLKISHEGNDATMITKMELVEGELGRFTMIRGEEPTQTYNRLKTLVNKIRSYGSTRWTDHDVVRLMLKSFTVIDPHLVNLIRENPRYTKMTPEEILEKFMSERMMVKEARYVDDALNGPLPVYEPQLVALKATSSREALPSKVAQVEAAGLNEDEMALIIKRFKTALKGRKEYPQQEQNKGKALLFQMREKKKVYKKAKGEAHLGKEWDSDCSSSDSDDEGLAASAFDKSSLFPNERHTCLMAKDKKVRIQDSPKYSSSDEESDDVDYSSLFKGLDIAKVEKINELIDALNEKDRLLEKQEDILYEEHDKFVSVQKSLALETKRNEMLSSELSACHESVSSLRNLNDELNAKLEEVNKSSSCVEHVVICNRCKDFDVDACDEHLGSITKLNNEVASLNAQLKTCKDDFDKLKFARDAYTVGRHPSIKDGHGFRRETKNLTSQRTSVLNKEKGKAPMTTLLLFMVEVGLGEIMLCLMYLGKCAMNPLLFFMLATLLLYFHVYASGGSSWIIDSGCTNHMTREKKMFTSYVKNKDSQDSIIFGDGNQGKVKGLGKIAITSEHSISNVFLVESLGYNLLYVTQLCNMGYNCLFTNIDVSVFRRSDGSLAFKGVLDDKLYLEDFLKENVDLDACLMAKTNMGWLWHRLLAHVGMKNLHKLLKGDHVLGLTNVCFEKDRPCAACQAGKQVGSTHHDKNVMTTSRPLELLHMDLFGPVAYLSIGGSKYGLVIVDDFSRFTWVFFLQDKSETQGTLKRFLKRAQNEFELKVKKIRSNNGSEFKNLQVEEFLEEQGIKHEFSAPYTPQQNGVVERKNRTLIDMARTMLGEFKTPERFWSEAVNTACHAINQLYLHRLLKKTSYELLTGNKPNVSYFHVFGSKCYILVKKGRHSNFAPKAVEGFLLGYDSNKKAYRVFNKSSGLVEVSSDVVFDETNGSPREQVDLDDIDEEEVPTAAMRTMAIDDEEERDQGGAQEEQVMEEEAPRVPPTQVRATIQRNHPIDQILGDISKGVTTRSRLANFCEHYSFVSSIEPFRVEEALQDLDWVLAMQEELNKFKRNEVWSLVPRPKQNVVGTKWVFRNKQDEHGVVTRNKARLVAKGYAQVAGLDFKETFASVARLESIRILLAYADHHSFRLLQMDVKSAFLNGPIKEEVYVEQPPGFEDDRYPDHVYKLSKALYGLKQAPRAWYECLRDFLIANAFKVGKVDPTLFTKTCDGDLFVCQIYVDDIIFVSTNQKSCEEFSRVMTQKFEMSMMGELTYFLGFQVKQLKDGTFISQTKYTQDLLKRFGMKDAKPAKTPMGTDGHVDLNKGGXEYVATGQCCTQLLWMRQTXRDFDYNLSKVPLLCDNESAIRMADNPVEHNRTKHIDIRHHFLRDHQQKGDIEVYHISTENQLADIFTKSLDEKTFCRLRSELNVLDSRNLD

SEQ ID NO: 303703 - protein, 499 aa, Zea mays
  unsure (1)..(499): unsure at all Xaa locations
  Clone ID: MRT4577_40049C.1.pep
MDPKGKGMVVNDKEKESLFNEPRDDKPTDSGSSHKKRDEKKKRRIKKIIYYDSDASSSSPRDDNNDDDSSSKKKMHMGIVENGMHFDNTDNPVIINEQIHKNAQATTVLLASLCRDEYNKQLATGLNEDEMTLIIKRFKTALGRKEYPNKNKTRGKRSCFKCGKTGHFIAQCPDNDNDQGEEKSGKREKKKNYRKAKGEAQLGKGWDSDCSSSDSDDEGLAASAFNKSSLFPNEHHTCLMAKEKKVHIRDSPKYSSSSDEESSDDEVDYSSLFKGLDRVKADEINELIDALNEKDRLLEKQEDILYEEHDKFVSVQKYLALETKKNEMLSSELSSCHESISSLKNLNDELNAKLEEVSKTSSCVEHVSICNRCKDYDVDACDEHLISITRLNDEVSSLNAQLKTCKIDFDKLKFARDAYTIXSTFVYGRSRPRRNHVVPHVPRRMCNEPTTVFHSCNTSFVLSCXYASVGSSWIIGSVCTNHMAGEKKMFTSYVKNKDS

SEQ ID NO: 303704 - protein, 118 aa, Zea mays
  Clone ID: MRT4577_4004C.1.pep
QELHNVEKLTEGRLDELLDAFLKDFEAGEADARGWPAAFAAYKVGKAAMNAYSRILAAEQPTLRVNCVHPGYIKTDITLRSGLLTPEEGAGNVVKVALLPGGGVTGAFFEDGQETSFV

SEQ ID NO: 303705 - protein, 284 aa, Zea mays
  unsure (1)..(284): unsure at all Xaa locations
  Clone ID: MRT4577_40050C.1.pep
MDPKGKGMVINDKEKESFINEPKDDKPTDSGSSHKKKDGKKKRHIKKIVYYDSDEEEYHKVGGLDNAKQIWDTLKISHEGNDATMITKMELVEGELGRXHQDDARGNTRKVXSERMMIKEARYVDEALNDPMPIHEPQTVALKATSSREGLPSKVAQVEAARLNEDEMALIIKRFKMALKGRKEHPNKSKTKGKRSCFKCGKIGHFIANCPDNDSDQEQGKNGKRENKKVYKKAKGEAHLGKEWDSDCSSSDSDDEGLAATAFNKSSLFPNEHHTCLMAKEKKI

SEQ ID NO: 303706 - protein, 149 aa, Zea mays
  Clone ID: MRT4577_40051C.1.pep
MTTSSSWLSLPIQLLRYAPSSSSSNRLGLGSVHRPSPHCARMHMQPAKGLKPVTATGRGDGGGVDAASPLRLLADEVAPELHAAAKRMVGGGALHSPKGRPGSPTEGSGGGKIRTTHAAAPTTTFARARGPTPPGLPAEGSGGNGGTKH

SEQ ID NO: 303707 - protein, 291 aa, Zea mays
  Clone ID: MRT4577_40052C.1.pep
MDPKGKGMVVNDKEESFLNEPRDDKPTDSGSSHKKRDVKKKRRIKKIVYYDNDCLHLHQETTMTTTLHRKRKRETLLNKVAQVEAVGLNEDEMALIIKRFKTALKGRKEYPNKNKTKGKRSCFKFGLAASAFNKSSLFPNERHTCLMAKEKKVYASGGSSWIIDSGCTNHMTGEKKMFTSYVKNKDSQDMIIFGDGNQGKVKGLGKIAITSEHSISNVFLVESLGYNLLSDKSETQGTLKRFLRRAQNEFELKVKKIRSNNGSEFKNLLVEEYLEEEGVKHEFSAPYMKVA

SEQ ID NO: 303708 - protein, 57 aa, Zea mays
  Clone ID: MRT4577_40053C.1.pep
YSARGAIGISLVPLKEHSVRSSAYTDNVASPLSLSHTHTCNVHNPARWRARAVWAMA

SEQ ID NO: 303709 - protein, 174 aa, Zea mays
  unsure (1)..(174): unsure at all Xaa locations
  Clone ID: MRT4577_40054C.1.pep
MDPKGKGIVINDKEKESFVNEPRDDKSNDSGSGHKRKDGKKKKTRRIKEIVYYDSDESSSSQKDDDHDKQKTVHQNVARRSPRKIRQRANDDQGGKEKGNKREKKKHYKKAKGEAHIGKEWDSDCSSSDSDNEGLAATAFNKSALFPNERHTCLMAKEKKXSTRNSTYAASMWE

SEQ ID NO: 303710 - protein, 35 aa, Zea mays
  Clone ID: MRT4577_40055C.1.pep
PCTLAHVRLPDRGDFIPMNFHIEPYHHDDELLICH

SEQ ID NO: 303711 - protein, 957 aa, Zea mays
  Clone ID: MRT4577_40056C.1.pep
MDPKGKGIVINDKEKESFVNEPKDDKSNDSGPGHRRKDGKKKKTRRIKEIVYYDSDESSSSQKDDDNDYRKTVNSNFSFDYSRIPHNSNSHLLSIPLGKPPHFDGEDYGFWSHKMRSHLFSLHPSIWEIVENGMKFDSSDSPMLINEQIHRNAQATTVLLASLCREEYNKVSGLDNAKQIWDTLKISHEGNDVTMLTKMELVEGELGRFAMIRGEEPTQTYNRLKTLVNKIRSYGSTRWTDHDVVRLMLRSFTVLDPHLVNNIRENPRYTKMSPEEVLGKFVSGRMMIKEARYVDDALNGPIHEPQPIALKATRSKEALPSKVAQVEAAGLNNEEMALIIKRFKTALKGRKGQPSKTKTKEKRSCFKCGKIGHFIANCPDNDSDQEHGSKREKKKHYKKAKGEAHIGKEWDSDCSSSDSDNEGLAATAFNKSSLFPNERHTCLMAREKKVCNQNNVTYDSSSDDESSDDEIDYSSLFKGLDRTKVDKINELIDALNEKDRLLEKQEDLLYEEHDKFVEAQKSYALEVKRNEMLSCELSSCHETIFKLRSINDDLNAKLEIASKSTSCVENVVACTRCKDINIDAYSEHLACISKLNEEVASLNAQLKTSKSDFEKLKFARDAYTVGRHPSINDGLGFKREVKNLTSHKAPISAKEKGKAPMANSTKRNYAFLYHDRRQSRNAYRSYNAYDAFDSHAMVASSSSYVHDRNVSRKNVVHNMPRRNMINVPRKVNEPSTKYHALNASFAICRKDRKIIARKLGARCKGDKTCIWVPKDICANLVGPNMSWVYASGGSSWIIDSGCTNHMTGEKKMFTSYVKNKDSQDSIIFGDGNQGKVKGLGKIAISSEHSISNVFLVESLRYNLSSVSQLCNMGYNCLFINVDVSVFRRSYGSLAFKGVLDDKLYLVDFSKEEADLDACLIAKTSMGWLWHCRLAHVGIKNIHKLLKGEHVESRLEGG

SEQ ID NO: 303712 - protein, 93 aa, Zea mays
  unsure (1)..(93): unsure at all Xaa locations
  Clone ID: MRT4577_40057C.1.pep
MAYYQEVDYCSXEVRLVAPAGFGRHGGGVQQHVVXEKFEEADTDSHCGANHHHHHGHHGVHGFLVRETTVEKDISTWTGEFLEPRDSFLNRGN

SEQ ID NO: 303713 - protein, 1400 aa, Zea mays
  unsure (1)..(1400): unsure at all Xaa locations
  Clone ID: MRT4577_40058C.1.pep
MDPKRKGMVVNDKEKESLFNEPRDDKPTDLGSSHKKRDGKKKRHIKKIIYYDSDASSSSPRDDDDSSKKKPVNQNYSFDYSRIPFNCNAHLLSIPLGKPPHFDGEDYSFWSHKMRSHLFSLHPSIWKIVENGMHFDSTNNPVFINEQIHKNAQATTVLLASLCRDEYNKVSGLDNAKQIWDTLKISHEGNDATMITKMELVEGELGRFAMIRGEEPTQTYNRLKTLINKIRSYGSTRWTDHDVVRLMLRSFTVIDPHLVNLIRENPRYTKMTPEKILGKFVSGRMMVKEARYVDDALNGPLPVYEPQPVALKATSSREALLSKVAQVEAAGLNEDEMALIIKRFKTALKGRKEYPNKNKARGKHSCFKCXEQEKHGKREKKKVYXEGLAASAFNKSLLFPNECHTCLMAKEKKDRLLEKQEDILYEEHDKFVSVQKSLALETKRNEMLSSELSACHESISSLKILNDDLNAKLEEANKSSSCVEHVSICNRCKDFDVDACNEHLIAITKLNDEVASLNAQLKTCKINFDQLKFARDAYTVGRHPSIKDGLGFQREAKNLTSHRAPVLNKEKGKAPMTSSPQRNHAFIYNEKVASRSHYNRNYAHIPYNDSHATFASSSTFVHGRSRPRRSNVVPHVPRRMCNEPYTIYHACNTSFALLCKNEKVVARKLGSKCKGDNTCIWVPKAIVTNLVGPNKSWVYASRGSSWIIDSGCTNHMTGEKKMFTSYVKNKDSQDSIIFGDGNQGKVKGLGKIAITSEHSISNVFLVESLGYNLLSNMQVEEYLDEEGVKHEFFAPYTPQQNGVVERKNRMLIDIARTMLGEFKTPEQFWSEAVNIACHAINQLYLHRLLKKTSYELLTGNKLNVSYFRVFGSKCYNLVKKGRHSKFAPKAVEGFLLGYDSNTKAYRVFNKSSGLVEVSSDVVFDETNGSLREQVDLDEIDEDDVLTAVMRTMAIGEVRPQEKQEQDQPSSSTMVHPPTQDDGQVHQEEVCDQGGAQEEQAMEEEAPLAPPTQVQPTIQRNHPVDQILGDISKGVTTLSRLANFCEHYSFVSSIEPFRVEEALQDPDWVLAMQEELNNFKRNEVWSLVPRPKQNVVGTKLFQMDVKSAFLNGPIKEEVYVEQPPGFEDDRYPDHVFKLSKVLYGLKQAPRAWYGCLRDFLIANAFKVGKADPTLFTKTCDGDLFVCQIYVDDIIFGSTNQKSCEEFSRMMTQKFEMSMMGELNYFLGFQVKQLKDGTFISQTKYTQDLLKRFGMKDAKPAKTLMGTDGHVDLNKGGKSVDQKAYRSMIGSLLYLCASRPDIMLSVCMCARYQSDPRECHLVAVKRILRYLVSTPCYGIWYPKGSTFDLIGYSDFDYAGCKVDRKSTSGTCQFLGRSLLSWSSKKQTSVALSTAEAEYVAAA

SEQ ID NO: 303714 - protein, 792 aa, Zea mays
  Clone ID: MRT4577_40059C.1.pep
MDPKGKGMVINDKEKETFVNEPNDDKPTDSGSGHKRKDGRKKKTRRIKEIVYYDSDESSSSQKDDDDHDRRKTVNSNFSFDYSRIPHSSNAQLLPIPLGKPPHFDGEDYGFWSHKMRTHLFSLHPSIWEIVESGMKFDSSDSPVFINEQIHKNAQATTVLLASLCRDEYHKVSGLDNAKQIWDTLKISHEGNDVTLLTKMELVEGELGRFAMIRGEEPTQTYNRLKTLINKIRSYGSTRWTDHDVVRLMLRSFTVLDPHLVNNIRENPRYTKMSPEEVLGEFVSGRMMIKEARYVDDALNGPINEPQPLALKATRSKEALPSKVAQIEAAGLNDEEMALIIKRFKTVLKGRKGQPSKTKAKGKRSCFKCGKLGHFIANCPDNDSDQDQGNKREKKKNYKKAKGEAHLGKEWDSDCSSSDSDNEGLAATAFNKSSLFPNERHTCLMAREKKVSTPNTSTYASSSEDESSDDDEIDYSCLFKGLDRTKVDKINELIDALNDRNILLEKQEDLLYEEHDKFVEAQKSLALEIKRNEMLSSELSSCHETIAKLKGFNDDLNAKLEVASKSNSCVEIVETCNRCKDFDIDACSDHLVSISKLNEELASLNAQLKTSKNEFDKLKFARDAYTIGRHPSIKDGLGYKREAKNLTSHKAPISAKEKGKAPMASSVQKNHAFMYHDRRQSYRSCNAYDAFDSHAMFASGSSYMHGRDMPRKNIHHVPRKNIVHVPRKVVNGPSTIYHALNASFAICRKDRKIVARKLGAKCKGDKTCISVPKDICTNLVGPNMSWVPKTQA

SEQ ID NO: 303715 - protein, 62 aa, Zea mays
  unsure (1)..(62): unsure at all Xaa locations
  Clone ID: MRT4577_4005C.1.pep
AVRLQYRPDSRSTTRPSDVMRFXQRVRCWEYRQQPSIVRLTRPTRTDKARRLGYKAKQGYVV

SEQ ID NO: 303716 - protein, 123 aa, Zea mays
  Clone ID: MRT4577_40060C.1.pep
AGVAFNPHFFKLVFWCHNKLGFNKRVVSFVPPIFKSQKRGFFPPPFMDGSGLFIPKKKFDWGGLWVARFILSLENFCNFGSPPGTICCKTPRLNWPQNKLFPARGGNKKKKKYKKKNKKKPRF

SEQ ID NO: 303717 - protein, 147 aa, Zea mays
  Clone ID: MRT4577_40061C.1.pep
MDPKGKGIVINDKEKESFVNEPKDDKPTDSGSGHRRKDGKKKKTRRIKEIVYYDDSDESTSSHKDNDDNDYDKRKTDQGIKREKKKNYKKAKGEAHLGKEWDSDCSSSDSDNEGLAATAFNKSSLFPNERHTCLMAREKKRHKNPML

SEQ ID NO: 303718 - protein, 77 aa, Zea mays
  Clone ID: MRT4577_40062C.1.pep
LHSRSPRRTSKLCCGRVHSGGGELQRGPRRLHLSSQLQARPLALLIRLIDQHGYDYHVFSFWWWLNNTKRGRAAWHT

SEQ ID NO: 303719 - protein, 455 aa, Zea mays
  unsure (1)..(455): unsure at all Xaa locations
  Clone ID: MRT4577_40063C.1.pep
MHHHHHHPAAVLESAAPAADPPPPPVLDPSSLRIHIPSRPHHALPSTPHKRPVVMTSSSSSSTPTRPSPSPFTPPRRRKVPAPAAPAGGAAXLSTQNFIPGSPIAVNHSKVLNAVQEARRAAEKAYDIPRVDDKVNRAVAAANKAANAARVAAVKAAQKRIPSNGDDLPLXSVTMKPIYVGMELLRDAIASPIARHNLQLPSXGEATARXCTGSGVYYYYMSGRYEGDWVDGKYDGFGVETWARGSRYRGQYRHGLRHGYGVYRFYTGDVYAGEWSNGQSHGYGVHTCEDGSRYVGEFKRGVKHGLGHYHFRNGDTYAGEYFADRMHGFGIYSFANGHRYEGAWHEGRRQGLGMYSFRNGETQAGHWQNGVLDTLCTQNFIPGSPIAVNHSKVLNAVQEARRAAEKAYDIPRVDDRVNRAVAAANKAANAARVAAVKAAQKRNPNNGDDLPLSVV

SEQ ID NO: 303720 - protein, 85 aa, Zea mays
  Clone ID: MRT4577_40064C.1.pep
DASAHASLHASGVSFDIEGSLGAPVPRGENASTRPDCALSFAPKRANVTSHSPDLNTVLHAERLEHPDRYYLTRHLHFRTRFHYQ

SEQ ID NO: 303721 - protein, 236 aa, Zea mays
  Clone ID: MRT4577_40065C.1.pep
MHHHHHHPAAVLESAAPAADPPPPPVLDPSSLRIHIPSSPHHALPSTPHKRPVVMTSSSSSSTPTRPSPSPFTPPRRRKVPAPAAPAGGAAARNGDTYAGEYFADRMHGFGIYSFANGHRYEGAWHEGRRQGLGMYSFRNGETQAGHWQNGVLDTLSTQNFIPGSPIAVNHSKVLNAVQEARRAAEKAYDIPRVDDKVNRAVAAANKAANAARVAAVKAAQKRIPSNGDDLPLSVV

SEQ ID NO: 303722 - protein, 238 aa, Zea mays
  unsure (1)..(238): unsure at all Xaa locations
  Clone ID: MRT4577_40066C.1.pep
MHHHHHHPAAVLESAAPAADPPPPPVLDPSSLRIHIPSSPHHALPSTPHKRPVVMTSSSSSSTPTRPSPSPFTPPRRRKVPAPAAPAGGAAARYLLRCLHLRLRILLLISLPSLYFLSPTPAILPHSLLADFLSAAAFSCALLLLLCLSLPRLPFALPLPLPLRRARRSPILWSIGSSPSASATTPTTGHFVQVYSNGDVYEGRFHRXRCTGSGVYYYYMSGRYEGDWVDGKYDGFGV

SEQ ID NO: 303723 - protein, 78 aa, Zea mays
  Clone ID: MRT4577_40067C.1.pep
AALCFIIFYTVCSPHFTTKFEHTVKNTSNSNNSPVLNMEIPGIFLSVYRPYTLKTYVLVCKHTLFFFCIIFTGCMWSQ

SEQ ID NO: 303724 - protein, 46 aa, Zea mays
  Clone ID: MRT4577_40068C.1.pep
LPLPISIPCSLKVVLYFLLLQLLLFKTNRSRCMSADYINRQVISVD

SEQ ID NO: 303725 - protein, 52 aa, Zea mays
  Clone ID: MRT4577_40069C.1.pep
NSKYLRCARSRDEEDRKQQCAAHLALVHIAWVLPFPLQSCSLSRLASLLLLF

SEQ ID NO: 303726 - protein, 122 aa, Zea mays
  Clone ID: MRT4577_4006C.1.pep
MAATASLSAVAAPLSVPGLRKPLGVSSLRPLQPRAARMTTTAVRASASPSSTSIKEKAAAGLTAAALAAALVLPDVAEAAQSGGLTPSLKNFLLSIVSGGVVLVGIVGAVVAVSNFDPVKRA

SEQ ID NO: 303727 - protein, 57 aa, Zea mays
  unsure (1)..(57): unsure at all Xaa locations
  Clone ID: MRT4577_40070C.1.pep
PCEACRVAGLAXAVDGLSAPYERASCIHERHVVNWLWAAGCHPFGPFSNSSQISQIL

SEQ ID NO: 303728 - protein, 46 aa, Zea mays
  unsure (1)..(46): unsure at all Xaa locations
  Clone ID: MRT4577_40071C.1.pep
KAHYLTGXSGHPYXSTPVWDDLSDWDILDRFGRICRNIFHYHSGSW

SEQ ID NO: 303729 - protein, 53 aa, Zea mays
  Clone ID: MRT4577_40072C.1.pep
PIGSGPKLLNVGVYQWEGPQIENLGLSRGQSSRDSRGTRTFLKWFVLQIQVIK

SEQ ID NO: 303730 - protein, 224 aa, Zea mays
  Clone ID: MRT4577_40073C.1.pep
RRSPAPSSSPPRPPWRWPRRRRLRLPPACPPRNLQGSQDKMELAAIDLQDKPAWYKDKVYAQGTVPSLEHDSEVRGESLDLIRYIDSNFDGPALLPEDAAKRQFADELFASANAFTKALYSPLLSHAAVSDEVVAALDKLEADLSKFDDGPFFLGQFSLADVAYVTILERVQIYYSHLRNYDIAQGRSNLQEFIDEMNKIEAYAQTKNDPLFLLDLAKNHLKIA

SEQ ID NO: 303731 - protein, 43 aa, Zea mays
  Clone ID: MRT4577_40074C.1.pep
LRLGAHRRARLISIVYSHSVEGCAPRIEAEMCRCGRVCRDRSE

SEQ ID NO: 303732 - protein, 73 aa, Zea mays
  Clone ID: MRT4577_40075C.1.pep
VQKEQADKLAREHGIRFFETSAKSSMNVDEAFSSLARDILLKSGCRRSGNGNMPPSTELKTCDKKNTNKCSLG

SEQ ID NO: 303733 - protein, 354 aa, Zea mays
  Clone ID: MRT4577_40076C.1.pep
MPYLVRERLYFGGIKDAIAALTESSSTPDFTHVLSVVSSASISFITDCRPGLEIPTEEVLRVVAGEEGAAPTAAVPPGTLMRVVERAGHGLRVTRMAVPLRDTEEEDLLDRLEPCLEFIDEGRKVGNVLVHCFAGVSRSASIIVAYLMRAEQKSLEEALEALKEISESACPNDGFLDQLKLFEEMGFKVDTSSPLYKRFRLKLLGQSYISGEKISSYMFEDDPGLSLESGSCQDSSKVEQRKTAYRCRKCRRVIAVEGNVISHVPGEGESCFDWNRRKSGHPYNNKEHGCSSLFVEPLKWMTPVEDGALEGKLSCIHCGARLGYFNWSGIQCNCGSWVTPAFQIVKSKVDISTI

SEQ ID NO: 303734 - protein, 267 aa, Zea mays
  unsure (1)..(267): unsure at all Xaa locations
  Clone ID: MRT4577_40077C.1.pep
FKRXKKKDISGTPRALRRLRTACERAKRTLSSYLEASIEIDCLYEDIDFYSAITRARFEELNMDLFRKCMAIVEDCLSDARYVRSVHDVVLVGGSSRIPKIQQLLQELFXGKELCNSINPDEAVXYGATIQAAIMSGEDDYENEIQNYLLLDATPLSLGLETDGGLMTVMIPRNTTIPTKKEMVLSTDSDNQPCIRIRVYEGEGSITRDNXLLGEFEFSVIPAPRGVPQITVCFSVDWNGILNVSAEDKTTGQKMKKVITKRFRLKH

SEQ ID NO: 303735 - protein, 293 aa, Zea mays
  Clone ID: MRT4577_40078C.1.pep
FEVRATAGAAHLGGEDFDNRMVNHFVEEFKRKKKKDISGNPRALRRLRTACERAKRTLSSYLEASIEIDCLYEDIDFYSAITRARFEELNMDLFRKCMAIVEDCLSDARYVRSVHDVVLVGGSSRIPKIQQLLQELFDGKELCNSINPDEAVAYGATIQAAILSGEDGYEIQNYLLLDVTPLSLGLETDGGVMTVLIPRNTTLPIRKEMVLSTDSDNQPCIQIRVYEGEGAITHDNHLLGEFEFSLLPAPSGVPQITVCFDVDLNSILNVSAEDKTTGQKMNKTITKRFHLKH

SEQ ID NO: 303736 - protein, 564 aa, Zea mays
  unsure (1)..(564): unsure at all Xaa locations
  Clone ID: MRT4577_40079C.1.pep
MAGERRGLAIGIDLGTTYSCVGVWQNGGVEVIANDQGNRTTPSYVAFTGSRLLVGDAAKNQAEMNPSNTIFDSKRLIGRRYSDASVQSDIKHWPFKVIPGPDDKPMIVVQYRGVEQQFAAEEISSMVLVKMREIAEAYLGTTVKDAVVTVPACSTDLQRQATWNAGVLANLNVIRIIPEPTAAALAYGLNRKAAQIMGEYDVLVFDLGGGTFDVSVLAIEQGIFEVRATAGAAHLGGEDFDNRMVNHFVEEFKRKKKKDISGNPRALRRLRTACERAKRTLSSYLEASIEIDCLYEDIDFYSAITRARFEELNMDLFRKCMAIVEDCLSDASYVRSIHDVVLVGGSSRIPKIQQLLQELFDGKELCNSINPDEAVAYGATMQAAILSREGGYEIQNYLLLDATPLSLGLETDGGLMTXSACSLRLAAAAIRLRLRLLQYFSLYGLQLQQSKQLQQCRLAANRTRPLMIPRNTTIPTKKERVLSTDSDNQPCIRIRVYEGEGSITRDNHLLGEFEFSLLPAPSGVPQITVCFDVDINGILNVSAEDKTTGQKMKKVITKRFRLKR

SEQ ID NO: 303737 - protein, 179 aa, Zea mays
  unsure (1)..(179): unsure at all Xaa locations
  Clone ID: MRT4577_4007C.1.pep
MEERRKLLWRRGHDGFVHLPHLFLAALALALLVVDPVGLSPLNDDHYRPGKHKLTPYGEVMGSLTRDNANRLRHGRLQFVIEVYLPEPIQFDLQGRGPYARLIDGHVVRWMGDEANCDTFDDMNADXANSVCANGVNSATMKQHEMEELCRRPIGLMYHGETGXLYMVDAYYGLMGVGH

SEQ ID NO: 303738 - protein, 76 aa, Zea mays
  Clone ID: MRT4577_40080C.1.pep
NAFYNSLKGSKTYTDRAALSKNKTKWNTQALTENISYNERGNFTDDSHNKHNTQKTRFQITLHNYILKQETLATSF

SEQ ID NO: 303739 - protein, 515 aa, Zea mays
  Clone ID: MRT4577_40081C.1.pep
MAGKRRHPAIGIDLGTTYSCIGVWQNDRVEIIANDQGNRTTPSYVAFTGSRRLIGDAAKNQAEMNPSNTIFDSKRLIGRRFSDASVQSDIKHWPFKVISGPDDKPLIVVQYRGVEHQFAAEEISSMVLVKMRETAEAYLGTTIRDAVVTVPACSTDLQRQATWNAGVLASLNVMRIIPEPTAAALAYGLDRKAAQVTGGYNVLVFDLGGGTFDVSVLDKVEGVFEVLATAGAAHLGGEDFDNRMVNHFVQEFKRKTKEDISGNPRALRRLRTACERAKRTLSSTLEATIEIDCLYEDINFYSTITRARFEELNMDLFRKCIDIVEDCLSDAKMDVGSVHDVVLVGGSSRIPKVQQFLQELFNGKKLFKSINPDEAVAYGATIQAAIMSGEDEIEDYLMNDATPLSLGLATDGGVMTVLIPKNTTIPTRKEVVLSTDSDNQPCIRIQVYEGEGAMARDNNLLGEFEFSIPPAPKGVPQITITFHIDADCILDVAAEDKTTGEKMRKTITKRFRLKH

SEQ ID NO: 303740 - protein, 37 aa, Zea mays
  Clone ID: MRT4577_40082C.1.pep
GRYPIPELWNFKEDRRAPMGEAVAYIVKQWKVSKRKH

SEQ ID NO: 303741 - protein, 98 aa, Zea mays
  Clone ID: MRT4577_40083C.1.pep
IPGSPHAPRVPRGLPLPSANCHLPRATCKSNYLTLDTEVMRLAMTKAAQLLFVQLKRPAKPNAANGLVLLDFLLVISAAAANDDAVFFAKMEHSNRLS

SEQ ID NO: 303742 - protein, 82 aa, Zea mays
  Clone ID: MRT4577_40084C.1.pep
HPFNQNYNRTYEVKYSMVCELSAKRRENDVRLSPFTEYSIIISEIFYSISQTSTIIFNLHLYPILIIRYSIIYFHLSLLNLP

SEQ ID NO: 303743 - protein, 80 aa, Zea mays
  unsure (1)..(80): unsure at all Xaa locations
  Clone ID: MRT4577_40085C.1.pep
VRMRRLEVLLRPVDEKRKAVADVDKDTRYAIDGSIVRIMSSRKVMGHLXLIAECVEQLCRMFKPDLQXIQMRIADLITRD

SEQ ID NO: 303744 - protein, 82 aa, Zea mays
  Clone ID: MRT4577_40086C.1.pep
SGRPFFFFLGRYFFSFDVKWINRLLAKLTMLPMGILYTFNIPLTHNCSCQLHVSRACDLVLNLMTFCKDLGVFLAIQPINKV

SEQ ID NO: 303745 - protein, 114 aa, Zea mays
  Clone ID: MRT4577_40087C.1.pep
RVPPPPPESPRPPPGPPSRRPGATTTPTGGPIPAQDPPRGAGPVPPAPPPICRFVRPIRFSDPDGRAWEPPKKPDRPSCVGFPIHLLFPPPVNELCGPPSPIIYDRLEALGVTP

SEQ ID NO: 303746 - protein, 49 aa, Zea mays
  Clone ID: MRT4577_40088C.1.pep
SSIITVSNPLPTSVILSGDQLYCINSMDLVHKHVEADCMSIAYIYVLLD

SEQ ID NO: 303747 - protein, 730 aa, Zea mays
  unsure (1)..(730): unsure at all Xaa locations
  Clone ID: MRT4577_40089C.1.pep
MGIKINPNPYPNGVKTHRVSGFGVPIAISTSEHSISNMFLVESLGYNLLSDKSETQGTLKRFLRRAQNEFELKVKKIRSDNGSEFKNLQVEEYLDEEGIKHEFSAPYTPRQNGVVERKNRTLIDMARTMLGEFKMPARFWSEAVNTACHAINRLYLHRLLKKTPYELLTGNKPNVSYFCVFGSKCYILVKKGRHSKFAPKAVEGFLLGYDSNTKAYRIFNKSSGLVEVSSDVVFDETNGSSREQVDLDDIDVDEVPTAAMHTMAIGDVRPQELQEQDQPSSSMLVHPPTQDDGQVPQEEEHDRGGAQEEQVREEEAPRISPTQVRATIQRNHPVDRILGDISKGVTTRSRLAIFCEHYSFVSSIEPFRVEEALQDPDWVLAMQEELNNFKRNEVWSLVPRPKQNVVGTKWVFRNKQDEHRVXLLQMDVESAFLNGPIKEEVYVEQPXGFEDDRYPDHVYKLFKALYGLKQAPRAWYECLRDFLIANAFKVGKADPTLFTNTCDGDLFVCQIYVDDIIFCSTNQKSYEEFSRVMTQNFEMSMMGELTYFLGFQVKQLKDGTFISQMKYTQELLKRFGMKDAKPAKTPMGTDGHVDLNKGGRSLVSWSFKKQTSAALSTAEAEYVVAGQCCAQLLWMRQTLRDFGYNLSKVPLLCDNESAIRMADNPIEHSRTKHIDIRHHFLRDHQQKGDIEVYHISTENQLADIFTKPLDEKTFCRLRSELNVLDSRNLD

SEQ ID NO: 303748 - protein, 92 aa, Zea mays
  Clone ID: MRT4577_4008C.1.pep
NQRLYGAFNVMKQERHDLAKCKPYQSQAPHYSERAHSVNLSAGATSNDENTHSNWAWLFRSRFVLLFCPSGQAENAIRYPGRSHAILLALCT

SEQ ID NO: 303749 - protein, 104 aa, Zea mays
  unsure (1)..(104): unsure at all Xaa locations
  Clone ID: MRT4577_40090C.1.pep
MADVYHQQDTPKLFNRWTFDDVQVNDISLNDYLAVNSSYHAMYLPNTVGRYSKKRFRXAQCPIVDRLTYSLMMHGRNNGKKVMASRIMKHTMEIIHLLTDSITI

SEQ ID NO: 303750 - protein, 1418 aa, Zea mays
  Clone ID: MRT4577_40091C.1.pep
MDPKGKGMVVNDKEKESIFNEPRDDKPTNSGSSHKKKDGKRRGASRRSSTTTVMHLLLHQETTMMTILRQRKKRDEYNKISGLDNAKQIWDTLKISHEGNDATMITKMELVEGELGKFAMIRGEEPTQTYNRFKTLVNKIRSYGSTRWTDHDVVRLMLRSFTVIEPHLVNLIRENPRYTKMTPEEILGKFVSGRMMVKEARYVDDTLNGPLPVYEPQPVALKATSSKETLPSKVAQVEAIGLNEDEMALIIKHFKTALKGRKEYPNKNKTRGKRSCFKCGKTGYFIAQCPNNENDQGQERHGKKEKKKSYRKAKGEAHLGKEWDSDCFSSDSDDEGLAASAFDKSSLFPNERHTCLMAKEKKDRLLEKQEDILYEEHDKFVSVQKSIALEIKRNEMLSSELSVCHELVSSLKSLNDELNAKLEEVNKSSSCVKHVVICNRCKDFDVNSCDEHLISIAKLNDEVGSLNAQLKTCKIDFDKLKFARDAYTIGRHPSIKDGLGFQKEAKNLTSQRAPIPNKEKGKVSMASSTQRNHAFIYNRKIASHSNYNRSYDHDAFDSHVMFASSSTFVHGRSRPRRNHVVHHVPRKACNESTTVFHACNTSFILSCKNEKVVARKLGSKCKGDKTCIWVPKAIVTNLVGPNKSLIIDIGCTNHITGEKKMFTSYVKNKDSQDTIIFGDGNQGKVKGLGKIAISSEHSISNVFLVESLGYNLLSVSQLCHMGYNCLFTNVDVSVFRRSDGSLVFKGVLDGKLYLVDFSKEEADLDACLIAKTSMGWLWHRRLAHVGMKNLHKLLKGEHVLGLTNVCFEKDRPCAACQAGKQVGSTHHSKNVMTTSRPLELLHMDLFGPVAYLSIGGSKYGLVIIDDFSRFTWVFFLQDKSETQGTLKHFLRRAQNEFELKVKKIRSNNRSEFKNLQVEEYLEEEGVKHEFSAPYTPQQSGVVERKNKTLIDMARMMLGEFKTPERFWSKAVNTACHAINRLYLHCLLKKISYELLTGNKPNVSYFRVFGSKCYILVKKGRHSKFSPKAVEGFLLGYDSNTKAYRVFNKSSGLVEVSSDVVFDETNGSPREQVDLDDIDEDDVPTTSMRTMAIGDTVNRYLKKREQIKGGAHEEQMMEEEAPRVPPTQVRATIQRHHPVDQILGDISKGVTTHSRLANFCEHYSFVSSIEPFRVEEALQDPDWVLAMQEELNNFKRNEVWSLVPRPKQNVVGTKWVFRNKQDEHGVMTRNKARLVAKGYAQVAGLDFEETFAPVARLESIRILLAYATHHSFRLFQMDVKSAFLNGPIKEEVGKADPTLFTKTCDGDLFVCQIYVDDIIFGSTNQKSCEEFSRVMTQKFEMSMMGELTYFLGFQVKQLKDSTFLSQTKYTQDLLQRFGMKDAKPAKTPMGTDGHEDLNKGGGDVLQLDPLRLTCVFEYS

SEQ ID NO: 303751 - protein, 103 aa, Zea mays
  Clone ID: MRT4577_40092C.1.pep
PEPESEPVVEATPEPEPEPVVEATPEPEPEPVVEATPEPEPVVEANPNKIAEPTKVVPVVVTKTETQITRPSSKFDLFTWFPSLKNFPFFVNLWTKLTGFFSK

SEQ ID NO: 303752 - protein, 1107 aa, Zea mays
  unsure (1)..(1107): unsure at all Xaa locations
  Clone ID: MRT4577_40093C.1.pep
MDPKGKGMVINDKEKESFVNEPNNDKPTDSGSGHKRKDGRKKKTRRIKEIVYYDSDESSSSQKDDDDYDRRKTIHKNAQATTVLLASLCRDEYHKVSGLDNAKQIWDTLKISHEGNDVTLLTKMELVEGELGRFAMIRGEEPTQTYNRLKTLINKIRSYGSTRWTDHDVVCLMLRSFTVLDPHLVNNIRENXVHQDVARRSSWETRXGRMMIKEARYVDDALNGPINEPQPLALKATRSMEALPSRVAQFEAAGLNDEEMALIIKRFKTVLKGRKGQPSKTKAKGKRSCFKCGKLGHFIANCPDNESDQEKGNKREKKKHYKKAKGEAHIGKEWDSDCSSSDSDNEGLAATAFNKSSLFPXERHTCLMAREKKXNILLEKQEDLLYEEHDKFVEAQKSLALEIKRNEMLSSELSSCHETIAKLKSFNDDLNAKLEVASKSNSCVEIVETCNRCKDFDIDTCSDHLVSISKLNDELASLNAQLKTSKNEFDKLKFARDAYTIGRHPSIKDGLGYKREAKNLTSHKAPISAKEKGKAPMASSVQKNHAFMYHDRRQSRNAYRSCNAYNVFDSHAMFASSSSYMHDKNVGRRNVIHNMPRKNVVNIPRKVYASGGSSWIIDSGCTNHMTGEKKMFTSYVKNKDSQDSIIFGDGNQGKVKGLVESLGYNLLSVSQLCNMGYNCLFTNVDVSVFRRCDGSLAFKGVLDGKLYLVDFAKGEAGLDACLIAKTSMGWLWHRRLAHVGMKNLHKLLKGEHVIGLTNVQFEKDRPCAACQAGKQVGGAHHSKNVMTTSRPLELLHMDLFGPVAYLSIGGSKYGLVIVDDFSRFTWVFFLQDKSETQGTLKRFLRRAQNEFELKVKKIRSDNGSEFKNLQVEEFLDEEGIKHEFSAPYTPQQNGVVERKNRTLIDMARTMLGEFKTPECFWSEAVNTACHAINRVYLHRLLKKTSYELLTGNKPNVSYFRVFGSKCYILVKKGRNSKFAPKAVEGFLLGYDSNTKAYRVFNKSSGLVEVSSDVVFDETNGSPREQVVDLDDVDEEDVPTAAMRTMAIGDVRPQEQVEQDQPSSSTMVHPPTQDDEQVHQKEVCDQGGAQDDHVMEEEAQPAPPTEST

SEQ ID NO: 303753 - protein, 120 aa, Zea mays
  Clone ID: MRT4577_40094C.1.pep
SPSINRVIVPVKCRPSAIITVNEGERVTYVVWSSRRLLGGPVYVYPSLRNRPEWTRLTSAPSARQPIESVTNISTSSTIQRANPAVQNGGGWVTSGRAPAQRCNTPPPPPPDLCRSSINI

SEQ ID NO: 303754 - protein, 1239 aa, Zea mays
  Clone ID: MRT4577_40095C.1.pep
MDPKGKGMVVNDKEKESFVNDPKDDKPTDSGMSHKRKDGKKKKTRRIKEIVYYDDSDESSSSQKDDDNDYEKKKTVNSNFSFDYSRIPQSSNTHFLSIPLGKPPHFDGEDYEFWSHKMRSHLFSLHPSICEIVENGMHFDSTDSPMFINEQNHKNAQATTVLLASLCREEYNKVSGLDNAKQIWDTLKISHEGNDVTMLTKMELVEGELGRFAMIRGEEPNQTYNRLKTLINKIRSYGSTRWTDHDVVRLLLRSFTVLDPHLVNNIRENPRYTKMSPEEVLGKFVSGRMMIKEARYVDDALNGPIHEPQTVALKETRSKEALPSKVAQVDATGLNEEEMALIIKLFKTALKGRKEHPNKNKTKGKRSCFKCGKIGHFIANCPDNNSDQEQDKKREKKKAYRKAKGEAHLGKEWDSDCSSSDSDNEGLAASAFNKSSLFPNEHYSSLFKGLDRNKIDKINKLIDALNDKNRLLEKQEDLLYEEHDKFVEAQKSLALEVKRNEMLSCELSTCHESISNLKSINDDLNAKLEVANRSNSCVEHVVICNRCKDFNVDACSEHLVSIAKLNDEVASLNAQLKTSKDEFDKLKFARDAYTIGRHPSIKDGLGFKREAKNLTSHKAPIPAKEKGKAPMTNSCQKNHAFMYHDRKFSRNAHYDRSFNAYNSNAMIASSSSIMHNRNLTRKNVMPRRNVVHVPSKVNNEPSTIYHACNASFAICRKDRKVIARKLGAKCKGDKTCIWVPKDIVTNLVGPNKSWVYASGGSSWIIDSGCTNHMTGEKKMFTSYIKNKDSQDSIIFGDRNQGKVKGLGKIAISSEHSISNVFLVESLGYNLLSVSQLCNMGYNCLFTNVDVSVFRRSDGSLAFKGVLDDKLYLVDFAKEEAGLDACLIAKTSMGWLWHRRLAHVGMKNLHKLLKGEHVIGLTNVTFEKDRPRAACQAGKQVGSSHHTKNVMTTSRPLELLHMDLFGPVAYLSIGGSKYGLVIVDDFSCFTWVFFLQDKSETQGTLKRFLRRAQNEFELKVKKIRSDNGSEFKNLQVEEYLEEEGIKHEFSAPYTPQQNGVVERKNRTLIDMARTMLGEFKTPERFWSEAVNTTCHAMNRVYLHRLLKKTSYELLTGNKPNVSYFRVFGSKCYILVKKGRNSKFAPKAVEGFLLGYDSNTKAYRVFNKSLGLVEVSSDVVFDETNGSPREQVVDLDDVDEEDVPTAAIRTMAIGDVRPQEQKEQDQPSSSTMVHPPTQDDK

SEQ ID NO: 303755 - protein, 635 aa, Zea mays
  Clone ID: MRT4577_40096C.1.pep
MDPKGKGIVINDKEKESFVNEPKDDKPTDSGSGHKRKDGKKKKTRRIKEIVYYDDNDESTSSQKDNDDNDYDKRKTVNSNFSFDYSRIPHSSNAHLLSIPLGKPPHFDGEDYGFWSHKMRSHLFSLHPSIWLIVENGMKFDSSDSPTFINEQIHKNAQATTVLLASLCRDEYHKMELVEGELGRFAMIRGEEPTQTYNRLKTLINKIRSYGSTRWTDHDVVHLMLRSFTVLDPHLVNNIRENPRYTKMSPEEVLGKFISGRMMIKEARYVDDALNGPIHEPQPIALKATRSKEVLPSKVAQVEAAGLNDEEMALIIKRFKTALKGRKGQPSKTKTKGKRSCFKCGKIGHFIANCLDNDSDQEQGGKREKKKAYKKAKGEAHLGKEWDSDCSSSDSENEGLAATAFNKSSLFPNERHTCLMAKEKKVCTRDSTTYDSSSDDESSDEQIDYSSLFKGLDRTKIDKINELIDALNEKDRLLEKQEDLLYEEHDKFVSAQNSLALEVKRNEMLSSEVSTCHDSISSLKRINNDLNAKLEVANKSNSCVEHVMICTRCKDFDIDACSEHLVCISKLNDEVASLNAQVKTSKSEFDKLKFARDAYTIGRHPSIKDGLGFKREAKNLTSHKAPISAREGPYG

SEQ ID NO: 303756 - protein, 651 aa, Zea mays
  Clone ID: MRT4577_40097C.1.pep
MDIKGNGMVVNDKEKESIFNEPRDNKPTDSGLSHKKKDGKKKRRIKKIVYYDSDESSSSPRDNDEKRKPQIHKNAQATTVLLASLCRDEYNKVSGLDNAKQIWDTLKISHEGNDATMITKMELVEGELGRFAMIRGEKPTQTYNRLKTLVNKIRSYGSTRWTDHNVVRLMLRSFTVIDPHLVNLIHENPRYTKMTPEEILGKFVSGRMMVKEARYVDDALNGPMPIYEPQPVALKATSSKEALPSKVAQVEALGLNESEMVLIIKCFKTALKGRKEYPNKNKTRGKRSCFKCGKTGHFIANCPDNDSDQGQENSGKREKKAYKKAKGEAHLGKEWDSDCSSSDSDDEGLAASAFNKSSLFPNERHTCLMAKEKKDKSETQGTLKRFLRRAQNEFELKVKKIRSDNGSEFKNLQVEEYLEEEGIKHEFSAPYTPQQNGVVERKNMTLIDMARTMLGEFKTPERFWSEAVNTTCHAINRLYLHRLLKKTSVEEALQDPDWVLAMQEKLNNFKRNEVWSLVPRPKQNVVGTKWVFHNKQDEHGVVTRNKARLVAKGYAQVAGLDFEETFAPVARLESIRILLAYAAHHSFSLFQMDVKSVFLNGPIKEEVYVEQPPGFEDDRYPDHVFKLSKALHGLKQAPRAWYECLRDFEST

SEQ ID NO: 303757 - protein, 65 aa, Zea mays
  Clone ID: MRT4577_40098C.1.pep
QIPQIKVQKPLCNSKNPFYKLQHLKLAIILKIPMLLQPNWFNFWFSSDLKFLKINELTNSPGPAG

SEQ ID NO: 303758 - protein, 357 aa, Zea mays
  Clone ID: MRT4577_40099C.1.pep
MTPEEILGKFVSGRMMIKEARYVDDALNGPIHEPQAIALKATSSREALPSKVVQIEAAGLNEDEMALIIKRFKTALKGRKEHPNKSKTKGKRSCFKCGKIGHFIANCPDNDSDQEQEKKREKKKAYKKAKGEAHLGKEWDSDCSSSDSGNEGLATSAFNKSSLFPNEHHTCLMAKEKKVYASGGSSWIIDRGCTNHMTGEKKMFSSYIKNKDSQDSIIFGDGNQDKDKSKTQGTLKRFLRRAQNEFELKVKKIRSDNGSEFKNLQVEEYLEEEGIKHEFSAPYTPQQNGVMKKTFQRSQYVPRRLAMCDHRNKRSKINLLPQQWCIPQLKMMNRFINKRRVIKGEHKMIMLWRKKHN

SEQ ID NO: 303759 - protein, 122 aa, Zea mays
  Clone ID: MRT4577_4009C.1.pep
MAATASLSAVAAPLSVPGLRKPLGASSLRPLQPRAARMTTTAVPASASPSSTSIKEKAAAGLTAAALAAALVLPDVAEAAQSGGLTPSLKNFLLSIVSGGVVLVGIVGAVVAVSNFDPVKRA

SEQ ID NO: 303760 - protein, 141 aa, Zea mays
  unsure (1)..(141): unsure at all Xaa locations
  Clone ID: MRT4577_400C.1.pep
XLXPSLTPCDEPVDSSWYSNQVEMGYVYAQHALHILSRNSQKKMVVLSICHKSCLPVQMLDSGMIMDLRTFXHMKNPTTCIFKRRERHVHLCETLSPVVPPKLLQSLRGPAFVDYLSSISQISKLENLRLSENKVINKRRR

SEQ ID NO: 303761 - protein, 1247 aa, Zea mays
  Clone ID: MRT4577_40100C.1.pep
MSIWEIVENGMHFDSTDNPVFINEQIHKNAQATIVLLASLCRDEYNKVSGLDNAKQIWDTLKISHEGNDATMITKMELVEGELGRFAMIRGEEPTQTYNRLKTLVNKIRSYGSTRWTDHDVVRLMLRSSTVIDPHLVNLIRENPRYTKMTPEEILGKFVNERMMVKEARYVDDALNGPLSVYEPQPVALKATSSKEALPSKVAQVEAAGLNENEMALIIKRFKTALKGLKEYPNKNKTRGKRSSFKCDKTGHFIANCPDNDSDEGQEKSGKKEKKKSYRKAKGEAHHGKEWDSDCSSSDSDDEGLAASAFNKSSLFPNERHTCLMAKEKKVYASGGSSWIIDSGCTNHMTGEKKMFTSYVKNKDSQDTIIFRDGNQGKVKDLGKIAITSEYSISNVFLVESLGYNLMSISQLCHMGYNCLFTNVDVSVFRRSDVSLAFKGVLDGKLYLVDFLKEEANLDACLIAKTSMGWLWHRRLAHVGMKNLHKLLKGEHVLGLTNAGKQVGSTHHSKNVMTTSRPLELLHKDLFGPIAYLSFGGSKYGLVIVDDFSRFTWVFFLEDKSETQGTLKRFLRRAQNKFEIKVKKIRSDDGFEFKNLQVEEYLEEEGVKHELSTPYTPQQNGVVERKNRTLINMARTMLGEFKTPERFWSEAVNTACHAINRLYLYRLLKKTSYELLTGNKPNVSYFRVFGSKCYILVKKGRHSKFASKAVEGFLLGYDSNTKAYRVFNKSSGLVEVSSDVVFDETNGSPREQVDLDDIDEDDVPTAAIRTMAIGDVRPQEQKEQDEPSSSTMGHPPTQDDGQVPQEETRDQGGAQEEQVMEEEAPLAPPTQVRETIQRNHLVDQILGDISKGVTTCSRLANFCEPFRVEDALQDPDWVLAMQEELNNFKRNEVWSLVPRPKQNVVGTKWVFHNKQDEHGVVTRNKARLVAKGYAQVAGLDFKETFAPVARLESIRILLAYAAHHSFRLFQMDVKSAFLNGPIKEEVYVEQPPGFEDDRYLDHVFKLSKALYGLKQAPRAWYECLRDLLIANAFKVGKADPTLFTKTCDGDLFVCQIYVDDIIFGSTNQKSCEEFSRVMTQKFEMSMMGELNYFLGFQVKQLKDGTFISQTKYTQDLLKRFGMKDAKPAKTPMGTDGHVDLNKGGKSVDQKVYRSMIGSLLYLCASRPDIMLSVCMCARYQSDPRECHLVAVKRILRYLVATPCFGIWYPKGSTFDLIGYSDSDYAGCKVDRKSTSGTCQFLGRSLVS

SEQ ID NO: 303762 - protein, 1279 aa, Zea mays
  unsure (1)..(1279): unsure at all Xaa locations
  Clone ID: MRT4577_40101C.1.pep
MDPKRKGMVVNDKEKESIFNEPRDDKPTDSGSSHKKKDGKKKRRIKKIIYYDSDASSSSPRDDDDSSSKKKTINQNYSFDYSRMSYNSNVHLLSIPLGKPPHFDGEDCSFWSHKMCSHLFSLHPSIWEIVENGMHFDSTDTPVMINEQIHKNAQATAVLLASLCRDXVQQNDARGDPWKIXSGRMMVKKARYVDDALNGPLPIYELQLVALKATSSKEALPSRDERSTPNKNKTRGKRSCFKCGKTGHFIANCPDNDSDQGQENSGKEKKKNYRKAKGEAHLGKEWDSVCSSSDSDDEGLAASAFNKSSLFPNERHTCLMAKEKKDRAKVEKNNELIDALNEKDRLLEKQEDILYEEHDKFISIQKSLALEIKRNEMLSSELSACHESVSNLKSLNDDLNAKLEEVNKSSSCVEHVVICNRCKDFDVDACNEHIVSITKLSNEVASLNAQLKTCKDDFNKLKFARDAYTIGRHPSIKDGLGFRKETKNLTSQKAPVLNKEKGKAPMASSSQKCHAYIYDRKFSRNAYRDYDHAMIASSSTYDCSRNRPRRNHAVSHAPRRNNVVSHVPRKMCNEPTTVFHTCNTSFILSCKNAKVVARKLGSKCKGDKTCIWVPKTIVTNLAGPNKSWVYASGGSSWIIDSGCTNHMTGEKKMFTSYVKNKDSQDMIIFGDGNQRKVKGLGKIAITNEHSISNVFLVESLGYNLLSAGKQVGSTHHSKNVMTTSRPLELLHMDLFGPVAYLSIGGRTLKRFLRRAQNEFELKVKKIRSDNGSEFKNLHVEEYLEEEGVKHEFSAPYTPQQNGVVERKNRTLIDMARTMLGEFKTPERFWSEAVNTACHAINQLYLHRLLKKTSYELLTGNKPNVSYFRVFGSKCYILVKKVSSDVVFDETNGSPREQVDLDDIDEDDVPTAPMRTMAIGYVRPQEQHEQDQPSCSTMVHPPTQDDEHVPQEEGPDQGGAQEEQVMEEEAPQVPPTQVRATIQRNHPIDQILGDISKGVTTRSRLAIFCEHYSFVSSIEPFGVEETLQDPYWVLAMQEELNNFKRNEVWSLVPRPKQNVVETKWVFHNKQDEHRVVTRNKARLVAKDYAAHHSFRLFQMDVKSAFLNGPIKEEVYVEQPPGFEDDRYPDHVFKLSKALYGLKQAPRAWYECLRDFLIANAFKVGKADPTLFTNTCDGDLFVCQIYVDDIIFGSTNQKSCEEFSRVMIQKFEMSMMGELTYFLGFQVKKLKDDTFISQTKYTQDLIKRFGMKDAKPTKTPMGTDGHVDLNKGGTSVDQKAY

SEQ ID NO: 303763 - protein, 814 aa, Zea mays
  unsure (1)..(814): unsure at all Xaa locations
  Clone ID: MRT4577_40102C.1.pep
MTGEKKMFTSYVKNKDSQDTIIFGDGNQGKVKGLGKIAITNEHSISNVFLVESLGYNLLSVSQLCHMGYNCLFTNVDVSVFRRSDGSLAFKGVLEGKLYLVDFSKEEADLDACLIAKTSMGWLWHRRLAHVGMKNLHKLLKGEHVLGLTNACFEKDRPCAACQAGKQDKSETQGTLKRFLRRAQNEFELKVKKIRSDNGSDFKNLQVEEYLEEEGIKHEFSAPYTPRQNGVVERKNRTLIDMARTMLGEFKTPERFWSEAVNTACHAINRLYLHRLLKKTSYELLTGNKPNVSYFHVMCDHXERQEQDQPSSSTMVHPPTQNDEQVPQEEAHDQXGAKEEQVMEEEAPXGPPTQVRATIQKNHPVDHILGDISKGVTTRSRLANFCEHYSFVSSIEPFRVEEALQDPDWVLAMQEELNNFKRNEVWSLVPRPKKNVVGTKWVFHNKQHEHGVVTRNKARLVAKSYAQVAGLDFEETFAPVARLESIQILLAYAAHHSFRLFQMDVKSAFLNGPMKEEVYVEQPPGFEDDRYPDHVCKLSKALYGLKQAPRAWYECLRDFLIANAFKVGKADPTLFTKTCDGDLFVCQIYVDDKIFGSTNQKSCEEFSRVMTQKFEMSMMGELNYFLGFQVKQLKDDTFISQTKYTQDLLKRFGMKDAKPAKTLMGTDGYVDLYKGGKSIDQKAYRSMIGSLLYLCVSRPNIMLSVCMCATFQSDPRECHLVAVKWILRYLVATPCFGIWYPEGSTFDLIGYSDSDYAGCKVDRKSTSGTCQFLGRSLVSWSSKKQTSIALSTAEVEYVAAGQCCAQLIWMRQTL

SEQ ID NO: 303764 - protein, 70 aa, Zea mays
  Clone ID: MRT4577_40103C.1.pep
MKLVFLFLLVTIPICCYASGSGCSILDEVIRGTINSTVTLHDYMKLVKPYVQDHFTEKAVKQFKQCFLDQ

SEQ ID NO: 303765 - protein, 82 aa, Zea mays
  Clone ID: MRT4577_40104C.1.pep
SRRMPWRKRASACATVGSPWSSAESAPKRRDWRDRSRSSASLLQFVVQPAAKGGSAISRVSRLASRRPNFALFPAFLHLDLT

SEQ ID NO: 303766 - protein, 262 aa, Zea mays
  unsure (1)..(262): unsure at all Xaa locations
  Clone ID: MRT4577_40105C.1.pep
AGRVGILVTVRSGQEVPGRRTRRLQNPSHSPSPIRYATGSSSSYCSLPSXPPAAASTAGCWPKECGGAQHHXPFWLEEPGQPPCGPPSFRLRCSSSGGSFLSIFPGNRSFHVVDHNLPLATGCPPPTVNVXSSSRXAGTFAFSRANRELLFLGXVHGVPAAGLGRGFXHLPCDNRSFVRVGDGRDFSIPHGCXLFTVVPTLRVPEGSEEDGYVASMENGFLVEWTAVPDDCPRCMARGXECTYGYGDAKFACDCSGDKCGAK

SEQ ID NO: 303767 - protein, 60 aa, Zea mays
  Clone ID: MRT4577_40106C.1.pep
THASRLRRRRFTLHLAPFHICDMTKLTRNSGLADTYRPRYHTHLRIRIKNIEASQHSKYF

SEQ ID NO: 303768 - protein, 104 aa, Zea mays
  unsure (1)..(104): unsure at all Xaa locations
  Clone ID: MRT4577_40107C.1.pep
MRLSSNAYSRMVAGPNIWVTFQALQMKKASRYDMFLIGEXPNQVVVENTGASSESFDDYPACVRYXDCRYALYDFDVDTAENVPXSGIPFIGCPPSTYLIRALM

SEQ ID NO: 303769 - protein, 83 aa, Zea mays
  Clone ID: MRT4577_40108C.1.pep
RHADSSSSTRSQFESSTAILRLPSVRIVGMSKDRHRTSSPVQIVALLKAARGAEVSILDGVWAPGLVGGCQIEERPGLGRPVL

SEQ ID NO: 303770 - protein, 158 aa, Zea mays
  unsure (1)..(158): unsure at all Xaa locations
  Clone ID: MRT4577_40109C.1.pep
GSIVVSQSINLNRVPAVAVEAMSTQGNCETHGAAVPGTKDAGTGKAGQSSGDRQEEKLPKCEQVDYGSEVEGCADDENPGKRAALVTLVGNEYCGDEDERVQVLTIVKKDEHADDIVDRINPGTVAGYSEVKGAVGASAATSAVRPAGSRSSXFHGVT

SEQ ID NO: 303771 - protein, 188 aa, Zea mays
  Clone ID: MRT4577_4010C.1.pep
LDLDVLLYIVYSLLTYVRSIINVFCSCLFLKKKKKKKKKKKKKKKKKKKKKKKNLSFAAVTALSFAEQAPARAGVKRRSLTGRPFFRKATGTAAGEMVASPLFAGGAMAKKVLLAPGNGGLFFNPSQLTVKAGDTITLKNNAGFPNNVVFNKNKGPSGVNPTKISKEEYLNAPGETYSVTLTGPGTYG

SEQ ID NO: 303772 - protein, 365 aa, Zea mays
  Clone ID: MRT4577_40110C.1.pep
MEESDLGGNLGKQTEEDKAAGESGDEGKIERSQSINLNRVPAVAVEAMSTQGNCETHGAAVPGTKDAGTGKAGQSSGDRQEEKLPKCEQVDYGSEVEGCADDENPGKRAALVTLVGNEYCGDEDERVQVLTIVKKDEHADDIVDRINPGTVAGYSEVKGAVGASAATSAVRPAGSRSSSFHGVTRHRWSGKYEAHLWDSSCRVEGRRRKGKQVYLGSYDTEEKAARAYDVAAIKYWGENTRLNFPISQYGKELEDIRDLSREECVTYLRRRSSCFSRGASIYRGVTRRQKDGRWQARIGLVAGTRDIYLGTFKTEEEAAEAYDIAAIEIRGKNAVTNFDRSNYVDKGMHCIEGEGLRLLASKPEE

SEQ ID NO: 303773 - protein, 67 aa, Zea mays
  Clone ID: MRT4577_40111C.1.pep
GKPPGTFFCKGVRITLKNCPLFFKEIPGGNPQQSPEGPCNFPFVGAPDNSLGQVLQLLDCNSWGSRV

SEQ ID NO: 303774 - protein, 134 aa, Zea mays
  Clone ID: MRT4577_40112C.1.pep
AGREIFLSFVADATTEQWRSPPSYLHIPSQCLLHTKDNLAASEAARRVRGHYFSDRAYLPAHLLYHHIYGITDQIRHAQIVYNPWMDARLRLDQDRRSIRPCTSISLLSCAEGTGRSAQYRATSDEYWSATQVS

SEQ ID NO: 303775 - protein, 166 aa, Zea mays
  unsure (1)..(166): unsure at all Xaa locations
  Clone ID: MRT4577_40113C.1.pep
FRFLVKTLRFLGGVYIPSGPVFGXLKGDXEKTLGFVYFLAHDFFXKNCFSGIFFPQGWVSLPGVXPVAFGGIHFWHMPTLAEIFGNDSVFQFGGGTFGPPWGNAPGATTNCVAFKTWVQACNEGGVFACEGNXIFKAACQWSVXTNPRFXIWKGIQFFGFQAMVPL

SEQ ID NO: 303776 - protein, 61 aa, Zea mays
  Clone ID: MRT4577_40114C.1.pep
EVVGHTHNTMKTAHTNLDSANLMAAGRGALARNTHEYLTSLQAFARTLVPLLPALAGDQKL

SEQ ID NO: 303777 - protein, 61 aa, Zea mays
  Clone ID: MRT4577_40115C.1.pep
MAGHAPARDKTTIGFAGTCSLVSQFVKEKKGGVQGLGGVAMAPAPAGGPGAFGPPTTVKLV

SEQ ID NO: 303778 - protein, 57 aa, Zea mays
  Clone ID: MRT4577_40116C.1.pep
PDLSSNSLVSNLIDRTLIPLLNFLKDTCISNTEIDHVLLVVGMTTLPYLHLSCFFIY

SEQ ID NO: 303779 - protein, 67 aa, Zea mays
  Clone ID: MRT4577_40117C.1.pep
WRGLRGLPVRLPELHRREAGPSQSGAWPHSQHTLRHAVVPTPLSTRRTAGPLHSCTRCHLSGFNRAR

SEQ ID NO: 303780 - protein, 235 aa, Zea mays
  unsure (1)..(235): unsure at all Xaa locations
  Clone ID: MRT4577_40118C.1.pep
NRVLQDVKNAFLHGDLQEEVYLEVPPGFATDQTKGKVLKLKKSLYGLKQSPRAWFDRLRRAMCNMGYKQCNSDHTVFYYHSGGSVTILAVYVDDMIITGNKKKKXKSGLNYFLGFQVKQLKDGTFISQTKYTQDLIKRFGMKDAKPAKTPMGTDGHVDLNKGGKSVDQKAYRSMIGSLLYLCASRPDTMLSVCMCARFQSDPRECHLVAVKRILRYLAATPCFGIWDPKGSTFDL

SEQ ID NO: 303781 - protein, 1679 aa, Zea mays
  Clone ID: MRT4577_40119C.1.pep
MDPKGKGMVINDNEKESIFNEPRDDKVNDSGSSQKKKDGKKKRRIRKVVYYESDESSSSQKDDECEEKKKTVNSNFSFDYSRIPHNSNTHLLSIPLATTVLLASLCREEYNKDTLKISHEGNDVTMLTKMELVEGELGRFAMIRGEEPTQTYNRLKTLINKIRSYGSTRWTDHDVVRLMLRSFTVLDPHLVNSIRENPRYTKMTPEEILGKFVSGRMMIKEARYVDDALNGPIHEPQTVALKATRSREALPSKVAQVEAVGLNEEEMALIIKRFKTTLKGRKEHPNKSKTKGKRSYFKCGKIGHFIVNCPDNDSDQEQEKKREKKKAYKKAKGEAHLGKEWDSDCSSSDSDNEGLAASAFKKSSLFPNEHHTCLMAKEKKVNTQKSTYASSSDDESSDDEIDYASLFKGLDRTKIDKINELIDALNDKNRLLEKQEDLLYEEHDKFVDAQNSLALEVKRNEMLSCELSTCHDSISSLKSINDDLNAKLEIANKSTSCVEHVIICNRCKDFNIDACSEHLVSISKLTDEVASLNAQLKTSKNELDKLKFARDAYTIGRHPSIKDGLGFKREAKNLTSHKAPISAKEKGKAPMANSAQKNHSFMYHDRRYSRNVHYDRSYNEVVSHAMIASCSSIMNDRSLARKNVIHHMPRRNVHVPRKTNNEPSTIYHACNASFAICRKDKKIIDSGCTNHMTGEKKMFTSYVKNKYSQDSIIFGDGNQGKVKGLGKIAISNEHSISNVFLVESLDVSVFRRSDGSLAFKGALDGKLYLVDFAKEEAGLDACLIAKTSMGWLWHRRLAHVGMKNLHKLLKGEHVLGLTNVHFEKDRPCAACQAGKQVGSAHHIKNVMTTSRPLELLHMDLFGPVAYLSIGGSKYGLVIVDDFSRFTWVFFLQDKSETQGTLKRFLRRAQNEFELKQYGVVERKNRTLIDMARTMLGEFKTPERFWSGAVNTACHAINRVYLHRLLKKTSYELLTGNKPNVSYFRVFGSKCYILVKKGRNSKFAPKAVEGFLLGYDSNTKAYRVFNKSSGLVEVSSDVVFDETNGSPREQVELDDVDEDDVPTDAIRTMAIGDVRPQELKEQDQPSSSTMVHPPTQDDEHVPQEEACDQGGAQDVQVEEEEAHQAPPTQVRAMIQRNHPVDQILGDISKGVTTRSRLANFCKHYSFVSSIEPFRVEEALLDPNWVLAMQEELNNFKRNEVWTLVPRPKQNVVGTKWVFRNKQDEHGVVTRNKARLVAKGYAQVAGLDFEETFAPVARLESIRILLAYAAHHSFRLFQMDVKSAFLNGPIKEEVYVEQPPGFEDERYPDHVCKLFKALYGLKQAPRAWYECLRDFLIANAFKVGKADPTLFTKTCDGDLFVCQIYVDDIILGSTNQKSCEEFSRVMTQKFEMSMMGELNYFLGFQVKQLKDGTFISQSKYTQDLLKRFGMKDAKPAMTPMETDGHVDLDKGGKSVDQKAYRSMIGSLLYLCASRPDIMLSVCMCARFQSDPRECHLVAVKRILRYLVTTPCFGIWYPKGSTFDLIGYSDCNYAGCKVDRKSTSGTCQFLGRSLVSWSSKKQTSVALSTAEAEYVAAGQCCAQLLWMRQTLRDFGYNLSKVPLLCDNESAIRMADNPVEHSRTKHIDIRHHFLRDHQQKGDIKVFYISTENQLADIFTKPLDEKTFCRLRSELNVLDSRNLD

SEQ ID NO: 303782 - protein, 38 aa, Zea mays
  Clone ID: MRT4577_4011C.1.pep
REECLMSTYSKGAVLWVVLFLWCYILLYSTMIMSCLHF

SEQ ID NO: 303783 - protein, 297 aa, Zea mays
  Clone ID: MRT4577_40120C.1.pep
MMTQKFEMSMMGELNYFLGFQVKQLKDDTFISQTKYTQDLLKRFGMKDAKPAKTPMGTDGHVDLNKGGKSVDQKAYRSMIGSLLYLCASRPDIMLSVCMCARYQSDSRECHLVAVKRILRYLVSMPCFEIWYPKGSTFDLIGYSDSDYARCNVDRKSTSGTCQFLGRSLVSWSSKKQTSVALSTVEAEYVAAGQCCTHLLWMRQTLMDFGYNLSKVPLLCDNESAIRMADNPVEHNRTKHIDIRHHFLRDHQQKGDIEVYHISTKNQLTDIFTKPLDEKTFCRLCGKLNVLDSRNLD

SEQ ID NO: 303784 - protein, 98 aa, Zea mays
  unsure (1)..(98): unsure at all Xaa locations
  Clone ID: MRT4577_40121C.1.pep
LPKWADSTKTIHPYIEYEELSKAETSEQCAYTYNRTLEEXLTRTYTQLMGKFQCLLFXXEKMXSVTHSVIQVKQPVMHSESAHVIQHMIDQNNLQQNP

SEQ ID NO: 303785 - protein, 705 aa, Zea mays
  Clone ID: MRT4577_40122C.1.pep
MDPKGKGIVINDKEKESFVNEPRDDKSNDSGSGHKRRDGKKKKTRRIKEIVYYDSDESSSSQKDDDYDKQRKPVNSNFSFDYSRIPHSSNSHLLSIPLGKPPHFDGEDYGFWSHKMRSHLFSLHPSIWEIVENGMKFDSSDSPMFINEQIHKNAQATTVLLASLCREEYNKVSGLDNAKQIWDTLKISHEGNDITMLTKMELVEGELGRFAMIRGEEPTQTYNRLKTLINKIRSYGSTRWTDHDVVRLMLRSFTVLDPHLVNNIRENPRYTMMTPEEVLGKFVSGRMMIKEARYVDDALNGPIHEPQPIALKASRSKEALPSKVAQIEAAGLNDEEMALIIKRFKTVLKGRNGQPSKTKTKGKRSCFKCGKLGHFIANCPDNESDQEKGNKREKKKHYKKAKGEAHLGKEWDSDCSSSDSDNEGLAATAFNKSTLFPNERHTCLMAREKKVGTRNSTYASSSEEESSDEDEVDYSCLFKGLDRSKIDKINELIDALNEKNILLEKQEDLLYEEHDKFVEAQKSYALEVKRNEMLSFELSTCHETISTLKGVNNDLNAKLEVANKSNSCVEHVEICTRCKDFDINACSEHLVSISKLNDELASLNAQLKTSKNDFDKLKFARDAYTIGRHPSIKDGLGFKREAKDLTSHKAPIPAKEKGKAPMASNVQKNHAFMYYDRRQTRNAYRSYNAFDDFDSHAMFAPSSSY

SEQ ID NO: 303786 - protein, 53 aa, Zea mays
  Clone ID: MRT4577_40123C.1.pep
KKKKKKKKNKKKKKKKKKEKKKNLKKKKKKKKKKKKKKKKRGGRFRGSKFTSP

SEQ ID NO: 303787 - protein, 50 aa, Zea mays
  unsure (1)..(50): unsure at all Xaa locations
  Clone ID: MRT4577_40124C.1.pep
WSPSSAKVKSKMLYASQTQKFKSGLNGMQVXLQPTDASETILHEIKHRAS

SEQ ID NO: 303788 - protein, 109 aa, Zea mays
  Clone ID: MRT4577_40125C.1.pep
CCFWASAFGLISPGTHGCCPGHLVSFSSRISLECVYGGGIIRDPSISRSGSVIFQSGTAVRYMRVPSGPVHAHLPQGRSQEHDPVIELEDRVSIVVPQQSTGLKEVGEG

SEQ ID NO: 303789 - protein, 152 aa, Zea mays
  Clone ID: MRT4577_40126C.1.pep
SSYMHDRDMSRRNVVHHMPRRNGVNVSRKINEPSTIYHACNASFAICRKNKKVYASGGSSWIIDSGCTNHMTGEKKMFTSYVKNKDSQDSIIFGDENQGKVKGLGKIAISNEHSISNVFLVESLGYNLLSVSQLCNMGYNCLFTNVDVSVFR

SEQ ID NO: 303790 - protein, 52 aa, Zea mays
  Clone ID: MRT4577_40127C.1.pep
PFSLFHTLHIYSVSIRNLSQPFPTPNPPYLPHSLLTLHYPPTPNYQTIYPLN

SEQ ID NO: 303791 - protein, 164 aa, Zea mays
  unsure (1)..(164): unsure at all Xaa locations
  Clone ID: MRT4577_40128C.1.pep
EGNDITMLTKMELVEGELGKFAMIRGEDPTQTYNRLRTLINKIRSYGSTRWTDHDVVRLMLRSFTVFDPHLVNNIRENPRYTNMTPEEVLRKFISSRMMIKEARYVDYALNGPINXPQPLAVKATRSKEALPSMVAQIEAAGLNDEEMALIIKRFKTALKGRKG

SEQ ID NO: 303792 - protein, 194 aa, Zea mays
  Clone ID: MRT4577_40129C.1.pep
PNSSSLPWWCPAPLFPLPPALGSRPCSPSQLVQRVVPRPRRAPSLVAVSEPDPKLLCVLLYPQFALPPCSRFFHGRRCPQPSPWWPTSPLPQPQLPLRPCCCKHSASPMAHGARPAPFCWWLSHLPGARRNDHEEICVVCSPICDTVDLRNPMIWGKTNPSTTPANRSMKNLNQNPQRFQGFRRDFMLQEKKED

SEQ ID NO: 303793 - protein, 210 aa, Zea mays
  unsure (1)..(210): unsure at all Xaa locations
  Clone ID: MRT4577_4012C.1.pep
SIADAKQITVGGSENEDEKDYTILSPTKPSHIEFCKSTVTADDMVMMKKLGYFGEAERKLVRFAGEEVIPDPKDDEVVVFKSFFRAGLRLPLHEMIGEVLKXFEIYFHQLTPNAVVRLSXYIWVVRSQAMSPNVEAFCRVHELHYQTKARADGLHENFSCYNFXYQKDTEAPILSYRTKWSTDWKSEWFYIKVDEXKEKLMTMAMSPLEL

SEQ ID NO: 303794 - protein, 60 aa, Zea mays
  Clone ID: MRT4577_40130C.1.pep
EARNWVDSTPVGWGARLFSRLRGRFPSGYDPRGHGPLWSWGGERWPSLVIRGSTHGYWSL

SEQ ID NO: 303795 - protein, 434 aa, Zea mays
  Clone ID: MRT4577_40131C.1.pep
MDPKGKGMVVNNNEKESIFNEPKDDKPTDSVSSHKHKDGKKKKTRRIKEIVYYDSDESSSSQKDDDYEKKKTVNSNFSFDYSRIPQSTNAHLLSIPLGKPPHFDGEDYGFWSHKMRSHLFSLHPSIWEIVESGVHFDSTDSPMFINEQIHKNAQATTVLLASLCRDEYHKVSGLDNAKQIWDTLKISHEGNDVTMLTKMELVEGELGRFAMIRGEEPTQTYNRLKTLVNKIRSYGSTRWTDHDVVRLMLRSFTVLDPHLVNNIRESPSGRMMIKEARYVDDALNGPINEPQPLALKATRSKETLPSKVAQIEAVGLNDEEMALIIKRFKTALKGRKGQPSKTKTKGKRSCFKCGKLGHFIANCPDNDSDQDQGNKREKKKNYKKAKGEAHLGKEWDSDCSSSDSDNEGLAATAFNKSSLFPNERHTCLMAREKK

SEQ ID NO: 303796 - protein, 88 aa, Zea mays
  Clone ID: MRT4577_40132C.1.pep
MASRPKLSGIQKQVLALYRGFLRTARLKAPEERHRIESVVLAEFRDKAKSVDRRNFIHIEYLLRSGKKQLEQLKNPDITGLATLVVKK

SEQ ID NO: 303797 - protein, 57 aa, Zea mays
  Clone ID: MRT4577_40133C.1.pep
AQKFSFTLLSRIISVAIQNPALILHIRLLAKSVKLWMKEKRCREGENFRSAHYNKAG

SEQ ID NO: 303798 - protein, 84 aa, Zea mays
  unsure (1)..(84): unsure at all Xaa locations
  Clone ID: MRT4577_40134C.1.pep
RQLRGAEHLCHRQGLYHHELKPXNLLSHEHRNLKVCDFHLSALRECQKQDGMLHTSCGSPAYVAPEIINRKGYDSAKADIWSCG

SEQ ID NO: 303799 - protein, 215 aa, Zea mays
  unsure (1)..(215): unsure at all Xaa locations
  Clone ID: MRT4577_40135C.1.pep
MGQNHSAQDGSGHGRRSFQQQPSAQWGAGGGGYYAQDPNAGYCGAPVPQQGGGYAAPYLPPAYQYQPTAAAPAPQVAKPRQLDRRYSRIADDYHSVDQVTDALAQAGLESSNLIVGVDFTKSNEWTGKFSFHGRSLHHISNTPNPYEQAISIIGRTLSKFDEDNLIPCFGFGDASTHDQDVFCFSPDERQCNGFEEALDRYRELVPHLRXAGPHH

SEQ ID NO: 303800 - protein, 636 aa, Zea mays
  Clone ID: MRT4577_40136C.1.pep
MATIARSREQLVSGAYTSYTWSGKGRRENAQRAMRGANCPVPHGSDRGKREREVAKRLESGAQAVTPTLASGEDKSETQGNLKHFLRRAQNEFELKVKKIRSDNGSEFKNLQVEEYLEEEGVKHEFSAPYTPQQNGVVERKNMTLIDMARMMLGEFKMPERFWSEAVNTACHAINRLYLHRLLKKTSYELLTGNKPNVSYFRVFGSKCYILLKKGRHSKFAPKAVEGFLLGYDSNTKAYRVFNKSSGLVEVSSDIVFDETNGSPREQVDLDDIDEDDVPTAAMRTMAIGDPFRIEEALQDPDWVLAMQEELNNFNRNEVWSLVPRPKQNLVGTKLFQMDVKSAFLNGPIKEEVYVEQPPGFEDDRYPDHVFKLSKALYGLKQALRAWYECLRDFLIANAFKVGKVDPTLFTKTCDGDLFVCQIYVDDIIFGSTNQKSCEEFSRVMTQKFEMSMMGELNYFLGFQVKQLKDGTFISQTKYTQDLLKWFGMKDAKPAKTPMGTDGHVDLNKGGKSIDQKVYRSMIGSLFYLCASRPDIMLSVCLCARYQSDPKECHLVAVKQILRYLVATPCFGIWYSKGSTFDLIGYSDSDYAGCKVDRNSKSGTCQFLGRSLVSWSSKKQTSVALSTTEVEYVAAG

SEQ ID NO: 303801 - protein, 88 aa, Zea mays
  Clone ID: MRT4577_40137C.1.pep
MASRPKLSGIQKQVLALYRGFLRTARLKAPEERHRIESVVLAEFRDKARRVDRRNFIHIEYLLRSGKKQLEQLKNPGITGLATLVVKK

SEQ ID NO: 303802 - protein, 209 aa, Zea mays
  unsure (1)..(209): unsure at all Xaa locations
  Clone ID: MRT4577_40138C.1.pep
MGQRQSHSKRDGSSHGRRSRSFQQQPSAQWGAGGGGYYQQDPSTGYYGAPVPQQGGGYQQDPGTGYYGAPVPQQGGGYAAPYRDKPAAVAVAAPAPQAAKPRQLDRRYSRIADEYHSVDQVTDALAQAGLESSNLIVGIDFTKSNEWTGKFSFHGRSLHHISNTPNPYEQAISIIGRTLSKFDEDXLIPCFGFGDAXTHDQDVFCFSPD

SEQ ID NO: 303803 - protein, 613 aa, Zea mays
  Clone ID: MRT4577_40139C.1.pep
MDPKGKGIVINDKEKESFVNEPKDDKPTDSGSGHRRKEGKKKKMRRIKEIVYYDDSDESTSSQKDDDHNDYERRKPVNSNFSFDYSRIPQSTNAHLLSIPLGKPPHFDGEDYGFWSHKMRSHLFSLHPSIWEIVESGMHFDSSDSPMFINEQIHKNAQATTVLLASLCRDEYHKVSGLDNAKQIWDTLKISHEGNDVTLLTKMELVEGELGRFAMIRGEEPTQTYNRLKTLINKIRSYGSTRWTDHDVVRLMLRSFTVLDPHLVNNIRENPRYTKMSPKEVLGKFVSGRMMIKEARYMDDALNGPINEPQPLALKATRSKEALPSKVAQIEAAGLNDEEMALIIKRFKTTLKGRKGQPSKTKAKGKRSCFKCGLAATAFNKSSLFPNERHTCLMAREKKGLDRTKVDKINELIDALNDKNRLLEKQEDLLYEEHDKFVEAQKSHALEFKRNEMLSCELSSCHETISSLRSINDNLNAKLEIASKSTTCVENVVIYNRCKDFDIDACSEHIASIAKLNDEMASLNAQLKASKSDFDKLKFARDAYTIGRHPSIKDGLGFKREAKNLTSHKAPISAKEKGKAPMAILPICIVEICLGKIFIMCLERMLLMFLGKL

SEQ ID NO: 303804 - protein, 88 aa, Zea mays
  Clone ID: MRT4577_4013C.1.pep
EPNAKLFLKKKTANAHITHNSRISYRHSCSHIGTKNGDMEHTSLTQADEQKQTSLIASSDRKGIRSKHMASSGQPPFGGTDFALNQTN

SEQ ID NO: 303805 - protein, 80 aa, Zea mays
  Clone ID: MRT4577_40140C.1.pep
MASRPKLSGIQKQVLALYRGFLRTARLKAPEERRRIESVVFAEFRDNARSVDRRNFVHIEYLLRRGKKQLEQLKNPDITG

SEQ ID NO: 303806 - protein, 84 aa, Zea mays
  Clone ID: MRT4577_40141C.1.pep
PVYPHVVRSVVSVSLSVPRESVGYPSVVVVALNVRWLRCVLFSARPSASEWEKKGAHANSVIARPGDSSVHVCQYKPTRPPTRQ

SEQ ID NO: 303807 - protein, 191 aa, Zea mays
  Clone ID: MRT4577_40142C.1.pep
MASSVQKNHAFMYHDRRQFRNAYRRCNAYDVVDSHDMFASSSSYVHDRNVGRRNVVHNMPRRNVVNVPRKVYASGGSSWIIDSGCTNHMTGEKKMFTSYVKNKDSQVSIIFGDGNQGKVKGLVESLGYNLLFVSQLCNMGYNCLFTNVDVSVFRRSDGSLAFKGVLDGKLYLVDFAKEEDKSETQGTLKRF

SEQ ID NO: 303808 - protein, 88 aa, Zea mays
  Clone ID: MRT4577_40143C.1.pep
MASRPKLSGIQKQVLALYRGFLRTARLKAPEERRRIESVVFAEFRDNARSVDRRNFVHIEYLLRRGKKQLEQLKNPDITGLATLVVKK

SEQ ID NO: 303809 - protein, 88 aa, Zea mays; identical to SEQ ID NO: 303796
  Clone ID: MRT4577_40144C.1.pep

SEQ ID NO: 303810 - protein, 145 aa, Zea mays
  Clone ID: MRT4577_40145C.1.pep
MDDDSRSQAAAAADLSLSLAPTPAPPAPPPPGPGGGGGVATACVDGKDVRLFPCLFCNKKFLKSQALGGHQNAHKKERSIGWNPYFYMTPHPQQPNAAPPSPTAPPAYAAAADYGVAGAGASAGVLGGLLPASSYAGFVYAPAVP

SEQ ID NO: 303811 - protein, 47 aa, Zea mays
  Clone ID: MRT4577_40146C.1.pep
PQILPPRPSHVCSNRSISADGFKRRSLVNHSQQPLVSRTRGRPGVGP

SEQ ID NO: 303812 - protein, 88 aa, Zea mays; identical to SEQ ID NO: 303808
  Clone ID: MRT4577_40147C.1.pep

SEQ ID NO: 303813 - protein, 110 aa, Zea mays
  Clone ID: MRT4577_40148C.1.pep
MAAASPAPSRPRLSGELPSMSWPLSRSPRRSPRKICDALVVAETAIHFRASRNRRSSFGDQMTQLFEFYKAEDSEHLFGEGCLWCNLCSGKEEGVEVDLQEFQDFDEFED

SEQ ID NO: 303814 - protein, 62 aa, Zea mays
  Clone ID: MRT4577_40149C.1.pep
VSQILNSNFMQILCVLIGVILKGLIVVTFKCANCYIDISYSDMEYTCMIVKHLKMVVTDSKE

SEQ ID NO: 303815 - protein, 106 aa, Zea mays
  Clone ID: MRT4577_4014C.1.pep
IRERGGRKAIDGVQLRGHDGRGGTVPRPSQPQHHHDPHGRGGGGGGLAGRLAVQIILQLLRLPQPLRVRPLQLLVASLDDHGSDCYLSSLWWWLNSSQLGRAGCHT

SEQ ID NO: 303816 - protein, 83 aa, Zea mays
  unsure (1)..(83): unsure at all Xaa locations
  Clone ID: MRT4577_40150C.1.pep
MASRPKLSGIQKQVLALYRGFXLRTARLKAPEERRRIESVILAEFRDNARSVDRRNFVHIEYLLRRGKKQLEQLKNPDITGLA

SEQ ID NO: 303817 - protein, 88 aa, Zea mays
  Clone ID: MRT4577_40151C.1.pep
MASRPKLSGIQKQVLALYRGFLRTARLKAPEERRRIESVILAEFRDNARSVDLRNFVHIEYLLRRGKKHLEQLKNPDITGLATLVVKK

SEQ ID NO: 303818 - protein, 57 aa, Zea mays
  Clone ID: MRT4577_40152C.1.pep
SQPNVMCVYSPRGRLHLFLNCGVPMLIMGELFEPYTSSTEERGAHTLSETTLAHNSW

SEQ ID NO: 303819 - protein, 202 aa, Zea mays
  unsure (1)..(202): unsure at all Xaa locations
  Clone ID: MRT4577_40153C.1.pep
RPGHKSALHVLLHVVTRTTCSTPHXETAHDDKIAADLWERVILAAIPDLYLHDKTXFHLNPHCRXIVGGXHLNTCLAVRNSIINLYXSAPAHGNPAFTTPDPANGYPSGAYDHMSVANMIAMAMLHPRAITQASYAIGVAEHTIHACVXSIGTGSILDEWILMILDDNYXMRYCMIVHQLXLINGXTERYPKTAAYGHSSRY

SEQ ID NO: 303820 - protein, 47 aa, Zea mays
  Clone ID: MRT4577_40154C.1.pep
YMLKPWSCIRWSCGVFGLETLRPASLIARCNGLAQWHIKRLQAVRKP

SEQ ID NO: 303821 - protein, 50 aa, Zea mays
  Clone ID: MRT4577_40155C.1.pep
FFFFFFFFFFFFFFFFFFFFFFFFFFWEQKREKQAKKSKNHPIRNKRGPI

SEQ ID NO: 303822 - protein, 65 aa, Zea mays
  Clone ID: MRT4577_40156C.1.pep
SPCALLSEATPKWTPVPNRGYVLFPLPTYLQQGFPSPFVYWNRDKQGHKKSPLLSLLRETRVFPK

SEQ ID NO: 303823 - protein, 48 aa, Zea mays
  Clone ID: MRT4577_40157C.1.pep
KTRPRLTNRLNPPASPFMISVVVILMRSHAFRTCLSSCSVDPTANLST

SEQ ID NO: 303824 - protein, 52 aa, Zea mays
  Clone ID: MRT4577_40158C.1.pep
IVVLLATLLCAAAAVASSWDDDNHHHHGGHKSGQCVRLCEDLLWHQRPLVPE

SEQ ID NO: 303825 - protein, 121 aa, Zea mays
  Clone ID: MRT4577_40159C.1.pep
KKKKKQRKNKEQKKKKKKKCFDLKANFVPKPPLGPISVDFLDIGACLALFSRGPHFPLLGGCFPFRGPTFSMVGPGKPLAYPTLSALPYIPFSPFGLFPKGPPPFSFPNVGPPWVATGPPL

SEQ ID NO: 303826 - protein, 217 aa, Zea mays
  Clone ID: MRT4577_4015C.1.pep
MPIAMDTGGAPEPDEESVVFPRWAMLDRRGRTRCHNGLNAARVAANKNKTAAPVDMDGGPSCYVSFTLAAPQKRISCLNLHLPEEPPLTPATPPAYAFVRATDKNLVLFDITNPSRSCYWDPPSDLFVYTAGGPSPSVQPLPMYTKERERPFLMDNLTTGILRLAEDRYIVADLNVYPKERAMACVPNSASSTPRLGSGKSSANWTRQWRTPRTLVN

SEQ ID NO: 303827 - protein, 188 aa, Zea mays
  Clone ID: MRT4577_40160C.1.pep
MAAGPVTATSSMAVPSARRNRALLPTVSVAREPARAWAAAGAEGRARRGKEAEVEDEKEAERRRKEEVNRKIASRKALSVILRREATKAVLDKRKPGKGTRRLLPGTVLEALHDRIAALRWDSALKVFELMRDQVWYKPHIGIYIKLITMLGKCKQPEKAHQLFQAMIDEGCAPNLQSYTALVSTYSR

SEQ ID NO: 303828 - protein, 121 aa, Zea mays
  unsure (1)..(121): unsure at all Xaa locations
  Clone ID: MRT4577_40161C.1.pep
LSLSQRPTTSCVSRKLPQLLLFIXWRSQQKAICVIRLGLHNTGDFVREITGFCLALCLAERGTRRPAAAALPAGSARNFENRKFHQCAIAVPRSERSWRLGFGARTFRQKPRGCEKIKLTK

SEQ ID NO: 303829 - protein, 44 aa, Zea mays
  Clone ID: MRT4577_40162C.1.pep
ARTCIILHTHLQRHHLLLIYMAEQVTTELIVLIINCRRTLTDRR

SEQ ID NO: 303830 - protein, 668 aa, Zea mays
  Clone ID: MRT4577_40163C.1.pep
MDPKGKGIVINDKEKESFVNEPKDDKPTDSGSGHRRKEGKKKKTRRIKEIVYYDDSDGSSSSQKDDDNDYRKTIHKNAQATTVLLASLCRDEYNKLVEGELGRFAMIRGEEPTQTYNRLKTLINKIRSYGSTRWTDHDVVRLLLRSFTILDPHLVNNIRENPRYTKMSPEEVLGKFVSGRMMIKEARYVDDALNGPIHEPQPIALKATRSKEALPSKVAQVEAAGLNNEEMALIIKRFKTALKGRKGQPSKTKTKEKRSCFKCGKIGHFIANCPDNESDQEKGDKREKKKHYKKAKGEAHIGKEWDSDCSSSDSDNEGLAATAFNKSTLFPNERHTCLMAREKKVSTRDTTYVSSSDDESSDEEIDYSSLFKGLDRNKIDKINELIDALNEKDRLLEKQEDLLYEEHDKFIEAQKSYALEVKRNEMLSFELSTCHETISTLKGVNNDLNAKLEVANKSNSCVEHVVICTRCKDFDIDACSEHLVSISKLNDELASLNAQLKTSKNDLDKLKFARDAYTIGRHPSIKDGLGFKREAKNLTSHKAPIPAKEKGKAPMASSVQKNHAFMYHDKRQTRNAYRSYNAYDDFDSHDMFVSSSSHMHGRNMSRRNAIHHCDTPVSPRVSLKQPNQKPSFYVNQSKHEHQNNLSEKEFTKYILKSVMIKTIETFER

SEQ ID NO: 303831 - protein, 810 aa, Zea mays
  Clone ID: MRT4577_40164C.1.pep
MALPVDVAGLRPRSGDVEAPLKPRSSLSSMAEPEPEPLGRARRRRKDFNVDACSEHLACISKLNDEVASLNAQLKTSKNDFDKLKFARDAYTVGRHPSIKDGLGFKREAKNMTSHKTSISAKEKGKAPMASSAQKNHAFMYHDRRHSRNVYRSYDAFDSHAMIASSSSIMHDRNMARKNDMPRRNVVHVPKKIMNEPSTIYHALNASFAICRKDKKVYASGGSSWIIDSGCTNHMTGEKRMFSSYVKNKDPQDSIIFGDGNQGKVKGLEKIAISSKHSISNVFLVESLGYNLLSIDLVQLVKQDKSETQGTLKRFLRRAQNEFELKFSAPYTPQQNGVVERKNRTLLDMARTMLGEFKTPERFWTEAVSTACHAINRVYLHRLLKKTSYELLTGNKPNVSYFRVFGSKCYILVKKGYDSNTKEYRVFNKSSGLVEVSSDVVFDETNGSPREQVVDLDDVDEEDIPTAAMRTMAIGDVRPLEQKEQDQPSSKTMVHPPTQDDEQVHQEVACDQGGAQDVHVIEEEAQPAPPTQVRATIQRNHPVDQILGDISKGVTTRSRLVNFCEHYSFVSSIEPFRVEDALLDPDWVLAMQEELNNFKRNEVWTLVPRPKQNVVGTKWVFRNKQDEHGVVTRNKARLVAKGYAQVTGLDFEETFAPVARLESIRILLAYATHHSFRLFQMDVKSAFLNGPIKEEVGKADPTLFTKTCDGDLFVCQIYVDDIIFGSTNQKSCEEFSRVMTQKFEMSMMGELSYFLAFQVKQLKDGTFISQTKYTQDLIKRFGMKDAKPAKTPMGTDGHTDLNKGGLLHSI

SEQ ID NO: 303832 - protein, 707 aa, Zea mays
  Clone ID: MRT4577_40165C.1.pep
MDPKGKGIVINDKEKESFVNEPKDDKSNDSGSGHRRKDGKKKKTRRIKEIVYYDSDESTSSHKDDDYDKHKTVNSYFSFDYSRIPHSSNAHLLPIPLGKPPHFDGEDYGFWSHKMRTHLFSLHPRIWEIVESGMKFDSSDSPSFINEQIHKNAQATTVLLASLCRDEYHKVSGLDNAKQIWDTLKISHEGNDVTLLTKMELVEGELGRFAMIRGEEPTQTYNRLKILINKIRSYGSTRWTDHDVVRLMLRSFTVLDPHLMNNIRGNPRYTKMTPEEVLGKFVSGRMMIKEARYVDDALNGPINEPQPLALKATKSKEALPSRVAQIEAAELNDEEMALIIKRFKTALKGRKGQPSKTKAKGKRSCFKCGKLGHFIANCPDNDSDQDQGNKREKKKNYKKAKGEAHLGKEWDSDCSSSDSDNEGLAATAFNKSSLFPNERHTCLMAREKVITRNDITYDSSSDDESSDDEIDYSSLFKGLDKNKIDKINELIDALNEKDRLLEKQEDLLYDEHDKFIEAQKSYALEVKRNEVLSSELSSCHENIATLKSVNDDLNAKLEVASKSTSCVEIVETCTRCKDLNVDACSKHLVSISKLNDEVASLNAQLKASKSEFDKLKFARDAYTIGRHPSIKDGLGFKREAKNLTSHKAPIPAKEKGKAPIATSAKKNHAFLYHDRRQTRNAYRSYNAYDDFSHAMFASSSSYVHDRN

SEQ ID NO: 303833 - protein, 183 aa, Zea mays
  Clone ID: MRT4577_40166C.1.pep
YPCPAGKKKKKKKKKKYKKKKKKKKKKKKKKKKKKKKKRIGSCQGMTDLLSPIVAALGENHEPFGGFGGFMRKAKPNFKLDEVEIKKQLKTVSQIIKLKDSQFYRHLQKLKAENCFFLYRRGGVFFRRELTFEQTMCLGEVMGADQAAIRAGIGRPTWARIRFNPPPTNNLLFYAIEACVLQR

SEQ ID NO: 303834 - protein, 103 aa, Zea mays
  Clone ID: MRT4577_40167C.1.pep
MSMMGELTYFLGFQVKQLKDSTFISQTKYTQDLLKRFGMKYAKPVKTPMGTDGHVDLNKGVATPCFTIWYPKGSTFDLIEYADSDYAGCKVDRKSTSGTCQFL

SEQ ID NO: 303835 - protein, 107 aa, Zea mays
  unsure (1)..(107): unsure at all Xaa locations
  Clone ID: MRT4577_40168C.1.pep
TVNFIYINTPTIATNTFTLRMVLALCGCVANTTISTQCSQACIAXLLPPYHPSIIAXVCENRXLQPYRHQQADVPINIPVXPLLQQSAGLSLEQSLVQTIIAHQLHQ

SEQ ID NO: 303836 - protein, 96 aa, Zea mays
  Clone ID: MRT4577_40169C.1.pep
MAPRAKNSLVAEGDVSVQKVKKIEPVYDYDLVTRPWVFGNPRVVTVLARPPPGAGVSVASGQKKLFQRALSEQEIINDYIARKKKQFAGEIPYSTY

SEQ ID NO: 303837 - protein, 39 aa, Zea mays
  Clone ID: MRT4577_4016C.1.pep
HASEIFILSNKSTSNGTSMFKVKINRESYKIPLLCVIGK

SEQ ID NO: 303838 - protein, 947 aa, Zea mays
  Clone ID: MRT4577_40170C.1.pep
MALIIKRFKTTLKGRKRHPNKNKTKGKRSCFKCGKIGHFIANCPDNDSDQEQGNKREKKKTYKKANGEAHLGKEWDSDCSSSDSDNEGLAAIAFNKSFLFPNEHHTCLMAREKKGLDRTKVDKINELIDALNDKNRLLEKQEDLLYEEHDKFVEAQKSLALEIKRNEMLSCELSTCHDSISSLKSINDDLNAKLEIANKSTSCVEHVAICNRCKDFNVDACSEHLVSISKLNDEVASLNAQLKTSKSEFDKIKFARDAYTIGRHPSIKDGLGFKREAKNLTSHKASISAKEKGKAPMASSTQKNHAFMYHDRRHSRNAYRSYDAFDSHAMFASSSSIMHDRNLARKNAMPRRNVVHVPRKVNNEPSTIFHTCNAYFAICRKDKKVYASGGSSWIINNGCTNHMTGEKKMFSSYVKNKDSQDSIIFGDGNQGKVKGLGKIAISSEHSISNVLLVESLRYNLLSVSQLCNMGYNCLFTNVDVFVFRRSDGSLAFKGVLDGKLYLVDFAKEEAGLDACLIAKTSMGWLWHRRLAHVGMKNLHKLLKGEHVIGLTNVTFEKDRPCAACQAGKQVGSSHHTKNVMTTSRPLELLHMDLFGPIAYLSIGGSKYGLVIVDDFSRFTWVFFLQDKSETQGTLKRFLRRAQNEFELKVKKIRSDNRSEFKNLQVEEYLEEEGIKHEFSAPYTPQQNGVVERKNRTLIDMARTMLVEFKTPEWFWSEAVNTACHAINRVYLHRLLKKTSYELLTGNKPNVSYFRVFGSKCYILVKKGRNSKFAPKVVEGFLLGYDSNTKAYRVFNKSSGLVEVSSDVVFDETNGSPSEQVVDLDDVDEEDVPTAAIRTMVIGDVRPQEQKEQDQPSSSTMVHPPTQDDEQVHQEEACDQEGAQDDHVMEEEAQPTPPTQVRATIQRNHPVDQILGDISKGVTTRSRLVNFCEHYSFVSSIEPFRVEE

SEQ ID NO: 303839 - protein, 779 aa, Zea mays
  Clone ID: MRT4577_40171C.1.pep
MDPKGKGMVINDKEKESFVNEPNDDKPTDSGSGHKRKDGRKKKARRIKEIVYYDSDESSSSQKDDDDYDRRKTVNSNFSFDYLRIPHSSNAQLLPIPLGKPPHFDGEDYGFWSHKMRTHLFSLHPSIWEIVESGMKFDSSDSPMFINEQIHRNAQATTVLLASLCRDEYHKVSGLDNAKQIWDTLKISHEGNDVTLLTKMELVEGELGRYTKMSPEEVLGKFVSGRMMIKEARYVDDALNGPINEPQPLALKATRSKEALPSKVAQFEAAGLNDEEMALIIKRFKTVLKGRKGQPSKTKAKGKRSCFKCGKLGHFIANCPDNDSDQDQGNKREKKKNYKKAKGEAHLGKEWDSDCSSSDSDNEGLAATTFNKSSLFPNERHTCLMAREKKVSTHNTSTYASSSEDESSDDDEIDYSCLFKGLDRTKVDKINELIDALNDRNILLEKQEDLLYEEHDKFVEAHKSLALEIKRNEMLSSELSSCHETIAKLKSFNDDLNAKLEVASKSNSCVEIVETCNRCKDIDIDACSEHLVSISKLNDELASLNAQLKTSKSNFDKLKFARDAYTIGRHPSIKDGLGYKREAKDLTSHKAPISAKEKGKAPMASSATKNHAFMYHDRRHTRNANRSYNVFDSYVYDSHDMFASSSFYVHDRNVGRRNVVHNMPRRNVVNVPRKVNEPSTIYHALNASFAICRKDRKVIARKFGAKCKGDKTCIWIPKEIVTNLVGPNKSWVYASGGSSWIIDSGCTNHMTGEKKMFTSYVKNKDSQDSIIFGDGNQGK

SEQ ID NO: 303840 - protein, 137 aa, Zea mays
  Clone ID: MRT4577_40172C.1.pep
GPAGKDSRKSPGRSGNVFLEDATCSDNDISMREPSGSALKLDHSNNVDTLSSIMSLIREHCLEDQHVVFRDEVQNSSPARNEEYHFQVELAGLILGRGVGSDREAAKLLAAEEALKTLKSTTDPQIKKYLRPVRCNG

SEQ ID NO: 303841 - protein, 767 aa, Zea mays
  unsure (1)..(767): unsure at all Xaa locations
  Clone ID: MRT4577_40173C.1.pep
STFVHGRSRPRRNHVVSHASRRMCNGPSTIYNACNTSFVLXHVYSSGGSSWIIDSRCTNHMTGEKKMFTSYVKNKDSQDSIIFGDGNQGKVKGLGKIAITSEHSISNVFLVESLGYNLLSVSQLCNMGYNCLFTNIDVSVFRRSYGSLAFKGVLDGKLYLVDFLKENADLDACLMAKTNDKSENQGTIKCFLRRAQNEFELKVKKIRSDNGSEFKNLQVEEFLEEEGVKHEFSAPYTPQQNGVVERKNKTLIDMARTMLGEFKTPERFWLEAMNTACHAINQLYLHRLLKKISYELLTGNKPNVSYFRVFGSKCYILVKKGRHSKFAPKAVEGFLLGYDSNTKAYRVFNKSLGLVEVSSDVVFDETNGSPREQVDLDDIDEDEVLTAAMRTMAIGDVRPQEPHEEDLPSSSTMVHPPTQDDVQSAFLNGPIKEEVYMEQPPGFEDGRYPDHVYKLSKALYGLKQAPRAWYECLRDFLISNTFKVGKADPTLFTKTCNGDLFVCQIYVDDIIFGSTNQKSCEEFSRVMMQKFEMSMMGELTYFLGFQVKQLKDGTFISQTKYTQDLLKRFGMKDTKPAKTPMGTDGHIDLNKGVSTPCFGIWYPKGSTFDLIGYSDSDYAGCKVDRKSTSGTCLFLGRSLVSWSSKKQTSVALSTAEAEYIATGNCCTQLLWMRLTLRDFGYNLSEVPLLCDNESAICLVDNPVEHSHTKPIDIRHHFLRDHQQKGDIEVYHISTENQLADIFTKLLDEKMFCRLRSELNVLDSRNLD

SEQ ID NO: 303842 - protein, 46 aa, Zea mays
  Clone ID: MRT4577_40174C.1.pep
AYRPLRPTLGRSRPQGARDHWLKNRSTDATRRASLEAPFPTGGVLN

SEQ ID NO: 303843 - protein, 256 aa, Zea mays
  unsure (1)..(256): unsure at all Xaa locations
  Clone ID: MRT4577_40175C.1.pep
MALVLHSGSGNKNAFKALIAAEYCGVKVELTKNFEMGVSNKTPEFIKMNPLGKVPVLETPDGAVFESNAIARYVARSKGDNLLWGGSLIEYARVEQWMDFGATEVDPNIARWLYPRLGYMPYNAQSEEFGIAGLKRALEALNTHLASNTFLVGHSVTLADIVMTCNLYHGFARILTKTFTSEFPHVERYFWTMVNQPNFKKVIGDFKQAEVVPPVQKKAAPAKPKEAKKEAPKXAPKPAEVEAPRERAPXPKPKIP

SEQ ID NO: 303844 - protein, 478 aa, Zea mays
  unsure (1)..(478): unsure at all Xaa locations
  Clone ID: MRT4577_40176C.1.pep
MARTMLGEFKTPERFWSEAVNTACHAINRLYLHRLRKKTSYELLTGNKPNVSYFRVFGSKCYILVKKGRNSKFAPKAIEGFLLGYDSNTKAYRVFNKSSGLVEVSSDVVFDETNGSPREQVDLDDVDEDDVPTTAICTMAIGDEELNNFKRNELWSLVPCPKKNVVGTKWVFRNKQDEHGVVTRNKARLVAKGYAQVAGLDFEETFAPVARLESIHILLAYAAHHSFRLFQMDVKSAFLNGPIKEEVYVEQPPGFEDERYPDHVCKLSKALYGLKQAPRVWYECLRDFLIANAFKVGKADPTLFTKTCDGDLFVCQIYVDDIIFGFTNQKSCEEFSRVMTQKFEMSMMGELNYFLGFQVKQLKDGTFISQMKYTQDLLKRFGMKDSKPAKTPMGTDGYVDLNKGGXWYPKGSTFDFIGYSDSDXAGCKVDRKSTSGTCQFLGRSLVSWSSKKQTCVALSTAEAEYVAAGQCCAQLLWM

SEQ ID NO: 303845 - protein, 79 aa, Zea mays
  unsure (1)..(79): unsure at all Xaa locations
  Clone ID: MRT4577_40177C.1.pep
FTTIFKXRDNLPSHASDHNNSLXRRLSRFPVPNLVTYSQSFVFTGSSMIIIAVLDLSLPGADNLFADSAHADHAAYGRT

SEQ ID NO: 303846 - protein, 368 aa, Zea mays
  unsure (1)..(368): unsure at all Xaa locations
  Clone ID: MRT4577_40178C.1.pep
DKSETQGTLKHFLRRAQNEFELKMRKIRSDNRSEFKNLQVEEYLEEEGIKHEFSAPYTPQQNGVVERKNRTLIDMARTMFGEFKMPERFWSEVVNTACHAINRVYLHRLLKKSSYELLTGNKPNVSYFHXEDDVPTAAIHTMAIGDVRPXEQQEQDQPSSSTMVHSPTQDDGXVPQEEACDQGGAQEDPTMEEEXVEEALLDPDWVLAMQEELNNFKRNEVWTLVPCPKQNVVGTKWVFRNKQDEHGVVTRNKARLVAKGYAQVAGLDFEETFAPMSRLESIRILLAYAAHHSFRLFQMDVKSAFLNEPIKEEVYVEQPPGFEDERYPDHVCKLSTALYGLKQAPRAWYDSLRSKVLALLFSKFSSGS

SEQ ID NO: 303847 - protein, 94 aa, Zea mays
  Clone ID: MRT4577_40179C.1.pep
PPKIFSCLGLKNKPPPFWWEKKKLRGGDFFSQIWGYPKFGGGPLNWDLTPSNVRPFKKKVSQKKKKKKKKKKKKKKKKKKKKKKKKKKKKNSRE

SEQ ID NO: 303848 - protein, 174 aa, Zea mays
  Clone ID: MRT4577_4017C.1.pep
MAAAEPSGSSQPGAPGRWSLHGKTALVTGGTRGIGRAVVEELAALGVAVHTCSRKEAELGERLKEWEARGFRVTTSVCDLSVREQRERLIADVAERFGGKLNILVNNVGTNIRKPTTEFSAEDYSFLMATNLESAYHLCQLAHPLLKASGLGSIVFISSVCGLVAVFSGTLYAM

SEQ ID NO: 303849 - protein, 1465 aa, Zea mays
  Clone ID: MRT4577_40180C.1.pep
MTPEEILGKFVSGRMMIKEARYVDEALNGPIHEPQTIALKATSSREALPSKVAQVEAAGLNEDEMTLIIKRFKTALKGRKEHPNRSKTKGKRSCFKCGKVGHFIANCPDNDSDQDQEKKRENKKTYKKAKGEAHLGKEWDSDCSSSDDEGLAASAFNKSSLFPNEHHTCLIATEKKNRLLEKQEDLLYEEHDKFVDVQKSLALEVKMNEMLSCELSTCHETISSLKSVNDDLNAKLEVANKSSSCVEHVVICNKCKDFNVDACVEHLTSIAKLNGEVASLNAQLKTSKNEFDKLKFARDAYTVGRHPSIKDGLGFKREAKNLTSHKAPISAKEKGKAPMANSVQKNHAFIYSDRKFSRNAYRNYSYDSYAMPASSFSIVHDMPRKNVIHHMPRKNVVHVPRKASNEPSTIYHACNASFAICRKDKKVIARKLGAKCKGDKTCIWVPKAIVTNLAGPNKSWVYASGGSSWIIDSGCTNHMTGEKKMFTSYVKNKDSQDSIIFGDGNQGKVKGLGKIAISSEHSISNVFLVESLGYNLLFVSQLCNMGYNCLFTNVDVSVFRRSDGSLAFKGVLDDKLYLVDFAKEEAGLDACLIAKTSMGWLWHRRLAHVGMKNLHKLLKGEHVLGLTNVTFEKDRPCAACQAGKQVGSAHHSKNVMTTSRPLELLHMDLFGPVAYLSIGGKTQGTLKRFLRRAQNEFELKQNGVVERKNRTLIDMARTMLGEFKTAEWFWSEAVNMACHAINRVYLHRLLKKTSYKLLTSKKPNVSYFRVFGSNCYILVKKGRNSKFAPKAVEGFLLGYDSNTKAYRVFNKSSGLVEVSSDVVFDETNGSPREQVVDLDDVDEEDAPTTAIRTMAIGDVRPQEQKEQDQPSSSTMVQPPTQDDEQVHQEEACDQGGAQDDHVMEEEAQHAPPTQVRATIQRNHPVDQILGDISKGVTTRSRLVNFCEHYSFVSSIEPFRVEEALLDPDWVLAMQEELNNFKRNEVWTLVPRPKQNVVGTKWVFRNKQDEHGVVTRNKARLVAKGYAQVAGLDFEETFAPVARLESIRILLAYAAHHSFRLFQMDVKSAVLNGPIKEEVYVEQPPGFEDERYPDHVCKLSKALYGLKQAPRAWYECLRDFLIDNAFKVGKADPTLFTKTCNGDLFVCQIYVDDIIFGSTNQKSCKEFSRVMTQKFEMSMMGELNYFLGFQVKQLKDITFISQTKYTQDLIKRFGMKDAKPAKTPMGTDGHIDLNKGGKSVDQKAYRSMIGSLLYLCASRPDIMLSVYMCARFQSDPRECHLVAVKRSLRYLVATPCFRIWYPKGSTFDLIGYSDSDYAGCKVDRKSTSGTCQFLGRSLVSWSSKKQTFVALSTVEAEYVAAGQCCTQLLWMRQILRDFGYNLSKVSLLCDNESAIRMADNPIEPSRTKHIDIRHHFLRDHQQKGDIEVFYVSTENQLADIFTKPLDEKTFCKLRSELNVLDSRNLD

SEQ ID NO: 303850 - protein, 195 aa, Zea mays
  Clone ID: MRT4577_40181C.1.pep
RSQLLGATVAVGVVKTVFIVIAIVLVDRVGRKPLLYVSTAGITVCLAVLAASLSALARGALPGGVAVGLAILTVCGFVAFFSVGIGPINMVLSSEIYPLRLRAQAVAAGFALNRMASGAVAMSFLSICRAVTVAGAFAAFAAVSALSVAFVHLCVPETSGKTLEEIESLFGGGGVSVTHGGSGEVELGDASGLST

SEQ ID NO: 303851 - protein, 84 aa, Zea mays
  unsure (1)..(84): unsure at all Xaa locations
  Clone ID: MRT4577_40182C.1.pep
LVIVLGSTHTQHNRSIFNPPLPQTENPSTPSFWKGPQTTQALGQLKQPMTYCPPRKRTTGGGGLSFGMWXPARGRPSSTCCAGK

SEQ ID NO: 303852 - protein, 45 aa, Zea mays
  Clone ID: MRT4577_40183C.1.pep
PASYFKSMHVTHAPSMCMKIWGRQMRRWFELYDFCHVTLMQICQI

SEQ ID NO: 303853 - protein, 89 aa, Zea mays
  unsure (1)..(89): unsure at all Xaa locations
  Clone ID: MRT4577_40184C.1.pep
PTIRAKQVHHLELPEINQVGXAELYPYPQQQHFLPCNQLSTLNPAAHLQQHLLPFNLLDSAYSQRLQLLRDSQSDELNPAADLQEQILL

SEQ ID NO: 303854 - protein, 61 aa, Zea mays
  Clone ID: MRT4577_40185C.1.pep
ETNSFIYFLAQKNPIDIMRVMLVVFSVRASAASSTDNVQRCIGYFSAYIIRVLQNGNSILI

SEQ ID NO: 303855 - protein, 68 aa, Zea mays
  Clone ID: MRT4577_40186C.1.pep
LALNNRRSRKGLYLDCLTHDHQLQTNNNERPHDAGWVVPQVLTKRAATGQRTVEALLCWWKDHAGGMA

SEQ ID NO: 303856 - protein, 60 aa, Zea mays
  unsure (1)..(60): unsure at all Xaa locations
  Clone ID: MRT4577_40187C.1.pep
LASVRLTAFLTQSLLFXYQLRXAPKVGSILQLLLLLPFSLLALENPLAFYLLPIIGGALF

SEQ ID NO: 303857 - protein, 72 aa, Zea mays
  Clone ID: MRT4577_40188C.1.pep
WESGRFDRVSIAETSRLVITRVQIVGRGAALQSRGVFEGIRAFGQPINGSWTTWIAAVNKDRNQQAYQLYLR

SEQ ID NO: 303858 - protein, 91 aa, Zea mays
  Clone ID: MRT4577_40189C.1.pep
RPEEYEYCMLRHVDPQVPYARDLITILYDAINIGYPHLIVAHDIEHETLAILVDIMLRRSLFIVATTVPVSWRAQLQVPHYIPTLIGGIVI

SEQ ID NO: 303859 - protein, 52 aa, Zea mays
  Clone ID: MRT4577_4018C.1.pep
YSRSEEGITVAVERVGLVLRAEIASDAHAVRVRAVRGKQVHGRSRPASRYPM

SEQ ID NO: 303860 - protein, 407 aa, Zea mays
  Clone ID: MRT4577_40190C.1.pep
MQAFLQGKPRRENQSAEILPSEVDEKMTATDNKNYVDDGGNVLPSKLEDITESDWTRLENYASTGEKVEVELINCSAKGFVVSLDSLIGFLPYRNLATKWKFLAFETWLRRKGGDPSLYKQSLGLEDSFEVNDTNLEPESSSVSKIAGEDQESLSSKPKFEDLIRAYNQEKSKFLSSFIGQRLRVSVVLADRNSKRIFFSMKPKESEEMIQKKKNLMARLNVGDIIQCTIKRFVYFGIFVEVEGVPALIQQWEVSWDDTLDPAVSYKIGQVVDAKVIQLDYNNIRIFLSLKDVKPNPSVGALESVVGEDLSFGGALEPVQADFEWPEVDALMEEMRRTEGVRDVYKGRFFQSPGLAPTFQVYMAPVVGPKYKLLARYGNSVQEVMVETALGKEELKEAVLMCTNRVS

SEQ ID NO: 303861 - protein, 87 aa, Zea mays
  unsure (1)..(87): unsure at all Xaa locations
  Clone ID: MRT4577_40191C.1.pep
CCRTTAISSNFASKXTSTAGPVDNQSATSNNFSMQAFLQGKPRRFLQELCSYIFRHNFYHLISGSLFEDHIENIAETVEKHGFVQWL

SEQ ID NO: 303862 - protein, 75 aa, Zea mays
  unsure (1)..(75): unsure at all Xaa locations
  Clone ID: MRT4577_40192C.1.pep
KKNKKYKIKNNKKKKKKKKKNKXKKKKKKKNKKKKKKKKKKKKKKNKRXKKRKKRYKKKKKKNMERRKIIRWLTI

SEQ ID NO: 303863 - protein, 122 aa, Zea mays
  Clone ID: MRT4577_40193C.1.pep
RAKAKLLEEDLPKLQSLALKKDEVVNPLFEKRPKQFGISGALPPKKDLHRFVNWPKVMRIQRQCRILKQRLKVPQALHQFTRTLDKNIGHFVKAAKGRSGGFGTRPVIESMLSPPWKDLNSA

SEQ ID NO: 303864 - protein, 211 aa, Zea mays
  Clone ID: MRT4577_40194C.1.pep
MARHPLAAAVLFLCLLSVCRAAGAGAAGKGKPSAVLLPVSKDGATQQYVTGFRQRTPLVPVKAVLDLAGATLWVDCEAGYASATYSRVPCGSSLCRLSRSAACATSCSGAPSPSCLNDTCGGFPENTVTQVSTSGNVITDVLALPTTFRPAPGPLATAPAFLFTCGATFLTQGLAAGAAGMASLSRSHFALPTQLASTFRFSRKFALCLPP

SEQ ID NO: 303865 - protein, 81 aa, Zea mays
  Clone ID: MRT4577_40195C.1.pep
GATPALKRNTSPGLSKKGPIQGAIAHCKGSQFFQPGMVPSAPARRSVSNVMFYSVTNTPKAFSFTPGKVAQKRSQEMSRGL

SEQ ID NO: 303866 - protein, 58 aa, Zea mays
  Clone ID: MRT4577_40196C.1.pep
QLLCAPSSVLLLRLFIQWPHLPKVYFLFPSNSMDFPCPSVVFFLNCCPCYSNPFQFQH

SEQ ID NO: 303867 - protein, 89 aa, Zea mays
  unsure (1)..(89): unsure at all Xaa locations
  Clone ID: MRT4577_40197C.1.pep
FLWFXYLKAANADDSVADLANHLAFLSLENPKQLSFWPSTVAAAVVALACLATGKEPSCHLVMETHMRTQDDDLPECLMSLEWLIECVP

SEQ ID NO: 303868 - protein, 59 aa, Zea mays
  Clone ID: MRT4577_40198C.1.pep
SIFFKETPRGKTNFPKKASFDKKFYSPKQANPQGNSYLPRIMITMLICSAIFLCLIDHY

SEQ ID NO: 303869 - protein, 155 aa, Zea mays
  unsure (1)..(155): unsure at all Xaa locations
  Clone ID: MRT4577_40199C.1.pep
MATAAAQGGSDKPALRKPVFTKVDQLKPGTNGHTLTVKVVSATPVPGRARPGAPAAASSRAPRIAECLVGDETGVIVFTARNDQVXDVLSSFAVDLLKPDATVILRNAKIDMFKGSMRLAVDKWGRIEATEPASFTVKEDNNLSLVEYELVNVAE

SEQ ID NO: 303870 - protein, 196 aa, Zea mays
  Clone ID: MRT4577_4019C.1.pep
MESPGLFAVVALFVVVVAAAAADDAQLLEQFKEAVPSQAADLRGWSASDGACRFPGAGCRGGRLTSLSLAAVPLNADFRAVAATLLQLSSLETLSLRGANVSGTLAAVPRCGAKLQSLDLSANAGLRGSVSDVEALVAACAGLSALNLSGGSIGGPRSAGVVASGFARLDALDLSGNKISGDGDLRWMVGARRGAV

SEQ ID NO: 303871 - protein, 122 aa, Zea mays
  Clone ID: MRT4577_401C.1.pep
SEVPPMHGQGISDQFHFPVESRETCEIADSFQNPPESNMYGSISQVCDTFMSQDVSCVPESSLILDGTSASISGDEFLSRAVSNGFSAFCEGTHTTSRMVLEDTGCVKNLMAERQKDVEDVI

SEQ ID NO: 303872 - protein, 77 aa, Zea mays
  Clone ID: MRT4577_40200C.1.pep
HTLGPFQPRTRAFKRRSAGFGFSSQKTPIPAVFGFPQPESVFRFKPGARLNGLCTCTPKEQDFPSKGGEVGISEGSF

SEQ ID NO: 303873 - protein, 53 aa, Zea mays
  Clone ID: MRT4577_40201C.1.pep
STLYPFIEKKYSSFAHRLFVIQIDYMDPAHDDIVVPISPPTIVTVDCMQILGL

SEQ ID NO: 303874 - protein, 45 aa, Zea mays
  unsure (1)..(45): unsure at all Xaa locations
  Clone ID: MRT4577_40202C.1.pep
KFTSRIFPLXKVFIPKGKILKAPKFDFGKLMEVLGDYKKKVGFKL

SEQ ID NO: 303875 - protein, 446 aa, Zea mays
  Clone ID: MRT4577_40203C.1.pep
MARTMLGEFKTPERFWSEAVNTACHAINRLYLHRLLKKTSYELLTGNKPNISYFHVFGSKCYILVKKGRNSKFASKAVEGFLLGYDSDTKAYRVFNKSSGLVEVSSDVVFNETNGSPREQVDLDDIDEDDVPTAAMRTMAIGDVRPQEQQEQDQPSSSTMVHPPTQDGEQEELNNFKRNEVWSLVPRPKQNVVGTKWVFRNKQDEHGVVTRIKARLVTKGYAQVTGLDFEETFAPVARLESIRILLAYAAHHSFRLFQMDVKSTFLNGPIKEEVGKADPTLFTKTCDGDLFVCQIYVDDIIFGSTNQKSCEEFSRVMTQKFEMSMMVKQLKDDTFISQTKYTQDLLKRFGMKDAKPAKTPMGTDGHVDLNKGGQCCVQLLWMRQTLWDFGYNLSKVPLLCDNESAIRMSDNPVEHSCTKHIDIRHHFLRDHQQKGDIEVYHISTEN

SEQ ID NO: 303876 - protein, 1071 aa, Zea mays
  Clone ID: MRT4577_40204C.1.pep
MDPKGKGMVVNDKEKDSIFNEPRDDKPTDSGSSHKKRDGKRKRRIKKIIYYDSDASSSSLRDDDNDDDSSSKRKTMELVEGELGRFMMIRGEEPTQTYNRLKTLVNKIRSYGSTRWTDHDVVQLMLRSFTVIDPHLVNLICENPRYTKMTPEEVLGKFVSRRMMVKEARYMDDALNGPLSIYESQPVALKATSSKEALPSKVAQVEAAVLNKDEMALIIKRFKTALKGRKEYSNKNKTRGNRSCFKCGKTDHFIAQCPDNDNDQGQEKSGKREKKNYRNAKGEAHLGKEWDSDCSSSDSNDEGLAASAFDKSSLFPNERHTCLMAKEKKVHIRDTPKYTSSSDEESSDDEVDYSDLFKGLDRAKVEKINELIDALNEKDRLLEKQEDILYEEHDKFVSVQKSLALEIKRNEMLSSELCACHESVSSLKNSNDELKAKLEEVNKTSSCVEHVFICNRCKDFDVDACDEHLASIAKLNDEVASLNAQFMTCKVEFDKLKFARDAYTVGRHPSIKDGLSFRKETKNLTSQRAPVLNKEKGKAPMASSSQKNHAYIYDRKYPRNAYNDKCYNHAAYNDSHAMFASSSTFAHGRSRPRRNYATSHASRKVCNGPTTVYHACDTSFVLSCKNTKVVARKLGSKCKGDKTCIWVPKAIVTNLVGPNTSWVYASRGSSWIIDSGCTNHMTGEKKMFTSYVKNKDSQDTFIFGDGNQGKVKGLGRIAITNEHSISNVFLVESLRRSDGSLAFKGVLDIKLYLVDFSRENAGLDACLIAKTNMGWLWHRRLAHVGMKNLHKLLKGDHVLGLTDVCFEKDRPCVACQEGKQDKSETQGTLKRFLRRAQNEFELKTPQQNGMVERKNRTLIDMARTMLREFKTPERFWSEAVNTACRAINRLYLHRLLKKTSYKLLTGNKPNLSYFHVFGSKCYIMVKKGRHSKFAPKTVEGFLLGYDSNTKAYRVFNKSSRLVEVSSDVVFDETNGSPREQVDLDDIDEDEVPTATMRTMAIGDVRPQELQEQDQPSSSTLVYPPTQDDVQVPQEEGQNQGGAQKEQVMEEEAPRVPPTQVQATIQRHHPVD

SEQ ID NO: 303877 - protein, 991 aa, Zea mays
  Clone ID: MRT4577_40205C.1.pep
MHPKGKGMVINDKEKESFINEPKDDKPTDSGSSHKKKDGKKKRRIMKIVYYNSDESSSSQRDDDDEKKKMVNSNFSFYYSRIPQNSNAHLLSIPLGKPPHFDGEDYGFWSHKMCSHLFSLHPSIWEIVENGMQFDSTDNPMFINEHKNAQATTVLLASLCREEYHKVSGLDNAKKIWDTLKSSHEGNDVTMITKMEFVEGELGRFAMIRGEEPTQTYNRLKTLVNKIRSYGSTRWTDHDVVRLMLRSFTVLDPHLVNSIHENPRYTKMTPKEILRKFVSGRMMIKEARYVDEAFNGPMPIHEPQTIALKATSSREALPSKVAQVEAVRLNEEEMALIIKRFKTALKGRKEHPNKSKTKGKRSCFKCGKIGHFIANCPDNDSDQEQGKTGKRENKKVYKKAKGEAHLGKEWDSDCSSSDSDDEGLAATAFNKSSLFPNEHHTCLMAKEKKVSTRNTIAYASSSDGESSDDEVDYASLFKGLDRTKIDKINELIDALNEKNRLLEKQEDLLYEEHDKFVNVQKSLALEVKRNEMLSSELSTCHESISSLKSVNDDLNAKLEVANKSSSCIEHVVICNRCKDFNVDACVEHLTSIAKLNGEVASLNAQLKTSKNDFDKLKFARDAYTIGRHPSIKDGLGFKREAKNLTSQRAPIFNKEKGKAPMANSSQKNHAFIYDRKFSRNAYHNRSCNAYDSHAMIASSSSFVHGRDMPRRNVVNVPRKMHNENATDIHAYNSDFVLTCKNEKVVARKLGAKCKGDKACIWVPKAIVTNLVYASGGSSWIIDIGCTNHMTGEKKMFTSYVKNKDSQDSIIFGDGNQGKVKGLGKIAISSEHSISNVFLVESVGYNLLSVSQLCSMGYICLFNNVDVSVFRRCDGSLAFKGVLDGKLYLVDFSKEEAGLDACLIAKTSMGWLWHRRLAHVGMKNLHKLLKGEHVLGLKNVSFEKDRPCAACQAGKQVGSTHHSKNVMTTSRPLEMLHMDLFGPVAYLSIGGR

SEQ ID NO: 303878 - protein, 1599 aa, Zea mays
  Clone ID: MRT4577_40206C.1.pep
MDPKGKGMMINDKEKESLLNEPRDDKPTDSGSSHKKRDGKKKKRRIEKIIYYDNDASSFSPRDDDDDDSLLKKKTVNQNYSFDYSRIPFNSNAHLLSIPLGKPPHFDGEDYSFWSHKMRSHLFSLHPSIWEVVENGMHFDSTDNPVFINEQIHKNAQVTTVLLASLCWDEYNNVSGLDNAKQIWDTLKISHEGNDATMITKMELVEGELGRFAMIRGEEPTQTYNRLKTLVNKIRSYGSTRWTDHDVVRLMLRSFTVIDPHLVDLIRENPRYTKMTPEEILGKFMSGRMMVKEARYVDDALNAPLPVYEPQPVALKATSSREALPSKVAQVEAAGLNEDEMALIIKRFKTTLKGQARGKRSCFKCGKTGHFIAQCPDNDNDQEQEKYGKKEKKKNYKKAKDEAHLGKEWNSDCSSSDSDDEGLAASAFDKSSLFPNERHTCLMAKEKKVCIQNTHKYTSSSDEESSDDEVEYTDLFKGLDRAKVDKINELIDALNEKNRLLERQEDILYEEHEKFVSVQKSLALELKRNEILSFELSACQEYVSSLKNLNDELNVKLEEANATRSCVEHVAICNRCKDVDVNACDEHLIAITKLNDEVASLNAQLKTCKIDFDKLKFARDAYTIGRHPSIKDGLGFRKKTNNLTSQKTLVLNKEKGKAPMASSSQKCHAYTYVRKFSRTAHRSYDHDVFNPHAMFASRSTFVHGRSRPRRNHVVHHVPRKVYASGGSSWIIDNGCTNHMTGEKKMFTSYVKNKDSQDTIIFGDGNQGKVKGLGKIAITSEHSISNVFLVESLGYNLLSVSQLCHMGYNCLFTNVDVSVFRRSDGSLAFKGALDDKLYLVDFSKEEADLDACLIAKTSMGWLWHRRLAHVGMKNLHKLLKGEHVLGLTNDKSETQGTLKRFLKRAQNECELKVKKIRSDNGSEFKNLQVEEYLKEEGVKHEFSAPYTPQQNSVIERKNRTFIDMARTMLGEFKTPERFWSEAVNIACHAINRLYLHRLLKKTSYEVLTGNKPNVSYFRVFGSKCYILVKKGRHSKFTPKAVEGFLLGYDSNTKAYRVFNKSSGLVEVSSDVVFDETNDSPREQVDLDDIDEDDVPTTAMRMMAIDGEQVPQKEGQDQGGAHEEQVMEEEAPSVPPTQIRATIQRHHPVDQILGDISKGVTTRSRLANFCEHYSFVSSIEPFRVEEALQDPDWVLAMQEELNTFKRNEVWSLVPRPKQNIVGTKWVFRDKQDEHGVVTRNKARLVAKGYAQVAGLDFEETFAPVARLESIRILLAYAAHHSFRLFQMDVKSAFLNGPIKEEVYVEQPPSFEGDRYPDHVFKLSKALYGLKQAPRAWYECLRDFLIANAFKVGKVDPTLFTKTCDGDLFVCQIYVNDIIFGSTNQKSCEEFSRVMTQKFEMSMMVKQLKDNTFISQTKYTQDLLKRFGMKDAKPAKTPMGTDGHVDLNKGDSYAGCKVDRKSTSGTCQFLGRSLISWSSKKQTSVALSTVVPEYVAAGQCCTQLLWMSQTLRDFGYNLSKVPLLCDNGSAIRMADNPAEHDRTKHIDIRHHFLRDHQQKGDIEVFQISTENQLADIFTKPLDEKTFCRLRSELNVLDSCNLD

SEQ ID NO: 303879 - protein, 146 aa, Zea mays
  unsure (1)..(146): unsure at all Xaa locations
  Clone ID: MRT4577_40207C.1.pep
FPSRRGGFELYRKFXAEPSFLEQHLPTEKRHVDIKIPKFTVSFQVNMKQFLKEMGLELPFLRDADFTDMVKEDGSRNPLYLSDILHKAVLEVNDEGVEETSVRIGIGKPSPGEHFVADHPFFFVIREEVSGSVMFMGHILDPSSQS

SEQ ID NO: 303880 - protein, 603 aa, Zea mays
  Clone ID: MRT4577_40208C.1.pep
MARAARLLAGVRALLPSRGQPSLRACTVKLMMMRRMIMIMLIVMVAFGAIYAQQNGVVERKNRTLIDMARTMLREFKTPERFWSEAVNTACHAINRLYLHRLLKKTSYELLTSNKPNVSYFRVFGSKCYILVKKGRNSKFAPKAVEGFLLGYDSNTRAYRVFNKSSGLVEVSSDIVFDETNGSPRKQVDLDDVDEDDVPTAAIRMMAIAKCCGNQVGVPQQARRARSGDKKQGSTCGKRLCPSHRFGFRGDFAPMARLESIRILLAYAAHHSFRLFQMDVKSTFLNRPIKEEVYVEQPHGFEDDRYPDHVFKLSKVLYGLKQAPRAWYECLRDFLIANAFKVGKADPTLFTKTCDGDLFVCQIYVDDIIFDSTNQKSCEEFSRVMTQKFEMSMMGELTYFLGFQVKQLKDGTFLSQTKYTEDLLKRFGMKDAKPTKTPTGTNEHVDLNKGDSDYGGCKVDRKSTSGTCQFLGRSLVSWSSKKQTFVALSTAEAEYVAVGQCCAQLLWMRQTLRDFGYNLSKVPLLCDNESAIRMADNPVEHSHTKHIDIRHHFQRKHQQKGDIEVYHVSTENQLADICTNPLDEKRFCRLRSELNVLDSRNLD

SEQ ID NO: 303881 - protein, 131 aa, Zea mays
  Clone ID: MRT4577_40209C.1.pep
LQKKKNIFFGKREERTPGLQRHPDPQPCRGPGSNPDKQDPDRGSHTSHRSHFLWNPILAPRRENEAGPGFQEPPFFDEPPPPPPFLPKSHPLTPHRQAAPKGRGGPHFWEPSNYPPLRTRIKQGGGWVPRS

SEQ ID NO: 303882 - protein, 67 aa, Zea mays
  Clone ID: MRT4577_4020C.1.pep
VGFCRELQDRDVAPQSRGRHFCILQRCTDAQREPCLCIYGCLHVRQRQALKQIHKWTVTPTPCTHAS

SEQ ID NO: 303883 - protein, 643 aa, Zea mays
  Clone ID: MRT4577_40210C.1.pep
MDPKGKGIVINDKEKESFVNEPKDDKPTDSGSGHRRKEGKKKKTRRIKEIVYYDDSDESSSSQKDNDDNDYRKTVNSNFSFDYSRIPHSSNSHLLSIPLGKPPHFDGEDYGFWSHKMRSHLFSLHPSIWEIVENGMKFDSSDSPMFINEQIHKNAQATTVLLASLCRDEYNKVSGLDNAKQIWDTLKISHEGNDVTLLTKTELVEGELGRFAMIRGEEPTQTYNRLKTLINKIRSYGSTRWTDHDVVRLMLRSFTVLDPHLVNNIRENPRYTKMSPEEVLGKFVSGRMMIKEARYVDDALNGPINEPQPLALKATRSKEALPSKVAQIEAAGLNDEEMALIIKRFKTVLKGHKGQPSKTKTKGKRSCFKCGKIGHFIANCPDNDSDQEQGNKREKKKNYKKAKGEAHIGKEWDSDCSSSDSDNEGLAATAFNKSSLFPNEHHTCLMAREKKVITRNASTYDSSSDESSDDDDIDYSSLFKGLDRTKIDKINELIDALNEKDRLLEKQEDLLYEEHDKFVEAQKSYALEVKRNEMLSFELSTCHETISTLKGVNNDLNAKLEVANKSNSCVEHVEICTRCKDFDIDACSEHLVSISKLNDELASLNAQLKTSKNDFDKLKFARDAYTIGRHPSIKDGLGFKRGS

SEQ ID NO: 303884 - protein, 726 aa, Zea mays
  Clone ID: MRT4577_40211C.1.pep
MDPKGKGIVINDKEKESFVNEPRDDKSNDSGSGHRRKDGKKKKTRRIKEIVYYDSDESTSSQKDDDHNDYERKKPVNSNFSFDYSRIPQTSLCRDEYHKVSGLDNAKQIWDTLKISHEGNDVTLLTKMELVEGELGRFAMIRGEEPTQTYNRLKTLINKIRSYGSTRWMDHDVVRLMLRSFTVLDPHLVNNIRENPRYTKMSPEEVLGKFVSGRMMIKEARYVDDALNGPIHEPQPIALKATRSKEALPSKVAQVEAARLNNEEMALIIKRFKMALKGRKGQPSKTKTKEKRSCFKCGKIGHFIANCPDNESDQEKGNKREKKKHYKKAKGEAHIGKEWDSDCSSSDSDNEGLAATAFNKSSLFPNEHHTCLMAREKKVYASGGSSWIIDSGCTNHMTREKKMFTSYVKNKDSQDSIIFGDGNQGKDKSETQGTLKRFLRRAQNEFELKVKKIRSDNGSEFKNLQVEEFLEEEGIKHEFSAPYTPQQNGVMKKMFRRPLYEPWRLEKCDHRNKMNEINLLPQQRCIPHLKMMNRVEEALLDPDWVLAMQEELNNFKRNEVWTLVPRPKQNVVGTKWVFRNKQDEHGVVTRNKARLVAKGYAQVAGLYQMDVKSAFLNGPIKEEVYVEQPPGFEDERYPDHSCEEFSRVMTQKFEMSMMGELNYFLGFQVKQLKDGTFISQTKYTQDLLKRFGMKDAKPAKTPMGTDGHTDLNKGDFGEAMGLKGQD

SEQ ID NO: 303885 - protein, 366 aa, Zea mays
  unsure (1)..(366): unsure at all Xaa locations
  Clone ID: MRT4577_40212C.1.pep
MTGKKKMFTSYVKNKDSQDSIIFGDGNQACQAGKQVGSTHHSKNVMTTSRPLELLHMDLFRPVAYLSIGGSKYGLVIVDDFSRFTWVFFLQDKSETQVTLKRFLKRAQNEFELKNMQVEEYLDEEGIKHEFSAPYTPQQNGVVERKNRMLIDMARTMLGEFKTPERFWSEAVNTTCHAINRLYLHRLLKKTSYELLTGNVSYFRVFGSKCYILVKKGRHSKFAPKAVEGFLLGYDSNTKAYRVFNKSSGLVEVSSDVVFDETNGSPREQVDLDDIDEDDVPTAAMRTMAIGEVRPQEQQEQDQPSSSTMVHRPTQDDGQDHQEEACDQXGAQEEQAMEEEAPLAPPTQVRATIQRNHPVDQILGDI

SEQ ID NO: 303886 - protein, 97 aa, Zea mays
  Clone ID: MRT4577_40213C.1.pep
SFVPLHFQFPPTKNLPDPAMAPTRWARRREHPTRSCCGTVGVAGTAARRRSARRERWEDTRDDGSSAILSLALAAAVGGGDLESTRRGRGEWVSPAA

SEQ ID NO: 303887 - protein, 1185 aa, Zea mays
  Clone ID: MRT4577_40214C.1.pep
MNEDFLIIILRDLLPRRPDLRLVLMSATINAELFSKYFGDAPVMHILGFTFPVAELFLEDVLEKTCYRINSERDNFAGSSRRKRFSSVKSDPLSDVFEDIDITKEYGNYSSSTRQSLEAWSAAELDLSLVESTIEYICHYEAEGAILAFLIGWDEILKLLDKIKGNNFLGSPNRFLVLPLHGSMPTVNQREIFDRPPANMSMFEQSQISAKEQVKLLVYTLESCTAGSENGQESVVWITDFRGWTLSSTPLAQSRQSMNIIQKHYPGLIAAAILFDPPKIFESFWKVYVSGGSSWIIDSGCTNHMTGEKKMFTSYVKNKDSHDTIIFGDGNQGKVKDVSVFRRSDGSLAFKGVLDGKLYLFDFSKEEADLDACLIAKTSMGWLWQYRLAHVGMKNLHKLLKGEHVLGLTNVCFEKDRPCAACQGGKQDKSETQGTLKRFLRRAQNEFELKVKKIRSDNGSEFKNLQVEDYLEEEGIKHEFSAPYTPQQNGVVERKNRTLIDMARTMLGEFKTPERFWSEAVNTACHAINRLYLHRLLKKTSYEVLTGNKPNVSYFRVFGSKCYILVKKGRNSKFAPKAVEGFLLGYDSNTRAYRVFNKSTGLVEVSSDVVFDETNGSPREQVDLYDVDEDDVPTAAIRTMAIGDVRPQEQQEQDQPSSSTMVHPKTQDDEQVPQEEPFRVEEALQDPDWVLAMQEELNNFKRNEVWSLVPRPKQNVVGTKWVFRNKQDEHGVVTRNKARLVAKGYAQVAGLDFEETFAPMARLESIRILLAYAAHHSFRLFQMDVKSAFLNGPIKEEVYVEQPPGFEDERYPDHVFKLSKALYGLKQAPRAWYECLRDFLIANAFKVGKADPTLFTNTCDGDLFVCQIYVDDIIFGSTNQKSCEEFSRVMTQKFEMSTIGELNYFLGFQVKQLKDGTFISQTKYTQDLLKRFGMKDTKPMKTPMGTDGHVDLNKGGKSVDQKTYRSMIGSLLYLCASRPNIMLSVCMCARFQSDPRECHLVAVKRILRYLVATPCFGIWYPKGSTFDLIGYSDSDYAGCKVDRKSTSETCQFLGRSLVSWSSKKQTSIALSTAEAEYVAAGQCCVQLLWMRQTLRDFGYNLSKVPLLCDNESAIRMADNPVEHSRTKHIDIRHHFLRDHQQKGDIEVYHINTENQLANIFTKPLDEKRFCRLRSELNVLDSRNLD

SEQ ID NO: 303888 - protein, 582 aa, Zea mays
  unsure (1)..(582): unsure at all Xaa locations
  Clone ID: MRT4577_40215C.1.pep
AVVTTQSTGEKKMFTSYVKNKDSQDTIIFVDGNQGKVKGLGKIAITSEHSISNVFLVESLGYNLLSVSQLCHMVYNFLFTNIDVSVFRRSDGSLAFKGVLDGKLYLVDFXSKEEADLDACXWHHRLAHVGMKNLHKLLKGEHVLGLTNVCFKKDKPCAACQAGKQVGSTHHSKNVMTTSRPLELLHMDLFGPIAYLSIXGSKYGLVIVDDFSRLXWVFFLQDXSETQGTLKHFLRRAQNEFELKVKKIRSNNGSEFKNLQVEEYLEEEGIKHEFSAPYTPQQNDVVERKNRTLIDMARTILGEFKMPERFWSEAVNMACHAINRVYLHRLLKKTSYELLTGNKPNVSYFRVFGSKCYILVKKGYDSNTKAYRVFNKSSGLVEVSSDIVFDETNDSPREQVYLDDVDEDDVPTAAIRTMAIGDVRPQEQKEQDQPSSSTMVHPLTQDDEQDEHEVVTRNKARLVAKGYAQVAGLDFEESFAPVARLESIRILLAYAAHHSFRLFQMDVKSAFLNGPIKEEVYVEQPPGFEDERYPNHVCKLSKALYGLKQAPRAWYECLRDFLIANAFKVGKADPTDSRLEGG

SEQ ID NO: 303889 - protein, 78 aa, Zea mays
  Clone ID: MRT4577_40216C.1.pep
PSQLTNVSTTASFYPNSSIPYYMHDRPCFVARSQSLHVPPVYQQTITFPKKKKKVFLHCESPFLVSFVVRVPTMIGFG

SEQ ID NO: 303890 - protein, 75 aa, Zea mays
  unsure (1)..(75): unsure at all Xaa locations
  Clone ID: MRT4577_40217C.1.pep
RYYPDSVRIICDXFSTFMGIPFSWILLTVIPHFVDYWSTYVFTLFLMGITIRWSATYANXPHFAXEVVPPYRASC

SEQ ID NO: 303891 - protein, 235 aa, Zea mays
  unsure (1)..(235): unsure at all Xaa locations
  Clone ID: MRT4577_40218C.1.pep
MARRDHNDDDDEVDEEEEEDAYDLDDDEDEDEEDDYEEETRRGKASRGGGGAKSGGGRKRSREDNFIDDSAIEDEDDEDDDGGGRPRKKGGGGVRGFFDEEAQVDEDEEEEDEGEGEDDFINDAGADLPDEDVVRGSRRHSIPMRDEEEDIDEMERQVRERYARSTHIEYGEEAAEVEQQALLPSVKDPKLWMVKCAIGHERETAICLMQKFIDRSXTFQIKSVVGVDHLKKYIY

SEQ ID NO: 303892 - protein, 67 aa, Zea mays
  Clone ID: MRT4577_40219C.1.pep
TMGRTLGFYPCYKWGILPPLFHILGGDEPPPLGQTTKKRLGGPFPGGGGFFILPWIDTLTWKGFLFF

SEQ ID NO: 303893 - protein, 175 aa, Zea mays
  Clone ID: MRT4577_4021C.1.pep
LLRSMFLFLFHGQRPLRSSARVSLPWRLPLPAANLPAWISPSSTSASPASREPLLPDFSLLAPESWSSCAPPQLAPCAPRHRLSLAAVSSSSPELSAAPATSPAVVVAAPAYGRARPSAVASQFLLVARVNSLRLVLIPVASSTSPNAFVIWSCVVKLVDRVRYRVRLFLMRIAQ

SEQ ID NO: 303894 - protein, 145 aa, Zea mays
  Clone ID: MRT4577_40220C.1.pep
AGRFGLTLFLLFQPQYTSGRQGMELRAACMSPFFFFLFAYAQHSSVLFACVFFSHACCMHVTSLCFCFFFLSAQPHRTAESTGGWLWPTAPCTEAHSRPLSVCFLFFFLCRTVTRPPRRTRHLHCAIELESSPRLLESLTVCLNI

SEQ ID NO: 303895 - protein, 277 aa, Zea mays
  unsure (1)..(277): unsure at all Xaa locations
  Clone ID: MRT4577_40221C.1.pep
AGPGLAYNSPVPFLLPFPASARPSTSNQPAAARNETKRTNPTNSPVATLQSRSPHPTTGQAGRACHAPCQARLRSQPGSRLEPASNRSATRWLSSRPARGWHSPPSSSSTAPTTRGDGCSRSVPPTSFSTSSPXVGASYXSCPIASSSTPGMQTTPSSCPPAPTTSSSGLPRPRAPRTSSASSLATSTPAPSSASPRSPSTWPSTPSRIRNTALASSPTRDRDTVVITWWPSSTRPLRPTTRPCYATPASPTSGPPGRWPHRERGAHRWGATASLPW

SEQ ID NO: 303896 - protein, 82 aa, Zea mays
  Clone ID: MRT4577_40222C.1.pep
GRFFFFFFLFFFFFFFFFFFFGLFIQASINSLSPSAGLAGPPRPQRQEPRLPGAYEAKKETGGGGGLNRRKKTLFTFPIIPG

SEQ ID NO: 303897 - protein, 94 aa, Zea mays
  unsure (1)..(94): unsure at all Xaa locations
  Clone ID: MRT4577_40223C.1.pep
PYYTPSAAAGKAFSHRTESMTERPKASYAAKTNKLKLDYNYAINPYIRGERTSLKKLPPKEXQVEDEEDYHMSKSXVNDEDDQDVPEEDEDHDQ

SEQ ID NO: 303898 - protein, 120 aa, Zea mays
  unsure (1)..(120): unsure at all Xaa locations
  Clone ID: MRT4577_40224C.1.pep
PGFVFVSRSGLHFHLVLPDFEVHTSKMRTRLAMHDPRXEHVRECSHTQALVVAALEVDADPILFGLSIDGIGEPNTTTVILVLGVVKAEALHAEALAWTIRGAGPTPTAVIQIQEGEEEV

SEQ ID NO: 303899 - protein, 105 aa, Zea mays
  Clone ID: MRT4577_40225C.1.pep
MSEVKDSNVPAALDGNPQPMDQTEDNSMPSAQQQEEAIKKKFGGLMPKKPPLISKDHERAYFDSADWALGKPTRQQQQQRARRPIYTSSENEDGDGAGAEDMNIN

SEQ ID NO: 303900 - protein, 122 aa, Zea mays
  Clone ID: MRT4577_40226C.1.pep
PEPETPRLTHAVRGNPQPMDQTEDNSMPSAQQQEEAIKKKFGGLMPKKPPLISKDHERAYFDSADWALGKQGVAKPKGPLEALRPKLQPTRQQQQQRARRSIYTSSENEDGDGAGAEEMSIN

SEQ ID NO: 303901 - protein, 123 aa, Zea mays
  Clone ID: MRT4577_40227C.1.pep
MSEVKDSNVPAALDGNPQPMDQTEDNSMPSAQQQEEAIKKKFGGLMPKKPPLISKDHERAYFDSADWALGKQGVAKPKGPLEALRPKLQPTRQQQQQRARRPIYTSSENEDGRQAAGEDMNIN

SEQ ID NO: 303902 - protein, 123 aa, Zea mays
  Clone ID: MRT4577_40228C.1.pep
MSEVKDSNVPAALDGNPQPMDQTEDNSMPSAQQQEEAIKKKFGGLMPKKPPLISKDHERAYFDSADWALGKQGVAKPKGPLEALRPKLQPTRQQQQQRARRPIYTSSENEDGDGAGAEDMNIN

SEQ ID NO: 303903 - protein, 123 aa, Zea mays; identical to SEQ ID NO: 303902
  Clone ID: MRT4577_40229C.1.pep

SEQ ID NO: 303904 - protein, 62 aa, Zea mays
  Clone ID: MRT4577_4022C.1.pep
WYATCDWSRSYQSQVSQCKGSVQRGGASTVHITGPYVITLLEIFRFGLLMPNIMGTNHAEVL

SEQ ID NO: 303905 - protein, 66 aa, Zea mays
  Clone ID: MRT4577_40230C.1.pep
MPSNSIALGSSQEVFHPGALKAAGGEFMCTLIFIFIGLTSGMAFISLTGRGPTTPRGLIAGRVGHA

SEQ ID NO: 303906 - protein, 103 aa, Zea mays
  Clone ID: MRT4577_40231C.1.pep
SSLTNIDFVVEASIPLEAVFQDGILPWSGHQVVVAEEGLVTGASSGSLLLQQRGACALMATRRAPLSPAVVDLSAMVCMHDICLPRLESYNSLIYSTAGSVLV

SEQ ID NO: 303907 - protein, 114 aa, Zea mays
  Clone ID: MRT4577_40232C.1.pep
HASAHVRTDSQADPHDLALLGILWRMKATTRAESTREASIEGLQSNQSAINVRLLTRKITSLRAELTDHQKDHVIYNSTFAWAKQQVQKSIALQTAIGMCDTLLALRSCSVIDS

SEQ ID NO: 303908 - protein, 844 aa, Zea mays
  unsure (1)..(844): unsure at all Xaa locations
  Clone ID: MRT4577_40233C.1.pep
VYASGGSSWIIDSGCTNHMTREKKMFTSYVKNKDSQDTIIFGDGNQGKVKGLGKIAITNEHSISNVFLVESXGYNLLSXRSDGSLAFKGVLDDKLYLVDFSKEEADLDACLIAKTSMGWLWHCRLAHVGMKNLHKLLKGEHVLVLTNVCFEKDRPCAACQAGKQVGSTHHSKNVMTMSRPLELLHMDLFEPIAYLNIGGSKYGLVIVDDFSRFTWVFFLQDKSETQGTLKRFLRRAQNEFELKVKKIRSDNGSEFKNLQVEEYLEEEGVKHEFSAPYTPQQNGVVERKNRTLIDMARTMLGEFKIPKRFWSEAVNTACHAINRLYLHRLLKKTSYELLTSNKPNVSYFRVFGRKCYILVKKGLVEASSDVVFDETNGSPIEQVDLDDIDEDDVPTAAIRTMAIGDVRPQEQQEQDQPSSSTMVHPPTQDDEQVHQEEACDQGGAQEEQVMEEEASLAPPTQVRATTQRNHPVDQILDDISKGVTTRSRLANFCEHYSFVSSIEPFRVEEVLQDPDWVLAMQEELNNFKRNEVWRLVPCPKQNVVGTKLFQMDVKSAFLNRPIKEEVYVEQPHGFEDDRYPDHVCKLSKALYGLKQAPRAWYECLRDFLIANSFKSCEEFSRVMTQNFEMSMMGELNYFLGFQVKQLKDGTFISQTKYTQDLLKRFGMKDAKPAKTPMGTDGHVDLYKGDFDYAGCKVDRKSTSGTCQFLGRSLVSWSSKKQTSVALSTAEVEYVAAGQCCAQLLWMRQTLRDFGYNLSKVPLLCDNESAIRMANNPVEHSRTKHIDIQHHFLRDHQQKGDIEVFHISTENQLANIFTKPLDEKTFCKLEREMCPWAISKYFGDL

SEQ ID NO: 303909 - protein, 447 aa, Zea mays
  Clone ID: MRT4577_40234C.1.pep
MDPKGKGMVVNDKEKESIFNEPRDDKPTDSGSSHKKRDGKKKRRIKKIIYYDSDASSYSPRDDDDDSSSKKKTVNQNYSFDYSRIPYNSNAHLLSIPLRKPPHFDGEDYSFWSHKMRSHLFSLHPSIWEIVENGMHFDSTDNPMIINEQIHKNAQATTVLLASLYRNEYNKVSGLDNAKQIWDTLKISHEGNDATMITKMELVEGKLGRFTMIRGEEPTQTYNRLKTLVNKIRSYGSTRWTDHDVVRLMLRSFTVIDPHLFNLIRENPRYTKMTPEEILEKFVSGRMMVKEARYVDDALNGPLPIYEPQPVALKAMSGRETLPSKVAQVEATGLNENEMALIIKRFKTALKGRKEYPNKNKTRGKRSCFKCGKTGHFIAQCPVNDNDQGQEKHGKREKKKVYKKVKGEAHLGKEWDSDCSSSDSDDEGLSALAFDKSSLLLGFSLPF

SEQ ID NO: 303910 - protein, 1560 aa, Zea mays
  Clone ID: MRT4577_40236C.1.pep
MDPKGKGMVVNDKEKESVFNEPRDDKPTDSGSSHMKKDEKKKRDEYHKVSGLYNAKQIWDTLKISHEGNDATMITKMELVEGELGRSFTILDPHLVNSIRENPRYTKMTPEEILGKFVSGRIMIKEARYIDEALNATSSREALPSKVAQVEAAGLNKDEMALIIKRFKTALKGCKEYSNKNKAKGKCSCFKCGKTGHFIAQCPDNENDQGDERHGKRENKKVYKKAKGEAHLGKEWDSDCSSSDSDDEGLAASAFNKSSLFPNERHTCLMAKEKKVNAQETPKYSTSSDDDSSDDEVDYTSLFKGLDRAKVEKINELIDALNEKDRLLERQEDILYEEHDKFVSVQKSLALEIKRNELLSSELSICNESISSLKILNDDLNAKLEVVNKSSPCVEHVVICNRCKDFNVDVCDEHLISISKLNDEVASLNAQLKTCKSDFDKLKFARDAYTVGRHPSIKDGLGFKREAKNLTSQRAPIFNKEKGKAPMASNSQKNHAFIYDRKFSRNAHHNRSYNAYDSHAMIVSSSSFVHSRNMTRNNVVHHVPKKMQNKSATVFHACNTDFVLSCKNKKVVARKLGAKCKGDKTCIWVPKTIVTNLVGPNKSWVYASGGSSWIIDSGCTNHMTGEKKMFTSYVKNKDSQDSIIFGDGNQGKVKGLGKIAISSEHSISNVFLVESLGYNLLSVSQLCNTGYNCLFTNVDVSVFRRSDGSLAFKGVLDDKLYLVDFSKEEAGLDACLIAKTSIGWLWHRRLAHIGMKNLHKLLKGEHVLGLTNVTFKKDRPCAACQAGKQVGSSHHSKNVMTASRPLELLHMDLFGPVAYLSIGGSKYGLVIVDDFSRFTWVFFLQDKTETQGTLKRFLRRDQNEFELKVKKIRSDNGSEFKNLQVEEYLEEEGIKHEFFAPYTPQQNGVVERKNRTLIDMARTMLGEFKTPERFWSEAVNTACHAINRVYLHRLLKKTSYELLTGNKPNVSYFRVFGSKCYILVKKVRNSKFAPKAVEGFLLGYDSNTKAYRVFNKSSGLVEVSSDVVFDETNGSPREQVDLDDVEEDDVPTAAIRTMAIGDVRPQEQKEQDQPSSSTMVHPPTQDDEQIQAKQDLRIRTFATGRLGLASPPGWLVAARLPLAVWDWLSYSFVSFIEPFRVEEALLDPDWVLAMQEELNNFKRNEVWTLVPHPKQNIVGTKWVFRNKQDEHRVVTRNKARLVAKGYAQVAGLDFEETFAPVARLESIRILLAYVAHHSFRLFQMDVKSAFLNGPIKEEVHVEQPPSFEDERYPDHVCKLSKALYGLKQAPRAWYECLRDFLIANAFKVGKADPTLFTKTCDGDLFVCQIYVDDIIFGSTNQKSCEEFSRVMTQKFEMSMMGELNYFLGFQVKQLKDDTFISQTKYTQDLLKRFGMKDAKPAKTPMGTDGHVDLNKGGKSVDQKTYRSMIGSLLYLCASRPDIMLSVCMCARFQSDPRECHLVAVKRILRYLVATPCFGIWYPKGSTFDLIGYSDSDYARCKVDRKSTSGTCQFLGRSLVSWSSKKQTSVALSTAEAEYVAAGQCCAQLLWMRQTLRDFGY

SEQ ID NO: 303911 - protein, 77 aa, Zea mays
  unsure (1)..(77): unsure at all Xaa locations
  Clone ID: MRT4577_40237C.1.pep
VGKNTGQPGVXAAENKPLGPPGPGSVLSSVVYPVEYNPMLKQKLEKALPPLPMWRGGPLAFSCSSPAKLFSLNSQSS

SEQ ID NO: 303912 - protein, 377 aa, Zea mays
  unsure (1)..(377): unsure at all Xaa locations
  Clone ID: MRT4577_40238C.1.pep
MDPKGKGIVINDKEKESFVNEPKDDKPTDSGSGHRRKDGKKKKTRRIKEIVYYDDSDESTSSQKDDDHNDYERRKPDQGNKREKKKNYKKAKGEAHLGKEWDSDCPSSDSDNEGLAATAFNKSSLFPNERHTCLMAREKKVYASGGSSWIIDSGCTNHMTGEKKMFTSYVKNKDSQDSIIFGDGNQGKDKSETQGTLKRFLRRAQNEFELKVKKIRSDNGSEFKNLQVEEFLEEEGIKHEFSAPYTPQQNGVVERKNMTLIDMARAMLGEFKTPECFWSEAVNTACHAINRVYLHRLLKKTSYELLTGNKPNXEEDVPTAAICTMAIGDVRPQEQLEQDKPSSSTMVHPPTQDDEQVVPNGCEERFPQRADQGGGVL

SEQ ID NO: 303913 - protein, 1389 aa, Zea mays
  Clone ID: MRT4577_40239C.1.pep
MDPKGKGMVVNDKEKESIFNEPRDDKPTNSGSSHKKKDGKRRGASRRSSTTTVMHLLLHQETTMMTILRQRKKRDEYNKISGLDNAKQIWDTLKISHEGNDATMITKMELVEGELGKFAMIRGEEPTQTYNRFKTLVNKIRSYGSTRWTDHDVVRLMLRSFTVIEPHLVNLIRENPRYTKMTPEEILGKFVSGRMMVKEARYVDDTLNGPLPVYEPQPVALKATSSKETLPSKVAQVEAIGLNEDEMALIIKHFKTALKGRKEYPNKNKTRGKRSCFKCGKTGYFIAQCPNNENDQGQERHGKKEKKKSYRKAKGEAHLGKEWDSDCFSSDSDDEGLAASAFDKSSLFPNERHTCLMAKEKKDRLLEKQEDILYEEHDKFVSVQKSIALEIKRNEMLSSELSVCHELVSSLKSLNDELNAKLEEVNKSSSCVKHVVICNRCKDFDVNSCDEHLISIAKLNDEVGSLNAQLKTCKIDFDKLKFARDAYTIGRHPSIKDGLGFQKEAKNLTSQRAPIPNKEKGKVSMASSTQRNHAFIYNRKIASHSNYNRSYDHDAFDSHVMFASSSTFVHGRSRPRRNHVVHHVPRKACNESTTVFHACNTSFILSCKNEKVVARKLGSKCKGDKTCIWVPKAIVTNLVGPNKSLIIDIGCTNHITGEKKMFTSYVKNKDSQDTIIFGDGNQGKVKGLGKIAISSEHSISNVFLVESLGYNLLSVSQLCHMGYNCLFTNVDVSVFRRSDGSLVFKGVLDGKLYLVDFSKEEADLDACLIAKTSMGWLWHRRLAHVGMKNLHKLLKGEHVLGLTNVCFEKDRPCAACQAGKQVGSTHHSKNVMTTSRPLELLHMDLFGPVAYLSIGGSKYGLVIIDDFSRFTWVFFLQDKSETQGTLKHFLRRAQNEFELKVKKIRSNNRSEFKNLQVEEYLEEEGVKHEFSAPYTPQQSGVVERKNKTLIDMARMMLGEFKTPERFWSKAVNTACHAINRLYLHCLLKKISYELLTGNKPNVSYFRVFGSKCYILVKKGRHSKFSPKAVEGFLLGYDSNTKAYRVFNKSSGLVEVSSDVVFDETNGSPREQVDLDDIDEDDVPTTSMRTMAIGDVRPQEQQEQDQPSFSTMILGDISKGVTTHSRLANFCEHYSFVSSIEPFRVEEALQDPDWVLAMQEELNNFKRNEVWSLVPRPKQNVVGTKWVFRNKQDEHGVMTRNKARLVAKGYAQVAGLDFEETFAPVARLESIRILLAYATHHSFRLFQMDVKSAFLNGPIKEEVGKADPTLFTKTCDGDLFVCQIYVDDIIFGSTNQKSCEEFSRVMTQKFEMSMMGELTYFLGFQVKQLKDSTFLSQTKYTQDLLQRFGMKDAKPAKTPMGTDGHEDLNKGGGDVLQLDPLRLTCVFEYS

SEQ ID NO: 303914 - protein, 763 aa, Zea mays
  unsure (1)..(763): unsure at all Xaa locations
  Clone ID: MRT4577_4023C.1.pep
PASAPRPIFLFAXILLPRQDIKHWWIWAYWSSPMTYSNNAISVNEFLATRWAMPNNEANIVAPTIGKAILKYKGYFGGQWGYWLSIGAMIGYTILFNILFLCALTFLSPGGSSNTVVSVSDDGDKEKSTDQEMFDVANGTNEAANRRTQTGMVLPFQPLSLSFNHMNYYVDMPAAMSRXGFTESRLQLLSDISGAFRPGVLTALVGVSGAGKTTLMDVLAGRKTSGTIEGDIKLSGYPKKQETFARVSGYCEQTDIHSPNVTVYESLVYSAWLRLSSEVDDNTRKMFVEEVMSLVELDVLRDALVGLPGVSGLSTEQRKRLTIAVELVANPSIIFMDEPTSGLDARAAAIVMRTVRNTVNTGRTVVCTIHQPSIDIFEAFDELLLLKRGGRVIYAGQLGVQSRVLVEYFEAIPGVPKITEGYNPATWMLEVSSPLAEARLDVDFAEIYANSALYRHNQELIKELSIPPPGYQDLSFPTKYAQNFLNQCMANTWKQFRSYWKNPPYNAMRYLMTILYGLVFGSVFWRMGKNVKSEQELQNLLGATYAAVFFLGSANLLSSVPVFSIERTVFYREKAAGMFSPLSYSFAVTVVELVYSIAQGILYTIPLYSMIGYEWKADKFFYFMFFLTCSFLYFSLFGAMLVTCTPSAMLASIVVSFSLTGWNIFAGFLVPRPALPIWWRWFYWCNPVSWTIYGVTASQFGDVGRNVTATGNAGTVVVKEFLEQNLGMKHDFLGYVVLAHFGYILLFVFLFAYGTKALNFQKR

SEQ ID NO: 303915 - protein, 518 aa, Zea mays
  Clone ID: MRT4577_40240C.1.pep
DLNVVYTDNTATDCSMELPRLNWSVEDVPGDSQPVENSSKKTLRCPTAVFEDDLPVTKMDDTPVTNVDDVEFTFHEKPQTDTVEENLSIQKTNGFTKEEVCNKQINPEIPTEDQFSRGQKHDTLLMDRVPSVKNPFNLDDDRNDDLFELPTESCFLEVPNVVESRKQVDSTSRMVVPPIVSNQIRMAEVQQCHNSIERILSSSSASENGEVVGPEDITVRSSSELVNKTCLTDHALQENGHTSGDIFVPSQAASTELSTISMQDISALSEVEIMQTEDASAKDMTAVCSIDCIEMKQAINTTANDTYAAIVEEKKLIEGTTARMNGVRETYYVEEQTQASDTKELSAVQNIGNSEENKQTENTDAKETNARFNANDVEHKTQTAKEIAAAESTSSVEEKQQLNIVVGQDGSNKKMNEEIASTGAQLNSGRVRVPLKVLLAEASMENQVKKPSTKERMLSFRRQVTKDNNLSVKSGSRKSGPDDHHWSSPAKLPHKDVDKISREKKQPWMPFICCHSVR

SEQ ID NO: 303916 - protein, 36 aa, Zea mays
  Clone ID: MRT4577_40241C.1.pep
VAACDTFRSGAVEQLRTHARRLQVSIKLSKCCPIIQ

SEQ ID NO: 303917 - protein, 1190 aa, Zea mays
  unsure (1)..(1190): unsure at all Xaa locations
  Clone ID: MRT4577_40242C.1.pep
MDPKGKGIVINDKEKESFVNEPKDDKPTDSGSGHKRKDGKKKKTRRIKEIVYYDDNDESTSSQKDNDDNDYERRKPVNSNFSFDYSRIPQSTNAHLLSIPLGKPPHFDGEDYGFWSHKMRSHLFSLHPTIWEIVESGMKFDSSDSPMFINEQTHRNAQATTMLLASLCRDEYHKVSGLDNAKQIWDTLRISHEGNDVTLLTKMELVEGELGRFAMIRGEEPTQNCNFPKFLTNLTLRQVKITSLQVVQAYLAGLTFALPXHLAXTVLANPSXYVATSRDPIIGGSLLLTYTTGYVAPLLIAASFAGALHSLLSFRRYSAWINPISGAFLLGGGVYTHTGQGVSSNINGHVGRKGQPSKTKIKGKHSCFKCGKVGHFIANCPDNDSDQEEGNKREKKKNYKKAKGEAHLGKEWDSDCSSSDSDNEGLAATAFNKSSLFPNEHHTCLMAREKKGLDRTKVDKINELIDALNDKNRLLEKQEDLLYDEHDKFVEAQKSLALEIKRNEMLSCELSTCHDSISSLKSIKDDLTAKCKDFNIDACSEHLVSISKLNDEVASLNAQLKTSKSEFDKLKFARDAYTIGRHPSIKDGLGFKREAKNLTSHKAPIPAKEKGKAPMASSAKKNHAFMYHDRRHARNANRSHDAFDSHVYDSYDMFASSSSYMHGRNVARRNAINHMPRRNGVSVPRKVNEPSTIYHACNASFAICRKDRKVYASGGSSWIIDNGCTNHMTGEKKMFTSYVKNKDSQDSIIFGDGNQGKDKSETQGTLKRFLRRAQNEFELKVKKIRSDNGSEFKNLQVEEYLEEEGIKHEISAPYTPQQNGVVERKNRTLIDMVRTMLGEFKTLERFWSEAVNTACHAINRVYLHRLLKKTSYELLTGNKPNVSYFRVFGSKCYILVKKGRNSKFAPKAVEGFLLGYDSNTKAYRVFNKSSGLVEVSSDVVFDETNGSPREQVVDFDNVDEEEVPITAIRTMAIGDVRPQEQDEQDQPSSSTMVQPPTQDDEQEACDQGGAQDDHVMEEEAQPAPPTQVRAMIQRDHPVDQILADISKGVTTRSRLVNFCEHYSFVSSIEPFRVEEALLDLDWVLAMQEELNNFKRNEVWILVPRPKQNVVGTKWVFRNKQDEHGVVTRNKARLVAKGYAQVAGLDFDETFAPVARLESIRILLAYAAHHSFRLFQMDVKSAFLNGPIKEE

SEQ ID NO: 303918 - protein, 171 aa, Zea mays
  unsure (1)..(171): unsure at all Xaa locations
  Clone ID: MRT4577_40243C.1.pep
MVQFGNMSSKKIELDHKDMVHDSAIDYYGKRLATASSDSTVKIINIGAANAPSLATLSGHYGPVWRVAWAHPKYGAILASCSYDGRVIIWKEDARGNWSQVHVFSDNKSSVNSIAWAPYEVGLCLACASSGGRISILTMRADGGXWDTATIERAHPVGATAISWAPATDSI

SEQ ID NO: 303919 - protein, 1589 aa, Zea mays
  unsure (1)..(1589): unsure at all Xaa locations
  Clone ID: MRT4577_40244C.1.pep
MDPNGKGMMVNDKEKESIFNEPRDDNPLTQDQVTRRGTGRRRGRSRRSFTTTTTPPLLHQETTTTMTRLKRNRIWEIVENGMHFDSTDNPVFINEQIHKNAQATTVLLAFLCRDEYNKVSDLDNAKQIWDTLKISHEGNDTTMITKMELVEGELGRFAMIRGEEPTQTYNRLKTLVNKIRSYGSTRWTDHDVVRLMLRSFMVIDPHLVNLIRENPRYTKMTPEEILGKFVSGRMMVKEARYVDDALNGPLPVHEPQTIALKATSNREKLPSKVAQVEAAGLNEDEMALIIKRFKTALKGRKEYPNKNKARGKRSCFKCGNTGHSIAQCPDNDDDHEQEKHGKREKKKVYKKAKGKAHLGKEWDSDYSSSDSDDEGLAASAFNKSSLFPNECHTCLMAKEKKVSVRDSPKYSTSSDEDSSDDEVDYSTLFKGLDRAKVEKINELIDALNEKDRLLEKQEDILYEEHDKFVSAQKSLALETKRNEMLSSKLSACHESISRLKILNDDLNAKLEVANQSSSCVEHVVICNRCKDFDIDACDEHLTSITKLSDEVASLNAQLKTCKVDFDKQKFARDAYAIGRHPSIKDGLGFRKETRNLTSQKTPVLNKEKEKAPMASSSKKCHAYIYDRKFSRNAHYNRSYNAFNSHAMFASSSTFVHGRSKPRRNHVVHHVPRKVYASGGSSWIIDSGCTNHMTGEKKMFTSYVKNKDSQDSIIFGDGNQGKVKGLGKIAITSEHSISNVFLVESLGYNLLSMFLSLERSDGSLAFKGVLDNKLYLVDFSREEVDLDACLIAKTSMSWLWHHRLAHVGMKNLHKLLKGEHVLGLTNVCFEKDRPCATCQAGKLVGSTHHSKNVMTTSRPLELLHMDLFGPVAYLSIGGSKYGLVIVDDFSRFTWVFFLQDKSETQGTLKRFLRRAQNEFELKVKKIRSNNGSEFKNLQVEEYLEEEGVKNEFSAPYTPQQNGVVERKNRTLIDMVRTMLGEFKMLERFWSEAVNTACHAINRLYLHHLLKKTSYELLTDNKPNVSYFRVFGRKCYILAKKGRHSKFAPKAVEGFLLGYDSNTKAYRVFNKSSALVEVSSDVVFYETNGSPREQVDLDDINEDDVPTAAIRTMAIGDVRPQEQQEQDQPSSSIMVHPPTQDDGQVPQEEACDQGGAQEEQAMEEEAPPAPPTQVRATIQRNHPVDQILGDISKGVTTRSRLANFCEHYSFVSSIEPFRVEEALQDPDWVLAMQEQLNNFKRNEVWSLVPRPKQNVVGTKWVFRNKQDEHRVVTRNKARLVAKXGYAQVXRLFQMDVKSAFLNGPIKEEVYVEQPPDFEDDRYPHHVCKLSKALYGLKQAPRAWYECLRDFLIANSFKVGKADPTLFTKTCNGDLFVCQIYVDDIIFGSTNQKSCEEFSRVMTQKFEMSMMGELNYFLGFQVKQLKDGTFISQTKYTQDLPMRFGMKDTKPAKTPMGTDGHVDLNKGGKSIDQKAYWSMIRSLLYLCASRPYIMLSVCMCARYQSDPRECHLVAVKRILRYLVSTPCFGIWYPKGSTFDLIGYSDSDYAGCKVDRKSTSGTCQFLGRSLVSWSSKKQTSIALSTAEAEYVAT

SEQ ID NO: 303920 - protein, 305 aa, Zea mays
  Clone ID: MRT4577_40245C.1.pep
MVQFGNMSSKKIELDHKDMVHDSAIDYYGKRLATASSDSTVKIINIGAANAPSQVLATLSGHYGPVWRVAWAHPKYGAILASCSYDGRVIIWKEDARGNWSQVHVFSDNKSSVNSIAWAPYEVGLCLACASSGGRISILTMRADGGWDTATIERAHPVGATAISWAPATDSIAGTGEFVYKLVSGGFDSVVKVWGFNNGSWKLESALISDMHTDCVRDVAWAPVLGLAKSTIASASQDGKVVIWTRGKDGDKWERKLMRDFGSPVWRVSWSLTGNILSIAAGGNNITLWKEGSDGQWEEVMKVET

SEQ ID NO: 303921 - protein, 865 aa, Zea mays
  unsure (1)..(865): unsure at all Xaa locations
  Clone ID: MRT4577_40246C.1.pep
MDPKGKGIVINEKEKESFVNEPKDDKPTDSGSGHRRKEGKKKKTRRIKEXVYYDDSDESTSSHKDNDDNDYDKQKXRDEYHKVSGLDNAKQIWDTLKISHEGNDVTLLTKMELVEGELGRFAMIRGEEPTQTYNRLKTLINKIRSYGSTRWTDHDVVRLMLRSFTVLDPHLVNNIRENPRYTKMSPEEVLGKFVSGRMMIKEARYVDDALNGPINEPQPLALKATRSKEALPSKVAQIEAAGLNDEEMALIIKRFKTALKGRKGRPSKTKTKGKRSCFKCGKLGHFIANCPDNDSDQDQGNKREKKKNYKKAKGEAHLGKEWDSDCSSSDSDNEGLAATAFNKSSLFPNERLTCLMAREKKVCSRNSTYASSSEDESSDEDEIDYSCLFKGLDRTKVDKINELIDALNDKNRLLEKQEDLLYEEHDKFLEAQKSHALEVKRNEMLSCELSSCHETISSLRSINDDLNAKLEMARKSTTCVENVAICNRCKDFDIDACSEHIASIAKLNDEMASLNAQLKASKSDFDKLKFARDAYSIGRHPSIKDELGFKREAKNLTSHKAPISTNEKGKAPMASSTKRNHAFMYNDRRQSHRSCNAFDSHAYDSYAMYASSSSYMHCRDMPRKNIHHVPRKNFVHAPRKVYASGGSSWIIDSGCTNHMTGEKKMFTSYVKNKDFQDSIIFGDGNQGKVKGLGKIAISNEHSISNVFLVESLGYNLLSVSQLCNMGYNCLFTNVDVSVFRRCDGSLAFKGVLDGKLYLVDFAKEEAGLDACLMAKTCMGWLWHRRLAHVGMKNLHKLLKGEHMIGLTNVHFEKDRPCAACQAGKQVGGAHHSKNVMTTSRPLELLHMDLFGPVAYLSIGGRLKVA

SEQ ID NO: 303922 - protein, 1684 aa, Zea mays
  unsure (1)..(1684): unsure at all Xaa locations
  Clone ID: MRT4577_40247C.1.pep
MDPKGKGMVVNDNEKESIFNEPRDDKANDSGSSQNKKDGKKKRRIKKIVYYDSDESSSSQKDDEYEEKKKMVNSNFSFDYSRIPHNSNAHLLSIPLGKPPHFDGEDYGFWSHKMRSHLFSLHPSIWEIVENGMRFDSSDNSMFINEQIHKNAQATTVLLASLCREEYNKVSGLDNAKQIWDTLKISHEGNDATMLTKMELVEGELGRFAMMKGEEPTQTYNRLKTLVNKIRSYGSMRWTDHDVVRLMLRSFTVLDPHLVNYIRENPRYIKMTPEKILRKFVSGRMMIKEARYVDDALNGPMPIYEPQTVALKATSSRETLPSKVAQVEAAGLNEDEMALIIKRFKTALKGHREHPNKSKTKGKRSCFKCGKIGHFIANCPDNDSDQEQGKTGKWEKKKTYKKAKGEAHLGKEWDLDCSSSDSDNEGLTATAFNKSSLFPNEHHTYLMAKEKKVSTRSTHTYASSSDDEVDYASLFKGLDRTKIDKINELIDASNEKNRLLEKQEDLLYEEHDKFVSAQNSLALEVKRNEMLSCELSTCHESISSLKSINDDLNTKLEIANKSSSLVEHVVICNRCKDFNVDACSEHLISIFKLNDEVASLNAQLKTSKNDFDKLKFARDAYTIGRHPSIKDGLGFQRETKNLTGQRAPIFNKEKGKAPMASSNQKNHAFIYDRKFSRNVHHDRSCNAYNSNVMIASSSSFMHSRDMPRKNVIHHMPRRKVVNHMPRKVYNGVTTVFHACNTKFILSCKNEKVIAKKVGAKCKGDKTCIWVPKAIVTNLVGPNKSWIIDSGCTNHMTGEKKMFTSYVKNKDSQDSIIFGDGKQGKVKGLGKIAISSEHSISNVFLVESLGYNLLSISQLCNMGYNCLFTNVDVSVFRRSDGSLAFKGVLDDKLYLVDFAKEEAGLDACLIANTSMGWLWHRSLAHVGMKNLHKLLKGEHVLGLTNVTFEKDRPCAACQAGKQVGNAHHNKNVMTTSRPLELLHMDLFGPVAYLSIGGSKYGLVIVDDFSRFTWVFFLQDKSETQGTLKRFLRRAQNEFELKVKKIRSDNGSEFKNLQVEEYLEEEGIKHEFSAPYTPQQNGVVERKNRTLIDMARTMLGEFKTVERFWSEAVNTACHAINRVYLHLLLKKTSYELLTSNKPNVSYFRVFGSKCYILVKKGRNSKFAPKAVEGFLLGYDSNTKAYRVFNKSSSLVEVSSNIVFDEINGSPREQVDIDDVDEEDVPTAAIRTMAIGDVRPQEQKEQDQPSSSTMVHPPTQDDEQVHHEETVEEALLDPDWVLAMQEELNNFKRNEVWTLVPRPKQNVVGTKWVFRNKQDEHGVVTRNKARLVAKGYAQVAGLDFQETFAPVARLESICILLAYATHHSFRLFQMDVKSAFLNGPIKEEVYVEQPPGFEDERYPDHVCKLSKALYGLKQAPRAWYECLRDFLIANAFKVGKADPTLFTKTCDGDLFVCQIYVDDIIFGSTNQKSCEEFSRVMTQKFEMSMMGELNYFLGFQVKQLKDDTFISQTKYTQDLIKRFGMKDAKPAKTPMGTDGHVDLNKGGSTFDLIGYSDSDYAGCKVDRKSTSGTCQFLGRSXGQCCAXQLLWMRQTLRDFGYNLSKVPLLCDNESAIRMADNPVEHSRTKHIDIRHHFLRDHQQKGDIEVFYVSTENQLADIFTKPLDEKTFCRLRSELNVLDSQNLD

SEQ ID NO: 303923 - protein, 78 aa, Zea mays
  Clone ID: MRT4577_40248C.1.pep
IFDLKFYYFFFFFYYLFIIFFFFFFFFFFFFFFFFFFFGRVGSTDTKPSFCYKHHPWLNQNETTKITHDILYDQSPGS

SEQ ID NO: 303924 - protein, 236 aa, Zea mays
  Clone ID: MRT4577_40249C.1.pep
PVLREGTTFECQGLVGRHNKIAPAGRPSCLFDCPNVKEPRQGGRRQNRRGNGGSGREGHDNDGSRREDVIRPGRPRQRRIQPGRRDPLRKAATSTNPTKMMKGWEQGSCVGPGRMVRRRQREKRNQGEAQGVVRRKSGQRGGGRRGGTTAGHEPRLWRRLACVWLAPAGHLLVGVAFLNARASTGRRVEEEEGGAAAPTATVRIWADNPNLDLLFVLAHRGCAQEAAAGLEEPNPL

SEQ ID NO: 303925 - protein, 44 aa, Zea mays
  unsure (1)..(44): unsure at all Xaa locations
  Clone ID: MRT4577_4024C.1.pep
HTIREPKFNTLAEAXQPCDWKNPNIIKVNRLEAHHPFSNSRNND

SEQ ID NO: 303926 - protein, 220 aa, Zea mays
  unsure (1)..(220): unsure at all Xaa locations
  Clone ID: MRT4577_40250C.1.pep
MAHYCARXRDEXSSNAAYIGTPGRGNPCCVEITGXTLRKRSSXASYWRETYEEXNRRALRELLYXCPGALQYSKGGILFQETLYHEYQGWLALXEGLKEGERLPGIKGDKGTIEDGGSDHETTTQGHDDPGRRCAKYYDAGARFAKWRAVLKIVPRGPSQFVVDLNAXGRARYAIFXHEKGLVPSREPEILDDGPDDIDRCAYVTETVLAACYKALNEHH

SEQ ID NO: 303927 - protein, 1422 aa, Zea mays
  unsure (1)..(1422): unsure at all Xaa locations
  Clone ID: MRT4577_40251C.1.pep
MDPKGKGMMVNDKEKESFVNDPKDDKPTDSGSGHKRKDGRKKKTRRIKEIVYYDNDESSSSQKDDYNDYEKKKTIWDTLKISHEGNDVTMLTKMELVEGELGRFTMIRGDEPTQTYNWLKTLVNKIRSYGSTRWTDHDVVRLMLRSFTVLDPHLVNNIRENXVHQDDARGDTWKVRXGRMMIKEARYVDDSLNGPIQEPKTIALKATRSKEALPSKVAQVEAAGLNEEEMALIIKRFKTTLRVRKEHPNKTKTKGKRSCFKCGKIGHFIANCPDNDSDQEQGNKREKKKAYKNTKGEAHLGKEWDSDCSSSDSDNEGLAATAFNKSALFPNEHHTCLMAREKKGLDRTKVDKINELIDALNDKNSLKSINDDLSAKLEIANKSTSCVKHVVVCTRCKDFNVDACSEHLVSISKLNDEVASLNAQLKTSKSEFDKLKFARDAYTIGRHPSIKDGLGFKREVKNLTSHKASISAKEKGKAPMASSAQKNHAFMYHDRRHSRNVCRGYDAFDSHAMIVSSSSIMHDRNLARKNVVHHMPRRNSVHVPRKVMNEPSTVYYACNASFAICRKDKKVYASRGSSWIIDSGCTNHMTGEKRMFSSYVKNKVPQDSIIFGDGNQGKVKGLGKIAILSEHSISNVFLVESLGYNLLSVSQLCNMGYNCLFTNVDVSVFRRSDGSLAFKGVLDGKLYLVDFAKEEAGLDACLIAKTSMGWLWHRRLAHVGMKNLHKLLKGEHVIGLTNLVKQDKSETQGTLKRFLRRAQNEFELKVKKIRSDNESEFKNLQVEEYLEEEGIKHEFSAPYTPQQNGVVERKNRTLLDMARTMLGEFKTPEQFWTEAMSTACHAINWVYLHRLLKKTSYELLTGNKPNVSYFRVFGSKCYILVKKGRNSKFAPKAVERFLLGYDSNTKAYRVFNKSSGLVEVSSDVVFDETNGSPREQVVDLDDVDEEDVPTTAMRTMAIGDVRSQEQKEQDQPSSSTMVHPPTQDDEQVHQEEACDQGGAQDDLVMEEEAQPAPPTQVRATIQRDHPVDQILGDISKGVTTRSRLVDFCEHYSFISSIEPFRQNVVGTKWVFRNKQDEHGVVTRNKTRLVAKGYAQVAGLDFEETFAHVARLESIRILLAYATHHSFRLFQMDVKSAFLNGPIKEEVYVEQPPGFEDERYPDHVCKLSKALYGLKQAPRAXVKQLKDGTFISQTKYTXDLIKRFGMKDAKPAKTPMGTDGHTDLNKGXFQSDPRDCHLVAVKRILRYLVATPCFGIWYPKGSTFDLIGYSDSDYAGCKVDRKSTSGMCQFLGRSLVSWSSKKQTSVALSTAKAEYVATGQCCAQLLWMRQTLRDFGYNLSKVLLLCDNESAICMADNPVEHSRTKHIDIRHHFLRDHQQKGDIEVFHVSTENQLADIFTKPLDESTFYKLRSELNVLDSRNLD

SEQ ID NO: 303928 - protein, 151 aa, Zea mays
  Clone ID: MRT4577_40252C.1.pep
AHPLPLTPAYVEQGEGGNNGAANANSSQGPPASAGDGLLDFDMYLSEIQSSQPSKPELEQYLDESLTPRTQEFDILNWWKLNRVKFPTLSRMACDILAIPMSMVSSGSSIFTAGTGSRMLDDYRSSLRPETVEALVCAKDWLQYSTKAEGS

SEQ ID NO: 303929 - protein, 46 aa, Zea mays
  Clone ID: MRT4577_40253C.1.pep
VSVQCRCWDAGCVIEIGCGTLVNGALREDGVHCAVDGVWGDEGQSS

SEQ ID NO: 303930 - protein, 217 aa, Zea mays
  Clone ID: MRT4577_40254C.1.pep
FGTRVKLREAHKAGSPALCSASWGPSGQHVVTASAADTAVLIHDAATVLAGGRGSGSSALATIRLHKDGVTALAVAPGPSGSLASGSIDHSVKFYTFPEGQFQSNVARFTLPIRSLAFNKKGTLLAAAGEDDGIKLISTIDNTISKVLKGHKGSVTGLDFDPRNDYLASVDSFGTVIYWDLCIGAEARTLTRIAPTFRSDNSVRNVLCWSPDGQTLA

SEQ ID NO: 303931 - protein, 61 aa, Zea mays
  Clone ID: MRT4577_40255C.1.pep
CYRHFLSFTLPPTNAGTGDTSTVIHTHTTTTTSHTENWMASELCLPHTMNSSAVRIKNALS

SEQ ID NO: 303932 - protein, 34 aa, Zea mays
  Clone ID: MRT4577_40256C.1.pep
GLYNIGTTISTYYLIYTNIILYITFLLFNTFNIL

SEQ ID NO: 303933 - protein, 89 aa, Zea mays
  Clone ID: MRT4577_40257C.1.pep
QRLVLLEQVDIGIFIVSAAATGCHDDQQGCRGSGHVGSGLECRACQEPRCAGQVQHISAELIVIDVLEARSSRLTIARRCMVLSMPIHQ

SEQ ID NO: 303934 - protein, 579 aa, Zea mays
  unsure (1)..(579): unsure at all Xaa locations
  Clone ID: MRT4577_40258C.1.pep
ETKILDVVQMNSIMSDSKPKCLVIDEIDGALGDGKGAVEVILKMINAEKSNNSDKSTNGEETQARKTSRKSHRTAKLLRPVICICNDIYAPALRQLRQVAKVHVFVQPTISRVVNRLKYICKNEGFKASSIALSALAEYTECDIRSCLNTLQFLNKKRVALNITAIDSQVIGQKDKSKSILDVWKQVLQKKRLKRAGKAESLFNEDKDIDFLFTLISNRGDYEVTMDGIHENFLRLSYHDPMLQKTVKCLDILGVSDSLTQYVYRTQQMPLHAYQPPIAITISRMVAQVEKPNINWPKALQRSRALLLEKKDMLKTWQNQMSPFVSRHLSVESFVEDTASPLLHILSPLSLRPVALNLLSEREKDELVQLVDTMVSYSVTYRNTKFVPQEKANLSVVPHEVSSLSLYPPINDVINFEGYQSEHIGLSLAMKQVLVHEVEKQKIIKDSAGKLLNQSNDGNMKSEALSTIRKKTVANSIRPALHSSKDSSKCNSSTLEMQSNSASIVNDNDSXLPKKHSSRAANFFDRFRKERPVDAKTHSDVGLQRATLQRDSRPLIFKYNEGFTNAVKRPVRVRDLLLS

SEQ ID NO: 303935 - protein, 59 aa, Zea mays
  Clone ID: MRT4577_40259C.1.pep
SFFFFFFFFFFFFFFFFFFFFFFFLKGGPKSLFGKGPFLRGWGGPIKTPPNRGRKPRGF

SEQ ID NO: 303936 - protein, 50 aa, Zea mays
  Clone ID: MRT4577_4025C.1.pep
INHRGSHTYPHTCKKNETIQNERLKLSPYKQRMIPPMTSPGLHTNAAHNT

SEQ ID NO: 303937 - protein, 127 aa, Zea mays
  unsure (1)..(127): unsure at all Xaa locations
  Clone ID: MRT4577_40260C.1.pep
HVCTSGKGSKSGASIRCAGCQDSSMIFTIRXLXPYMIHLMQHPCNECKGTEXCINENDRYPACXAEKVIHEKKVLDVHVXNVMLHNLXITLPALANLSPDTXTGDIVFTLQQRDHSXFNRMCEDLFY

SEQ ID NO: 303938 - protein, 217 aa, Zea mays
  Clone ID: MRT4577_40261C.1.pep
KRTALTYLDARGKMHRVSKGAPEQILNLASNKSEIERKVHHSIGNYAERGLRSLAVAYQEVPEGTKESSGGPWQFIGLLPLFDPPRHDSAETIRRALDLGVSVKMITGDQLAIAKETGRRLGMGTNMYPSSSLLGDKKGDIAVLPVDELIEQADGFAGVFPEHKYEIVQRLQARKHICGMTGDGVNDAPALKIADIGIAVADATDAVRGASDIVLTD

SEQ ID NO: 303939 - protein, 180 aa, Zea mays
  unsure (1)..(180): unsure at all Xaa locations
  Clone ID: MRT4577_40262C.1.pep
LLAAWWPSSRLLKPAAIKGPPGSSISGRKLAVARAARRSIRRPRADAAEDTYGDDSVYFDLDHIRKTXTGEGDXLYRSDAAAAYNPLQRTFFXTYAXRVTKRELVRKFLVLEGGSLLAYDSAEAAPDLLSIQKGPHEASQPVPLGKIEAQRLHLDGLEIWLALRSVGRSVTDVMDDLSIL

SEQ ID NO: 303940 - protein, 203 aa, Zea mays
  unsure (1)..(203): unsure at all Xaa locations
  Clone ID: MRT4577_40263C.1.pep
XHKYEIVQRLQASKHICGMTGDGVNDAPALKIADIGIAVADATDAARGASDIVLTEPGLSVIISAVLTSRAIFQRMKNYTIYAVSITIRIVLGFLLLACFWKFDFPPMLVLVIAILNDGTIMTISKDKVRPSPHPDSWKLAEIFATGVIIGAYLAVTTVLFFWVIYKTEFFVRVFHVRTMNRKKIEETGDQNLLADNMEMLAS

SEQ ID NO: 303941 - protein, 133 aa, Zea mays
  unsure (1)..(133): unsure at all Xaa locations
  Clone ID: MRT4577_40264C.1.pep
KMHRVSKGAPEQILNLASNKFEIERKVHHSIGNYAERGLRSLVVAYQVVXTSILWHACLYTSKPLLNLFIVKEVPEGTKESSGGPWQFIGLLPLFDPPRHDSAETIRRALDLGVSVKMITGVSFYALFNICLM

SEQ ID NO: 303942 - protein, 53 aa, Zea mays
  Clone ID: MRT4577_40265C.1.pep
HQCFHINLKDEYPLPIFKVTTHQSHPQYEIATYIERASSAWKFIKYFSRSRDF

SEQ ID NO: 303943 - protein, 117 aa, Zea mays
  Clone ID: MRT4577_40266C.1.pep
NNHMQLQDFINQASRTNQTYLTTQKQIQAIIFSTCRFLDSSIAVTCFNHNSQDIHPKVVNKDFPESLRTALQLWYYYLKVIRHLARSNSAKRQLCPDLDRIRLLTSKIHTRPASRVP

SEQ ID NO: 303944 - protein, 107 aa, Zea mays
  Clone ID: MRT4577_40267C.1.pep
FHYIEFIAATLHLNKLEREEHLVAAFSYFDKDGSGYITVDELQQACQEHNMPDAFLDDVIKEADQDNDGRIDYGEFVAMMTKGNMGVGRRTMRNSLNISMRDAPGAI

SEQ ID NO: 303945 - protein, 107 aa, Zea mays
  Clone ID: MRT4577_40268C.1.pep
MATVPLPWPSVRRSLQEGAASAASYARRAPRPAATVRSVETLVVIVAAIVLAAVLAGVLARVCGGRHVVPSAQYHDEEGWVERRCRSCLDSGLPPPEQGASKTSEAK

SEQ ID NO: 303946 - protein, 75 aa, Zea mays
  Clone ID: MRT4577_40269C.1.pep
TFLITELNWTLNTNKEAKRAQDDSSHLIIAKSRAGRDASTVSTTIRTENSKVLVGLLLHWGQKSGNSHCCIKLHD

SEQ ID NO: 303947 - protein, 87 aa, Zea mays
  Clone ID: MRT4577_4026C.1.pep
AQDLARAAQIRVREACPRSDGGSTCPPAPARCNNQNAGDGEKRRGGCYHHRGHSLAICFHSTPSANLLRCALLCSQSQRREGLVEWG

SEQ ID NO: 303948 - protein, 119 aa, Zea mays
  Clone ID: MRT4577_40270C.1.pep
QNTHLSLGGNTNMVGHYFLEGAGYIQITAYDNSTFFFYTVPFEQNFLPAKVFTAYQNVTAFVGPGTNSLFTSKLALTSSPSEPLLYQITALLQDQVHHQSQHCSKGTRDLANFDFGNGA

SEQ ID NO: 303949 - protein, 99 aa, Zea mays
  unsure (1)..(99): unsure at all Xaa locations
  Clone ID: MRT4577_40271C.1.pep
RGXGFFFFFFFGKNPPPPCIKQGRNKILSKGLLGFHQEKPPKECKWGRDKGPPPCFPTPLVARFNHWPTPQTWVPPPPNLGAPPLYIKGGVPCHAAFKT

SEQ ID NO: 303950 - protein, 56 aa, Zea mays
  Clone ID: MRT4577_40272C.1.pep
LQFGKCSIQKYLVLKDKPHMSNHLQHTEYGIISLMEKLEIYSTKVAETEKYLKMRI

SEQ ID NO: 303951 - protein, 66 aa, Zea mays
  Clone ID: MRT4577_40274C.1.pep
RLGGLCRTETVGLIMLGSSELQDIICYINSSNRPILVVIKGFGKIEQVRVGEIRIVIHRGLFTSGS

SEQ ID NO: 303952 - protein, 342 aa, Zea mays
  Clone ID: MRT4577_40275C.1.pep
MAHSHRSSMSFCLVCIVVMAAAAALLQPASSQQAVPDIPNLKVGSNDRSTTLKCTNIKSNKTTCSATCNARCPHKCLIQCPSCKTFCLCDFYPGVSCGDPRFTGADGNNFYFHGKKDRDFCIVSDAALHINAHFIGKRNPAMSRDFTWIQALGIRFAHHHLYVAAQRTPRWDAAADHLALALDDEDVDVASLLPRFVGARWSPPTAPALSVTRTARVNTVVVELRGAFRIVASVVPITAEDSRIHNYGVREDDGDTLAHLDLGFKFYDLTDDVHGVLGQTYRPDYVNSLNVTSNMPVMGGAPDYLSSDLFSTDCAVARFGGRRHQQATAANIAMLTDDDDME

SEQ ID NO: 303953 - protein, 239 aa, Zea mays
  unsure (1)..(239): unsure at all Xaa locations
  Clone ID: MRT4577_40276C.1.pep
PRVRAPRGIRKLKALHTLGVVDVARSKTTLKELEELTQLRKLAVAGVHSKYSNKFWSVISANKQLRSLSVKGLGLDSCFGGDLLPPIHLESLKLEGQLVRINEWIHKLQNLSKLQLYNTEIDSADPMQAIGQLPNLTMLTLCYGSFMDNSELLFHGPSSFPELMVLKLKGVDCEIVSLXRQAMPKLELIHADFPGGNCGLAFLASLKEIRLGSSTRDTLKKDLQKQLTGDLERVSLKLL

SEQ ID NO: 303954 - protein, 143 aa, Zea mays
  unsure (1)..(143): unsure at all Xaa locations
  Clone ID: MRT4577_40277C.1.pep
MFSGKHTHTHTSFAVATKLYTGRQAASFLQSLVQKPEEMASPNVTFLAFFVALALSALHTDXKDHSFLAALSTNNLALKSNPIFFSSXAAAETLRHRSDTWCVAKPSTQEAALRGNLEFACSESDCGAIQGTGGCAQPDSLLS

SEQ ID NO: 303955 - protein, 100 aa, Zea mays
  unsure (1)..(100): unsure at all Xaa locations
  Clone ID: MRT4577_40278C.1.pep
MGAASSREGDAARAAAREHTKRCRERRRLAREAVRLRRHLAASHAAYLRSLGVVAYALTRXADGEPFPESDHTPADVIAHRPVVVPSSPSTLLRAIAHRA

SEQ ID NO: 303956 - protein, 68 aa, Zea mays
  Clone ID: MRT4577_40279C.1.pep
ACPGPVFIRGSTRSLVGGRPFFFFFLCFPQKESMSTTTMAMSRSTEAGGCFKHPEGLLPPHTCTSTRA

SEQ ID NO: 303957 - protein, 107 aa, Zea mays
  unsure (1)..(107): unsure at all Xaa locations
  Clone ID: MRT4577_4027C.1.pep
QETHQAKRTSNNRTTRXTKRGAPPAPTATTESATKASNXPQSTLXPRAKKPQKHPPDTXRGREQPAGQAXRPQQAQAASDKQQPXAQGQQQXGAQENRQTXGTQQQQ

SEQ ID NO: 303958 - protein, 59 aa, Zea mays
  Clone ID: MRT4577_40280C.1.pep
CREWSNNGSNYRKRSLSQDHGSFSYGILTIGSCPSFFIFFMAPALHVMLFVLSAPVQLS

SEQ ID NO: 303959 - protein, 233 aa, Zea mays
  unsure (1)..(233): unsure at all Xaa locations
  Clone ID: MRT4577_40281C.1.pep
MGMEVVGAEAAPAEVKISDGEVNLFQEKESKATAKEREEAAVFGSETTANVTDLAPPKDAKDEWPEPKQTYVFYFIKIRSFEDPKLRVKLEQADKEFQKKIQARSKLIEAVRAKKAERSSIIAELKPLSAENKQYNEVVNEKIKEMEPLRNSLGKFREENNAMRAQSAGLCSSIEELDLTIKMLNDRMVHESIPLSXRVMYXQQLRTFPKSRSKVISNAATSAKVLLPANATN

SEQ ID NO: 303960 - protein, 117 aa, Zea mays
  unsure (1)..(117): unsure at all Xaa locations
  Clone ID: MRT4577_40282C.1.pep
MPLTKLTTLNSTVIKPATFQLATDPSLNSHPTTSRLNKPNLYRPQTHPLHDIRKYHNITYLLIINLPFHILVTQIAHDFKTDSRLQNHSILPLHQASNAYXLLQLFQHTNSFSIHSK

SEQ ID NO: 303961 - protein, 150 aa, Zea mays
  Clone ID: MRT4577_40283C.1.pep
KESEATAKEREEAAVFGSEITTNVTDLAPPKDVKDEWPESKQTYAFYFIKVRSFEDLKLRAKIEQSNKEFQKKIQARSKLIEAVTTNDVFFLQVLIEVIFLTDAPLFINVECFVTHLCTYEPVVEAFSKLCLSMREVASLLVKKKKKKAA

SEQ ID NO: 303962 - protein, 65 aa, Zea mays
  unsure (1)..(65): unsure at all Xaa locations
  Clone ID: MRT4577_40284C.1.pep
MGTTIFALLELITXFIRANHXFIIPQCSLDPNAIIPQMHEPATSMDYEHLTMQAHHXQQALAASN

SEQ ID NO: 303963 - protein, 306 aa, Zea mays
  Clone ID: MRT4577_40285C.1.pep
MGMEVVGAEAAPAEIKVSDDVNLFQEKESKATAKEREEAAVFGSETTTNVTDLAPPTDVKDEWPEPKQTYAFYFIKVRSFEDPKLRAKLEQADKEFQKKIQARSKLIEAVRAKKAERSSIIAELKPLSAENKQYNGVVNEKIKEMEPLRNSLGKFREENNAMRAQSAGLCSSIEDLDLTIKMLNDRIVHESIPLSEEKRLVKEIKDLEKTRSKVISNAANRAKLQGTVVEKEAIQDQVKIIGEGIDGIKKERQAVRSKIKVLEDELKLVDAEIALLQEDLDAATARKDKAYESLQELRAGRDAKNA

SEQ ID NO: 303964 - protein, 550 aa, Zea mays
  unsure (1)..(550): unsure at all Xaa locations
  Clone ID: MRT4577_40286C.1.pep
MKVTDLAPPKDVKDEWPEPKQTYAFYFIKVRSFEDPKLRAKLEQADKEFQQKTRPGPKRKLRXKLKKEEEKAKKKSGAADTDEQXKNRKPSLRKRRATRAQSAGLCSSIEDLDLTIKMLNDRMVHESIPLSEEKRLVKEIKDLEKTRSKVISNAANRAKLQGTVVEKEAIQDQVKIIGEGIDEIKKERQAVRSKIKVLEDELKLVDAEIASLQEDLDAATARKDKAYELLQELRAGRDAKNAPFMQNRTVLAKARDYSLRNMLSELQELHKTEVDKFMTQWCESKAFREDYEKRILTSLNSRQLTRDGRMRNPDEKPIFIESQAPAPAPEPIPVKLPAKQAKEVPAPQADDAPKTEAPSKGPVKSHKAKAALDADDDYEAEPLKEKAKPTEADVAKLKEIKRQEEIEKNKLALERKKKQAEKQAAKAAARAQKEAEKKLKKEEKKAKKKSGAADTDEPSESDAKSDEAMEAPVEQEVAPASTMVKKEQKESARHRXRGQQXPPPKAILKRKKAQSYWSWAGPAAMVAAVLVALLAVLGYYQYYLPANASN

SEQ ID NO: 303965 - protein, 206 aa, Zea mays
  unsure (1)..(206): unsure at all Xaa locations
  Clone ID: MRT4577_40287C.1.pep
PCCGSSPPPSFAXFLVPTVXLVNQQAGVIKEHTDLRVAQFYGDMGVDFWNADTWRGRIDGAEVLVMTPQILLDNLRHSIFRLRDIPLLIFDECHRATGNSPYACILKEFYHPQLNSRPSDSIPTIFGMTASLIARNLALDKYSEEISEFENLMNAKVYTVASESALLQYIPIATTKIVEYDDYIVTSELIVILRCLNKLETKVLLY

SEQ ID NO: 303966 - protein, 40 aa, Zea mays
  Clone ID: MRT4577_40288C.1.pep
VRTIICKDVQSISSMGYLSIVLDVLLHIFRPYCLTYKCLL

SEQ ID NO: 303967 - protein, 46 aa, Zea mays
  Clone ID: MRT4577_40289C.1.pep
ETKVAHAPAILEAKQVVGNSARAFYYSLAGLESTRLVFSKIGNGRV

SEQ ID NO: 303968 - protein, 108 aa, Zea mays
  Clone ID: MRT4577_4028C.1.pep
QHRKHTIVPILARNVLGTTMLLGLSASAATASIFPQCSQAAIACIFPAYLSPAMSSVCDNPTLLHYTIQQALTAGILPLSPWILQQSSSLLQQLPLVHLSPQNIMAQQ

SEQ ID NO: 303969 - protein, 343 aa, Zea mays
  Clone ID: MRT4577_40290C.1.pep
MVFSSVPVYLDPSNWSQHHQAQEQQQHAQHGQLPSDGGMDAHAHHHHDQPPPVRPPHGGALMAPRPDMAVVVSASGNGPTGGGSAIRAGSMSERARLAKIPQSEPGLKCPRCESTNTKFCYFNNYSLSQPPSRLSPTPLMQHPLVGGDHYNISASRLGFLGLSSLDPMDYHQFGTGAGASSATIGLEQWRLPQIQRFPFLSGQPDVVQPTMSGIYPFDMEGQSGDTPVLPGGHMLGGSKMPGSAGLITQLASVKMEDNPASVAMASSSSRDFLSVTGNLQFWVDDSDNDGASGNNEGGVGNAGGGSGGGAVAPGTSWVDLSGSTRLHPGNCCDEPFGLHASCS

SEQ ID NO: 303970 - protein, 287 aa, Zea mays
  Clone ID: MRT4577_40291C.1.pep
MMMHGNGHGHGRVHPASSSSDFSGEMNQSAVSDPSSSPLYSFHFEKPVPPPPPAGTYVVQVPKDKVFRVPPPENARLFDHYTRRARRRRRGSCSCACLLVGAAVALAAALAGVLACLVLGPKPPAYAVQALAVSGLVNASSSPAALSPGFDATVRADNRNGRLGVRYEGGRGRVSVSYGGALLADGAWPALYQAPRNVTVVVARARGSGVRLSRSVRGQLAAAERLRSVPFDMDVDVPVRLQLGVVRTWAVPLRARCTVAVDRLAADARVVSNSCDVKVRLLSWWRN

SEQ ID NO: 303971 - protein, 73 aa, Zea mays
  Clone ID: MRT4577_40292C.1.pep
FSMPQPLRNCDPLTIIPLNMRLSRHILNNFLNLMARPRCIYKTLSPIGLFCYKLYFFKDSIPQVDNPFARKII

SEQ ID NO: 303972 - protein, 150 aa, Zea mays
  unsure (1)..(150): unsure at all Xaa locations
  Clone ID: MRT4577_40293C.1.pep
PTRAASWAVTDGMAXFDGRLYIPAASPLLPEIVPLPRRRHEGVTRTLHRLRRDFHFPNMRRMVQDFVRACATCQQYKXEHLHLAGLLHPLPIPSVVWADIGLDFVEALPRVHGKTVILSVVDRFSKYCHFILLAHPYTAESVAHAFFTDI

SEQ ID NO: 303973 - protein, 263 aa, Zea mays
  unsure (1)..(263): unsure at all Xaa locations
  Clone ID: MRT4577_40294C.1.pep
GYLEAGRGRLRLLLRPISRPHLHPLPPPMCRLRLLLPFFLLLRPIPHASQPAAPSPALQCALNFTALLPFLAPPLPSDDASRCAVATQSVAFLLSLHLAATSSFVLPPDASSCLSPLRAALPYPLPASACGLSGLDAALASPGCGNVSTVADFDALVPPSSRGDIDASCDRDLSAVPDCTACSTALSKAAAAYLLAGSPSARSNNVTGCVQYPSIYAGAEASPHGPADPXTAYCLFLLKANPPQSHSSGAAPWXVYGVAFGSL

SEQ ID NO: 303974 - protein, 258 aa, Zea mays
  unsure (1)..(258): unsure at all Xaa locations
  Clone ID: MRT4577_40295C.1.pep
MSPAATDAGGDLFAANLKGALLAVASSAFVGVSFIVKKKGLRRAGAVGSRAGVGGYGYLWEPLWWVGMVTMLVGETANFVAYMFAPAVLVAPLGALSIIVSAVLAHFMLNEKLQRVGVLGCILCIVGSTVIILHAPEERSPDSVEQIWRLATQPTFLCYAALAVAVSLLLMLYCAPRYGQTNIMIYVGICSVIGSLTVMSIKAVGIAINLPFXGVNQAGYSQTWXFVTVSAICLIIQLVYLKQALDXFHTALVSPHLY

SEQ ID NO: 303975 - protein, 167 aa, Zea mays
  Clone ID: MRT4577_40296C.1.pep
MSPAATDAGGDLFAANLKGALLAVASSAFVGVSFIVKKKGLRRAGAVGSRAGVGGYGYLWEPLWWVGMVTMLVGETANFVAYMFAPAVLVAPLGALSIIVSAVLAHFMLNEKLQRVGVLGCILCVVGSTVIILHAPEERSPDSVEQIWRLATQPSKLPWCLHLATCH

SEQ ID NO: 303976 - protein, 197 aa, Zea mays
  Clone ID: MRT4577_40297C.1.pep
IRWLDKQPSESVLYVSFGSLASLDSDEFSEVAWGLANSGHPFLWVHRSDSVRGSDGPAALPDGFEAAVHGRGKVIRWAPQQEVLAHPAVGGFWTHSGWNSTLESVSEGVPMMCRPQFADQMMNARYVVDTWGVGLELEGELQRGGVEMAIRKLMKGRDGEEMRGRAKELKKIVADCLEARGTSQVATDKLVNYILSL

SEQ ID NO: 303977 - protein, 88 aa, Zea mays
  Clone ID: MRT4577_40298C.1.pep
ASSGAPNAPLMSPPPPYSYSPYYPPPPFQPPPPPPVVSVDPSQSIATAPWATHSAVLPPPPPLSSTTDQPIAPYGADAEYAKFMADMK

SEQ ID NO: 303978 - protein, 345 aa, Zea mays
  Clone ID: MRT4577_40299C.1.pep
EFLSSKAARRQVVACAAICRSWREVTKEVVKTLEECGRITFPISLKQPGPREMPVQCFVRRERATSTYLLYLGLSPSMNVEKDKLLLAARKVRRATRTYFVISLVSDDFSHSSSTYVGKLKPNFLGTKFTIFDSQPPPDAVVLPNNKTSKRQSKQVSPRLPLGNYNVATVTYELTVLRNRGPRRMQCTMHSIPAECIQEGGKAPTPTGAIQSLDEPVSSTLPSAKGKEVAVEFSSTSLSADLSGPACVNGTPLVLKNKAPRWHEQLQCWCLNFRGRVTVASVKNFQLVASVDPSLNIPAAEQEKVILQFGKIGKDIFTMDYRYPLSAFQAFAICLTSFDTKPACE

SEQ ID NO: 303979 - protein, 133 aa, Zea mays
  Clone ID: MRT4577_4029C.1.pep
MAGAANEEDAKRTGLEGTGLPLQGGSHGNLRSAGSDQQLRHMLDSLKSSKSPAVINYGASWCRVCSQILPSFCKCSDKFKKLTFIYVDIDECPETTQNIRYTPTFHFYRDGERVDEMLGAGEERLHDRLWLHS

SEQ ID NO: 303980 - protein, 68 aa, Zea mays
  unsure (1)..(68): unsure at all Xaa locations
  Clone ID: MRT4577_402C.1.pep
HFYFILIHLVDSINSAQKPLRFPLSXGPVPPLSRPSSVMPPPSSFWCFVSSPVAAFVFLLWSSWAAGW

SEQ ID NO: 303981 - protein, 146 aa, Zea mays
  Clone ID: MRT4577_40300C.1.pep
GRVGGRVGLCACKPISEEDLAAFIADCIYDQDKANKVLPIGGPGKALTPLEQGEMLFRLLGREPKFIKVPIQIMDAVIWVLDGLAKLFPGLEDAAEFGKIGRYYASESMLLLDPETGEYSDEKTPSYGKDTLEEFFQCVITGGMAG

SEQ ID NO: 303982 - protein, 46 aa, Zea mays
  Clone ID: MRT4577_40301C.1.pep
RRTREARNPPTPLVCLKRRRRHARRYRKPASKKTALAGRWLGFRRT

SEQ ID NO: 303983 - protein, 383 aa, Zea mays
  unsure (1)..(383): unsure at all Xaa locations
  Clone ID: MRT4577_40302C.1.pep
MTNLSAVHSWPSLWPEQQQPQRQGQGQGLGQEGRRYRHQGPWADLPPELLLXESSAATWPARRXVVACAAVCRSWREXTKAVVKTLGXCGRIXFPIFLKQPGPREMVFCEVERATSYLPYEGLSPSMNVLLLEGQARYFVISLVSDDFSHSSXHVGKLKPNFLGTKFTIFDSQPPPDAVVLPNNKTSKRQSKQVSPRLPLGNYNVATVTYELTVLRNRGPRRMQCTMHSIPAECIQEGGKAPTPTGAIQSLDEPVPSTLPSTKGKEVAVQFSSTSLSADLSGPACGNGTPLVLKNKAPRWHEQLQCWCLNFRGRVTVASVKNFQLVASVDPSLNVPAAEQEKVILQFGKIGKDIFTMDYRYPLSAFQAFAICLTSFDTKPACE

SEQ ID NO: 303984 - protein, 151 aa, Zea mays
  Clone ID: MRT4577_40304C.1.pep
MATVLSSLRAPASTFPSSLRVAAAPAAPATVALLPAAGNKVPGMAARGARLRAQATYNVKLVTPEGEVELQCPDDVYILDQAQEEGIDLPYSCRAGSCSSCAGKVVAGSVDQSDQSFLDDDQIAAGWVLTCHAYPTSDVVIATHLEDELTG

SEQ ID NO: 303985 - protein, 45 aa, Zea mays
  Clone ID: MRT4577_40305C.1.pep
TWQVFKKVKTSKFFVFGYNFIYGQKRLIYFMFLVMVPGNFFYSLC

SEQ ID NO: 303986 - protein, 141 aa, Zea mays
  Clone ID: MRT4577_40306C.1.pep
HACETSPRHARPPAYVLFTHGPRPRGGSLSTTSELATLKRPYGNNGFCDGSNNSSATCYKPKAQRREADPAAAKAAVRHKYCQHGGVNMYIEASATYTAMEPDTMRKLIAGELCPDRGDMYIYIRHFNPTELALGRQIVAL

SEQ ID NO: 303987 - protein, 46 aa, Zea mays
  unsure (1)..(46): unsure at all Xaa locations
  Clone ID: MRT4577_40307C.1.pep
ATCCADHLHCXPQDTVCDVIQSTCLSKENATTDLVTKLREHTVGDG

SEQ ID NO: 303988 - protein, 166 aa, Zea mays
  Clone ID: MRT4577_40308C.1.pep
RAKPPKGNRSELGAAKKKKMADADQKQKEEAEQGKREKGHSRRKGGGEPGPHKGQQDSKTDRTKKRSARDKIQDSKGQGKNQQTEGVNIRGGENQQAERKQDTQQGSEDKKTPTEQKREGTHPGPAGQEGSKQPGSQREATQDTEDPRREGPPGGGDRNTLGRGPR

SEQ ID NO: 303989 - protein, 59 aa, Zea mays
  unsure (1)..(59): unsure at all Xaa locations
  Clone ID: MRT4577_40309C.1.pep
FNHLTYHHCXSIYNLFSSTKSNPRAFSPSFCFKIFITLNDALTYMNLFFYIFYFFSFYF

SEQ ID NO: 303990 - protein, 49 aa, Zea mays
  unsure (1)..(49): unsure at all Xaa locations
  Clone ID: MRT4577_4030C.1.pep
XLIFQYNERQXYKHNWPPWLRFKHTSHTRRENTNRVFLTDGLXNSHTML

SEQ ID NO: 303991 - protein, 112 aa, Zea mays
  unsure (1)..(112): unsure at all Xaa locations
  Clone ID: MRT4577_40310C.1.pep
LVRSNSFLLLAGRFRLAPLANFKLLAGLKLXAHDSGLQAGVSPGFTLPDGLAWGPVGLILGVGLXVGLKNPGAPARSSGRSFRVVLGSGHQLVRPPARQVLAGGILCGVRRR

SEQ ID NO: 303992 - protein, 77 aa, Zea mays
  Clone ID: MRT4577_40311C.1.pep
ERGHPPKGPRKGKDARHFKFKGSSKWEPSRWKKSMPKMFVLKFGFGLRGPQYVSVIWLGLFIKRLKDTYRFYINSNV

SEQ ID NO: 303993 - protein, 278 aa, Zea mays
  Clone ID: MRT4577_40312C.1.pep
IIAFKIVDQVVYYIKFGRLSIPVFHFVDMLDESRVEKQHRIYVPQDEAFEELKQGAFSSRRLRAVLHTLIPSMIATMSVETHGFQSFHHVDNLYKEGLRLKLGLQEHFDYAEDKFAWLHDDEFARQTYSMALPPSPRSAHSSKLQCRPSYGPKSAPDSKQPNSTRGKHVTEPHNIDRSTNPTTQIPRRASGCAAGYGPPRVAAVAEAHVHLRGREGGGHRGGIGGAAQIPPGAGMADSARAEASESAWRGHGHGEDAFHRRRGSGGEDGGGAAGGGMV

SEQ ID NO: 303994 - protein, 65 aa, Zea mays
  Clone ID: MRT4577_40313C.1.pep
GPGRASIPVSRRGGPLAQSGHLRSPRVLMFTIGVFVSRSLGGCCSSGAHPRFHEPLASKDMNVAS

SEQ ID NO: 303995 - protein, 256 aa, Zea mays
  unsure (1)..(256): unsure at all Xaa locations
  Clone ID: MRT4577_40314C.1.pep
MAAGVSLKMAGFCVVWALFWLAGSVTDNDFVCATLDWWLPEKXDYDTCSWGLASLLNXAFSPLKLRLGGSLQDMYDTGDARQPSCAPFAKNASAMFGFSQGCLPLRRWDELNAFFQRTGAKIVFGLNALNGRVPMPDGSLGGPWEXTTTNAASFIGYTVSRGYDVHGWELGNELSGSGVGARVDADQYAADVIALKRIIDSTYHQSSSPAKPLVLAPGGFFDAAWFTELVGKTKPEQMDXITHHIYISRPRVDDHL

SEQ ID NO: 303996 - protein, 54 aa, Zea mays
  Clone ID: MRT4577_40315C.1.pep
GWGTGRVPFSIQAEQFLEMAIGVGLLFIRHVGQMQMFCQGIHVGKVSVFPVGLL

SEQ ID NO: 303997 - protein, 201 aa, Zea mays
  Clone ID: MRT4577_40316C.1.pep
WGRRSAGLRPSCPTCSTPLRPRAPRSTRHPPLSLWPRWVTTSSTPARRRARGIRLCRTVLVDAQALIRAFDGDGAVGHVALGDTPYARLLPRVAFVKASSEEAPYVGVETTRRQCCVIVTEGRDGCRLYWDGGEAHVAPFPAVQVDPTGAGDSFLAGFAAGLLWGLSATDPALLGNFFGAAAVSQVGVPPFHPKMLQVCPI

SEQ ID NO: 303998 - protein, 379 aa, Zea mays
  Clone ID: MRT4577_40317C.1.pep
MPLAAEPDDAHEERENQQLLITTKGGPGLEGLVVGSYCHDVLIRGGRIVGETLGGAAAFVSNVLDAASPQGAALNETSPFVVVAKVGHDFIYARAPASARHPPLLCSSPTTSFHAQFSETAASAHAPDRELRRVRACDPIYPADLPDRRFAYGLAVGVAGEVLPETLEQMIRLCRTVLVDAQALIRAFDGDGAVGHVALGDTPYARLLPRVAFVKASSEEAPYVGVETTRRQCCVIVTEGRDGCRLYWDGGEAHVAPFPAVQVDPTGAGDSFLAGFAAGLLWGLSATDAALLGNFFGAAAVSQVGVPTFHPKMLQAVKEILEEKTRKRSSPCMNGASFTLEKSNMHNELHAALQEAAVLMSEQQQADPANGSGGDICSA

SEQ ID NO: 303999 - protein, 48 aa, Zea mays
  Clone ID: MRT4577_40318C.1.pep
KKSAGVNMLNLLPHVLLTHKTKQTKKKKKKKKKKKKKKKKKQKRAATN

SEQ ID NO: 304000 - protein, 87 aa, Zea mays
  Clone ID: MRT4577_40319C.1.pep
DETYPGMFQNHTSREAAVDYSKRSGYVNVPSSHASSSKGKTLDSSPWDEMTAHTTRPPREKWGKRLCLCSTCHDHTCQDWVADGKYH

SEQ ID NO: 304001 - protein, 108 aa, Zea mays
  unsure (1)..(108): unsure at all Xaa locations
  Clone ID: MRT4577_4031C.1.pep
EHEEINITFTLTTAWNADDCALHGYCEQVVFTACITLTAAPGVFPVTVQPSHCVPDTXSNATLWYKIFTTAXDANTQYAQDYNIVWCYKGAIGKVYHALNPKLTVIVP

SEQ ID NO: 304002 - protein, 53 aa, Zea mays
  unsure (1)..(53): unsure at all Xaa locations
  Clone ID: MRT4577_40320C.1.pep
GILLISXPXPAXPPPVRERQARSGRRPCHGXRAAAYSISAAAASRNSAAEAGA

SEQ ID NO: 304003 - protein, 74 aa, Zea mays
  Clone ID: MRT4577_40321C.1.pep
CVGKLSRWVVHCCFLSARFAILCMRLEPPTGVGVWVSSPFQFVLWFRKIVGSIGGAPWHLYWVTLSCLRCFFFA

SEQ ID NO: 304004 - protein, 93 aa, Zea mays
  Clone ID: MRT4577_40322C.1.pep
SYVIYSLGQPLEKLNHFFEGVEARVAQGIREEEVSYQLAFNKQELRKVIKEYPGKEVKKGLDNLYKKVDKHLCEEENLLQVVWHSMQDEFIRQ

SEQ ID NO: 304005 - protein, 157 aa, Zea mays
  unsure (1)..(157): unsure at all Xaa locations
  Clone ID: MRT4577_40323C.1.pep
MACAMGDGPAISIHFRTTXSWQGEWQDDRAEIIGNDHGNTHAHPHXAFTESDTRSXEANKNHLVMNPIXTGIDGKRPIHTRECDASGQRDIKLWTFQGIPGTRGRSMIDHQHWGEDKQSAAQXLSSTDLLEKREITGTYLACPIQNAVVTPPGYYND

SEQ ID NO: 304006 - protein, 114 aa, Zea mays
  Clone ID: MRT4577_40324C.1.pep
FWPRVSPPSVPLSVPDLQFSRTSLGSADDCDLAELGWCLVFSGSGFLPHAHSGVVFAASEDKHWHSWLFFFLFCFVFSPPYKSICGAVLKHKLPLSLLIHLRKNGHASYTTGEI

SEQ ID NO: 304007 - protein, 131 aa, Zea mays
  Clone ID: MRT4577_40325C.1.pep
IRSESNTNSRSWRTHGTSLTGAYLIPATESINDITLYTRLKISHTLSITVTPSHQHQLKQRHGHSPVCDRGRKQRYGNYHEQGNYAGQRPRRFWQENLIFSPAPAMERMAGEQAERQDAQAVGGPAEGAQP

SEQ ID NO: 304008 - protein, 131 aa, Zea mays
  unsure (1)..(131): unsure at all Xaa locations
  Clone ID: MRT4577_40326C.1.pep
MRYRATTTTTQAPHMGSQLSGAALRFHGLRSNAAPRSASVELPSVREGRNRPSSQGIRCNYIXSDSDLIMATTTTLMLXFAGRLLLEPSXDRKVTDLMKMXASDSELQNEEPDDDTLDDTVACGDAVHICL

SEQ ID NO: 304009 - protein, 58 aa, Zea mays
  Clone ID: MRT4577_40327C.1.pep
FALPTLPHLAYTCSSNTRVSRSPGSLAYTTKPTYLTLHIAPTAVGVVRCAPPPQPRAE

SEQ ID NO: 304010 - protein, 29 aa, Zea mays
  Clone ID: MRT4577_40328C.1.pep
STCYITMRRGKLDRLSLQQPGRARARCCA

SEQ ID NO: 304011 - protein, 71 aa, Zea mays
  Clone ID: MRT4577_40329C.1.pep
SRHYYQRCYLHGKIDFIFGSCQSTFHWTYIIARPDRTTAIRRSITAQVPQDEESSGFVFSQGHRVRQSGMC

SEQ ID NO: 304012 - protein, 63 aa, Zea mays
  Clone ID: MRT4577_4032C.1.pep
IKWPQKKSIKLDKPESKPGTPKTAPPFYFYFFFYFFNLFFFLGLLFPFFFFFFFFFFFFFFFF

SEQ ID NO: 304013 - protein, 128 aa, Zea mays
  unsure (1)..(128): unsure at all Xaa locations
  Clone ID: MRT4577_40330C.1.pep
LSRHTPNPHLWVDSARIDTVQVINTSQRAFHSHSDCHSTSNQSVAPTNVLPPVPSVSRHLTPFRHSYHVCTHLTLRRSSRDASGSQASSSAMHNARTPASTLRGYFTGARGVRRGRRGRRNGAXCHXH

SEQ ID NO: 304014 - protein, 78 aa, Zea mays
  Clone ID: MRT4577_40331C.1.pep
KPFCFPHFPPPSCRANKTGGSVGFFRKAKSETFPVPGVRFFYFWPPLGGRGVLNFFKANKGGLFLGFFRAGDSFGVVE

SEQ ID NO: 304015 - protein, 90 aa, Zea mays
  unsure (1)..(90): unsure at all Xaa locations
  Clone ID: MRT4577_40332C.1.pep
RTAIPGLSYSPGDGGRLAQPSAGAAAVTTAEQAQDLIDAARYDDLEDVVALFSAGVSLDSTDSQGRTALXVGSANGHLAVVEYLIQNGAV

SEQ ID NO: 304016 - protein, 153 aa, Zea mays
  Clone ID: MRT4577_40333C.1.pep
MGVELAQPTAAAAAVTTAEQAQDLIDAARYDDLEDVVALFSAGVSLDSTDSQGRTALHMASANGHLAVVEYLIQNGANVNATNMEKNTPLHWACLNGRIEVIRALISAGASVSALNSHEKTPMDEAVTTGKMHVIDAIGAAVAQAELDGVTVS

SEQ ID NO: 304017 - protein, 337 aa, Zea mays
  Clone ID: MRT4577_40334C.1.pep
MLRLRFRPAPLSLKLAFTVSLAVSFSVSCCASSSYSSRTSSRSPQAVAADLLSVLAGPRAAARVPAAEASRLHACLRFLAPANPTAPKISSWSRGGPRKFLLDGCDAGAAEADEMVMWPPAPVLDLARLAVDSGGDPGAIHRALDPTMLPVPDVEGSQKNKCHLTRTPYGRRFANEEINSYFAFLFELIVARAPSVGLNVSLNRYDLFHGHLFLASETGRLGILFHAKEYPAFNKELFPYNLGYCQAGSNVPYDDSMNLRNVLWLAPLPSKETKAWLAPGVLVVLDAHPDGIIYQEMIRDYVQIVRTVYEDDLGENTVDVNYLNVANAAPVDRIYIC

SEQ ID NO: 304018 - protein, 105 aa, Zea mays
  unsure (1)..(105): unsure at all Xaa locations
  Clone ID: MRT4577_40335C.1.pep
LILQLERAQFRRDAHXKGQAEGRHMAAHHAPPVEDERDQRDARPGAHRGTTTTLHTHHHLVHQGGHRHAAGEIMQDVALQDTEELSALLKETIDPTECLGVPVAP

SEQ ID NO: 304019 - protein, 57 aa, Zea mays
  Clone ID: MRT4577_40336C.1.pep
AIAPILARERDVPPQLEGPITSRQWWLVLGERRRTFELHCVVVTRYVYVRRDQFVCP

SEQ ID NO: 304020 - protein, 213 aa, Zea mays
  unsure (1)..(213): unsure at all Xaa locations
  Clone ID: MRT4577_40337C.1.pep
AAMGRFGRFGGKYVPETLMHALTELESAFHALATDDEFQKELDGILKDYVGREXGAGQHGVATATVCARFGLQCIIYMGAQDMERQALNVFRMRLLGAEVRAVHSGTATLKDATSEAIRDWVTNVETTHYILGSVAGPHPYPMMVREFHKVIGKETRRQAMDKWGGKPDVLVACVGGGSNAMGLFHEFVEDQDVRLVGVEAAGHGVDTDKHAA

SEQ ID NO: 304021 - protein, 55 aa, Zea mays
  Clone ID: MRT4577_40338C.1.pep
TTLVITNRIHREVFARHTSTLDIHGGLNNISAIRASSWGTNRVLKKTPPSESPLG

SEQ ID NO: 304022 - protein, 506 aa, Zea mays
  Clone ID: MRT4577_40339C.1.pep
NSARGARPHAEPLPPQPIYPLPLVDLLFSWPPPPPPPFAALPAPPHQDPPRRPSSARCCGWRRPGPPPPAPEGRRRRGRGRNAAGQAVAAEASPAAVEMGNGAAAPGLQRPDAMGRFGRFGGKYVPETLMHALTELESAFHALATDDEFQKELDGILKDYVGRESPLYFAERLTEHYKRADGTGPLIYLKREDLNHTGAHKINNAVAQALLAKRLGKQRIIAETGAGQHGVATATVCRRFGLQCIIYMGAQDMERQALNVFRMRLLGAEVRAVHSGTATLKDATSEAIRDWVTNVETTHYILGSVAGPHPYPMMVREFHKVIGKETRRQAMDKWGGKPDVLVACVGGGSNAMGLFHEFVEDQDVRLVGLEAAGHGVDTDKHAATLTKGQVGVLHGSMSYLLQDDDGQVIEPHSISAGLDYPGVGPEHSFLKDIGRAEYDSVTDQEALDAFKRVSRLEGIIPALETSHALAYLEKLCPTLADGVRVVVNCSGRGDKDVHTASKYLDV

SEQ ID NO: 304023 - protein, 308 aa, Zea mays
  unsure (1)..(308): unsure at all Xaa locations
  Clone ID: MRT4577_4033C.1.pep
MGSRVLHLDVPADSEAYLMRNVPGSVSSPRTNGEKGLFRNQNAGFTALASPVRREIGNRSSTRSFCVEDNDLEDGKTSKEREGSAQSLRLPKIQNQALLSGLAYCISSCSMILVNKFVLSSYGFSAPVFLMLYQNIVSVTIVSTXPVFLMLYQNIVSVTIVSTLSLSGAVPTEPLTWNLIKVWLPVNIIFVGMLITSMFSLKYINVAMLTILKNVANVLTASGETYFFKKQHGTQVWGARIYLADLXNCVLTAAYSLTLRHVMDSAKQVTKSGNLNELSMVLLNNVLSLPLGIILVLGLNEVEYLLQT

SEQ ID NO: 304024 - protein, 62 aa, Zea mays
  Clone ID: MRT4577_40340C.1.pep
SLDDLVKYQDERCSPRGRHLTTLTYVIPGYNFVLLWMVLSAGGLGLLIKVYPIFSFFIEDCH

SEQ ID NO: 304025 - protein, 80 aa, Zea mays
  Clone ID: MRT4577_40341C.1.pep
YSLCLYPECYVEHLIAWLLSHAAFKRVSRLEGIIPALETSHALAYLEKLCPTLPDGVRVVLNCSGRGDKDVHPASKYLDV

SEQ ID NO: 304026 - protein, 104 aa, Zea mays
  Clone ID: MRT4577_40342C.1.pep
SYSDSILKFYRVKFRCHFHPLSTRPLENAHTKQSVANIVVGRVSRFIECGHVAKTSESVLQESVTIWFHKKKFLKNTSGRCSYTLLAFANMLMLNLQAKSASTI

SEQ ID NO: 304027 - protein, 74 aa, Zea mays
  Clone ID: MRT4577_40343C.1.pep
TVDVYTIKTFMRTTASYTQSRAKASTMRTAEASSAAAFKPSTIAVDATSNSTSATEPTSMATVESPSASTLHSP

SEQ ID NO: 304028 - protein, 60 aa, Zea mays
  Clone ID: MRT4577_40344C.1.pep
HAAFKRVSRLEGIIPALETSHALAYLEKLCPTLADGVRVVVNCSGRGDKDVHTASKYLDV

SEQ ID NO: 304029 - protein, 483 aa, Zea mays
  Clone ID: MRT4577_40345C.1.pep
MLNMYIMTHMHSARGGSPTRAAAPIQPRVVLRVASSAAPASSSSARPRRGAVAEAAMQPAKAVAAEAASPAAALEMGNGAAVAGLQRPDAMGRFGRFGGKYVPETLMHALTELENAFHALATDDEFQKELDGILKDYVGRESPLYFAERLTEHYKRADGTGPLIYLKREDLNHTGAHKINNAVAQALLAKRLGKQRIIAETGAGQHGVATATVCARFGLQCIIYMGAQDMERQALNVFRMKLLGAEVRAVHSGTATLKDATSEAIRDWVTNVETTHYILGSVAGPHPYPMMVREFHKVIGKETRRQAMHKWGGKPDVLVACVGGGSNAMGLFHEFVEDQDVRLIGVEAAGHGVDTDKHAATLTKGQVGVLHGSMSYLLQDDDGQVIEPHSISAGLDYPGVGPEHSFLKDIGRAEYDSVTDQEALDAFKRVSRLEGIIPALETSHALAYLEKLCPTLPDGVRVVLNCSGRGDKDVHTASKYLDV

SEQ ID NO: 304030 - protein, 48 aa, Zea mays
  Clone ID: MRT4577_40346C.1.pep
PLVLPLVRSAFAAPYSFRRSFHSVQFVTSPRGAITDRALVDTDSTNKA

SEQ ID NO: 304031 - protein, 190 aa, Zea mays
  Clone ID: MRT4577_40347C.1.pep
MNGSRQMELHYINTGYPYTITESFMDFFEGLTYAQADFALADAFQDQANPYWTMMQTNSYKYGYSGAGNYYSYGHVYDMNDYMHRADSGRRIWDNPMPVNNTDSPNIVLQGAEAPHASASSTTEERIQQPVHQNSSSPQVVWQDSIDPDNMTYEELLDLGEAVGTQSRGLSQESISALPITKFKCGLFSR

SEQ ID NO: 304032 - protein, 105 aa, Zea mays
  unsure (1)..(105): unsure at all Xaa locations
  Clone ID: MRT4577_40348C.1.pep
SDSDLHPRIPLKRPVPLGGRGEGSESICSSAFLSPILHNSFNIYTLGLYYFFIDLNYIVYIIQYTSTYNTLHSTFKSXNRNLAINVNPITILQHRYPYIIKLFPF

SEQ ID NO: 304033 - protein, 61 aa, Zea mays
  Clone ID: MRT4577_40349C.1.pep
PPTIRHARRRPCRPPLRPPIFAPPMAVSPMRPPMARLFSLLPSRKPHLFVMPVIGLPSVLQ

SEQ ID NO: 304034 - protein, 225 aa, Zea mays
  Clone ID: MRT4577_4034C.1.pep
IFSLLFSLKYINVAMLTILKNVANVLTASGETYFFKKQHGTQVWVALMLMIISAVAGGITDLSFHAVGYIWQTLNCVLTAAYSLTLRHVMDSAKQVTKSGNLNELSMVLLNNVLSLPLGIILVLGLNEIEYLLQTSLLRMPEFWLVITASGVLGLGISFTSMWFLHQTSATTYSLVGSLNKIPLSIAGIVLFNVRTSVQNSLSILFGLLAGVFFARAKLRDNSPT

SEQ ID NO: 304035 - protein, 67 aa, Zea mays
  Clone ID: MRT4577_40350C.1.pep
SCYYQPEVKIARRLRVSTNSGGRGPDQLLLSTRLQVHSTRHVNLQVIANCSVETEEGCPSTPSPRAE

SEQ ID NO: 304036 - protein, 211 aa, Zea mays
  Clone ID: MRT4577_40352C.1.pep
MPSIDKATDNGEMKQRQPEQELVCVTGAGGFIGSWVVKELLLRGYRVRGTARDPADQKNAHLLAMEGAEERLTLCRADVLDYDGLRTAFRGCHGVFHVASPVSNDPDLVPVAVEGTRNVIRAAADAGVRRVVFTSSYGAVHMDPNRRPDAVLDESCWSDYEYCKNTGNMYCCAKMMAEITATEEAAKRGLELAVAVPSMTMGPLPATVAST

SEQ ID NO: 304037 - protein, 122 aa, Zea mays
  Clone ID: MRT4577_40353C.1.pep
MPSIDKATDNGELKQRRPELELVCVTGAGGFIGSWVVKELLLRGYRVRGTARDPADQKNAHLLALEGAEERLTLCRADVLDYDGLRAAFRGCRGVFHVASPVSNIPDLVPVAVEGTRNVIRA

SEQ ID NO: 304038 - protein, 87 aa, Zea mays
  Clone ID: MRT4577_40354C.1.pep
SEYILTRTHEPQRTTNPPTHKFQHPRSNPHTHPLPANRVNKLLKHHPVSDILLVHFPADQLKRPNQGNHAVCHKHRATFIKTSFSTL

SEQ ID NO: 304039 - protein, 114 aa, Zea mays
  Clone ID: MRT4577_40355C.1.pep
LNCAIGQLWSSGHGGRKHGGYMVVFPATRELLVQFNGSASIVDARECLNKGAEDTDRRGRGMGEQQHEGASTGVGRRAAERHGRGKSKLGRSRAQGKKSAMGEPSELERCCGSR

SEQ ID NO: 304040 - protein, 85 aa, Zea mays
  Clone ID: MRT4577_40356C.1.pep
QREGINIKSYLHLHLPSAGSACLQVLFNTPAYPTSFQKLCLFPRQSGFYSSNAHGIRLLLSPRILATNPDPLDSHKHVHQEAIQH

SEQ ID NO: 304041 - protein, 56 aa, Zea mays
  Clone ID: MRT4577_40357C.1.pep
PRLCVYRSQRIKSQGGFFMKRVGVITSSCPQPVLTGISGLCCGGKKYSPYEVARGG

SEQ ID NO: 304042 - protein, 123 aa, Zea mays
  unsure (1)..(123): unsure at all Xaa locations
  Clone ID: MRT4577_40358C.1.pep
NPARVIPAQEKFLQLLLNNPFVPVXPGPFGFFLPRDLHPTXGEGFWLADAPPPVGGRPGNPAPFGGPQGVGFSPLAVGDXPTPPPPFGSPCGGPGGPLFYWVFFLPFWGWRPPPPLVGWEPFC

SEQ ID NO: 304043 - protein, 83 aa, Zea mays
  unsure (1)..(83): unsure at all Xaa locations
  Clone ID: MRT4577_40359C.1.pep
RPGKKITPFLSFSHITTFKMAEHPSFTLAALLAAGGTAGYMRTRSTPSLVAGVGLGVSYAYAGYLLKKHKTTXLSLPWATVSS

SEQ ID NO: 304044 - protein, 413 aa, Zea mays
  Clone ID: MRT4577_4035C.1.pep
MIYTSAPAMASSASAGQGQGRRVEPVRAATGMGALPLDALYDILLRLPAKELCRLRSVCRPWRSLLSDPAFAAAHAARYPEPLIIVGYNYNDSPPPPESDERDWTKPRRYQCVISVMDLTGHVVKNLRVDGHIASMSLSLACVKRTGDGSCRLVNPATGAVHHVPEEDPPYGYSDRLCPFGQVASTREFKVLRKVSYSLNGNPRVLYEICTVAGTGRSNAQWRMVQDHPHRIDIDWRDKASVVIDGVVYFLSKNYASSSSSAGSEEQDWIASFDLDAERWRPNIRGPQSLTVVNNGNDNGLAVDEELSLTNLNGSLVIVHLQSPPCMNLWYLLDSEKGLWVRQYSIQVEEWDCSLSSFTPLIVLDDGRIVIHVEGSEMLEIYDPKTNKLSSVADTGLSSAVSVYTGTLLSLEW

SEQ ID NO: 304045 - protein, 88 aa, Zea mays
  Clone ID: MRT4577_40360C.1.pep
ILSWKKALRIPGGLRAAPVSLLLAILSTPVAEGSDAPEDFVYQFKAMCYFTNVTERVRYVTRYIYNREEYARFDSDVEVYRAVTRLWT

SEQ ID NO: 304046 - protein, 518 aa, Zea mays
  Clone ID: MRT4577_40361C.1.pep
SFADLPRVATSEKKEYPVDPSLPDIKNSIYASDEFRMYSFKVRPCSRAYSHDWTECPFVHPGENARRRDPRKYHYSCVPCPDFRKGVCRRGDMCEYAHGVFECWLHPAQYRTRLCKDGTSCNRRVCFFAHTTDELRPLYVSTGSAVPSPRASATAAMEMAAAMGLMPGSPSSVSAVMSPFTPPMSPSGNGMPPSLGWQQPNVPTLHLPGSSLQSSRLRTSLSARDMPADDYSLMPDFDSQLMNDLCYSRLGSSTGNHSARTKSLNPSNLDDLFSAEMVSSPRYSNADQGAMFSPSHKAAILNQFQQQQQALLSPINTGVYSPKAVDNKQLPSHPSLLHASLGMPSPGRMSPRCVESGSPMNSHLAAALAQREKQQQTMRSLSSRDLGPSAARASALGSPLSTSWSKWGSPSGVPDWGVDGEELGKLRRSSSFELRSGGDDPDLSWVHTLVKESPPEKQVTTSESINSVGPSPLMPPSMNNGGEGSGLNTQLDGRDQAAVLGALLEQMQLDQQIGSLAT

SEQ ID NO: 304047 - protein, 106 aa, Zea mays
  Clone ID: MRT4577_40362C.1.pep
RHPPTHITSTTTTIAFLNIARELHLGPRDSRPIGSAWLATQTCTTPAPARERGLATLHAAHANLHSLPGQRSPLALKHANRGVFTLPTTALSLLGASTQCTSYRRT

SEQ ID NO: 304048 - protein, 154 aa, Zea mays
  Clone ID: MRT4577_40363C.1.pep
ICFFPSGPGRSSLSTLACLLPWCPSFFSLFPGAFFGLSGSPWGFFPVLRGVFSFPFPVSSMADSPGFPLLFLRAPSPWCCVFLLVPRSPVFKTAPASGFCLFARLWPGWSLFFCELARFGRLVADFLGPVTRCVHFWVGLLPPRIWFFHPPFFF

SEQ ID NO: 304049 - protein, 46 aa, Zea mays
  Clone ID: MRT4577_40364C.1.pep
FKILNWAIIFLSTYSAKEMRPSLFVSNCIKNSDGAPVQFFKAPLPP

SEQ ID NO: 304050 - protein, 94 aa, Zea mays
  unsure (1)..(94): unsure at all Xaa locations
  Clone ID: MRT4577_40365C.1.pep
NLVERMRFALGMDXHWYSAFKELPGEYRLGIIGTLEYLWYVERFGLSHLVPEMGRLLPDPPKQRELXDAYYANTRFRSLQDNXGGGTSFTRGHP

SEQ ID NO: 304051 - protein, 74 aa, Zea mays
  Clone ID: MRT4577_40366C.1.pep
SVVAGGLGYSRAGVLAGLRGLPCFGSSSKRGRSRVDGAGPWLSEDATSPIRRQHSFTYFRLLTVLPSGWRLQLA

SEQ ID NO: 304052 - protein, 127 aa, Zea mays
  unsure (1)..(127): unsure at all Xaa locations
  Clone ID: MRT4577_40367C.1.pep
PSLGCPFIGCQFSDSRGLCFSYTLALLVPLPRVPHRAVCVKVQRFRSLVDAIDAIKGXALRGVRSPVSIIHARVGLSAFTRVSSTCSGRELSSSVCCESGLVPVGLMYQKSVCCRSKCIISLSLFFF

SEQ ID NO: 304053 - protein, 174 aa, Zea mays
  unsure (1)..(174): unsure at all Xaa locations
  Clone ID: MRT4577_40368C.1.pep
HWVPRGRPXKKISPKKKKKKKKKKKKKKKNLAARTRADGGGGRRTRGASSSVLWSGLTVHSTPSTPSCSASAAASQCPSPKSRRSHPGRGRPGRSPRRPRSRRVSPRSNRARMSCWPCTPSCCSVALRGCSPRRTETEAQRLPGGQWCWDRCGGSAXPGWRSARSTWTRRRRRG

SEQ ID NO: 304054 - protein, 88 aa, Zea mays
  unsure (1)..(88): unsure at all Xaa locations
  Clone ID: MRT4577_40369C.1.pep
PPFXCSXXLLAGLFXSSVFAFSXLXCSGCXXGPRXXLPXXVAAXLGVAXPXXAVXALXAGSPXAXAPLLLVLGPAXAXAXPSLXXGIS

SEQ ID NO: 304055 - protein, 92 aa, Zea mays
  Clone ID: MRT4577_4036C.1.pep
QGAQECKIPPPLCLPPPPKKTRMDFFFPLPKKFTSLKITAFGFLPDPGGGAPLSKKNKRGGYKNGKAPQSFCFWEKAFFFFKKWPPPPKPTI

SEQ ID NO: 304056 - protein, 137 aa, Zea mays
  unsure (1)..(137): unsure at all Xaa locations
  Clone ID: MRT4577_40370C.1.pep
MTQSISHHIDQLXIHLANVCXQMNCLEHGIQADTQTPGDKTIDGGDDAIHTFFTETDAVNYESRVVFADPEPTVIDDGKTDTYRQIFHPDYFINDKEDALNNFDRDHYTNANHIDDLCLDRIRKIANNCYWSPYLSS

SEQ ID NO: 304057 - protein, 227 aa, Zea mays
  Clone ID: MRT4577_40371C.1.pep
MAENEECKVLIDQQGSNDVADPHPPCEEEEDDDGDEDDSWSFIVVLNLVLGGTARLNVLLPTATILAFAIFAPLLTDDGKCSTRLNRILTAAFVALCAASCVFFTLTDSFRSASGRLRYGVATPAGIRTFCGGHRRRRKGPREPELYRLRWSDLFHSALALVAFVTFAASHHDMVLCYYPGVPRKVVNTVPLVVGFVVSLLFVLFPSRRRGIGYPFLLRTDLVYLRR

SEQ ID NO: 304058 - protein, 241 aa, Zea mays
  Clone ID: MRT4577_40372C.1.pep
MQALALGAQGLIGWWMVKSGLEEPTSEYVQPRVSPYRLATHLTSAFIIYCGILWTALSVVMPDPPTGSMSWVNGAAKIRKLAIPVSAVVGITAISGAFVAGNDAGHAYNSFPKMGDSWIPEDVFSMEPFVRNFFENTSTVQLNHRILAATTLLSVGGLWLAARKIDMHPAVKSLIGSTLGMAALQVTLGISTLLTYVPTSLGSAHQAGALTLLSLTILLVHTLRRPSPARLKSIATAVKST

SEQ ID NO: 304059 - protein, 76 aa, Zea mays
  Clone ID: MRT4577_40373C.1.pep
MASRGVQCTHHVPRSEVTRDYTSGGDATYEGEPAKQARLRLRPVHERSVSTRSRLSRCRLVGRCARDPLPLPRQTQ

SEQ ID NO: 304060 - protein, 78 aa, Zea mays
  Clone ID: MRT4577_40374C.1.pep
GGGVTTPAKVRQGQPSACWTTDGKLLVISEKEATTKPHGHCSKKYQLTNGRNKGPEVNSQLNGHKCSHCQSVNIRTRS

SEQ ID NO: 304061 - protein, 133 aa, Zea mays
  unsure (1)..(133): unsure at all Xaa locations
  Clone ID: MRT4577_40375C.1.pep
MSGGGVRSKAASELEELDKLWDDVVAGPRPETGLEKLRKATTXVRSSSTREGGGGIYKRAQSMPSTPTTPVTPWSSSSATTARGACNVWRSVFHPGSSLCTKGMGANLFDRPESKSLTGYDWLYRDETRSNHR

SEQ ID NO: 304062 - protein, 59 aa, Zea mays
  unsure (1)..(59): unsure at all Xaa locations
  Clone ID: MRT4577_40376C.1.pep
LYNGGNATXXKAAREIFXQXGDRANDAXRXNGAELRCKGXGEGGNXGCTQXGRIEFAQR

SEQ ID NO: 304063 - protein, 70 aa, Zea mays
  Clone ID: MRT4577_40377C.1.pep
DLVMLLDYADMQCHASTLSALARLSVSGIMGQLLGPWSKVECRGIAVLGYRIIRSTRYYWPGGSAAARPW

SEQ ID NO: 304064 - protein, 65 aa, Zea mays
  Clone ID: MRT4577_40378C.1.pep
MDPNMTEVTHMFSRFKAAYARNYLNTYVTLLSQLNVHLTQFPILSPLFHQTPNIVEELKLAKDIY

SEQ ID NO: 304065 - protein, 40 aa, Zea mays
  Clone ID: MRT4577_40379C.1.pep
MGSTGGDVAAVVDEEACMYAMQLASWCILPMTLNNAIYLR

SEQ ID NO: 304066 - protein, 49 aa, Zea mays
  Clone ID: MRT4577_4037C.1.pep
KNPYITQIHHLTSPTSFAHYLNTQYSSPIALPHFFTNSISNITLPLSSH

SEQ ID NO: 304067 - protein, 364 aa, Zea mays
  unsure (1)..(364): unsure at all Xaa locations
  Clone ID: MRT4577_40380C.1.pep
GSLHLCSSGVAFGNDANTNIPPEXWRYYLLMNRPEASDTLSTWAGLQAKLNSELLNNLXGNFINRVLSFIAKPAGAGYDSIIPDAPGAESHPSTSVIAEKVSKSVEQYLDAMEKVKLKQGLKSAMGISTDGNRYLQDSEFWKLYKDNPASCAIVMKTSVGLVYLLACLLEPFMPSFSKEVLRQLNLSPEENISFSEENGESVKAKPLDLVPAGHKIGRPVPLFEELKDEKVSEYREKYAGSQAERNSKAAADAEANKVAKQTKGIKLSDGGTKKEPKKQSGGSKAKTAEAITVAKLDIRVGLIRKAEKHPDADSLYVEEIDVGEDTPRTVVSGLVKFIPLEEMQNRKVCVLCNLKPVAMRIKNN

SEQ ID NO: 304068 - protein, 187 aa, Zea mays
  unsure (1)..(187): unsure at all Xaa locations
  Clone ID: MRT4577_40381C.1.pep
MARRTRFVAVAALLTSFLSVAAGQPRPLPAAGLPGDLFGLGIASRIRTDRNSTAKAATDFGQMARATPEAVFHPATPADIAALVRFSASSAAPFPVAPRGQGHSWRGQALAPGGVVVDMGSLGRGPRINVSAAAGAEPXVDAXGEQMWVEVLRATLGPXLMPRERTEYLRLTVSXTLSNAIIYEKEF

SEQ ID NO: 304069 - protein, 94 aa, Zea mays
  Clone ID: MRT4577_40382C.1.pep
DSFFDKETTSRGFLGCPNEKATKLNPFNFLHTQMGFWISNTLSHQTYLCLNKHPKSLENYSSPARCFVLSRFLKRHIFFFGSRTPFCFARTLVF

SEQ ID NO: 304070 - protein, 110 aa, Zea mays
  Clone ID: MRT4577_40383C.1.pep
MKGKKLDESSSSSNEEEYDEDEKDDQASTTSSEADEETIQRVRKVMRMIHKINLIDVLIQIEDILFNVPFGDVQGNGRPATFKGLLKRRRTKGVRSTGPTNDVTFFIYAN

SEQ ID NO: 304071 - protein, 45 aa, Zea mays
  Clone ID: MRT4577_40384C.1.pep
PRRAATKVMMKKRKGKIINIASVVGLTGNGGQTNYSPTQGGVVGF

SEQ ID NO: 304072 - protein, 44 aa, Zea mays
  Clone ID: MRT4577_40385C.1.pep
MPGHLQEGFGCVVTNRFDQLFDYESDPFEVLKAAENKTKEAGGG

SEQ ID NO: 304073 - protein, 32 aa, Zea mays
  Clone ID: MRT4577_40386C.1.pep
PGTSKTIRWMFKQVGANVRVPRPTAKAFKSVN

SEQ ID NO: 304074 - protein, 119 aa, Zea mays
  unsure (1)..(119): unsure at all Xaa locations
  Clone ID: MRT4577_40387C.1.pep
MAPNQGGRGPFPPKKKTVKGTNLFFKKRPKQFGFGGGVPPKKDLNRFFKGPKVLRFQXRQVRILKQGFKVPPGLNQLTRTFYKNLVPNLFKMLLXYRPENKAAKKERLFKRSHAEIEGK

SEQ ID NO: 304075 - protein, 192 aa, Zea mays
  Clone ID: MRT4577_40388C.1.pep
MAGGGGQELKLLGTWTSPFVTRVKLALSFKGLSYENLEEEDLYHNKSELLLRSNPVHRQVPVLIHNGKPICESQLIVQYIDEAFSSANGPSLLAAEPYERAVARFWGAYIDDKLFASAFQAGRANMEEEKAEALKRTFAAVETLEAAFEGISDGKPFFGGDSVGYLDIVLGGLVPMVYYGEARHGIKLFDGT

SEQ ID NO: 304076 - protein, 41 aa, Zea mays
  Clone ID: MRT4577_40389C.1.pep
KNNILVNGTKQSLDHRDSLLLLIYKHAYAYFLSMVNCFSGG

SEQ ID NO: 304077 - protein, 271 aa, Zea mays
  unsure (1)..(271): unsure at all Xaa locations
  Clone ID: MRT4577_4038C.1.pep
MGSRVLHLDVPANSEAYLMRNVPGSVSSPPMNGEKGLFRNQNAGFTALASPVRREIGNRSSTRSFCVDDNDLEDGKASKERESSAQSLRLPKIQNQALLSGLAYCISSCSMILVNKFVLSSYGFSAPVFLMLYQNIVSVTIVSTLSLSGAVPTEPLTWNLIKVWLPVNIIFVGMLITSMFSLKYINVAMLTILKNVANVLTASGETYFFKKQHGTQVWVALMLMIISAVAGGITDLSFHACGYIWQTLNCXLTAAYSITLKDARVFGWSSL

SEQ ID NO: 304078 - protein, 50 aa, Zea mays
  Clone ID: MRT4577_40390C.1.pep
TLTASCYKPLGNGNDFTDIHVMCRHYSVSRNYASTGLRCTRKYNLFAHDP

SEQ ID NO: 304079 - protein, 276 aa, Zea mays
  unsure (1)..(276): unsure at all Xaa locations
  Clone ID: MRT4577_40391C.1.pep
MLGLAPLRSAPLPIRASATACGRNNSQRLANGCQLSLLAPEAAEGDTALPENMHKWRMVIAYDGTKFKGWQYQPSIPTIQYFLEDALICITKLDRKKLCLVGAGRTDTGVHAWGQVAHFTTPFSYSCLSSIHSAMNGLLPPEIRVREISAARPEFHARSSTKSKVYRYKIYNEAIMDPFHNHYAYHSAYKLNPHAMQEAAPPFVGIHDFTSFANAAHNDGERRPTKKITRFDVTEMGAVLQLEVEGTGFLYRQVRNMVALLLQSXKEALPSDIVSD

SEQ ID NO: 304080 - protein, 77 aa, Zea mays
  Clone ID: MRT4577_40392C.1.pep
LGVLNAKPQSPKHHHILLLPPYSSAYLNPHNIRVPPTTHHHLLIARTTQAHPTIADAALISFMTLAGGQCQLAGTRA

SEQ ID NO: 304081 - protein, 152 aa, Zea mays
  unsure (1)..(152): unsure at all Xaa locations
  Clone ID: MRT4577_40393C.1.pep
HDSHHYISGWQYQPSIPTIQYFLEDALICITKLDRKKLCLVGAGRTDTGVHAWGQVXNILHNCILKLKLISIIWFAYPALLNVNIMFYMKYWGITYNICWFQVAHFTTPFSYSCLSSIHSAMNGLLPPEIRVREISAARPEFHARSSTKSKV

SEQ ID NO: 304082 - protein, 118 aa, Zea mays
  unsure (1)..(118): unsure at all Xaa locations
  Clone ID: MRT4577_40394C.1.pep
VAYLTVPSGSSAVVLSTPDSPXAHQPIGSIQXQTVQEDKKYVRRPVHASASLAPLIXALASMFGPMFFHAWPAPVVESGKLVHVGXPSVWVRIATQCRQAGLFIWFPGAPVLFQVREF

SEQ ID NO: 304083 - protein, 176 aa, Zea mays
  unsure (1)..(176): unsure at all Xaa locations
  Clone ID: MRT4577_40395C.1.pep
LHHQALAYESRSIEIQEPSHHNTCHDSSSSNDEPKEVYVDELVWSAKDKTXTCSSLQSVQKNRQREVKFTFNVAKCDKIFDKLLRAEXIKLSHTIPPTDELKRRAXCKLHNSFXHATIDCNVFYRWIQXTINEGQLIFEDVQIDXNXFPVNTFEMNNKKGLVRPEYGSLLPNTWNI

SEQ ID NO: 304084 - protein, 74 aa, Zea mays
  unsure (1)..(74): unsure at all Xaa locations
  Clone ID: MRT4577_40396C.1.pep
MGAAVAWTVAAVLLQVAGLSLFLYGFFPVKPTLRGFSGAESYRVPSCGSXSAGEQEPALPPXQLRSLYKELSGI

SEQ ID NO: 304085 - protein, 143 aa, Zea mays
  Clone ID: MRT4577_40397C.1.pep
NNRNDVEYSTSHDTICQLQKHILVLHTVPYFHYISITLNKHCIVNRKTSGLIQTKPLRLITATSKEPSKSTQTHLKLIPDQYSVSKLQVPFPYVKDKNLNKNLSKGHPKLSINNHVLCRCINTSQPQSPNQSPSARASYCTEK

SEQ ID NO: 304086 - protein, 90 aa, Zea mays
  Clone ID: MRT4577_40398C.1.pep
ASYLMWNTHPMWPRIQVILDFFCRNVPIRSPCIRALLSATPLKFVDHVPSVCLYCGALGFPLMLYQIVKSGSLSVLNNVKKAPKIKKSIS

SEQ ID NO: 304087 - protein, 97 aa, Zea mays
  Clone ID: MRT4577_40399C.1.pep
IPNLEVMDWSLNLRWLWLKKTQPDCLWNSFEVQVHPNAAAIFAVSIQSIVGNGTSTKFWTDRWLDGRRIVELAPNLFAAVNRKAVRTLAVHEAVMGD

SEQ ID NO: 304088 - protein, 100 aa, Zea mays
  unsure (1)..(100): unsure at all Xaa locations
  Clone ID: MRT4577_4039C.1.pep
MPSGGVFSGSVNLKHAKLGYQYLVNHFLTLLLVPVMAATALELVRLGPGELLSLWRSLELDLVHILCSVFLVVFVXTASLMSRPMPVSLVDYACYKPPAS

SEQ ID NO: 304089 - protein, 49 aa, Zea mays
  Clone ID: MRT4577_403C.1.pep
MSWLEKLGLSGLGGSPRASDASAALAHGPDEDQAAPGNEITQLRAGCFW

SEQ ID NO: 304090 - protein, 57 aa, Zea mays
  Clone ID: MRT4577_40400C.1.pep
AYYVICRMLAYKKTTYSSDNCCENTYVQRRPVEEPMYYGILRCVSNMKRGRGRLKST

SEQ ID NO: 304091 - protein, 96 aa, Zea mays
  unsure (1)..(96): unsure at all Xaa locations
  Clone ID: MRT4577_40401C.1.pep
MARSISEISGLIWIGKLVAKVALHSDDVELRGANDPFISYDYMSYMFKYDTVHGQCKHHEVMVMDSKTLIFGENDVAVXACMNPEEIPWRSLDAEY

SEQ ID NO: 304092 - protein, 98 aa, Zea mays
  Clone ID: MRT4577_40402C.1.pep
EEWQTFSFRLPHYSATLFILYTSTYSPKLAPLTKNEQRNIFTTLGMRYSKHSNKTTHTFKRDSHSYTSKQVSLAERSGDTTMTSLTIMNLTKSSFKPS

SEQ ID NO: 304093 - protein, 70 aa, Zea mays
  unsure (1)..(70): unsure at all Xaa locations
  Clone ID: MRT4577_40403C.1.pep
PRGGKRQTTTTEESRTPPHPPXADRGNAQQGQGGSAQQRHNHKGIGLKKSPKTERNNPRKRKEKKKTPPA

SEQ ID NO: 304094 - protein, 55 aa, Zea mays
  Clone ID: MRT4577_40404C.1.pep
SSHNVRPPVVLLQRMCKRGSDTCWGRSTYYRRRARFALCLWLVYGPGSNPGLIFY

SEQ ID NO: 304095 - protein, 150 aa, Zea mays
  Clone ID: MRT4577_40405C.1.pep
SSLVHVPVMGMEHFISSANLSAEGFTSYGNEAAEEMKKLRGLRLETLMETCQNTESRDVAIRCPIPCKSSRRYREHDLRAAQDLSEFIVSKASPPYFMGSPPLRATNPLAHDAQFCAWKVHSVDQSLGIPIPAKSYNARYYARKESFRKA

SEQ ID NO: 304096 - protein, 110 aa, Zea mays
  Clone ID: MRT4577_40406C.1.pep
FKAQGFEIRAFPRTQFGGQKPGTNEKIAQFAGPRFKAGAPIFPKVDVTGNNAAPIPKFLKSSKGGLFGASIKWNFSKFLVAKKGRFLDRYAPPPSPLSIEKDIKKLLGSF

SEQ ID NO: 304097 - protein, 81 aa, Zea mays
  Clone ID: MRT4577_40407C.1.pep
WGDPLRWSLALGFPPSNGEQASKWPVSIPKKPTPVKKGPPQARKLSIDSSLPNKKKEFNRKQARVKTTFLKNLLLFILLGD

SEQ ID NO: 304098 - protein, 48 aa, Zea mays
  Clone ID: MRT4577_40408C.1.pep
WKRATRSFATLMKHVDRNTYDCVLLIVPLGTVFTGKRHCRDGIFENAE

SEQ ID NO: 304099 - protein, 74 aa, Zea mays
  Clone ID: MRT4577_40409C.1.pep
SCSIGAKQQSFPAKALSSCRAASSVRADNSCPTQGDWSLINGHRKVSYLVNNCYQNPASRKSSCFKKGPCLHQC

SEQ ID NO: 304100 - protein, 245 aa, Zea mays
  unsure (1)..(245): unsure at all Xaa locations
  Clone ID: MRT4577_4040C.1.pep
TALLLPSTKKLSSRPRRSAARAATARSSVLPFAHRRLLVPADLPPLPRKARGRPAPAGIHHDPLVSRVAENTSPPSSVDQPHISVSQVLQTDRRFPVPPHRRRSIPWHQRWRRRLPAGRGKAGASSPSAPPPAWALCPCTPCHDILLPPPAKELCRLRSVCRPWRSLLSDPAFAAAHAARYPEPLIIVGYNYNDSPPPPESDERDWTKPRRYQCVISVMDLTGHVVKNLRVDXHIASMSLSLACV

SEQ ID NO: 304101 - protein, 55 aa, Zea mays
  Clone ID: MRT4577_40410C.1.pep
FARRSCPLSHISPPFDLVVSCLMDQSPSSPRSQPYVSEGSTIFWKQSEEKLGGNG

SEQ ID NO: 304102 - protein, 89 aa, Zea mays
  Clone ID: MRT4577_40411C.1.pep
MGVLRDAPTLLALSATATYTHTSGCCGCQPPPPVHLPPTVHLPPTFHLPPPVHLPPPVHMPTPVHLPPTIHVPTTVHLTPSPCHYPTQP

SEQ ID NO: 304103 - protein, 119 aa, Zea mays
  Clone ID: MRT4577_40412C.1.pep
SFFFPGVPTEDYNTPGESAEYRAPTPAVGTPKPRNDAGDDNDDDDDDEEPPLNEDDDDDDDLDDLEEGEDEPNTQHLVLAQFDKVTRTKNRWKCTLKDGIMHLNGRDVLFNKATGEFDF

SEQ ID NO: 304104 - protein, 390 aa, Zea mays
  Clone ID: MRT4577_40413C.1.pep
MASSNVSTVYISVIDDVISKVREDFITYGVGDAVLNELQALWEMKMLHCGAISGNIERTKAAAASAGGTSGTTPPVHDLNVPYEATSEEYATPTADMLFPPTPLQTPIQTPLPGTDTGMYNIPTGPSDYAPSPISDIRNGMTINGADPKAGRPSPYMPPPSPWMNQRPLGVDVNVAYVEGREDPDRGVQPQPLTQDFLMMSSGKRKRDEYPGQLPSGSFVPQQDGSADQIVEFVVSKENANQLWSSIGNKLETPTKTITPVIPQRDGIQDNYNDQFFFPGVPTEDYNTPGESAEYRAPTPAVGTPKQRNDAGDDDNDDDDDEPPLNEDDDEELDDLEQGEDEPNTQHLVLAQFDKVSRTKNRWKCTLKDGIMHLNGRDVLFNKATGEFDF

SEQ ID NO: 304105 - protein, 176 aa, Zea mays
  unsure (1)..(176): unsure at all Xaa locations
  Clone ID: MRT4577_40414C.1.pep
MDRTKETXRSPPRGKAPREAIXATKADRESAPATDGGKKAHRFRPGTVSLREIRKYQNSTELLIRQLAFQRLVREIRAGLAKTDXLRFQSSAXVSALQDCGLVXYLDGLCXDTIPTCAIHAWRVTIMPKDIQLSHVRIRGREGLSISYSDIRGRSEDEEMCLESVILSDCGIHANR

SEQ ID NO: 304106 - protein, 77 aa, Zea mays
  Clone ID: MRT4577_40415C.1.pep
CPGLRLNRINRVSIPTKVHLLFRKTYLERTLPVKRACLGAIWDGWPTLEVSRRVWATGFGYMAYGACGSGVITWHDI

SEQ ID NO: 304107 - protein, 97 aa, Zea mays
  Clone ID: MRT4577_40416C.1.pep
VQVRVALMVPLVHLVQAQLMPLGRPRVIDVRGLGRQHKRPPGHGNDTAPGILLEPAHRDSGRLARFVVGGGALDLVLARAPELGGHGDQPEVPGWPA

SEQ ID NO: 304108 - protein, 58 aa, Zea mays
  Clone ID: MRT4577_40417C.1.pep
STVATILYYAYIVHHYFKKVLLSHIRSHTHVLQYVLVSVVIIISSLPSPMVDFYPLYL

SEQ ID NO: 304109 - protein, 113 aa, Zea mays
  Clone ID: MRT4577_40418C.1.pep
RLGSSTLASERDAHLSVKRRRGLDQSRRRTPPWRRLAAAQEGRFSVPEAAPFTAVLKYAAEEFKVPPQTSAIITNDGIGINPQQSAGNVFLKHGSELRLIPRDRVGAVVMSSG

SEQ ID NO: 304110 - protein, 98 aa, Zea mays; identical to SEQ ID NO: 223221
  Clone ID: MRT4577_40419C.1.pep

SEQ ID NO: 304111 - protein, 98 aa, Zea mays
  Clone ID: MRT4577_4041C.1.pep
ILPTNPSLKFPAFQKKARRIYLFFSIIQHIHTLAVHQRGEIHPLNNTDHQYKHKEGAGNPHILNFTHPPPKYRAFSSKPIKRELFTSTVQAYHLSTMF

SEQ ID NO: 304112 - protein, 98 aa, Zea mays; identical to SEQ ID NO: 223221
  Clone ID: MRT4577_40420C.1.pep

SEQ ID NO: 304113 - protein, 106 aa, Zea mays
  Clone ID: MRT4577_40421C.1.pep
PQVPTVHVRQRVGGPLQERLRMGQGGQGHTSRAPSKLLYRATGLLCARHRVAQPQALCQRRPPRQRRLGVAFGLHVRFHACVSLHAIIGCNDQQQASSVLLLPLLN

SEQ ID NO: 304114 - protein, 66 aa, Zea mays
  Clone ID: MRT4577_40422C.1.pep
FSASSRLYTCCLFWSSLSDSACFAHSYSSRCAQVHVAYTSFSSSLPNRSSRPVSCETAFCTLFKDF

SEQ ID NO: 304115 - protein, 41 aa, Zea mays
  Clone ID: MRT4577_40423C.1.pep
IYLQRNPLPWMFQSFKFRRHKQPKLGTLAHLSILMGNSKKK

SEQ ID NO: 304116 - protein, 179 aa, Zea mays
  unsure (1)..(179): unsure at all Xaa locations
  Clone ID: MRT4577_40424C.1.pep
KAPGKRAFPPGKTSGGFFGGPGPIGVKLRKNFKGVIFPPPRGAKKNRPPPGGVPPGGGGGGPPSFGGQTAQGPLGAGGPPVFPVKXGGNPLGPKGFFRGGMGGPPPGVPQKGGGPAXKRGPPPKKKKLSPPPWGFSFFPGPRGLLGFLKNPPQSPTPFSPGGGFFPPGKKAPPTLGFFG

SEQ ID NO: 304117 - protein, 111 aa, Zea mays
  unsure (1)..(111): unsure at all Xaa locations
  Clone ID: MRT4577_40425C.1.pep
AAGLLXCCKSCRLRGMNYLGGDLKRGNFTDDEDELIIRLHALLGNKFVSRLPSVDETASFFSVSTFIFSTALPDVTRRARRWSLIAGQLPGRTDNEIKNYWNTHIKRKLLA

SEQ ID NO: 304118 - protein, 87 aa, Zea mays
  Clone ID: MRT4577_40426C.1.pep
RCSTVRSSGSTTRPLGALLCCVLASSRTTASAPYNQYLGLPYSVKISSLPSNSSQSSLFECAVLVYCWYNPLCSLGLPCPRTLLPMD

SEQ ID NO: 304119 - protein, 114 aa, Zea mays
  Clone ID: MRT4577_40427C.1.pep
RSNVLNVVAKGSFIHHRTTIARLFATFRPLEYIIFKWTNICVKPLIPELERLIRNRSKNFFPLTTTKGRRPGVKPGKPIFNLRIGQNLGSGNFPARRARTTAREGNSLATPRVR

SEQ ID NO: 304120 - protein, 73 aa, Zea mays
  Clone ID: MRT4577_40428C.1.pep
APPLDVRPACYVSIPKLINKGGMRVFGLQAGGFFQGKKARPLFKGCCLKKKKKMGKKRRKPQKKQPKKKKKKK

SEQ ID NO: 304121 - protein, 109 aa, Zea mays
  Clone ID: MRT4577_40429C.1.pep
SSGSSSSSSPFSSGSPLCFLVSLPFGLSYPSPSETSSSPSSPKSPSSSPSSPPSSSSSPASTGSSSSLFFPLILKSGTPQIGPLLPRNGGLGGTDLEVSRRLLVLNGHN

SEQ ID NO: 304122 - protein, 92 aa, Zea mays
  unsure (1)..(92): unsure at all Xaa locations
  Clone ID: MRT4577_4042C.1.pep
GLFQTHTCSLHACPISRKSLANISVYFGIIDGFLGMQQLLQEYRHLCQEILCRYQERKGRSRFNXLSPKCGFCGSNSAIVSSSDTTECSRHP

SEQ ID NO: 304123 - protein, 235 aa, Zea mays
  unsure (1)..(235): unsure at all Xaa locations
  Clone ID: MRT4577_40430C.1.pep
MRGYDEKPGRTQRTVTKAAEDLHFFLFFGGWSESSSSSSSSSSSWSSSSSSTPSSSSSPLSSSSSSPFSSSSSSSSSSSPPPSXXSSGSSSSSSPFSSGSPLCFLVSLPFGLSYPSPSETSSSPSSPKSPSSSPSSPPSSSSSPASTGSSSSLFFPLILKSGTPQIGPSAATASSSFSAASPAQAFSCRGAAVSIWTANFSKNPILDLLRRGASTTCCRGTGALEAQIWRFQGGC

SEQ ID NO: 304124 - protein, 336 aa, Zea mays
  unsure (1)..(336): unsure at all Xaa locations
  Clone ID: MRT4577_40431C.1.pep
LQTLDLSSNNLTGSIPASLARDSGLVVFNVSHNKLSGEAPAMLGSRFGSSSAYASNSDLCGPPSESECXACTGDGXRQRVQRLALLIGVVAAAALLVALFCCCCVVSLMGWRRRFVESRDGVKKRRRSPGRGSGSSGTSTENGVSQPKLIMFNSRITYADTVEATHQFDEENVLSRGRHGLVFKACYSDGTVLAILRLPSRSADGAVVIDEGSFRKEAESLGKVKHRNLTVLRGYYAGPPPDVRLLVYDYMPNGNLATLLQEASHRDGHILNWPMRHLIALGVSRGLAFLHQSGVVHGDVKPQNILFDADFEPHLSDFGLEPMVVTAGAAAAAAAD

SEQ ID NO: 304125 - protein, 486 aa, Zea mays
  Clone ID: MRT4577_40432C.1.pep
MAPRTLGLNAAPLLQILRSLCLLALAAAAAVSGRRHGASPARGSGQSMYLAPACRAHTASVADFGGVGDGTTSNTAAFRSAVDHLSQYSGEGGGGGMLYVPAGKWLTGPFNLTSHFTLYLHQDAVILGSQDVGEWPIVDPLPSYGRGRDKVGGRFASLIGGSNLTDVVITGSNGTIDGQGAMWWSKFHKNQLKYTRGYLIELMHSDTIYISNLTLLNSPAWNIHPVYSSNIVVQGITILAPTNSPNTDGINPDSCSHVRIEDCYIVSGDDCVAIKSGWDEYGISYGMPSQHIVIRRLTCVSPTSAVIALGSEMSGGIQDVRAEDITAINTESAVRIKTAVGRGAYVRDVFARRMTLTTMKRVFWMTGDYKSHPDDKYDPNAVPVVANISYQDVVATGVYKEAARLQGIQGAPFRGICVANVTADLSKSRKYPWNCADIEGVSANVSPAPCDPLQGAHDGACPFPTDTLPIDQVTVQQCAYDIPATN

SEQ ID NO: 304126 - protein, 217 aa, Zea mays
  unsure (1)..(217): unsure at all Xaa locations
  Clone ID: MRT4577_40433C.1.pep
MRGYDEKPGRTQRTVTKAAEDLHFFLFFGGWSESSSSSSSSSSSWSSSSSSTPSSSSSPLSSSSSSPFSSSSSSSSSSSPPPSXXSSGSSSSSSPFSSGSPLCFLVSLPFGLSYPSPSETSSSPSSPKSPSSSPSSPPSSSSSPASTGSSSSLFFPLILKSGTPQIGPSAATASSSFSAASPAQAFSCRGAAVSIWTACCRGTGALEAQIWRFQGGC

SEQ ID NO: 304127 - protein, 123 aa, Zea mays
  Clone ID: MRT4577_40434C.1.pep
GLSRVRQTCHDMRHLLHIGEKKKRYRSMEPRCVRLVPKLPSSKWILLPAAAAGAGGEAPSVPELVRSRGKTKRGGARRGAHHASQPRNASARQAGQVAGAAPLTRKSWMMHGGILFFRLFIHS

SEQ ID NO: 304128 - protein, 47 aa, Zea mays
  Clone ID: MRT4577_40435C.1.pep
FFFFFYPNSILRAFFQKGGGIPTPKTSLLTILFLTLTPGTPFWIFAY

SEQ ID NO: 304129 - protein, 125 aa, Zea mays
  Clone ID: MRT4577_40436C.1.pep
RGFSLWRGRPPPSFSPASTPWAFGASPRSSAGFWASPSPPGGTLSSRPYCLAYPARCPSGCCPPPKKPLFKEPVAAWKISLIKGKPPLLLDWRALKSVLPPCPVYPPCFAGCCFPSFALIAFVFP

SEQ ID NO: 304130 - protein, 182 aa, Zea mays
  Clone ID: MRT4577_40437C.1.pep
MVQLVTVALHHRDHFSVGNARRVFDKQAYHWSIMIIPEGGQSENCHSFDATDASHINPVTFRMNNPTMDWWFRSELDIKPQRHEKLLGRIVIGEMPDEVSGEELGDFFQGIPLPMKNTNPQQSSVTWIMDAIQALQEKGWTHDFDLDRFKNFAVTYADEKMKGAEAEEPDLKFYESWKASVL

SEQ ID NO: 304131 - protein, 104 aa, Zea mays
  Clone ID: MRT4577_40438C.1.pep
MVNFVTSITLLLTAVSTVVALPNTLEKRAVTCRDDRPNSELANANEAAACIDYLASLGNQACVATISGQSFCRRGDTQITGLARGAPTRTSTCQGRSRCWFDSG

SEQ ID NO: 304132 - protein, 143 aa, Zea mays
  unsure (1)..(143): unsure at all Xaa locations
  Clone ID: MRT4577_40439C.1.pep
PQPPRRLTPGAPFPAPPRXLPGPQXPGETPGGVWLPXNLAARGGPPFSGGGNGPRKNKAPXFLPGAGGFLFSAPGFTRGGPLDFFPKPGGGKKKGPPPPPCSGQKGPRPPPAPPPLGARPKRGKKRKKKGGGGGGPGVPIPPR

SEQ ID NO: 304133 - protein, 182 aa, Zea mays
  unsure (1)..(182): unsure at all Xaa locations
  Clone ID: MRT4577_40440C.1.pep
MESIIARALEYTLKYWLKSFSRDQFKLQGRTAQLSNLDINGDALHASLGLPPALAVDTARVGKLQITLPSLSNVQVEPIEVNIDKLDLVLVEKDDSENLSSPSSTASSPSATKSSGYGYADKIADGMTVQVGIVNLLLETHGGAHRQGDATWSPPLAAITFPXFVLYTTXEXWQVVNXLKEA

SEQ ID NO: 304134 - protein, 58 aa, Zea mays
  Clone ID: MRT4577_40441C.1.pep
GSDQESHPENGDSRLSLVDFDSNAGTILLLVHYDIGRCTHIMWNVKKVSSQPARGLSS

SEQ ID NO: 304135 - protein, 167 aa, Zea mays
  Clone ID: MRT4577_40442C.1.pep
MEGAAVSSLTIALEKQSRLLRAICDRLSAQDAPWASLESATTEHLDAVEAAAATRVGAPESWRPHVELRYEEPVTADNWGGLFEHSGVITAEVGSSPEEVITDDWGDLFCRGVDSDEQLCDSLHSASIRSLEEAFAREDPIPSRADLGIQLSTTERLDAREAGVATH

SEQ ID NO: 304136 - protein, 131 aa, Zea mays
  Clone ID: MRT4577_40443C.1.pep
SLFMEGAAVSSLTIALEEQSRLLRAICDRLSAQDARWASLESATTEHLDVVEAAASTRVGALESWRPHVELRYEEPVTADNWGGLFEHSGVLTAEVVSSPEEVIPDDWGRPLLPRHQLRRAALRFPPFRDD

SEQ ID NO: 304137 - protein, 148 aa, Zea mays
  Clone ID: MRT4577_40444C.1.pep
MEGAAVSILTIALEEQSRLLRAICDRLSAQDARWASLESATTEHLDVVEAAAATRVGAPESWRPEPVTADNWGGLFEHSGVITAEVGSSPKEVITDDWGGLFCRGVDSDEQLCDSLHSASVRSLEEAFAREDPIPSRADLGIQLSATT

SEQ ID NO: 304138 - protein, 84 aa, Zea mays
  Clone ID: MRT4577_40445C.1.pep
MSTFGTLFRVTTYGESHCASVGCIVDGVPPGLKLTAPDIQVQLSRRRPGQSNLTTPRNEKDLVNIQSGVEHDTTLGTPIGLLVK

SEQ ID NO: 304139 - protein, 91 aa, Zea mays
  Clone ID: MRT4577_40446C.1.pep
VKDEPSPGLFLSDSVPVLGGAWAPGCLWVLVGSPGVEALCRSLARFRLAPDALAWLCRVGFFPIRYPCVALPVSLVCGLLVPVVVLYFVGF

SEQ ID NO: 304140 - protein, 148 aa, Zea mays
  unsure (1)..(148): unsure at all Xaa locations
  Clone ID: MRT4577_40447C.1.pep
PTTAGPPPPPHARQTAPQGGRPPAGQEHPPGRPSRXAPQKPSTRGPRSSGQAGGPXPTXGNRXPXKRGRGPPKNARAGRPSRSDQAGAGRPDGXPXAGXTARGPRAPEDPXPAGXRGXAPGRATGGAAAREPGEDPAARSGPPARARG

SEQ ID NO: 304141 - protein, 51 aa, Zea mays
  Clone ID: MRT4577_40448C.1.pep
TETSTETRGSERGGKLSRTHLILLILPITLLALRASFMLTYNSDLNVKGMC

SEQ ID NO: 304142 - protein, 134 aa, Zea mays
  Clone ID: MRT4577_40449C.1.pep
TSRALVGKPAAGTRDVFGEGRITMRKTAAKPKPAASGSPWYGADRVLYLGPLSGSPPSYLTGEFPGDYGWDTAGLSADPETFAKNRELEVIHCRWAMLGALGCVFPELLGPLGEVVDPVNNNVWAYATNFVPGK

SEQ ID NO: 304143 - protein, 38 aa, Zea mays
  unsure (1)..(38): unsure at all Xaa locations
  Clone ID: MRT4577_4044C.1.pep
GKIXGAAAALKXXSNNFXNPXHPLRTTLIHTNSSSPPL

SEQ ID NO: 304144 - protein, 49 aa, Zea mays
  Clone ID: MRT4577_40450C.1.pep
KRLFWKGKHLYCTKSSFVSIKVKVSKENLSQIWFRLPVSCNKLCQKVGI

SEQ ID NO: 304145 - protein, 70 aa, Zea mays
  Clone ID: MRT4577_40451C.1.pep
MASSTMALSSTAFAGKAVNVPSSSAMFSMFGFFVQAIVTGKGPLENLADHIADPVNNNAWAYATNFVPGK

SEQ ID NO: 304146 - protein, 121 aa, Zea mays
  Clone ID: MRT4577_40452C.1.pep
MAAATMAITSRALAPELPDRRVPRRLRVGHRGAVGGPGDLRQEPRAGGDPLPLGLADDPEAFAELKVKEIKNGRLAMFSMFGFFVQAIVTGKGPLENLADHIADPVNNNAWAYATNFVPGK

SEQ ID NO: 304147 - protein, 144 aa, Zea mays
  Clone ID: MRT4577_40453C.1.pep
VDCAEKCCSLAIKLSSSCFFCSALDTASYSSSFFCCTWRAEGARACSVERLCERTSLLGRRHRSSATGAACVGSPKNSVEIWRGRMSRRPSSSTAACVRWSREPPSLLAEYRSAAIVAGLADLGFLVRLRLRREEKSGCGVFLA

SEQ ID NO: 304148 - protein, 111 aa, Zea mays
  Clone ID: MRT4577_40454C.1.pep
TYGGLRLHNESTVTRAHSTQQGHHTKGARFYAHKRTHLIPERDCQGVGSNRLIPTVIFRRRAAPGPGGPATTYVLAEGPNLWRRPSQKTLPSSKGPGGSRAKGGILAPNGL

SEQ ID NO: 304149 - protein, 124 aa, Zea mays
  Clone ID: MRT4577_40455C.1.pep
GVSADPETFAKNRELEVIHCRWAMLGALGCVFPELLARNGVKFGEAVWFKAGSQIFGLADDPEAFAELKVKEIKNGRLAMFSMFGFFVQAIVTGKGPLENLADHIADPVNNNAWAYATNFVPGK

SEQ ID NO: 304150 - protein, 63 aa, Zea mays
  Clone ID: MRT4577_40456C.1.pep
SNIVASGGLGGEVFIWDLDAALAPVAKSVYAKKDEVPNGNSGPALTTLCNINSSSYYVDKRFL

SEQ ID NO: 304151 - protein, 101 aa, Zea mays
  Clone ID: MRT4577_40457C.1.pep
MAPKAEKKPAEKKPAAEEKAEKTTAGKKPKAEKRLPASKSSGKEGGEKKGKKKAKKSVETYKKPTITSREIQTSVRLVLPGELAKHAVSEGTKAVTKFTSN

SEQ ID NO: 304152 - protein, 121 aa, Zea mays
  Clone ID: MRT4577_40458C.1.pep
MAASTMAISSTAMAGTPIKVGSFGEGRITMRIAGGPLGEVVDPLYPGGSFDPLGLADDPEAFAELKVKELKNGRLAMFSMFGFFVQAIVTGKGPLENLADHIADPVNNNAWAYATNFVPGN

SEQ ID NO: 304153 - protein, 64 aa, Zea mays
  Clone ID: MRT4577_40459C.1.pep
AGRVGYWGKDTAKNPSNRSADPAARSAAGELGDGLGRHRVGDVGVEAAEGRCGREEAFLATWCC

SEQ ID NO: 304154 - protein, 37 aa, Zea mays
  Clone ID: MRT4577_4045C.1.pep
QFANRIFDYSLWELFLKIHFFTESYYIPGTVLGHLGN

SEQ ID NO: 304155 - protein, 163 aa, Zea mays
  Clone ID: MRT4577_40460C.1.pep
MASSTMALSSTAFAGKAVNGVKFGEAVWFKAGSQIFSEGGLDYLGNPSLIHAQSILAIWACQVVLMGAIEGYRVAGGPLGEVVDPLYPGGSFDPLGLADDPEAFAELKVKELKNGRLAMFSMFGFFVQAIVTGKGPLENLADHLADPVNNNAWAYATNFVPGK

SEQ ID NO: 304156 - protein, 42 aa, Zea mays
  Clone ID: MRT4577_40461C.1.pep
EISLHNPCDGDVTRRRLYVSLPELKCIVDLMIYLRLIMHLYY

SEQ ID NO: 304157 - protein, 148 aa, Zea mays
  Clone ID: MRT4577_40462C.1.pep
MAPKAEKKPAEKKPAAEEKAEKTTAGKKPKAEKRLPASKSSGKEGGEKKGKKKAKKSVETYKIYIFKVLKQVHPDIGISSKAMSIMNSFINDIFEKLAGEAAKLARYNKKPTITSREIQTSVRLVLPGELAKHAVSEGTKAVTKFTSN

SEQ ID NO: 304158 - protein, 235 aa, Zea mays
  unsure (1)..(235): unsure at all Xaa locations
  Clone ID: MRT4577_40463C.1.pep
MAASTLSISSTEMAGTPIKVVSFXGEGRITMRKIVCKPKVAASGSPXYGPDRVKYLGPFSGEPPSYLTGEFPGDYGWDTAGLSADPETFAKNRELEVIHSRWAMLGALGCVFPELLSRNGVKFGEGVWFKAGSQIFSEGGLDYLDNPSLIHAQSILAICACQVVLMDAVEGYRIAGGRLGXEVVDPLYPGGSFDPLGLXDDCEAFDELXMKELKNGRLVMYFMFCFYATNFVPGN

SEQ ID NO: 304159 - protein, 137 aa, Zea mays
  unsure (1)..(137): unsure at all Xaa locations
  Clone ID: MRT4577_40464C.1.pep
PPASGRVGSPGSSRRRCAAGLPLVRVRPPGLALRGPCFSVGGGVWLPASARWVAPVAWRGRGWRSVWGGLVRGLCLXLAVVFPRRGWXXPGVPXLFRLAXPPPFARWRXXXGARPXRPSXXLRRLGGXWRLVRVFLL

SEQ ID NO: 304160 - protein, 149 aa, Zea mays
  Clone ID: MRT4577_40465C.1.pep
MAPKAEKKPAEKKPAAEEKAEKTTAGKKPKAEKRLPASKSSGKEGGEKKGKKKAKKSVETYKIYIFKVLKQVHPDIGISSKAMSIMNSFINDIFEKLAGEAAKLARYNKKPTITSREIQTSVRLVLPGELAKHAVSEGTKHAVTKFTSN

SEQ ID NO: 304161 - protein, 174 aa, Zea mays
  Clone ID: MRT4577_40466C.1.pep
MASSTMALSSTAFAGKAVNVPSSLFGEARNGVKFGEAVWFKAGSQIFSEGGLDYLGNPSLIHAQSILAIWACQVVLMGAIEGYRVAGGPLGEVVDPLYPGGSFDPLGLADDPEAFAELKVKELKNGRLAMFSMFGFFVQAIVTGKGPLENLADHLADPVNNNAWAYATNFVPGK

SEQ ID NO: 304162 - protein, 119 aa, Zea mays
  Clone ID: MRT4577_40467C.1.pep
MLGALGCVFPELLARNGVKFGEAVWFKAGSQIFSEGELDYLGNPSLIHAQSILADDPEAFAELKVKELKNGRLAMFSMFGFFVQAIVTGKGPLENLADHLADPVNNNAWAYATNFVPGK

SEQ ID NO: 304163 - protein, 34 aa, Zea mays
  Clone ID: MRT4577_40468C.1.pep
FVYTYSCYQLLSKEVTQNLIMKEQIISLGWKMLR

SEQ ID NO: 304164 - protein, 109 aa, Zea mays
  Clone ID: MRT4577_40469C.1.pep
KYKRDARVSTSQHRQYEGIVHLFIGTGRSLCKITLMPFIFSTNLRTICRGLNGVFLLKSVSFSAIELKLPCAQLRHCFNLRFDPCFHIVYSFIPCPKVPAHILCFGKHC

SEQ ID NO: 304165 - protein, 249 aa, Zea mays
  unsure (1)..(249): unsure at all Xaa locations
  Clone ID: MRT4577_4046C.1.pep
MARRGGMVVVGCCLLVALALACGVASAQPSENGPPTKLPPKATFQTITIPKNSTKRLYAVTCRERRGKPCVVSCPSRCPNKCLAYCKYCMAFCVCDLVPGSSCGDPRFTGGDGNTFYFHGKKDQDFCILSDEALHINAHFIGNHNPAIRRNFTWIQAIGVSFGQHRLYVGARKAAIWDDEEDHIHIMLDGEAVDVETVKNTRWVSKALPSLSVTRIDTVNAVMVELDGVFGISVNAVPITEXDSRIHKL

SEQ ID NO: 304166 - protein, 101 aa, Zea mays
  Clone ID: MRT4577_40470C.1.pep
VEHVMRREIDEAVVHGRIGRQVGHDDVGRQRDLAGLVERAADTAPRLRAHGFGQPAFDLRRDPAREARQRGQRGRAVGPHEVIERARYRHVERTVGRAPVA

SEQ ID NO: 304167 - protein, 72 aa, Zea mays
  Clone ID: MRT4577_40471C.1.pep
SLNMFKSLIAGMVLTLNLLRVKLVVLSSVVIVMSTPFFLVSMVTMLRVQSQGCIFMRLSMFISVPVEDGAGR

SEQ ID NO: 304168 - protein, 83 aa, Zea mays
  Clone ID: MRT4577_40472C.1.pep
PCAMRAGLAWRKSISSSVVEECNGIWRRCRQEIYLSHFLVNPDRLQPVRIGVVDEVHGITIFSGSILQLIALSTGGCVSCLCA

SEQ ID NO: 304169 - protein, 98 aa, Zea mays
  Clone ID: MRT4577_40473C.1.pep
AIQAVLSLYASGRTTGIVLDSGDGVTHNVPIYEGYALPHAIMRLDLAGRDLTDYLMKILTERGYSFVTTAEREIVRDIKEKLCYVALDFENEMATAAS

SEQ ID NO: 304170 - protein, 50 aa, Zea mays
  Clone ID: MRT4577_40474C.1.pep
TKRGIFSFSVSYYEQPTPTTINVRIMNDRFIVNLVVLADIVSAMSTKLQP

SEQ ID NO: 304171 - protein, 43 aa, Zea mays
  Clone ID: MRT4577_40475C.1.pep
TRICASHFHHLMPQQALKGGQSKTVFVPPPLSLPIQHKEERVY

SEQ ID NO: 304172 - protein, 97 aa, Zea mays
  Clone ID: MRT4577_40476C.1.pep
FSIARLFFPYRLRIRGVLGCPLRPGGGEPPVLVCSRTLGRSWGASPGGRSPGCVFCGGPLTGGLRLSCSARGFIWGSRCGFFPPMGPLLVSCFPEFC

SEQ ID NO: 304173 - protein, 219 aa, Zea mays
  Clone ID: MRT4577_40477C.1.pep
MVILKLDFEKAFDKLEHAAVTDILRHKGFGDKWIHWISMILGYGTSQVLLNGVPGRRFHCRRGVRQGDPLSPLLFVLAADLLQSIINKAKDCGILNLPILHSCGADFPIIQYANDTILILEACLRQLFFLKAMLNSFAESIGLHVNYHKSNIYPINVSDQKLAILANTFHCKVGTMPFTYLGLPLGPKNPNLGVLLLLIQKIERRLTSTSIFLSQAGRL

SEQ ID NO: 304174 - protein, 110 aa, Zea mays
  Clone ID: MRT4577_40478C.1.pep
THTQSLSVFNTADAPLLTSHGQAKHLDNAPSIDNTIETYIDATGSMQLLKAFLLAFAWAFDAQHMFICVFTDTEPQCHCTGASSSFKPAVPPASPCALSYGAWTSDLSVH

SEQ ID NO: 304175 - protein, 50 aa, Zea mays
  Clone ID: MRT4577_40479C.1.pep
VKSCNITRRTPKCGVVLVSPAIWICQVFQFFFRFAQVFVIVKNYVITGRP

SEQ ID NO: 304176 - protein, 159 aa, Zea mays
  unsure (1)..(159): unsure at all Xaa locations
  Clone ID: MRT4577_4047C.1.pep
VRIPGRPASGNHKKDSRGGVEKKHLEHDRNLTDYNINEESTLDVVFLIKGGMQILAMTLTDNHIPLGVDSSDTIGNVKANIQDKEGIPPQHQDMGFPCKHLXDGRTLARYNMQKESTLHLVLRLIGGMQSFVKTLTWKTITLEDESXHTIHNEKADIHD

SEQ ID NO: 304177 - protein, 145 aa, Zea mays
  Clone ID: MRT4577_40480C.1.pep
MAAAALREQLNALLSSMFASGLVDEQFQQLQMLQEDGGTPGFVAEVVTLFCDDADRIISELAALLDQPIVDFDKVDAYVHQLKGSSASVGAQKVKFTCMQFRQLCQDKNRDGCIMALAVVRNEFYDLRNKFQTMLQLEQQIQAQQ

SEQ ID NO: 304178 - protein, 243 aa, Zea mays
  Clone ID: MRT4577_40481C.1.pep
MQASTVDAAAGSQRGENPSSRPPSTVRAAGLAVATAQESNPPLLTGARGFINRFPRHCRGRGLIGFNSPTPPPRFLPSSGYFLRHHRPLRPRLLEQAAMAAAALREQLNALLSSMFASGLVDEQFQQLQMLQEDGGTPGFVAEVVTLFCDDADRIISELAALLDQPIVDFDKVDAYVHQLKGSSASVGAQKVKFTCMQFRQLCQDKNRDGCIMALAVVRNEFYDLRNKFQTMLQLEQQIQAQQ

SEQ ID NO: 304179 - protein, 156 aa, Zea mays
  unsure (1)..(156): unsure at all Xaa locations
  Clone ID: MRT4577_40482C.1.pep
RIVQIKSQVPNVLPSSIVEHPRSSAGTHALSIYTGRNVHHGDRVSPFHEQEVNVIVENIEQHSEVXQESLFKSQVRYQDILXTSLYPLHPVGMKDLREITARYRCCLLATSGYEGLVLXMLYMLLGSKNTLLIIVDNYYSLLATAIALPHXGTILV

SEQ ID NO: 304180 - protein, 86 aa, Zea mays
  Clone ID: MRT4577_40483C.1.pep
RVRSSGVVHVEAPDSNVTLRLTKLQWQHSQMDAGSVVCEEAWYDSVSILESPDSDDDLDNDFASVSGDPLPDVTGGSDAPQCKEAA

SEQ ID NO: 304181 - protein, 83 aa, Zea mays
  Clone ID: MRT4577_40484C.1.pep
KTFLVIVSIETTAHEGKVVRVKALEVAAGGKEHVKANKQQDEKGCTRLPEPDPARLCHSSGSGGNVCVSCGTTTRLTSRVILC

SEQ ID NO: 304182 - protein, 494 aa, Zea mays
  Clone ID: MRT4577_40485C.1.pep
MAPPPSMPAASDRAGPGRDAGDSSSLRLRRAPSADAGDLAGDSSVGLRENGEPQPPTNPPPQEQQQQHEMLYYRASAPAHRRVKESPLSSDAIFRQSHAGLLNLCIVVLIAVNSRLIIENLMKYGLLIRAGFWFSARSLGDWPLLMCCLTLPVFPLVALMAEKLITRKLIGEHVVILLHIIITTSAIVYPVVVTLKCDSAVLSGFVLMFLASIMWMQLVSYAHTNYDIRVLSKSTEKGAAYGNYVDPENMKDPTFKSLVYFMLAPTLCYQPTYPQTTCIRKGWVTQQLIKCVVFTGLMGFIIEQYINPIVKNSKHPLKGNFLNAIERVLKLSVPTLYVWLCMFYCFFHLWLNIVAELLCFGDREFYKDWWNAKTVEEYWRMWNMPVHKWIIRHIYFPCIRKGFSRGVAILISFLVSAVFHEICIAVPCHIFKFWAFSGIMFQIPLVFLTRYLHATFKHVMVGNMIFWFFSIVGQPMCVLLYYHDVMNRQAQASR

SEQ ID NO: 304183 - protein, 156 aa, Zea mays
  Clone ID: MRT4577_40486C.1.pep
MAFLFALLVGFRLNIVAELLCFGDREFYKDWWNAKTVEEYWRMWNMPVHKWIIRHIYFPCIRKGFSRGVAILISFLVSAVFHEICIAVPCHIFKFWAFSGIMFQIPLVFLTRYLHATFKHVMVGNMIFWFFSIVGQPMCVLLYYHDVMNRQAQASR

SEQ ID NO: 304184 - protein, 136 aa, Zea mays
  unsure (1)..(136): unsure at all Xaa locations
  Clone ID: MRT4577_40487C.1.pep
MKDPTFKSLVYFMLAPTLCYQPTYPQTTCIRKGWVTQQLIKCVVFTGLMGFIIEQVSLLYSLSNLYLYITLDXLPIFLLFXYINPIVKNSXHPLKGNFLNAIERVLKLSVPTLYVWLCMFYCFFHLWLVSCFSSTV

SEQ ID NO: 304185 - protein, 92 aa, Zea mays
  Clone ID: MRT4577_40488C.1.pep
PPQAPEDEKKALLAKIKKKLPGGPKKPEKVGSPPPAPAVHGPPPAPQAKVDVNSPDGKKGFLGKIMAKIPGSPKSSGEKTPKHPPGEPKTSS

SEQ ID NO: 304186 - protein, 190 aa, Zea mays
  unsure (1)..(190): unsure at all Xaa locations
  Clone ID: MRT4577_40489C.1.pep
MAEGFRLLHLVRAFLALLPEVQSAHRKIXPYREKAIYTVISLXYIFLCCSQIPLYGIHSTTAADTFYWMRVILASKRAHXMELRITPSGTSVMTMQLLDASXIIEDDDRVXREDRALLNGAQKLLASLTAMVEAVXYVLCAMYVSVRQPGTDDAILIILQLFLAGIIVIWLHELLQKGYGLRSGMSLFIA

SEQ ID NO: 304187 - protein, 82 aa, Zea mays
  Clone ID: MRT4577_4048C.1.pep
INSLLYRNHSNARALKKRRGGGRCGFVKRFVPSGRGRVGHHTYRAALLWYFKKYFNLINNILNFLRTHFNLYLLYTILKHQF

SEQ ID NO: 304188 - protein, 71 aa, Zea mays
  Clone ID: MRT4577_40490C.1.pep
LSAPQVIKKWGVLVSCQRERGKKRVMVQFRGCQRPFFFKESFWGLSFHFPGGFLKWDPLVGEKIKRQRLNF

SEQ ID NO: 304189 - protein, 92 aa, Zea mays
  Clone ID: MRT4577_40491C.1.pep
LDGTPPLDQQYLEQASSSNTTSSRCSASPYHGRRLGVEKRPDDGDSFLWTTAKERKGKRRGELLRQSVGLRLAVLVCLSLRTQRVFTGEGTR

SEQ ID NO: 304190 - protein, 427 aa, Zea mays
  unsure (1)..(427): unsure at all Xaa locations
  Clone ID: MRT4577_40492C.1.pep
MCSGCRQPLNLRXKRHNCYNCALVFCHSCSSKKSLKASLAPNTNKPYRVCDTCYSKLTKGLETDMHSSAKRAATVPGVSDANEEDLETRSNAQLSRLSSMESFKHLDSRYSKKNKKFEFNSTRVSPVPNGSSHWSGLNISRSFNPVFGSSKKFFSASVPGSRIVSRATSPISRRTSPPRSTTPTPTLGGLTSPRVPTDGKPTNDALSQEVLNLRSQVESLTRKSQLLELELERTTKQLKEAISIAGEETAKCKAAKEVIKSLTAQLKGMAERLPGGAAKNTKLPPLPGISIPSDISSLPMESVGSPSSSGEQIINGHNGLLTSNGQSSIRNKTSHPEVGKNGSRLPDAESCHDAEWVEQDEPGVYITLTALPGGARDLKRVRFSRKRFSETQAEQWWQQNRARVYQQYNVRVIDKSTASVNSDIAAN

SEQ ID NO: 304191 - protein, 447 aa, Zea mays
  unsure (1)..(447): unsure at all Xaa locations
  Clone ID: MRT4577_40493C.1.pep
MAWQTDLGWLPLFLFFSCSVLCVLLPLAPGEYYAPRLPMTPPPNLSPAPAITGGTFAYDDLAAATGRFSDANLLGQGGFGHVYRGTVGGREVAIKKLQAGGGQGDREFRAEVEIISRVHHKNLVSLVGYCLYGEQRLLVYEYVPNKTLEFHLHGTGSGRPTLDWPRRWRIAVGSAKGLAYLHEDCYPKIIHRDIKAANILLDYHYEPKVADFGLAKYQAAEVTPVSTRVIGTFGYLAPEYAATGKISDRSDVFSFGVMLLELITGRKPIMASSEFQSVALVSWARPLLTRAVEEENYDDLIDPRLETDYDAHDMARLVACAAAAVRQTARCRPRMSQXPVPGGRAVGGGPERRRGAGAERGAAVGRRHHGPDQPARXVREHRDRDDHHGVHEQRSHQRGRGRHGRGGGRAGAAVLRQARGRLHREDEPAHHRQTHPEFVVRSRTSAY

SEQ ID NO: 304192 - protein, 76 aa, Zea mays
  Clone ID: MRT4577_40494C.1.pep
QRGVFFWGPQLGRGSSGPFGSGAQKYLKGVLSSKSPGMGPPRVRRFGPQGWGPFQFFSAGKFFRGGGNLGPFPKSF

SEQ ID NO: 304193 - protein, 169 aa, Zea mays
  Clone ID: MRT4577_40495C.1.pep
SSYRSSSLYLYVTVSIWFLVFCWLFAPFVFNPSCFEWHKTVDDWNDWWKWMGNRGGIGLAPEQSWEAWWVSEHDHLRNATIRSLLLEFILSLRFLIYQYGIVYHLHIVHGNKSFLVYALSWLVIAVALVSLKVVSMGREKFVTRIQLVFRILKGIVFLVLIGLLVLLFV

SEQ ID NO: 304194 - protein, 152 aa, Zea mays
  unsure (1)..(152): unsure at all Xaa locations
  Clone ID: MRT4577_40496C.1.pep
PAVEDTPNTRLFLVLLPLAPGEYYAPRLPMTPPPNLSPAPAITGGTFAYDDLAAATGRFSDANLLGQGGFGHVYRGTVGGREVAIKKLQAGGGQGDREFRAEVGXIFSRVHHKNLVXLVGYCLYGEQRLLVYEXYVPNKTLEFHLHGTREWQ

SEQ ID NO: 304195 - protein, 78 aa, Zea mays
  Clone ID: MRT4577_40497C.1.pep
WADDWASSDPTSEDAGDTGEVAGAQGQQCSNRRAAVYTERMSRRTTARRTLNSLFVRVHQHTELCFNFSKLYPPLYSF

SEQ ID NO: 304196 - protein, 634 aa, Zea mays
  unsure (1)..(634): unsure at all Xaa locations
  Clone ID: MRT4577_40498C.1.pep
MSSPAPTSPATPSPPPPAPVPPTPSPQPPTPAPVPPTPAPVPPTPAPVPPTPAPIPPTPAPVPPTPTPSPPPPSPSPPPPVTPSPPPPATVPTPSPPPPASPPPPTVPTPSPTPPASPPPPATAPTPTPPRSSLSPAPPGEFYDPRRGPMTPLHMSHVQSTTPSSTPPLMHSWQQSSHGLSESPLPPLNPSPAITGGTFAYDDLAAATDGFSDANLLGQGGFGHVYRGTVAGQEVAIKKLRAGXSGQGDREFRAEVEIISXRVHHKNLVSLVGYCLHGEQRLLVYEYVPNKTLEFQLHGSGRPTLDWPRRWKIAVGSAKGLAYLHEDCHPKIIHRDIKAANILLDYNYEPKVADFGLAKYQAAEVTPVSTRVMGTFGYLAPEYAATGKISDRSDVFSFGVMLLELITGRKPIMASSEFQPVALVSWARPLLTRAVEEENYDELIDPRLETNYDAHDMARLVACAAAAVRQTARSRPRMSQVRLLLQNVSHTLGAAVAASVTLVSPFPNGQVVRYLEGELSVEDLNAGVMPGQSAMQRSSGGTTDQINRLRRMAFGPGAGGSTGTGAITEYTSSEFSDPTTEYGLNPSSEYTASSAGDTGEVAAGAQGQQQWHGRRAPGDTERMSRRTTGRRTQS

SEQ ID NO: 304197 - protein, 90 aa, Zea mays
  Clone ID: MRT4577_40499C.1.pep
KGMGPGGKIHSLHQKGGGGAKKLVILKKGMDFKIETKFLGSLSPGVPKERENFFSKNKKGLERANKKVGPGDKKGKKRGGGGKGKPFVQS

SEQ ID NO: 304198 - protein, 103 aa, Zea mays
  Clone ID: MRT4577_4049C.1.pep
RRLGPPQASGEPPWWDTPPGLGLGSKPVEGPAPPPGKKPDSPPVPLGAPPAFFRALSQDKGTANPLGPGPDLFIGKRMGPPKGWWVKQPPPGMVQGLTPGETP

SEQ ID NO: 304199 - protein, 60 aa, Zea mays
  Clone ID: MRT4577_404C.1.pep
VQDHFCVQPRVEIAGSLANDTSYREKCIGRECPMRYWNNIYKLGECMHNPAKELPSTINP

SEQ ID NO: 304200 - protein, 74 aa, Zea mays
  unsure (1)..(74): unsure at all Xaa locations
  Clone ID: MRT4577_40500C.1.pep
TARKVSLSFLTPGRETXGPHERNAREVPEWQSDLCQGCKTKSLTLKDRAQILLKNLIVGSSKVPGETPPDAGKV

SEQ ID NO: 304201 - protein, 94 aa, Zea mays
  Clone ID: MRT4577_40501C.1.pep
TPIGDWDPRGRPGNRKFVFPAHLSLGHLCKGAHGSREGQGDHRVLPGRPSSPKGQGDRRLPPRRRLQVLLVKSICFQVPHLQKQVKLRIGPSAT

SEQ ID NO: 304202 - protein, 67 aa, Zea mays
  Clone ID: MRT4577_40502C.1.pep
YHRCADTMTQEAGCLLGRVNPNCDMEVRLHSALATAKLIVMAPMICFSSAFKLQPIVLWQWRKISIL

SEQ ID NO: 304203 - protein, 199 aa, Zea mays
  unsure (1)..(199): unsure at all Xaa locations
  Clone ID: MRT4577_40503C.1.pep
VLWLLVFDFLQDHLFTTLQVLSPLNEDGSPLLTDNHWAIVEKVLSFLELFYESIVALSSVYYPTSTLMLHHILRIARHLNAFENDILLRCAVVPMKDKFLKYXRDIPILYAVAFILDPRAKMRGFNKVLIKLSSLTGTDYSRLPFDVRTKLTKVFQLYETKFGDTRMRGAHQPSSHLSGKKELAWDDIYCDDDLDGEFS

SEQ ID NO: 304204 - protein, 39 aa, Zea mays
  unsure (1)..(39): unsure at all Xaa locations
  Clone ID: MRT4577_40504C.1.pep
KRMLLEKLCFXIHRRXALTLKNHXDAQAMXLPWSTGAVX

SEQ ID NO: 304205 - protein, 122 aa, Zea mays
  unsure (1)..(122): unsure at all Xaa locations
  Clone ID: MRT4577_40505C.1.pep
KFAEVTPPPXXPSFRSPPPPGNVXFXXVIPXLXLLVGVGWGVGNYREKRGVGXQKKIFLXAXPLGDGEPPPPPPXVCFYAQNAWXGXGCGRARDXRWAEGGVPQKKXPHPPLFFLFPPPPPA

SEQ ID NO: 304206 - protein, 92 aa, Zea mays
  Clone ID: MRT4577_40506C.1.pep
LVLFWIFWKKKGKTAKRGPKKMGRGRGGRGGKEKGERGKRRAERSRKDQTQRNPRDCKGFFSWARKGGGREKRNERGNPAKNRQTPSLTRAR

SEQ ID NO: 304207 - protein, 71 aa, Zea mays
  Clone ID: MRT4577_40507C.1.pep
NFSGQHQLYSLRLLRTSSHASLLLCALREPKCLAFSPLNIYRVPSNHILYAWSGTGTPTTIYYLSIALVPL

SEQ ID NO: 304208 - protein, 47 aa, Zea mays
  Clone ID: MRT4577_40508C.1.pep
FWAGKGQGSNWVTQTKIQTSPKCPCFPRSRTFQFQRKGPQVPLYLPS

SEQ ID NO: 304209 - protein, 56 aa, Zea mays
  Clone ID: MRT4577_40509C.1.pep
TAHGTRVLVTLTSASSTFVRTDVWAHTGSGRVILSMYSIVLPVASVTVLVSVRPLY

SEQ ID NO: 304210 - protein, 86 aa, Zea mays
  unsure (1)..(86): unsure at all Xaa locations
  Clone ID: MRT4577_4050C.1.pep
CSPVRALKVCVSDILVIGLINTTLGRRPRTPXCCTLMQGPPDLEAAVHVCSVGRANVRGAPLNQPINLTLLVNXCARRAPAGFQCV

SEQ ID NO: 304211 - protein, 99 aa, Zea mays
  Clone ID: MRT4577_40510C.1.pep
TPQFPDMILSASRDKTIIMWKLTMDETNYGIPQRALRGHSHFVSDVVISSDGQFALSGSWDGSLRLRDLTTGTTTRRFVGHTKDVLSVAFSSDNRQIVS

SEQ ID NO: 304212 - protein, 70 aa, Zea mays
  Clone ID: MRT4577_40511C.1.pep
KCPVMGFLVPLIKKQVKESGFLYIYEGCYIYAQRQQPVQLVQPFFFFKTIFPVWGVPELIGHRLIVNSFM

SEQ ID NO: 304213 - protein, 79 aa, Zea mays
  unsure (1)..(79): unsure at all Xaa locations
  Clone ID: MRT4577_40512C.1.pep
QKTATTKRTPSREPSTEPLEAPARAPDSAXSVVTTHPQPFLVRXTSXTSFHPNPYGDHAHITPHTTHNNVGNLPHPPHT

SEQ ID NO: 304214 - protein, 363 aa, Zea mays
  unsure (1)..(363): unsure at all Xaa locations
  Clone ID: MRT4577_40514C.1.pep
MFGRGPPKKSDSTRYYEILGVPKDASQDDLKKAYRKAAIKNHPDKGGDPEKFKELAQAYEVLSDPEKREIYDQYGEDALKEGMGGGGMHDPFDIFQSFFGGGGNPFGGGGSSRGRRQRRGEDVVHPLKVSLEELYNGTSKKLSLARNVLCSKCNGKGSKSGASMKCAGCQGAGYKVQIRQLGPGMIQQMQQPCNECRGSGETISDKDRCGQCKGXEKVVHEKKVLEVVVEKGMQHGQKITFPGXEADEAPDTVTGDIIFVLQQKEHPKFKRKGDDLFYEHTLTLTEALCGFQYVLAHLDGRQLLIKSNPGEVVKPDSFKAINDEGMPMYQRPFMKGKLYIHFTVDFPDSLSLDQCKALETVLP

SEQ ID NO: 304215 - protein, 98 aa, Zea mays
  Clone ID: MRT4577_40515C.1.pep
GAVGGFVRQAANELPNSRRHDAEILRGSAYECAVAVALAISLDDHHSAAVAAARALIAGPTNQGSLAPSMRERELPTTIRRRPPRVLPCPLSIAEDDA

SEQ ID NO: 304216 - protein, 83 aa, Zea mays
  Clone ID: MRT4577_40516C.1.pep
QGSNMFKSNPWWIILIPYMFHIEILCRCFFLAKSYSSAGKRAEAYALFCHAHTLTGSALQQHSNSHDKALIQDLEFLSNNCRS

SEQ ID NO: 304217 - protein, 49 aa, Zea mays
  Clone ID: MRT4577_40517C.1.pep
GRPSYSADWMLVACYDTDVGLAPSVVCGRVVLYAVAQAPSCCRRHIDVC

SEQ ID NO: 304218 - protein, 110 aa, Zea mays
  Clone ID: MRT4577_40518C.1.pep
TLSSRDLALRGSGAADGRSGSALPTPDALPEPHQLPGPDPRLRRHPAPPTLGLLLAPLHLHPDTTPRGRNALTHRARLRQIARPQPLHLAPTGLRVLGHRRRLPPHPHQA

SEQ ID NO: 304219 - protein, 62 aa, Zea mays
  Clone ID: MRT4577_40519C.1.pep
TWRPVFLCAIKKNVCYEHTVSSNVIMLHDRAMHCLPRLLDHATIARMSTGRDILSFQEGPKR

SEQ ID NO: 304220 - protein, 78 aa, Zea mays
  Clone ID: MRT4577_4051C.1.pep
SRLVTPPKGFVVRPRFCVPLPCVRMVAAYRGSPWAARLAVSVVVSRVHVGVLPVGVEEWVTSIKSPKKNRGRPPTDEL

SEQ ID NO: 304221 - protein, 76 aa, Zea mays
  Clone ID: MRT4577_40520C.1.pep
AAASASAGVDAVVCAAASNPTSSATSGPIVGAGRGHGWPALYGMAWYIIPPCPLFSVGRARASCTASVFLVRLGGS

SEQ ID NO: 304222 - protein, 118 aa, Zea mays
  Clone ID: MRT4577_40521C.1.pep
QRRRLFCPYLVRPSSPGEHAFDCATVFLRRCPHPSTVRSCSCPRHALTGPHAARALSCSHVCAGSVCLFRKHRNRMEGLPLLWLGLLFVLDLVCFAAQKAARNRKGTFFMLDIKCLTL

SEQ ID NO: 304223 - protein, 178 aa, Zea mays
  Clone ID: MRT4577_40522C.1.pep
PPSPSPPPPSPPPPSPPPPSPSPPPPSPPPPSPPPPSPSPPPPYYEVSPEERYLSPPPPAYTEVPPPPYYEVSPEERYLSPPPPAHQESPPPIHHDPPPPPYYEVSPEDRYLSPPPPPSPASLPKYDYSSPPPPSSPPYSEVSPEERYPSPPPPPRALPKLPVYDYSSPPPPAAAWTP

SEQ ID NO: 304224 - protein, 210 aa, Zea mays
  unsure (1)..(210): unsure at all Xaa locations
  Clone ID: MRT4577_40523C.1.pep
MDFFTEYGEASQYQIQEVIGKGSYGVVAAAIDSHTGERVAIKKINDIFGNVSDAARILREIKLLRLLRHPNIVQIKHIMLPPTRREFKDIYVVFELMESDLHQVIKANDNLTPEHHRFFLYQLIRALKYMHSAHVFHRDLKPRNILANSDSKLXICDFGLARASFNDSLSAIYWTDYVATRWYRAPEICGSFFSSYTPAIDIWSIGCIFA

SEQ ID NO: 304225 - protein, 55 aa, Zea mays
  Clone ID: MRT4577_40524C.1.pep
PSVYSDYKISNVVQGRGEPNFKWPPMHISSVPVAVALYQATSGKLHCAAVRGGAH

SEQ ID NO: 304226 - protein, 98 aa, Zea mays
  unsure (1)..(98): unsure at all Xaa locations
  Clone ID: MRT4577_40525C.1.pep
MDFFTEYGEASQYQIQEVIGKGSYGVVAAAIDSHTGERVAIKKINDIFGNVSDAARILRENKLFRXLVRHPNLVXIKHXIMLPPYPEREFKDILCLVF

SEQ ID NO: 304227 - protein, 151 aa, Zea mays
  unsure (1)..(151): unsure at all Xaa locations
  Clone ID: MRT4577_40526C.1.pep
MWRGTATAASAARALRSRLLADPIHHPSTAVLPIASVRTACSVPSAASPAPIVAETAAASVAVSSGARSASDVLRHYGWCYWELSKARLSALVVATSGAGYVLGSGSIVGIAGLCYTCTGTMMVAASANTLNQVFEIKNDAKMXRDMRRPL

SEQ ID NO: 304228 - protein, 199 aa, Zea mays
  unsure (1)..(199): unsure at all Xaa locations
  Clone ID: MRT4577_40528C.1.pep
MDFFTEYGEASQYQIQEVIGKGSYGVVAAAIDSHTGERVAIKKINDIFGNVSDAARILREIKLLRLLRHPNIVQIKHIMLPPTRREFKDIYVVFELMESDLHQVIKANDNLTPEHHRFFLYQLICALKYMHSAQVFHRDLKPRNILANSDSKLXICDFGLARASFNDSLSAIYWTDYVATRWYXAPXLCGSFFLSTPCN

SEQ ID NO: 304229 - protein, 59 aa, Zea mays
  Clone ID: MRT4577_40529C.1.pep
LSQKSPRLSGARAYPLEELRRAVRLLCVPLSRDTGLGCSCSSTGLDMDLGQTPGFMIVL

SEQ ID NO: 304230 - protein, 43 aa, Zea mays
  Clone ID: MRT4577_4052C.1.pep
CTCQPKNLKAKSIKSCGFPNNKLQKPHCCRSNRNKRNCQPGRV

SEQ ID NO: 304231 - protein, 107 aa, Zea mays
  Clone ID: MRT4577_40530C.1.pep
NTRAHTGGSRSRAAGNLGQHRATTRHQRGERNRPREAAQCPPPPNGKARLPAQARVAASALTMATEASTSRVIVFPVRVLTKICILDRRGDRGSQIGDRAVMRPSKR

SEQ ID NO: 304232 - protein, 134 aa, Zea mays
  Clone ID: MRT4577_40531C.1.pep
SQIERPPETVGRGAPPSVSLAFKKFGKKFPLRGAPPVFSPLGGPFFFPPPQLFFSFPKSFWGLLKNIPQGVSNFRFFKLLKKMVFPLVFFPPVKVFFVYKECPLAPTPGLGFPWVGPIWLFPPLFFFFKNGFFW

SEQ ID NO: 304233 - protein, 80 aa, Zea mays
  Clone ID: MRT4577_40532C.1.pep
ALCTYLVFFFFQRSVFLEWCEVNTPTRHRCHCHVIDLSTTHNLFPPDSPGAPYSSRSQVATQRHRTPWKLEKQRSSGSRS

SEQ ID NO: 304234 - protein, 114 aa, Zea mays
  unsure (1)..(114): unsure at all Xaa locations
  Clone ID: MRT4577_40533C.1.pep
CSPRSTVSTPAIYFYTSTNSLRLTMPPXGKAPLLWEITGDSCHVIYHHIDILKGLCPKSFSPVWLGCFYSNVIARLTRYKNRTYTVTVVPADNEQIWPVTLKVVQGATALTALH

SEQ ID NO: 304235 - protein, 112 aa, Zea mays
  Clone ID: MRT4577_40534C.1.pep
FGFLAPRPRFMASPSAAAGFFPEAARQSLLGVSESPPGTPSPRAGGSSPISSAGNGKPGDGADNFRSQLMSPPPPSFDAPPAQCPPEDVAALSIGGVSARLAGSLFLCLPIL

SEQ ID NO: 304236 - protein, 202 aa, Zea mays
  Clone ID: MRT4577_40535C.1.pep
TLEHTQHTNVAKALSSRPLSKLPTEEGRARSRSSSVPVGKTGGLLHLRWPLWLPEGWEIPDLMPGGVYSPRFSRFGVLCTGVMAEEASVCGIKWPCLLLRSPGVVLGTSEELGSFWSRGSECLRSCELVVVVIGHRWALWCGETARGVEDSDPWRSRLWPCGAVVGACPLLRLHGKMLLALLLLWMREVATTRMKDWRLFIG

SEQ ID NO: 304237 - protein, 20 aa, Zea mays
  Clone ID: MRT4577_40536C.1.pep
MARHGTSPSVSFRSDFCSRS

SEQ ID NO: 304238 - protein, 49 aa, Zea mays
  Clone ID: MRT4577_40537C.1.pep
PQLVSFPFEWLVFTLVCQAYHNPPLPVLGPAMLRQHRRNFHDPSRPGQM

SEQ ID NO: 304239 - protein, 105 aa, Zea mays
  Clone ID: MRT4577_40538C.1.pep
DPLWTRPEYSRFQPHPSHLGDLALIWVHRTPLTRTWGPCDSSPNGGKVKGIGFRRHNKVKSPCPNGGLGDKMGTPEEKAGIGPGGTKPRFNLPKKSTPSNCGAKT

SEQ ID NO: 304240 - protein, 64 aa, Zea mays
  Clone ID: MRT4577_40539C.1.pep
MASRWVRPEVYPLFAATGVAVGICGFQLFRNITGYPEARANKARKGAGVLENHEEGRRYPMHEL

SEQ ID NO: 304241 - protein, 53 aa, Zea mays
  Clone ID: MRT4577_4053C.1.pep
QRVFYFLYMCIGPQCLLTERAPKTARLVRNAYTINQKTTALLSPAAQLSVYGP

SEQ ID NO: 304242 - protein, 97 aa, Zea mays
  Clone ID: MRT4577_40540C.1.pep
PLGVGLRPHGLSGGGGGGEVDRLPRPLVRRGLHGISSKKGNDSLSLSFLSFLVPVLPLAVYTNDVASKPRHRQLARPGETSAITRGQRRKSTKSEVC

SEQ ID NO: 304243 - protein, 46 aa, Zea mays
  Clone ID: MRT4577_40541C.1.pep
FVLTNFELFGVETFGMQAHLFHIQASLWIAVNSYKAHLFFVFFQSA

SEQ ID NO: 304244 - protein, 39 aa, Zea mays
  Clone ID: MRT4577_40542C.1.pep
KTLGSSRFKKKKKKKKKKKKKKKKKKKKKKKKKKKKTPP

SEQ ID NO: 304245 - protein, 73 aa, Zea mays
  Clone ID: MRT4577_40543C.1.pep
SPMRAKANRPYASRQIAQPSRGSRVLGESAERKARTPSSEISLRGRRKNRPSFLHSCAFVSCHGLAAFLSIAA

SEQ ID NO: 304246 - protein, 87 aa, Zea mays
  Clone ID: MRT4577_40544C.1.pep
CPTKCFTREKQDDHENFSHPMICLCFMLFIHQVHSDDNYGQHLKRYPYALFLENTFLSELYICNSIYVIESVNTIIHRNSFLALRND

SEQ ID NO: 304247 - protein, 89 aa, Zea mays
  Clone ID: MRT4577_40545C.1.pep
PVVTVRQKAFSADYLLSPQPSGQGSMHHHKHLFYLVLHNEDDVQTSFKLSGFAVRALWWCMASKLLTTRSVCPTTGAASRGSITFVNQP

SEQ ID NO: 304248 - protein, 284 aa, Zea mays
  Clone ID: MRT4577_40546C.1.pep
MMMMPDGGVVSCSPPLPPRALLAASSVLCCVVWVQHGSRLAMCPAVLCHHPSIIILYLYPTKKKKKKKKKKKYSARAPQKKKKKSQRQRGIPIRQAKRKNQLLRPEMSSQLIEEHRSGAEVHVGHELCERKSREFMVELGLPDGLLPLPSLDEVGYNRSTGFVWLRQAAGLTHTFGSIGKQVWYDREVTAFVEPGRMHGLAGVKSKELLIWVTISEIVLSPSGGRAWAARSGSGSGFVRQSSRLWFPLLRHVRVVDDDAGINGVPGSRTHGSIHPVYLKKKKKS

SEQ ID NO: 304249 - protein, 57 aa, Zea mays
  Clone ID: MRT4577_40547C.1.pep
GGVLHEKACPGRIWVILGRVFFKLFICANFIYRGTVNRIKWTVIVGVNDRGVHWGGF

SEQ ID NO: 304250 - protein, 117 aa, Zea mays
  Clone ID: MRT4577_40548C.1.pep
KKLVGIPLTVSSEDRSILVAESAVSDVARTGADREAHGAPYPPQPWWQRRDASVHRHRPIRAPANATGPRERAGEEGCGRRLHLRRRRWLRGMRRRGGRGRGRPPWEGRRWDWIERR

SEQ ID NO: 304251 - protein, 137 aa, Zea mays
  unsure (1)..(137): unsure at all Xaa locations
  Clone ID: MRT4577_40549C.1.pep
PTPSAPFGKQVWYRREVNGVRGAGADARPRRGEKQGAPHPAGLTHTFXSIGKQVWYDREVTAFVEPGRMHGLAGVKSKELLIWVTISEIVLSPSGTKIVFRTPAGLGRAFPVTAFQLEPAAAEGDHKEEAEDAAAAN

SEQ ID NO: 304252 - protein, 49 aa, Zea mays
  Clone ID: MRT4577_4054C.1.pep
HHSFFRINQPNINKMAARILATQVEQNYNIRQYSPSLKTKKFAIISLHS

SEQ ID NO: 304253 - protein, 629 aa, Zea mays
  Clone ID: MRT4577_40550C.1.pep
MAPVAAPIRDLLTSFSPGADFLALSSGDGRIKVWDAVRGRLQTEFADIPAVEAVAVAESKRGHLALDYTCMKWVQLSSKKKRKAGSSLIVLGTGSGDVLALDVAAGHWKWKVSDCHPGGVTAVEYSKHGRNVYTAGADGMVCRIDASNGAVVGKFKSSSKAISALAVSSDGNMLATAAGQLRTFDTSSNKKIKKFSGHPVAVRSMVFSNDSQYVLSSGVGERYIAIWKLGSGKTQSSNCILSMEHPAMSVDCKCSDKGEIYILAISEIGVCYFWSANVVDDLRNKKPTKIILSESSVSTAHQALSIFAAKLQGVDGPNSAHVLLAYGSVVKPSFDKLLVCYGTDISLGISQDGVLLPNTQTTMAKKGQSVKKHETVFALDRANAEDAILPLPKLHTQEKKRKHGVTKPSGDVEPEIHSDLTTTRSIHKRVPVQRIEDDSTCIEDMMRECGIIETRVDESMKGHAGIPFNILSCLFGDGSIKVDANLPSKKIRGHLRSLKPGDACKLLDKLVSAWKTRSGSTELVLRWIYCLLVIHGRFICSEESINNLEKMCAERYTVTEDLLKLSGRLRLITAQVDKAASNMSEPTSGEMQDAAFQSDEEEEDEDVDETVFGQDSDSSQNSGTDDDAK

SEQ ID NO: 304254 - protein, 129 aa, Zea mays
  unsure (1)..(129): unsure at all Xaa locations
  Clone ID: MRT4577_40551C.1.pep
MAPVAAPIRDLLTSFSPGADFLALSSGDGRIKVWDAVRSRLQTEFADIPAVEAVAVAESKRGHLALDYTCMKWVQLSSKKKRKAGSSLIVLGTGSGDVLALDVAAGHXKWKVSDCHPGNTMPSCCCRCH

SEQ ID NO: 304255 - protein, 38 aa, Zea mays
  Clone ID: MRT4577_40552C.1.pep
VIHIFEEQLSIQRFALEATCTDKDKNGFHNMSLKYFSK

SEQ ID NO: 304256 - protein, 81 aa, Zea mays
  Clone ID: MRT4577_40553C.1.pep
NRSSGGGWLMSFLDCYLMLLPLWIDRLQLESSLASCLAPWTWGWTRRIARLVAGFVRCLAKFFFFLVRIKGRRENTPVAQQ

SEQ ID NO: 304257 - protein, 84 aa, Zea mays
  unsure (1)..(84): unsure at all Xaa locations
  Clone ID: MRT4577_40554C.1.pep
NNTINMVQLAGFIKLKRAILIWYFFARESMRSPSAHNGSXHMAPYNSWSFLNDNPAGASISLLLGEGGGACCLSFFASINQKPN

SEQ ID NO: 304258 - protein, 133 aa, Zea mays
  unsure (1)..(133): unsure at all Xaa locations
  Clone ID: MRT4577_40555C.1.pep
HLRPPVHQSHQPVVXSSATMXXCVXHTRXWXEGMGDYSPIAVSLAHGPLSFARPSPAAKYGRAIPXSSIGWXXGGHXAGKGRQXCLCPAQPYDXSARVPVRSLNPGWKLXGESINLXXLRSXVAHICTSMISA

SEQ ID NO: 304259 - protein, 51 aa, Zea mays
  Clone ID: MRT4577_40556C.1.pep
CEEQTPSIISMYHLEKEADFPFNINKPSASKAYNCICPVPSSRRSVSISSA

SEQ ID NO: 304260 - protein, 92 aa, Zea mays
  Clone ID: MRT4577_40557C.1.pep
MSTFAFDDFSRMIFVSEKGVLIATPEQKLLRYDLNGTLLESFPCNNGSHLKITPYTFKESLVRHAFFETPDFNADGHGDEDEPEPPPFFLGL

SEQ ID NO: 304261 - protein, 199 aa, Zea mays
  unsure (1)..(199): unsure at all Xaa locations
  Clone ID: MRT4577_40558C.1.pep
GTSRPAGTALSRSPLPPLLLLRCRCGCPASQARRRRVLCSALLHSTSPPPPCATDAARSRSFGLLASRAGGEPAGARRASERAEGGGXMMHAKSESDVTSLAASSPPRSPKRGVAAAGTGGGGGYYVQSPSRESHDGGGGVGGGYKSSSMQATPVYNNSPSESPSHPSYGRHSRSSSVSRFSGGLRGGGVVGRKVLHDK

SEQ ID NO: 304262 - protein, 122 aa, Zea mays
  Clone ID: MRT4577_40559C.1.pep
QFPLLSFYKKKKKKKKKKKKKKKKKKKKKKKKKKKRATNLKDPNLTKPKLRKKNKLFFKEGGGLFRGPIFSPRGSGKTFFFSGFLILLPGPLFPTGGLGKTPGPPPFSPFGPPPFFAGGGAL

SEQ ID NO: 304263 - protein, 146 aa, Zea mays
  unsure (1)..(146): unsure at all Xaa locations
  Clone ID: MRT4577_4055C.1.pep
RPIFTFGEVDLRHVSLPSLPVSGPSPFRAAAVAAPFVERRGXQLFLADWPFYMNGWNSYWLMDQAVEPRSRDRVSRMFRTDTEMGLTVCRSWAFNDGTYNALQVSPGHFDERVFKVKKGNCPPVNFSRKCRALWGGANCLTMECLY

SEQ ID NO: 304264 - protein, 272 aa, Zea mays
  unsure (1)..(272): unsure at all Xaa locations
  Clone ID: MRT4577_40560C.1.pep
MRCPASQARRRRVLCSPXLPPARRHHHHSXARQLLXRFVRAGEGNRGSEASGGRRMMMHAKSESDVTSLAASSPPRSPKRGVAAAGTGGGGGYYVQSPSRESHDGGGGGYKSSSMQATPVYNNSPSESPSHPSYGRHSRSSSVSRFSGGLRGGGGGRKVLNDKGWPECSVIEEEGPYEGLGAGDSGLSRRCQIVLGFLTFVLLFTVFCLVIWGAARPYEPEVVVKSLVMDDFYAGEGTDHSGVPTKLVTTNCSLHVSVYTLPQCLGSCHSGP

SEQ ID NO: 304265 - protein, 63 aa, Zea mays
  Clone ID: MRT4577_40561C.1.pep
LTRANPRRIRLLANITPYPFQKAFQSNSHDHGLTKKISSTKGSIQGAKLKRPRQILETMAWGG

SEQ ID NO: 304266 - protein, 74 aa, Zea mays
  Clone ID: MRT4577_40562C.1.pep
GSSRVAARLKFFFFFFFFFFFFFFFFFFFFFFFFFKTKKLYKPFTTFQLKFPTLKGKIVHHERSNLKFWNSHFF

SEQ ID NO: 304267 - protein, 332 aa, Zea mays
  Clone ID: MRT4577_40563C.1.pep
MMHAKSESDVTSLAASSPPRSPKRGVAAAGTGGGGGGYYVQSPSRESHDGGGGVGGGYKSSSMQATPVYNNSPSESPSHPSYGRHSRSSSVSRFSGGLRGGGGGGRKVLNDKGWPECSVIEEEGPYEGLGAGDSGLSRRCQIVLGFLTFVLLFTVFCLVIWGAARPYEPEVVVKSLVMDDFYAGEGTDHSGVPTKLVTTNCSLHVSVYNPATMFGIHVTSGPIRLIYSEISIAVGQVRRYYQPRKSHRTVTAVIHGEKVPLYGAGGGLTLSTSAGGGAVPLTLDFDLTSRGYVIGRLVRVTHRAHVTCPVVVDARRTKPVRFSKKACAVYKA

SEQ ID NO: 304268 - protein, 60 aa, Zea mays
  Clone ID: MRT4577_40564C.1.pep
REVIQLSLLFYCSPYFLLSSCSHRFILSMLVWYSFFLSNLIFFCSFILDSSVLFMVFFFF

SEQ ID NO: 304269 - protein, 91 aa, Zea mays
  unsure (1)..(91): unsure at all Xaa locations
  Clone ID: MRT4577_40565C.1.pep
MAPRKGKENXVEQVISLGPQVAEGVHVFGVCHIFASFNXTFVHVTDLSGKETICRVTGRMKVKADRDESSPYAAMLAAQDVAQRCKELGIT

SEQ ID NO: 304270 - protein, 28 aa, Zea mays
  Clone ID: MRT4577_40566C.1.pep
KKKKNNQSKKILKNIRVHSTSYLLYNVT

SEQ ID NO: 304271 - protein, 70 aa, Zea mays
  Clone ID: MRT4577_40567C.1.pep
TGTGGHQIFLQPPANFILFRPKKNKLAHLSFFYLQGGPNPMIDIFFFLFQLQGAWFFRFFHSSVTNYRRE

SEQ ID NO: 304272 - protein, 131 aa, Zea mays
  Clone ID: MRT4577_40568C.1.pep
SMSRQRYKGRQAQTAEAASAGRGESVAHHMAPVPKAVTNGLPKSHRQSYAVRLSRARKGDEDGGRIEGEPAPLMPTRPSRTCAREHIPCRTTRDRTRQARRRLAQQLKDYDDLRRRAASKSAAAPRSRCPL

SEQ ID NO: 304273 - protein, 78 aa, Zea mays
  Clone ID: MRT4577_40569C.1.pep
LIFFFCFLFFFFFFFFFFFFFFFFNNILGAGLGAKTQMGNNNNEPGTKHSGPRRPQTKINPLLTWGNTVAKANKITRP

SEQ ID NO: 304274 - protein, 76 aa, Zea mays
  Clone ID: MRT4577_4056C.1.pep
KRCTPLFHRLQNKALAGGQGQLVESKPQLLLPEPDVAAPRVTHIGDKILDAACMTDALSLLVITRSNRERIHTYIA

SEQ ID NO: 304275 - protein, 81 aa, Zea mays
  Clone ID: MRT4577_40570C.1.pep
GFWVVVCGHPELEGTFPGFYGEKKKKRAGRFKDPRLPSPCLQLISFLLGQPNSIQLAAVYHRRAWETLAVPNLIGFAEIPL

SEQ ID NO: 304276 - protein, 62 aa, Zea mays
  Clone ID: MRT4577_40571C.1.pep
HLFHCNSEFSHSRTFALVASRRIFLLYLFLCLVYCYVYVLLVYLYVLIRVAARLRLTRRPVW

SEQ ID NO: 304277 - protein, 113 aa, Zea mays
  Clone ID: MRT4577_40572C.1.pep
RGGAKNLLFKTYLGTFSPKKTFGEKKPPRYENGNPPDPPPGKGKLPKAAPPPFAKLAGTIIGPKKGPKGTPNQKKLPRVREALTPPRGGQKQNTPPPRVGTLVLFTKGPPGIF

SEQ ID NO: 304278 - protein, 59 aa, Zea mays
  Clone ID: MRT4577_40573C.1.pep
VSSFLLFLFLYSSNNIILNHHLIIQKSLFHTPILLNYSPISKKKNPIPPPPKSYNHTPP

SEQ ID NO: 304279 - protein, 69 aa, Zea mays
  Clone ID: MRT4577_40574C.1.pep
TREKFTFHLMTISDISNPVNKPNNYKTLTFSPSNHHLRFSTRTHKPYLFQFFFSFCCRLPNVQLFSPFL

SEQ ID NO: 304280 - protein, 90 aa, Zea mays
  Clone ID: MRT4577_40575C.1.pep
IRPNLRLARSMLAFLRVNAAPMAIATHASAATRELLAVACAPEGNLRDLTSELVLLSSSYFGPAPLCPSTQEAVEDPKGFLAQQLDPRMP

SEQ ID NO: 304281 - protein, 95 aa, Zea mays
  unsure (1)..(95): unsure at all Xaa locations
  Clone ID: MRT4577_40576C.1.pep
SQMASVSKILKELVPQNLTRLMXSSDALTKSLLLECDKHKNKSVAEAKVEFLKRIYRWPTFGSAFFEVKQTSEPDYPDILLIAINRHGLVLIHAK

SEQ ID NO: 304282 - protein, 66 aa, Zea mays
  Clone ID: MRT4577_40577C.1.pep
LLLGNSKLQWLVWKLKSPLRGLERIEGELSSFSSQAYSVRGGLREIEFISLSGLIRLGGDLGLGRM

SEQ ID NO: 304283 - protein, 64 aa, Zea mays
  Clone ID: MRT4577_40578C.1.pep
KGLNKPLQVKIINPHPPLGPWPPNAKPVPRSGGQKRPQILKRPKLDGRKPTPLGWVKTQTNWAH

SEQ ID NO: 304284 - protein, 63 aa, Zea mays
  unsure (1)..(63): unsure at all Xaa locations
  Clone ID: MRT4577_40579C.1.pep
MARTQXSAVAVGLGGRVLLLATAGTTXSKAAITCGQVSSAIAPCLSYARGTGSGPSASCCNGV

SEQ ID NO: 304285 - protein, 45 aa, Zea mays
  Clone ID: MRT4577_4057C.1.pep
FSCVFEKKNKLKHWPTTSTLMRALSVPQYSLLHVHWYGFKVCIFI

SEQ ID NO: 304286 - protein, 214 aa, Zea mays
  Clone ID: MRT4577_40580C.1.pep
MDDVWCSLDMAADIAGLHSALADPFWPADLDLMVSTHEVEGMADMDASGFFVGGGDDRFMLPSSTTSSLSSKRSLSLDSGGSSGSGSFSLDLADASRYQAPALPVPHNPLAGAVDHDDEAIMRAMMAVMSSSSASPSSSASSHPQPFRRERDSNMQQQSAAMAPQLRGGRSGHVMVKSSLSMSPERSSSGGRGQQQEDPTRAASGNTGQLYHMM

SEQ ID NO: 304287 - protein, 125 aa, Zea mays
  Clone ID: MRT4577_40581C.1.pep
QRGVSVQASTLGSLEALLEFLRVSKIPVSNISIGPVFKRDVMLAGTMLEKGLKEYAVMLCFDVKVDKEAQAYADDVGVKIFTADIIYHLFDDFTKHMAELTEQRKEESKMHAVFPCVLKTVAVFN

SEQ ID NO: 304288 - protein, 72 aa, Zea mays
  Clone ID: MRT4577_40582C.1.pep
RVINGARGECEVDYIIIRDVDLGTEWTVIASEAGKGWVRVSNRLANPAEIRYPRTAWPTLMSQTKPRITAGD

SEQ ID NO: 304289 - protein, 153 aa, Zea mays
  unsure (1)..(153): unsure at all Xaa locations
  Clone ID: MRT4577_40583C.1.pep
PNPNMGFVYTSFXERATFISHGNTARHASRYGNTKLAQICGTIAADEKRHESAYERIVEKLFEVDPDYTVRAFADTMRKKVAMPAHLMYDGQDDGLFARFSAVAQRIGVYTARDYVDILEFLVRRWGVQELTGLSGEGRRRTRGRTRGRTRGK

SEQ ID NO: 304290 - protein, 66 aa, Zea mays
  Clone ID: MRT4577_40584C.1.pep
GGFLRHKGRATLGRAFGGGLFDKTPGVKKWIPASRLSWVGAGFFQATRLKRRPVIVLAPLGNWSYK

SEQ ID NO: 304291 - protein, 252 aa, Zea mays
  Clone ID: MRT4577_40585C.1.pep
MAATAPNGNPTVSSLAATVPVQAVLFDIDGTLCDSDPLHHVAFQEMLLEIGYNNGVPIDEEFFIKNIAGRSDVEAAQNLFPDWELEKGLKFLEDKEAKYRSLAKERLVPVKGLAKVVQWVKDHGYKRAAVTNAPRINAELMISLLGLSDFFQAVIVGGECEQPKPAPYPYLRALKELQVSAEHSFVFEDSPAGIRAGVAAGMPVVGVATRNPEKSLVEAGAALLVKDYEDPKLWAALEEIDGEEAKLKKASE

SEQ ID NO: 304292 - protein, 68 aa, Zea mays
  unsure (1)..(68): unsure at all Xaa locations
  Clone ID: MRT4577_40586C.1.pep
EGEHPQKGXGNHKEGTLKKFRARLTGNHGNNSGNNKERKARKRKKEKKKHGEGHDHDGGHSSSSSDSD

SEQ ID NO: 304293 - protein, 38 aa, Zea mays
  Clone ID: MRT4577_40587C.1.pep
KLVMRFEAKQRAFFSVTIVSSVWGVHPKPRRLLLFCLR

SEQ ID NO: 304294 - protein, 91 aa, Zea mays
  Clone ID: MRT4577_40588C.1.pep
WNSPSCVTAEDVVRRDVVQLGGHELLVRVHRFVGEREDQVRTAVVRRHQLQLRVQVLELGIRSSVVVHQVARVGQGLRVHRHGRCESRNRS

SEQ ID NO: 304295 - protein, 53 aa, Zea mays
  Clone ID: MRT4577_4058C.1.pep
AVLGATFSGQKGCCFTHITNLSLQTAQLQNKTLIQGGLHNWHLEPDPNTSMFA

SEQ ID NO: 304296 - protein, 200 aa, Zea mays
  unsure (1)..(200): unsure at all Xaa locations
  Clone ID: MRT4577_40590C.1.pep
NDPLLHDDMNQDAHRHVLETQLGGPDEGRYSLQHVPSSSQQSTQPTGDLTHTKLSARGGSQEELLMVRPPQISHRQWHPSDITLPDATXSDIMFDALEKNMETXTNCYLCCHQXPHRILHGXSKTDIGXNSYHMNKTDVRLLEEMRMDAYRISISWPRILPKATRQGGINPDGIKYYTNLINSLLDNGIQSYVTIFHWDV

SEQ ID NO: 304297 - protein, 58 aa, Zea mays
  Clone ID: MRT4577_40591C.1.pep
ETAKGLSPSFLIISGNCIESEIAECLDKRGKIRADAFLRKPLRIEDLTRVITSHYINQ

SEQ ID NO: 304298 - protein, 138 aa, Zea mays
  Clone ID: MRT4577_40592C.1.pep
VSFSLSPVPFPHLPDPIHRSSPSSDAMSVSVKNTSSESDDNAKDISKKYSDTVEIEMALEQLCPHLNDEPCRVSANQPLIPRYDIKVSLLDDAHHGHHRRHHATSLPRCCGSPETSSQHKTCSQACIRRQCFACDHMA

SEQ ID NO: 304299 - protein, 68 aa, Zea mays
  unsure (1)..(68): unsure at all Xaa locations
  Clone ID: MRT4577_40593C.1.pep
IVSRIKXCDSVCGVATPGVRRYSAASLPPAGRLHEFRALAQPRRRGEPGLSRRAWWDRAETLRPEGET

SEQ ID NO: 304300 - protein, 91 aa, Zea mays
  Clone ID: MRT4577_40594C.1.pep
EQRWRRERGNHDHGLGNRRAPSTREMGHAGHGTGASSPASMARATMESRTAGRRVRWRWHPPWLRASYRTGGGGMVEKMTAREGSSLFVSR

SEQ ID NO: 304301 - protein, 90 aa, Zea mays
  Clone ID: MRT4577_40595C.1.pep
LHKLKNPQKFLHPRGTPTNPPLGPFSAPPIFFKPEISVLGMPAPFGRPFPRGATPPPQIFLGPCPPRGLIFLQKGMHSTYIWGFLLKKFF

SEQ ID NO: 304302 - protein, 106 aa, Zea mays
  Clone ID: MRT4577_40596C.1.pep
GRGPVFLGPHYRGGPKGFFSPALHPSFHPPPKKTPPGAKPKKGPFKKSPGPLLKKAQTPFPPGGEGGAPHWAPNPQKKAPPVFPNRKRPKVKTHAAPPGPKGETKG

SEQ ID NO: 304303 - protein, 52 aa, Zea mays
  Clone ID: MRT4577_40597C.1.pep
EVFDFLVDIVPRDEPRDADPAAAAMGAAAPGIPQHPAAADPTTMGYYYVQPQ

SEQ ID NO: 304304 - protein, 58 aa, Zea mays
  Clone ID: MRT4577_40598C.1.pep
VQAAIGSLFGPQEGEVVKARFKEFKLASAKGIGIGVGLHETGSPRTGLTGLVVFLKPL

SEQ ID NO: 304305 - protein, 244 aa, Zea mays
  Clone ID: MRT4577_40599C.1.pep
MQAPREGYGLATMDFDYVPASPGSSRWAGESAARRRQRRLSSPSLRTYLTPAFDAVAGGEGGVSGYSSSSSSGGLELGFDASLLRYRRSCLAASADLDSRVLLYSPQSLPPPPPQMRAAYVAADDEVWAPGVSHYGSKHEAGRLTGAPGFQDSENRIAFVSPSRTSSNLHTTVLGASTPVKLPAELQLPEGSAELPTPKPEATPSALKLSADPEPDVDADEITEALYGGSGHRRLPIFREICPE

SEQ ID NO: 304306 - protein, 93 aa, Zea mays
  Clone ID: MRT4577_4059C.1.pep
MRLRSCSVFFQPHALALWVCFGQLQDLEIYECDDLVYWPEKVFQSLISLRRLEIYSCKNLIGYAAAVANGPDQEAMSQLLLPHLESLKILGCE

SEQ ID NO: 304307 - protein, 120 aa, Zea mays
  Clone ID: MRT4577_405C.1.pep
DTGISLTMSVSSYPVTYTVRLRDCHIGCAGILQSARVCLCPQSHHVVMLCTTNSWRQQFTSLESGLQREPPGPPRALAQVHERKLGLMPPRSVSSTRRRRGRMVPLPFRAARARPLPEVI

SEQ ID NO: 304308 - protein, 62 aa, Zea mays
  Clone ID: MRT4577_40600C.1.pep
GNPKKNVVRRKFSQLNFCSIKGPPIFFFFTLYKIYYFCMYAFFILFSFYIFSPFFFFFFFFF

SEQ ID NO: 304309 - protein, 52 aa, Zea mays
  Clone ID: MRT4577_40601C.1.pep
LLHPIVSRIKRAQLCSGGLSGSLMVEFLSDGEFHEGKVAGRPVAVRAQVEES

SEQ ID NO: 304310 - protein, 107 aa, Zea mays
  unsure (1)..(107): unsure at all Xaa locations
  Clone ID: MRT4577_40602C.1.pep
IFVGIARGTLVFFPWGKIMFWVAPNYLLDPPQGPVGRAFCLSKLAVSFGPRNIALLPPNFRVSPPFFLKKKPVPGNFWVPPWKFMGSQIKKKKKKKKKKKKKKKXXE

SEQ ID NO: 304311 - protein, 240 aa, Zea mays
  Clone ID: MRT4577_40603C.1.pep
LTRPSTATRSLARAPVLPFPLHLRGARGNLATPHRVRAPTVAGPLIKLPARRDPAAHIHAHRRWAAPLLASVLLSSLLISASLFFSSSRALLLSFSPLPSAASAEPLFVEAKLRQQMRAEERPARGAVPRIAYLVSGSAGDGAALRRTLRALYHPANTYVVHLDLEAPAAERAELAAAVRADPGYARFRNVKVVTRANLVTYRGPTMVANTLHAAAILLREGGDWDWFINLSASDYPLVT

SEQ ID NO: 304312 - protein, 53 aa, Zea mays
  Clone ID: MRT4577_40604C.1.pep
SPRWISCSDPLVSACRRAREQLPRALPVAPSPVKHHAVGMLVHVQGLVQSDLG

SEQ ID NO: 304313 - protein, 441 aa, Zea mays
  Clone ID: MRT4577_40605C.1.pep
MLEAKPPSPGSSGAAGAAAHIHAHRRWAAPLLASVLLSSLLISASLFFSSSRALLLSFSPLPSAASAEPLFVEAKLRQQMRAEERPARGAVPRIAYLVSGSAGDGAALRRTLRALYHPANTYVVHLDLEAPAAERAELASAIHADPVYARFRNVKVVTRANLVTYRGPTMVANTLHAAAILLREGGNWDWFINLSASDYPLVTQDDLLHVLSELPRQLNFIEHTSDIGWKEYQRAKPVIIDPGLYSLQKSDVFWITEKRSVPTAFKLFTGSAWMVLTHQFIEYCIWGWDNLPRTVLMYYANFLSSPEGYFHTVICNVPEFRNTTVNHDLHFISWDNPPKQHPHYLTLADFDGMVNSNAPFARKFGREDPVLDKIDQELLGRRPDGFVPGGWTYLLNATTEEGRPFAVERVQDLRPGPGVDRLKKLVTGLLTQEGFDDKHCL

SEQ ID NO: 304314 - protein, 45 aa, Zea mays
  Clone ID: MRT4577_40606C.1.pep
GHSFPLVCLFFMVCYNLIPPFFQFFFFFLFFLQINPKPKKKKKKK

SEQ ID NO: 304315 - protein, 176 aa, Zea mays
  unsure (1)..(176): unsure at all Xaa locations
  Clone ID: MRT4577_40607C.1.pep
MEFIGTNTKDVEMAGRDNTELSSREHALPALLIKVPSQAIAGFDCVPAAADATVVSLNEPGDKAEDVAISILPAPARAYGGDAHGVPYSVSLSMPASPSGFHLSSHFMCAGDAPVATADVRXGAAGGSAAGXAAAHSPRLIKQTRFHSQPILNLHPPSKNVVDEAAARRWDSARDT

SEQ ID NO: 304316 - protein, 76 aa, Zea mays
  Clone ID: MRT4577_40608C.1.pep
SFLPSARRASSPPKVASSSPKTAEKSPKQASVLIPALALCWSMLVFKSLPVSCVVVVSFLPPLFLFFPLPDRKYLV

SEQ ID NO: 304317 - protein, 116 aa, Zea mays
  unsure (1)..(116): unsure at all Xaa locations
  Clone ID: MRT4577_40609C.1.pep
MEAVVPKGQHPVRKALEEMDQWDDLNTRLLSQFSNAGAVIYQLQALGEDKNYGPLRAVPNIRVDLMGXQMRGVWQLIFRLKLRRHWEKFNDIVKALNKALRDTNQMVRGGSALTAK

SEQ ID NO: 304318 - protein, 199 aa, Zea mays
  unsure (1)..(199): unsure at all Xaa locations
  Clone ID: MRT4577_4060C.1.pep
MRGLLSVEAAGAASSSASASVLNGAVDWWRDVNESPXLYGIVSAVALVQLIRIECRVPEYGWTTQKVFHFLNFLVNGVRSAVFVLRRNVQLVEPEIIQHVLLDMPGLAFFTTYALLVLFWAEIYYQARAMSTDGLRPTFYWINSVGYAIQIILWLVLWWKPVRIMVILSKMFFAGVSLFAALGFXLYGGRVFMMVRRFP

SEQ ID NO: 304319 - protein, 77 aa, Zea mays
  Clone ID: MRT4577_40610C.1.pep
VSPGGGDPARGFYFFISHQQGTREDYLVYDVSGADSNTFLGSNHPPVFIFSQTSRTRQTGDSYTLMNNDAGVDWTRP

SEQ ID NO: 304320 - protein, 74 aa, Zea mays
  Clone ID: MRT4577_40611C.1.pep
MAATVSFPAVNMEKLETEETDTAIAVIRDACDNWGFFELLNHGISHELMDEVDLLTRAHYATYREAKFHEFAAL

SEQ ID NO: 304321 - protein, 158 aa, Zea mays
  Clone ID: MRT4577_40612C.1.pep
ILIELLQRSGGGGGGGGPNGGPAPQSRSLQVAYTPHNKSHRVYTQAGCTASQSQPTPTLGSSPTKRDVFLRNVRRFLLFRTLRIRLRLRLLFFRRIRITSRRRFTGYRLKLLLLRRVRLLIVRRVRLLLLRLIRFLFLRLLLLRVIRLRLRFFVRRLL

SEQ ID NO: 304322 - protein, 68 aa, Zea mays
  Clone ID: MRT4577_40613C.1.pep
PASRQGGFRLLETYRRRKRRKRRAHMLCEQTAASTSSSRGGVKQSDKVAAAGGCELGGGGGMHGHTLA

SEQ ID NO: 304323 - protein, 98 aa, Zea mays
  Clone ID: MRT4577_40614C.1.pep
LPPSQPWRAPDNKGHGHPLPKFGEWDVKNPATSEGFTVIFQKARDDKKTTTGPGAGNARAGIPPAFRNGGGDGGYRPDFGDGNQYTPPKRKKWAFCGC

SEQ ID NO: 304324 - protein, 88 aa, Zea mays
  Clone ID: MRT4577_40615C.1.pep
DNKGHGHPLPKFGEWDVKNPATSEGFTVIFQKARDDKKTTTGPGAGNARAGIPPAFRNGGGDGGYRPDFGDGNQYTPPKRKKWAFCGC

SEQ ID NO: 304325 - protein, 92 aa, Zea mays
  Clone ID: MRT4577_40616C.1.pep
MATPDNKGHGHPLPKFGEWDVKNPATSEGFTVIFQKARDDKKTTTGPGAGNARAGIPPAFRNGGGDGGYRPDFGDGNQYTPPKRKKWAFCGC

SEQ ID NO: 304326 - protein, 120 aa, Zea mays
  Clone ID: MRT4577_40617C.1.pep
MSTPPPTTIPDELLEEIFLRLPTPDAVARASAACTSFRRVIKARAFRRRFRALHRPPLLGFMDAVGFHPAQAPHPSAPLAGALAPRAADFSFVPAVVSSASYFVPRGVQEDDGEGTRWRP

SEQ ID NO: 304327 - protein, 59 aa, Zea mays
  Clone ID: MRT4577_40618C.1.pep
RRFLNPEKLRVSTGTLTRCYALLRKDQGQLVAPLRCFPGPKGSAARVVYVPPRGPLLVK

SEQ ID NO: 304328 - protein, 51 aa, Zea mays
  Clone ID: MRT4577_40619C.1.pep
DKQIKLFPVAYQTHWRNHTYDMSIIETQLHVVLSVTNGGNDKPDANACCRS

SEQ ID NO: 304329 - protein, 247 aa, Zea mays
  unsure (1)..(247): unsure at all Xaa locations
  Clone ID: MRT4577_4061C.1.pep
QQKKGKWKSXSHAMMDKGXRVSPQQCEDKFNDLNKRYKRVVDLLGRGRACRVVENHALLDAIDELTPKAKDEARKLLSSKHLFFREMCAYHNSGVAGGSHLPPHAGGGAAGDAACLHHPPPVPVAGAASSAARHYQAAPSPPCMKDSSADVADDEDDSDAVSDNGEEDEDDYDEEDDGHMYHSHLTSRQHSGGGRRRGKREHGEDSAAAEDLEDEAAGGGKRARTGAAPDPSAMLQQLKSELAAAAA

SEQ ID NO: 304330 - protein, 57 aa, Zea mays
  Clone ID: MRT4577_40620C.1.pep
SFELKRNLSSRLVLFDYNLEIVPMSVQSSEHVTTYCTLSCKVLLRSQKKKKKGRPPT

SEQ ID NO: 304331 - protein, 201 aa, Zea mays
  Clone ID: MRT4577_40621C.1.pep
MVLQKKKKKKKKKKKRRHFPSEPQFASTRAAAASPVDAHRAAMAEQTEKAFLKQPKVFLSSKKSGKGKKPGKGGNRFWKSIGLGFKTPREAIEGTYIDKKCPFTGTVSIRGRIIAGTCHSAKMNRTIIVRRNYLHFVKKYQRYEKRHSNIPAHISPCFRVKEGDHVIIGQCRPLSKTVRFNVVKVIPAGSAAAGKKAFTAA

SEQ ID NO: 304332 - protein, 63 aa, Zea mays
  Clone ID: MRT4577_40622C.1.pep
MAMAAAQLEAEEELRLELEAVAAVYGDDVRVLRDLPPHLFVHVRPRTADDTSQQEAELGRLGS

SEQ ID NO: 304333 - protein, 105 aa, Zea mays
  unsure (1)..(105): unsure at all Xaa locations
  Clone ID: MRT4577_40623C.1.pep
MAELSMDAGRAFVRMGGLDTYRCDAMPGALNXIRGSLRADHSTLLIWTFRSCIELLKKGHDDYRLHELWTVMNLLNTDGXCKYCRDGTIHEITKDIWSMEPDMLR

SEQ ID NO: 304334 - protein, 51 aa, Zea mays
  unsure (1)..(51): unsure at all Xaa locations
  Clone ID: MRT4577_40624C.1.pep
AVSRLYRSQAVVTLTSITRLSTLTHADSHNYRLRSPTLLXSCNLSTITRPM

SEQ ID NO: 304335 - protein, 89 aa, Zea mays
  unsure (1)..(89): unsure at all Xaa locations
  Clone ID: MRT4577_40625C.1.pep
MGKRKSAAKPPPKKRMDKLDTVFSCPXCNHGSSFECRIDMKNLIGEASCRICQENFSTTINALTEPIDIYSEWIDECERVNTVEGDDDA

SEQ ID NO: 304336 - protein, 231 aa, Zea mays
  Clone ID: MRT4577_40626C.1.pep
MEDWDSEDFQPVAPVVKVEPLKNQWADEDVDADDVKDSWEEEEEEEKPKPAAVQKNATKPSAKAPAKKGKQQASTSAEEPDEPLSPTSEKIRQQRLVEEADFKSTTDLFAKKSGEQKSLDTFIPKSESDFAEYAELIANKLLPYDKSFHYMALLKNVMRLSMTPLKGSDAKDISSSVTAIANEKIKAEKEAAAGKKKQGARKKQLHIEKGDDDFIPGRGGGYDDPDEYDFM

SEQ ID NO: 304337 - protein, 94 aa, Zea mays
  Clone ID: MRT4577_40627C.1.pep
PSLYLSLALGDSWVTVVAAALLQVPRSSQVPLPPLRRRRAPASDMKNLIGEASCRICQENFSTTINALTEPIDIYSEWIDECERVNTVEGDDDA

SEQ ID NO: 304338 - protein, 237 aa, Zea mays
  unsure (1)..(237): unsure at all Xaa locations
  Clone ID: MRT4577_40628C.1.pep
MAPSNLPAIFNPTQQDIEMLLAAQCHLGSKNLQVHMEPYLWKTRPDGVNVLNIGKTWEKIVLAARIIVAIDNPADVCVISARPYGQRAVLKFASHTGATAIAGRFTPGNFTNYITRSFREPRLIVVTDPRTDAQAIKEASYVNIPVIALCDGDSPTEYVDVAIPTNNKGRHAIGLVWWMLAREVLRLRGTLANRETEWDVMTDLYFYRDPEXRENRTXXVEEAKVPXADEVPPLSLT

SEQ ID NO: 304339 - protein, 91 aa, Zea mays
  unsure (1)..(91): unsure at all Xaa locations
  Clone ID: MRT4577_40629C.1.pep
LGRVGDGSQIAVVRLKSWSNKAATAFAVEGAVLARVRHRSLLSLRGYCAAGHERLIVYDYMPNLNIHSQVHGQHAAXCNLSCERRMRIVTD

SEQ ID NO: 304340 - protein, 180 aa, Zea mays
  unsure (1)..(180): unsure at all Xaa locations
  Clone ID: MRT4577_4062C.1.pep
MRGLLAVEAAGAASVPASVLHGAVDWWRDVNESPLWQDRIFHALAVLYGIVSAVALVQLIRIECRVPEYGWTTQKXRSVVFVLRRNVQLVEPEIIQHVLLDMPGLAFFTTYALLVLFWAEIYYQARAMSTDGLRPTFYWINGVVYAIQIILWLVLWWKPXRVMVILPKXFFAGVSLFAAL

SEQ ID NO: 304341 - protein, 163 aa, Zea mays
  Clone ID: MRT4577_40630C.1.pep
VDVSLAKVEMAISKFLIVENCCLYASSSAEFTVLLISPNPKQLADYVQKHFDETNWQNIANEPEFHEQLIKDIHEVCRKGDIERFEMPQRVKIVKEMWTPETGLVTDALKLKRKAIEQKYRRFIAELYSDNQSSRSSGKKIKKSTTQGSEHSTDNNNLLKKDQ

SEQ ID NO: 304342 - protein, 90 aa, Zea mays
  unsure (1)..(90): unsure at all Xaa locations
  Clone ID: MRT4577_40631C.1.pep
MGKRKSAAKPPPKXKRMDKLDTVFSCPFCNHGSSVECRIDMKNLIGEASCRICQENFSTTVNALTEPIDIYSEWIDECECVNTVEGDDDA

SEQ ID NO: 304343 - protein, 59 aa, Zea mays
  Clone ID: MRT4577_40632C.1.pep
YKIWMEFNLGGTLKLKRISLGNNQRFGSGPETTDRNLPKIYLGTYTGIYNHNNLLRNEW

SEQ ID NO: 304344 - protein, 89 aa, Zea mays; identical to SEQ ID NO: 256713
  Clone ID: MRT4577_40633C.1.pep

SEQ ID NO: 304345 - protein, 89 aa, Zea mays; identical to SEQ ID NO: 256713
  Clone ID: MRT4577_40634C.1.pep

SEQ ID NO: 304346 - protein, 111 aa, Zea mays
  Clone ID: MRT4577_40635C.1.pep
EQIARGLLVSADALAMDVDSLCWQSNFIWYPRCLSGTMATPLYYVRPGWPVKLWGDVRWARNSESSGSQYILVWLMSILSRTHFESSWHVRSHTSILFIAGFPMLKPEKNP

SEQ ID NO: 304347 - protein, 117 aa, Zea mays
  unsure (1)..(117): unsure at all Xaa locations
  Clone ID: MRT4577_40636C.1.pep
TTIVPQCSQATIAHLLARGLLPAWPSVCRKPXLFNTYRIHHASTACILPLXPLILQQXXSVSHQSPMLHXLAQIMMAQHLQHLELAHLAVYTQLQQLPEMLMMAQNMTTHHLHHLVL

SEQ ID NO: 304348 - protein, 85 aa, Zea mays
  Clone ID: MRT4577_40637C.1.pep
SFFFFFFFLRTLLNLHGYYIHSIPFSPSLTCTTTTTNNLTLFFLNTTTKLLSITHNTLSHTHCPKHTPLAFTHKEQHSTLKLNHF

SEQ ID NO: 304349 - protein, 399 aa, Zea mays
  unsure (1)..(399): unsure at all Xaa locations
  Clone ID: MRT4577_40638C.1.pep
MDVDDVLSNLRVVGVPTKSAIYIWGYNHSGQTARKGKECHLRIPKSLPPKLFKLGNGKSLRWTDIACGREHTAAVASDGSLFTWGANEFGQLGDGTEDSAKEPKKVKSLETEFVKSVSCGAHCTAAVAEPRENDGTVSKSRLWVWGQNQGSDYPRLFWGAFTPNTVIKQVSCGAVHVMALSEDGLLQAWXYTWGLGSMGQLGHCSLQSGDNELIPRRVVALDGIVVGDVSCGGVHSCAVTEGGALYAWGGGHVGQLGVGPQGGFFSCSLNGSDMLLRNIPVLVIPSGVRLATCGHSHTLVSMKDGRIYGWGYNSYGQATNEKSTYSQSRLVLFGAGSSTQPHPNPSRSSSPPQGRKEAEPWGRESQLLSHLLRSGWTSLTLSFPAHSATTGVVLSAELT

SEQ ID NO: 304350 - protein, 65 aa, Zea mays
  Clone ID: MRT4577_40639C.1.pep
KKKKKKKKKKKKKKKKKKKKKKKKKLKKKKKKKKKFFSCPGRAVSKRGNFWEISSTLGARLDLAF

SEQ ID NO: 304351 - protein, 61 aa, Zea mays
  Clone ID: MRT4577_4063C.1.pep
YFFFNPAPKKFTLVRERAPGPWGLTDVEIHKTSTLPQGRKAGPQWGPIELHCLKKQTGFEP

SEQ ID NO: 304352 - protein, 100 aa, Zea mays
  Clone ID: MRT4577_40640C.1.pep
AKTIRGRGALLFNSTRLCYSRMVGGITRSGAYVYYVPQPGYAEVTTTSVFPRCVSRVLDEFAVSRGGLKAFRISCLRALGVKAGAEGCASDVYELKRLVR

SEQ ID NO: 304353 - protein, 41 aa, Zea mays
  Clone ID: MRT4577_40641C.1.pep
ACDLGHHTKLLQQHIPGFCDDVGIYIFITHDPFNKSSSCEL

SEQ ID NO: 304354 - protein, 85 aa, Zea mays
  Clone ID: MRT4577_40642C.1.pep
AYRWIDRICAHLIAYDFEAVPNFTVKGTTELNQDFFRARRLHNMRERLNLNMQMTCIMSLLELLCSEQLISCWYMTNPSLFLDED

SEQ ID NO: 304355 - protein, 171 aa, Zea mays
  Clone ID: MRT4577_40643C.1.pep
TSDFRGDLEAISSLASSGLDVYAHNIETVRSLQRIVRDPRAGYDQSLAVLKHAKGSREDMITKSSIMLGLRETDEEVKQAMMDLRAIGVDILTLGQYLQPSERHLTVREYVTPQKFQFWKEYGESVGFRYVASGPLVRSSYRAGELFVQNLVRNNKTESSMDPYAEITKSN

SEQ ID NO: 304356 - protein, 190 aa, Zea mays
  Clone ID: MRT4577_40644C.1.pep
MAARRGREWDGDEQGAALPTPAPLGAPVVCLLSSAGDLAAGAFVGSLVGYGKGLITNQGTKACLSIAGSSAKTFAALAGVQSFIMCLLRRLRGKDDMINAGMAGCCTGIALSFPGAPQAMFHSCVTFAAFSCIMDGLSKQQAAMALTLDVKSPTVKYEEGRVIPPFTLPPLLDALDPLGSFCQTLIKPKH

SEQ ID NO: 304357 - protein, 63 aa, Zea mays
  Clone ID: MRT4577_40645C.1.pep
HCQIVAVNCSLCLPYYTLIQWQLHKHVLLALSLVGPKILDSHIIRFTGYYDILLLERLLNPSI

SEQ ID NO: 304358 - protein, 77 aa, Zea mays
  Clone ID: MRT4577_40646C.1.pep
MGREKGGQGNVKIHGTQTTHYHEYIDHVYWLQNPLVSGRISLHPRGIGLGLWHALNLGHNLNFPAGLEPVHFGQKLS

SEQ ID NO: 304359 - protein, 82 aa, Zea mays
  Clone ID: MRT4577_40647C.1.pep
LFAKRLLIFFSKTFAKTKQVVQVWSKMLKERKQSMQYLMKIYWLNSKQPLHLPLCKLVHLHLYICFGLCWHQSPKRGTLKGN

SEQ ID NO: 304360 - protein, 59 aa, Zea mays
  Clone ID: MRT4577_40648C.1.pep
EQKSERCCSKDCSIQRYVLRPLICSQLLCRFLYLLRTLQLCPFYLKSVTCTPSSLACSP

SEQ ID NO: 304361 - protein, 91 aa, Zea mays
  unsure (1)..(91): unsure at all Xaa locations
  Clone ID: MRT4577_40649C.1.pep
QLAPGKKEKVQEAPKXALDWMXPNQSPXKEDFEAKLKRVEAVCTPMVWPVFHRSGGPPGGDADGGVYDAPPELXMVVGNGDLKSREPTQLL

SEQ ID NO: 304362 - protein, 157 aa, Zea mays
  Clone ID: MRT4577_4064C.1.pep
CIHFYLILTFWFLNSVDINVFQIILWLVLWWKPVRVMVILPKMFFAGVSLFAALGFVLYGGRLFLMLQRFPVDSKGRRKKLQEVGYVTTICFSCFLIRCVMMCLNSFDKEADLDVLNHPILNFLYYLLVEIVPSALVLFILRKLPPKRGITQYHPIH

SEQ ID NO: 304363 - protein, 47 aa, Zea mays
  Clone ID: MRT4577_40650C.1.pep
SYILILACYIQLLTFLLHLILYDCNPNNVHLTKMSLLPEKKYHCNDI

SEQ ID NO: 304364 - protein, 58 aa, Zea mays
  Clone ID: MRT4577_40651C.1.pep
STSFLRFNFPVHSFQPPFHACVSPPRVHLGHLFTYPGLSQFDLPAAPMVGTLCRLPLV

SEQ ID NO: 304365 - protein, 112 aa, Zea mays
  Clone ID: MRT4577_40652C.1.pep
APAPHAATAAAVAASTSESAQPAAEDERARTSHHGSRLDQDREEQLQDGGPDVLLPHGPSTATPRMRRWNRSRCLPSGLLHCKVVGFTTHLMRAPPAPVRSVSSRSRCPIQR

SEQ ID NO: 304366 - protein, 74 aa, Zea mays
  Clone ID: MRT4577_40653C.1.pep
QQSIVQAIRDFLFCRERQKKVTWRQLPRKTSRAQHRKSILLGHCRITEGAREGSVFALLVASEHAILLGAGIDS

SEQ ID NO: 304367 - protein, 518 aa, Zea mays
  unsure (1)..(518): unsure at all Xaa locations
  Clone ID: MRT4577_40654C.1.pep
MAPPPASPADSAPDPRPTASAPVPITVPSPRDHAHHHHLVDRRDTPRGRAWEPERNRRGEAMDGAAAVKLVPGEAGYVLEDVPHVSDYLPDLPTYSNPLQDNPAYSVVKQYFVNPDDTVCQKIVVHKDGPRGNHFRRAGPRQKVYFEPDEVHACIVTCGGLCPGLNTVIREIVCGLSDMYGVTKILGIQGGYRGFYARNTITLTPKSVNDIHKRGGTILGSSRGGHDTVKIVDSIQDRDINQVYVIGGDGTQRGAGVIFEEVRRRGLKVSVAGIPKTIDNDIPVIDKSFGFDTAVEEAQRAINAAHVEAVSAENGIGLVKLMGRHSGFIAHYATLASRDVDCCLIPESPFYLEGEGGLFRYIEKRLKDNGHMVIVVAEGAGQKLIAETMQSIGKDASGNELXTINLKYIDPTYMIRAIPSNASDNVYCTLLAHSVVHGAMAGYTGFTIGQVNGRHCYIPFYRITEKQNRVSITDRMWARLLSSTNQPSFLCNKVVEEAKKEHERATRLLDGSPSHRKG

SEQ ID NO: 304368 - protein, 385 aa, Zea mays
  unsure (1)..(385): unsure at all Xaa locations
  Clone ID: MRT4577_40655C.1.pep
PGYSVVEQYFVNPDDTVCQKIVVHKDGPRGNHFRRAGPRQKGGYRGFYARNTITLTPKSVNDIHKRGGTILGSSRGGHDTVKIVDSIQDRDINQVYVIGGDGTQRGAVLIFQQVRRRGLKVSVAGIPKTIDNDIPVIDKSFGFDTAVEEAQRAINAAHVEAVSAENGIGLVKLMGRHSGFIAHYATLARRDVDCCLIPESPIYLEGEGGLFRYIEKRLKDNGHMDIVVAEGAGQKLIAETMQSIGKDASGNELLLDVXLWLSQKINEHFKKNKMTINLKYIDPTYMIRAIPSNASDNVYCTLLAHSVVHGAMAGYTGXYHWQVNGXTXTSIYRITEKQTXXSITDRCXKXLSSTTPTPTNLRKEGHKTPTRLHKYSKGHWSTHAR

SEQ ID NO: 304369 - protein, 246 aa, Zea mays
  Clone ID: MRT4577_40656C.1.pep
NPKFLPLRPFPVSRSTNLFITINSTNDHYFFTNAGFMSQFGTRASRDVDCCLIPESPFYLEGEGGLFRYIEKRLKDNGHMVIVVAEGAGQKLIAETMQSIGKDASGNELLLDVGLWLSQKINEHFKKNKMTINLKYIDPTYMIRAIPSNASDNVYCTLLAHSVVHGAMAGYTGFTIGQVNGRHCYIPFYRITEKQNRVSITDRMWARLLSSTNQPSFLCNKVVEEAKKEHERATRLLDGSPSHRKG

SEQ ID NO: 304370 - protein, 81 aa, Zea mays
  Clone ID: MRT4577_40657C.1.pep
IHSAVAQDTIYCTLLLRANPSSIGECFASVRIGGFIIISIFPWTGSATSPHSSRRMSPYGGISFTTRIQWPPSSQKARPEE

SEQ ID NO: 304371 - protein, 63 aa, Zea mays
  Clone ID: MRT4577_40658C.1.pep
NDRDSTIDITVSMYHTSDHVTDDSTINNCTIDRAVLKVPQKHPHSDTNVTTSLKLIDQPCVHE

SEQ ID NO: 304372 - protein, 99 aa, Zea mays
  unsure (1)..(99): unsure at all Xaa locations
  Clone ID: MRT4577_40659C.1.pep
SPLGEVVEQGITRVXNATDAVGIVLKELKRQSSLGMFHLLVAVDGINALWGRTTLKREDKSPIAPEELALVHNLRKMMKNDCNGGAIVSALSQTGSLFK

SEQ ID NO: 304373 - protein, 111 aa, Zea mays
  Clone ID: MRT4577_4065C.1.pep
MRVRSPQRITYTLASWLFMMLQRFPVESKGRRKKLQEVGYVTTICFSCFLIRCVMMCLNAFDKAADLDVLNHPILNFFYYLLVEIVPSALVLFILRKLPPKRGITQYHPIH

SEQ ID NO: 304374 - protein, 41 aa, Zea mays
  Clone ID: MRT4577_40660C.1.pep
NVLLPPLLHKETKGGQIQRLLQHMFYISNLTICGPKKELLL

SEQ ID NO: 304375 - protein, 255 aa, Zea mays
  Clone ID: MRT4577_40661C.1.pep
LEARPGTSLAENVLCALPMICPFLESLILRFQVISDRVVRRLLESATNLQVLCLHYCLGSLTSFSFQTKAHALRVLRLHWVTSWLTNDDLTILTENCNLAELSLSGCKLLDSSSQDIISSGWPNLALLHLEECGKVTVEGVSSFFNCKALEDVLLRHTGRGIGRSIIDDAIRELPLLRKLALDLCDACEDGYDSPNDAEGKMIRSVRMSRCKKMAGSCLEVPRQGSSTSRPVHKDTVVLEWSSRMFPPPIVKERV

SEQ ID NO: 304376 - protein, 252 aa, Zea mays
  unsure (1)..(252): unsure at all Xaa locations
  Clone ID: MRT4577_40662C.1.pep
LLESATNLQVLCLHYCLGSLTSFSFQTKAPALRVLRLHWVTSWLTNDDLTILTENCNLAELSLSGCKLLDSSSQDIISSGWPNLALLHLEECGKVTVEGVSSFFNCKALEDVLLRHTSICACHFQDFYRCNFSPLKKLNXIHLIGYIVSESWEPQGRGIGRSIIDDAIRELPLLRKLALDLCDACEDGYDSPNDAEGKMIRSVRMSRCKKMAGSCLEVPRQGSSTSRPVHKDTVVLEWSSRMFTTTIVKERV

SEQ ID NO: 304377 - protein, 49 aa, Zea mays
  unsure (1)..(49): unsure at all Xaa locations
  Clone ID: MRT4577_40663C.1.pep
FYVAAVSRTRSRPSRPVXALSVSSSTRPLYIFSVAGSCGPTPATGSSSR

SEQ ID NO: 304378 - protein, 104 aa, Zea mays
  Clone ID: MRT4577_40664C.1.pep
SFFFFLSVCFSFSFFFTEQHLSTLHSNSELPIPTGREALSRSFTRPLRQPNLPRTLLHLLTRADPPHVYMHLEHTKLPLAQKNKIIANGLAPPSSFLHDLATPD

SEQ ID NO: 304379 - protein, 80 aa, Zea mays
  Clone ID: MRT4577_40665C.1.pep
RISIYYNCGNSHHRLQSSRIAKRNVQWRPKGRLFLLNQLVANTPAAPNSRGVHDLQPKKSMAASNGSNIQHHPMLSAKPG

SEQ ID NO: 304380 - protein, 130 aa, Zea mays
  Clone ID: MRT4577_40666C.1.pep
MSSVTASPRARSLGCPPVYLLVVLSALFNFIVQAAPISTSAKKPNDDNDNILRTARDGPYNLTVQAGIAGAILIVFGLILCFLGVRFFRVCMFLIGFYFFANVSYIGMSNGGVTNFYLLLVISIVVRILG

SEQ ID NO: 304381 - protein, 137 aa, Zea mays
  unsure (1)..(137): unsure at all Xaa locations
  Clone ID: MRT4577_40667C.1.pep
TTSPPARATILLPRRRLRLAPVHDVDDSKNPPEERPETDKMVDGMDYRELCSDFERISSPXAKPKARQDARDIVKLREDNRXFLVISXXQSHKDPLRKFGGGEKXKKKKRIPEVVENPVATDQEKSMQSTSNRTIRW

SEQ ID NO: 304382 - protein, 81 aa, Zea mays
  Clone ID: MRT4577_40668C.1.pep
SQLEAARATPLNCAPGFAKVPSSMQRPGLPTPGQPSAIRPPIACHTGTGILTCFPSATHFCLALGADSPYADERCVGNLGL

SEQ ID NO: 304383 - protein, 122 aa, Zea mays
  Clone ID: MRT4577_40669C.1.pep
IRHEELEQASVISLPLCPLLLLLLSLSPHLISTGSLSRLPPRPPPLLSSRLALSQHDAIVWSVRGRETGKETRRRNRETRDTASQRRKGERKKGGCVRGVAWGDAAEDGARPVRPGLLRRWR

SEQ ID NO: 304384 - protein, 52 aa, Zea mays
  Clone ID: MRT4577_4066C.1.pep
MVRKTVLAALLVAAALAGSARAQIKEGFYDYSLPQAEKVVQDYVKAHIPHAA

SEQ ID NO: 304385 - protein, 192 aa, Zea mays
  Clone ID: MRT4577_40670C.1.pep
SRPAGLGRTCLTVTEFTKSSFKIGCAPETLRRTNLGSLKEGSKVNLERAVSANTRMGGHFVQGHVDTIATIESITPDGNALTFRFKPRDTAVLRYIVEKGYVTIDGASLTVTKVQDGPDGWWEVMLIAYTQEKVVTASKKAGDDVNVEVDQVGKYVEKSVAGYFEGSTNGEFAILEKMVSKLVDERLKALGR

SEQ ID NO: 304386 - protein, 479 aa, Zea mays
  unsure (1)..(479): unsure at all Xaa locations
  Clone ID: MRT4577_40671C.1.pep
SLDAAVGDFAIVRNRTKLAEFTQPYIESGLVIVVPVKHVTSSAWAFLEPFTLEMWCVTVALFILVGIVVWLLEHRTNEEFRGSPRRQLITIFWXCCCYLGMYFILGYQVPWVEIHNFIGDFFXDCHFFIMLNFRFSFSTMFFSHSXPLDLSHDIMLIFSSVLSLCEGKHLDGKLTAGQNTVSALGRFVLIIWLFVVLIINSSYTASLTSILTVQQLATGITGIDSLISSGLPIGYQAGKFTRNYLIEELNIPESRLVPLNTIQEYADALKRGPKDGGVVAIVDEMPYVEIFLSYHCNFRIVGQEFTKEGWGFAFKRDFPLAADLSTAILQLSESGQLQKXHDEWFTRPSCSSDDSEVGATRLGLGSFWGLFLVCALICLLALLVFFIRICWQYNKYSNSEAAGEPSAAAAAAAAVDAAAAAADAVERQRRPSRLGSFKDIIQFVDKKEEEIKKTMKRRVSEKDNNQAAGSSEAHSVASA

SEQ ID NO: 304387 - protein, 68 aa, Zea mays
  Clone ID: MRT4577_40672C.1.pep
SDRPRLLNCKRPKKSSYMKVFFSSSSYLYSRAGFIVWLASHVRRGQKKSGITARGLGRVDARVVGRVG

SEQ ID NO: 304388 - protein, 117 aa, Zea mays
  Clone ID: MRT4577_40673C.1.pep
CCCCCSGTSFEISRLSSSWPSCSCSTFRCRSCGSITGSRAPGSCVLNDKHQGRGSCCFPHATRSSSKTSPFEAYPIQLSDYLHLLSVSRGFLFWPKKHKPAALSWFPRRSGERTRLN

SEQ ID NO: 304389 - protein, 334 aa, Zea mays
  unsure (1)..(334): unsure at all Xaa locations
  Clone ID: MRT4577_40674C.1.pep
AINQLLTEMDGFAGNSGVIVLAATNRPDVLDSALLRPGRFDRQVTVDRPDVAGRVKILEVHSRGKALAKDVDFDKIARRTPGFTGADLQNLMNEAAILAARRXIKEISKDEISDALERIIAGPEKKNAVVSEEKKRLVAYHEAGHALVGALMPEYDPVAKISIIPRGQAGGLTFFAPSEERLESGLYSRSYLENQMAVALGGRVAEXEVIFGQDNVTTGAXNDFMQVSRVARQMVERFGFSKKIGQVAIGGPGGNPFLGQQMSSQKDYSMATADVVDAEVRELVEKAYSRATQIITTHIDILHKLAQLLIEKETVDGEEFMSLFIDGQAELFVA

SEQ ID NO: 304390 - protein, 138 aa, Zea mays
  unsure (1)..(138): unsure at all Xaa locations
  Clone ID: MRT4577_40675C.1.pep
RAAARAGTRAEEVIFGQDNVTTGASNDFMQVSRVARQMVERFGFSKKIGQVAIGGPGWKPFXGQQMSSQKDYSMATADVVDAEVRELVEKAYSSARRRITTHIDILHKLAQLLIEKETVDGEEFMSLFIDGQAELFVA

SEQ ID NO: 304391 - protein, 197 aa, Zea mays
  unsure (1)..(197): unsure at all Xaa locations
  Clone ID: MRT4577_40676C.1.pep
MADKKLIPLGLIILMSIGLANAVRVVRYSNADGTGTGQGEGGGYVNGGGSGSGSGTGSGDSGPYGTHASASGGGGGGGTSQYGGSGYGSGSGSGSGSSTYSQGGYSGYGESSSAGGTGGGGAGGQAGGAWNSNAQGSGSGTGSGSSYANRYWYGSNEAGASANGNGGGTGNSQNGGGGGGSGAGSGYGNAXTPSFYI

SEQ ID NO: 304392 - protein, 134 aa, Zea mays
  Clone ID: MRT4577_40677C.1.pep
TMSSCMTVSLCFIFTHPLFSEWIWYNKDNWHNQTTKTHGLRGKDLFKNIVFKETLRTRRYIVKSDGYKLSHILLDKSSIFQYDIRTIISEYDGDIQIKYPIEYLTSKDARVISHLSNIFLKISSRLHSFGSCSN

SEQ ID NO: 304393 - protein, 93 aa, Zea mays
  unsure (1)..(93): unsure at all Xaa locations
  Clone ID: MRT4577_40678C.1.pep
TTHGRPGCSGXPEVPPAESQGPAGASTGAGPISKAEGMAGHELRHSKTPSQEKGQGLVLGLLTGSXSSAQSGWEVAPGSVTLTQVGGWSVEAG

SEQ ID NO: 304394 - protein, 134 aa, Zea mays
  Clone ID: MRT4577_40679C.1.pep
RPGFPYLFLCCSERLVSLSPIPILCYLLPLLKEEKKLNHASNRKSAANPPPKKRMDKLDTGFSCPFCNHGNTAQCRIDMNNLIDEASCRICQENFSTTVNALTEPIDIYTEWIDECDRDDTGEGDHDAGACPIG

SEQ ID NO: 304395 - protein, 294 aa, Zea mays
  Clone ID: MRT4577_4067C.1.pep
MRGLLAVEAAGAASVPASVLHGAVDWWRDVNESPLWQDRIFHALAVLYGIVSAVALVQLIRIECRVPEYGWTTQKVFHFLNFLVNGVRSVVFVLRRNVQLVEPEIIQHVLLDMPGLAFFTTYALLVLFWAEIYYQARAMSTDGLRPTFYWINGVVYAIQIILWLVLWWKPVRVMVILPKMFFAGVSLFAALGFVLYGGRLFLMLQRFPVDSKGRRKKLQEVGYVTTICFSCFLIRCVMMCLNAFDKAADLDVLNHPILNFFYYLLVEIVPSALVLFILRKLPPKRGITQYHPIH

SEQ ID NO: 304396 - protein, 126 aa, Zea mays
  Clone ID: MRT4577_40680C.1.pep
YRHCIYLCGLHKLLVDDLVFSTLKASAAMGYLAPEYTTVGRFSEKSDVYAFGVIVLQVLTGKSKVTTTHAQLPDKDVDELVDGNLQGDNYSAAEAAQLAKIGSACTSENPDQRPTMAELLQELSTI

SEQ ID NO: 304397 - protein, 61 aa, Zea mays
  Clone ID: MRT4577_40681C.1.pep
NKQYHHSQDNNSIRRGLTYPGRRSKPLMSYHRTSRPAIILLEADSTPKVTDCGIAGEPSKA

SEQ ID NO: 304398 - protein, 206 aa, Zea mays
  unsure (1)..(206): unsure at all Xaa locations
  Clone ID: MRT4577_40682C.1.pep
EKVLVFDRVVGSPPCLVTGEYGWPAPLERVLKAPALRDSSMFGDLSPQKPLGVNPGNPLMEELPKRPEAPKNPKFVKGPVLLFFXTALLPSGFNLCDPHPFGGRIPPMVKMGLSIPQGEAPEAPPPMPPFEENPGENKMEEVAQFGFRVLIGGGGFFFPLLAPQLCPFFIVGIIVPRPPPQKKKKKKKKKKKKKKKKKKKKKTRER

SEQ ID NO: 304399 - protein, 63 aa, Zea mays
  Clone ID: MRT4577_40683C.1.pep
ALQRKPIDSFNEPRSPPCCMCIESPQVRALENGRMQDLFLGIRLLVSERCSPGVECDRVPYVK

SEQ ID NO: 304400 - protein, 44 aa, Zea mays
  Clone ID: MRT4577_40684C.1.pep
VGPKYSLGHLHFLSINHPTHLSPLVSTTTYATEGELSWLITAKP

SEQ ID NO: 304401 - protein, 213 aa, Zea mays
  unsure (1)..(213): unsure at all Xaa locations
  Clone ID: MRT4577_40685C.1.pep
RXXAIGYLEAGRXKFPGLGRILGFSRLGWAYEATICFGELKCQLERSSTTSLLWAWGRDTEHGLPDRRGRLPDSAHRGVLLGGARAANGARRPERFAAHLQESAPLLPPRGSRGRRRSSVPSCCSCPGQTSTTPTPSSPSRWRFVRWCTSRCQSSKSAESRWWGAPRSPGATRATGTQKAGRELSSFGGRYARYGLTHGHDTGLRQGLPRRRQ

SEQ ID NO: 304402 - protein, 173 aa, Zea mays
  unsure (1)..(173): unsure at all Xaa locations
  Clone ID: MRT4577_40686C.1.pep
LDDLVMLMNENTCAHVLDDASSYYEIVTINFLADEHKSAEHLVRNPLGHVPTSAPMTDLXYLLXSPTICKSLLENLPELMKQPNLKXGTMLDEXIEAELNRXTAAMNLILFHVLISTMVEMTTDTKVVYETPXMTNKVLNPFHAQLIRRKXLAEDFLKLTKLTHETCNLCRFA

SEQ ID NO: 304403 - protein, 77 aa, Zea mays
  Clone ID: MRT4577_40687C.1.pep
RIANSVDALAAKKLGEVPIKQVMDLVVSCGARIGSNEHFIGPKLFIKKEQREMFMPLDTDESRFLWLSRPYNEQSNA

SEQ ID NO: 304404 - protein, 34 aa, Zea mays
  Clone ID: MRT4577_40688C.1.pep
MQFDKANDQVPDPDVIKETATKTFHDLDDYLLKN

SEQ ID NO: 304405 - protein, 55 aa, Zea mays
  Clone ID: MRT4577_40689C.1.pep
TTTMYCKNHTPLLHNIEISIQCMFQVTEHNLLARFRAQPLRTFFCSITSKGGNEL

SEQ ID NO: 304406 - protein, 296 aa, Zea mays
  Clone ID: MRT4577_4068C.1.pep
MRGLLSVEAAGAASSSASASVLNGAVDWWRDVNESPLWQDRIFHALAVLYGIVSAVALVQLIRIECRVPEYGWTTQKVFHFLNFLVNGVRSAVFVLRRNVQLVEPEIIQHVLLDMPGLAFFTTYALLVLFWAEIYYQARAMSTDGLRPTFYWINSVVYAIQIILWWVLWWKPGRIMVILSKMFFAGVSLFAALGFVLYGGRLFMMLQRFPVESKGRRKKLQEVGYVTTICFSCFLIRCVMMCLNAFDKAADLDVLNHPILNFFYYLLVEIVPSALVLFILRKLPPKRGITQYHPIH

SEQ ID NO: 304407 - protein, 45 aa, Zea mays
  unsure (1)..(45): unsure at all Xaa locations
  Clone ID: MRT4577_40690C.1.pep
IFPQXSQFLCVSPKARPYKNRCTPPAPPESESLGKMHRNDRXRPA

SEQ ID NO: 304408 - protein, 125 aa, Zea mays
  Clone ID: MRT4577_40691C.1.pep
MQQPCVIVGSKYCSPNPVGLAIVRKVMKITDGNFVITSADGKLLFKVKDPLFSLHGKRILLDCSGAKVLTLRGKMMTMHDRWQVFRGGSTEEGALLYTVKRSSMIQLAPKLEVFLANNVQEKICD

SEQ ID NO: 304409 - protein, 86 aa, Zea mays
  Clone ID: MRT4577_40692C.1.pep
FFFFFFFFFFFFFFFFFFLGFFFFLGRSTQKIIFLFKDNGFGMLQGRHFGGHTYWSLKPELFLKTKKEHRGRGGFTKKSSLKIKPV

SEQ ID NO: 304410 - protein, 62 aa, Zea mays
  Clone ID: MRT4577_40693C.1.pep
KLSSPACCVLCVNREQPLSYHVCTPCNTLCAWLISLWQTSRPAWGCKLSINITASRVPEPSS

SEQ ID NO: 304411 - protein, 54 aa, Zea mays
  Clone ID: MRT4577_40694C.1.pep
MGEPQSQVGKASTDELEEKEEEIGDEANRVGSTNGIESGGERGEEIEERREALR

SEQ ID NO: 304412 - protein, 56 aa, Zea mays
  Clone ID: MRT4577_40695C.1.pep
QAYNIKFYCIFRCRSYYNTILNGHIESLQRSHYFPFATLNLAQILLFVCSSFPTGE

SEQ ID NO: 304413 - protein, 328 aa, Zea mays
  unsure (1)..(328): unsure at all Xaa locations
  Clone ID: MRT4577_40696C.1.pep
GKKQAARRRAAKADAEAAQARAEAGXDAAALPLTRSAICRLAGASFGVGVGXSSRRGVLARMSGSGSGSGGGGARGQSGPVPASARKLVQGLKEIVNRPDAEIYAALRECGMDPDEAVSRLLCQDTFQEVKSKRDKKKEVKETLDPRSRGASNSCRSSRGGMDRAGRSSSVQSGSSGTDYVTSRSSILGPAVPVKPTVPSLSTNKDVVFNGSVGAPQSSSGFQHNWFGVPGQMSMADIVKMGRPQVRSSGKPMAAADTSYAGQTPSLSSSVNQNSKQSASTTLPTTFDQGFPALPDPIPHTVNSSHGSAGNNHTHENDWFPQDEPQSG

SEQ ID NO: 304414 - protein, 402 aa, Zea mays
  Clone ID: MRT4577_40697C.1.pep
MGIHLDARNQDYYDNDALNLSANEDVETRIGTNMDNIDGPSVSQSDVPRQGAIDVPGLQYDMPSVPSHAYSSTTQPSKMEDPQGNTQAQPLSHFSGLLQANTLPNYLLGSNLTPIREFDFSQLLQTQSATKYNPSAAPNNLPAISMQETLKPGGFPNTQSTQHVPNTSIPSGLPLPQQLPVYSQPTLPLGPFTSLVGYPYLPQNYYLPSAAFQQAYSSNGPFHQSGAPAVPGAGMKYSMPQYKSSPPASSLPQPSSLSGYGGFGNANNIPGNFSLNQGAPSAPTTLGFDEALGTQFKDPNHYAALQQSDNSAMWLHGGAGSRTVSAVPPGNFYGLQGQSQQGGFRQAHQPSQYGGLGYPSFYQSQSQASLPQEHPQNLTEGSLNNSQGVPSQPSHHLWQHSY

SEQ ID NO: 304415 - protein, 95 aa, Zea mays
  unsure (1)..(95): unsure at all Xaa locations
  Clone ID: MRT4577_40698C.1.pep
LSAGILLLKNNLTVTSWNKETNITEQLPLQQLGDLREPTDSAPEISIXXEPNPSSIEYYDRVPVKHYILEERLSYLRGLSYLALHSSAFLDHDFA

SEQ ID NO: 304416 - protein, 842 aa, Zea mays
  Clone ID: MRT4577_40699C.1.pep
MSSGGGGGGARGPSGPVPASARKLVQGLKEIVNRPDAEIYAALRECNMDPDEAVSRLLSQDTFQEVKSKRDRKKEVKETPEPRSRGASNSSRSSRGGVDRAGRGNSVQSGSSGTDYMASRSSILGPAVAATNAMQKPTVPSLSTNKDVVPNGSVGAQQSSSGFQHNWFGVPGQMSMADIVKMGRPQVRSSGKPMAAADTSYAGQTPSLSSSVNQNSKQSASTTLPTTFDQGFPALPDPIPHTVNSSHGSAGNNHTHENDWFPQDEPQSGVQSTGIEASGDQSLSVASLDQSMLVAGTAYSQENSHAEENNSTAVKATVSSERHLEIVEEDNHYNDGLLQNSSAYQAQVHSYVDNEVGVSNVDAESASMNFQHLSLQNEDIAATKSAEDNPAVILPDHLQAANADCAHLSFGSFESGAFSGLLSSKVPKGSLEDDEVLIPDESRSVNRIDVRNQDYYDDDALNSSENVDVETRIGNMDNIDGPSVSESDALRQGAIDVPGLQYDLPSVSSHAYSNTTQPSTMEEPQGNTQAQPLSHFSGLLQANTLPNNLLGSNLTPLREFDFSQFLQTQSATKYNPSVAPNNLPPISMQETSKQGGFPNTQSTQHVPSTSISSGLPLPQQLPVYSQPTLPLGPFTSLVGYPYLPQNYYLPSAPFQQAYSSNGPFHQSAAPAVPGAGMKYPMPQYKSSPPASTLPQPSSLSGYGGFGSANNIPGNFSQNQGAPAAPTTLGFDEALGTQFKHPNHYAALQQSDNSTMWLHGGAGSRTISAVPPGNFYGFQGQSQHGGFRQAHQPSQYGGLGYPSFYQSQTSLPQEHPQNPTEGSLNNPQGVPSQPSHQLWQHIY

SEQ ID NO: 304417 - protein, 115 aa, Zea mays
  Clone ID: MRT4577_4069C.1.pep
PHREHLMRCEDGGVLVDGPAPSLQQRDVDLDDVDPPPHGGCDGDDGAVERPVEAGWSRARWKERGNQGIFRLPWIRLATKVREVVPSVGSTHAASDHAQSTVVAGHGLGFLGDRG

SEQ ID NO: 304418 - protein, 117 aa, Zea mays
  Clone ID: MRT4577_406C.1.pep
RLVEPGQFAWGACTRRSTALEPLHRFWLGRHGRARKGPSCGLPSPLRTKIGVHVAAPQLAAFCIGHVQFLRAMKPGQRVHWSARAARSAAASLRQSLRASLPRSPHTTRPQGLAAPV

SEQ ID NO: 304419 - protein, 75 aa, Zea mays
  Clone ID: MRT4577_40700C.1.pep
SLPCNHSDQGAVVFVSSRRPLHRRAPSCMVASGTARRTRASSGPLYAQCSPVPCRYRYPAPLSAHVAASDGRSVG

SEQ ID NO: 304420 - protein, 70 aa, Zea mays
  unsure (1)..(70): unsure at all Xaa locations
  Clone ID: MRT4577_40701C.1.pep
LYYQHXXNHESFHLFMLEXXIKLXSSIFPTINKNNSTSCKQNYFLSSILTKITMNSIIISSLNTSIIFST

SEQ ID NO: 304421 - protein, 270 aa, Zea mays
  Clone ID: MRT4577_40702C.1.pep
MQGDPGYGYGSYGYGYGYGYGAGAAGYDYDMAGYGSGGAAYYSATDRYPAATAAAYEDPLVAGQRQHDVPAPLTGLEFQASDTCPKNYVIFDHTYDRSRVMFHPSLANNFASSPAAGGGGGYDYDRQCYGGYDQNYAGKSAYYVCAAAAADDDGGGASIRQKEDTDEIDALMSTEDGEDDDDDDVLSTGRTPGCRAAGSPDSTCSSGYAAAGAGGGEKKKERMKKMVRTLKGIIPGVDRMDTPAVLDEAVRYLKSLKVEVKKLGARGSSS

SEQ ID NO: 304422 - protein, 195 aa, Zea mays
  Clone ID: MRT4577_40703C.1.pep
SRVAAPDAQPQAAAAAALYAGAEESAFRPKLPRHRHAHPAAAPGLLLRQVGVGRGRDVPHQRRPRGGPTRTPRRASCDARPRRDSTDSAVAQGNRDMATAPELQSRSSSPSSARTSSCVVTTVANPVCTSQEIHKKFIVSGAKVYRTHSAYMDKIRTRHLTEDLYFPSKVAVGTTMHSSPSSTSTETPATPRKAA

SEQ ID NO: 304423 - protein, 171 aa, Zea mays
  unsure (1)..(171): unsure at all Xaa locations
  Clone ID: MRT4577_40704C.1.pep
AIENWAPFFPXFKRGXSFPKGPQPKGNVLFPPFPGLFQRGKIVFALETGGYFLGPLGEPAKKWQKKLAPLFWPAEENXANRXVAFVPPREXLAGPSQFALNARAPGFLTDMARSXLRPPPPHFEGSGPRXGVKIESYIPSNDKMRQKKKKKKKKKKKKTQKKKFLKNPPPP

SEQ ID NO: 304424 - protein, 130 aa, Zea mays
  unsure (1)..(130): unsure at all Xaa locations
  Clone ID: MRT4577_40705C.1.pep
FPQYTTDSXLFPTFIAKQIVPANNYTIRTPISDPNSNPPVPSNQCFRISPLDRHHFTRTTMYLCSSPTQHGNYCIMNLEPPPPRKFINITRKTEHQEIKKTPRMKKKKKTKQTTKKKKSTTPHKKKKKAC

SEQ ID NO: 304425 - protein, 41 aa, Zea mays
  Clone ID: MRT4577_40706C.1.pep
ILSTVHLRSHIRSPTSQGTPATSTTVSDPDLASHGQDQDRN

SEQ ID NO: 304426 - protein, 70 aa, Zea mays
  Clone ID: MRT4577_40707C.1.pep
EYLAHYSCLFLGRIQTNQYITTMVLDSLSSPHRRSQNTFFVSSAKKPQSSRDDSWSALGERHRFLLTTLP

SEQ ID NO: 304427 - protein, 104 aa, Zea mays
  unsure (1)..(104): unsure at all Xaa locations
  Clone ID: MRT4577_40708C.1.pep
GGQRPAGEGPKGNPGGEPPPGAPRLGKGXAVRTGEPRPRRGFGGPGGXPPGKNPRSPXSGRGTFETPPYPGAPPAPGAPETPTDTPXGARGTRGGPGGPCPWGP

SEQ ID NO: 304428 - protein, 107 aa, Zea mays
  Clone ID: MRT4577_40709C.1.pep
LESGRPVVLFFCRVTNFHTGKKERPKEQGGPQKEGRERPPRRRDQPRRVGQAREQEGTKNRRKARQNRTSYSRGRQGANSHRQRPPHQWHRPHTTLSRSQEQPAAET

SEQ ID NO: 304429 - protein, 61 aa, Zea mays
  Clone ID: MRT4577_4070C.1.pep
GRRNPSIARSRASSERNRLRWPSLTWQQTATLGSPVVDVGLLHERRVPVILYSLSSLCMRL

SEQ ID NO: 304430 - protein, 137 aa, Zea mays
  unsure (1)..(137): unsure at all Xaa locations
  Clone ID: MRT4577_40710C.1.pep
GRVGGRVGELLSPMPPPPEVEEKKEDEAEKKKDDEKKDGGEKNEEKKDGGDGDGDKKDEAGDKDKDPAASXTCTTRGSRSLEGTTSRRPTRXPGYPYAYQPAYPPPFYAPPHHHLHQQQPMAPQIFSDENPNACSVM

SEQ ID NO: 304431 - protein, 380 aa, Zea mays
  unsure (1)..(380): unsure at all Xaa locations
  Clone ID: MRT4577_40711C.1.pep
MGEEAAKKEEVEKPKEAAAAEEKKKDDKPKEVGGGGEKPKDKEEDEKKKEDAPPPPPXPEEVEMRVYMHCEGCARKVKKILRRFDGVEDVIADSKAHKVLVKGKKAPADPMKVVERVQKKTGRKVELLSPMPPPPEVEEKKEDEAEKKKDDEKKAEPEPPKPEEKKEPPVIAVVLKVHMHCEACAEGIKKRILKMKGVQSVEPDLKASEVTVKGVFEESKLAEYVYKRTGKHAAVVKSEPAPAPEGGGGDKAAKEEEKKDAGGAGSEEKKDGKEEEEKKDGGEKNEEKKDGGDGDGDKKDEAGDKDKDPAASLYMHYPRFPFAGGYYQPPAYPPPPGYPYAYQPAYPPPFYAPPHHHLHQQQPMAPQIFSDENPNACSVM

SEQ ID NO: 304432 - protein, 87 aa, Zea mays
  Clone ID: MRT4577_40712C.1.pep
NSHKLICISMLFPSATMCHPWLYWGKVSLSKSLEAGDQSVKLKSDIANAQTSMTLQWLIDQRRFLAGKKIKHLMFENLNRNPKKIAI

SEQ ID NO: 304433 - protein, 167 aa, Zea mays
  Clone ID: MRT4577_40713C.1.pep
MAPAAAEAGPGDDGLRKLEYLSLVSKVCSELETHIGVGDKVLAEFITELGRDSTTVPEFDAKLKEKGADFPDYFVRTLLTIIHAILQPTASNPSAATVAEGPAGAESAKFPGLARPDDPDHARNLRLELERDADAAPPAPMRDDRDRRWDGRGRDRDYGRGGREHDQ

SEQ ID NO: 304434 - protein, 228 aa, Zea mays
  Clone ID: MRT4577_40714C.1.pep
MAASAYFLLVAFLALVTSQAIASDPSPLQDFCVADKYSPVKVNGFVCKDPMAVNADDFFKAAKLDQPRDTKNKVGSNVTLINAMQLPGLNTLGISLARIDYAPLGQNPPHTHPRATEILTVLEGKLYVGFVTSNQANSNNKLFTKVLNKGDVFVFPQGLIHFQFNPVHDKPAVAIAALSSQNPGVITIANAVFGSKPPISDDVLAKAFQVQKGTIDWLQAQFWENNHY

SEQ ID NO: 304435 - protein, 171 aa, Zea mays
  Clone ID: MRT4577_40715C.1.pep
GRPPSEKDIRVNYLFTRIVKLIVVELYCTHTAACIFYYLATTLPESMEGHTWIGSLQLGDYRFTHFREIDLAKRYITSLYFAIVTMATVGYGDIHAVNIREMIFIMIYVSFDMILGAYLIGNMTALIVKGSRTERFRDKMKEVIRYMNRNKLGKEIREQIKGHLRLQYESS

SEQ ID NO: 304436 - protein, 62 aa, Zea mays
  Clone ID: MRT4577_40716C.1.pep
ATMTTHPTTTHHSTLTVEKPMGTGVLVYNLYNTIINFYSDNCIVDSLGFTRTNPALSVNHAL

SEQ ID NO: 304437 - protein, 89 aa, Zea mays
  Clone ID: MRT4577_40717C.1.pep
HASAPLLNKPAISVFDTRQRQRLRDVLSEPSSQPLQTQSHLNPHLPAPLLLHSAHQSNSRQRPRRSSPVLPLLLKLFFALLATRSPRHI

SEQ ID NO: 304438 - protein, 62 aa, Zea mays
  unsure (1)..(62): unsure at all Xaa locations
  Clone ID: MRT4577_40718C.1.pep
SRRRLHRLHRLLPRLLCLLPSPGRCRGSITSIFFFFYLXXNWWGGGGYNCXXSXWGGRAKNS

SEQ ID NO: 304439 - protein, 92 aa, Zea mays
  Clone ID: MRT4577_40719C.1.pep
QNQLQKMEEVWVISRVLKISQPSYYLPVSYLIRWEGFSSQYDSWHTEGELEEMEVENLHLLYVRPKKPAKPPKEGPPKSKGTTTSTTVPSMP

SEQ ID NO: 304440 - protein, 58 aa, Zea mays
  Clone ID: MRT4577_4071C.1.pep
PGLFFRRALYGGGDITYPSLRRGGVPCSRLFSCYYNCRPGGQANPYHRGCSPLTLCRG

SEQ ID NO: 304441 - protein, 154 aa, Zea mays
  Clone ID: MRT4577_40720C.1.pep
PRSSSRRPHELFSIPSPSSSSAGRPPASRHGARSSSLPQPSVPPWSLALAATLLYWPTSSPAMERPVTRPAPWRRRLAGVSPCSSSALPSCSSACSRALCSDFTWPHPLVIEVAESLSPARVPISLCSISLYFSNNSGCAVCRVELGAGSQSFS

SEQ ID NO: 304442 - protein, 74 aa, Zea mays
  Clone ID: MRT4577_40721C.1.pep
AHHCLRMSRLYFFYRLLFGEWSRAQQWTPSTAHLSIVSSILRLQVTQVRLLHRPTRGKVVKGKYWESTSHVHTV

SEQ ID NO: 304443 - protein, 70 aa, Zea mays
  unsure (1)..(70): unsure at all Xaa locations
  Clone ID: MRT4577_40722C.1.pep
HAGAPMSGCDGLVGTLAMVLXAAVGTAATDAAEADQIANLPEQPAAILFIHSDYGNADPASGRCLFYWLI

SEQ ID NO: 304444 - protein, 70 aa, Zea mays
  Clone ID: MRT4577_40723C.1.pep
PHCLPPEGAAPQMGGSGPGLRPLQGDVREFLRVQTKVLSLAFFLKKKSHKQKAHLFRFVEGGKQANKHFS

SEQ ID NO: 304445 - protein, 61 aa, Zea mays
  Clone ID: MRT4577_40724C.1.pep
FLFLIFFIIKNTKKDVLFEGTLKASPLSIYHTNKHHQNFNIEHHPCSLAIKMITEYTKLFY

SEQ ID NO: 304446 - protein, 48 aa, Zea mays
  Clone ID: MRT4577_40725C.1.pep
FWFFLIFFRLETQGDYSQYISPYSCRKTNTAQRDGTALNNSGEKQHCY

SEQ ID NO: 304447 - protein, 62 aa, Zea mays
  Clone ID: MRT4577_40726C.1.pep
NQNHLLLLLSDRKIHIGHRPTLRYNKNRNICSNSCVKKMEPQEPTHKLVLLHLPRHLISQPS

SEQ ID NO: 304448 - protein, 60 aa, Zea mays
  Clone ID: MRT4577_40727C.1.pep
LYVAMPAVFLGMAIVKTARAINLWCLIKKLVEAYMIEKICFLIKKLPFYFIYVFFYFYLY

SEQ ID NO: 304449 - protein, 98 aa, Zea mays
  unsure (1)..(98): unsure at all Xaa locations
  Clone ID: MRT4577_40728C.1.pep
MATMASTAFAAVKFFPAHLDSSPRIAPRRAAPTASLSFSPLSASPSSLLRLRTPCPSGPGGRLPPPPPPPPRSYGGGGGSGGDAANSGXGRRGGGILG

SEQ ID NO: 304450 - protein, 48 aa, Zea mays
  Clone ID: MRT4577_40729C.1.pep
PEWITSVFSCQRASRRLLPPCRIRSPPAKVTFVFSKIELAEQRSARTE

SEQ ID NO: 304451 - protein, 59 aa, Zea mays
  Clone ID: MRT4577_4072C.1.pep
EGSSCRRDLPPLHSLVVVDWLVVPGVEVSTQCAGWTATVACFRRGEAEDGRDGREGSRT

SEQ ID NO: 304452 - protein, 48 aa, Zea mays
  Clone ID: MRT4577_40730C.1.pep
ICTMSAGSGGVEPVVRRGLRVKEIRSCLPPTQLLLPLACRLKRIRTSG

SEQ ID NO: 304453 - protein, 53 aa, Zea mays
  Clone ID: MRT4577_40731C.1.pep
NSQQGRVLVKKKGVLKEMLKHFSEKGRQTKRGGRDDGRRRAGRTGERSSLAAR

SEQ ID NO: 304454 - protein, 77 aa, Zea mays
  Clone ID: MRT4577_40732C.1.pep
NIYSNIHTYMLSPRHAVGIHREEVVIAQRHAMNSGRVTGSNLQGGRRTVTNLPGGNENPNESLQIQTTRIYIFVKIN

SEQ ID NO: 304455 - protein, 152 aa, Zea mays
  Clone ID: MRT4577_40733C.1.pep
MARYRSDLQGELSSLDDSMEDPNGYLRFDVGGIEELENYFIFNDRHRGMRMDIDGMSYEELLALGERIGTVNTGLSDDALSACLNRRLYMPTASGSHEDCERKCSVCQEEYLAGEEVGEMACKHYYHLSCIDHWLRQKNWCPICKSVALKIN

SEQ ID NO: 304456 - protein, 84 aa, Zea mays
  unsure (1)..(84): unsure at all Xaa locations
  Clone ID: MRT4577_40734C.1.pep
EPTCKACRSTLRTRALVLDVQNEPLTLRICLIRFGSACFFAGSGENVQVDGLLREHLNRRGGGVAQGRGERGPXPWRVGARNPR

SEQ ID NO: 304457 - protein, 135 aa, Zea mays
  Clone ID: MRT4577_40735C.1.pep
RHQTCITKSLSGGQLQEDIRICTCLLYKASYYSFYNKQQLEDPSMYICRFCFSARQVLGTQGNCWSLVRANVTELSASMYNSCTGLFLGFYVLRGLQSNSWYPLVALHISVGLHWFGSLLFLSSDLRRGSLVIAQ

SEQ ID NO: 304458 - protein, 66 aa, Zea mays
  Clone ID: MRT4577_40736C.1.pep
FRHADNASSERPVFTVPIRSPKASNSFKAECHKLYNYTYKSMTNKNCLLTGERERERERERERRMK

SEQ ID NO: 304459 - protein, 692 aa, Zea mays
  Clone ID: MRT4577_40737C.1.pep
MQELAVSQLGCCGEMVRAGENRHFFPLTSLQIGDLQSYLAELTIFLCPHTKKFLILLDNRPWLLDQDTKPAHLWQLMVTKSRFSPFANSRARRRRDETDEKLVYSTSSVSAPHLQNKSSRWYSLIDDAMREKKLQVNKLKDARILNRELHQTLYGFIIFEVDWADVRGINYLNELQTDTSMVVESKIMKRWEFDSVKQASTLITSWFSGNPFECQLLQDYLTNISSNGDIFYDAQNDFLTPEWDSENLPSDSDDSSHVQIIRESSGFTDSSYTTPPCSGPYKRRKITKSDDGSSSTEESYTEIVASPKHSSSSCSSCDSDNENAKPLLEPSTYKDVLICFRFDDHDLPFGLKEVILSDVRLLTLLEYGLPSWVIFLQSYPVFCKIYRPWMCPLARALYVLMSLITVLIGFYDLYKNVPMLKATASRLFGPLFDWIETWEMISRLKYLGTMLFLHNFQQAFTWSLKIVGAAKSALSVLTKPIAGPILEVFELTMPIWNLCAETVGYLSSVVMLSVEVSWSVVIDTVEMIVWPFWFVFSTMVSIVNSILYPIIWLLGEILAAPFRLVIGLSSFVVDLFVDIINFLRGSWSTLSALYQVGSVPRSPVLTSDNNIWASLWKDLLYQIFRALRSILYGFVAFFSTCNRHRLSIYNHIQVFLRRISHVPAGARFTAYLDGTRKYSSQNHHKRRKAKTR

SEQ ID NO: 304460 - protein, 113 aa, Zea mays
  Clone ID: MRT4577_40738C.1.pep
PLQPMARAAVFGLGARAVFFEEKDGSSLGEEEAPDRSSSHVLIHVRYRDNFLFSQAFPSNPAIFLPSNRPGQRPDQPGESRGEMGKGAIFFFFFFFFFFFFFFFFFFFFFFFF

SEQ ID NO: 304461 - protein, 108 aa, Zea mays
  unsure (1)..(108): unsure at all Xaa locations
  Clone ID: MRT4577_40739C.1.pep
RGNHTGDXPGFTITNTVIGGGDYCRGMGARTIKGNITGETCGPGHGSSIGSLRRDKDEKDATDNNVKDGTLKKTTIGGRIKAYEDAAYELTGGKIHYEKIKKEDSANP

SEQ ID NO: 304462 - protein, 116 aa, Zea mays
  unsure (1)..(116): unsure at all Xaa locations
  Clone ID: MRT4577_4073C.1.pep
XXXXACPFXLXXCXXXXXXXLSCLXXPPFPVXVXXVXXLPXXLRSPXVXXXXGXPLGXVAPPPPFGWCGXXXKKKKXPPPPVAXXXXSXXLXSLXGLVVXXSLVWVPRXXXXXLGG

SEQ ID NO: 304463 - protein, 51 aa, Zea mays
  Clone ID: MRT4577_40740C.1.pep
NSARGQVMLGVLVNSLAGFLFLRCFSSSLFKNARNRLHRRRMILMLLRFCQ

SEQ ID NO: 304464 - protein, 165 aa, Zea mays
  Clone ID: MRT4577_40741C.1.pep
MSASGSGAPNAPSGSSKKAFPSVDLEGNDLPPSPAPSSPHGGRRYNIATELVFTEGNDQYNASSVPIYQSATFKQTSGGGGGEYDYTRSGNPTRTHLERHLAKIMSAQRALVVSSGMAALDVITRLLRPGDEVVAGDDIYGGTNRLLKYLSDNGGIKVHHVDTTT

SEQ ID NO: 304465 - protein, 169 aa, Zea mays
  Clone ID: MRT4577_40742C.1.pep
DSRAVIMLNTDHHNVRVKKKMTEEDFIRNNRRINGGNDLPREFLSELYYSICRNEIRTIPEQGAGCSEMSFSRWVDLVWRSKRTSLYIACDSYPFLDHDMFSLMAGPTVAAVSVVFDNVEHEEVLTGCIDGFLSVAKLAAFYHLDDVLNDLVVALSKFTTLLNTSYIDD

SEQ ID NO: 304466 - protein, 52 aa, Zea mays
  Clone ID: MRT4577_40743C.1.pep
LNNLPIIALTTPFNHLHLGGGDSLIHGFFIFQGGFLMVSHDYLVITGSVDYL

SEQ ID NO: 304467 - protein, 64 aa, Zea mays
  Clone ID: MRT4577_40744C.1.pep
RFKKKKKKKKKKKKKKKKKKKKKKKKKKKKKKKKKKKKKKKKKIKKKIKKNKKKILSFFLGGPF

SEQ ID NO: 304468 - protein, 49 aa, Zea mays
  Clone ID: MRT4577_40745C.1.pep
PIEGGIFPMKLFDCSVKNCRFVIFPIHSSMVPVRLLFCSDNLYKPLSFP

SEQ ID NO: 304469 - protein, 124 aa, Zea mays
  unsure (1)..(124): unsure at all Xaa locations
  Clone ID: MRT4577_40746C.1.pep
GQDQDKEGXPPDQQRXXGGGGQXEDGRTXADXNXQKESTXHXGXRPRGGXQXXXKTXTGKXXTXEGEXXDTXDNGKAKXQDKEGXXPDQQRXXXAGKQXEDGRTXADXNXQKESTXHXGXXXRG

SEQ ID NO: 304470 - protein, 123 aa, Zea mays
  Clone ID: MRT4577_40747C.1.pep
SHHTIALQKKIKTADLACIYINSEVVEDCDLGAQTAKGLVVKYYRGSIGNSSPQNHHRSYHQIDLCMHKTKENILRGLNYQIKIDNTSYKEKRATIVRSARAAKDATTKHRRRRRMVGRKSEP

SEQ ID NO: 304471 - protein, 90 aa, Zea mays
  Clone ID: MRT4577_40748C.1.pep
PQPERTADGYELRSRGPASRGFQVLDNDPLEKANASIRSRTLMNKLVLPLLLVELVITNPNCQKIWCCYICINLYLSLCFCKLMHVPPHV

SEQ ID NO: 304472 - protein, 56 aa, Zea mays
  Clone ID: MRT4577_40749C.1.pep
VLDGAILCAQIMYSGSHSRFLSPGGSKSCGCHLSLYICNGIGSMPHDTCSSGACKY

SEQ ID NO: 304473 - protein, 52 aa, Zea mays
  Clone ID: MRT4577_4074C.1.pep
MGKPVPSLLVLLLSRVTALVPTITGMGDHVSGRVRGYVCGQVQSGFSNHYAK

SEQ ID NO: 304474 - protein, 66 aa, Zea mays
  Clone ID: MRT4577_40750C.1.pep
LLPFPHPSYPHGLVIISQFCRRSNLALFVDEDNETQRDICPNLPSLQVVVLEPGVLWLKVFPLLSW

SEQ ID NO: 304475 - protein, 58 aa, Zea mays
  unsure (1)..(58): unsure at all Xaa locations
  Clone ID: MRT4577_40751C.1.pep
XXXXRYECGXXSPQDNXRIRXMQCTPRWXCXSPPXSSATVXASXLVAPSXDLXXVXXS

SEQ ID NO: 304476 - protein, 151 aa, Zea mays
  unsure (1)..(151): unsure at all Xaa locations
  Clone ID: MRT4577_40752C.1.pep
MVRQQQAPMPPPPLPPRDKHREFMSHXSTFASSPVPLQADDWLKSVKKMLNIAQCSDRXKVLYASGHLTGPAADWWDSYTAAYDAANTITWAEFTTQFKNYRIPAGLMKIKKEFLSLKQGNMSVSEYRDKFIXLSRYDXDEVADDERKQEH

SEQ ID NO: 304477 - protein, 222 aa, Zea mays
  Clone ID: MRT4577_40753C.1.pep
MSFGKIYSYSGNPRTTSLLAVAKENGLDIEFVDTEPAKGVSTEYLKLNKLGKVPTFEGADGFVLSETIAIAVYLASQNEKTSLLGKTKQDYATILRWMSFANTEVLTPLGGWFRPIVGRDPYNKKNVDDSQKAALKAVHVLEEHLLTHTYLVGERLTLADIFAASIVARGFQYFFDKKWRSENPNVTRWYETVYNTPSYSAVAKLEFIEEGIKNVAPKEQAP

SEQ ID NO: 304478 - protein, 95 aa, Zea mays
  Clone ID: MRT4577_40754C.1.pep
PKKTRPAKFWNVFSPQPQKEQRGGMLTGFFFSLPGGPPLQIWGKKRVPPGGSNQRGGQTPSKPGTEKGGWLDLGDHLLLAITGRACFSGERAWPG

SEQ ID NO: 304479 - protein, 49 aa, Zea mays
  Clone ID: MRT4577_40755C.1.pep
LLLTIEAGAHLSRAQEMGMEREGYAKGVWGAGPPCHILLVLPTSTKTRR

SEQ ID NO: 304480 - protein, 154 aa, Zea mays
  Clone ID: MRT4577_40756C.1.pep
HWVPRGRPGSSSTSSTLSARQWQELCRLLSASPPESGPPLEKEKRRLLFRPRAFCCAHERARRAFLPRPRASCCCNRHGRAGSHRTTSHPASFCLPPCQPALSCCQPLPPAARDQSTRGGNISVSESVFPLAPGAACMHADCREWCGVAGWPRY

SEQ ID NO: 304481 - protein, 216 aa, Zea mays
  Clone ID: MRT4577_40757C.1.pep
MEVGQKEYDYVFKVVVIGDSGVGKSQLLMGFARNHNLESKSTIGVEFATRSIRFEDKVVKAQIWDTAGQERYRAITSAYYRGAVGALLVYDVTRHVTFENVERWLKELRDHTDSNIVIMLVGNKADLRHLRAVATEDAKAFAEMESTFFMGNIRYGETSALKEAFKNVLTDIYRIASQKNLSANAAQTHLQGQGKVVQNDDVQEPQGKSKRSCCSN

SEQ ID NO: 304482 - protein, 358 aa, Zea mays
  unsure (1)..(358): unsure at all Xaa locations
  Clone ID: MRT4577_40758C.1.pep
MPNEVTFDMLIIFFCRVGSYGCNPDTISYTTVLKGWCHAERWNDANELLXEMACNNYYPPNEVTFNTFICILCQXGLIEQAIMVTEKMSEHGYIVGVVTYNALVNGFCEQGHIDSALELFRSMLCKPNTITXTTLLTGLCNAKXLDAAADLVAEMLRRYYPPSDFQYDVLASFFCQKGFLEQAFELVEQMMEHGRTPXNLIRYNTSLDGITKGCSSEDTLELLHGLVIKGVSPDVXTFSSIIGILSKEDRVEEVIQMXLSKEDRVEEVIQMFHVVQDIGMRHKVVVYNRILHGLYRRCEIDNAINFFXYMVFNGCMPNESTYIILIEGLDHEGLLKEAQDLLSVLCSRGVVSKDLIEE

SEQ ID NO: 304483 - protein, 90 aa, Zea mays
  Clone ID: MRT4577_40759C.1.pep
YDSILKYRNGATLFYLTLQLNAPIRLMLISSHRMLIFFSVPHSEVDKFAMLFFLIFRATRQLGPMHVAQVFPTPLDHHSPQVHHPIVFCP

SEQ ID NO: 304484 - protein, 59 aa, Zea mays
  Clone ID: MRT4577_4075C.1.pep
LVKDQPRVGVAKHISTAPTRRCLFCVQLNQAPNRRLQDGTGKERRRGRAEQSIENQATA

SEQ ID NO: 304485 - protein, 69 aa, Zea mays
  Clone ID: MRT4577_40760C.1.pep
VQSSALPLLRLTAWVPSSLRLRTWVFKFPGAVGCFPISSSAPTFLTLSSTGPRGRRTYGSCVGRRGLPI

SEQ ID NO: 304486 - protein, 84 aa, Zea mays
  Clone ID: MRT4577_40761C.1.pep
FRPDSRCPAVTLRFTPIEIGLFGCMNPLKLRAYSGTACSMYYPTLYAWHLCPLVIIIFSQQTPIYPPRLSFPTFCFNTSMDGAV

SEQ ID NO: 304487 - protein, 46 aa, Zea mays
  Clone ID: MRT4577_40762C.1.pep
LNEKSENKLKKNCSCAIIPTWLKYLVLVIPLVPLGVLHGYLHCILV

SEQ ID NO: 304488 - protein, 255 aa, Zea mays
  Clone ID: MRT4577_40763C.1.pep
MVWRPARLLAAAPGVAARSRRDPLAFGAARPPAWRARGLPAHGHGAQSAPGAVWLAASLPALPAQLARLRHRAPYPSPRLPSPPFDRAASRREIRRAAIVVAAQQRLRRSSRRQDDDEEDGYDYAYGNGKWYSFRLERVAFGAIYAQELKSRLVRGGRILDGITGKEGRVRHRWFGEEASGGWDLVISETRGEKQADQGKKTTDQTKDGGKKSFEVPSVREKVKETRNPKPGVKKKTCKVKVDRVKSYGASRITT

SEQ ID NO: 304489 - protein, 69 aa, Zea mays
  Clone ID: MRT4577_40764C.1.pep
PRIDPRVARQRRELGPHARLVYQRHSAVQEQRRPAQPAAQHLAGGPLLHGERHDVDHVRVWHASHPRSS

SEQ ID NO: 304490 - protein, 70 aa, Zea mays
  Clone ID: MRT4577_40765C.1.pep
QKPKKVNRDCEKQTHQAFKGHGRCGNQGPKTKASCFQGFLEKSSLAKPEDLKWDALGFELNPPCILCCRP

SEQ ID NO: 304491 - protein, 76 aa, Zea mays
  Clone ID: MRT4577_40766C.1.pep
GPTVGVFICTFTLHDIIVDTDLGVRNIRPVAGVGLWFVGDVAIHEPRLLPRGQAAENSSRLYLRKGTGIPAGLEGP

SEQ ID NO: 304492 - protein, 143 aa, Zea mays
  Clone ID: MRT4577_40767C.1.pep
TRAGWDKLHLLQMPSGTNLGGNRNNWGGKFTTPPVRGYQIFLEKKRATTGLKLLLGINQETRGPSFWSRGPRRNPEKLGGGQNAGTGFPFPKNTRSARPPISLVGRGPLGKKKLGGGPRKGNKTRTGVQVTNIGGPGTGNPGA

SEQ ID NO: 304493 - protein, 75 aa, Zea mays
  Clone ID: MRT4577_40768C.1.pep
KTTIISPVLISAAAKLGISTRTRSISVRPQPLWRSWRPGASDAHTALRARCGVRHGVRQPGGVHQPRAVHPPPPP

SEQ ID NO: 304494 - protein, 144 aa, Zea mays
  Clone ID: MRT4577_40769C.1.pep
MSPISRPADFTAAVMGVGPAVAIPAAVKSAGLEIGDIDLFELNEAFASQFVYCCNKLGLDRSKVNVNGGAIALGHPLGATGARCVATLLNEMKRRGRDCRFGVVTMCIGSGMGAAAVFERGDAVDGLSNVRDIQAHNFLSKDAK

SEQ ID NO: 304495 - protein, 72 aa, Zea mays
  unsure (1)..(72): unsure at all Xaa locations
  Clone ID: MRT4577_4076C.1.pep
RRLVVRQGPARXRLTTXQAPPSRELGPGPSLRTPLQTTIRPARPPDSQAGLLPVRXPFLGASSXVSSXPPAR

SEQ ID NO: 304496 - protein, 62 aa, Zea mays
  Clone ID: MRT4577_40770C.1.pep
PKKTTHGIPKLPCVRIDRQKEQELNQHKTQQAVSGEGMGDHCCTDTGPDHHYQPTHTLFRPR

SEQ ID NO: 304497 - protein, 84 aa, Zea mays
  Clone ID: MRT4577_40771C.1.pep
GRCSTLQRRPGSLVRRLHLNNMPLMCTCQRFHKVPLWTPDIYSLGCCTSTRNLLPARACLWPSWTDFPFSTVVERLYLLELKEW

SEQ ID NO: 304498 - protein, 158 aa, Zea mays
  unsure (1)..(158): unsure at all Xaa locations
  Clone ID: MRT4577_40772C.1.pep
AVMGVGPAVAIPAAVKSAGLEIGDIDLFELNEXVSIALIYTLFSHLFIHNIXTESSMXAFASQFVYCCNKLGLDRSKXNVNGGAIALGHPLGATGARCVATLLNEMKRRGRDCRFGVVTMCIGSGMGAAAVFERGDAVDGLSNVRDIQAHNFLSKDAK

SEQ ID NO: 304499 - protein, 99 aa, Zea mays
  unsure (1)..(99): unsure at all Xaa locations
  Clone ID: MRT4577_40773C.1.pep
HLVFLVCVXDFWPPPLYRRYVVEIRMWFRVWSRFTICVAFGLVVEFFFWRGVVGLDPVVGYGSAVVRVTYMTLVVLALLLFWCVRTEKIHMLQNLPDGL

SEQ ID NO: 304500 - protein, 126 aa, Zea mays
  unsure (1)..(126): unsure at all Xaa locations
  Clone ID: MRT4577_40774C.1.pep
EDELAGKGDGPAIRLDLGTTYSCAGVCQHHRVQIIGSDQGNRAAPSSVALPDSERLIVDAATNQVAVNPXVNTXFVARRVMGRRSSAAPVQSDLKLWPFXGVSAPGEKPMIAGQSQGEERQPAAAE

SEQ ID NO: 304501 - protein, 284 aa, Zea mays
  unsure (1)..(284): unsure at all Xaa locations
  Clone ID: MRT4577_40775C.1.pep
MVHLPLLLPLLCSSVSSSQSIHRSVGEMASEKHFKYVILGGGVAAGYAAREFGKQGVQPGELAIISKESVAPYERPALSKGYLFPQNAARLPGFHTCVGSGGEKLLPEWYTEKGIELILSMEIVKADLASKTLTSADGATFTYETLLIATGSSTIKLTDFGVQGAESNNILYLREIDDADKLVAAMQAKKDGKAVVVGGGYIGLELSAALKINNFDVTMVYPEPWCMPRLFTAGIAHFYEGYYASKGINIVKGTVASGFDADANGEMXVVKLKDGRVLDADIVI

SEQ ID NO: 304502 - protein, 187 aa, Zea mays
  Clone ID: MRT4577_40776C.1.pep
HWDLEAAGSHLKSISAQLPLHMSGHRLILIPCSIRHDWASHPHPLPDRIRWSCSEHTPRPEDPGCQDHHQQQPPPHHEITSNQDDARLLRLLLMLGTSTATTTTTRTFSSSRRSTTTKRITMLMTLSDDVMPAVKVLHPPSRPHCTMSMVAWNWCCGVQKAGISVTSKDVPMIWSRSLRENCTATRM

SEQ ID NO: 304503 - protein, 56 aa, Zea mays
  Clone ID: MRT4577_40777C.1.pep
KRCFAQGTSRAGNYGRVFGSRDGSFFQEFLFFIFLNVPVLGLYKNISWLSNTLLHV

SEQ ID NO: 304504 - protein, 82 aa, Zea mays
  unsure (1)..(82): unsure at all Xaa locations
  Clone ID: MRT4577_40778C.1.pep
MSLTGPGLEAXLQAVGRALDAGEDHRVLYCKAGARPAALEEDRGLDLPLPDGEDPPSVPPGVQGEQRRTDRQRISPRHLRPS

SEQ ID NO: 304505 - protein, 77 aa, Zea mays
  unsure (1)..(77): unsure at all Xaa locations
  Clone ID: MRT4577_40779C.1.pep
PTRPAQATCNGHSTGTGAPVNGXTCANSNAQLXPXSPMTRCGIVPIFIDCTGCGTCYDVKCSEEANCSGKPLNVCIT

SEQ ID NO: 304506 - protein, 67 aa, Zea mays
  Clone ID: MRT4577_4077C.1.pep
VVHFLGTLGFQLYFSGLYFLWNFERIFIFHRKKVWWWFRQVLIDISIGKTGWPKGTGMKFLGKTTRP

SEQ ID NO: 304507 - protein, 57 aa, Zea mays
  Clone ID: MRT4577_40780C.1.pep
ENNQCDIGSHLQPSTNCCFAATKIHRAQHQSKQSLPNKYVHYVVHGNFLTSYLGLSH

SEQ ID NO: 304508 - protein, 48 aa, Zea mays
  Clone ID: MRT4577_40781C.1.pep
IVDRLYLTSLCKSVGHHSKACEACDMGKEVDEYTLEDPDIRDRDYKNP

SEQ ID NO: 304509 - protein, 269 aa, Zea mays
  Clone ID: MRT4577_40782C.1.pep
MESGTERRRRRHHFVLVHGTCHGAWCWYKVATLLSSAGHRVTALDMAACGASPGRAEEVPSFEEYSRPLLATVAGLAPEEKVVLVGHSFGGVSLALAMEQYPDRVAVAVFVATGMPSAGKPMAFVFEQFLQEEYPADRYMDCEFETSGDPQRPVETFRFGPQYLKQRLYQLSPPEDLTLAMAMVRPSQRFRDDATMKGGVLTAERYGGVRRVCVVAEDDASVPAGFQRRMASWNPGTEVRGLQGADHMSMLSKPGELSELLMEVANKYS

SEQ ID NO: 304510 - protein, 55 aa, Zea mays
  Clone ID: MRT4577_40783C.1.pep
LPKKLGWVFFPGERLNSPGEECNKVFFGINQGKFLAPMLECPKEWGGKPLPLNIK

SEQ ID NO: 304511 - protein, 124 aa, Zea mays
  Clone ID: MRT4577_40784C.1.pep
TAHRCQHAAAICCHRHRWYMLALRLLVRYELHHQLQILPGAVLCLHPALVLAALSPERLVHEASSTASRCSMPSPLRDCTPCPRVTVLPGTHGSPAHWSWSMAGGLVAVADILCASGRGRACAV

SEQ ID NO: 304512 - protein, 41 aa, Zea mays
  Clone ID: MRT4577_40785C.1.pep
PVPSYPFQTFLWSFSNIPLSYHQNSFLFRASSCFSSIFFLF

SEQ ID NO: 304513 - protein, 124 aa, Zea mays
  unsure (1)..(124): unsure at all Xaa locations
  Clone ID: MRT4577_40786C.1.pep
YCRAAKGPQRKPPRLLYVCRQPLPIGDPTDWSRRRRRLEPPPLICGRQLVCRHEVCGRVLLSLLSPSAVARFVAVICRLSCPSCFSKTQTPPVLLCSSQDAHGRAAVFFNFFVFVLGGENFXPG

SEQ ID NO: 304514 - protein, 102 aa, Zea mays
  unsure (1)..(102): unsure at all Xaa locations
  Clone ID: MRT4577_40787C.1.pep
RSPCGVRGCNHLPCLLHFLVTQLNCALQGSQTSPQKHLKKPLSDDHDRKDTLTIQSIVXLAWTNRQLSNITWNRKHTDPTAHASVPAMHRLAQSLRKLTSYT

SEQ ID NO: 304515 - protein, 93 aa, Zea mays
  Clone ID: MRT4577_40788C.1.pep
TFSIFSRRDRGLYIDVEEPHAAESDDLEEDEFLNAGEKVNCTNIAPEYGLPWQKHKQHSRRGSVNMIGDGKLLTKAHCVEHNTQVKVQRRGDD

SEQ ID NO: 304516 - protein, 45 aa, Zea mays
  Clone ID: MRT4577_40789C.1.pep
ITSRGGIGPRRLVLSFVLVGSFSYCFSSVIVDSGVLGGQTMLKCL

SEQ ID NO: 304517 - protein, 63 aa, Zea mays
  Clone ID: MRT4577_4078C.1.pep
NLEDIFSAAQGHKWKVHSVADFVGTHNETMTRYKLWPLPLTRLFPHKNIGNMAETKQRMFTPC

SEQ ID NO: 304518 - protein, 44 aa, Zea mays
  Clone ID: MRT4577_40790C.1.pep
TNLLRQTQQCSTNNPSLVVASFRLLMSHSSIVKFSWMMFAASQK

SEQ ID NO: 304519 - protein, 104 aa, Zea mays
  Clone ID: MRT4577_40791C.1.pep
VLHLQNWCYAHSFMLYPSDRQLLTGLVHLHQEQQSMALEEHVLQPQMHHEEDPMNDLAVCSVAAVHRQLVWSLLHCQQCMHPIMLPPWWSGSEPSQVRLLQQLL

SEQ ID NO: 304520 - protein, 68 aa, Zea mays
  Clone ID: MRT4577_40792C.1.pep
ERIESSLARNNVSKWNHLGYARSTSMDSTGPLLAGRRSSRHGSSEMGDCIFSSMRHFLQLANQLLGEF

SEQ ID NO: 304521 - protein, 94 aa, Zea mays
  Clone ID: MRT4577_40793C.1.pep
GPVRKAGSRASVRRGLPVLASAASLAYLLPEPALLRALLLAAPAASGQAFLRPALALARGAPAAPSMARDGTDRVPSSSLVLPWARRPASSLSL

SEQ ID NO: 304522 - protein, 107 aa, Zea mays
  unsure (1)..(107): unsure at all Xaa locations
  Clone ID: MRT4577_40794C.1.pep
MRECISIHIVQAGIQIGNARWELYCLEHRIQTDGQTNGDQTIGGGDDDINNFFSETGAEKYVPRADFADLEPTVTDEVRTSAXRQIFQLEEVMQRNEDAINNFARGH

SEQ ID NO: 304523 - protein, 148 aa, Zea mays
  unsure (1)..(148): unsure at all Xaa locations
  Clone ID: MRT4577_40795C.1.pep
PTKKVKWDGIPFAIDIYGFCYAXHSVFPNIYXSMCDRTKFNRALXMVCITXQFELHSGGSRSYCLVIXFSMLCLTVLFNFAICTAIYGAISIIGYLMFGDKMLSXITFNLLKDSFAAKVARWTTITIIVGFSDSIKWEPLVVIQLSEK
